United States Patent Application Publication US 2007/0054278 A1 - sequence listing, part 117

SEQ ID NO: 164723 - DNA, 201 bp, Homo sapiens
agctagtcctgtgtccttcagaaggcgagggtggggtttgataattttgaggtgagggacccctcttccccttccccatcccactgccatccccgccccaraggaagaccctggacctatctctacagccggcctcggcgcaggccagcgggaagaccttgccaatcccggtccagatcacactccgcttcaacctgccca

SEQ ID NO: 164724 - DNA, 201 bp, Homo sapiens
aggcgggaaacttgcctgactgagcagggaggcactcagacaccatcacacatctggcacacaggcttttcaacactgaggagcagccctgcctaagctgygggctggtggagtgggtcaggcccagccagggaagaacactcatcacctagcagcctggggcatagcacgaacagtgaagctcctggttgaccctgaacc

SEQ ID NO: 164725 - DNA, 201 bp, Homo sapiens
tgccatgatacgagtactggggcaaggaccagtggctaatgtccccagttgtcccctgagccttgcaggcaggtatccaaaatgctgtcagcagatagacrtaagcatgttgtccctcgctccttgtgtccagtgaggtcagtctcttaaagccagaagggactctgaacttcatcacacatgggctcttcagtgccctcc

SEQ ID NO: 164726 - DNA, 201 bp, Homo sapiens
tgggtcccgtcctggctctccagagagagaggtggtgagtaggtcccccacttcaccttttctctcctgcctcctatttctcttgtctgttggcattaggrgctcctggatgggcaggaggcggctccctctcaccctgacttcatcttgcaaaggatgggggccaaattgcacatgtagctcccagagtccagtagctag

SEQ ID NO: 164727 - DNA, 201 bp, Homo sapiens
ggaggggcgtctggaattatggggcgggcgaggcgcagatactttgatgaaggggcgtggctcttagctgctccgagaggtacagggcggggcctggaaakgggtggcacttgtgactgaaggaggcttaggagagacctaagtgctggagcttagggatccggcctgggggtggagttcaggtcgtggaagggtggagtc

SEQ ID NO: 164728 - DNA, 201 bp, Homo sapiens
aacccatctcctctgcccagggccagtacatcctcacactgtcagaggacatcgtggatggccatgagcgggccatgctcaagcggctcctgcggatcgamtccaagtgtctgcacttcactcccaaggactggagcaagagggggaagtggtgaccagacactgcccactgcagtgccaagacggcagcaggactggggc

SEQ ID NO: 164729 - DNA, 201 bp, Homo sapiens
attcacaggaggaagcactgtggacctggaaggtatggctttgatgactggatcagtgggtttggtttctgtctccaaatgcacaaatgcagacactccartaagagaagcaccattcatggaggacccgctaggtgccaggctctgtgttcaatgccttttctgctcttagaccctggcaagaggggcccctgctctggg

SEQ ID NO: 164730 - DNA, 201 bp, Homo sapiens
tcacagggccaaggcattctgactacccagaggggtgcttccacccccaccccaaccatgtgctggacacctgggatcccagaagctcctgaagggcccarccttgcttccaatacccgtcttcctaagggcagactgccactctgctgttcctgccacaggcccatgaggtggccagggctggctgttgccttggttgtg

SEQ ID NO: 164731 - DNA, 201 bp, Homo sapiens
actacaggcatatgccaccacaatgagctatgtttttttggggggtttttttgacacagagtttcgctcttgttgcccagactttagtgcagtggtacaawctcggctcgctgcaacctctgcctcctgggttcaagtgattctcctgcctcagcctcccgagtagctgggattacaggcgctcactatgacgcccagcta

SEQ ID NO: 164732 - DNA, 201 bp, Homo sapiens
ccacaggccttgcctcctgttcaggtcgttctcccactcagtgggacacttcctttacattctctgtgaggagggagtatcgttgtcttcattttaccaaygggatgctcagagagtgacctttttgcccaaggtcacacaccccttacattcagaggtaagatttaaatccaggccaatctgacctcaacgatgctcaac

SEQ ID NO: 164733 - DNA, 201 bp, Homo sapiens
aagttccgttcttgcactaagaatgaccaccaggccagacattatccccaattagggtgatgtggcccaggctctgggctttacttacagagacttacaamggcttctggctccagaactcactgacttcatgacttaattaatttaagtgaaaccaaattcaattcaattaaatgttgatggcttacattgactaaatgc

SEQ ID NO: 164734 - DNA, 201 bp, Homo sapiens
agagtttcgctcttgttgcccagactttagtgcagtggtacaatctcggctcgctgcaacctctgcctcctgggttcaagtgattctcctgcctcagcctyccgagtagctgggattacaggcgctcactatgacgcccagctaatgttttgtatttttagtagaggtgggatttcatcatgttggccaggctggtcttga

SEQ ID NO: 164735 - DNA, 201 bp, Homo sapiens
aggtactggtctctgtgtattcacaagcctttcctacagtgattgtgtctatatgcaaagctgaattctaaggttctgagacgttgattagaaaagaggargtcagaaggagtaagcctaggataaaataaatttgaagtaaggatgttcagctgggagagggagtggtacctaatgggctaaggttcaggtaagaggttg

SEQ ID NO: 164736 - DNA, 201 bp, Homo sapiens
ctacatccgatgggcttcatctcctctgtgtggatcttcatgcgctcctatttgcagagaatagtattctctcaaacaagtcatttatgtgtttttcctcrttggatgtacagataataaaatatgacattctcacaaagtcatccttaaaatggagagaggacgactgctggccagcggaacccctgtttgtgcccgcgc

SEQ ID NO: 164737 - DNA, 201 bp, Homo sapiens
ggctcactgcaatctcctcctcctaggttcaatcgattctcctgcctcagcctccccagtagctgggattacaggcacccaccaccacacccagctaattkttgtattttcagtagtgacggggtttcaccatattggccaggctagtctcaaacttctgacctcgagtgatccatccgccttggcctcccctagtgctag

SEQ ID NO: 164738 - DNA, 201 bp, Homo sapiens
cgaacccgggaggcggaggttgcagtgagctgagatcgtgccaccgtattccgcctggatgacagagtgagactcagtctcaaaaaaaaaaaaaaaaaaaagtaaaataaaataaaattaaatttaaatcgcaacatatggctagcgattgccgtttgggacagcctgttccacgccatcatgaagggctgcgtgtcaagg

SEQ ID NO: 164739 - DNA, 201 bp, Homo sapiens
tcttttaatgggtgcatattattccttcttgggggcatggtgtaatgtagactaccctactgttggacatttaggttatttccaatttttggctattatasataaggccctgataagtaacgtcctgcataaaattctagagttcatcccctaccctgtatttgggtggctgttactgttattatcttcagctagattccc

SEQ ID NO: 164740 - DNA, 201 bp, Homo sapiens
  misc_feature (1)...(201): n = A,T,C or G
cctgagcctagctcctggcggggctgggttttgttcagcccccagatgccacagtgccaggctgagagagggtgagctgagcccttgatatgtgtcctttntcagacttatatccacatcatcgaccaaaggaccaggcagcctgtgcagaccaagttttacacagacgccatggtggtcttccatcacgtcaacgcctac

SEQ ID NO: 164741 - DNA, 201 bp, Homo sapiens
taataaataaaattatatttaaaatgcgaattgtatcggccctgtgtactaaaggagcttgtcctagtgaaataaccaccttcttctcccagtaaaacccrtacaaggactgacattgattttaaagccctgtgaaggcgtcagcctgagattatgctggttcttctcttgcaggtgaagtctattacaggagcaaatacc

SEQ ID NO: 164742 - DNA, 201 bp, Homo sapiens
accgcactgagactctccttgacctagtcagaacaactggaagagaaaaaggcattgattttctcccctatgtgactcagggctattggatgaacagccaygtcccatgaaatcagcacatgagccctgggcgcctgcaccccttgctccagaagcaccgcagtgcagcccctcagactttctcctggttccaggaagtac

SEQ ID NO: 164743 - DNA, 201 bp, Homo sapiens
tgttctggaattaggtgatggttgcgcaacattgtgaatacactagaaccccctgaactgtacattttaaaatgatgagttttatctcaaatttttttaarttgcagaaaatatctggtcctgtccttccctattataaccatcaaaggtgccccattcttctgaggattagatcaggacccttagtgtgatcctgttgac

SEQ ID NO: 164744 - DNA, 201 bp, Homo sapiens
ggctggggtaaggggagaagggggagtgacagctaatgcataagggagatggctttttggagtgatgaaatgttctggaattaggtgatggttgcgcaacrttgtgaatacactagaaccccctgaactgtacattttaaaatgatgagttttatctcaaatttttttaagttgcagaaaatatctggtcctgtccttccc

SEQ ID NO: 164745 - DNA, 201 bp, Homo sapiens
ggcctctacccactggaagccaggaagacccccatcctgaattggagcagccaaatatgtctccagacattgccagcatctcatgggagcaccattgccaygatggagaacttctgccccagaatataagcccgtgaggcgagaattgtgttgctgtgctcacagcgtatcagcagcacatgacacaaaggctggcataga

SEQ ID NO: 164746 - DNA, 201 bp, Homo sapiens
ggagaagacttctacgcgacctcagagaccaattacatcaggaaaatcaacccacagactctggaaaccctggagaaggtatcaacacatatgtaaccagyatcacttcctgactcaagaaagggagagtcggcgacggccggggtgaggttgctcagcctgcaagcagcttaccaggggagcccctcctctaacaccgtt

SEQ ID NO: 164747 - DNA, 201 bp, Homo sapiens
cacacatatatacacatcagcacttttttgaaaaaaagctttaagaaattgcagtagcctctgattttaatcatgcaattctctttgatttctatgttggrtaattaaagatgtttatacacttaaaacctaggtctggagtaccttgctcctggactctctaatagagctggggtaattaaattaccagaggctccctcc

SEQ ID NO: 164748 - DNA, 201 bp, Homo sapiens
taccaattgcaaagtttgagggtccccaagatagccttcagcttcaataattcattaaatcaccaacctcactgcaagtgcttatgttcacagttctggtktgtggcaatgaaaagatacagactaaaattagcacagggaagagatgcacaagacagagcccagcagggaccaggcaggagcttccaggtgcctctccaa

SEQ ID NO: 164749 - DNA, 201 bp, Homo sapiens
cacgacctggaggtcctggaaccaagcctcctttttgttccagtgtttgccagtaggaggagcactccccaatacaccgatacaggatttgccaatttcaycacccataaacccctctggtttttctttcttcttgctttgagtataccttctgatcaaatgagctatgtgttcttaactcataattagtttgttttcctt

SEQ ID NO: 164750 - DNA, 201 bp, Homo sapiens
cctgcctgaattgtggtgtcttcatcatctagcatggggcctggcccagaggggcgcttggaaactgtatatggagctgagatggtacagtgaggcagtcrttgttttggtagacagaggcaatactttcccaatcaaactcttcaatatttactacaaagagggtttgctgggccctgccccaagtgtttcatgtccatc

SEQ ID NO: 164751 - DNA, 201 bp, Homo sapiens
atggggcctggcccagaggggcgcttggaaactgtatatggagctgagatggtacagtgaggcagtcgttgttttggtagacagaggcaatactttcccartcaaactcttcaatatttactacaaagagggtttgctgggccctgccccaagtgtttcatgtccatccacaactcagccctccccgtcactcctgaggag

SEQ ID NO: 164752 - DNA, 201 bp, Homo sapiens
gaggatagcctggggactaccacagttttagagataaggaatgaagtcccagagaggccaagtcacttacccagaagcacacagctaagagttggtaaagstcagacatagacgcaatactctctaacttcagaatcccaagtcctaaccattgtgcaattcagccctgtttccccttcccaccagctcctgcctccccat

SEQ ID NO: 164753 - DNA, 201 bp, Homo sapiens
gcatagaaaatgacacatgcaccaggtatttgtcatttatggctgcatcatttgttataacaagtagctgaaaacaacccaaatgttcattaaaagaggastggttaaatccgtaacagtaaaactgtacgagaaaatgccatgtagaagtaaaaaggaatgaggatgttctctttgcactctacagaagcttttccaaga

SEQ ID NO: 164754 - DNA, 201 bp, Homo sapiens
cttacagagacttacaaaggcttctggctccagaactcactgacttcatgacttaattaatttaagtgaaaccaaattcaattcaattaaatgttgatggyttacattgactaaatgcaagttatgtgccaggtactttgctaagcattttgtttttcttacctcacttaatgatcaaaacaacctgtgggaaacgtccct

SEQ ID NO: 164755 - DNA, 201 bp, Homo sapiens
gcctcattttacagatgaacaaactgaggctcagagaagttaagaaatgtgggcaaggtcacagcccagagtggcagagccaagactggaacctgccccartctgtctctaaacccccattttttttttctttttgtgggggatggagtcttgttgtgtcacccaggctggagtgcagtggtttaatctcggctcactgca

SEQ ID NO: 164756 - DNA, 201 bp, Homo sapiens
tctcgaactcctgacctcaggtgattcaccagcatgggcctcccaaagtgctgggattacaggcgtgagccaccgcgcccggccgagtcagttttattcayaatctggcactggctgggaaaataggaaacccaggaattacacccaatgatttgttttccctccatctttctcttagacctaggccagcgtctgagggtt

SEQ ID NO: 164757 - DNA, 201 bp, Homo sapiens; identical to SEQ ID NO: 30470

SEQ ID NO: 164758 - DNA, 201 bp, Homo sapiens
gctactaccacagctttggagtcaccgagaactatgtcatcttccttgagcagcctttcaggttggatattctcaagatggcaaccgcatacatccggagwatgagctgggcctcctgcctggctttccacagggaggagaaggtgaggtctggctggactctagcccagtgggtgctggctgaccatggagggaggctgg

SEQ ID NO: 164759 - DNA, 201 bp, Homo sapiens
atggggtgggtgctgagtggaaggtctcagcctggccccctgcagcagctgcagcaaccttgttgtctgtctacacgttgctgtttaatgtaaaggttttyttcagcaatcaagtcagtttgtaggtgatggtggtgtggtcttgggggggcagccagatcctgcacaattcctgaggcttgctttttgtcttgctagagg

SEQ ID NO: 164760 - DNA, 201 bp, Homo sapiens
ctgacctcaggtgattcaccagcatgggcctcccaaagtgctgggattacaggcgtgagccaccgcgcccggccgagtcagttttattcataatctggcaytggctgggaaaataggaaacccaggaattacacccaatgatttgttttccctccatctttctcttagacctaggccagcgtctgagggttcatgccccat

SEQ ID NO: 164761 - DNA, 201 bp, Homo sapiens
ggcttagagcttccacgggtcaattatgctcacaatggaaagcaataccgatatgtctttgctacaggagttcagtggagtccaatcccaaccaaggtacyggtctctgtgtattcacaagcctttcctacagtgattgtgtctatatgcaaagctgaattctaaggttctgagacgttgattagaaaagaggaggtcaga

SEQ ID NO: 164762 - DNA, 201 bp, Homo sapiens
tttgtcttgctagagggcaagaagcaggggaagagcccctggaagcacacagaggtgttctgctccatcccatcccgctccctgctctccccaagctactmccacagctttggagtcaccgagaactatgtcatcttccttgagcagcctttcaggttggatattctcaagatggcaaccgcatacatccggagtatgagc

SEQ ID NO: 164763 - DNA, 201 bp, Homo sapiens
attctcctgcttcagcctcctgagtagctgggactatgggtgcgtgccaccacgcccggctaattttttttttttttttttttttttttttgtatttttartagagacagggtttcaccatgttgaccaggctggtctcgaactcctgacctcagacgatccgcccatcttggcctcccaaagtgctgggattacaggcat

SEQ ID NO: 164764 - DNA, 201 bp, Homo sapiens
cttttgttcatactaagtctttgaaatctggtgtatatttcattcttatagcacatgtcatttcagaccaaccacatttcaagtgctgatagctaccataytggacagtacagctctagaatgttctttccttttgcctttgtgaggcgaatacctactctccctcaagacttagccaggttgcctcctctaggaagctga

SEQ ID NO: 164765 - DNA, 201 bp, Homo sapiens
atagacttctctggctgggtggacatagccactgactctgttgatttgcttttctccccagagctttctcctacttgtctcacaccatccccgatttcacmgacaactgcctgatcaacatcatgaagtgcggagaagacttctacgcgacctcagagaccaattacatcaggaaaatcaacccacagactctggaaaccc

SEQ ID NO: 164766 - DNA, 201 bp, Homo sapiens
agctaccatattggacagtacagctctagaatgttctttccttttgcctttgtgaggcgaatacctactctccctcaagacttagccaggttgcctcctcyaggaagctgaccacaccctcctgctctcagcccacccgagggctgttctgtttcacaaagaacctttttctacgtctgtagcgttgcccctatctttttt

SEQ ID NO: 164767 - DNA, 201 bp, Homo sapiens
ttccttttgcctttgtgaggcgaatacctactctccctcaagacttagccaggttgcctcctctaggaagctgaccacaccctcctgctctcagcccaccygagggctgttctgtttcacaaagaacctttttctacgtctgtagcgttgcccctatctttttttttttttttttttaattttttgagacaaggtcttgct

SEQ ID NO: 164768 - DNA, 201 bp, Homo sapiens
tctctacaaaaaataaaaaattagccaggcatggtagcacgcacctatagtcccagttacttgggaaactgaggtgggaggatcactcgagcctgggagaytgaggctgcagtgagctgtaattgcgccactgcccttagcctggtgacagcaagaccctgtctcacaaagaaaggagaaagaaatatctcagtgacactt

SEQ ID NO: 164769 - DNA, 201 bp, Homo sapiens
caccctcctgctctcagcccacccgagggctgttctgtttcacaaagaacctttttctacgtctgtagcgttgcccctatctttttttttttttttttttaattttttgagacaaggtcttgctctgttgcccaggctggagtggagtggtgtgatcactgcagcctggagctcccaggctcaagcgatcctcccacctca

SEQ ID NO: 164770 - DNA, 201 bp, Homo sapiens
gatcgcttgagtccaggagttcaagaccagcctaggcaatatagcaagatcccatctctacaaaaaataaaaaattagccaggcatggtagcacgcacctrtagtcccagttacttgggaaactgaggtgggaggatcactcgagcctgggagactgaggctgcagtgagctgtaattgcgccactgcccttagcctggtg

SEQ ID NO: 164771 - DNA, 201 bp, Homo sapiens
gcagtgacttgccaaggccaggcagcctgcagagaacaggcctcctgactctccgtccaggcctgggttgagcctaatcagttggtgacatccatgggcaracagctaactaaaaactgtgcctgggttgacacgtccatgcagggagcacatgcaaaggttttggctttgtaactggctgtgccgacacacgtgtgttct

SEQ ID NO: 164772 - DNA, 201 bp, Homo sapiens
tgccacccggattttcttggacaatgcagtttcaacagcctttgtttacgaagtgcatgctgggagtcaatgcgcaggaccccttacattaccacatctcrtttaaaactgcccacctcaccacttgaggtcaggagttcaagaccatcctggccaacatggtgaaaccccctctctagtaaaaatacaaatattagccag

SEQ ID NO: 164773 - DNA, 201 bp, Homo sapiens
tgacctcccagaagctgaggacaaaagccagccccctctttagacaagtttaagttttttaccgcacaaagtccatctcctttccactcagtgacattaaactctctcagaatgcagaatcttggttttaaaattgattgcagtggctggatcccaaacaaatgtttttaagaaatggagtcttgctctgttgcccaggct

SEQ ID NO: 164774 - DNA, 201 bp, Homo sapiens
ggccaggcagcctgcagagaacaggcctcctgactctccgtccaggcctgggttgagcctaatcagttggtgacatccatgggcaaacagctaactaaaarctgtgcctgggttgacacgtccatgcagggagcacatgcaaaggttttggctttgtaactggctgtgccgacacacgtgtgttctgagacctctttggca

SEQ ID NO: 164775 - DNA, 201 bp, Homo sapiens
atgagtccgcctgccacccggattttcttggacaatgcagtttcaacagcctttgtttacgaagtgcatgctgggagtcaatgcgcaggaccccttacatyaccacatctcatttaaaactgcccacctcaccacttgaggtcaggagttcaagaccatcctggccaacatggtgaaaccccctctctagtaaaaatacaa

SEQ ID NO: 164776 - DNA, 201 bp, Homo sapiens
gagcctaatcagttggtgacatccatgggcaaacagctaactaaaaactgtgcctgggttgacacgtccatgcagggagcacatgcaaaggttttggcttkgtaactggctgtgccgacacacgtgtgttctgagacctctttggcaacttaagcatttcctgcctcagtgttcttttctgtttgatgaatgtagcctggc

SEQ ID NO: 164777 - DNA, 201 bp, Homo sapiens
gtgacctcccagaagctgaggacaaaagccagccccctctttagacaagtttaagttttttaccgcacaaagtccatctcctttccactcagtgacattaaactctctcagaatgcagaatcttggttttaaaattgattgcagtggctggatcccaaacaaatgtttttaagaaatggagtcttgctctgttgcccaggc

SEQ ID NO: 164778 - DNA, 201 bp, Homo sapiens
ggtgacctcccagaagctgaggacaaaagccagccccctctttagacaagtttaagttttttaccgcacaaagtccatctcctttccactcagtgacattaaactctctcagaatgcagaatcttggttttaaaattgattgcagtggctggatcccaaacaaatgtttttaagaaatggagtcttgctctgttgcccagg

SEQ ID NO: 164779 - DNA, 201 bp, Homo sapiens
aggtgacctcccagaagctgaggacaaaagccagccccctctttagacaagtttaagttttttaccgcacaaagtccatctcctttccactcagtgacattaaactctctcagaatgcagaatcttggttttaaaattgattgcagtggctggatcccaaacaaatgtttttaagaaatggagtcttgctctgttgcccag

SEQ ID NO: 164780 - DNA, 201 bp, Homo sapiens
ggagggctccctcttggttcagtggttttcagattgtatatggggtgggtgctgagtggaaggtctcagcctggccccctgcagcagctgcagcaaccttkttgtctgtctacacgttgctgtttaatgtaaaggtttttttcagcaatcaagtcagtttgtaggtgatggtggtgtggtcttgggggggcagccagatcc

SEQ ID NO: 164781 - DNA, 201 bp, Homo sapiens
gaggtgacctcccagaagctgaggacaaaagccagccccctctttagacaagtttaagttttttaccgcacaaagtccatctcctttccactcagtgacattaaactctctcagaatgcagaatcttggttttaaaattgattgcagtggctggatcccaaacaaatgtttttaagaaatggagtcttgctctgttgccca

SEQ ID NO: 164782 - DNA, 201 bp, Homo sapiens
gagccaacacacaaccagcattgccttgaccacagtggatcttgggtgtctgtttattcatctgtctcttaatggtcagtaggcagtttgaggacagggasagtgtctccatcttggtatcctcagtgctagccaactgcccaacacattatacactttctggaaatgactgtagaataaacgaacagatgcaaggagtgg

SEQ ID NO: 164783 - DNA, 201 bp, Homo sapiens
ggactaccacagttttagagataaggaatgaagtcccagagaggccaagtcacttacccagaagcacacagctaagagttggtaaagctcagacatagacrcaatactctctaacttcagaatcccaagtcctaaccattgtgcaattcagccctgtttccccttcccaccagctcctgcctccccatctctccatcccaa

SEQ ID NO: 164784 - DNA, 201 bp, Homo sapiens
caccccattgtctaatggtgggaagatacaccagaaatgttcagttccactctagcgggttcagaagagaacacgtggggaagttggggtccctgataagctgaaaacaaagccaataactctcaaaaagtggtttgtgtgcctcctttctcaataaagcttttttttttttttttttttgagatggagtctcactgtgtt

SEQ ID NO: 164785 - DNA, 201 bp, Homo sapiens
tgggcctccacttgtactctcctcctggctcctgtgaattttaggggctgtgaagtgctttgctaatcttcatcacaatgttctaagttatttatgatccyccacgtctacagatgagaaagtaacttgcccaactttttagaatcatccccaggacttgagctggaactggaatgtacgcctgtctgcctgcacgatgtg

SEQ ID NO: 164786 - DNA, 201 bp, Homo sapiens
aacactaagccattcatgagggacccacccccatcacccagacacctcctcctaggcccacctgcaacatcacaggcttcaacatgagatttgcaaggaasaaaacattcaaaccgtaacacatacttatccagccatactgttgtgagtcaggagtgagaaaatgtgtgtctaaaattatattccaggccgggcatggtg

SEQ ID NO: 164787 - DNA, 201 bp, Homo sapiens
ttttctaggggaggaagcgcagacggttggtctgcggccactccatcattctgcagctgtggactgcagagtgagggtcattattcagctcgttgatcaarcttcactttgaccaaatgtttttgtaacctctccattcccagaataatcgtctaagagaggcctagagatttatgcttctgtgcaatgcaaaagggcaga

SEQ ID NO: 164788 - DNA, 201 bp, Homo sapiens
ttttagaggctgaggtgggaggatcccttgagcccaggagttcaagacaagcctgggtaacatagtgagacctggtacctaccagaaaatcaaaaagttakccaggcgtggtggtatgcacctatagtcccagcatcttaggagactgaggcaggaggatcacttgagccttggaggcagaggctgcagtgagccgagatc

SEQ ID NO: 164789 - DNA, 201 bp, Homo sapiens
cccccaggcctttgtacccccacggtgatgagttattggatgaggctgtccaggcaagggggtgccatcttgggcaaacatggaagccctggcagtccccrtatgcccagcagcaaaaggagtgagtcctcagtccttatggagagctgggctcctccccacctccgccctgttgacaagaccccttaaccatgtctgcta

SEQ ID NO: 164790 - DNA, 201 bp, Homo sapiens
ggaaagaacagctggagcctgtgagggccaaagtgacaggtgagcattctgataaacactgggctctttcttctatttattttattattttttttttttttgaggcggagtctcgctctgtcgcccgggctggagtccagtggcttgatctcggcccactgcaacctctgcctcctgggttcaaacgatcctcccaccaca

SEQ ID NO: 164791 - DNA, 201 bp, Homo sapiens
aggtacatgaaacattttatgtctccttcttccaaaaagaaaataatgaattaagtggctctttatgtatgattattagaggggagcatcggggcctttastaaaaacaaaacaaaatgtaaaacctttcccgtctctgctgaaggggttccctgctgtgcagcagacattcagtgatcacagagcttagctcaagtttct

SEQ ID NO: 164792 - DNA, 201 bp, Homo sapiens
tcatttggtaaaaaagttggaacctttaagcactgtttagatcttgctttattttgctattaattaacaaatgacattatgttatttttttttattttttwtttttttgagatggagtctcgctctgttgcccaggctggagtgcagtggcgtgatctcagctcactgcaacctctgcctcctgggttcgagcgattctcc

SEQ ID NO: 164793 - DNA, 201 bp, Homo sapiens
gccacagtgcccggccagtacttcatttctttttatggattaataggtacatactatcttacagactgcttttcttttctttcttttttttttttttttttgagaaggagtctcgctctgtggcccaggctggagtgcagtggcgcagtctcagctcactgcaagctccgcctcccaggttcaagccattctccttcctca

SEQ ID NO: 164794 - DNA, 201 bp, Homo sapiens
cctccctgaagcttctcctgacttattcccagctgggaaggacctcctctcacccctgccccaggaggaatccatggatgtgggttttttgttgttgttgygtttttttgtttatttgttttttgagacggggtctcgctctgtcgtccaggctatagggcagtggcgcgatctcggctcactgcagcctctgcctcttgg

SEQ ID NO: 164795 - DNA, 201 bp, Homo sapiens
ggttcaagcaattctcctgcttcagcctcctgagtagctgggactatgggtgcgtgccaccacgcccggctaattttttttttttttttttttttttttttgtatttttaatagagacagggtttcaccatgttgaccaggctggtctcgaactcctgacctcagacgatccgcccatcttggcctcccaaagtgctggga

SEQ ID NO: 164796 - DNA, 201 bp, Homo sapiens
ccagcattttcccacccatggccatttgtgtatctctgccatggtttttgtcatattttatatcacctctacttaacatttaaaaatccttttttttttttcatttcaatcaattcactctctacttagctcatttgaaaggaaacacatcactacccagtagaaagctggcaatgcttgctgcacagagaagacaagcat

SEQ ID NO: 164797 - DNA, 201 bp, Homo sapiens
ctcaccctctccagcagagagggtgtagctgaaacttagaggatttattttgcttctttttttgttttgttttgttttttcctttttatttaaaaaaaaaatacagaaagagacagagtctcattgtgttgtccatgcctgtcttgaattcctaggttcaggggatcctcctgcctcagccaccaaaagtgctggattaca

SEQ ID NO: 164798 - DNA, 201 bp, Homo sapiens
gggttcaagcaattctcctgcttcagcctcctgagtagctgggactatgggtgcgtgccaccacgcccggctaattttttttttttttttttttttttttttgtatttttaatagagacagggtttcaccatgttgaccaggctggtctcgaactcctgacctcagacgatccgcccatcttggcctcccaaagtgctggg

SEQ ID NO: 164799 - DNA, 201 bp, Homo sapiens
acctaaggaactcaccctctccagcagagagggtgtagctgaaacttagaggatttattttgcttctttttttgttttgttttgttttttcctttttattwaaaaaaaaaatacagaaagagacagagtctcattgtgttgtccatgcctgtcttgaattcctaggttcaggggatcctcctgcctcagccaccaaaagtg

SEQ ID NO: 164800 - DNA, 201 bp, Homo sapiens
gtaggacccctcaacccatttcccaatttcatttcactcctgtcctccaaatccctctctaatgttccagcccagccgaactcaacgcctgcaagaagggwtctgcattttcccaactccaggcctttgcttacagacctcttagcgggtgaacaggacagctctgccctctctccccagcatattgcagtcaaattctac

SEQ ID NO: 164801 - DNA, 201 bp, Homo sapiens
ggtcagaaggagtaagcctaggataaaataaatttgaagtaaggatgttcagctgggagagggagtggtacctaatgggctaaggttcaggtaagaggttrtggctggagtttattcactgatttctttattcaatacatatttaatgagcaccaattatgggctacaatgtggtaggcactgagggtaaggaagtcagca

SEQ ID NO: 164802 - DNA, 201 bp, Homo sapiens
aaaaagttatcaggcctgcaaacctagtaggacccctcaacccatttcccaatttcatttcactcctgtcctccaaatccctctctaatgttccagcccarccgaactcaacgcctgcaagaagggttctgcattttcccaactccaggcctttgcttacagacctcttagcgggtgaacaggacagctctgccctctctc

SEQ ID NO: 164803 - DNA, 201 bp, Homo sapiens
acataggccgggtcccttctggcgagttctcagactctctcatttcatcccggcagtgtcattcttttattgttgacattagatttgttcacgtacatcargggcttagtgtggggtctggcctatagggagagtccagccattggcagcaatattagaacagtcctaagaagcaggctcagacaatctcaaaacttgcca

SEQ ID NO: 164804 - DNA, 201 bp, Homo sapiens
acatgccaccacatctggctagtttttttttctttttttgagacagagtctggctctgtcacccaggctggagtgcagtggcacgatctcggctcattgcraactccacctcccgggttcacgccattctcctgtgtcagcctcccgagtagctgggactacaggctcccaccaccacgcctggctaattttttgtatttt

SEQ ID NO: 164805 - DNA, 201 bp, Homo sapiens
ctgagaagaccacgcttgtttattgttgcaatattgtccacactaaaaagtgtaacaataaagaaaccacccgtaatccctgcccccgtgacagcgctttrggctacccatccaatcctcccatcatgcatggattgtgtgacataggccgggtcccttctggcgagttctcagactctctcatttcatcccggcagtgtc

SEQ ID NO: 164806 - DNA, 201 bp, Homo sapiens
ctgtggtgagttgagatcatgccactgcactccagcctgggtgacacagtgagactccgtctcaagaaaaaaagcaccagtggttttccttccatgaggcmttgcttccccaggctgccagctcctccatggtctctttctttcttttttttttttttttgagatggagtctcactccgttacccaggttggagtgtggtg

SEQ ID NO: 164807 - DNA, 201 bp, Homo sapiens
gtggtggcgcatgcctgtggtcccagctactcaggaggctgaggcatgagaatcacttgagcccaggaggtggagattgcagtgagttgagattgtgctaytgtactccagcctgggcaacagagcaagacactgtctcacaaaaataaaaataaaaataggaaggcagtgggtggttgttgggccagatgacttctgcaa

SEQ ID NO: 164808 - DNA, 201 bp, Homo sapiens
acacgtttttattttactttttgaaaactgaattttttcagaatgcagaagtgggcacaaatttaatcaaagtggcatctacaacagccacggccctgaargaagaagatggccaagtctactgccagccggaatttctttatgaaggtaaaatgcatcctcttgtcctgagtttaggaaaggggcagattttcacaggga

SEQ ID NO: 164809 - DNA, 201 bp, Homo sapiens
ggctgcagtgagctgagatcccaccactgcactccagcctgatcccgccactgcactccagcatgggcaacagagtgagactccatctcaaaaaaaaaaaraaagaaagctgtcatatgaaccatctgctgctttgaaactagcaaaggaaagcaagccctgggatgggtagctccagccacgctttttaattgctactta

SEQ ID NO: 164810 - DNA, 201 bp, Homo sapiens
aaagtccccccaatcccatcatctgttgtatttttaatatttagtatatttctggctgggcgtggtggctcacgcccgtaatcccagcactttgggaggcygaggcgggtggatcacttgaggtcaggagttcaagaccaccctggccaacatgatgaaaccccatctccactaaaaatataaaaattagccaggcatggt

SEQ ID NO: 164811 - DNA, 201 bp, Homo sapiens
aaagaaagctgtcatatgaaccatctgctgctttgaaactagcaaaggaaagcaagccctgggatgggtagctccagccacgctttttaattgctacttaytgtcccttaaatatgtcttcttactgcactttcaatggctccgcctgcatagtgaaatcagaaagtcaggcaggtggacagagccttacatgccctgatc

SEQ ID NO: 164812 - DNA, 201 bp, Homo sapiens
agatcctgcacaattcctgaggcttgctttttgtcttgctagagggcaagaagcaggggaagagcccctggaagcacacagaggtgttctgctccatcccrtcccgctccctgctctccccaagctactaccacagctttggagtcaccgagaactatgtcatcttccttgagcagcctttcaggttggatattctcaaga

SEQ ID NO: 164813 - DNA, 201 bp, Homo sapiens
agagaggcatacaaaaaagaaattaaagtccccccaatcccatcatctgttgtatttttaatatttagtatatttctggctgggcgtggtggctcacgccygtaatcccagcactttgggaggccgaggcgggtggatcacttgaggtcaggagttcaagaccaccctggccaacatgatgaaaccccatctccactaaaa

SEQ ID NO: 164814 - DNA, 201 bp, Homo sapiens
cttcaggaagatgctgcccttactcagatgccctctgggcctgaggcctttgcaggacattgctttcccctctgtctgaaaccctgtcctcctgggctgayactcctgctccccctggctggctgcacattgggatcccctggagagccctgagacccccatgtccgggccttggcttccgcccagaccggggaagcccag

SEQ ID NO: 164815 - DNA, 201 bp, Homo sapiens
tgaacacaggtctgaccctctattgctatgcaggattgggcatcaggtcacctcctggttgtgttcaatatcaaacgttactccagggagactgaagtgaycaactgggcttctggaggcagcgctcccaggactgaacggggccctggggaaaaccaccccacatatgcagccttctagattagtcctccagctctgctc

SEQ ID NO: 164816 - DNA, 201 bp, Homo sapiens
tcttccagcattttggtttgcaggtggaaacgggaaactaaacattctctcttttctcaggcaagattccagcatggctgcagggaaccctgctccgcaaygggcctgggatgcacacagttggggagtccagatacaaccattggttcgacggccttgccctgctccacagcttcaccatcagagacggtgagaacaccc

SEQ ID NO: 164817 - DNA, 201 bp, Homo sapiens
cccgggtgtggtctcagaaacccccagtgattctgcagtgcagccgtggcagagaacctccaaggtcagggatcagcagcatgaccccgcagctgagtccrtatcctctaatggcgccttgtaactctttgtcaacatttatctctagtgtaagtaacttgttcatttccctcttcctgttcaagcctaagttctgggagg

SEQ ID NO: 164818 - DNA, 201 bp, Homo sapiens
gtggcagagaacctccaaggtcagggatcagcagcatgaccccgcagctgagtccgtatcctctaatggcgccttgtaactctttgtcaacatttatctcwagtgtaagtaacttgttcatttccctcttcctgttcaagcctaagttctgggaggacagggactctgtctcatcagcagttcatctgctgcactcagagg

SEQ ID NO: 164819 - DNA, 201 bp, Homo sapiens
tttttttctcaatttgactgttcatctgtacatattttattttttaaaaagacaccccacggccaggtgcggtggctcacgcctgtggtcccagcactttsggaggccaaagagggtggatcacttgaagccaggagtttgagaccagcctggctaacatggcgaaatccctctctactaaaaatacacaaattagccagg

SEQ ID NO: 164820 - DNA, 201 bp, Homo sapiens
atatgccaccacaatgagctatgtttttttggggggtttttttgacacagagtttcgctcttgttgcccagactttagtgcagtggtacaatctcggctcrctgcaacctctgcctcctgggttcaagtgattctcctgcctcagcctcccgagtagctgggattacaggcgctcactatgacgcccagctaatgttttgt

SEQ ID NO: 164821 - DNA, 201 bp, Homo sapiens
ctaaagcaaatgtttgctctggattacacgtttttattttactttttgaaaactgaattttttcagaatgcagaagtgggcacaaatttaatcaaagtggyatctacaacagccacggccctgaaggaagaagatggccaagtctactgccagccggaatttctttatgaaggtaaaatgcatcctcttgtcctgagttta

SEQ ID NO: 164822 - DNA, 201 bp, Homo sapiens
tacagaatgggtggttccatattttgctgacagcactaaatcttaatgattcctttcttttctaaacagaagtccccaatgattcttggaaataaatattkttctggatgaggaacatagaaggtaaatgcaccagtggtggccgggcgcggtggctcacgcctgtaatcccagcactttggggggccgaggtgggcagat

SEQ ID NO: 164823 - DNA, 201 bp, Homo sapiens
gagggtccccaagatagccttcagcttcaataattcattaaatcaccaacctcactgcaagtgcttatgttcacagttctggtttgtggcaatgaaaagawacagactaaaattagcacagggaagagatgcacaagacagagcccagcagggaccaggcaggagcttccaggtgcctctccaagtagagtcacagatagc

SEQ ID NO: 164824 - DNA, 201 bp, Homo sapiens
gctacagaatgggtggttccatattttgctgacagcactaaatcttaatgattcctttcttttctaaacagaagtccccaatgattcttggaaataaatayttttctggatgaggaacatagaaggtaaatgcaccagtggtggccgggcgcggtggctcacgcctgtaatcccagcactttggggggccgaggtgggcag

SEQ ID NO: 164825 - DNA, 201 bp, Homo sapiens
accttgcagattttactgtgactcagctacagaatgggtggttccatattttgctgacagcactaaatcttaatgattcctttcttttctaaacagaagtycccaatgattcttggaaataaatatttttctggatgaggaacatagaaggtaaatgcaccagtggtggccgggcgcggtggctcacgcctgtaatcccag

SEQ ID NO: 164826 - DNA, 201 bp, Homo sapiens
ccacggggtcagacacttggggggtggagctcagcaagctgtgtgttcacaagccctcaggcgattccaaaggtaagaaccattcctctacatcaagcctmcctattgacagatgggaaactgaggcagaggggcagtgacttgccaaggccaggcagcctgcagagaacaggcctcctgactctccgtccaggcctgggt

SEQ ID NO: 164827 - DNA, 201 bp, Homo sapiens; identical to SEQ ID NO: 30463

SEQ ID NO: 164828 - DNA, 201 bp, Homo sapiens
agtgccttgctctaacatttacacatgaatagagacacgatgggtgaaaagcgcgagctctgagtctgcaataccttgcagattttactgtgactcagctmcagaatgggtggttccatattttgctgacagcactaaatcttaatgattcctttcttttctaaacagaagtccccaatgattcttggaaataaatatttt

SEQ ID NO: 164829 - DNA, 201 bp, Homo sapiens
acttggggggtggagctcagcaagctgtgtgttcacaagccctcaggcgattccaaaggtaagaaccattcctctacatcaagcctccctattgacagatsggaaactgaggcagaggggcagtgacttgccaaggccaggcagcctgcagagaacaggcctcctgactctccgtccaggcctgggttgagcctaatcagt

SEQ ID NO: 164830 - DNA, 201 bp, Homo sapiens
tggctcacacctgtaatcccagcattctgggaggctgaggtgggcggatcacctgaggtcaggagttcaagaccaacctggctatggtgaaaccccgtctstactaaaaatacaaaaaatcagccaggtgtggtggcacacgcctgtaattccagctactcaggaggctgaggcaggagaatcacttgaacccgggaggcc

SEQ ID NO: 164831 - DNA, 201 bp, Homo sapiens
tagaggtgacctcccagaagctgaggacaaaagccagccccctctttagacaagtttaagttttttaccgcacaaagtccatctcctttccactcagtgayattaaactctctcagaatgcagaatcttggttttaaaattgattgcagtggctggatcccaaacaaatgtttttaagaaatggagtcttgctctgttgcc

SEQ ID NO: 164832 - DNA, 201 bp, Homo sapiens
ctgcagtgataacttttcctagaagaaaatactgaaaatacagagaggcatacaaaaaagaaattaaagtccccccaatcccatcatctgttgtatttttwatatttagtatatttctggctgggcgtggtggctcacgcccgtaatcccagcactttgggaggccgaggcgggtggatcacttgaggtcaggagttcaag

SEQ ID NO: 164833 - DNA, 201 bp, Homo sapiens
tcctcattttttaaactgagactaaggataacaacaggaaacgagctgcttcctatgattaatgtgaggctaagccaagatgacatgtattcaagcatttyaaaaaatatatacactaaagcaaatgtttgctctggattacacgtttttattttactttttgaaaactgaattttttcagaatgcagaagtgggcacaaa

SEQ ID NO: 164834 - DNA, 201 bp, Homo sapiens
agaaaatgtagaaagtagagaaaagtttaaatgagaagtcagccataacaataatgttccatcctcttgttcctcaatatcttccagagcctaacccgtastcacctccagtagtggtggcagcaatataataataataagtgatagtagtagtagtatggtaataatagtaataataatataacaacgtcatcaatagaa

SEQ ID NO: 164835 - DNA, 201 bp, Homo sapiens
agagcaagaccctgtcccaaaataaaatagaagctatcttagaaaatgtagaaagtagagaaaagtttaaatgagaagtcagccataacaataatgttccrtcctcttgttcctcaatatcttccagagcctaacccgtagtcacctccagtagtggtggcagcaatataataataataagtgatagtagtagtagtatgg

SEQ ID NO: 164836 - DNA, 201 bp, Homo sapiens
gtcacccaggctggagcgcagtggtgcgatatcagttcactgtaacctccgcctacgtatcaagctattctcctctctcagcctcctgagtagttgggatyataggcacacgccacaatgcctagtgaatttatttatttatttattttttgagatggagttccatgcttgtcgcctaggctggaatgcaatggcacattc

SEQ ID NO: 164837 - DNA, 201 bp, Homo sapiens
aggcatatgccaccacaatgagctatgtttttttggggggtttttttgacacagagtttcgctcttgttgcccagactttagtgcagtggtacaatctcgrctcgctgcaacctctgcctcctgggttcaagtgattctcctgcctcagcctcccgagtagctgggattacaggcgctcactatgacgcccagctaatgtt

SEQ ID NO: 164838 - DNA, 201 bp, Homo sapiens
atgaagtgcggagaagacttctacgcgacctcagagaccaattacatcaggaaaatcaacccacagactctggaaaccctggagaaggtatcaacacataygtaaccagcatcacttcctgactcaagaaagggagagtcggcgacggccggggtgaggttgctcagcctgcaagcagcttaccaggggagcccctcctct

SEQ ID NO: 164839 - DNA, 201 bp, Homo sapiens
gacactgtgttactccaccatctctgccttcacgtgcacttttagtttttcttttttttttttttcagatagagtctcactctgtcacccaggctggagcrcagtggtgcgatatcagttcactgtaacctccgcctacgtatcaagctattctcctctctcagcctcctgagtagttgggattataggcacacgccacaa

SEQ ID NO: 164840 - DNA, 201 bp, Homo sapiens
agcagcatgaccccgcagctgagtccgtatcctctaatggcgccttgtaactctttgtcaacatttatctctagtgtaagtaacttgttcatttccctctkcctgttcaagcctaagttctgggaggacagggactctgtctcatcagcagttcatctgctgcactcagagggtgctcttaaatatttgaaatgaatgaat

SEQ ID NO: 164841 - DNA, 201 bp, Homo sapiens
cagctgcagcaaccttgttgtctgtctacacgttgctgtttaatgtaaaggtttttttcagcaatcaagtcagtttgtaggtgatggtggtgtggtcttgsgggggcagccagatcctgcacaattcctgaggcttgctttttgtcttgctagagggcaagaagcaggggaagagcccctggaagcacacagaggtgttct

SEQ ID NO: 164842 - DNA, 201 bp, Homo sapiens
gccctgccctggtgctgcagggcgctgtgtgaggcccgaggttcgtgtgcacccacgcctaaggggcattcacaggaggaagcactgtggacctggaaggkatggctttgatgactggatcagtgggtttggtttctgtctccaaatgcacaaatgcagacactccaataagagaagcaccattcatggaggacccgctag

SEQ ID NO: 164843 - DNA, 201 bp, Homo sapiens
ccagaatgagtgtgttttctagctgtcactgcctgatgtttactgctcaaagcttaggacttggattagagcccaggacttggcagccaagataaaccagstgcaattacgctgaacatctcagcccagctcctgtccatccctgaacaggacacttagggtagaggatgttctcagcagtgccatttgcatcccccttca

SEQ ID NO: 164844 - DNA, 201 bp, Homo sapiens
ctaaagtcagttacataaccaagcccagcttcagaagggaaattgtatgccttacaaggaggtgagaggatggaaaatgaatatttgctgaacagactttytgtccagtttgttgtatttggtggtggtgcagggcaaatatatgtttaaaaccttgttcagatttttagctttcttcagaacagagcttttaaaactgag

SEQ ID NO: 164845 - DNA, 201 bp, Homo sapiens
cgatgagattggaggcacctgggtgtcagcctcttgggctggctcattacaggccactctgtctgaggaacactcaggtttgcaaaccgtttcttaaaatwacaggatacctagggacctgttggggtgggagggaagaaccctatgggcagaaatgtgactttctgtagcaaagatgtactgtttcccactgagaagaat

SEQ ID NO: 164846 - DNA, 201 bp, Homo sapiens
aaactggctgactgagttaaatgaatgccaaagtcacagagctgctgagtggcagagttgtaattcccatgcagaactgtgtggcatcaaagccatttttwaactcattgcaatgcacagtgggttaaaatgagatgattgaaaatgagatgtggctgggcatggtggctcacacctctaattccagcactttgagaggat

SEQ ID NO: 164847 - DNA, 201 bp, Homo sapiens
tacaggattttacatggcttagagaaatactgtggtggtgaaaatatgcataaaaaagcgagagattttacttttgaaatgctgccaaagtgaaatctctyttggataggcagatgacagtttagtacttgcaggtctttcgattctgacaactgtcagaagtgaatttaagtgctggtgactaggctgccagagaaacac

SEQ ID NO: 164848 - DNA, 201 bp, Homo sapiens
cttatttgtcttttggcttgtatcccacctgttcactttttaccatagctaacctttctaagtggtcaggtgggactcatggagattttccgttctttggmgactagcagcgactgcagattactcatcagctgtctccttgagtccacaatgccgggcggtggacgggcttcctgcctcctggcccagggcccctttgcc

SEQ ID NO: 164849 - DNA, 201 bp, Homo sapiens
gttacatcaaggctgggaggaggtctttccactggttttccgggctgtttgtgtactacacagcctgtgtacctggcaaggcacgctctgctctgccctgmcttctgatgagctgactaacaccttatagatgaggttcccttagaaccaaagatgccccatgaaactccctaggatgaatgttggaagtccttccaactg

SEQ ID NO: 164850 - DNA, 201 bp, Homo sapiens
tcttgctctgttgcccaggctggagtgcagtggcatgatggcatgatcatagttcactataatctcgaactcctggtttcaagtagtcttcctgccttggsctcccaaaatgctaggaatacaggcaggagccactgttactggtctgttttttttccttaaatacataggcaacttcctcgattgtctctcctttattgg

SEQ ID NO: 164851 - DNA, 201 bp, Homo sapiens
ttaaacagagacagatcttgctctgttgcccaggctggagtgcagtggcatgatggcatgatcatagttcactataatctcgaactcctggtttcaagtartcttcctgccttggcctcccaaaatgctaggaatacaggcaggagccactgttactggtctgttttttttccttaaatacataggcaacttcctcgattg

SEQ ID NO: 164852 - DNA, 201 bp, Homo sapiens
cttattacctggtgacacgtgtttctagttattgacctatgtttttaattataactttgggtggtggtctgaaatgaaatgttaagtttgacgcaaaaatmggactagtttgtgtaactgatttgttcagaataacagcttacatttctcagagctttttgtatgccaagtgctatgcgaaaccctggatgtacaatattc

SEQ ID NO: 164853 - DNA, 201 bp, Homo sapiens
ttctcctgcctcagcttcccgagtagctgggattacaggcatgtgccaccacgccaggctaattttgtatttttagtagagacagggtttctccatgttgktcaggctggtcgcgaactcctgacctcaggtaatccgcctgccttgccctcctgaagtactgggattacagacatgagccaccgcgcccggccacagagc

SEQ ID NO: 164854 - DNA, 201 bp, Homo sapiens
ccctcaacctgttagaaacaagaaatgggactctggagtagatgttagcaacatcatgagctcaaacccctccagcttacagcggagacagtgaggtcctstaggatgaggttggagagcaggaacttgcccgaggtcatgtgcagagttcgaggcagggcctggatgggaagcccagcatggagaccccaggccgtctct

SEQ ID NO: 164855 - DNA, 201 bp, Homo sapiens
ttcagggataccaacttgggtgctgaaaagcagcgatggcaggactatttacaccacggaaacaggcaaaaactactgatcaagccttcactgttttgttwatattgtcttgacttagaaagtgattgcaatgttaataatgcagattaaattgaagcgtacagtgcctataaaccattacattatgaatagtataaaaaa

SEQ ID NO: 164856 - DNA, 201 bp, Homo sapiens
acttccctactaggtagagcaatgattccagaagtttataataattggaaagtgtattagtcgattctcacactgctataaagacattcctgagactgggmaatttataaagaaggaaggtttagttggctcgtggttctgcagactgtataggcttctgcctctcgggaggcctcaggaaacttacagttatggcagaag

SEQ ID NO: 164857 - DNA, 201 bp, Homo sapiens
gccaagagcatagaggtggaattgttgtgtgagcctgtagagtccgtgttcttacccactgcatgatgtctgatcatcgtcaattttctttccatttggayagatgaatggtaacacttccctactaggtagagcaatgattccagaagtttataataattggaaagtgtattagtcgattctcacactgctataaagaca

SEQ ID NO: 164858 - DNA, 201 bp, Homo sapiens
gtataatccacagcactccttctgaatacgttacgtaaatggaaccctcgcaacagtcttatccccattgtagagatgagaaaactgaggcatacagaagrgatggaactaggccaagagcatagaggtggaattgttgtgtgagcctgtagagtccgtgttcttacccactgcatgatgtctgatcatcgtcaattttct

SEQ ID NO: 164859 - DNA, 201 bp, Homo sapiens
tgtatctagtaattgctatgcacttatatgtatagaagcgtataatccacagcactccttctgaatacgttacgtaaatggaaccctcgcaacagtcttayccccattgtagagatgagaaaactgaggcatacagaagggatggaactaggccaagagcatagaggtggaattgttgtgtgagcctgtagagtccgtgtt

SEQ ID NO: 164860 - DNA, 201 bp, Homo sapiens
ccttgtttgcccttccccgtgcctcttatgaagctcaggccttttggcagtcagaggcctcaatggtgcctgtgtccacagggctggctgtcctcaccgtsaagtctagatctccctgctaacttacactgtgctcaaaacacacacacacacacacacacacacacacacacacacacacactggctgtcctcactgtca

SEQ ID NO: 164861 - DNA, 201 bp, Homo sapiens
ctctatttctttgtgacctgatagtcttgctctccagggtaaaagaagaggatggaaatggctgtggggcgcctgaggtgggccctggcatgatggcaagwtgccgttctgggttcactgggatggctcaaggggagtttggaaaccctcctaacatgtcatctgaaatctgggaccacagttccggctggaacacttgtc

SEQ ID NO: 164862 - DNA, 201 bp, Homo sapiens
ggatcacctgaggtcaggagttcaaaaccagcctggccaacatggtgaaacccccgtctctactaaaaatacaaaaattagccgggtgtggcggtgcatgmctgtaatcccagctacttgggaggctgaggcaggagaatcccttgaacctgggaggtggaggttgcagtgagctgagatcacgccattatactccagtct

SEQ ID NO: 164863 - DNA, 201 bp, Homo sapiens
cagcaaggtatgtacggtttaaagtgtaatcaattttgaggttgtatacaaggatatacatgataaatacaagtagtagcatttttagtaaaggctgttayaaaatactgtatttatggcctattccattctttttatagctcattaatgtagaaaacaaacacagtgtatccatcttctcagacggtttaaaattccctt

SEQ ID NO: 164864 - DNA, 201 bp, Homo sapiens
cgtgtgaatgtattgcagaaatggacaggacaattctcagcccattcatcttacagacctcaagtgaacaggcacaaaacaacaggctccaccctccttcycccctctatctcatactttacctcaatttatgacttggcttacaatccgttgcagaaagcctagctccccagcttctcctgaatctacgtttttctattt

SEQ ID NO: 164865 - DNA, 201 bp, Homo sapiens
cagcccaggaaggagctttaatttgagtaattgttttcactaattcatcttcacagaaagaaataatatgatcaccttcggttagtaaacaaaacaaatasgcaaacaggtttacaggctgaggtgggctggatcacttgaggccgggagtttgaaaccagcctagctaacacggtgaaacccttctctactaaaaataca

SEQ ID NO: 164866 - DNA, 201 bp, Homo sapiens
tgggtaccttgcatcctcctttgttcccatactaacccctacaaccatggtcattttgtggttatctgtttaattctctgctggctattccaggctgtcasctccctgactacaaggactttgttgctcacaatcatatccacggcatccacacaagatctggccgctacgtggaaggacacatagttccgtctggcttgg

SEQ ID NO: 164867 - DNA, 201 bp, Homo sapiens
agactcactagaagtttcagaaagatgcagactgctttaaaaaaaaaaaaaaagggcaaggggaggtgtgagaagaaagtataattctttttcttctaackggagatataaaaatcatataagcatgatttatgatttgattggaacattgtattttatggttgcagagcacacgtatcatcctatctgcttctgacaccc

SEQ ID NO: 164868 - DNA, 201 bp, Homo sapiens
gtgtttcaccaggttggccaggctgctctcgaactcctgacctcaggtgatctgcccaccttggcctcccaaagtgcagagcaggaatttcattggatttstacactgctgctttttcagagcctggaacagtgccaagcacatagtcggccctcagtgagcatttgttgactaacttaggtcacagatgtggggctgtga

SEQ ID NO: 164869 - DNA, 201 bp, Homo sapiens
tttgagacaggagtctcactctgttgtccaagctggagtgcagtggcgcgatgtcagctcactgcaacctccgcctcctgggttcaaacaattctcctacstcagcctcctgagtagctgggattatagtcacctaccaccatacccagctaatttttgtattttttagtagaaacagtgtttcaccaggttggccaggct

SEQ ID NO: 164870 - DNA, 201 bp, Homo sapiens
tgattgtgagaagtccacattgctccatttggacttcctttttgtagtgggctattagattttgcctctgcttgtttctgaatacccaagcttgctaacamagggaaagaccaattatcatgattattattatttaccttaagacctgattctacctatctatgatcacatagacatttggaagcaaagagaaatgctttt

SEQ ID NO: 164871 - DNA, 201 bp, Homo sapiens
cagcctcccaaagtgcagggattaaggcgtgagccaccgagcccagccggcaaacttactttaaaacacattgcaataaaataaaaagaaaagggattgtsctaagtgagaagcagagatgaaaatgtggaaggatgattgtgagaagtccacattgctccatttggacttcctttttgtagtgggctattagattttgcc

SEQ ID NO: 164872 - DNA, 201 bp, Homo sapiens
aggctggtcttgaactcttgacctcaggtgattcacccacctcagcctcccaaagtgcagggattaaggcgtgagccaccgagcccagccggcaaacttaytttaaaacacattgcaataaaataaaaagaaaagggattgtcctaagtgagaagcagagatgaaaatgtggaaggatgattgtgagaagtccacattgct

SEQ ID NO: 164873 - DNA, 201 bp, Homo sapiens
acattgtattttatggttgcagagcacacgtatcatcctatctgcttctgacacccagtaagcagctctggcttttataattttgatgaaagaagtttccyaacagtatttcggtgtgcatgctcacacaccagccctggtcgtcagtgaacagattcttccaggtcttcattgtggcggaagaaagtgagatcagagatc

SEQ ID NO: 164874 - DNA, 201 bp, Homo sapiens
ggaggcctcaggaaacttacagttatggcagaaggtgaaggggaagcaggtaatgtcttcacatggctggcactggaggaagagagaaagtagggaggtgstagatgcttttaaacaaacagatctcaggagaactctttcacaagacagcactagggggatggtgattagaaagcacctcatgatcccgtctacttcctg

SEQ ID NO: 164875 - DNA, 201 bp, Homo sapiens
ctacccccgcccccgggttcaagcaattgtcgcacctcagcctcccaagtaactgggattacaggtgcccaccaccaagcccggctaatttttctattttmaatagagatgaggttttgccatattggtcaggctggtcttgaactcttgacctcaggtgattcacccacctcagcctcccaaagtgcagggattaaggcg

SEQ ID NO: 164876 - DNA, 201 bp, Homo sapiens
aatttgtaggagctgctcttaatgattattactgcataggctggaatagaagcaaaatttgcagtaatacttttgtacctttctctttaggccttggcatrtattaaagtactatacatttgtcttaaaaattgaaattgtagattattttcatctaagacccttttgttcacagatttttttttccaagtatacctattc

SEQ ID NO: 164877 - DNA, 201 bp, Homo sapiens
aagaccaacgtgtaaattacatattaatctttctttttctccctagctcggttttaagaataatgttttagccaacatatctgcattactcttggctcaayatgagaaatccatttttggtttgcctaacagaagatcatgttgctttgcttctctacacagtatgaaaacccaaagaaaagaaaaacagaggcagttttt

SEQ ID NO: 164878 - DNA, 201 bp, Homo sapiens
ttgtggtcaacagtggggcttagggggcaggttttgtggctgtgacagaacacgtggcccctagtgtgtctgttgaaagatgggcccctttcaggaaaatkgcttaccttactttttagacataatttttgttttctgttaaagggtcagttatagataagtatgctcccttgcaatgaaatgaacccactttatcaattt

SEQ ID NO: 164879 - DNA, 201 bp, Homo sapiens
ctgtttgaagcactgtattgagcataccatatgctgaaagacttggaatgcaaaaacctaaggccaagggcacttctcaatattaaaccctcagttgtaakggaggcatcaagactataagatccaagaccttaacttttgtgctccttgtcttgtggagggaacatccatcctcaaaacagaaacctgtgagatcccttg

SEQ ID NO: 164880 - DNA, 201 bp, Homo sapiens
gaagagattctcgtccgctcagttaaggtactcagactattttccaaccaatcaagagggtgctgcttcatggagttcgtttaagctgaagcggcagctgktgactgtcatttgcatcatctttatacatttactgtgaatgtcactgtccatttccactttctttctacttgtcttcaaattgatgcttatcaagtagac

SEQ ID NO: 164881 - DNA, 201 bp, Homo sapiens
tggccaaattctgtttgaagcactgtattgagcataccatatgctgaaagacttggaatgcaaaaacctaaggccaagggcacttctcaatattaaacccycagttgtaatggaggcatcaagactataagatccaagaccttaacttttgtgctccttgtcttgtggagggaacatccatcctcaaaacagaaacctgtg

SEQ ID NO: 164882 - DNA, 201 bp, Homo sapiens
cccttgagcaggaataagtgagtggcagagggggtcagggatgttaacgcaaatggagatcccttcacccagaaagacacatctgaaatggagaagatgcytttttcctcctgcaaccaataagagagtgatgaaaattatgacgccttgggaaataagactgcaacgtaaatgtgtgtccaccccctagttttcttttgg

SEQ ID NO: 164883 - DNA, 201 bp, Homo sapiens
tcaagtgatcctcctgccttgagctcccgaagcgctgggaccaatagagatttctctgagaattaggtcccccactattaataaggtcattgtcagctgarttggggaggtggcgtgggtagatacaattaatttagattttttaaaaggcttttgagaatattcggagaacctaatatattttgagacctgacatttatt

SEQ ID NO: 164884 - DNA, 201 bp, Homo sapiens
gacactggtctgcacaatgagtgtttttgtatatgaaccgaaaaacaggtagcaaaagcaaaaatagacaactgggattacaacaatctaaaaaatttctktacagaaaggaagcaatgaacagagtgaagcagcatcctacagaaagagagagaatatttgcaaaccacacatgtgataagggattaatattcaaaatgt

SEQ ID NO: 164885 - DNA, 201 bp, Homo sapiens
cttctgttaggtgtatctctgctcatgcttgagagtggtggtgtttggaaagactcaatagcatatgcacatgaggaagttgaccaaatgattccacagcrcatactcattttttgctctgattctagcttttcctccaattttattcagaatttgttcttttcttacctcacaccatatagaaaaatcaactcaaagtgg

SEQ ID NO: 164886 - DNA, 201 bp, Homo sapiens
gaccttgtgtccgtccccgctggccctcagttctctggatcagggttgaaaggctgaaattctttgggtgttagcttaggatgcctctgatccatcctaasccgacattcccttgatctctcctgatctgtgagcatcctggcccttcttttcttttcagttttaatttttgcgctggctccaaccccttttcattcctga

SEQ ID NO: 164887 - DNA, 201 bp, Homo sapiens
cttgtacttcttttaggctatttttccacctggtactatttggctttactgactgccctcattccccatacaccaccttgttttgttcagattcccctaartcttcattctcgtcccacctccccatcactcctgactacttgaaacacgacttctgtcctcagaaggcagcagtgttccctcctcccgttcatttttcat

SEQ ID NO: 164888 - DNA, 201 bp, Homo sapiens
tcatgtcacaagatcttgttgatgtgcatgcattcattcattcaacaaatattattgagcatctaacataagccgggtgctttgctagggacagaatgctrtacaaggtccctgtcctcatggggaccgtatgttgggaagacagatgataggcatggaaatgaagagacaaaccactccgacttcagcccaggaaggagc

SEQ ID NO: 164889 - DNA, 201 bp, Homo sapiens
ctgaattatggagttttagttttgctttagaatttttggatgattagacttgtacttcttttaggctatttttccacctggtactatttggctttactgamtgccctcattccccatacaccaccttgttttgttcagattcccctaagtcttcattctcgtcccacctccccatcactcctgactacttgaaacacgact

SEQ ID NO: 164890 - DNA, 201 bp, Homo sapiens
aaaatcatgtcacaagatcttgttgatgtgcatgcattcattcattcaacaaatattattgagcatctaacataagccgggtgctttgctagggacagaakgctgtacaaggtccctgtcctcatggggaccgtatgttgggaagacagatgataggcatggaaatgaagagacaaaccactccgacttcagcccaggaag

SEQ ID NO: 164891 - DNA, 201 bp, Homo sapiens
gaaaggctccttctcatccttcagagctgagcttacatgtcactgcccaagagaccttcttaactgtgggtgtcccctcgaccttgtactagtcaccttgyttctctgcttcttcgtgcttagccttggctgtgtactcctccttgttggccctgtctcccttgcccaggttgcagatgtcatggggcagcttgttcatct

SEQ ID NO: 164892 - DNA, 201 bp, Homo sapiens
ataaacacatttatagttctcagagattccttgagagaggaacatctttaaatggataaccacagtcttctaaacacctgaaagggtgtcttttgctgaaytatggagttttagttttgctttagaatttttggatgattagacttgtacttcttttaggctatttttccacctggtactatttggctttactgactgccc

SEQ ID NO: 164893 - DNA, 201 bp, Homo sapiens
tcacagcctggatgcatgtatgaataaacttctaccattaagtccctgaattatttaagcactgccagtgattctatataaaccgttcagtaaaatgaatkgcatatgcgtatgtttcaagagctccagcagcctacccaggatggcttgatgttgtctcttagcaccgtatcaatacctgggggttttcaaatattgcag

SEQ ID NO: 164894 - DNA, 201 bp, Homo sapiens
tattgatctagactgcctgctactttcatttaccatgttactgctcgtgggattacaggcacaaaggtttcataaatttcaaatgaaatatgaacatttgktgtcaaagtactgttaaggtatgaaaaccctgctagtattagttcccttttgttattattctattattattattattattgtgtttacatccacaggcaa

SEQ ID NO: 164895 - DNA, 201 bp, Homo sapiens
agtctaggtagagggaacagtgagaggagagaccccctgcatggcctgtccaggggcctgtgatctttgtgagggtccaggaatgtgaaggttaaggcagsgaagggaggacccatttcaaggatttctgtgccttgccgagaagcttgggctctgttggcagagccagagagtggcattcattcagcttgtgaattctgg

SEQ ID NO: 164896 - DNA, 201 bp, Homo sapiens
tgcctaccaccatgtttctgaggcctccccagccatgtggaactgtaagtccagttaaacctctttttcttcccagtctcaggtatgtctttatcagcagygtgaaaacggactaatacagtgaggaaatccatgtgttaggaagggagtgtggttgtacttcaacctggaactgtctaactcctaaggttttattaatat

SEQ ID NO: 164897 - DNA, 201 bp, Homo sapiens
gggtcagttcaggcactgtgcgtaaagcacatagcaccgtgtctagtaggtactctctgttccttaactgtcgttccttgattgctcttaagatacgacartgcctcttatatcggcaccttagaatcacctaggaaatgtcctaaatacacgttttgggtctccatagagaacctactgtagccgactctcaactttggg

SEQ ID NO: 164898 - DNA, 201 bp, Homo sapiens
aaaatgggttgatatgagggtcagttcaggcactgtgcgtaaagcacatagcaccgtgtctagtaggtactctctgttccttaactgtcgttccttgattrctcttaagatacgacagtgcctcttatatcggcaccttagaatcacctaggaaatgtcctaaatacacgttttgggtctccatagagaacctactgtagc

SEQ ID NO: 164899 - DNA, 201 bp, Homo sapiens
ttttcacctgtaaaatgggttgatatgagggtcagttcaggcactgtgcgtaaagcacatagcaccgtgtctagtaggtactctctgttccttaactgtckttccttgattgctcttaagatacgacagtgcctcttatatcggcaccttagaatcacctaggaaatgtcctaaatacacgttttgggtctccatagagaa

SEQ ID NO: 164900 - DNA, 201 bp, Homo sapiens
atgaaagccagccgggcacagtggctcacgcctgtaatcctagcactttgggaggccgaggcaggcagatcacttgaggtcaggagttcgagaccagcctrgccaacatggtgaaaccctatctctactaaaaataacaaaattagctgggtatggtggtgtgcgcctgtaattccagctacttgggaggctgaggcatga

SEQ ID NO: 164901 - DNA, 201 bp, Homo sapiens
tatttttcgagatggactttcgcttttttgcccagcctggagtgaagtggcatgatctcggctcactgcaaactacccccgcccccgggttcaagcaattstcgcacctcagcctcccaagtaactgggattacaggtgcccaccaccaagcccggctaatttttctattttcaatagagatgaggttttgccatattggt

SEQ ID NO: 164902 - DNA, 201 bp, Homo sapiens
cctggtggcagtattggtggtcacagctggcaaagggaagtgtggctgcccggagagcttggctgaggttggaacgtgggagtttaagagagcaaactccmacagcttggtgcagagagaaaagtgtagaaaggtcgggtgtcatacagcagagggctgtgatgctctactgaggagtggaagtgtttttctgagggcatc

SEQ ID NO: 164903 - DNA, 201 bp, Homo sapiens
caggttttaggcaataataagtgagcagtatggcgccctaatagaaggagggatgcctgtggccaatatacacggctcaaagttgaccatgatagagaagytttccctagaaggtctgtgagggaggaggcctgggagagacagcagggtgaccagagtaagtgaagtcaccgaggtgccaatgagtgtggccctgcaggt

SEQ ID NO: 164904 - DNA, 201 bp, Homo sapiens
gcaggttttaggcaataataagtgagcagtatggcgccctaatagaaggagggatgcctgtggccaatatacacggctcaaagttgaccatgatagagaasctttccctagaaggtctgtgagggaggaggcctgggagagacagcagggtgaccagagtaagtgaagtcaccgaggtgccaatgagtgtggccctgcagg

SEQ ID NO: 164905 - DNA, 201 bp, Homo sapiens
caaatatcttactcctgggctgtgctggggatggcagcagagtggggtggttggatgggaaggcgggaaagagctagcttggagatgatacgcttttccayccttgaataacttgggaaaaagtcaggagtgtggaatgaagaattggaatataaaggctgagggcggacctaattttttttttaaggattaagaaaaaag

SEQ ID NO: 164906 - DNA, 201 bp, Homo sapiens
aggttcacatgataaatattttctgctttgtggcctacaaggtacctatcacaactactaagctatcatgcattagtgaaagcacatagataatctataarccaatgggcatggttgtgtgacaataaaactttatttagaaaaacaggtggtagactggatttagcttgtgggttgtagtttgctggcctctggtcaaga

SEQ ID NO: 164907 - DNA, 201 bp, Homo sapiens
gaggttgcagtgagctgagatcacaccactgcactccagcctgggtgacagagcaagactgtctcaaaaaaaaaaaaaaaaaaaaaaaaattcaacatacsaattttgcgaggacgcaaacatttaatccgtagtactgatgtggatatgatttgagctaagactctgctgttgattctcttcaaaaacttggcagtagcc

SEQ ID NO: 164908 - DNA, 201 bp, Homo sapiens
taccaccacgcctggctaattttttgtatttttagtagagacgggatttcaccatgttggccatattggtcttgaactcctgacctcaagtgatcctcccrcctcagctgcccagggtgctgggatcacaggcgtgagccaccgtgcgcgacctcagggtcccttctaacctgtgctgttgtcataaaccctggaggagaa

SEQ ID NO: 164909 - DNA, 201 bp, Homo sapiens
ctgtcaaacaacacagtccccatctgtactttgggagggaaggacttcttaattccagctgcctgttgccatgggggaacatagacccagaactgccatcytttctaatttttttaaaaattagaggctaaaagttttggcttataaaaatggtatttcctgagtttttacaattatagtattaagatattcctaggtttt

SEQ ID NO: 164910 - DNA, 201 bp, Homo sapiens
cccacctcagcctgagtagatgggactacaggcatgtgtcaccatgccaggctaatgtttaaaaatttttcttagaggtagagcctcactttgctgcctargctgatctagaactcctggcttcaagtgatcctcctgccttgagctcccgaagcgctgggaccaatagagatttctctgagaattaggtcccccactatt

SEQ ID NO: 164911 - DNA, 201 bp, Homo sapiens
tgctgggaatgcgttcattttctttatcttgccattactgtacctctattgggaaatttactctctcttcatagataggatccgattcagtacatatttakaaaaccacacttacatttaaatacaggcctttcccatttcacagtgtttctagctcccctttccaatacatctctctctctctttctctctctctctctc

SEQ ID NO: 164912 - DNA, 201 bp, Homo sapiens
gacttcttgtgcctgtagagtttattcatatcactctttgcttgctcagcagttgaaatgggatggaggaaagccccctaactccaaaaaaaaaaaaaaaactttcttcccagcctgagacagttgccataattagtaacctgcagctcccttgatatcttgatgatactttattaaaacaaacaaacaacaaaaaacaca

SEQ ID NO: 164913 - DNA, 201 bp, Homo sapiens
gttttcgagacgaagtttcgctctcatttcccaggatggagtgcagtggtgcaatctcctccgcctcccagtttaagccattctcctgcctcagcctcctragtagctgggattacaggcgcccgccaccatgcccggctaattttttgtattttttagtacagacggggtttcagcatgttggccaggctggtctcaaac

SEQ ID NO: 164914 - DNA, 201 bp, Homo sapiens
tggtggggaaggatgttgcggtggggttggggtggcaatgaaaggtgaaaaccactgtggtcccacctgcccatcgtcagatttcggttcctctcagagtyaacgtagaaggtttctgggggcatggacctgagtcttatcccctttgcaaaagtaagaattgtatcgtagcctgactcagggttttagccaacttctctg

SEQ ID NO: 164915 - DNA, 201 bp, Homo sapiens
agaattggcaggaagggcacaggggcaaggtataggctcacgtctccacattctgcacctcccaggctcctgccattgatgtgagcgggttcctgtactgyatgaagcaggggtttgcatccgaaacaaccacccgtgctgaatatgtaggtgatacgttgatctgtacagcaaaccaccatggcacacatttacctatgt

SEQ ID NO: 164916 - DNA, 201 bp, Homo sapiens
taagatctgtctgcactccttttgtctggcctgtacctgccttttctgaatgaccctgttaattgcaattgactctcatagaatgtggatagcagtgccasttgacaccagactaatgcttctgacttttccatggtgccccagcagcaggctggagggaagggcgggggcggtcagaggagagatagagcacttcagatt

SEQ ID NO: 164917 - DNA, 201 bp, Homo sapiens
acatatcagtcattttttgaggaaaataaatttaaggcttggttatcggtccttgagtcagcacattgagcgttttgtcaattagctcctccccccatctktatggtatggcttttcctgtaattacagtcaagatcctatagccggaggaaggcctgtcaattgagtaagaggctgatgttcatcgcacagtgacagccc

SEQ ID NO: 164918 - DNA, 201 bp, Homo sapiens
agatacccagccaatggtccacagtgatgtaactcatcagtggtccacctgacattggaaattcggttgctttggaaccttctactacatcccctttccttactcactgacatcattcccagatcaaagaaagataaaagaaggaagggctggagacgttgttttcctgtatgctccttgatgaagggctcagagctaagc

SEQ ID NO: 164919 - DNA, 201 bp, Homo sapiens
ggacaacatatcagtcattttttgaggaaaataaatttaaggcttggttatcggtccttgagtcagcacattgagcgttttgtcaattagctcctcccccmatctgtatggtatggcttttcctgtaattacagtcaagatcctatagccggaggaaggcctgtcaattgagtaagaggctgatgttcatcgcacagtgac

SEQ ID NO: 164920 - DNA, 201 bp, Homo sapiens
aggtaccttggaaagactgcatctcctggattttgcatggttctggcttaatggacaacatatcagtcattttttgaggaaaataaatttaaggcttggtyatcggtccttgagtcagcacattgagcgttttgtcaattagctcctccccccatctgtatggtatggcttttcctgtaattacagtcaagatcctatagc

SEQ ID NO: 164921 - DNA, 201 bp, Homo sapiens; identical to SEQ ID NO: 30476

SEQ ID NO: 164922 - DNA, 201 bp, Homo sapiens
cctttgcttgttaccagaagagtcgcccagttgtggcagagatcatctagctcgcaaaactgtaaatatttactctttggcctttcccagaaaaaagtgcsgactgctatgttagatactccagttcattcaaagtgatatcaccctaacattctctaaattagccacagcttagatgaaatttaggcaaatggaatgccc

SEQ ID NO: 164923 - DNA, 201 bp, Homo sapiens
gtgccgactgctatgttagatactccagttcattcaaagtgatatcaccctaacattctctaaattagccacagcttagatgaaatttaggcaaatggaaygccccaggccccaggaagactgtggcagcacattgtatgtaactgttggggatgttgcctgaaaccccccccttttttttaggcagctgcaaggattaga

SEQ ID NO: 164924 - DNA, 201 bp, Homo sapiens
cgtcctaattgtgactctgccttgccattctatgttttatcggaatacgcagacatatactttatgaggttgggtaatgaagagagagagaccccaataaacatattttctaagagtaatggttatctatagctcaggaacccttggttagcacagcctctattacacagtactaggcaagcagttcatagctcaattaga

SEQ ID NO: 164925 - DNA, 201 bp, Homo sapiens
aggagctgggctttagcctttaaaatcgtgggtggatagggccatctggtgtgcagttgtgtaactagacattgctgttttttttttaacctccttgctartaatcaatgtgattcatttgtctttacaaaaacaaaccattcttttgttttgtttttttttcttcaacttttactttaatttcaggagtatatgtgcagg

SEQ ID NO: 164926 - DNA, 201 bp, Homo sapiens
ttgaaattttttatactatgttctattgggaaccatttcagggttttgagatatagtatgatataataacagctatgctaaattctttgaagttattggtrgtggaatatcaatccagaatgaaaataaataattttggaaatgagcctgtcattgaaatatactttatttctcgttaaatgtcccagcaaaagtattttg

SEQ ID NO: 164927 - DNA, 201 bp, Homo sapiens
tgaactgaagtgctaatgtgaaatgttcatgatggtacccgagtacttgcggtggtacctagcgtgtgctttccaagtgctggcaaagaaaagaaaagaawtgcttggggctctgcctacctgtctaggctcctgtctggccattctctttcttgttccaaccatatcaaactcactgctgttgctaaaccttcctgtctc

SEQ ID NO: 164928 - DNA, 201 bp, Homo sapiens
tgatccacctgcctcacctcccaaagtgctgggattacagtcgtgagccaccgtgccggccactttcatctttctgattaactgaaaagtatcaagcaatrcttacatgtaactgcactttctcatcaactgcaaccataatttagctatggatacaagagttgggcacaaatccatgaaagcattgagtgagaatcaatt

SEQ ID NO: 164929 - DNA, 201 bp, Homo sapiens
tgactttaagccttaatgaaactaaggccggagcgggtggcacactccgtggctgggatccacagtgaaatctacgctgggagaggaggaatttagggtgrtaatttggttctttgctattgacgaaattttctaattgactggggttacttaataccagataatatttttttcttgctataaagagagtaaatttgtttt

SEQ ID NO: 164930 - DNA, 201 bp, Homo sapiens
tgtttgcctatgctataaggcatcagtggttaccaggcagtgttgcattttttccatcccatacctctgtgtgtgttccttatctgtttctaggatgtgcyctctgccccgtcacatcacactctgtgctgctctcagccaaagctcttcttaaatacactagccatcaaaaccatacaacttggctgggtgcggtggctc

SEQ ID NO: 164931 - DNA, 201 bp, Homo sapiens
agggtcattcatgttgtagcatgtatcagtacttctttttttagggctgagtaatattccatttacggatatgccacatttcatctatgcattcagttcayggacatgtgggttgtttccacattttggctattgtgcataatgcttccaggtacacttgtctacacatttttgtgtggatataggttttccttttttggg

SEQ ID NO: 164932 - DNA, 201 bp, Homo sapiens
tgcaggcttaaggctggaagaaaccccaagcatttggccaggaagaggcaactagttccagctggcccacatactacactttaaaaattacccagatgatstgattctgtagagagagagtgggtggagaggactccagggccatggaggaagattcggcctttctctccctaatcatgagcaatgtgatttggagagaga

SEQ ID NO: 164933 - DNA, 201 bp, Homo sapiens
cttcaaagatacaaagctagaaactacaaaactaggcatggttaataaataactgaaataccaggtgtatagaaatgcatctgtggaaaaatgaaatcatrtattctctaggatatattaggaaatggctctttggcaagtctagagggtaaagtatccctgaagggggaaaaggtttaaaaacagtaaactaaagaagat

SEQ ID NO: 164934 - DNA, 201 bp, Homo sapiens
ttgaaggtgacagagactgagaaagggctgcacacctttggcctaaagggtaatgagcaacacacaaggattgggagatgttcatggcaagaaaaattcasaagggacattgttgtttcactaattctgtaaaggagagcagcggcatttacttaggccgattccccattctctctttctgtttttaaacagagacagatc

SEQ ID NO: 164935 - DNA, 201 bp, Homo sapiens
tagttcaaataatacatatgctgaaattcctatatcccccccatactccagatcttcagtgtggaatttaaatataattccttattgtaaaaaaaaaaaawttttttttgatcaaggtgattttgataaactaaatgcatctttaattttactcacagcaaagcgattctttattttctctctaaaagcataattgatgtg

SEQ ID NO: 164936 - DNA, 201 bp, Homo sapiens
tctttccccctcaacttccataggaaccaaactctctttcttcctcccgtttggttggaaagttattttgcctcactgcgtgatttttctactgcaccaaytcccctttcaaacgttattccacaacatactaaattaatgtatactgtgttctttgggtaatggggaggggagcctgtctcacagcacgcatttgttcag

SEQ ID NO: 164937 - DNA, 201 bp, Homo sapiens
ccttttgactccctaaggaaccctgttttgggtttcttttgaggttgaagatatttcagactctttccccctcaacttccataggaaccaaactctctttmttcctcccgtttggttggaaagttattttgcctcactgcgtgatttttctactgcaccaactcccctttcaaacgttattccacaacatactaaattaat

SEQ ID NO: 164938 - DNA, 201 bp, Homo sapiens
tggatggtttaataaataagattgatacaaacacaaagcattaagcaaacaaaaggaaataaaaacggcaacaaataaaacttctgtgctttttgaaattytgtttttggcaggcaacattccaaagatctttttcatttaaagtccaggagtcttctgtgtgaaccccacacaggtaccttggaaagactgcatctcctg

SEQ ID NO: 164939 - DNA, 201 bp, Homo sapiens
tgatgtaggaatgaacagatgaacaaccccacacaacctaaggacaactttgaatcaattcttctaagctggtagcagaagccacctttccatttgacttstatctcgctctttttttctttcttttttttttttttggagacagagtctcactctgttgcctagactagagtgcagtggtatgatctcagctcactgcca

SEQ ID NO: 164940 - DNA, 201 bp, Homo sapiens
gtgtgactaatattagaagcagacacagccatgatgagcaatactctttttttgtttatttttgttgttactgctgtaagccactttcttctccctctccrttaaaatgcaacttaattggtaaagtttagttgactagagatttcatttatttatttatttatttatttatttatttatttgtttgtttgtttgtttgag

SEQ ID NO: 164941 - DNA, 201 bp, Homo sapiens
ttatgtttccccagttggcacatcatggccaacaagagagtagggatcattaaggagtttattttcatctttattttatcatttaaaacacatttttttttccaatgagagtactgatgacataaaaggttatacattgaataaccacccaaattagcagtgtttcatatttacactgttcaacacagttctcttgtctct

SEQ ID NO: 164942 - DNA, 201 bp, Homo sapiens
attattccttaaacaatccaacataaccactatttatatcgtgtttatattgtattaggtattataagtaatctagagatgatttaaagtgtacaggagcrtcacatacattatatgcaaatactatacaattttatgttagggacttgagcatttgtggattttggtatttgggggggttccttgaaccagtcccctttg

SEQ ID NO: 164943 - DNA, 201 bp, Homo sapiens
cttgataaaggttggggtttgtaagcttggggctcctcagccatgactgaaacgtactatgagcacggcatctaccgggctgttccacatcctccctgtgkgactaggggccagggcaatgggaatcagtgcagaaataaagctcatgctgtttgctctgccatgagtaacgaagtcctctgtatctgatcctgggtctcc

SEQ ID NO: 164944 - DNA, 201 bp, Homo sapiens
acagttgtattcctaagacatagttgggaccagacctcaagaaaatagccaacaaatactggctgaatgaacgaaagaggccatatgcagtcagcccccctctctctgggttctacatatgtagatttaactaatgacagattaaaagcattcgaacaaacggagggtggtatctgtactgaaaatgtaccaactgctttt

SEQ ID NO: 164945 - DNA, 201 bp, Homo sapiens
acagtcgtgatttagggcatgaagagctcactcatcaagatgtatgtaattcagattttctgagtgtttaattcggcgtctttggtcacaaggaacagagktttacttgtgccacctcttctaagaaaaaggtttactgtaagagataatgttggcaagctgaggaaaggaggcagttttgggtaactgtctcttgcgatc

SEQ ID NO: 164946 - DNA, 201 bp, Homo sapiens
ccaacctttttgctggctctctttcaaactgtactgctcactttgggctgtacgttagaaccacctgagaagttctttttctttcttttttttttttgagrtggagtcttcctctgtcacccaggctggagtgcagtggtgggatcttggctcactgcaacctctgtctcctggcttcatgccattctcctgcctcagcct

SEQ ID NO: 164947 - DNA, 201 bp, Homo sapiens
ggctgcagcagtgtctaggtatctgtgaatgtgtaagaaattgagacagcctgcaaaatagctcacccagcttttctttaaagttccaacctttttgctgsctctctttcaaactgtactgctcactttgggctgtacgttagaaccacctgagaagttctttttctttcttttttttttttgaggtggagtcttcctctg

SEQ ID NO: 164948 - DNA, 201 bp, Homo sapiens
tgtgggcccttctctttcctcgtgatgcacggtgatagtgcgtatctaacacttgaaggtgtccacgctggccctagctcagtgagatggctttgctttgsgggggtgagggggcggaggtggtggaaaggcagcaagctacgatgttcttatgtgtgtggccttgcttctggtggtggggtggcacacatgctctgtagt

SEQ ID NO: 164949 - DNA, 201 bp, Homo sapiens
cctttgtttttgttgtcatcgttttatgattaacttatatctggtcctttagacatttagattttttctgttttatctctctctctctatatgtatatctrtatatatatttatctatatctatatagagatatatatatatatatataataatgaatgaaatggactgtttgcaacctcagatgtatttctaggacttag

SEQ ID NO: 164950 - DNA, 201 bp, Homo sapiens
gcgtagtttcacgcctctaaaagtcccctgaaagtgttattaaaagtactatctggccatgtcctcatttccccagcaaagtccttctgagaatttaggckctttaggctagaggatctcagtgctcagaatgaaatatccctgtactccaagatgcctccagcaattataattgaatcttgaagctagagtttcttggct

SEQ ID NO: 164951 - DNA, 201 bp, Homo sapiens
gtgcaggttagaggctatgtcagaagcaagtcaggatttgaaggcagatctgtctgcttttgcccctctgtaaatccagagctgctgcctcatttcttacrttgcccccacccgtgcagcaattcttcctgggaggcctcattgttcatattcataaagggccccattcagtctcctttttggagaaatggccactgcaac

SEQ ID NO: 164952 - DNA, 201 bp, Homo sapiens
ggtcttctgaagtataggaaaaggcagcttacagaaaaaaacttgcttgtttactgtcttctgagctgatttctcacctactggcaagtggataggtctastttttgtttagctgtttttctaatttaatcttgtacatgagacagctatagatggatgtatagtctttgaagtggggccagttggctccgtctattagct

SEQ ID NO: 164953 - DNA, 201 bp, Homo sapiens
gcaagtgtgatcattcaggtaatcaaagtaactacagaaacagaggtatggattagctagtcattgcagatgtggcattgagcatataagcgtggtgtacwtcttagaacttcatctggaaatgcctgtgggggagttggatttcaagatcatcgtcaatgtcatgtcactgtaatttcatttacattaatcagattagtt

SEQ ID NO: 164954 - DNA, 201 bp, Homo sapiens
tagtgttggcaaaaggcttgcaatttattattaagtggaataagcagtttaaaaacagtatgtacagggtggttttctggctatataaacacacaggcatwgaaaatagatatacataaataatgttactataatttgtctgcctcccttctctcagaaaagaccaatgaattatctattatgtgccactcactatttgag

SEQ ID NO: 164955 - DNA, 201 bp, Homo sapiens
tttttctccttggcaggttttcactattaatttgcttgacaaaggatagatacattttccatgtgtggaggtaaaagcagtgcagtgagctaaaaagttarcaaaggtgaagtggtcctaatctgcggccctggtacacttagataggcatcattgcctttcctctgagctcttggtgctgataacagcttccttgaccga

SEQ ID NO: 164956 - DNA, 201 bp, Homo sapiens
agaccttgatatatgtacatatattgtatgatacatatccatgcatatacgtgggtgtacacacacaggtacacacaaatatatatgtgcctttggacaaraaaaaatccccaggacagtctcatttggcttttaaaatgctgcagttgaataggaccgtagaggtggcctaaggcagccttccattcagggcacgcagat

SEQ ID NO: 164957 - DNA, 201 bp, Homo sapiens
agatacaagaaggccacatgtggtggttcacccctgtaatcccagcagtctgtgagactgaggcagaaggattgcttgagaagtttgagattggcctgggmaatatagcaagatcccaaccctattaaaaaattaaaaatgaaaataaaattttaaagaaaggtatttctccccttcacggtaatttggagccaatacttc

SEQ ID NO: 164958 - DNA, 201 bp, Homo sapiens
agcctcaaactagaacgtggcttttgaacggtgaacattccacaaacatttaatacagagatggctgtggggtgggggctgggggctgggggcctggaagrggagaaggggcaccagaaggagaaatgggaggaaagggcgagtgagatagcaaagagaactcagaaagtaataaagccctgcagtaatcagagggctgag

SEQ ID NO: 164959 - DNA, 201 bp, Homo sapiens
tgtatgtgggcccatttgccatgtgtgtgtgtgtgtctgtctatctatctatctatgtatatatatatatatatatatatatatatatatatatatatatagttataatgtggtgggttctcgaatcacagttgtaattcacatttttctccaccaattctgataacttgcattaagaaattgactgtgtaagttaaattt

SEQ ID NO: 164960 - DNA, 201 bp, Homo sapiens
ttgtatgtgggcccatttgccatgtgtgtgtgtgtgtctgtctatctatctatctatgtatatatatatatatatatatatatatatatatatatatatatagttataatgtggtgggttctcgaatcacagttgtaattcacatttttctccaccaattctgataacttgcattaagaaattgactgtgtaagttaaatt

SEQ ID NO: 164961 - DNA, 201 bp, Homo sapiens
aaaaaaagtctgattgcaactacgtgtttgggaatcagggagactatggaagaacaatctcagatctcagcttgaggctccacttgcaatatcacaatttytaaaacatgttgtatgtgggcccatttgccatgtgtgtgtgtgtgtctgtctatctatctatctatgtatatatatatatatatatatatatatatatat

SEQ ID NO: 164962 - DNA, 201 bp, Homo sapiens
gaacccgggaggtggaggttgcagtgagccgagatcacaccactgcactccagcttgggaaacagagtaagactccatctcaaaaaaaaaaaaaaaaaaaagttattgattaaaatttaaatataaattacaagtaataatgaaagtatgaaatttttattgattcataaatatttggttttaatcaaatatgatgtgaag

SEQ ID NO: 164963 - DNA, 201 bp, Homo sapiens
tacgtttttctattttgtctgaactagccaaggtctctggagtttgctgttatattgcttcagagaaattagtgacattgaaaggctgttgtcttttttaktgtacttttggttgttaggagaaatttacaaggccatttttttctcccgtctctgcagttcaggagattatattagaaaatattctatacaaaaaatatg

SEQ ID NO: 164964 - DNA, 201 bp, Homo sapiens
gagacctcccagcaggggttgccagagaacttacacaggagcgtttctgctggaatcagctcgatgcctcttgaggacagagactcccagaggaaggagcrggcagccatccttgctgtgctgcagcctccacaggtgacacctcctggtgtgggagggacccaggtgaacagggtctggagtagacccccagcaaactac

SEQ ID NO: 164965 - DNA, 201 bp, Homo sapiens
tccatgacactggtctgcacaatgagtgtttttgtatatgaaccgaaaaacaggtagcaaaagcaaaaatagacaactgggattacaacaatctaaaaaayttctgtacagaaaggaagcaatgaacagagtgaagcagcatcctacagaaagagagagaatatttgcaaaccacacatgtgataagggattaatattcaa

SEQ ID NO: 164966 - DNA, 201 bp, Homo sapiens
gccactatgcccagctaatttttgtagagatggagtttcaccatgttggccaggctggttttgaactcctgggctcaagtgatccacccaccttggcttcscaaagtgctgggattacaggcatgagccaccatgttcgaccccatttttataaatgtaaaattaacttaggtttaaactattaatacacaaggttgagaa

SEQ ID NO: 164967 - DNA, 201 bp, Homo sapiens
acagtgtaaaattagtagaagaaaacaaggaggaaagctccatgacactggtctgcacaatgagtgtttttgtatatgaaccgaaaaacaggtagcaaaarcaaaaatagacaactgggattacaacaatctaaaaaatttctgtacagaaaggaagcaatgaacagagtgaagcagcatcctacagaaagagagagaata

SEQ ID NO: 164968 - DNA, 201 bp, Homo sapiens
agagagactgtattccattttatttttatttatatttatttttgagacagagtcttgctctgtcacccaggttggagtgcagtggcacaatctcggctgamtgcaacctctgcctcccgggttcaagcaattctcctgcctcagtctgccgactagctgggactacaggcacacgccactatgcccagctaatttttgtag

SEQ ID NO: 164969 - DNA, 201 bp, Homo sapiens
gtgccaaaaataagaatctttaagaactcataaagtaatttagcaccacgttaataaaagaagcaccattttgaattagttctgtaagtatgtgtttgagktagaaatagagttttaaaaaactgtctgttcatatagttcatctgcttaataagtaaacagctctttcaaatcaccaagctcaaataaaacaaacaaata

SEQ ID NO: 164970 - DNA, 201 bp, Homo sapiens
ccgggaggcagaggttgcagtgagcctagactgcaccattgtactccatcctgggcgacagagcaagactccatctcaaaaaaaaaaaaaaaaaaaaaaaagtaactcattcaaggctacacatttactccatgaagtgagcacacttcagacttccagtcttgtgtggcctgtctaccacaccatgagacttcatgtctc

SEQ ID NO: 164971 - DNA, 201 bp, Homo sapiens
tgaacccgggaggcggagcttgaagtgagccgagatcgcgccactgcactccagcctgggcgacagagcgagactccgtctcaagagaaaaaaaaaaaaaattataacatggaaatgtttccttgcatctccgtatcatttctcctcattctttttaggtgtaacacagtattttgtcctattcatgcaatataatttata

SEQ ID NO: 164972 - DNA, 201 bp, Homo sapiens
tttatgattaacttatatctggtcctttagacatttagattttttctgttttatctctctctctctatatgtatatctatatatatatttatctatatctrtatagagatatatatatatatatataataatgaatgaaatggactgtttgcaacctcagatgtatttctaggacttagagtgattagcttgaggcgatgg

SEQ ID NO: 164973 - DNA, 201 bp, Homo sapiens
aagaaaaataaaacgtggtgaacgcccatgattgcaactaggagactgttatgcttatggttgttaagattagaaagaaggaagctttaaccctatctctratttcttacttttctctgtctatgtagaagttgatgttgatacgtgtctacataaatatttactaagggcttgcattagtcttgggaccaaggatatagt

SEQ ID NO: 164974 - DNA, 201 bp, Homo sapiens
agaaggaagctttaaccctatctctgatttcttacttttctctgtctatgtagaagttgatgttgatacgtgtctacataaatatttactaagggcttgcmttagtcttgggaccaaggatatagtattaaacgaaacagaatccctgccctcataggcttaccttctaggtaggaaaaatagaccataatcaagtttaat

SEQ ID NO: 164975 - DNA, 201 bp, Homo sapiens
acatcttcccctttcttctcccccaggtttgtcccatttgtactgactctgacccaggttgtcatgacttgagactcactagaagtttcagaaagatgcasactgctttaaaaaaaaaaaaaaagggcaaggggaggtgtgagaagaaagtataattctttttcttctaactggagatataaaaatcatataagcatgatt

SEQ ID NO: 164976 - DNA, 201 bp, Homo sapiens
aaatcaggatgctcaggaaataccttgtttggaataggaataggctcctccctttttttctcacttgccttgattgctctgtattaaaattcataaaggcycatgaattatcaattagatagcatttggtttgttatttttagtttcttcctatagcaggcatgtatgcatgtgttaaaaatggaagtagcgtcgacatta

SEQ ID NO: 164977 - DNA, 201 bp, Homo sapiens
aacaaagagagatcctgtctccaagtctgtctgtctgtctgtctgtctgtctgtctctctcggaaatattccttcagtgtattagtaaagaagttacttakgagtcacttatgcccttgaagagtgagtgatgtatcaaaatatgtctgtctttattgtttcactttcatccttctttttttggagatggagtcttgctct

SEQ ID NO: 164978 - DNA, 201 bp, Homo sapiens
gttttctattctgggcctccctgcttccagcgatagcaaggagcgaaatgagatgctgtctaagaaaggaaggtgctgcgatctttgattactacacagcytcggcagtgtttgtatgattaatgagtccatgtttcagacgttcccatttaatgtatttgagccttctaacaacattgcctttcatatgttgctgactgt

SEQ ID NO: 164979 - DNA, 201 bp, Homo sapiens
agggccacatcttcccctttcttctcccccaggtttgtcccatttgtactgactctgacccaggttgtcatgacttgagactcactagaagtttcagaaaratgcagactgctttaaaaaaaaaaaaaaagggcaaggggaggtgtgagaagaaagtataattctttttcttctaactggagatataaaaatcatataagc

SEQ ID NO: 164980 - DNA, 201 bp, Homo sapiens
atcccctttgcaaaagtaagaattgtatcgtagcctgactcagggttttagccaacttctctggatgctaatgctattctcttctttatacttgtcttccytcccaggcacacatccactggagctttgcagggcctatctgcccttagccctccaatatccttttcattttctttaatagttttattgatatataatgtg

SEQ ID NO: 164981 - DNA, 201 bp, Homo sapiens
ggtcttctaattctctgtgatgaagttcaaactgaagactgttactagtgtcgtgtttgtttctttttctctctcttttgttttgtttgtataaaatgccrgggatgaagggatccacttaataaaaaggcccattgtgttcagggagcagcctgttctgccaaatcacacaagggcatgtgttttcatgacattattgct

SEQ ID NO: 164982 - DNA, 201 bp, Homo sapiens
taagagacctcttctcaacaggatccatgtttgatccgggggaataaagctagagttgctttcttccttgtaatatgtataatgactcatgagagaattcyccactgtcttccccacctgagacctgagaggaggagaaggaagcttggagtcgctgccctgtggcctgaattggtcagtgaccaatcactcagacccagc

SEQ ID NO: 164983 - DNA, 201 bp, Homo sapiens
cttgagcccaggaggcagaggttgcagtgagccgacattgcaccactgcaccccagcctgggccacacagagaaaccttgtatccaaaaaaaaaaaaaaaaagtgaccacactgtggctttgctgctttgcctaagtatttcgtgaaattgatcgttcattcacaatgctcagtgcagtgactttgccgagcacaagtggt

SEQ ID NO: 164984 - DNA, 201 bp, Homo sapiens
ctactaaaaatacaaaaaattagccgggtgtggtggcgggcgcctgtagtcccagctactcgggaggctgaggcaggagagtggcgtgaacccgggaggcrgagcttgaagtgagccgagatcgcgccactgcactccagcctgggcgacagagcgagactccgtctcaagagaaaaaaaaaaaaaattataacatggaaa

SEQ ID NO: 164985 - DNA, 201 bp, Homo sapiens
cacctccctacagtccagtggtggcggtgggctgggcaggaaaaccataaccacctgcaaatgtcatgtggtttatatcacaccttcacttaacaccctcsccctaacaacctctacctggcaatcttcatttaactccaaactcaggacctcaatcctctgtttggcctgtgttccacgggacaggcatggggcacagat

SEQ ID NO: 164986 - DNA, 201 bp, Homo sapiens
cctccaacttctgggctcaagtgatcctcccacctcagcctcttgagtaactgggactgcaggtgcatggcactgtgctccacaattttttttttttttttagagatgggatctcactgtgttgtccaggctggtctcaaacccttgggtttaagtgatcctcttgcctcagcttcccaatgtgctaggattacaggcatg

SEQ ID NO: 164987 - DNA, 201 bp, Homo sapiens
gtaatgctgaatgattgtgaatgattgtgaatgtttgtttattcggggtactccctcaaatttcttatccagtggtgtctagaacatgttgggattttgtktgatagtttcttgagttggaaattgcgtttctttggcctcccatgtgggtatcaatgagttttacatggtttaaaggccagttatgtgatggatacttct

SEQ ID NO: 164988 - DNA, 201 bp, Homo sapiens
aagccactgttagattttacaaaactttaaaaagtaattatcttaaagatatctaagatagtgatctggttacatagattatcagagatacttttttttttgattatcagagatacttttaaaaaagcaactacaaggtaaggattatcctttaatttagtgtttttctattaaactcaatttgctttaaagttttttaca

SEQ ID NO: 164989 - DNA, 201 bp, Homo sapiens
gctaggggcaaaatacatatattctatgtagtttccatttctagaccctggatttctaaattcttccttataaaattttaaatttctttttttttttttttaaagatggtgctccctaactgatttccttcattttattatctcataacagatttgattttcacaatgaaggtaattattaaaatgcttcctttggtagtc

SEQ ID NO: 164990 - DNA, 201 bp, Homo sapiens
gttctagaggctagaagtctgaaatcaaggtgttggtagggccatactccctttaaaatgtgtagggaaggacccttccttgcctctttcagcttctggtrgccctagatgttcattggcctgtggcagggtaattccagtctctgcctccatctgcacaagccattctccctgtatcttttcacatcatcttccctctat

SEQ ID NO: 164991 - DNA, 201 bp, Homo sapiens
cactgcagtcttgacctcccaggctcaagcaatcctctggcctcagcctcccaagtagctgggactattggcaatgccaccatgttcggctaatgtttttrattttttatagagacaaggtttccctatgttgcccaggctggtctggaactcctgtgctcaagccatcctcccacctcagtctcacaaagtgctgggatt

SEQ ID NO: 164992 - DNA, 201 bp, Homo sapiens
tcagagaatctctaggatggaaatggggggatccatattgtagccccaggtgaggccatctggttgcatttgtgtcaagttggttgaaaactgcatggtgrgcgtaaaaatggtttgagtaaaatggagctgtgagaatttgaaggggtgcatgagaggtgcccgatacagtccaccccctgcaccatgctcaggtctctt

SEQ ID NO: 164993 - DNA, 201 bp, Homo sapiens
gcagtgagccaagatggtgccactgcactccagcctgggtgacaaaaaaaaaactttacctgggcttagtaagttgcctgacttctcatcctggagttcgkatccccttgtttctagaagagaaatccctcagatgtgaaggtgtgttccatgattttgtcgaacttgccctacatactgttttattatatattctgccca

SEQ ID NO: 164994 - DNA, 201 bp, Homo sapiens
cttacctctttttagtttaattaaaattatttctcagattaagagccatgctatgatgcttgccaacggatatttaaaacatgtaactgatttgttttttrtaatgcttcaggagaactcagttgagcagtaaagatgtgctcgtgatgtggttagctcagaataaggatgtgaaaaccaaaagggaaaggaggacaggag

SEQ ID NO: 164995 - DNA, 201 bp, Homo sapiens
gccctactgcactccagcctgagcgtgagactctgactcaaaaaaaaaaaaaaaaaaattagctgggcgtagtggcaggtgcctgtaatcacagctatccrgaggctgaggcaccagaactgcctgaacctgggaggcggaggttgcagtgagccaagatggtgccactgcactccagcctgggtgacaaaaaaaaaactt

SEQ ID NO: 164996 - DNA, 201 bp, Homo sapiens
ttcctcatctgtaaaatgggaaccatgacgtcagcatcacagagttgtgagaattcgacaaggtggaatgaaagcaactagtgtggtgtctgaccgcttgygttagtccatgaggaatttccttacgtattgttttgtgtctaggaccaagttcttattttcttcttatggatgacttcatatatatgccgccacagaggg

SEQ ID NO: 164997 - DNA, 201 bp, Homo sapiens
gcccctcttctcttagttgcctttagcctttgtttttattatgacaattggtatgaaatttttccttttcattacttcttttattcagagcacacctctgkcttatctcttcattctctgtttagtttcatattttactttaatttctgtacatcaatatctgccattatagtatttaagctcttggaaacatcaggcatt

SEQ ID NO: 164998 - DNA, 201 bp, Homo sapiens
tttcctgctggcctgatccgggagggatttgggaaagctagtcttgttggtgtgtcatcatcgcgacgctgttagtgattgacttacccgagtgtacacatgtttgcatctcacttgtatgttccttacatgtttacttaattattgggaaggtgtattaatgtcctgttgctactataatggaccaccacaaactcggtg

SEQ ID NO: 164999 - DNA, 201 bp, Homo sapiens
tccaatttttcaagctgctggccagcttgagcgtattcatatgttacctacgatgaatcacatcagtgtcggggccgggaaggtactgcaacatattggcrcctcacgggaggctctcaaaatgatccaaagttttttgttgcagcaaaagctcattcagaagtctttgggccatttggctcagcggaggctgtcatgtgc

SEQ ID NO: 165000 - DNA, 201 bp, Homo sapiens
aaacatgctgtattatagtggcaaagattagaatcagatacatcttatgaccttgggcaagtttcttaacttctttaaacctcagtttcttcatctgtaamatgcacatcataatatctctattcagagatacaggtggttctattaaacacatcaactctgtgtatataaagtcttaacccattgtggaataaattaagt

SEQ ID NO: 165001 - DNA, 201 bp, Homo sapiens
tggaggttgcagtgagccgagatcaggccactgcactccaatctgggtgacagagcaagactctgtctcaaaaataatagtaataataataataataatartaataataataataataataagaatctgactaaggttattaaccattaaggtatgctgtgctaaggagcagggggccccttccatccgtagagggcagaa

SEQ ID NO: 165002 - DNA, 201 bp, Homo sapiens
  misc_feature (1)...(201): n = A,T,C or G
cacaaatgtgatccttctggaggccagaagatagattcagtgggccccagttctttcaggtttaaggaataagcattttggtctatgaaaaatggggtttncctaaagtataagattgtcttatatttataaatgcctgtgttcattgctgtgggttcactgctttctcttttgggcagccatataaataaaagaaccacc

SEQ ID NO: 165003 - DNA, 201 bp, Homo sapiens
ttactttgcaggattgctgtaaggattagaaccaccgtctctaaggcattcagcatagtcccttagggtaacatgagtgctcaagaaatagtaaattttartatgtgtctcatttttttccagatgctctggggtcactaccaaccttgcctttcaccctacctgtggatctatgaccctgtccttctcagaacaccactc

SEQ ID NO: 165004 - DNA, 201 bp, Homo sapiens
tttcacctacaaaatgaaggctacaatatttactttgcaggattgctgtaaggattagaaccaccgtctctaaggcattcagcatagtcccttagggtaamatgagtgctcaagaaatagtaaattttagtatgtgtctcatttttttccagatgctctggggtcactaccaaccttgcctttcaccctacctgtggatct

SEQ ID NO: 165005 - DNA, 201 bp, Homo sapiens
atttcctgctggcctgatccgggagggatttgggaaagctagtcttgttggtgtgtcatcatcgcgacgctgttagtgattgacttacccgagtgtacacatgtttgcatctcacttgtatgttccttacatgtttacttaattattgggaaggtgtattaatgtcctgttgctactataatggaccaccacaaactcggt

SEQ ID NO: 165006 - DNA, 201 bp, Homo sapiens
agactcctaaagggaagattagggttggaagaagatggaggaagagagtaatttaattccttaatggaaagaataaaataagagctcttgacttttttttkttgttgttgttaggatatggggagaggtttctgcaaatatcttcttcagggtttacgaagtgaaccggatgtccggtaacagggttgcatgtcatgcaat

SEQ ID NO: 165007 - DNA, 201 bp, Homo sapiens
acaagggaatatgtgaggtagggtaggacattttggtagcagtcacacagcccaaagagcatggtgaatttaattagtctgccacacctgtatggccttaygttttccgggataacttaacaagcattgtgtgcagccaggtcaggcagatggaggttctaatccaggctgcacacctcatcagccaggagactacagata

SEQ ID NO: 165008 - DNA, 201 bp, Homo sapiens
ttgatgtgccttctcatttaatataagtaattattttaaaggttattgtgattaacatgtattccttatggaaaatttagaaagcgaagaaaaataaaaayaagaataaaagatttaaaaaaaccccaattcttaccagttagaagtatactattaatatttagcatgtatgattgtaagcatgttttcccttctttcgtg

SEQ ID NO: 165009 - DNA, 201 bp, Homo sapiens
attaatacctctgtttaaggttcattttgaacgccttggtgaccctatgtttttttctttgttttttgttttgttttttttttttttgttttttttttttktttttttgagatgaagtcttcctctgttgcccaggctggagtgcagtggcgcattcttggctcactgcaaccttcgcctcccaggttgaagcaattcttc

SEQ ID NO: 165010 - DNA, 201 bp, Homo sapiens
gtaatatttaagtattaatacctctgtttaaggttcattttgaacgccttggtgaccctatgtttttttctttgttttttgttttgttttttttttttttkttttttttttttgtttttttgagatgaagtcttcctctgttgcccaggctggagtgcagtggcgcattcttggctcactgcaaccttcgcctcccaggtt

SEQ ID NO: 165011 - DNA, 201 bp, Homo sapiens
tgccattgcactccagcctgggcaaaaagagcggggtaaaaaaacaacaaaaaaatgatgtaggaatgaacagatgaacaaccccacacaacctaaggacractttgaatcaattcttctaagctggtagcagaagccacctttccatttgacttgtatctcgctctttttttctttcttttttttttttttggagacaga

SEQ ID NO: 165012 - DNA, 201 bp, Homo sapiens
gcttagatgaaatttaggcaaatggaatgccccaggccccaggaagactgtggcagcacattgtatgtaactgttggggatgttgcctgaaaccccccccytttttttaggcagctgcaaggattagaatgttgcctcctcagaaactaacactcttctctccttgacctttgtttaaccagctttctgaacctgaagaac

SEQ ID NO: 165013 - DNA, 201 bp, Homo sapiens
ttcttaaccctttaagaaatatgacttgttctaattgccttttcttatttacattatacttaggctggtgttaggatgccgtggctgccaagtttacacartgcactttctctctctctttcttcttttggtttatgatgtttttcaatagtgtcatggaactcacttaatctgatttcatcaagtaaatatatgggaagt

SEQ ID NO: 165014 - DNA, 201 bp, Homo sapiens
acagcttagatgaaatttaggcaaatggaatgccccaggccccaggaagactgtggcagcacattgtatgtaactgttggggatgttgcctgaaacccccsccttttttttaggcagctgcaaggattagaatgttgcctcctcagaaactaacactcttctctccttgacctttgtttaaccagctttctgaacctgaag

SEQ ID NO: 165015 - DNA, 201 bp, Homo sapiens
ttgtggcagagatcatctagctcgcaaaactgtaaatatttactctttggcctttcccagaaaaaagtgccgactgctatgttagatactccagttcattsaaagtgatatcaccctaacattctctaaattagccacagcttagatgaaatttaggcaaatggaatgccccaggccccaggaagactgtggcagcacatt

SEQ ID NO: 165016 - DNA, 201 bp, Homo sapiens
tttatataattgtcattgaagtcaaaactgatggcgtaatatttaaaacaatggctggatccccaatctaagaagaatacattttgttgatcatattaagyactgttacagtgaatgcatggacccatacaattgtggaataattaagaaaaaaggacttaagggcttaaaaatgtctttttaacaatttaacaagttagc

SEQ ID NO: 165017 - DNA, 201 bp, Homo sapiens
gctttttgcctaacttgtgaaagttttttttcctcaactaattaagggtatcaacgcattggttgtatgttgaaaatgttgaaaatgttttttttttttttccaagttttctttctttttttttttttatactgggtcttgctcttcttatccagggctgaggtgcagtgacacagtcacagctcgctgcagcctcaacct

SEQ ID NO: 165018 - DNA, 201 bp, Homo sapiens
aaggccagttatgtgatggatacttctattaccttatgtctttctgatttcatacacttaaatgtacagtttttatcttccttcaaaaccttatttttccragcaagttttatttattcactttcagtcattactgaagtgaataacaaacatataacagatgctattttgggtcatagctgttttgctaagtaatactta

SEQ ID NO: 165019 - DNA, 201 bp, Homo sapiens
ctgaaccacacttgttatctttcattttatgatgagaaccaccttaagaggtgtgaggtgacatctcactgtggtttcaatttgcattttcctgagaattwgtgacagtgagccccttttcatacacttggctatttgtatgttttctttggagaattgtctatttggttcctttgcttgtttttaaaatctgtggttttt

SEQ ID NO: 165020 - DNA, 201 bp, Homo sapiens
gtgaacagattcttccaggtcttcattgtggcggaagaaagtgagatcagagatcccgaggaagggcttcagtttcaccagtagtggagctagggagtagsggggcagaagccgcaggaagtcagtgcaggacgccggaggccactcctaattgcttcatgtgttgttgccgtgctgatgaccttggaggcgctgctggtc

SEQ ID NO: 165021 - DNA, 201 bp, Homo sapiens
aggccctggggtggaaacacactcgatgtgttcaagggagagtaagtggtgaatgggtttggagccaacagggataatagacaacgctatcaagagggggsccaaccacacatgtgcagccactgtatgacgtctggattttccttgacttatggtgatcactattgggaggtggtaagcaaacaggtgacataatttgaa

SEQ ID NO: 165022 - DNA, 201 bp, Homo sapiens
gccgtgtctcttttctgtgattcgggagcacattgatacccttcttttggagcagagaagcttgtctttcatgatagaagtaggtcatgggggcggttagytgacttcatcagagagtagcatgcagatcccacctgtgaggctatggtctgccaaggagagttcagcgggctggatcagagagagcagagccatgctggc

SEQ ID NO: 165023 - DNA, 201 bp, Homo sapiens
tgttagcaggctatttcaatgattttctctgcggaagagtagggaaaggtgacattccaactgggaatattcgactctgcagatccctactcggagtttttcagccctgttttaagtgccgagctgggttttgcctcatgatccaattgttttattagcgaaatcatcatctgtttcattttgctttggtaatagtgcagt

SEQ ID NO: 165024 - DNA, 201 bp, Homo sapiens
ttcataatcagcagaagtcttttctctggaaggaacaaaggattaagttagggagacagtaatggtattgttagcaggctatttcaatgattttctctgcrgaagagtagggaaaggtgacattccaactgggaatattcgactctgcagatccctactcggagtttttcagccctgttttaagtgccgagctgggttttg

SEQ ID NO: 165025 - DNA, 201 bp, Homo sapiens
gccatcacgcctggtgaatggtgtcattttgatgtactgagccatctcagtttttccagcaaccttccctcacctttgtggtcagctagaaggtcagttascacatgggatgggaattcttgccaatgtccttcgtaaaagaagaacttctccttcactcacatgtcctgatacttcctcagcatttcattctagcctttc

SEQ ID NO: 165026 - DNA, 201 bp, Homo sapiens
ttcatagataccactgacactatttttcacctcccatgttatcagtttgtgtaatagtagcttgctggtaatgtagttacagtaacaagttcaaatgacatgtgtgttttttgagcaaacctggtgaacttttggtgcaaaactgatattgagagcaaataggccaaagcttgcttgagagaagtctcccaggccaccata

SEQ ID NO: 165027 - DNA, 201 bp, Homo sapiens
acccaggaggcggaagttgcagtgagctgagatcgcgccactgcactccagcctgggtgacagaatgagactccttctcaaaaaaaaaaaaaaaaaaaaaagagggaatgcactgtgtggactgtttagtaacctgctttttccatgtaatatattatgagcattttcttgtatccatatctatttttcaaaaagatgcta

SEQ ID NO: 165028 - DNA, 201 bp, Homo sapiens
ttgtttttctttcttttttttttttttttttgaggcaggccttaggtctggcacccaggctggagtgcagtgacgtgatcaaggctcactgcagcttccamctcctgggctcaagcaatcttcgtgtttcagcctcctgagtagctggaattacgggctcatgccaccacacttggctacttgtttaattttttgcagaca

SEQ ID NO: 165029 - DNA, 201 bp, Homo sapiens
aacccaggaggcggaagttgcagtgagctgagatcgcgccactgcactccagcctgggtgacagaatgagactccttctcaaaaaaaaaaaaaaaaaaaaaagagggaatgcactgtgtggactgtttagtaacctgctttttccatgtaatatattatgagcattttcttgtatccatatctatttttcaaaaagatgct

SEQ ID NO: 165030 - DNA, 201 bp, Homo sapiens
tactgctattgttagtttctaaaggcacttgtcatggtgtgactaatattagaagcagacacagccatgatgagcaatactctttttttgtttatttttgwtgttactgctgtaagccactttcttctccctctccgttaaaatgcaacttaattggtaaagtttagttgactagagatttcatttatttatttatttatt

SEQ ID NO: 165031 - DNA, 201 bp, Homo sapiens
agggaggccaggcatggtggctcatgcctgtaatcccagcactttgggaggtcgaagtgggtggatcctgaggtcaagagatcgagaccattctggccaayatggtgaaactccgtctctactaaaaatataaaaatgagctgggtgtggtggcacgtgcctgtggtccctgctactcgggagggtaaggcgggagaatca

SEQ ID NO: 165032 - DNA, 201 bp, Homo sapiens
tggtataccaatattcccactgtgccagcagagagcgggttatccttactagagagccagagagtcagaacggtttttttttgttttttttttttttttttgagatggagtttcacaattgttgcccaggctggagtgcacgatctcagctcaccgcagcctctgcctgccgggttgaagcaattctcctgcctcagcttc

SEQ ID NO: 165033 - DNA, 201 bp, Homo sapiens
tgaaggagaagcaggagttggtataccaatattcccactgtgccagcagagagcgggttatccttactagagagccagagagtcagaacggtttttttttkttttttttttttttttttgagatggagtttcacaattgttgcccaggctggagtgcacgatctcagctcaccgcagcctctgcctgccgggttgaagcaa

SEQ ID NO: 165034 - DNA, 201 bp, Homo sapiens
tcctcactgtcaactctagatctccctgctaacttacactgtgctcaaaaaacacacgcacgcacgcacgcatgcacgcacatacacacacacacacacacccataggctggccatggtgggaggccaaggtgggaggatcgcctgagcccaggagctcgaggctgcagtgggctatgattgcatcactgtactctagcct

SEQ ID NO: 165035 - DNA, 201 bp, Homo sapiens
gtcctcactgtcaactctagatctccctgctaacttacactgtgctcaaaaaacacacgcacgcacgcacgcatgcacgcacatacacacacacacacacacccataggctggccatggtgggaggccaaggtgggaggatcgcctgagcccaggagctcgaggctgcagtgggctatgattgcatcactgtactctagcc

SEQ ID NO: 165036 - DNA, 201 bp, Homo sapiens
tgtcctcactgtcaactctagatctccctgctaacttacactgtgctcaaaaaacacacgcacgcacgcacgcatgcacgcacatacacacacacacacacacccataggctggccatggtgggaggccaaggtgggaggatcgcctgagcccaggagctcgaggctgcagtgggctatgattgcatcactgtactctagc

SEQ ID NO: 165037 - DNA, 201 bp, Homo sapiens
ctgtcctcactgtcaactctagatctccctgctaacttacactgtgctcaaaaaacacacgcacgcacgcacgcatgcacgcacatacacacacacacacacacccataggctggccatggtgggaggccaaggtgggaggatcgcctgagcccaggagctcgaggctgcagtgggctatgattgcatcactgtactctag

SEQ ID NO: 165038 - DNA, 201 bp, Homo sapiens
agtagatattggaaatatgaacccaatatgttcttaacatctccatgtcgtaattctaatttaaaatcaaaatctcatcaaattacattttagattaaagsattgtacctatcgaaagaagagaatcgaaaatgcgaaagtccttcattttcagtgtggcctgagattgttgaaggatttgttctattgcatgctgataaa

SEQ ID NO: 165039 - DNA, 201 bp, Homo sapiens
aaactgtgtgattctgtctgcagttgagaactgtaagaaaaagatcaagattaacattattattattggtgttacctcatgtctgtacctttttggacacktgggtctgtttcccgagaaatcatttttcctcctccttgaaaatagtgaatttcaagtggttttaattttaactgcattatttgtttgctttatatagtt

SEQ ID NO: 165040 - DNA, 201 bp, Homo sapiens
ttcaacacagttctcttgtctctgttcatgatataacagtaaatccaagttgctttaagtagatattggaaatatgaacccaatatgttcttaacatctcyatgtcgtaattctaatttaaaatcaaaatctcatcaaattacattttagattaaaggattgtacctatcgaaagaagagaatcgaaaatgcgaaagtcct

SEQ ID NO: 165041 - DNA, 201 bp, Homo sapiens
ctgggacaaggacgatggacaaagttatgggggtgctaaaaacctcagtaatgaagataaatgatattctaatctaatattttaaaaaatcgaggctaggygtggtggctcatgcctgtgattccagcattttgggaggccaaggtggacggatcaccagagttcaggagtttgagaccagcctggccaaaatggtgaaat

SEQ ID NO: 165042 - DNA, 201 bp, Homo sapiens
ttttccaatgagagtactgatgacataaaaggttatacattgaataaccacccaaattagcagtgtttcatatttacactgttcaacacagttctcttgtstctgttcatgatataacagtaaatccaagttgctttaagtagatattggaaatatgaacccaatatgttcttaacatctccatgtcgtaattctaattta

SEQ ID NO: 165043 - DNA, 201 bp, Homo sapiens
agttatgggggtgctaaaaacctcagtaatgaagataaatgatattctaatctaatattttaaaaaatcgaggctaggtgtggtggctcatgcctgtgatyccagcattttgggaggccaaggtggacggatcaccagagttcaggagtttgagaccagcctggccaaaatggtgaaatgccatctctactaaaaacacaa

SEQ ID NO: 165044 - DNA, 201 bp, Homo sapiens
cggaggttacagtgaaccgagatcgtgtcactgcactccagcctaggcgacagagcgagaccctgtctcagaaacagaaaataaaacaaacaaaaaaatastattccatagctgactattttctgaaatgattttgttacttttctaatgagaaaaaaatagatctcgtgtgtggagggaattgaagatgtaatttcagac

SEQ ID NO: 165045 - DNA, 201 bp, Homo sapiens
cagcctgggcaacacagcgtgactccatctcaaaacaaacaaacaaaacaaaacaaaaaaggtttaagaaatgttctagtaccttgaaaccaaaataggtrtcagatacttggctgttttgttttttcttcttagccattttgacctgtgagattttatgtgatgaaaacataagaatgtggtattacaccctgtgatttg

SEQ ID NO: 165046 - DNA, 201 bp, Homo sapiens
ggtatcagatacttggctgttttgttttttcttcttagccattttgacctgtgagattttatgtgatgaaaacataagaatgtggtattacaccctgtgakttgaattttccatactccattccattctatatgtcagatgcatcttcctaaaacacacctttgtcacatcactcctctgctcaaaaacattcagtggctc

SEQ ID NO: 165047 - DNA, 201 bp, Homo sapiens
aaaagaaatctgttagaaatgcatattttctgttttcaccccagaaatcctgaataagaaacactaaaggggagtgggcccagctatttgtgtttttggargaactcctgttttaatttgttttttcggaagtcctccagtttgagaaccaatgataaggacatttttccgggaatccagttgttttaggaaaggcccagt

SEQ ID NO: 165048 - DNA, 201 bp, Homo sapiens
gtctcccgtctgcagaagcattggctgacatggaagattttttttttttttaatacttttctttttgccggcatctgcgtagaatttttttttttttttttggtagtttcttaatggtctttagcaaaggaagtaagtgacactgatcggtgaaggcagacagtaagatttataatgtatttgtgctagctgattgccaac

SEQ ID NO: 165049 - DNA, 201 bp, Homo sapiens
agatcttgcttttcagtctactggtatctccacttctctctgcagcgtgatgtctagtcagagtttccattctgtttttatgaccctgggaggactgggasagatctgtgaggtcatcttgtccaccctcagccagggcaggagtattccctaatggtagagtcaagtgtttggtttggtcttgtttctaatgactcaagt

SEQ ID NO: 165050 - DNA, 201 bp, Homo sapiens
gtatgttggtacgttattgaaggtgatgctagctgctataacaaataagcacgcctgtgcacagttgctcaaagatagtagaagtttatttcttgtttatrtaagatccataatgactcttgccaattagcaggctgctctcttccaagtggtaacccagggactcaagctcttttcatcttgtggctcagccgtctgaca

SEQ ID NO: 165051 - DNA, 201 bp, Homo sapiens
cccagcctgggggagggtttgttaaagaactgtctgttttatcacatgaccacaagttaaaatgttgggcaatgtccctgaatgataccttttcattagtractcacatggacccataatctctgaatttaacatgcttttcaggaatgtgttcatattttccacctataaaacctgttttagtaatttactcccttgtaa

SEQ ID NO: 165052 - DNA, 201 bp, Homo sapiens
cattgaactgaatctccaccttgggcttgagactctgcaaagtgcattaaatgggaaggaaaccaaagggcctgctgccctgcccccgccatagcccaagkctgtggccatggctggggaattggcctgtcagttcaatcaggcagcccctctgactggtgtttttcactaagctggccccatggatggccctggtcatgt

SEQ ID NO: 165053 - DNA, 201 bp, Homo sapiens
gatctcatgagatttattcactatcaagggaacagcacaggcagatcccatggctttgactcagttacctcccactgggtccctaccatgacacatgggarttctgggaactacagttcaagatgagatttgggtggggacacagacaaattgtatcatagaatcataaaaattgctatttctaaggcagatgaataatcc

SEQ ID NO: 165054 - DNA, 201 bp, Homo sapiens
agccatactcagagtggccctaggatggctcctcagatagctgctggcagaaacctgcactcagtacatctatacatggtgtaatgattgactcaagatamttagcatagccatcatctcaaacctttattatttgtgatgagaagattcaaaacccgctttttgaactgttctgaaatatgcaataccttgttgttaact

SEQ ID NO: 165055 - DNA, 201 bp, Homo sapiens
tcctcctttttcctgaatatggaaccaaagcctgtgtttttcttgctcacatgtgagtcttctccttgcttcaaccctccccgctgacagccacaagactctgcctccctgcagcctgtggaacataatattcgttgggatcatacattgaccaaagatccgccatgtctttgcaactaacatactcactcatgacttcac

SEQ ID NO: 165056 - DNA, 201 bp, Homo sapiens
tccgctcatattcttgcatttgctgcagcaaaacctgacctctctttgtgttacctgagtcttgacgaagaagactgaggaaaggcccccccccccccccrccaaattgtcccgttgtctcttggctggtcttgccagctggcacacagcttcctctgaccaccctgctaggtacaaatcccacatgaaaagtctcaatca

SEQ ID NO: 165057 - DNA, 201 bp, Homo sapiens
cttctaaggtgccgattctcagtgatagaatcttgagttgatacctccttgggtggcatggagcctatacctttgtagatcttgggaaacaacttctaaartaatcatagttgtatgtaatcgtagttacaacaatagttattttaggcacataacccaaaggttttcttacaaggaatctatgaaccttaagagtgaggg

SEQ ID NO: 165058 - DNA, 201 bp, Homo sapiens
atccgctcatattcttgcatttgctgcagcaaaacctgacctctctttgtgttacctgagtcttgacgaagaagactgaggaaaggcccccccccccccccaccaaattgtcccgttgtctcttggctggtcttgccagctggcacacagcttcctctgaccaccctgctaggtacaaatcccacatgaaaagtctcaatc

SEQ ID NO: 165059 - DNA, 201 bp, Homo sapiens
ttctaaggtgccgattctcagtgatagaatcttgagttgatacctccttgggtggcatggagcctatacctttgtagatcttgggaaacaacttctaaagkaatcatagttgtatgtaatcgtagttacaacaatagttattttaggcacataacccaaaggttttcttacaaggaatctatgaaccttaagagtgagggc

SEQ ID NO: 165060 - DNA, 201 bp, Homo sapiens
ttgatacctccttgggtggcatggagcctatacctttgtagatcttgggaaacaacttctaaagtaatcatagttgtatgtaatcgtagttacaacaatarttattttaggcacataacccaaaggttttcttacaaggaatctatgaaccttaagagtgagggcttctgttaagagtaagggcttccctggagtggacat

SEQ ID NO: 165061 - DNA, 201 bp, Homo sapiens
agctggtgacaaaactcaaagaagatgtaactagagaaaaggtactcagtgcagcctctgtgagctaccaccactgcctctagttttccagaaaaccaccmctgaccactctctgtacagatgcgctcaagcgaccataaccaccagtgttcctaacaatgcgcctattgacttcttatttcaatagatatccagatttat

SEQ ID NO: 165062 - DNA, 201 bp, Homo sapiens
ccgtgaagtctagatctccctgctaacttacactgtgctcaaaacacacacacacacacacacacacacacacacacacacacacactggctgtcctcacygtcaactctagatctccctgctaacttacactgtgctcaaaaaacacacgcacgcacgcacgcatgcacgcacatacacacacacacacacacccatagg

SEQ ID NO: 165063 - DNA, 201 bp, Homo sapiens
ggactcgggtgcatacatggtttccaaacgcctttcctccagccctcccgactagtgtcttaaatctcaagctggcctctctggctccgctgtttttttttttttttttttttaatttaatttaactttaaattccgggatacatgtgcaggatgtgcaggtttgttacataagtaaacctgtgccatggtgacttgctgc

SEQ ID NO: 165064 - DNA, 201 bp, Homo sapiens
ttgaccgataagtgtaccagatttccttacctgtcccagggcaagatagcaagagtttcttgatgcatttaaaaaatgcatttagtgttggcaaaaggctkgcaatttattattaagtggaataagcagtttaaaaacagtatgtacagggtggttttctggctatataaacacacaggcatagaaaatagatatacataa

SEQ ID NO: 165065 - DNA, 201 bp, Homo sapiens
gcgtctcctcctttgccactcagccccagaggtgcttctgcttccctgcaggcttgccctggagcctggcgctagggccctggggctcccttgctcctgcktgccccctgcgcctgccttcctgctgcctggcctttctcccatctgctttcttcctgagtggcccctggccaggggactcgggtgcatacatggtttcca

SEQ ID NO: 165066 - DNA, 201 bp, Homo sapiens
tgacctcgtgatcctcccgcctcggcctctcaaagtgctgggattacaggcgtgagctaccgctcccggcctttttttttttttttttttttttttttttttaaagacagggtctcgctccgtcgcccaaactggagtgccgtggtgcgatctcggctcactgcaacctctgcatgccgagttcaagcgattctcgtgtct

SEQ ID NO: 165067 - DNA, 201 bp, Homo sapiens
ctgacctcgtgatcctcccgcctcggcctctcaaagtgctgggattacaggcgtgagctaccgctcccggcctttttttttttttttttttttttttttttttaaagacagggtctcgctccgtcgcccaaactggagtgccgtggtgcgatctcggctcactgcaacctctgcatgccgagttcaagcgattctcgtgtc

SEQ ID NO: 165068 - DNA, 201 bp, Homo sapiens
cctgacctcgtgatcctcccgcctcggcctctcaaagtgctgggattacaggcgtgagctaccgctcccggcctttttttttttttttttttttttttttttttaaagacagggtctcgctccgtcgcccaaactggagtgccgtggtgcgatctcggctcactgcaacctctgcatgccgagttcaagcgattctcgtgt

SEQ ID NO: 165069 - DNA, 201 bp, Homo sapiens
tcctgacctcgtgatcctcccgcctcggcctctcaaagtgctgggattacaggcgtgagctaccgctcccggcctttttttttttttttttttttttttttttttaaagacagggtctcgctccgtcgcccaaactggagtgccgtggtgcgatctcggctcactgcaacctctgcatgccgagttcaagcgattctcgtg

SEQ ID NO: 165070 - DNA, 201 bp, Homo sapiens
tgtgtttttagtagagacggggtttcaccgtgttagccaggatggtctcgatctcctgacctcgtgatcctcccgcctcggcctctcaaagtgctgggatyacaggcgtgagctaccgctcccggcctttttttttttttttttttttttttttttttaaagacagggtctcgctccgtcgcccaaactggagtgccgtgg

SEQ ID NO: 165071 - DNA, 201 bp, Homo sapiens
tttgagaaacatggatgtaaatctgattttcagcatctgggaaactttttttgtaagagcctttttctgggccccacttccagagggtttttctttttttkttttcttttgagacggagtcttgctctgtcgcccaggctggagtgcagcggcgcgatctcggctcactgcaacctccgcctcccgggttcacgccattct

SEQ ID NO: 165072 - DNA, 201 bp, Homo sapiens
agctgccgttgagtgtgtgcatgtacaactgcttgaaaacagcttgtgagttcactattaggtccatgaaatttttctccttggcaggttttcactattartttgcttgacaaaggatagatacattttccatgtgtggaggtaaaagcagtgcagtgagctaaaaagttagcaaaggtgaagtggtcctaatctgcggcc

SEQ ID NO: 165073 - DNA, 201 bp, Homo sapiens
cctgggaaatatagcaagatcccaaccctattaaaaaattaaaaatgaaaataaaattttaaagaaaggtatttctccccttcacggtaatttggagccartacttcttgcaccattcatttgtccacagcatgggacaaaggataatgccttaatgcctgctgcaaatagaacagtggtgcttagcagctttagataatg

SEQ ID NO: 165074 - DNA, 201 bp, Homo sapiens
tctaatattttaaaaaatcgaggctaggtgtggtggctcatgcctgtgattccagcattttgggaggccaaggtggacggatcaccagagttcaggagttygagaccagcctggccaaaatggtgaaatgccatctctactaaaaacacaaaaattagctgggtgtgtggtagtgtgtgcctgtagtcccagctactctgg

SEQ ID NO: 165075 - DNA, 201 bp, Homo sapiens
cactcagtgatgggagtcttccttatgaagctgtcccagctccatctctcaggactgaaatgtgggtaagaccatcacatttttcatcccccgccccccgsccccaacattgactgggcagatattcatacaatggcgattgttttgtctgcctggatggctttaacataataccatagactgggcaggttaaacagcaga

SEQ ID NO: 165076 - DNA, 201 bp, Homo sapiens
cagattttaatatctttcctcccacacttgctttgactccctcctttagtaattagataattatgtataataagcacattaattatgtgcaacagctgccrttgagtgtgtgcatgtacaactgcttgaaaacagcttgtgagttcactattaggtccatgaaatttttctccttggcaggttttcactattaatttgctt

SEQ ID NO: 165077 - DNA, 201 bp, Homo sapiens
atacttgaaggtagccagtggacacgtggggccatttcaagctaaattaaattttaaataaaattaaagattcaatctctcactcacacattacaagtgckaaacatccggacacatctagtggctcccactgtgggtagcacatacagaaagaacgtttccgtgacagtagagtgtcccattgcacagtttgggtatgga

SEQ ID NO: 165078 - DNA, 201 bp, Homo sapiens
cttgatgtcggagtgttctctagacctcacacccagtccctattcttaggttttatttctcaaaccaggttttgcctgagaaattacagcaaatgattcakagcacaatgatgttgctcatttttgataagtagttgaaagctgatggtgccctccatttcaaagcaacagaagaaacgctggtggtcatggagaaagagt

SEQ ID NO: 165079 - DNA, 201 bp, Homo sapiens
ttagccaggtgtggtggcatgcatctgcagtcctggctactcagaaggctgaggtgggaggattgcgtgagcccaggagttcaagaccagcctgaacgacrtaaaaagacctatctctacaaaaattagctgggcatggtgtcacgtgcctgtagtcctagctactcgggaggctgaggtgggaggatcgcttgagccccg

SEQ ID NO: 165080 - DNA, 201 bp, Homo sapiens
taatgaaaagtgagtgaatgggctgggtgtggtgggtcacacctgtaatcctggctactcaggaggctgagacaggaggatcgcttgagcccaggaggtcraggctgcagtagggtatgagcgggccactgcacttcagcctgggcaacagagcgagaccttctgtctaaaaatatttatctatattgagtgaataaatga

SEQ ID NO: 165081 - DNA, 201 bp, Homo sapiens
atttggaaacacggcacaagcaaaggcttgaaacgtgcttttatgttggtgcttgcccacttgctgtgctacgaacccttttacttctgggtgcgaacaarcccaggctagccttctgggcgatgagagacacaagaccatgtttccatattgccccagccaagagccaacctacagacgcaactgccttgctgacagcag

SEQ ID NO: 165082 - DNA, 201 bp, Homo sapiens
cacaggtcaaacatcctgagcctgttctgtggtcagttactcattagcagcctctgctctaggaggaatagttatgggtcctttcagacatgcaacccccmaaactccatgttgtttacagtgtgggacacctgactttcaccttttatgatacctgcctggggcatgcatgtggtgactttttccatctctggtctctat

SEQ ID NO: 165083 - DNA, 201 bp, Homo sapiens
ttgaccaatgaggcatttggaaacacggcacaagcaaaggcttgaaacgtgcttttatgttggtgcttgcccacttgctgtgctacgaacccttttacttytgggtgcgaacaagcccaggctagccttctgggcgatgagagacacaagaccatgtttccatattgccccagccaagagccaacctacagacgcaactgc

SEQ ID NO: 165084 - DNA, 201 bp, Homo sapiens
ggtcaggcagctgtttgacaggattcttgcaaatgtttttggtttctctgtctactcattacgtacactctgccagaggttgaaaactcaatgttgagatyacatacatcctgaaaacactgtttaaataaaattttggcctgcatcctgtttttgaaaacttgcaatggcttgccaacgttttcaagttgagaagtttca

SEQ ID NO: 165085 - DNA, 201 bp, Homo sapiens
ggagtaggaggctgcagtaagctgagatcatgccactgcactccagcctgggttaacagagcaagactctgtctcaaaaaaaaaaaaaaaaaaaaaaaaawtcaaaattgatgcaaaaaatatgataacatttcaaaatttaaatcaagacaaattcaatattatagcaaaggttcaagtaatgaacatgaatttgtaatg

SEQ ID NO: 165086 - DNA, 201 bp, Homo sapiens
tagtgatctgattcattaatatcccttgttattaagaactgtctgtatttgtgtcctggttggcagatattaagtccacagataccaataattaatatctwtggttgattgtaaaaatggccaccaattcttccctgtcccctgcatatgtacatccttgcactgtgaaattgtagatctcgccctccaaaggtgaagttc

SEQ ID NO: 165087 - DNA, 201 bp, Homo sapiens
ttaaaaaaaataaattaaatttttaaaaacatgactttctggccaggcgcagtggctcatgcctataaccctgcacttagagagggcaagacagaaggatygcttgaggccaggagtttgagaccagcctgggcaacatagcgagaccttgtctgtactaaaaaattattaaaagaaaatatatatatttttttaaatcat

SEQ ID NO: 165088 - DNA, 201 bp, Homo sapiens
cagctactctggatgctgaggcacgagaattgcttgaacctgggagtaggaggctgcagtaagctgagatcatgccactgcactccagcctgggttaacasagcaagactctgtctcaaaaaaaaaaaaaaaaaaaaaaaaaatcaaaattgatgcaaaaaatatgataacatttcaaaatttaaatcaagacaaattcaa

SEQ ID NO: 165089 - DNA, 201 bp, Homo sapiens
gtttcttgtagcaggtcatgaagaggaatgaaatactataatcacagagcttgcagaagctgcctggaggaccagttagtctattttttgtacatgaggayactgaggctcagagaaagtgaggtcattgagtcacttgagttcttgttgagtgttctttcctgctgaggtgtcctaggtgcctcttaatgcctttaacat

SEQ ID NO: 165090 - DNA, 201 bp, Homo sapiens
gtttgtgccaaaccaggtgtcattgccctccccaccctaccttgctcccctggagtgtatcctgattcttttgaggatcacttgatcctgattttttttttatgtgtatagatgggatttcattatattgcccagactggtcttaaactcctggcctcaagcaatccagccacctcggcctcccaaagtgctgggattata

SEQ ID NO: 165091 - DNA, 201 bp, Homo sapiens
cctccgagttccactggctgcattctcatcagaacccagctaaaactcacgtctctcaaattccctaaataataaatccaaagttattgaagatattgggwtactaaaagttggcagtgagactggccccactcatttctttgtaacccctgtccctctttttattattgaagcttgggatgcacttggtaaggctaggca

SEQ ID NO: 165092 - DNA, 201 bp, Homo sapiens
aggcaaacatgttgacacaaacgagagaattttaggttctctttgtagctgtggctgggctgggacaaggacgatggacaaagttatgggggtgctaaaaacctcagtaatgaagataaatgatattctaatctaatattttaaaaaatcgaggctaggtgtggtggctcatgcctgtgattccagcattttgggaggcca

SEQ ID NO: 165093 - DNA, 201 bp, Homo sapiens
attgacagacccatgggtgttaagatccttcatggctactggggagaaatgacaggccttttgaaatcgtatcagtggttttccctgggatcactggaaakaatacccctgtttgacaagatatgacacatgctctgttttaattctgcatttgactaacagaaaagattggtgaagatcagactctgctttaaagttatt

SEQ ID NO: 165094 - DNA, 201 bp, Homo sapiens
aagcaattgtggtttttgccattaaaagtaatagtaataataatactcggttggtgcaaaagtaaatgtgttttttgctattaaaagtaatgcggttttasttctgcagtttttttgccatttgccaattacttttgcagtttttgccagtacttaaaagtaatggcaaaaactgcaaaagtaattggcaaatggcaattg

SEQ ID NO: 165095 - DNA, 201 bp, Homo sapiens
gttggaatgttgcagggaggctgggctaaggtgttctgttcctgtctctggttcaaaggaaaggaatagcctagacctaaaggattctgtctggtagctgkttgctcttcgcgcctgtgctttgaatggtgaataccctcggcgggaggcaggcacctgatgccactgcccccgccccacctgcccccgccccgtttctca

SEQ ID NO: 165096 - DNA, 201 bp, Homo sapiens
gtgcttgctttgggagttcttgttaaccctgacaattcttgtcaaatatcttactcctgggctgtgctggggatggcagcagagtggggtggttggatggraaggcgggaaagagctagcttggagatgatacgcttttccatccttgaataacttgggaaaaagtcaggagtgtggaatgaagaattggaatataaaggc

SEQ ID NO: 165097 - DNA, 201 bp, Homo sapiens
ctgtccttactgtttcccttgggcacgctgttcaccccttaggacatactacagtaaccttttcccaccaccgtgggaggactgtgattttgtaaatgtcytctgatctctcctctttgcaggcgcagtgacatttatgcacactggctttgaggctcattgatcttttgttttatttgcctttgctgaggcaggggcagg

SEQ ID NO: 165098 - DNA, 201 bp, Homo sapiens
cattcttctgcctagagtatgccttttccttcaccaaaccaagtggctctttcggaagacttgcctgaatcctagaccccttctctctacaaccttcagtstgagttgggtaccttgcatcctcctttgttcccatactaacccctacaaccatggtcattttgtggttatctgtttaattctctgctggctattccaggc

SEQ ID NO: 165099 - DNA, 201 bp, Homo sapiens
ggtggaattgttgtgtgagcctgtagagtccgtgttcttacccactgcatgatgtctgatcatcgtcaattttctttccatttggacagatgaatggtaayacttccctactaggtagagcaatgattccagaagtttataataattggaaagtgtattagtcgattctcacactgctataaagacattcctgagactggg

SEQ ID NO: 165100 - DNA, 201 bp, Homo sapiens
tgatgctagctgctataacaaataagcacgcctgtgcacagttgctcaaagatagtagaagtttatttcttgtttatgtaagatccataatgactcttgcyaattagcaggctgctctcttccaagtggtaacccagggactcaagctcttttcatcttgtggctcagccgtctgacacatgtggcttccagcactgccct

SEQ ID NO: 165101 - DNA, 201 bp, Homo sapiens
ctgtaaacaaaaacaacacagccatctagctgcaagacgtagctaattgctctgcagaacagggttggccagcctggccttgatgtcggagtgttctctaracctcacacccagtccctattcttaggttttatttctcaaaccaggttttgcctgagaaattacagcaaatgattcagagcacaatgatgttgctcattt

SEQ ID NO: 165102 - DNA, 201 bp, Homo sapiens
ggtgaaagcatgcaagctaggagttaagatctttaactcagggaagaccctgtctatggaagtgctgagctcttcagtgtcatcacagaaaagcatgagcscctccctggtacggagtcatcacatcccatagctgagcgacgtcggagctccacgatggggaggtgacacatagtcagttaattacataaagagaacttg

SEQ ID NO: 165103 - DNA, 201 bp, Homo sapiens
tatatgtgtatacatacatagaagtatatatataaataccagtactagtgtctgctaataggtggcgccactttttatctgtgtgtgttgggggtggaatkagcatgtagaggttggcaaaggggacaggagactgtgggatgattagtatattcttatttggcctgggagggaaaaaaaatctttcatttccaacaatat

SEQ ID NO: 165104 - DNA, 201 bp, Homo sapiens
cttacaagttagattcacactccaggaatgtatctgttcccacatcccctgatgctgagcataccagagttaagggaggcaagcaaggcccctaacctccyaggttcatggaggtacccattctgcacttgttgaccttgagcttgaggactccataaatgtctgcccttggcattgcacgtgcctccctctgggctgacc

SEQ ID NO: 165105 - DNA, 201 bp, Homo sapiens
ttttcgttgcttacaagttagattcacactccaggaatgtatctgttcccacatcccctgatgctgagcataccagagttaagggaggcaagcaaggcccytaacctcccaggttcatggaggtacccattctgcacttgttgaccttgagcttgaggactccataaatgtctgcccttggcattgcacgtgcctccctct

SEQ ID NO: 165106 - DNA, 201 bp, Homo sapiens
gcggaggttgcagtgagctgagatcgtgccactgccctccagtctgggtgacagagtgaaacccatcccccaaaaaaataaataaataaaaattaaaaaayctaacactggtacgagaagaaattatgctctaaatccttctttgagcagtggcttacagacctaaatttatcaaaggtggtggcagtaatagtaataatt

SEQ ID NO: 165107 - DNA, 201 bp, Homo sapiens
ataaattaattttttagcattaatattagggaagataatctgacatttaaaaatacatgtctatatgtgtatacatacatagaagtatatatataaatacmagtactagtgtctgctaataggtggcgccactttttatctgtgtgtgttgggggtggaattagcatgtagaggttggcaaaggggacaggagactgtggg

SEQ ID NO: 165108 - DNA, 201 bp, Homo sapiens
tacgttgatctgtacagcaaaccaccatggcacacatttacctatgtaacaaacctacacatcctgcacattgtaccctggaacttaaaagttggtgaaaraaagaaggggccgggcatggtggctcacgcctgtaatcctaacattttgggaggtcgaggcaggcagattgcctgagctcaggagttgaataccagcctg

SEQ ID NO: 165109 - DNA, 201 bp, Homo sapiens
cggtccccatccacttgacccaccatacctcaagccacttctggctccatgctctttctttccttagggttttgaaacatgttcttcagcctagaatactsctcctccactcttaatttctacccatcctgcaaaactcagtctgaacagcacacgtcaaggaagcagttttggtctctcagattatatgaagctctccaa

SEQ ID NO: 165110 - DNA, 201 bp, Homo sapiens
gtgaggtgagatcagtagaagagtacaataaaacaggaattttcagagcatgtaatttcttcttggaagtgaaaggcactggagaatggtgcagaataagyactagccttagagagaggatgccctgccccagtctctttctctgagtagcagagagctggctgtgctaggaaactcttcgcctctctaacaccacgttta

SEQ ID NO: 165111 - DNA, 201 bp, Homo sapiens
actggctttttgagcctctagagtggcaggcgaactctgattttgaggaaaaaggatagggtaatggtgttgacacaggcactgttgaatacgtatgtacrtattttaatagttttctcattaatcaaatggaaatgctatcgattttataggatcgttgtgagaagaagtgagaattgaaatgaaaggcatctagtcttc

SEQ ID NO: 165112 - DNA, 201 bp, Homo sapiens
ttctatggattttcactaaaatagaatcatcgccttggtgatggatagaaaaagtaaagcaatacatcctgataaatgctgtgccttcctccttcgtctcyctggcggtgaccttgtgcaatccataagagggcaaggctgagagccccggccaccgccgccgtgtgtcagaacttggaaatttaagtagctttgaaaccc

SEQ ID NO: 165113 - DNA, 201 bp, Homo sapiens
aggctcagttaatgataaattgttatcaggagacccagcagtttctgctttttctaccctcctctttgacctctatttaaactaataggttactgggtttsaacatgccatgcagtgggaagaggcgggaaccccactgagctgtcctctaagtgaatcatgcccactatttggttgtgaggctgtggactttacttttca

SEQ ID NO: 165114 - DNA, 201 bp, Homo sapiens
gtattaatagtagggagacagtaagcaagcaaggctcagttaatgataaattgttatcaggagacccagcagtttctgctttttctaccctcctctttgasctctatttaaactaataggttactgggtttcaacatgccatgcagtgggaagaggcgggaaccccactgagctgtcctctaagtgaatcatgcccactat

SEQ ID NO: 165115 - DNA, 201 bp, Homo sapiens
tctcgatctcctgacctcatgatctgtcagcctcagcctcctaaagtgctgggattacaggcgtgagccactgcgcccggccggggatcttgtattaatartagggagacagtaagcaagcaaggctcagttaatgataaattgttatcaggagacccagcagtttctgctttttctaccctcctctttgacctctattta

SEQ ID NO: 165116 - DNA, 201 bp, Homo sapiens
aacagagcctgcaagcatttctcctgcagaacccccagaagggactcagcctgcagacactcagatttcaaacctctggcttcctgaactgtgaaagaatraattgctgttgggccaggtacagtggctcatgcctgtaatcccagcactttgggaggctgaggcaggtggatcacttcaacccaggagttcgagaccagc

SEQ ID NO: 165117 - DNA, 201 bp, Homo sapiens
gaagctttacccctgagaagagcaggcatcagatgggctttggaatctacatgggtgtttgtaggtagaccatcctggaagttgagtgatggggaataaarggaagaaagtgcattctgaacagagggaatagcaggtacagcagctcagacatgggcaccttcagagcgtgtctgagtcttcctgatgagacacgtggtg

SEQ ID NO: 165118 - DNA, 201 bp, Homo sapiens
gccaaactgtgtgattctgtctgcagttgagaactgtaagaaaaagatcaagattaacattattattattggtgttacctcatgtctgtacctttttggasacgtgggtctgtttcccgagaaatcatttttcctcctccttgaaaatagtgaatttcaagtggttttaattttaactgcattatttgtttgctttatata

SEQ ID NO: 165119 - DNA, 201 bp, Homo sapiens
ttaagattaaattattgatactgaaatattaggttgtgcaaaagcaattgtggtttttgccattaaaagtaatagtaataataatactcggttggtgcaawagtaaatgtgttttttgctattaaaagtaatgcggttttacttctgcagtttttttgccatttgccaattacttttgcagtttttgccagtacttaaaag

SEQ ID NO: 165120 - DNA, 201 bp, Homo sapiens
gctcagagcccccacccccacccccctttaagtaacagtgacgcaaacgacctttatttagcagaaggtagctctgcgaatccgctgaatgtccgattgckatctcgctggaaagactgctgcttcagcaaggtttctttgctggtctgtggcaaggtccctgcttcattttcaaggtgtcctcacttggtgcctttgaag

SEQ ID NO: 165121 - DNA, 201 bp, Homo sapiens
cattttccccagacctaacctcgatttgtgctccaggtctgagcagaaatgttattccctccagaaagccttccctggatgttgagggatgaagttgtagscccctcccgaatgcgtcctcagaactcgctggttctcgtcctcgccctcagcatacttgctcattgtttgtttccatctctatcatctctgtgagccctt

SEQ ID NO: 165122 - DNA, 201 bp, Homo sapiens
gacagcagggggtgaggataagaaggaggaagctttacccctgagaagagcaggcatcagatgggctttggaatctacatgggtgtttgtaggtagaccaycctggaagttgagtgatggggaataaagggaagaaagtgcattctgaacagagggaatagcaggtacagcagctcagacatgggcaccttcagagcgtgt

SEQ ID NO: 165123 - DNA, 201 bp, Homo sapiens
ggttcatctgtagaatatggacagccctctacaaattgggaacaagggccaggacacgaaatatagtgacagcctctggcctgggagtctagacagtggtsaaaggcaggattcatggagttttccaagataagattcaagacccaaactatgaatgaaagccaggctgaggctggcaccaagtagaggcctccaataatg

SEQ ID NO: 165124 - DNA, 201 bp, Homo sapiens
gcatttggctgcacagcaagttctaagttactcaccaggtttcagaggagagatgggaatttgatgatcttataagaaacctgtactctttggccagacayggtggctcatgcctgtcattccagcactttgggagaccaaggcgggcagatcacctgaggtcatgagttcgagaccagcctgggcaacatgctgaaaccc

SEQ ID NO: 165125 - DNA, 201 bp, Homo sapiens
aaggattattcctccccttttatcaagagccgtaagtccttggaaaatgcaaagagggggaaaaagaagaaaaacagcaacgagtttattggagagttaamacttaaatactccagtacattgagtgtgacatgcctgtgtaggagactgtctgtcccccaaataattgacaatttctctccatctaacaagaaaatatat

SEQ ID NO: 165126 - DNA, 201 bp, Homo sapiens
agcctcccaaagtgctgggattacaggcgtgagccaccgtgcccagccttcttgttttaatcttttagacaactggacacaggtttgtctttgaaattgtmctggtttttcttgatgttttagtgctcctggatgtccaatgtcattcttgggctagttgaaggaaagttttggctacccagttgttagctgctgaagttt

SEQ ID NO: 165127 - DNA, 201 bp, Homo sapiens
atctgtaaagtaaaaataaccgtcgtcgtcatttctcaagcgtgacgatactgttacacgtttactgcatattctgcataccaagcacatatccgtcacaygcagtgtggccaacttccgagaggccggcattcagccaaacagcctgaagaaccaggagaaatgcctgagtttccaaatggcttatggtaagttgttgct

SEQ ID NO: 165128 - DNA, 201 bp, Homo sapiens
cagagtcttgctctgttgtctaggctggagtgcagtggcaccatctcggctcaccacgagctctgcgtcgtgggttcatgccattctcctgcctcagcctscggagtagctgggactacaggcactcaccaccatgcctggctaattttttgtattttttagtaaagatggggtttcaccatgttagccaggatggtctcg

SEQ ID NO: 165129 - DNA, 201 bp, Homo sapiens
atttccattttacttctatttggtagtctcagaacttggcttttattggccagtatattcaatgattcacttgcacctttaaccttgtgttgttctaatcyttttttttttttttttttttttttttttttttttgagacagagtcttgctctgttgtctaggctggagtgcagtggcaccatctcggctcaccacgagct

SEQ ID NO: 165130 - DNA, 201 bp, Homo sapiens
atccaactcaaaggctgttgaaaggctccttctgtttaaggtaaagcctgtggcagcctttaacttcctttctcttctcctgctgccaccttggtccacartttatctttgaaaatgctgggttttaatgggcagggtatagtgcagaaaccagatggttttaactcacacctgtgaaaatgctggggatctgcgaaacat

SEQ ID NO: 165131 - DNA, 201 bp, Homo sapiens
gtcactacgtattgcgtatatttggttggaattttatttttgagcaattcatttacccagattgtgtttctggagattaaagcatctcactgtatttttakttttttctacattgcaatttcaaaataatccaactcaaaggctgttgaaaggctccttctgtttaaggtaaagcctgtggcagcctttaacttcctttct

SEQ ID NO: 165132 - DNA, 201 bp, Homo sapiens
tatggatttcttcctcagtttatttcttctttgattttttcatgtccaggtcactacgtattgcgtatatttggttggaattttatttttgagcaattcayttacccagattgtgtttctggagattaaagcatctcactgtatttttatttttttctacattgcaatttcaaaataatccaactcaaaggctgttgaaag

SEQ ID NO: 165133 - DNA, 201 bp, Homo sapiens
tctctgtgagccctttgaggatggatgtgtgtccatcttgttaacagttggctccccagtaaccagtacagtgccagatacagagtagtaaccctacattstagcgtaggcaaatattctagtatttgccaaaactagaggatgaatgagtgatgggtaagagagttctcagaaaaatggatataaacaatattgtaaatc

SEQ ID NO: 165134 - DNA, 201 bp, Homo sapiens
agaagtttctgtatcaactggaaaaaaccatggtgcttgggacattcaaggccgaaacttggtccctggatgggagaagatagctgtatcattggcagagstgccttggtcatgtaccctctccagactagacactagatagtgggtagggtgggacagttttatgtcctctgccaccttatctgggactcttgtcccctg

SEQ ID NO: 165135 - DNA, 201 bp, Homo sapiens
tagtcagttaattacataaagagaacttgagcaaactcttactctgccatatgctgtgcagatccctctgaaaagctttacagatgttcttttttttttttaatccctccccctatctttctttctttgcacccacgatgctctgcacttcaagctaaatataatgtatctgattttacagcatacatactaatcaggttt

SEQ ID NO: 165136 - DNA, 201 bp, Homo sapiens
aagtaacagaaccataggccttatctttatctgagttcctgtagcatgtgcactactcctgattaaccaagtgaaagagaaaatgagactaatctctaacstcagcttccttttctgccaaatggaagatcatctctaattaataatgagttagaatacctaggacagtatttggcacacagttgatgaggatggtgtacc

SEQ ID NO: 165137 - DNA, 201 bp, Homo sapiens
gcaccactgctcgcattcccatgttggagttttccctttggggttcttatgccattttaaagactctgaaaacaggaagactttttctcttgggtattttwttttttttttcctctgcaagggatggggtcataagacattggtgaggttaggccttcctttgtctcccaggagcacacttgatagcaatgtagggtgaat

SEQ ID NO: 165138 - DNA, 201 bp, Homo sapiens
cttacatttaaatacaggcctttcccatttcacagtgtttctagctcccctttccaatacatctctctctctctttctctctctctctctctctctctcamacacacacacacacacacacacacacagccaaatcagacaccaacataaactgtagagttaacattctttttccaccctcacactttttttagctccgat

SEQ ID NO: 165139 - DNA, 201 bp, Homo sapiens
gcacatatgtgtgtgtgcaaattgtacttgcagtggctgcctgggaaatgaaatttctgcaccttgccagagcatgttttccctctaaagagaggcagctsataattagtaatgctaatgtcggggtgagatgcaatagataatctaacaccagcaatgatgcccagagcatttatctttgatgctgggaatgcgttcatt

SEQ ID NO: 165140 - DNA, 201 bp, Homo sapiens
atcgcagacacggaaaaaaggattattcctccccttttatcaagagccgtaagtccttggaaaatgcaaagagggggaaaaagaagaaaaacagcaacgartttattggagagttaacacttaaatactccagtacattgagtgtgacatgcctgtgtaggagactgtctgtcccccaaataattgacaatttctctccat

SEQ ID NO: 165141 - DNA, 201 bp, Homo sapiens
ccgattctcttccacgtgtggacagattggcacatatgtgtgtgtgcaaattgtacttgcagtggctgcctgggaaatgaaatttctgcaccttgccagarcatgttttccctctaaagagaggcagctgataattagtaatgctaatgtcggggtgagatgcaatagataatctaacaccagcaatgatgcccagagcat

SEQ ID NO: 165142 - DNA, 201 bp, Homo sapiens
cctgctcaagttggtatgactggtgtatggtgccttaatgggtacttaaagtccaggtgagagtggcaggaggcagccaaatgcctaggtagataggagcyggtccctgttgaaaccccacttccaagttgaagacagtttaaagactgaaagccaagctacaagttaaatcctcggaccagattgagaacttgtcttctt

SEQ ID NO: 165143 - DNA, 201 bp, Homo sapiens
atgagacgttgcctttgaagtgtcggaaggatggagaggagaaaagaaaacggagattgaatctggaaaacgcattcatctttagaggcagtgttaatgartacatgaatttagtcctgtaaatgttttctcccttatttgggacttggtgtattgaaggtgtctgttaactgtgctaccaatgagtgcccctgtatccga

SEQ ID NO: 165144 - DNA, 201 bp, Homo sapiens
ccacttcctggaggactgtcagtgctagctaatgagactgtaaaagtggactatctgcccaggagacagtgaggaaggaaatcaggggtcacccttacagsgaagggctctttgcagagagagtgcctgatacgtagcagctggtacttctccatcttgaaactgtccttcctggttttgtctaatttgtcatcatgggat

SEQ ID NO: 165145 - DNA, 201 bp, Homo sapiens
ttggcttctccacagaggcctggttctggtcccttcccctgcaaccccaaggcagggggcagattcccgtatcatggtgctccttggcctgattctgtggsctttatattagaactcaccttctggaatcttttattgtcttgttctctcttccaagctgcgcatcttccttcccttcagaggtttggtgatcagcgtggt

SEQ ID NO: 165146 - DNA, 201 bp, Homo sapiens
accctggacagatggattttctaaaattacagaggaaactagatctgtaactctgtacatttactcctgtgccagtaacaatggcaatattttaatactgwaataaattttttcttatgcatttgctataaattagtaaatctgtgtaaagctgcttattgcatcatcatgtagaatttctacatcctgcagaagtttaag

SEQ ID NO: 165147 - DNA, 201 bp, Homo sapiens
cttccatttgaaaggagctttaaacacctttggtggcagctaagagtgtcaaaatggagggatgtgtaggggacctagggcctgggtaacattgtcccagsccagggcctattgtgttgtgtgtgtctccactttccagcctttgggaacgcagagggggacctctgtaattggtaccagcatcccttccttgcagggtcc

SEQ ID NO: 165148 - DNA, 201 bp, Homo sapiens
ctcctgctgtgatgccacttctaatctcaattttattatacaatttgttaaatacagaagtaaatggaggcaatagtgatagtaaaaagaaccatgtgaaytgggcgtggtggctcatgtctgtaaagccagcacttcgggagtccaaggtaggagggtcacttgagcccagcaattggagaccagcctgggcaacatcat

SEQ ID NO: 165149 - DNA, 201 bp, Homo sapiens
ctggagtcatgtgtttgcttctggaagggaggcaagaggcattcaacctcctgttaatttggttgctccttcagatacgctcttcatggtacagccctgasctgcatcatttaaagaccaattgttaaggaccaatctgagggcctgtgcattagttaaaactccttatctggtcatagagggtggtgtggtttggacgcg

SEQ ID NO: 165150 - DNA, 201 bp, Homo sapiens
ctcctatcccctttcagctcctgctgtgatgccacttctaatctcaattttattatacaatttgttaaatacagaagtaaatggaggcaatagtgatagtraaaagaaccatgtgaactgggcgtggtggctcatgtctgtaaagccagcacttcgggagtccaaggtaggagggtcacttgagcccagcaattggagacc

SEQ ID NO: 165151 - DNA, 201 bp, Homo sapiens
atcatctccgtccacatcaatgtcgtcatcgtccttatgaaaagccctgggcatcattttgcccttgagctggatgtccatgttggaaaaacagctagtgraaggcgtgcccaaatctcagaagttggcgtttccttgcagatatcattggtggccattggaggggaaaaagatgctttggaaaccaggacacagagaaaa

SEQ ID NO: 165152 - DNA, 201 bp, Homo sapiens
ttgccacttcctggaggactgtcagtgctagctaatgagactgtaaaagtggactatctgcccaggagacagtgaggaaggaaatcaggggtcacccttayagggaagggctctttgcagagagagtgcctgatacgtagcagctggtacttctccatcttgaaactgtccttcctggttttgtctaatttgtcatcatgg

SEQ ID NO: 165153 - DNA, 201 bp, Homo sapiens
cttgaacctgggagtcggaggttgcagtaagctgagatcgccactgcactccagcctgggcaacagagcaagacgccatctcaaaaaaaaaaaaaaaaaaagtgtaatgcaagtagaaaagggcacacactccaggtgtatatctcaacaaatttgtacacactgcatgcacatgggtgacccgcacccacatgttataca

SEQ ID NO: 165154 - DNA, 201 bp, Homo sapiens
ctcagacagataagaagctggcccacccttgccacttcctggaggactgtcagtgctagctaatgagactgtaaaagtggactatctgcccaggagacagygaggaaggaaatcaggggtcacccttacagggaagggctctttgcagagagagtgcctgatacgtagcagctggtacttctccatcttgaaactgtcctt

SEQ ID NO: 165155 - DNA, 201 bp, Homo sapiens
cttccacatacaaagtctgggacacagtacgctctcataagagacctcttctcaacaggatccatgtttgatccgggggaataaagctagagttgctttcwtccttgtaatatgtataatgactcatgagagaattccccactgtcttccccacctgagacctgagaggaggagaaggaagcttggagtcgctgccctgtg

SEQ ID NO: 165156 - DNA, 201 bp, Homo sapiens
gcttccacatacaaagtctgggacacagtacgctctcataagagacctcttctcaacaggatccatgtttgatccgggggaataaagctagagttgctttmttccttgtaatatgtataatgactcatgagagaattccccactgtcttccccacctgagacctgagaggaggagaaggaagcttggagtcgctgccctgt

SEQ ID NO: 165157 - DNA, 201 bp, Homo sapiens
ccatttggacttcctttttgtagtgggctattagattttgcctctgcttgtttctgaatacccaagcttgctaacacagggaaagaccaattatcatgattattattatttaccttaagacctgattctacctatctatgatcacatagacatttggaagcaaagagaaatgcttttcatgtgggaaaaaccaataccaac

SEQ ID NO: 165158 - DNA, 201 bp, Homo sapiens
gagcttgttttattttgcttgggctgctgtagaaataccacaggtcaggtggcttaaacaacaggaatgtagttcctcacagttctggaggttgggagtcmtagatcaaggtgtcagcagggttggtttctctctgtaccattgtccctggcttggagatgaccatcttctctgtcttcacatggtcttccctctgtgtgc

SEQ ID NO: 165159 - DNA, 201 bp, Homo sapiens
aaatgccatggactgaataatatataaacaacggaaatgtatttctcacaattccggaggctgagaagtccaagaggaaggcactggcagattcagtgtcyggtgaggatttgtttttgatctcataggtgtccatcttgctattttctcaactagcagaggcaactctctggggtatcttttaaaagggcactaatggcc

SEQ ID NO: 165160 - DNA, 201 bp, Homo sapiens
catggtgaaagaagacagacagtgtaatttccctggaaactcaattttgattcagacgtccacagcatctcatttctgcctttaaaaaatttcaagagtgrcattttggcatgattggactcacaggtggagaaggtatgacaaacattctggaaatcttggaaggtgaaatatagggaagatggcccctatggaggttca

SEQ ID NO: 165161 - DNA, 201 bp, Homo sapiens
atggaaaggatctattcctagaaaggatccattcctagaagaggaattctgtacaatatggccaactttctctctgttgaggttgaaccatttgacacatytcgctagcattgggaaaatccccattttcctcactatccatttttcttcctctctttccttcctcttttcccttcttcctctttttttttcttttctttc

SEQ ID NO: 165162 - DNA, 201 bp, Homo sapiens
gaagaaatgctgttttaggaaatcaataggataatttttttttttttttgaggcggagtctcactctgttgcccaggctggagtgcagtggcacagtctcsgctcactgtaagctccgcctcccgagttcacgccattctcctgcctcagcctcccgagtagttgggactacaggcgcccgccaccacactcagctaattt

SEQ ID NO: 165163 - DNA, 201 bp, Homo sapiens
ataaataaatacataataaataaacagtagtggttgaaagaaagggaaggaagaaatgctgttttaggaaatcaataggataatttttttttttttttgargcggagtctcactctgttgcccaggctggagtgcagtggcacagtctcggctcactgtaagctccgcctcccgagttcacgccattctcctgcctcagcc

SEQ ID NO: 165164 - DNA, 201 bp, Homo sapiens
ttctctcattccattggctgaagcaaatcatgtatacaagccagaagccaatgagctataggaagggtagcaaagaacagaacagccatacagcctagccsacagatggggtcaagaagattcaataggcattggctgaagacttaagacttctcaagcaagttggatcctggtgtgcacctggcatatcctttaggattc

SEQ ID NO: 165165 - DNA, 201 bp, Homo sapiens
ggggttggcgagagggtgttgcttttctaatgattcacattgtataaaaagcagacagtaggtctggcactgttggctcatgcctgtaatcccagtacttygggaggccaaggcaggtgaatcatgaggtcaagggttcaagaccagcctggccaacatggtgaaaccccttctctactaaaaatacaaaaaattagttgg

SEQ ID NO: 165166 - DNA, 201 bp, Homo sapiens
tgcccaggctggtctcgaactactgggctcaagcaggccacctgcctcagcctccagaattgagattacaggcgtgagccactgcgcctagccaggagtaytttttagtagcagtcctagatagcttcactatcatttcctgggaaagttttggaaaccccagcagagccttcatctttaactgtgtgaccttgggccatt

SEQ ID NO: 165167 - DNA, 201 bp, Homo sapiens
ccccatctctgctacagatataaaaattggctgggcatggtggggtgcagctgtaatcccagctgctcaggaggctgaggcaggcgaatcgcttgaacccsggaagcagaggttgtagtgagctgagatcatgccactgtactccagcctgggtgacagagcaagactgtctcaaaaaagaataaaaatgaataaaaatta

SEQ ID NO: 165168 - DNA, 201 bp, Homo sapiens
tcatatggtcctctgcagccttgcaaagtcgattcctgacatttccgtagactgttttttttgttttcagcaatactctccagcagcaaaacccaatccgytcatattcttgcatttgctgcagcaaaacctgacctctctttgtgttacctgagtcttgacgaagaagactgaggaaaggcccccccccccccccaccaa

SEQ ID NO: 165169 - DNA, 201 bp, Homo sapiens
acttgttaacttctgtattgtcttttctgctgctttatccaactttgcaatctataagcttctgttactggaaaatggtgatggtaaagtaattgctttcytatgttccatcacagagggtagactgctagctctagtatttttcaatgctgctttttaagtgatagatgtataccattcagtaccaaccctgcaccctgg

SEQ ID NO: 165170 - DNA, 201 bp, Homo sapiens
aaatggtgatggtaaagtaattgctttcttatgttccatcacagagggtagactgctagctctagtatttttcaatgctgctttttaagtgatagatgtataccattcagtaccaaccctgcaccctgggacatgcctccttgctgaaactaccatttatctttgtgaattcattattcgtttttccaacaaacttttatt

SEQ ID NO: 165171 - DNA, 201 bp, Homo sapiens
aagttaaaaaatagcacagaggggatccctgtgatttttactcacttttctacaagcatgactccttatataactacagtacaggatccaaaccaggaaayatgcctgggtacaatgtgagtgtataattccaggtaggtaaaataatggcccttattaggatgtctgcgtcctaatccgcggaaactatggatatgcttt

SEQ ID NO: 165172 - DNA, 201 bp, Homo sapiens
ggaaagtgtatagttctcctttccttacagaaacattattttgttattgttgtttgggtttgggtttctgaagtataaatgcatatgaactggacagaagkattatgcccatgtgccaggtggccaagatggggcttgtgatttgaagcttcttttcctagattcaggaaagtatcactggttaatcagggaatacatctt

SEQ ID NO: 165173 - DNA, 201 bp, Homo sapiens
gttttctgtcactattgatgaatttgcattttctagaattttagataagtgaagttttctagtacttgttctgcatctggtttctttcattccacataatkaccttgggatgtacccatactgctgcctgtatcagtggcttactcattgtcattggtgagtagtactccattgtgtggagaaatcacattgttttaaaaa

SEQ ID NO: 165174 - DNA, 201 bp, Homo sapiens
ttagtgtgatttgggatgaaaattttaaaaaatcaatatgtataatccaccatctttgttccttttatttttatgttactcattcttttaagcttgtcttrgacgtgagtattatgttttattttgctgggagaacaatttgggaaaatttgagcagcaaaccataagtttcttggtgtctgtgtacttggagctctgaat

SEQ ID NO: 165175 - DNA, 201 bp, Homo sapiens
tgaggattaattgaaataactcgcaaaaatatccagctctctgtttccctgctaggggctcttgtcataggagccattgttgtagccttagaaaacatacrgcattattttagggggagaggttagagtagaattttaaagagtgcatttctcttccagtaagcaattctgcatcgataaaaagtggagaaagaataagtg

SEQ ID NO: 165176 - DNA, 201 bp, Homo sapiens
agatagatgaagggttaggaagatgtaacttgtcctaaatcacgtgtcttctaagcggtggaactgattttctcactgactatagatgttgagcccattamtgtgatacctactgccttttaattttaaaagttctcattgttttatcgttttcatcattatcatatgatttacctcttctcttgtgtcttataatccgat

SEQ ID NO: 165177 - DNA, 201 bp, Homo sapiens
gtcttttttttttttttttttttcctccttttttgagagagagagtctcactctgtcacccagactggattgcagtggcacaatctcaactgactgcaacstgcacctctcaggttcaagcaattatcaggcctcaacgtcctgagaagctgggactacaggcatgtaccaccacactcagctaatatttgtatttttagt

SEQ ID NO: 165178 - DNA, 201 bp, Homo sapiens
tagagggtggggagagagttcagtatgtcaggactgctacatttatgagtgtgggtctttattgaagtctctctttgtagccaatccttttttttttttttaatttttaaattttaaattcttacttttagatatgggggtctcactctgttgcccaggctagagttcagtggcacaatcatagctcactgcaacgttgac

SEQ ID NO: 165179 - DNA, 201 bp, Homo sapiens
aaaatagagtcagcagcatctaaagagttgttttactacctctggagctgagaggtgaacatagtcgtttttcaggaagccgtttctggctcagacagatmagaagctggcccacccttgccacttcctggaggactgtcagtgctagctaatgagactgtaaaagtggactatctgcccaggagacagtgaggaaggaaa

SEQ ID NO: 165180 - DNA, 201 bp, Homo sapiens
tgtttacctgtttatgataaaggatattacaaagagtacagatgaagcggtacatagggccaggcatgcggaggggatgtggagcttccataccccctccyggcatgcccctctccaggcaccacatgctcagcaatctggaagctctccaaaccctatcgtttaggtttttgttgttgttgttttgagatagggtctcgc

SEQ ID NO: 165181 - DNA, 201 bp, Homo sapiens
tgtcaatattttaatgtactagtaagggaaaattctattaagacataattgtttggctttgtcagtttgtcaacttgaaaatagagtcagcagcatctaaagagttgttttactacctctggagctgagaggtgaacatagtcgtttttcaggaagccgtttctggctcagacagataagaagctggcccacccttgccac

SEQ ID NO: 165182 - DNA, 201 bp, Homo sapiens
ttattgatttgtaattcaacaacttcaacatcttaccaagaagaatgtgcagttattctagcaggagaaacaatgcaattagagcctgcgagatgaaatcmaattgttttataatgagaaattagggaattcgaggcagacattagctgtgtaattgtggaaagggaagaactgtagttagagcatattagaaatctggcc

SEQ ID NO: 165183 - DNA, 201 bp, Homo sapiens
aatgtcaatattttaatgtactagtaagggaaaattctattaagacataattgtttggctttgtcagtttgtcaacttgaaaatagagtcagcagcatctraagagttgttttactacctctggagctgagaggtgaacatagtcgtttttcaggaagccgtttctggctcagacagataagaagctggcccacccttgcc

SEQ ID NO: 165184 - DNA, 201 bp, Homo sapiens
ctgcagctgtcgcagttggaacatgtgacgaaagccagttgatgtgacaactgctgggtgggagggacaggcttgggggcggggctgggagggctccttcycttcctgacccagggatggtctttacttctccctggcacctgtagacctgtctttcttgtgtttcagatttgccatacggatgggaacaagaaactgatg

SEQ ID NO: 165185 - DNA, 201 bp, Homo sapiens
atccagtcagagtgaatcagcttgcccagtgcttggcatatagctgctcaagaaatattaggcattctttgttattataaatcccctttgtattttaaaaycctcatgtatcactgaaacaaccaactgaaaaccattgagaggctcatggtgaaagaagacagacagtgtaatttccctggaaactcaattttgattcag

SEQ ID NO: 165186 - DNA, 201 bp, Homo sapiens
agtgcactccagcctgggtgacagagcaagaccctgtttcagaaaacaaaaacccaaaaagcaaaacccccacagtatatatagaaatacaagatttgtgrggggcgggggtccccctacaaagcaagtgttactgtccacagagcaaatgtcaatattttaatgtactagtaagggaaaattctattaagacataattgt

SEQ ID NO: 165187 - DNA, 201 bp, Homo sapiens
cgggtggggagggcagacaagttgctcatcctctctgcgcctcagtttcttcatctacaaaatgaagatgttggttatttctttattcaagggttgttgaraggatgaagtgctaaaaatgcttgaccagcattcacacaggcactaagacggtgagtactcactacttagcgctgtcaacatcatctccgtccacatcaa

SEQ ID NO: 165188 - DNA, 201 bp, Homo sapiens
ggtgcccgccaccaggcctggctaattttttttgtattattagtagagatggggtttcaccgtgttagccaggatggtcttgatctcctgtccttgtggtycgtctgcctcggcctcccaaagtgctaagattacaggcacgagtctccgcacccggccctgtttttgcatttttagtagagacgggttttcaccaggttg

SEQ ID NO: 165189 - DNA, 201 bp, Homo sapiens
tgggcaagaagggaaggagaattgtgaaacatgcacaattagaagtcgtgcacctgggttcatatcctggctgggccacttactttctggcgggtggggarggcagacaagttgctcatcctctctgcgcctcagtttcttcatctacaaaatgaagatgttggttatttctttattcaagggttgttgagaggatgaagt

SEQ ID NO: 165190 - DNA, 201 bp, Homo sapiens
acgcaattagataatacaaaaataacaaaactataggaggttgaggatggggctgggggccaaggagattacttggtttgaaatgaataaattgtctatcstaagggaattctttggtgcattttattgtgtgaaatgagcctggtcatatgactgccctgcctccctggaggcctccctgccctcctccttcccacagac

SEQ ID NO: 165191 - DNA, 201 bp, Homo sapiens
ttgggcgattcagttttacctgtgtcctctctataccatagtttatgacaaggggttttctgtggctggtctccaaggcctcttccaatcttgacattctrtgatcctgtaagtctttgaataatggcccaggatgccaacaagaagtcaccaatgagagttcaggtgttctgttggaaatctttgtaaaatcacagagaa

SEQ ID NO: 165192 - DNA, 201 bp, Homo sapiens
caatctatatgtccaacgccattcgtagaccccctttgataatctccactaagcagacatactcgatacatcttcactaatgagttctgacttcataaaawgtattaatgacttctttttgaaagtaagagtgctttgaataccagtcgttattgctttagaagttcataaaagcaaaagcacagtatttcccccagtgtt

SEQ ID NO: 165193 - DNA, 201 bp, Homo sapiens
tccttctcatatgtttaggcaagcgttgatgacatcaacctagccttttattttaaatcccctgtcaacgcaattagataatacaaaaataacaaaactayaggaggttgaggatggggctgggggccaaggagattacttggtttgaaatgaataaattgtctatcgtaagggaattctttggtgcattttattgtgtga

SEQ ID NO: 165194 - DNA, 201 bp, Homo sapiens
gccagtgattctatataaaccgttcagtaaaatgaatggcatatgcgtatgtttcaagagctccagcagcctacccaggatggcttgatgttgtctcttarcaccgtatcaatacctgggggttttcaaatattgcaggtggccgaagcctttgtgttgaggtttctgtagtgtttatccatttgtgaaaccaggcctcaa

SEQ ID NO: 165195 - DNA, 201 bp, Homo sapiens
tgggggaaaaaaccaatagaataatgttttattacatgtaaaaattgtatgaaattcaaatttcagtgttcataactaaattttaaaaacttttattgaarttccagagagatctgaagtagttttattggaacacagccctacacaccttcatttataagctatctgtggctacttttgcactatgccagcaaagttgag

SEQ ID NO: 165196 - DNA, 201 bp, Homo sapiens
ttgtatttacaaatgtggcattaagtagaacaacgtattcttgcaattaatgacaggaagcctacaatttctcattaagcacaggacagtgagaacgaacrgaatttcagagacatgtttcttaacattaaaaacaacaaaaacaacaacaacaacaaaaaaccaagtaggaagcaggcagagttgcaatatgaagaacaa

SEQ ID NO: 165197 - DNA, 201 bp, Homo sapiens
tattgaatgaagacatgaaagcatttggtggaaatagggcacacacatgaatatattcacagttgcaaactcagaaggatactcccaacctggttctttgkcttgtccctccatctgggtgctttccagtcacagcctggatgcatgtatgaataaacttctaccattaagtccctgaattatttaagcactgccagtgat

SEQ ID NO: 165198 - DNA, 201 bp, Homo sapiens
accgggtctggagtgcaacagaggcccctgaccttgtctctagctctctgtctgcatcttcagcgtggcttcactggtttctaagtctctggtgtcttttktcttttgcagccggcttgcaattgcctccttctaactctcaaaaggatgcatgggatgggttcagtgtagtcactgttgtgccttttggacaaggctttc

SEQ ID NO: 165199 - DNA, 201 bp, Homo sapiens
gtagttttattggaacacagccctacacaccttcatttataagctatctgtggctacttttgcactatgccagcaaagttgagtagttgggatggagactrtatggcccataaagcctaaaatactctctgctcctttccagaaagcttggcaacccctactatcatctccacgtctgcctttgttcttcttatttgtccc

SEQ ID NO: 165200 - DNA, 201 bp, Homo sapiens
tttaaagcgatagtcctattttctaagtaaaagtccaggcatgtgacttaaaaaagaaaaaaaaaaatgttttctggtcaagtcacatgcctctgaggttkttttttttctttctttcttttctttttttttctttttcccagactcctcatacccctcctaggagacagtgattccctggcttcaccaggcaggctcttg

SEQ ID NO: 165201 - DNA, 201 bp, Homo sapiens
cttgtggttccttgtagtaatttgcatccactgaccctcccactcccctgctactctgttccttgactataaatctccagctgtctttattatatttggarttgagccctatctctctcccctattgcaacagccttgacccctgttgaaataatcctgcataaagtcttccttaccattttaacaaatgtcaaggtaact

SEQ ID NO: 165202 - DNA, 201 bp, Homo sapiens
taggtagaaatttttatgtcacaggtgggcctaattaaccttgattaatgttctgcaaacccggatagactggagactcagaaagggacgcaaaagctagyctggttcccatgttagtccctgctctgtgagcagctgccacacagtcatgctgatggctcctgcagcagccattctggtttgactgtgctcgtgctgccc

SEQ ID NO: 165203 - DNA, 201 bp, Homo sapiens
tgagagtgcctgaaacccagagaggtcgtacgttgaccatgccacggggcccttcctggtaaatctaagcagaaatacaccatgcatgagacagaacaaaraaaagaactgtgaaaatacactcaggaccaggatgctgatacagtcatgaggttcagcttaaaaggccagtttctctactgcagaataatgaggtctatc

SEQ ID NO: 165204 - DNA, 201 bp, Homo sapiens
tagtatttgccaaaactagaggatgaatgagtgatgggtaagagagttctcagaaaaatggatataaacaatattgtaaatcatatttggaaaataaataytagaatcattgaatccctgagttatagaaaaatttattaatagcgctatctggctactttttaaagtgtggacatcctcgatgtattagctatgcatctg

SEQ ID NO: 165205 - DNA, 201 bp, Homo sapiens
gttttaggaagttgcatttaaaaaatcttggatacctgttttgtacatattatatatagcatcccgtgtgaatatgttaattcctttttatgagtttcggycttttttccctctcctatacatgattgctgttttatagctccagtttggtggaattaacatagatttcccacatggggaaggttttgggtgaggatttag

SEQ ID NO: 165206 - DNA, 201 bp, Homo sapiens
tgtggagtatgcatttaattcacatttacaaattggtttctgtttttaactaaaggtactttttcagcagaaatgatgtgtatgatgtcatatctaacttktgatctcactggtatttgatgttaagcctcaaaatcatcaaattttttttacggcactgaaaaaaatacataaatctgcttgattggttcatagaaaaag

SEQ ID NO: 165207 - DNA, 201 bp, Homo sapiens
cagctggcgtaagaggagtgactcatttgttcttctttttttttttttttttggctgtctacagagaaggaggatataggggcccttaagagaaaaactgkagtagggtgtgtgtgtgtttgttttggtcaagggcagagtgtgctgtgtcagggtgtttcattgcattttcatatttgtcatttctctttggagcgtgtc

SEQ ID NO: 165208 - DNA, 201 bp, Homo sapiens
ctttgaaagttgtccttctgcacccattttccccagacctaacctcgatttgtgctccaggtctgagcagaaatgttattccctccagaaagccttccctkgatgttgagggatgaagttgtagccccctcccgaatgcgtcctcagaactcgctggttctcgtcctcgccctcagcatacttgctcattgtttgtttcca

SEQ ID NO: 165209 - DNA, 201 bp, Homo sapiens
ttgaagacacaaattcagatgcatgtggatgggcccaaaatactttgtttacatgtactccaaatgtaactcctggggcacccttccttattttctctacsacaccaatgccttcatggtcttacatcttgtcctcttaaccctgacttctctagccctcatgaatgctttagtgtggcagatgttactgtacatgggccc

SEQ ID NO: 165210 - DNA, 201 bp, Homo sapiens
gcatgtggcccaccagccatggtttggacaagcttagtctacaggttcttcaagaggggcttgagcatttgaaagacttctagtgggagagatcacaaggkacaagtagaaaatcctgggctggcctgagaggcagacctgtgattattttgctctttgaaagttgtccttctgcacccattttccccagacctaacctcg

SEQ ID NO: 165211 - DNA, 201 bp, Homo sapiens
ggggtttcaccatgttagccaggatggtctcgatctcctgacctcatgatctgtcagcctcagcctcctaaagtgctgggattacaggcgtgagccactgygcccggccggggatcttgtattaatagtagggagacagtaagcaagcaaggctcagttaatgataaattgttatcaggagacccagcagtttctgctttt

SEQ ID NO: 165212 - DNA, 201 bp, Homo sapiens
tttctaaaactttaagtttcagggtacatgtgtaagatgtgcaagtttgttacataggtaatcatctgccacggtggtttgctgcagagatcaacttatcrcctggatatgaagcccagcgtccattagctgttgttgctgatgctcttcccaccacctgcaagccccagtgtgtgttatccgcctccaccgtgtgtccat

SEQ ID NO: 165213 - DNA, 201 bp, Homo sapiens
aacccttctactacaagacatagaagaaaattagttggccatggtggcacacacctatagtcccagctactaaggaggctgaggcggtaggatcgcttgakcccgggaggtggaggctgcagtgagctgtgatcacgccactgaattctagcctgggtgaccgagaccttgtctaaaaaataaataaataaataaaattag

SEQ ID NO: 165214 - DNA, 201 bp, Homo sapiens
cttgaggccaggagttcgagaccagcctggccaacatggtgaaaccccatctcacctaaaaataaaaaattagctgggcgtggtggcagccacctgtagtmccagctactcaggagactgaggcaggagaatcgcttgaacccaggaggaggaggttgcagtgaactaagattgtgccactgcactccaacctgggcaaca

SEQ ID NO: 165215 - DNA, 201 bp, Homo sapiens
cggattacttgaggccaggagttcgagaccagcctggccaacatggtgaaaccccatctcacctaaaaataaaaaattagctgggcgtggtggcagccacytgtagtcccagctactcaggagactgaggcaggagaatcgcttgaacccaggaggaggaggttgcagtgaactaagattgtgccactgcactccaacctg

SEQ ID NO: 165216 - DNA, 201 bp, Homo sapiens
gatcacacagctagatcacagtgggggaacctgaattatggggatgctcacaaaagggcaaaacacaacggttgctgtcatttgatgctttatgttaagtrtgcatatgctcagttacagaaacctaaattgctaaattgcaaggctgtatatgatatgccaatttggcatattctgtctttttatattctgccaccccta

SEQ ID NO: 165217 - DNA, 201 bp, Homo sapiens
cacagtgggggaacctgaattatggggatgctcacaaaagggcaaaacacaacggttgctgtcatttgatgctttatgttaagtatgcatatgctcagttrcagaaacctaaattgctaaattgcaaggctgtatatgatatgccaatttggcatattctgtctttttatattctgccacccctatcatacttatgaaaat

SEQ ID NO: 165218 - DNA, 201 bp, Homo sapiens
gggaaaatggaggagaatgatgacgaaggaggaggaggaggaaaaggtgacttgcctctagctgatgtggattatttctcttttttaatttccatgtctgygtagcttcatcatagatctcagcttaaggacaatgaaagtcgtttattgagtacttagtatgtgctggttgcagagccaagtcttttttttttttttttt

SEQ ID NO: 165219 - DNA, 201 bp, Homo sapiens
acagacagtgtaatttccctggaaactcaattttgattcagacgtccacagcatctcatttctgcctttaaaaaatttcaagagtggcattttggcatgaytggactcacaggtggagaaggtatgacaaacattctggaaatcttggaaggtgaaatatagggaagatggcccctatggaggttcattgtcccccacctt

SEQ ID NO: 165220 - DNA, 201 bp, Homo sapiens
cgtcctcgccctcagcatacttgctcattgtttgtttccatctctatcatctctgtgagccctttgaggatggatgtgtgtccatcttgttaacagttggmtccccagtaaccagtacagtgccagatacagagtagtaaccctacattctagcgtaggcaaatattctagtatttgccaaaactagaggatgaatgagtg

SEQ ID NO: 165221 - DNA, 201 bp, Homo sapiens
tgtggaaaagggacatggcccagggaaccagagtggtttgggaaagcactttgtcaagaggcttggggaccccagggtggaagctgccatgcgcatgaggytgtgttagcagaggcagtggcagaagaagacattgcaaacctgcaaaagcaacctctgaggatgggtagacatatacttcattgcaggcagctgctgctg

SEQ ID NO: 165222 - DNA, 201 bp, Homo sapiens
gttggaatactcctacccttgtggttccttgtagtaatttgcatccactgaccctcccactcccctgctactctgttccttgactataaatctccagctgkctttattatatttggagttgagccctatctctctcccctattgcaacagccttgacccctgttgaaataatcctgcataaagtcttccttaccattttaa

SEQ ID NO: 165223 - DNA, 201 bp, Homo sapiens
caggacaggtgccctcctcagcggagacaactgtccccctccatcctgcaggagttttgcagccatccttccagccactgcttctctaccggggcaaattytcccccaagggataattgataatgtctgaggcatttttaattgtcacaacttggggaaggggcaagggattgagggagagtgctcctggcatctggtggg

SEQ ID NO: 165224 - DNA, 201 bp, Homo sapiens
atagaaacttttgccttcattatatcacctttacaccccaggacaggtgccctcctcagcggagacaactgtccccctccatcctgcaggagttttgcagmcatccttccagccactgcttctctaccggggcaaattttcccccaagggataattgataatgtctgaggcatttttaattgtcacaacttggggaagggg

SEQ ID NO: 165225 - DNA, 201 bp, Homo sapiens
catcttacaaatgaatcaatatttagtggtttgaaaatatgttgtttaatttggggcgattcaatatcaaattaagatttttaggtttatttatcgatctytagaattacatcaacattaagctaattactttaaattgtgtttttaagtaaccaagaatacatctgtggacgctgttctgtgccatcttgagtcacgttt

SEQ ID NO: 165226 - DNA, 201 bp, Homo sapiens
tgagagaatagaaacttttgccttcattatatcacctttacaccccaggacaggtgccctcctcagcggagacaactgtccccctccatcctgcaggagtwttgcagccatccttccagccactgcttctctaccggggcaaattttcccccaagggataattgataatgtctgaggcatttttaattgtcacaacttggg

SEQ ID NO: 165227 - DNA, 201 bp, Homo sapiens
gcataatttaggcccctttcaggccactcttccccctgtgccccaggtgtgtttgctaccatacctccccaggggatagccctccaaacctgattggccamctagtctggtcttaaagtcccaaagggaggccatcacaaactactcagtatggagaagacctgaatcctaattttggcttaaccccaaacttgggcgatt

SEQ ID NO: 165228 - DNA, 201 bp, Homo sapiens
taaaacgtggatgttccaatttatgtatagccgcataatacattaccccaaaacttagaggcttaaaacaacaaccattttgttttatcttgtgatttctstaagttagggctcagtggagtgactcttctgccccttgtggtgttgactggggtcagtcagtggtgctatgctggaggatgaattggactggcacttcag

SEQ ID NO: 165229 - DNA, 201 bp, Homo sapiens
cattttactttgcataatttaggcccctttcaggccactcttccccctgtgccccaggtgtgtttgctaccatacctccccaggggatagccctccaaacytgattggccacctagtctggtcttaaagtcccaaagggaggccatcacaaactactcagtatggagaagacctgaatcctaattttggcttaaccccaaa

SEQ ID NO: 165230 - DNA, 201 bp, Homo sapiens
tggatgttccaatttatgtatagccgcataatacattaccccaaaacttagaggcttaaaacaacaaccattttgttttatcttgtgatttctctaagttrgggctcagtggagtgactcttctgccccttgtggtgttgactggggtcagtcagtggtgctatgctggaggatgaattggactggcacttcagctggtcc

SEQ ID NO: 165231 - DNA, 201 bp, Homo sapiens
taggtgagtggtgaagatttttattctgaatttttgaaataatatcgtactgcaagttccaggcaatcaaaaactcacaaatcacttgcactctgcagcagtggtatcaggtctgaagaaaggaagaggctgcagataggcacatggctttgctaagttagcttttatatcctgcgtggctgccttagaaagtgtccttgc

SEQ ID NO: 165232 - DNA, 201 bp, Homo sapiens
ccaccatattgagagaatagaaacttttgccttcattatatcacctttacaccccaggacaggtgccctcctcagcggagacaactgtccccctccatcckgcaggagttttgcagccatccttccagccactgcttctctaccggggcaaattttcccccaagggataattgataatgtctgaggcatttttaattgtca

SEQ ID NO: 165233 - DNA, 201 bp, Homo sapiens
atgaattggactggcacttcagctggtccaggatggtcacccatgggtctggcactttcacgaggatgactgggatgcttggctcagctgagggactcttrcccagagccctacacatggcctttcctgcatggcagatatagggccatcagatttcttacatggtggctcagggctcccagaggattccaaaagaaagta

SEQ ID NO: 165234 - DNA, 201 bp, Homo sapiens
gtacaaatgaacttgctacttggtttgctgccaattgctgccgaaacaggagttatttaaattagtaaataatttttgaaatcttcttagaatgtcacagsccacaattcaaattcacagaccaggaatggttattatttctatatatcttaaagttttctgcaatagaaatgcatttcaaatataagctagaaaaaaaaa

SEQ ID NO: 165235 - DNA, 201 bp, Homo sapiens
gtgtagctccaattgccttcatccttagaagacctttaatgatatcctatgccaaacttcctagcctccacctgtaccctgaattggccctagcctagttktccaaactttatccccaggtggttgaactttctaagtttccccaagctgatcagtgttttggggtggtatggaactcagaatagatcactttttttattg

SEQ ID NO: 165236 - DNA, 201 bp, Homo sapiens
tcttctcaggcttccaaccactatgtttggaaatgaaatatgccttgaaggaaaaaagctgccaaatgctggccttgcagtttttgcagatcttggccccmaaaattcttagtcatagtgcccttctgatgccttcaaacagatatgggtgtgtatgcacgtgtgttattttgtccatcttttctaattgttctcagtagg

SEQ ID NO: 165237 - DNA, 201 bp, Homo sapiens
tcaggtggtgactggaggagccagaaggtccctttgggcctgtcctctcaccagcatcaactgcaccaaaaagatctcattctgattatcagggatgaacscccccactgggtgatcaggcaaactacatgcattttaaaaaactatatcctgctgggtgcagtgcctcatgcctgcaatcccagcattttgggaggttga

SEQ ID NO: 165238 - DNA, 201 bp, Homo sapiens
gagcttctctttgttcccatatgtttcagtgaagcagttatagcttcagaaaagagggagccaggaaatacacttgtaattcatcactccttttatagtcmgagcataggaacactcatagtatgtatcagaaactagtgaacacatgttgttttacagctctgtctgcaaaattgcatcgtgggcctctttggggagtgt

SEQ ID NO: 165239 - DNA, 201 bp, Homo sapiens
aatttcatcactccaaaaagaaatctcataacaattagcagttattttccatcgctacttcctccagtcccaaggcaatcagcagtctgctttctatctcyacctgtttgcctattctggacatttcatatgagtggagttagataatacatggccttttgtgactggctttcacttagcataatgttctagaggttcatt

SEQ ID NO: 165240 - DNA, 201 bp, Homo sapiens
gcactttttctgtttttgatgggatttatcacttgaaaatgcatattatagtaatttctgaattcatcctgattctcctactggtttctaaactcttcagkttagaattcctgttggatatccctctggcccgaaattcctgaatgagttaagcaggacacctagaactatgcagaggtaataccttccttgacctgtccc

SEQ ID NO: 165241 - DNA, 201 bp, Homo sapiens
agatggttctatgttgtcaggggctgccctgttcatggtaagatgttttgtaatgcctggtgtttacccactagatgccagtaggactctaccccacaacygtggccactgaaaatgtctccagacatttgcttctgtcccctggggatcaaaatcacccctggttgagaacttggggtaatttaagtggtgctccggtaa

SEQ ID NO: 165242 - DNA, 201 bp, Homo sapiens
taactgcaatcagatgttttatttgtttatttatttttccttcttgcgttgctcttaagcccccactcttgggcaaggctctgtgctatgctgttttatgsacatcatcttctaacagcttctctgccacacctggagaagtgccaatatcattttcatggcacagataaggcattggatgctcatagtttaagtcatcag

SEQ ID NO: 165243 - DNA, 201 bp, Homo sapiens
tgacagagtgagactccatctcaaaacataagtaaataaataaaaaataaatataatacagacacaggcttttctccccacctcttttaattcttgaaagraacagtaacaagctcctattcctgtttccttgccaggagaagtattgttttcatataaatcatttgtgacagaagctccttatttttaagtggaaaatgc

SEQ ID NO: 165244 - DNA, 201 bp, Homo sapiens
tggtattggtacaatcagtcaggaagcatttttcctggggagaaacttacaagtccacgatcaaagccaacaagagacaaggtgttacatgactcattttyggtttaagaagtgacaggctgattctaagttgggttcaattattttgttaaagcgttttgcttatttgacttctcctgacctcggaaataattctaacca

SEQ ID NO: 165245 - DNA, 201 bp, Homo sapiens
tgatgggatttatcacttgaaaatgcatattatagtaatttctgaattcatcctgattctcctactggtttctaaactcttcaggttagaattcctgttgratatccctctggcccgaaattcctgaatgagttaagcaggacacctagaactatgcagaggtaataccttccttgacctgtcccttttctgggtcagttt

SEQ ID NO: 165246 - DNA, 201 bp, Homo sapiens
  misc_feature (1)...(201): n = A,T,C or G
ccaagtcttttgccctccatggtgcacatgtgatcttggcctgcaggaacatggcaagggcgagtgaagcagtgtcacgcattttagaagaatgggtaagngcttgactgttgttgttttttttaattgtcaaatacacatgccgggctaaccatatggagatttcagtggagtgtgtaaagtttattgctcttggaatca

SEQ ID NO: 165247 - DNA, 201 bp, Homo sapiens
tttatatttttagtggagacggggtttcactatattggccaggctgatctcgaactcctgcccttgtgatccacccacctcggcctctcaaagtgctgggmttacaggtgctagccaccacacccggcctcttctcgatagatcttatttggctgacaacgaaagctgttgtgctggtagcatcatccctttgcatgcaaa

SEQ ID NO: 165248 - DNA, 201 bp, Homo sapiens
agtgggttgcgcctgtaatcccagcactttgggaggccaaggcgggtggatcacctgaggtcaggagttcgagaccagcttggccatcacagtaaaacccygtctctgctaaaaatacaaaaattagccaggcatggtggtgtgggcctgtaatcccagctacttgtgaggctgaggcaggagagtcacttgatcccgggg

SEQ ID NO: 165249 - DNA, 201 bp, Homo sapiens
cttgaaaatgcatattatagtaatttctgaattcatcctgattctcctactggtttctaaactcttcaggttagaattcctgttggatatccctctggccygaaattcctgaatgagttaagcaggacacctagaactatgcagaggtaataccttccttgacctgtcccttttctgggtcagtttgcccttcatgatttc

SEQ ID NO: 165250 - DNA, 201 bp, Homo sapiens
  misc_feature (1)...(201): n = A,T,C or G
aggaacatggcaagggcgagtgaagcagtgtcacgcattttagaagaatgggtaagcgcttgactgttgttgttttttttaattgtcaaatacacatgccnggctaaccatatggagatttcagtggagtgtgtaaagtttattgctcttggaatcatgtctttatttttaaagtcatcttcactttgtttgtcttatgaa

SEQ ID NO: 165251 - DNA, 201 bp, Homo sapiens
ggtattgttagcaggctatttcaatgattttctctgcggaagagtagggaaaggtgacattccaactgggaatattcgactctgcagatccctactcggagtttttcagccctgttttaagtgccgagctgggttttgcctcatgatccaattgttttattagcgaaatcatcatctgtttcattttgctttggtaatagt

SEQ ID NO: 165252 - DNA, 201 bp, Homo sapiens
taaaaacagaaacagagcagtccctttgcttccgaatgcagccctcccattggaatcactttggaagaatctggatctgcgtgttacccagtcttactttkcaggcagtcccaggcaggaaggcccattagtgaaaagagccctgcatatgctgtgggtcatcacagctgctgctttgcacatttaggagatatttgtgga

SEQ ID NO: 165253 - DNA, 201 bp, Homo sapiens
agagtccctgtgcttcccagtttactctggagacgactgaggctcacagaggttaagccacctacccaggctggcaccgcacactttgttcagagtgggcytggcatacggcatcagttcagcctggccctagacccttttcctcccacaaccatattgcccccagtggagagacaggaaagcagggaagggggcaattgc

SEQ ID NO: 165254 - DNA, 201 bp, Homo sapiens
agacatagaaattcttgggctttattccacacataatgaatcagaagcttatggggtggggcctgcagtctgacgtttattttttctaaaactttaagttycagggtacatgtgtaagatgtgcaagtttgttacataggtaatcatctgccacggtggtttgctgcagagatcaacttatcacctggatatgaagcccag

SEQ ID NO: 165255 - DNA, 201 bp, Homo sapiens
tctggctctgcagctgaaattgggatcgcatggagaaaatagaaagtccagtgtttgtagctgtgatctctcagttgcttgcatgaattgtgctttaagaytgtaaaattttagcccattaaaaataaaatctgttgctttccacccacacctggcaatttggtgagggacgggggctaggatatttaatgtctgaaagtt

SEQ ID NO: 165256 - DNA, 201 bp, Homo sapiens
tcctttaactcatttattaagaaaaataaaacgtggtgaacgcccatgattgcaactaggagactgttatgcttatggttgttaagattagaaagaaggargctttaaccctatctctgatttcttacttttctctgtctatgtagaagttgatgttgatacgtgtctacataaatatttactaagggcttgcattagtct

SEQ ID NO: 165257 - DNA, 201 bp, Homo sapiens
tggtattgttagcaggctatttcaatgattttctctgcggaagagtagggaaaggtgacattccaactgggaatattcgactctgcagatccctactcggagtttttcagccctgttttaagtgccgagctgggttttgcctcatgatccaattgttttattagcgaaatcatcatctgtttcattttgctttggtaatag

SEQ ID NO: 165258 - DNA, 201 bp, Homo sapiens
aagctccgattttcttgttgaatagccgtgtttcctcagcattctgtagatttttggccaggtttgtgtaagggatgaacgactctctataaaatgatgtmaggatcctttctttcctgcccattgccatttctagcattctctccttgagggaagttgcagttttctccctctgtgtattcatccttctgacctgtgctc

SEQ ID NO: 165259 - DNA, 201 bp, Homo sapiens
ttccctttggtggccatttaggttgtttgcattgttttgctatttgttattccaagcaatggtgtttcacagttctctctttcttgcatcagtctttcttrcgatatcatctgatattgggcctaaactatgctgctgtgagcattctttatttacgtatttgtgagtaaatgcctggggcagaatcttagcactggactc

SEQ ID NO: 165260 - DNA, 201 bp, Homo sapiens
atggtattgttagcaggctatttcaatgattttctctgcggaagagtagggaaaggtgacattccaactgggaatattcgactctgcagatccctactcggagtttttcagccctgttttaagtgccgagctgggttttgcctcatgatccaattgttttattagcgaaatcatcatctgtttcattttgctttggtaata

SEQ ID NO: 165261 - DNA, 201 bp, Homo sapiens
agagtggaatattcataatcagcagaagtcttttctctggaaggaacaaaggattaagttagggagacagtaatggtattgttagcaggctatttcaatgrttttctctgcggaagagtagggaaaggtgacattccaactgggaatattcgactctgcagatccctactcggagtttttcagccctgttttaagtgccga

SEQ ID NO: 165262 - DNA, 201 bp, Homo sapiens
agtagctggtactacaggtgcctgccaccacgcccggctaattttttatatttttagtagagacagggtttcaccatgttagccactttggtctcaatctmctgacctcgtgattcaactgcctcgccctcccaaagtgctgggattacaggcgtgagccaccgcacccagccgaaaagttataattttaatggtctaaat

SEQ ID NO: 165263 - DNA, 201 bp, Homo sapiens
ctcgttcagtttccacataatacctggggcagggatgtaaataccctgattttatgtgtcaggccttcaggactcagggtgtataagtgacatggctcctsgcacagcagggatggagaggcaaacccaggttggcctctctgccactcatatagaactcctttatcaccaagattcctttcttcttcagtgccacctgcc

SEQ ID NO: 165264 - DNA, 201 bp, Homo sapiens
cactgtgcaggtgactcacgcctagaatcctctgcctatcgtgacagggagaagcctgtgtgaccctgtggccatctcagtctctgcagggcatctgtagytttggaggtacctgggcaagagactgcctttcctactagagcttctgccatccctctgtcactatttaaagcattgcctgcaccctcaacctcgttcagt

SEQ ID NO: 165265 - DNA, 201 bp, Homo sapiens
ctggtatctccacttctctctgcagcgtgatgtctagtcagagtttccattctgtttttatgaccctgggaggactgggacagatctgtgaggtcatcttrtccaccctcagccagggcaggagtattccctaatggtagagtcaagtgtttggtttggtcttgtttctaatgactcaagtgatgaggcctggggacgtcc

SEQ ID NO: 165266 - DNA, 201 bp, Homo sapiens
agcacaggaaagacttgccctcatgattcagttacgttccaccggggccctcccacaacacatgggaattgtgggagcgacagttcaagatgagatttggrtagggacacagccaaaccatatcacagggtcacctgtaggttaccgtaaataagagaaacagaccaagtagagactcagcatagctggagggggggcccc

SEQ ID NO: 165267 - DNA, 201 bp, Homo sapiens
agaatctaattttactgtgcattttcttgattattagtgaagctaaacattattttttattgatgtgttaacaatttctttcttttgcaaatgatctattmatgttctgtgactgatttctatcttggtgtctttacgtttgtgaatggtaagaatttttatgtgttcaggaactatttaaatgttcaagacattaacctg

SEQ ID NO: 165268 - DNA, 201 bp, Homo sapiens
ggcagaggaccataattaaatggctgtggaaacccagaagcagcctacagaaactcttaggagccctccgtctgggaggaattttttttttttttttttttggtatatctgtgtttacagttctagaaaagtgttggttttgagggcaatggagacaggaatgaggagaaaatgtataaaggagaggttgctgtgagccga

SEQ ID NO: 165269 - DNA, 201 bp, Homo sapiens
gggcagaggaccataattaaatggctgtggaaacccagaagcagcctacagaaactcttaggagccctccgtctgggaggaattttttttttttttttttttggtatatctgtgtttacagttctagaaaagtgttggttttgagggcaatggagacaggaatgaggagaaaatgtataaaggagaggttgctgtgagccg

SEQ ID NO: 165270 - DNA, 201 bp, Homo sapiens
ggggcagaggaccataattaaatggctgtggaaacccagaagcagcctacagaaactcttaggagccctccgtctgggaggaattttttttttttttttttttggtatatctgtgtttacagttctagaaaagtgttggttttgagggcaatggagacaggaatgaggagaaaatgtataaaggagaggttgctgtgagcc

SEQ ID NO: 165271 - DNA, 201 bp, Homo sapiens
ggcaggcgaatcgcttgaacccgggaagcagaggttgtagtgagctgagatcatgccactgtactccagcctgggtgacagagcaagactgtctcaaaaargaataaaaatgaataaaaattatgtgattagagaggggaaaacaatcatttcttgtgcgctaatgccactcagcaggtgcttacactgtctggttcatcc

SEQ ID NO: 165272 - DNA, 201 bp, Homo sapiens
cccctgggcaggtgcatgagggggtcccaggcaatcaggctcttctcaaacctgaattatacccggcctcagggtataggggtcaggcagctgtttgacargattcttgcaaatgtttttggtttctctgtctactcattacgtacactctgccagaggttgaaaactcaatgttgagatcacatacatcctgaaaacact

SEQ ID NO: 165273 - DNA, 201 bp, Homo sapiens
cccaaagcttgctgtcccctgggcaggtgcatgagggggtcccaggcaatcaggctcttctcaaacctgaattatacccggcctcagggtataggggtcargcagctgtttgacaggattcttgcaaatgtttttggtttctctgtctactcattacgtacactctgccagaggttgaaaactcaatgttgagatcacata

SEQ ID NO: 165274 - DNA, 201 bp, Homo sapiens
ggtcaaggtagtgttcattaggtttctccactgcacacttagtctttccctctactttccacactgctgcctttggaggagtgttgctgtgcccagctcaygcttgtggagtggggatttaatgttctcactcttcgagggtagagtatctgcataaactacttggaattctacatggaatatttgtgtcttctcccccat

SEQ ID NO: 165275 - DNA, 201 bp, Homo sapiens
aagcacgggggtttatgtgatggctccacagagcagtgaaaagactcccgccctactgctcgcaacctcagatgtccctgggcactagcccatctgtatgkctttaaaaaaaataaattaaatttttaaaaacatgactttctggccaggcgcagtggctcatgcctataaccctgcacttagagagggcaagacagaagg

SEQ ID NO: 165276 - DNA, 201 bp, Homo sapiens
gtctccttagcatcttcttggctgtgacagtttctcagaattgtctttgtgatgaccttgacagctttgaggagtgctggttgggtattctgtaggatgcycctgtgttgggatttttatgatgtttttctcatgagtttactggagttaatgaatttcagggaggaagaccccagaggtctgttttcatcacatcgtatc

SEQ ID NO: 165277 - DNA, 201 bp, Homo sapiens
agatctcactcactgtggtgaagacagcgccaagccatgagggctccgccccagtgattcaaatacctcccattacggacatgtttcaacatgagatttgrgcggggacaaatatccaaactatatcaggatcccagcagactgggtgggtggaggttcagggatatctgggaaggactaagaatagctttttcttttagt

SEQ ID NO: 165278 - DNA, 201 bp, Homo sapiens
gagatcgtgccactgtactccagcctgggtgacaagagtgaaactccatcttaaaaaaaaaaaaagtgaacccttgtagtttcttcctctgtttgacagayggaccctaagacggccccagtgataccccacctcctggtgtccaaggcctgatgtgatcacccttcccccaccttgaatgtaggtgggacatgggactta

SEQ ID NO: 165279 - DNA, 201 bp, Homo sapiens
tctcactcactgtggtgaagacagcgccaagccatgagggctccgccccagtgattcaaatacctcccattacggacatgtttcaacatgagatttgagcrgggacaaatatccaaactatatcaggatcccagcagactgggtgggtggaggttcagggatatctgggaaggactaagaatagctttttcttttagtaga

SEQ ID NO: 165280 - DNA, 201 bp, Homo sapiens
ggcacaatctcgactcactgcaactttcacctcctgcgttcaagcaattcttctgcctcagcctcccgagtagccgggactacaggcacgcgtcaccatgyccagctaatttttgtatttttaatacagacggagtttcaccatgttggctgggatagtctcgacctcctgatctcatgatctacacacctaggcctccca

SEQ ID NO: 165281 - DNA, 201 bp, Homo sapiens
cacttgtgacagagggaggaacatagggtgcataagagagatgtggggaagcactccccatccaactcgttccaaccagttcatcttttttttttttttttcttttttcgagaaagagttttgctcttttccccaggctggagtgcagtggtgcgatcttggctcactgcaacctctcccttccaagttcaagcaattgtc

SEQ ID NO: 165282 - DNA, 201 bp, Homo sapiens
tgcaagagtcagcaaagtttctctgtgatgggatatttaataaatattttggggccttgtagtgtttgttgccaactactcaactctgccctcatagtgcraaaacaggcataaacgatatgtaaaggagcaggcatggctgcgagaaactttatttatggatactggaatttgaatttcatatacattttcatgtgtcac

SEQ ID NO: 165283 - DNA, 201 bp, Homo sapiens
ttctgcctcagcctcccgagtagccgggactacaggcacgcgtcaccatgcccagctaatttttgtatttttaatacagacggagtttcaccatgttggcygggatagtctcgacctcctgatctcatgatctacacacctaggcctcccaaagtgctgggattacaggcatgagccaccgtgcccgacctcccgagtcat

SEQ ID NO: 165284 - DNA, 201 bp, Homo sapiens
ggccaccatggtgaagccccgtctctactaaaaatacaaaaaattagccagctgtggtggcacatgcctgtaatcccagctactcgggaggctgggacagragaaccactggaacctgggaagcggaggttgcagtcagccgagatctatgccattgcactccagcctgtgtgacagagcaagactttgtctcaaacaaac

SEQ ID NO: 165285 - DNA, 201 bp, Homo sapiens
ttctctgtgatgggatatttaataaatattttggggccttgtagtgtttgttgccaactactcaactctgccctcatagtgcaaaaacaggcataaacgayatgtaaaggagcaggcatggctgcgagaaactttatttatggatactggaatttgaatttcatatacattttcatgtgtcacaaaatattattctttccc

SEQ ID NO: 165286 - DNA, 201 bp, Homo sapiens
accatgcccagctaatttttgtatttttaatacagacggagtttcaccatgttggctgggatagtctcgacctcctgatctcatgatctacacacctaggmctcccaaagtgctgggattacaggcatgagccaccgtgcccgacctcccgagtcatttcttatcttgttgctccaatttccattcccactgacagtgtag

SEQ ID NO: 165287 - DNA, 201 bp, Homo sapiens
tttcgtttgttctgtttcccactgagagaattttctagctttatgtggagaaaacagtattggaaattattactcagttcaagaaaacctcactgagcacytaccatgtaggtgctcatcccgataccactatcaggccctttggaccagttgcaaggatgcaggatgaggaaggcaatgtgagaaaacagaaggagcacc

SEQ ID NO: 165288 - DNA, 201 bp, Homo sapiens
aattaatgttgagaatctagtcaatctgccagcagtacgtacataactgttctgtgtatatttcacatggccatatatgttttgcttgtgtggtgctaaaygcaaaggcagagaagcttctgctattgaatgcttagcacagaactcctgtcctccctctttgaaattattccgacagttgcccctcatttggcttgccaa

SEQ ID NO: 165289 - DNA, 201 bp, Homo sapiens
acagccgtgtttggcccagcggttatagtttgccaacccctgcttagagtctagctttattcagagcttaaatatgtcatcgaggtcccctctttatttawtcccttagttttgatgatcttttatgggttatattcttcaaagggaaaattctctccgaatggggctgccactggcagacgagcactgtcccatcttggc

SEQ ID NO: 165290 - DNA, 201 bp, Homo sapiens
gcttgcagtgttcttgggactagcaggagggcgtgtcaaaattgtaaaactctgcctatttgatgtaatatttgaaactagaaaggtaaaattccagggaygctagtgacactatggtaacctgattgtacagtgacattcatgtttaaaccagtcttggaagataatgctgtagcacaactgtttttgcatcattaaatt

SEQ ID NO: 165291 - DNA, 201 bp, Homo sapiens
cagacattgaactgaatctccaccttgggcttgagactctgcaaagtgcattaaatgggaaggaaaccaaagggcctgctgccctgcccccgccatagccyaaggctgtggccatggctggggaattggcctgtcagttcaatcaggcagcccctctgactggtgtttttcactaagctggccccatggatggccctggtc

SEQ ID NO: 165292 - DNA, 201 bp, Homo sapiens
tcaaaaaaaaacaaacaaacaaacaaaaaaaaaacaaaacacatgctggtgcacacataaatttggaagaaatgctctttaacccagtatgagcacgtggkattcttatcctcattttacagatgaggaaattgaggcacagacagattcaataactacgtgactcacagagataaccgtgtagcagaatcaggaattcag

SEQ ID NO: 165293 - DNA, 201 bp, Homo sapiens
attcagagcttaaatatgtcatcgaggtcccctctttatttattcccttagttttgatgatcttttatgggttatattcttcaaagggaaaattctctccraatggggctgccactggcagacgagcactgtcccatcttggcttgttcccccagtgacaagaagctgttttccccactacccttggcccaaaagccacag

SEQ ID NO: 165294 - DNA, 201 bp, Homo sapiens
cccaagatgatgattatggaaactcaaattttgcaccagaagctgtagttaccatttcattccattgcaccattcataccctgcagagaggatgtgaagtygtaaggccttcttgctctggtgacatctgttaggcttcgtctctatatcatcccccaactccttgacccttgatatttgctggtctacttcacttcaggt

SEQ ID NO: 165295 - DNA, 201 bp, Homo sapiens
catgtcaggaaggtgtccgatcagaacctgaatgccagctcaagctgctctcagctaaactccaggggttgctgatggagacttcatcccctcctccagtyccgggatcaagacagaaatgtaaatcacctccaagaatgggtctgcgtcttgcacattttccttttgagaaagaggaaaattctcagctggtctagcttt

SEQ ID NO: 165296 - DNA, 201 bp, Homo sapiens
tgcatctgtgaagattccatttctaaataagatcacatgctagggctgggcacggtggctcatgcctgtaatcccagaattttgggaggccgaggcaggcrgatcacttgaggtcaggagtttgagaccagcctggccaaaatggcaaaaccccttctctattaaaaatacaaaaattagccaggtatggtggtgcgtgcc

SEQ ID NO: 165297 - DNA, 201 bp, Homo sapiens
tcgaggtcccctctttatttattcccttagttttgatgatcttttatgggttatattcttcaaagggaaaattctctccgaatggggctgccactggcagrcgagcactgtcccatcttggcttgttcccccagtgacaagaagctgttttccccactacccttggcccaaaagccacagggagaaccaggattggcctag

SEQ ID NO: 165298 - DNA, 201 bp, Homo sapiens
tttcttttttttttttttgcattttccagacgagccaagggatggctcagaagggtgaaggaactcacccgaattgcacagctggtgagctcagagtcagkctccttgcttggtccatctggcttccaaactccaagtctgtctgctccaccccatggcccatctttttaccatgtttagtatcaatgttcatactttgca

SEQ ID NO: 165299 - DNA, 201 bp, Homo sapiens
cactgttctaaacacatgacaccaatagctcactcagattcccgcctctcaacagggaaactgaagcacaggaagtttcagtgatgcacttaggcaaccaktaagtggcagggtcggcattgaggtcaagactggttggacccctaagtttgaacaatcaaactggactttggggctcacagtttgtttcatgtcaggaag

SEQ ID NO: 165300 - DNA, 201 bp, Homo sapiens
ccaggatgacctcattttaccttaacaagttgcatctgtgaagattccatttctaaataagatcacatgctagggctgggcacggtggctcatgcctgtartcccagaattttgggaggccgaggcaggcggatcacttgaggtcaggagtttgagaccagcctggccaaaatggcaaaaccccttctctattaaaaatac

SEQ ID NO: 165301 - DNA, 201 bp, Homo sapiens
tttaggcagacacctatccctgaatcagtcatgtccccggatgatgcggttctctgcagcctgggcagtcaaggctggagataattctctgcttctccacrgagtctgagaggccccgttccctaatggaaaaatgaggtccaattttgcaaaaggaggcacctggggaaacattctggacacacaaatctatagcttcta

SEQ ID NO: 165302 - DNA, 201 bp, Homo sapiens
tggtgccctcacctcttaagacaagcacctatcgttttcctgtgtattccaagaggccagtgtggctggtggaataagatgttttcctgttttcaagatgsagtggactctcttttatttagcagcagtgtctatgtgttaggaatccatgtgagttctctaagtctgggacaacgataggtgtgtctgagtcctgcatta

SEQ ID NO: 165303 - DNA, 201 bp, Homo sapiens
gccagtgactacagtgtgcctggaaaggtcactggaggcatttttgtctggggcagcccctggagtcttggcttttgtgcttggtgagaccttatctggcytcttcattgtccccttcatacaaatagatagcttttagtgagcagctactctgcctggcactgttctaaacacatgacaccaatagctcactcagattcc

SEQ ID NO: 165304 - DNA, 201 bp, Homo sapiens
agggactcaagtcattggatttagggctcactggaatccaggatgacctcattttaccttaacaagttgcatctgtgaagattccatttctaaataagatyacatgctagggctgggcacggtggctcatgcctgtaatcccagaattttgggaggccgaggcaggcggatcacttgaggtcaggagtttgagaccagcct

SEQ ID NO: 165305 - DNA, 201 bp, Homo sapiens
catgtccccggatgatgcggttctctgcagcctgggcagtcaaggctggagataattctctgcttctccacagagtctgagaggccccgttccctaatggwaaaatgaggtccaattttgcaaaaggaggcacctggggaaacattctggacacacaaatctatagcttctaccgtcaatctgctatgatccttttatggt

SEQ ID NO: 165306 - DNA, 201 bp, Homo sapiens
gcaaacgttttgaaaagaaatctcctttcaaaaatcacagcactggttgaagcaggagcatctctccccttaaatgcaaaaggagttaatatgccagtgaytacagtgtgcctggaaaggtcactggaggcatttttgtctggggcagcccctggagtcttggcttttgtgcttggtgagaccttatctggcctcttcatt

SEQ ID NO: 165307 - DNA, 201 bp, Homo sapiens
aattttgcaaaaggaggcacctggggaaacattctggacacacaaatctatagcttctaccgtcaatctgctatgatccttttatggttctgacgttgcarttttatttttgcatgtttctagagacatcaggaggggatcttttcgggatgtggcttcagaaaggagcctgttggatggtctcttactagtggtcagcaa

SEQ ID NO: 165308 - DNA, 201 bp, Homo sapiens
cagtatctattggagttgggcttctgttgctttatttctcggggtctggcatatcccactccctgtcttgagatctcaggacctctgaggggcattgcatktaaagaacaagagcttattaggtatcaaaacatacttcatgaacagctacagcaagacctcgacattccagtgtagagctcttgaaagaccccagtgggg

SEQ ID NO: 165309 - DNA, 201 bp, Homo sapiens
agttgggggagagattttgaccaggcaggctctcaggtcggtgccatcggtgacgccaacacacctcctggcttggtgtgttttgtggcatttggcaggcmaacgttttgaaaagaaatctcctttcaaaaatcacagcactggttgaagcaggagcatctctccccttaaatgcaaaaggagttaatatgccagtgacta

SEQ ID NO: 165310 - DNA, 201 bp, Homo sapiens
tggtcagagagggctggtatgggaagaggggcaggtggctctcccttagagttactatttgactcacccctgacttcccagaatgtgtcttgagtctattmccctctcatatgggaggggtgacccaagtatgtttgtggcaaccaaaatgtctccaggcattgccagatgtctcttgggggtgcaaatcgtccccagttc

SEQ ID NO: 165311 - DNA, 201 bp, Homo sapiens
aaacccctaaattgtggtgcctcagtgatcttctataacataagttgatagtcaataattgcttaatgggaatcataaatatgagtttatttatatgtgtrtatatatatatatataaaatatatttccatgaatatactgaatgctaagccctccccactttttttttcttttttaaattcagaaatttctagttgtgtt

SEQ ID NO: 165312 - DNA, 201 bp, Homo sapiens
tctgtatttctcagggcagcgtgggacctcagggtttgtcatggaccacacctttctcctttgtccctttttataactcataggctacctccaacttgacrcttatttaagtttttatttattttatttagcattcagaaaactctatagcctcagtctctcgggatgtaaattaaagcaatttcattttcatagtttctc

SEQ ID NO: 165313 - DNA, 201 bp, Homo sapiens
ctcatagttttcaggtggcataagccatggcattttcacctcctttcctggttgtttccagaaagggatgatagccccagtgcagtggctctgtatttctyagggcagcgtgggacctcagggtttgtcatggaccacacctttctcctttgtccctttttataactcataggctacctccaacttgacacttatttaagt

SEQ ID NO: 165314 - DNA, 201 bp, Homo sapiens
tgccttcactgcacattccgggatcgccatgttctagaacattcatgtctgccttttagccagcagaatgctattctcacatccacaatgggacagctaayagcccccatttatcaaatccctgtcatatgctgtgtcaggcactttatatccctcatccaggaggatgcaaaaacctggtgtttttcttttttttttttt

SEQ ID NO: 165315 - DNA, 201 bp, Homo sapiens
gtgtgtgttgggggtggaattagcatgtagaggttggcaaaggggacaggagactgtgggatgattagtatattcttatttggcctgggagggaaaaaaartctttcatttccaacaatattcattctctgtgtcacctcagcatttaatttacttccgtcacaaaactacttgaagttgtcccaggctagttggtcctat

SEQ ID NO: 165316 - DNA, 201 bp, Homo sapiens
gtcaggccattggtataccattgtttttcttaaacatttatttattttcttatatttacagcatatgtggtcatttaaaattattttatagcatataaaastaaaaagaatataaattaattttttagcattaatattagggaagataatctgacatttaaaaatacatgtctatatgtgtatacatacatagaagtatat

SEQ ID NO: 165317 - DNA, 201 bp, Homo sapiens
ctgggcttagtaagttgcctgacttctcatcctggagttcggatccccttgtttctagaagagaaatccctcagatgtgaaggtgtgttccatgattttgycgaacttgccctacatactgttttattatatattctgcccacttctattccctgccaattaattaattgtttcattggtatagttttttttttttttttt

SEQ ID NO: 165318 - DNA, 201 bp, Homo sapiens
ttttagacaactggacacaggtttgtctttgaaattgtcctggtttttcttgatgttttagtgctcctggatgtccaatgtcattcttgggctagttgaargaaagttttggctacccagttgttagctgctgaagtttaactgtgcattctaagcacaccagtattttattacatcatacctgggcagcagataatttta

SEQ ID NO: 165319 - DNA, 201 bp, Homo sapiens
acaagaggtcacattgccttttctagcttggaaggtggcgcaaataactgcttgaggctccctctcttgggccaagcttgactctggattttcattgttgkccttttttattaaaacaggttttgtttttttgtgtgtgtgttattttgttttttgtttttttgtttttcgggggctggagtagtgtgcagagcctggcgg

SEQ ID NO: 165320 - DNA, 201 bp, Homo sapiens
ttgaacccgggaggtggaggttgcagcgagtcaaggtcacgccagtgtactccagcctcggtgacagagcgagactccgtctcaaaaaaaaaaaaaaaaaraaaaagaaaaagaaaaaggtgtttggaagccatgtcccatgaattccaaatacaattgaggactctataaaggactataaaaaaagttgtaataaattat

SEQ ID NO: 165321 - DNA, 201 bp, Homo sapiens
ccactgagcacatcctcgtggatcttcctggctctccttacaaggggttccttccaaacccaagcgccacaatccttaggcagattgctctgacacagaasactggtgagttctagacttgatgtgtttcatgggaaacaggaagacatttaggggaggctgtagatacacagccgctctgtttagggaaggctgtcgata

SEQ ID NO: 165322 - DNA, 201 bp, Homo sapiens
agggattcgtaagcttaggactgatagagatttggcttttctgctgttggattgatagctccttgactgctgaagccattgcccatctgttcaactgttgkattcacgaggaggttagacccctgacccaaggcccaggtacctggctttcctcagttgggatcagaaggccacaaagttttcttatattttaagcatcaa

SEQ ID NO: 165323 - DNA, 201 bp, Homo sapiens
tgaaaatgttagcaatatagtaatgaacaaaacagatgttatctctacccttatggtttttatattttaataaaagtggcagaaaagaaataggtaaaacwataaactgagctctttggagaagaggcccacgttcttttcagattctgatttctccgtgatataaatagttttttaggtgatcacttgtttttaatgtac

SEQ ID NO: 165324 - DNA, 201 bp, Homo sapiens
tcttcacctgggtgggcgatttgaatagagctcacagccctgaaaaccctggttttcagactctttattggtaaatgaagtcagcttagtgatatgagaawtatgaaacataaatccctttgtaaaaatataaaataatcttacaatcatcatcgtcatcctcatcatcgtgttccttcacaccagcggtatttatggtat

SEQ ID NO: 165325 - DNA, 201 bp, Homo sapiens
agaccctgtctctgaaaaataaaaataaaaaaaaaaattaagttagaagggagggattacgaccctcatgtgtatcaagaaacaagctccatgaagccccrtaggatggctcagcaccagaacgaggtctgactgttaagcaaagtcaagtgcatgatggctgaacattgctgggggaagattttgcaattatgcattgtt

SEQ ID NO: 165326 - DNA, 201 bp, Homo sapiens
ctgtaatcccagctactcgggagcctgaggcaggagaatcacttgaacccgggaggtggaggttgcagcgagtcaaggtcacgccagtgtactccagcctsggtgacagagcgagactccgtctcaaaaaaaaaaaaaaaaagaaaaagaaaaagaaaaaggtgtttggaagccatgtcccatgaattccaaatacaattg

SEQ ID NO: 165327 - DNA, 201 bp, Homo sapiens
tttcaatagagttgatatcgggtctatttattttgtgggagtgaagggatagggatagtactgacagcattatgtgattgcagcctcattgataagcatcrgaaataatgactttaacattattttcagatagggagcactcagtaccaaccattatattaggctcatgggctcaacattttgctgtgcttttcatagata

SEQ ID NO: 165328 - DNA, 201 bp, Homo sapiens
gcacacacacacttttaagcatttttgatttatatatccctctgcatattttgtgccttgtgatgtgtttaacgaatgacagtgtctttagtgcattgctrcttggggtttctacactggaagtgtaatccgaggccttggaattggtcaaacaaaactcacttggcaacatttacttagagagcactctgcgagcactct

SEQ ID NO: 165329 - DNA, 201 bp, Homo sapiens
tacattattatgaggattattttctacctagatcaggtataaggtggatgtattattggcattcctaggactgttttaaaggaagtacctatgaggcctcrtgataagccagatgtccagaagccagcttgagaccagggctcctggtcacttaaaagatgtttggggctgggcgtggtggctcacacctgtaatcccagc

SEQ ID NO: 165330 - DNA, 201 bp, Homo sapiens
attgataagcatcggaaataatgactttaacattattttcagatagggagcactcagtaccaaccattatattaggctcatgggctcaacattttgctgtrcttttcatagatactgacacctgtgttttcattttgttgttgttgttgttttccctgccgggaaactgccgcatcctgtgttttcatggcatgatattaa

SEQ ID NO: 165331 - DNA, 201 bp, Homo sapiens
cacacataattcaaaggtaatgtaacttgccgtgtcggactttagtccattccgttaaatggagaaaaatgactgacgtgaagaatgacttattgattctyggtgggaaaatgacttctgtaatatgggaagtatggtaaaaggaatagcttaattatttagggagcacttttcaaaatgtgcttttacagcagtacaaat

SEQ ID NO: 165332 - DNA, 201 bp, Homo sapiens
gttccacatcctccctgtgggactaggggccagggcaatgggaatcagtgcagaaataaagctcatgctgtttgctctgccatgagtaacgaagtcctctrtatctgatcctgggtctcctgttttctgctagcttcctcaaaacttggtagctaactcattaacttacaaggaagaggttgaacgtgtagacccttcaca

SEQ ID NO: 165333 - DNA, 201 bp, Homo sapiens
tggggagtattgctagctattcccatagggagtgagagagagtgtaagtaaaatgcaatggcaggcacagggatggttgccattatcagttacattattakgaggattattttctacctagatcaggtataaggtggatgtattattggcattcctaggactgttttaaaggaagtacctatgaggcctcatgataagcca

SEQ ID NO: 165334 - DNA, 201 bp, Homo sapiens
aaatcccacatgaaaagtctcaatcacctggctcaaactcatagttttcaggtggcataagccatggcattttcacctcctttcctggttgtttccagaargggatgatagccccagtgcagtggctctgtatttctcagggcagcgtgggacctcagggtttgtcatggaccacacctttctcctttgtccctttttata

SEQ ID NO: 165335 - DNA, 201 bp, Homo sapiens
tttacattatacttaggctggtgttaggatgccgtggctgccaagtttacacaatgcactttctctctctctttcttcttttggtttatgatgtttttcartagtgtcatggaactcacttaatctgatttcatcaagtaaatatatgggaagttgagatgacatatttttatctgacatttgaagaaatattcataaaat

SEQ ID NO: 165336 - DNA, 201 bp, Homo sapiens
gctagcaacctaagggagcttgaaggtgattgaccatccccagtcaagcctctgatgagaccgcagccccactaggcaactagatttcagcatggtaagamcctggatggagaacccagctcagccatgcccagactcctatcctatggaagctttaagataataaatgtatgtggctttaagctgttaagcttttggtaa

SEQ ID NO: 165337 - DNA, 201 bp, Homo sapiens
tcagttgggatcagaaggccacaaagttttcttatattttaagcatcaaagtagcaccactgtacagcatctttacttaatctgccctctttcacgtgtgkgcatccctggcatgcttaaacaagaaaggcaaatgagagagagcgagtgagtgtgagcgagagagccctgaggtgccagaaggctgtggttcctttgtgt

SEQ ID NO: 165338 - DNA, 201 bp, Homo sapiens
ttcaggattgatcacaaaatcaaaaccattcctaccagccagaggtgggcacatgacccaggtcagaccagtcacagttcctgattcccggccacagtgcwtgatgggggaatgagcatatatcaaaccaggacagtccaagtccttccggggactttgctgccacagttgacagggggaggtatttgcataacttcacca

SEQ ID NO: 165339 - DNA, 201 bp, Homo sapiens
cattttgttgttgttgttgttttccctgccgggaaactgccgcatcctgtgttttcatggcatgatattaaggaacgatgggtaggatgctgaggagtaarttgctcgcacttttaaagacttctgcaaaactccacctacttttaggctccttaaaattcagtgactttatgagctggtatagcttcactgtttgtggga

SEQ ID NO: 165340 - DNA, 201 bp, Homo sapiens
tttggttttttttgtattttagtagagacgggatttcaccatgttggccaggctggtctcaaactctggacctcaaatgatccaaccgcctcggacttccraagtgctgggattacaggcgtgagccaccgtgactgacctgtttttaatttttttagagacagagtttcacactgtttaccagattggagtgcagtggtg

SEQ ID NO: 165341 - DNA, 201 bp, Homo sapiens
aaataaagacttgtgaaggtaaaactgtagcttacagtgtgcgactgtttaccttcttttggtttcttctcatttaataggttggtcatctctctgctggstttttcccccttttttctcccttctgtagaataacatgtggaccattaactatgatgctacttcttagctgcaaggggggaaaaatggaaaactccaggg

SEQ ID NO: 165342 - DNA, 201 bp, Homo sapiens
tgctaaataaggcaggaaattccattaagtttaaatgtgctgcccttaccctaaagtgtttggagggcttcgtagaagagccaaatagattcacacagatyttatttgtagagctgaatgtgcacttcattaaaatactttgtaaggtattcaaggatgggctaggagggtgaggattccaaatcagaatcttcaagccag

SEQ ID NO: 165343 - DNA, 201 bp, Homo sapiens
tcactgcaaactccacctcccaggttcaagggattctcctgcctcagtctcccaagtagctgagattacaggcgcccaccaccaagcccagctaatttttktggttttttttgtattttagtagagacgggatttcaccatgttggccaggctggtctcaaactctggacctcaaatgatccaaccgcctcggacttccaa

SEQ ID NO: 165344 - DNA, 201 bp, Homo sapiens
gacctcccaggctcaacctatcctcttacctcagcctcttgagtggctggaaccacaagcagatgccaccatgcctggctaactttttttttttttttttktttttgtagaaacagagtctctctatgttgcccaggcttgtcttgtactgggctcaagcaatcctcccatcttggcctcccacagtattgggattacagg

SEQ ID NO: 165345 - DNA, 201 bp, Homo sapiens
ttctgtatagtattggattttcaataaataaagtatgatataaacaagtctgcaaaccagcaagaactatataagccacttgctcaagtcaataagcgcaygctcacaaaggaacgtaaagttctgaagttcttctttggggcgtttgcaaaatgtcctattattgtcacctgcaggtggggggttggatattcctatttg

SEQ ID NO: 165346 - DNA, 201 bp, Homo sapiens
caaatgaatgaatgtatgagtgggtcaagaacaagattcggccccaaggagatacgcgactttctactttgttttctatttggatttcacacaaaggctckaaggtctcctggtaggccatgctcagaagtctgggttgtcccctgcccaggacaggctcaccctggcctgtgtcctaggtattgtggggccgctgtagga

SEQ ID NO: 165347 - DNA, 201 bp, Homo sapiens
aaaacctgaacctaaaaagaaattctttagccatgtccgtgtgaactaaattcagcgtcagatgtacaaggctgtggttctgaccacccccgggctatttytgaccacaggacagcttaaatggtgtggcccataaaatgtaatctgcaaactcaggctgaatgttgatctatttagggccaagagaagaccaggccttgg

SEQ ID NO: 165348 - DNA, 201 bp, Homo sapiens
cacagctgggagataacggggtggatccaagatttgcagctggtgtgtgggtgatgccggaagattggcctttttcaaggacttagacaagtattgtactsatacattatttgcatttatttgtatgaatacttctgggttcctaatatgagggtacctaaaaagtacatccgctgcgcttcttgtaatctgagggagttg

SEQ ID NO: 165349 - DNA, 201 bp, Homo sapiens
ttgctgaaggtccccagcctccttgctcccaaacacttcaagaaggaaaatgctgttgcagaaatgttgtctaagctttaccattcagtgtggcccagatmaacctgtcccttctttttgtgatcacagtgtgtaattataaagttatttgtgtgtttggtttatgtcttccacactggactgtaagatccatgagatcta

SEQ ID NO: 165350 - DNA, 201 bp, Homo sapiens
ttgttctttgatcattgtctttgtgtcttctccttttttttttttttcctggccaccgctcgcagtcttgaaccgaatctttcaaactttatatccatgtracctttgtataatgagggctgtgattaactgcagagttttaaagagtgaaagtcaagcataggtggctggctctgaaccatcactcccaataatgtgaaa

SEQ ID NO: 165351 - DNA, 201 bp, Homo sapiens
aaccttacctactcaagtgtaagatgagatgccactgtggtatcttcaaaggaatttagaatcatgtcttaatggctccattaagaagaattctttttctsttttctctgaaaagcatcccaggtcataaaatgtaatgtgggattgtaggttttgtgggaagatgcacttggcagcaattccttgagaggaggccttgaa

SEQ ID NO: 165352 - DNA, 201 bp, Homo sapiens
gactgggaagaaaaagaggtttaactggacttacagttccacatggctggggaggcttcagaatcatggtaggaggcgaaaggcacttcttatatggtgtmagcaagagaaaaatgaggaagaagcaaaagcagaaactgcctgataaacccatcagatctcttgagacttattcactatcatgagaataggatgggaaag

SEQ ID NO: 165353 - DNA, 201 bp, Homo sapiens
aaaaattcggatgcattttgcacagaattaagacgttatgtgcaatccttgtgtttctaattatatgttgatcaatgacacctttacaaaactgtcatcartctattggtggttgattggtccaaccttagcccgatacctctatctccgcttagtcattcctggtgggtgactgatgacccctgcttaacagtaaacttg

SEQ ID NO: 165354 - DNA, 201 bp, Homo sapiens
cgcccaccaccatgcctggctaattttatgtatttttaatagagacagggtttcaccatgttatcaggatggtctcaatctcctggcctcgtgattcaccygccttggcctcccaaagtgctgggattacaggcgtgagccaccgcggctggcgaaaattatatattatacacacaaacatacacacacgcacacaccaaa

SEQ ID NO: 165355 - DNA, 201 bp, Homo sapiens
accactggattagtctcttgcctttcaattttatgtttatatacaaatatatgtgcataccaaattttatatatatatatatatatatatatatatatttwtttttttttttttttttttttttggtcggagtctcaccctttcacccaggctggagtgcagtggcgcaatctcggctcactgcaagctccgcctcccggg

SEQ ID NO: 165356 - DNA, 201 bp, Homo sapiens
ttttaaatagttaatccatttaagaagtttcatttaaggtactgttaaaaagaaaaaacacagaacaacacagtgagagcagaaaaggtatcatctcctcyccctcttcttctcttttagaaaccttgctgcgtgatccactgatggtaaatatttcatgtactttgcatatcagcctgagttccttttgtgaagtcaggt

SEQ ID NO: 165357 - DNA, 201 bp, Homo sapiens
cccagattgatcttttctggatattgggtcaaccataagatggtacctttccctgtgtaacaaagtcagattctgtgaaacacctgttttttgtatggctyatgagatgaggatgatttttacctttttttttttttttttcccttgagacagtgtcattctattgtccaggctggagtgcagtggtgcaatctcagctca

SEQ ID NO: 165358 - DNA, 201 bp, Homo sapiens
gacttcataataaataagatgctgacagttgaaacccccttgaccgttgcctgtttggtatgacacagaccttcttggacttttgtagcctatacatgagyagatatgaatcctcagccttctccaaaataaggttggggtcactaggaggccttcttggaaagatgtcttaaattaaggcaccagtagatggatcaaaaa

SEQ ID NO: 165359 - DNA, 201 bp, Homo sapiens
acctgtaatcccagcactttgggaggctgaggtgggtggatcacttgaggtcaggagttcgagatcagcctggccaacatggtgaaaccctgtctctactrtaaactccgtctctactataaatacaaaaattagccaggcttggcgctgggtttctgtaatcccagctacttaggaggctgagacaggagaatcacttga

SEQ ID NO: 165360 - DNA, 201 bp, Homo sapiens
acactttgaaataatttatgttatgtgaatttcatctcagcaaaaagaggctaacacataaggagacatattttgatacatgtggcatattaagctgctgytgttgttttttaaatattccagctgcgtgcagtggctcacacctgtaatcccagcactttgggaggctgaggtgggtggatcacttgaggtcaggagttc

SEQ ID NO: 165361 - DNA, 201 bp, Homo sapiens
tttatataaaatatgcagagtaggcaaattcataaagacagaatacgcatcggtggtttctggggcggcggggagtatggaaagcctgttaatgagtacawgtttctttagttttttttggttttttgttttttttttgagacggagtcttgctctgttgcccaggctggagtgcagtggcaccatctctgctcactgcaa

SEQ ID NO: 165362 - DNA, 201 bp, Homo sapiens
cagagggattcgtaagcttaggactgatagagatttggcttttctgctgttggattgatagctccttgactgctgaagccattgcccatctgttcaactgktgtattcacgaggaggttagacccctgacccaaggcccaggtacctggctttcctcagttgggatcagaaggccacaaagttttcttatattttaagcat

SEQ ID NO: 165363 - DNA, 201 bp, Homo sapiens
cggggaggacgcgcactccagcgcagcgcgtgcggtgcaaagtgaaagtaactgttaaggagcttcagggaaaagggtccagggttcccagtaggggccgscccccttggtgggcctcgggtccagcgggggtcacctggtggcttcccggcgcgccctctgctgttcaggatgcagcactgcgcggcgcggcgagggcaa

SEQ ID NO: 165364 - DNA, 201 bp, Homo sapiens
ggaatagagaaaaggtggcttggctgtttggtttatgtcctaaaaccttatcgtaatgtgattctccttaacagagggattcgtaagcttaggactgataragatttggcttttctgctgttggattgatagctccttgactgctgaagccattgcccatctgttcaactgttgtattcacgaggaggttagacccctgac

SEQ ID NO: 165365 - DNA, 201 bp, Homo sapiens
cagtgtgatcttggctcactgcaaactccacctcccaggttcaagggattctcctgcctcagtctcccaagtagctgagattacaggcgcccaccaccaarcccagctaatttttttggttttttttgtattttagtagagacgggatttcaccatgttggccaggctggtctcaaactctggacctcaaatgatccaacc

SEQ ID NO: 165366 - DNA, 201 bp, Homo sapiens
cttttctgactgctcaaaacagggaataataaacagtcagagtgtccaagtaatctgagctagaaagttccttctttcagagaaaagttataaaaagtatwtttgccggatccaaaaaaaatactgtgtatcaactactgagacctgcataatgttttcttagtattctcactctttaaaagaaaaaagaaaacctgtaaa

SEQ ID NO: 165367 - DNA, 201 bp, Homo sapiens
ggaaatggaatagagaaaaggtggcttggctgtttggtttatgtcctaaaaccttatcgtaatgtgattctccttaacagagggattcgtaagcttaggamtgatagagatttggcttttctgctgttggattgatagctccttgactgctgaagccattgcccatctgttcaactgttgtattcacgaggaggttagacc

SEQ ID NO: 165368 - DNA, 201 bp, Homo sapiens
tcagagtgtccaagtaatctgagctagaaagttccttctttcagagaaaagttataaaaagtatatttgccggatccaaaaaaaatactgtgtatcaactmctgagacctgcataatgttttcttagtattctcactctttaaaagaaaaaagaaaacctgtaaaatttgggaacttaaactttttttgatattttaatat

SEQ ID NO: 165369 - DNA, 201 bp, Homo sapiens
tgtcacccaggctggagtgcagcagtgtgatcttggctcactgcaaactccacctcccaggttcaagggattctcctgcctcagtctcccaagtagctgarattacaggcgcccaccaccaagcccagctaatttttttggttttttttgtattttagtagagacgggatttcaccatgttggccaggctggtctcaaact

SEQ ID NO: 165370 - DNA, 201 bp, Homo sapiens
acatggcaaccaaataagagtagctggagcagagactttctcttcttcagattattaagatttgagcaattcattttttttggatggtgtttattaaagtmaagaaatcttttgcttatttgctaatgattctctcccctttctcttcttatatttttgaaggctgaattggtaaaattatctggcccaataaaaatatgt

SEQ ID NO: 165371 - DNA, 201 bp, Homo sapiens
gaatacactagtaggtacagcaggagagcatgtagaagaggatagatgtagaaaatcgggacggcatgttaggaatatagataggaattactaaggaaaaktgtatttttgtggaattctttgaactcgttactattagtaaacggtgagttttggttctactcttcaatgagtttaagatgaaggaaatcattaaatagt

SEQ ID NO: 165372 - DNA, 201 bp, Homo sapiens
atctggcccaataaaaatatgtcctgggttggaaaagagcacaagtttctttttctagccctggagtgaggtggctctctggcctctgggttcgtttggtrtcctggggagtcattgacacccacacactcctagtcacaagacctttccctcccatccagattgtgtttattttacggctctcgcacggagcatgcagct

SEQ ID NO: 165373 - DNA, 201 bp, Homo sapiens
atatggtgtcagcaagagaaaaatgaggaagaagcaaaagcagaaactgcctgataaacccatcagatctcttgagacttattcactatcatgagaatagsatgggaaagaccggcccccatgattcaattacctccccccgggtccctcccacaacatgtgggaatcctgggagatataattcaagttgagatttcggtg

SEQ ID NO: 165374 - DNA, 201 bp, Homo sapiens
tacaaaattagccagacatggtggtgcatgcctgtaatcccagctactcagaaggctgaggcgggagaatcatttgaacctgggaggtggaggttgtggtragctgagatcacgccattgcactccagcctgggcaacgagcgaaactctgtctcaaaaatgaatgaatgaatgaatgaatgaatgaaatactacttctcc

SEQ ID NO: 165375 - DNA, 201 bp, Homo sapiens
ctttcctttataaaccacccagtcttgggtatttcttcttagcagcatgagaagggactaatacaggggtgatcacaaacagcctgcagactgggccatckttcttaggcaggatctcgagctaggagatgagaagagctctataggcaaaaagaatgacttggaaggccacatatggcagagtagctaagactttggggt

SEQ ID NO: 165376 - DNA, 201 bp, Homo sapiens
taccctggaacttaaaagttggtgaaagaaagaaggggccgggcatggtggctcacgcctgtaatcctaacattttgggaggtcgaggcaggcagattgcytgagctcaggagttgaataccagcctgggcaacacggtgaaaccccgactctactaaaatacaaaaaattagccgggcgtggcagtgtgtgcctgtaatc

SEQ ID NO: 165377 - DNA, 201 bp, Homo sapiens
tggctgattcatgtcatgagagatcctgagtcagaaccacccagcagctaagccacttctgaatccttgacccacaaaatatggtaagataccaaatggtkactgttttaagccactatgctctgggggaatttgtgatgtagcggtagataactatcacaggatccatggcctcaaggggagaaggatccttaagagaga

SEQ ID NO: 165378 - DNA, 201 bp, Homo sapiens
gagtgtctggagttgccaacgtcctctccttgggtcatgggtgtgtgtgtgtgtgttttcttcttgttgttgggtttttttttttttttttttttttttttggcttttgcgcctatggtgacttttagcgaatggatactattgaaggaatgtttcacttccaaatccagatctctgacttcccttgaaaatttggagtgc

SEQ ID NO: 165379 - DNA, 201 bp, Homo sapiens
gccactgtgcccggccttagatgaggtttgtagatgtgtttttcatattcccaaagccatgaaatttgacaggtaaatatatcagttataaaagttttagsattaattatcaactaactcccagaagttgcctcagcctctctttttcagccttgtcttgccccagcccagagacaagccacagctataggttttatttct

SEQ ID NO: 165380 - DNA, 201 bp, Homo sapiens
ggcagctggagagcgtgcagactcaggagccaagacctgccttgccttccctggagttaatgaatcagtgtgaatgaagagcacagtcttcttttaaatgrcaggggaaccgtgcacttatttaccggcaattctcagattctaattgttccgactacaatgcgtcctgtaaaccgggtagctgggagaaacttcaatgca

SEQ ID NO: 165381 - DNA, 201 bp, Homo sapiens
agagtgtctggagttgccaacgtcctctccttgggtcatgggtgtgtgtgtgtgtgttttcttcttgttgttgggtttttttttttttttttttttttttttggcttttgcgcctatggtgacttttagcgaatggatactattgaaggaatgtttcacttccaaatccagatctctgacttcccttgaaaatttggagtg

SEQ ID NO: 165382 - DNA, 201 bp, Homo sapiens
ttcccagtaggggccggcccccttggtgggcctcgggtccagcgggggtcacctggtggcttcccggcgcgccctctgctgttcaggatgcagcactgcgyggcgcggcgagggcaaagcggcctcatccccgccaaaaaataaagatgttttaaaaagcgcacatgctcagctccctcctgcaggctctgggttgcaggg

SEQ ID NO: 165383 - DNA, 201 bp, Homo sapiens
tcttattggaacagctggttttccctttaaaacagggagtccagcagcttctaggatgcttagaatcagaattgttgctcactttttaaggtatagagtakttgtcttattcttaactacattttatatctttgcccttttttcccctactttaaataaaatctatctctaatttatgttacttaagcaatgacaaattct

SEQ ID NO: 165384 - DNA, 201 bp, Homo sapiens
agcgtgcagactcaggagccaagacctgccttgccttccctggagttaatgaatcagtgtgaatgaagagcacagtcttcttttaaatggcaggggaaccrtgcacttatttaccggcaattctcagattctaattgttccgactacaatgcgtcctgtaaaccgggtagctgggagaaacttcaatgcatctttgtaatg

SEQ ID NO: 165385 - DNA, 201 bp, Homo sapiens
tttattgtgggacatttagagaatctcagactagcaggtgttagattaaacagaggagaaacggtccttgtggtgataaaacttccctacgcaaggacaartagagaaacaactgtagatgaagcagccagtctcaggctggggcagcacgccctgcgataggttaaggtttattttagacaaatatttaaaatgcagcta

SEQ ID NO: 165386 - DNA, 201 bp, Homo sapiens
gagagtgtctggagttgccaacgtcctctccttgggtcatgggtgtgtgtgtgtgtgttttcttcttgttgttgggtttttttttttttttttttttttttttggcttttgcgcctatggtgacttttagcgaatggatactattgaaggaatgtttcacttccaaatccagatctctgacttcccttgaaaatttggagt

SEQ ID NO: 165387 - DNA, 201 bp, Homo sapiens
ctacttccttcttatatctggctatctgggagagaaaaaatttaatacaattgattactttttagaagagttaatttttacttattactgtggattttttkttttttaacagtcacaccgaggagaagactcagtgggaacatccaaaaactggaaaaagaaaacgagtggcaggaggtttgtatgttgttgtctaaggat

SEQ ID NO: 165388 - DNA, 201 bp, Homo sapiens
caaatgtttacatggggctgtggaccattttgtatcattggaggagaagccagggcacttggcaggggtgttcatgatgataatcaggtggctgggtggastcaccatttgtggcatcctcaaagacttgccaacatagacatttttggggagacagaaacacagaaataattctgcagtgctttaaagaatctgttaaaa

SEQ ID NO: 165389 - DNA, 201 bp, Homo sapiens
aataactctgtgttgagaaatattcctgtctgtaatcccggcactttgggaggctgaagcgggcagatcacctgaggtcaggagtttgagaccagcctggscaacatggtgaactccccccaaccaacgacccttcccatatctactaaaaatacaaaaattagctgggcatggtggtggggacctataatcccagctact

SEQ ID NO: 165390 - DNA, 201 bp, Homo sapiens
ataaaatatctttggggtgtttaaggagaattattctttttacaagttctgattaatgacaccgcaaaaatgagaataatgagctaatatgtatctagtamttgctatgcacttatatgtatagaagcgtataatccacagcactccttctgaatacgttacgtaaatggaaccctcgcaacagtcttatccccattgtag

SEQ ID NO: 165391 - DNA, 201 bp, Homo sapiens
ttctttccttccctttttccttttctttccttctttccttgccatttaaaacatactgataacttggcagcacagggcagtgattaaactcaggcactcaycccaccctacctgggaatctgaattctgtcttttctgctgctgtggattctcagtccccaagttgtgtaaatcaaagcttctcctgccacactagtgtgt

SEQ ID NO: 165392 - DNA, 201 bp, Homo sapiens
cacagaaataattctgcagtgctttaaagaatctgttaaaaatcaagtttctttcagtcatgtatgatccattgggctttatataacttttagcctttgcyttgcagggacagcaaagatgtgagcaaatttgtgcaaacctaatagggtgaaaaattgaggtatgaattagtaaagtcatttgtccttctggaaagagtt

SEQ ID NO: 165393 - DNA, 201 bp, Homo sapiens
taatggatttttagcctcaagtttctggaattctaagagggcctgaaaggtaagtgctcacttactgaggtgtgtgaacaaaaacaggcaacctagctcarcaagtaagaatggagtggcatctccccacctgctctggagtcatgtgtttgcttctggaagggaggcaagaggcattcaacctcctgttaatttggttgc

SEQ ID NO: 165394 - DNA, 201 bp, Homo sapiens
aggaagaactcttccaaatgatggcagggatatttggaatctttccccctgagttccctctggaagttaaagcccagatcccgtgaactgattaaaaagcyccagaccattcccgttccagtcatcttgaaactgagcaagaccgtgtcatccatggagcttgaacataggagcactttaaaaaaaaaaagaatgaaaagc

SEQ ID NO: 165395 - DNA, 201 bp, Homo sapiens
gcactttaaatgcattaattcagttcatctttatgacaacactatgagatagctaatattatgaatcctattttcagatgaaagactgagtcttagggaasaaacagccgagagatgaaatgccacagggatgtctaggttcaaacagcaacagaggtgcgtaccatagggatgtggaagccttgcttgtcttgttcctct

SEQ ID NO: 165396 - DNA, 201 bp, Homo sapiens
attcagcctgaaggcctacttgatgctgcaactgaaaaattgttagactagattttattttattttaattctttttgagacagggtcttagtctgtcaccyaggctgctggagtgcagtggtgcaatcatggctcactgcagtcttgaccaccctggctcaggtgatcctcccacctcagcctcccgggtagttagggcta

SEQ ID NO: 165397 - DNA, 201 bp, Homo sapiens
ggaagaactcttccaaatgatggcagggatatttggaatctttccccctgagttccctctggaagttaaagcccagatcccgtgaactgattaaaaagccscagaccattcccgttccagtcatcttgaaactgagcaagaccgtgtcatccatggagcttgaacataggagcactttaaaaaaaaaaagaatgaaaagcc

SEQ ID NO: 165398 - DNA, 201 bp, Homo sapiens
gggatgtctaggttcaaacagcaacagaggtgcgtaccatagggatgtggaagccttgcttgtcttgttcctcttggtataaccccagtgagtagcatagygcctggtcaattggagggatttggtaaatatttactgagtgagtgagagggtaaaacagctgagccatgggagttataacttgggcagcagtaatcctgc

SEQ ID NO: 165399 - DNA, 201 bp, Homo sapiens
gtgagttagtgccatatatagcagtgttgtcagtaagatttctcactggcatctctgcttcccctcttgactctcttgaaatcccttcttcaggcagaagytggagtcatttctctaaaatagaaatctgatcttgccaccaccctacttgccactccctgcttaatcccttcactggctcaccatatcccttaggataaa

SEQ ID NO: 165400 - DNA, 201 bp, Homo sapiens
tcattctggagcagtgggagccgactgtgatgcagagtggactcataatccagcttgattttgagggacagaaacctgggcctttaggtagaatgaacagsttaaaaggctgcacctgagagtagggggcatatgggtaaatccagctgtacccaagagttgggggcatatgttagccctactgggtaaatccagctgcac

SEQ ID NO: 165401 - DNA, 201 bp, Homo sapiens
gctacaaaacctggcattttacttctctcattttccccaaatgatctaggtgtcttttgctcactggtgataaggggtgacattggtatcacaggtaaaartgagtaaatttgagattattgtcgtcttgctttaaaggttggagatacagcttcaaaaaccttttactacccacacacccaaggggagtcaaatggattt

SEQ ID NO: 165402 - DNA, 201 bp, Homo sapiens
cattcagccctcgggttaccattggtagcacatctaggagcaagttttaattttttagtcatagtgactgtgctggatttggtaggtcgtacgaattgggkaagaggcataggacaccaaggattttgcaaaaagcaggcaactaacatttgttttccacctactatgattatgttaggctctcaatatatgtttaccact

SEQ ID NO: 165403 - DNA, 201 bp, Homo sapiens
tgtggtgtgcggtgcaacccgggctgtgttcccgagtgcatcaaacggggattgggacctgttttccttcccactcacatgtaggtcacctacgggagcargggaggaaccatctgaggtgtttttttttttttttttagatttctcattgctgagaacagttccagctctgctgaccaaaggctgagtgtccttttatta

SEQ ID NO: 165404 - DNA, 201 bp, Homo sapiens
atataattcaagttgagatttcggtggggcgcagccaaaccatatcagacacaaacattcaattcacagcattctaccccagccctccaaaattcatgttyttctgacatgctaaatacatttattacatccaaatatccccaaaatcttaactcattccggcatcagctgtaaagtctatgtctttttaatttttttaaa

SEQ ID NO: 165405 - DNA, 201 bp, Homo sapiens
tctccgacttatgtatgattcatcaagaggactccaggctgtggtgtgcggtgcaacccgggctgtgttcccgagtgcatcaaacggggattgggacctgktttccttcccactcacatgtaggtcacctacgggagcaggggaggaaccatctgaggtgtttttttttttttttttagatttctcattgctgagaacagt

SEQ ID NO: 165406 - DNA, 201 bp, Homo sapiens
gcagaaaggtgcctatcatgtcttcagtgtcagtgccctggtatggagctagctggccttccacaggttctggagttaatgctggagagaagtaggggtgkcagagcctaccctgtgttcctaggggggttcatctggagctagtccctgacccttaggtggaagatgcagctatgcccaaggttctgaagaccctgtaaa

SEQ ID NO: 165407 - DNA, 201 bp, Homo sapiens
aagaggtcacataggatattccatttatataaaatatgcagagtaggcaaattcataaagacagaatacgcatcggtggtttctggggcggcggggagtakggaaagcctgttaatgagtacaagtttctttagttttttttggttttttgttttttttttgagacggagtcttgctctgttgcccaggctggagtgcagt

SEQ ID NO: 165408 - DNA, 201 bp, Homo sapiens
aggagctcttggattgcaatttttcattcacccctccctctccacccttcctgtcttcaagcctgagcaggtgatactgcattttgtaccgtatgactttwaaacagaaccacgagttcagaactttggttaggtcctgcccgtgttctctagctaacgcatggcaacgctggtttccaacctttcactgtgcgggtttct

SEQ ID NO: 165409 - DNA, 201 bp, Homo sapiens
atgtttacatggggctgtggaccattttgtatcattggaggagaagccagggcacttggcaggggtgttcatgatgataatcaggtggctgggtggagtcrccatttgtggcatcctcaaagacttgccaacatagacatttttggggagacagaaacacagaaataattctgcagtgctttaaagaatctgttaaaaatc

SEQ ID NO: 165410 - DNA, 201 bp, Homo sapiens
agggagatggagggaggcaaaaagaaaaagggagaaggaaagagaggaaagaggggaagggaggaaggaaagaagagagagaaggaggaagagagggaagkaggcacagaggtagagaggcagggagataatggagatcctggccaaaagttaatgctccgtttctagtagtccacagaaagcaccttgaccaagtgactg

SEQ ID NO: 165411 - DNA, 201 bp, Homo sapiens
ctgcctcctaggctcatgccattctcctccctcagcctcctgagtagctgggactgcaggcgccagccaccacgcccggctaattttttatatttttagtmgagacggggtttcaccatgctaaccaggatggtctcgatctcctgacctcgtgatccaccagccttggcctcccaaagtgctgggattacaggcattagc

SEQ ID NO: 165412 - DNA, 201 bp, Homo sapiens
ctttccattaagtgagtctttctccaagggaacagaagtcttaggttgttgatctggcggtcagaacctaggacaggcaaggcagtgggctgttgtagagkagatgaagctgatcagagcacacccacaccagtgacaaccggtcaggacctgggaagggctctgacccattcatctgagagatgtggcatgaggaacact

SEQ ID NO: 165413 - DNA, 201 bp, Homo sapiens
actctcatgacataattacctcccaaagtccgcacttcctaatgttaccactctggaggttagaatttcaacatataaattttggggggacacattcagaycacaataatgttttataatgttcattttgctttaacaagagacacatgtcagatagtagacatgatctgagaagacacaaaacccagcgtggtgattttg

SEQ ID NO: 165414 - DNA, 201 bp, Homo sapiens
gaggatttgtttttgatctcataggtgtccatcttgctattttctcaactagcagaggcaactctctggggtatcttttaaaagggcactaatggccaggmgtggtggctcacacctgtaatcccagcactttgggaggccgaggcaggtgtctcggtggatcacttgaggtcaggaggtcgagaccagcctggctgacat

SEQ ID NO: 165415 - DNA, 201 bp, Homo sapiens
attggaaatggaatagagaaaaggtggcttggctgtttggtttatgtcctaaaaccttatcgtaatgtgattctccttaacagagggattcgtaagcttargactgatagagatttggcttttctgctgttggattgatagctccttgactgctgaagccattgcccatctgttcaactgttgtattcacgaggaggttag

SEQ ID NO: 165416 - DNA, 201 bp, Homo sapiens
caccgctcccgacggcctctagatattttgagtgattcagcaaacctcctaaagttgaccccgtagctggggtcacagtcctctttctccttcttcccccyacttccttcttatatctggctatctgggagagaaaaaatttaatacaattgattactttttagaagagttaatttttacttattactgtggattttttgt

SEQ ID NO: 165417 - DNA, 201 bp, Homo sapiens
tttcggatttatattattgcttacttggcacatcttccattggaaatggaatagagaaaaggtggcttggctgtttggtttatgtcctaaaaccttatcgkaatgtgattctccttaacagagggattcgtaagcttaggactgatagagatttggcttttctgctgttggattgatagctccttgactgctgaagccatt

SEQ ID NO: 165418 - DNA, 201 bp, Homo sapiens
aagtgctgggattacaggcgtgaactactgtgcctggccaggataatctttaagaagaagataacattagctattcttctcacttcctacgtagaattccmtaccctgtgtctttggcctggaaagggtattggtagcaattgtcttcggctttccctgccatgtgtatgcattcccacggccacacaagcacacacacac

SEQ ID NO: 165419 - DNA, 201 bp, Homo sapiens
tccacctcctttgagcctctgccaaacacaactgatggtggctgactgcctggctgcaggaagttctgaataagtgacctctatttgttattatttgggtyccctttgtttatttttacactagctttgcactaggttaattttttcccacatggcttttcctgtttgtttctttgattgtttttaattaataattagttt

SEQ ID NO: 165420 - DNA, 201 bp, Homo sapiens
gattctgccgataaacatcatctggacggaatgaagctgagggccaatagtttagaggctcagcacccgactggagagagagagagagagagagagagagwgtgtgtgtgtgtgtgtgtgtgtgtgtgcgcgtgcatgtgtatacgctggtgtttaggtgggcttgagaaaagtgctgactttgtgaacgaggaggaggga

SEQ ID NO: 165421 - DNA, 201 bp, Homo sapiens
tggattctgccgataaacatcatctggacggaatgaagctgagggccaatagtttagaggctcagcacccgactggagagagagagagagagagagagagwgtgtgtgtgtgtgtgtgtgtgtgtgtgtgcgcgtgcatgtgtatacgctggtgtttaggtgggcttgagaaaagtgctgactttgtgaacgaggaggagg

SEQ ID NO: 165422 - DNA, 201 bp, Homo sapiens
cttcccacaattcccagtgagcccaactccttaccacaattcccaccccatgccttccccaaattcctgatgagccctatgccttcccacaattccctgtraattttgctccttcccacaaccccagtgagccccactctgtcccataattccctgtaaatctcactccttcccacaatccccactgagtcccattccttc

SEQ ID NO: 165423 - DNA, 201 bp, Homo sapiens
ttgaggcaggagaatcatttgaacccaggaggcggaggttgcagtgagccaagattgcgccactgcactccagcctgggtgacagagcaagactctgtgttaaaaaaaaaaaaaaaaaagttctaaatcagtggattctgccgataaacatcatctggacggaatgaagctgagggccaatagtttagaggctcagcaccc

SEQ ID NO: 165424 - DNA, 201 bp, Homo sapiens
agatattcccctttcttctaaatatacttgaccaccaccattcaggttcttctattaaccctcctatatttgccaaccctcaacctgttagaaacaagaawtgggactctggagtagatgttagcaacatcatgagctcaaacccctccagcttacagcggagacagtgaggtcctgtaggatgaggttggagagcaggaa

SEQ ID NO: 165425 - DNA, 201 bp, Homo sapiens
ccactccttcccacaattcccagtgaaccccacttgtgtagtgtgtctgtgagtagtctgcccactctccttatgacaggtttccagtattatctgtttcmtaacccatttccaaccttctgggttttttccttcaacgtttcctgtgacagttctccattatatctttgttagataatagttagcaacccattaataact

SEQ ID NO: 165426 - DNA, 201 bp, Homo sapiens
tgggcctttaggtagaatgaacagcttaaaaggctgcacctgagagtagggggcatatgggtaaatccagctgtacccaagagttgggggcatatgttagycctactgggtaaatccagctgcacccaagagtagggggtatatgttagggctagtgcgtaaacccagctgcacccgagatatggggtatacatgagtgct

SEQ ID NO: 165427 - DNA, 201 bp, Homo sapiens
cgggtgtggtggcgtgtgcctgtaatcccagttactcgggaggctgaggcaggagaatcgcttgagcctgggaggcagaggttgcagtgagctgagatcgygccactgcgctccatgctaggtgacagagcaagattccatctcaaaacaaaacaaaacaaaaaaacaagaagttaaggattgcagagcataagtatcttc

SEQ ID NO: 165428 - DNA, 201 bp, Homo sapiens
tgttagaaaaggtattttttttatgaagtaagtagggaactaactacctgttcactgctgcccgttcattgctagcacaatgccaagtgtcaaataaatgyttcttgaacaagtgaatagagtacgcttctaggcttctggaaacggtgaatgttgctttatgtggcaaaaagggactttggagatgtgatcaagttcagg

SEQ ID NO: 165429 - DNA, 201 bp, Homo sapiens
ggtatacatgagtgctattgggcaaatccagctgcacaggagagtaaggggcatatgttagggctagtgggtaaacccagctgcacctgagagtaggggtrtatgttagggcttgtgggtaaatccagttgcacctggcagttggggcatatgttagggctagtgggtaaacccagccgcaccggagagttgtgggtatat

SEQ ID NO: 165430 - DNA, 201 bp, Homo sapiens
gagtttgagagcaatctggccaacatggtgaaaccctgtctctactacaaataaaaaattagccgggtgtggtggcgtgtgcctgtaatcccagttactcsggaggctgaggcaggagaatcgcttgagcctgggaggcagaggttgcagtgagctgagatcgtgccactgcgctccatgctaggtgacagagcaagattc

SEQ ID NO: 165431 - DNA, 201 bp, Homo sapiens
tacatgagtgctattgggcaaatccagctgcacaggagagtaaggggcatatgttagggctagtgggtaaacccagctgcacctgagagtaggggtatatsttagggcttgtgggtaaatccagttgcacctggcagttggggcatatgttagggctagtgggtaaacccagccgcaccggagagttgtgggtatatgtta

SEQ ID NO: 165432 - DNA, 201 bp, Homo sapiens
gccatgttggagagggatccaacatttattatccccattttacagatgaagaagttaaggtggccaggcatggtggctcatgcctgtaatcctagcacttygggacactgaggtgggtggatcacttgaggtcaggagtttgagagcaatctggccaacatggtgaaaccctgtctctactacaaataaaaaattagccgg

SEQ ID NO: 165433 - DNA, 201 bp, Homo sapiens
taagggtgttttaacaaaatggcaatttccccaggctggcttgtgtattaccttcgcattgcatcccttggctcccatgagtgagcgtggtgacttggtgygtaggtggtacgtgaagacagttgctcactacccaagaactcagggccctaaaccatgctgtaaaatgcaagtgctgatatctaattacctccatcaacc

SEQ ID NO: 165434 - DNA, 201 bp, Homo sapiens
cctacttggacccaagactggcgtttactgtggatgataatccgaccaagccaaccacccggcaaagatacgacggcagcaccactgccatggaaattctscagggccgggatttcactggcaaagtggttgtggtcactggagctaattcaggaataggtaggctcttcacttagttatttatctttgggactgctataa

SEQ ID NO: 165435 - DNA, 201 bp, Homo sapiens
agctgcacctgagagtaggggtatatgttagggcttgtgggtaaatccagttgcacctggcagttggggcatatgttagggctagtgggtaaacccagccrcaccggagagttgtgggtatatgttagggccagtgggtaaatccagctccatctgagatatggggtatacatgaatactagtgggtaaatccagctgtac

SEQ ID NO: 165436 - DNA, 201 bp, Homo sapiens
tcaagagtctttctcttccttttgagcccagctctccctttgtgacccagcaacttccttccccgatgatggccaagccttgaggatgtgaaactgcccartgccccaatctggagtccaccatcctgggtctagctggggacatccttgaatcagcctctgggaatcactgaaccaacatgagtcacttgctactgtgag

SEQ ID NO: 165437 - DNA, 201 bp, Homo sapiens
agcaaggtgttgatagaaccccttagtgtcctcctcataccacagacactctcttcccccacttacttggccaattttttttttttttttttttttttttkggtggagtctcgttctgtctcccaggctggagtgcaatggtgcgatctcagctccctgcaacctctgcctcccatattcaagggattctcctgcctcagc

SEQ ID NO: 165438 - DNA, 201 bp, Homo sapiens
ttcattgctgtgggttcactgctttctcttttgggcagccatataaataaaagaaccacctacttggacccaagactggcgtttactgtggatgataatcygaccaagccaaccacccggcaaagatacgacggcagcaccactgccatggaaattctccagggccgggatttcactggcaaagtggttgtggtcactgga

SEQ ID NO: 165439 - DNA, 201 bp, Homo sapiens
cacctgagagtaggggtatatgttagggcttgtgggtaaatccagttgcacctggcagttggggcatatgttagggctagtgggtaaacccagccgcaccsgagagttgtgggtatatgttagggccagtgggtaaatccagctccatctgagatatggggtatacatgaatactagtgggtaaatccagctgtacacgag

SEQ ID NO: 165440 - DNA, 201 bp, Homo sapiens
gaaatgacagtgattggaggtggtttatttttttttaagtctgcttactcggaaaaataaaacaaagttgacaacctgatttcagacctcccaattttttsttaaaaaaaataaaagtcttcttggtccatgaaatccagaaactggagaccaaactagcaaattcgcaaggagctgcttgatagaaaaacacttgagatc

SEQ ID NO: 165441 - DNA, 201 bp, Homo sapiens
ctgaaggaaaggattcgatgactatctttttttggcacaaatgtgatccttctggaggccagaagatagattcagtgggccccagttctttcaggtttaakgaataagcattttggtctatgaaaaatggggtttgcctaaagtataagattgtcttatatttataaatgcctgtgttcattgctgtgggttcactgcttt

SEQ ID NO: 165442 - DNA, 201 bp, Homo sapiens
tagataactcaagagactcaatcaacttcgtgtttaatgttttcgtaagaatacttcagaggcagtggtgtaatcgtccaagagtacacacaggcctgatygccaaagccagttttcttcaggcccagcacgtcctgacctcctcactcctctgcccactctctgtttactcactcccattttcattcattgattctgtta

SEQ ID NO: 165443 - DNA, 201 bp, Homo sapiens
tggggtatacatgaatactagtgggtaaatccagctgtacacgagagtagggggcatatgttagggctagcaggtaaacccagctgcaccccagagcaggkgtatacatgagtgctagtgggtaaatccagcagacgtccggactgtgcttgagggtgtcatcgagagagagaaggttgatccgaagttagtaaaggcttt

SEQ ID NO: 165444 - DNA, 201 bp, Homo sapiens
agatattccagctatggcaaactgcggaagaattaggacagatgtatgacttatttcatataaagctaaatcagtttaatttatatgattgtcctttattmtgagattatgttcaacagatattttcagtgttaaaatattcttttttttttttttttttgagacagggtctggctctgtcacccagggtctagcacagtg

SEQ ID NO: 165445 - DNA, 201 bp, Homo sapiens
ccaagagtacacacaggcctgatcgccaaagccagttttcttcaggcccagcacgtcctgacctcctcactcctctgcccactctctgtttactcactccsattttcattcattgattctgttattctccactaagttttctgggtggtcagcccaggaagcctcagcctgcttccagatagttctcctcagagttagcgg

SEQ ID NO: 165446 - DNA, 201 bp, Homo sapiens
ttggaggtaagtataaaaaccttcttgttttctactacttaaagctgaaaacccagcttgggttggctttgcttctaatatccttcttcctttttgtttcrtaagtaattgtcctgaagcctgtcgagataaatgtatactgaaagagaaagacacagaggagagacaggcatacagagaaagagagacacgcagacacac

SEQ ID NO: 165447 - DNA, 201 bp, Homo sapiens
atggggtcataagacattggtgaggttaggccttcctttgtctcccaggagcacacttgatagcaatgtagggtgaattccaaatctgtgagttagtgccrtatatagcagtgttgtcagtaagatttctcactggcatctctgcttcccctcttgactctcttgaaatcccttcttcaggcagaagttggagtcatttct

SEQ ID NO: 165448 - DNA, 201 bp, Homo sapiens
ttaccagacacatctcactttatggagcctggggctattggtaatatgcatttctttctcatcttgatcgtaaaatgatcttagaaaggtttctgagaatwtatagagtttaagacagcaataagacaactaattaattaaacaggaaaaggggatgttgtgctcagagaggaagtgtgggtctcataagggctttcacaa

SEQ ID NO: 165449 - DNA, 201 bp, Homo sapiens
ccccatcaacatgatggcccttggaaaggactcttttagcctccgcgagttccttttccgcaccaggctccacttacgaaggactgcaaaaacttgctaaygtcatcagtctgaaaggattgagctgtaaaatgtgttatgggggcctaagcaacgcatctggaatttagccttcccaagttcaaatccggtttatgccac

SEQ ID NO: 165450 - DNA, 201 bp, Homo sapiens
atgaacctgggaggcagagcttgcagtgagccgagattgcgccactgcacttcagcctgggtgacagagcgagaatctgtctcaaaaaaaaaaaaaaaaaraaagaaagaaagcaaaggttttttcctcccaagaactcatggtccaagttttggtttttaaatatgcatctatgacagcacggatcacatagtgcattga

SEQ ID NO: 165451 - DNA, 201 bp, Homo sapiens
ttaatagtaataataatatctaccacccactaggggtctatgtgtgtatgtgttgggggcggtgtggctggggagggaagcaaggcctgtattatggcccragctcaagaatattcgggcaagagcagatacaatgcctgtatttctcatcacttttgggtggcataggaccagttggttatgagcgtgaaaggttttctt

SEQ ID NO: 165452 - DNA, 201 bp, Homo sapiens
cacgcccggctcaaatccttcttacttttcctcaagaactcacttcccacccaaacctttcctattgtggcagctgttatcttgtccagcacatgtgtccrcacttggtattaatagctccatcttaggaactatgaaagtgaggggggtggtggtaatttgcatgaactggtttgggccagttatggtctgttacatcct

SEQ ID NO: 165453 - DNA, 201 bp, Homo sapiens
agacagtaagaaaggtgacgtcaatctgagatgagagagagagcaaaacagttcttttgaccaccttgaccccgaccttgaaataaggtggaactaataamtcccgctttgtgctggagcaagttttggctgagtttctgtcacttgcaaccaaatcagtcctatccagtatacctagtgactctctggtctccaaaggct

SEQ ID NO: 165454 - DNA, 201 bp, Homo sapiens
agaagcttagtctcaatttcagagagttattttggcaacatatttgggaaaatgatagttagatgctgcgttagccagcctctgcatgattttttacgcaraacaaacagttccaaatatcagtgctttcagcaactcatatatttctcacttatggtgcatgtcgctgatggttggctgctgctctgatctcactccagt

SEQ ID NO: 165455 - DNA, 201 bp, Homo sapiens
gcttctttttatttcttagagccagagctggaagacaaggcctggcatattttggcaggcctggatcagagcctaggtgtgtaaattaggaattgcatttsgctgctgctaacaaggacccaaacatggtggtaaattcttccacataaaacaacagaaaataagttgttttctggccctgggctggggtggccactccac

SEQ ID NO: 165456 - DNA, 201 bp, Homo sapiens
ggagttttgtttgcaaatgatcacctggtaatttaagagggtgagctaaacttcctccttttctagtatggacctttggggctcaggatgaggatgttcamtttgtactgctggtggagctgcctttccattaagtgagtctttctccaagggaacagaagtcttaggttgttgatctggcggtcagaacctaggacaggc

SEQ ID NO: 165457 - DNA, 201 bp, Homo sapiens
gtaagaaaggtgacgtcaatctgagatgagagagagagcaaaacagttcttttgaccaccttgaccccgaccttgaaataaggtggaactaataaatcccsctttgtgctggagcaagttttggctgagtttctgtcacttgcaaccaaatcagtcctatccagtatacctagtgactctctggtctccaaaggctatgcc

SEQ ID NO: 165458 - DNA, 201 bp, Homo sapiens
aggacatatgtgtcttctgccaagatgtggaattttggcaaggctagcatgataacaaataaacattcaagcagtcacttaatgatattgaattgaacacmatttctcagaagttcctgtattaaattacaaccataagaacatacacaagcatgcagattgtaagtgtgatgagaatggaaacattccataggacgcaga

SEQ ID NO: 165459 - DNA, 201 bp, Homo sapiens
gggtttatgatcaagtaaagagtttaaagaagtgttttatgagggagttttgtttgcaaatgatcacctggtaatttaagagggtgagctaaacttcctcmttttctagtatggacctttggggctcaggatgaggatgttcaatttgtactgctggtggagctgcctttccattaagtgagtctttctccaagggaacag

SEQ ID NO: 165460 - DNA, 201 bp, Homo sapiens
attatagtgtctggcatacaataaatactttgtaatgttactggtgtcttcttaccgttattgtctcactggtgaccgtttgaaatgttgaagctttattrttacagataatggtggatatagtctcttccttgtttattttttgacagaatctttttttaaaaaagtttttatttgtttggtgagaatttacttgttaca

SEQ ID NO: 165461 - DNA, 201 bp, Homo sapiens
actcctgtacttcaaggttttggagtgggaaagttgaggaaatgtaagagatcatctctgtctctatcacattaccgacggagaagtgggataagaactaygtgtgttttcacttcttctttctttagagaaaacaaatatcatctgccttgctaggtagttgtgagaaatgaggagataatatctttaaatctcctacgg

SEQ ID NO: 165462 - DNA, 201 bp, Homo sapiens
ttgggtaattctaatgcttacttcatcccagggctgatgtgtgttaggttagggtttatgatcaagtaaagagtttaaagaagtgttttatgagggagttytgtttgcaaatgatcacctggtaatttaagagggtgagctaaacttcctccttttctagtatggacctttggggctcaggatgaggatgttcaatttgta

SEQ ID NO: 165463 - DNA, 201 bp, Homo sapiens
tttatatttttagctaaattaaaatactcacattcccattattttttagaggttgtaagctaagtaataacattctagaaactctctgttttttgaaaggkcatcaccactgttgaaggcgctaatgggagatcctaagtttcaggctctgctacagacgtcaggtcccctaggagttgggctgcctttgctctcctctcc

SEQ ID NO: 165464 - DNA, 201 bp, Homo sapiens
ctccttctagaactagaacataagctctctgaagtcagggaccatgcctagaatcgccttccttttatttcccatcagccgaaactaactctgctgtgtcrcgctgtgttaggctgtgttggctgtgagtaagagaagtctcacccaactagctgaagcgaggtgggttggaggggggatgccttgtggaagtgacaactc

SEQ ID NO: 165465 - DNA, 201 bp, Homo sapiens
agagtgtgctgtgtcagggtgtttcattgcattttcatatttgtcatttctctttggagcgtgtcttttggtgccacggaaaagggctggattttctatcrggtacaataggtacctgcagggcttagggtacaagagcttgtcggggacctgcacacatgtttgagacctgtaaaaatattgctggctctgaattatgga

SEQ ID NO: 165466 - DNA, 201 bp, Homo sapiens
tttgcctccttctagaactagaacataagctctctgaagtcagggaccatgcctagaatcgccttccttttatttcccatcagccgaaactaactctgctrtgtcacgctgtgttaggctgtgttggctgtgagtaagagaagtctcacccaactagctgaagcgaggtgggttggaggggggatgccttgtggaagtgac

SEQ ID NO: 165467 - DNA, 201 bp, Homo sapiens
gttctgaacttgctgttataattattcacattttcttgcagtgaaaatctacaggtcaaggtcatcttcacgtctttagttcttgttttgcttcaggtcastttagaaccgaatgttaaaaggatattgtctattcgaagggtcagattgtggcacgtggaccaaatccagccccccgaggcccacttttgtaaatcaggt

SEQ ID NO: 165468 - DNA, 201 bp, Homo sapiens
aactatattttcttcctttttttgtatgcctccccatgcaaggataattacacagaataagcactgagatgcctgttgatggatttattccagcaattttwtttttttagctctctttgtctggaactttgcaaaataaacaccatggtcactccgtgctttgtgagtgacgtgctagaatggaatttcactgttttaaat

SEQ ID NO: 165469 - DNA, 201 bp, Homo sapiens
gtgatttcagggtgttgggctctgacaagatgatgccgacttagacagtgttagtcaacatcaaatgtctggatcaagagaggcaagaatcccgtggattkggcgttggccagaacttgtctggaatcttgttttctgccttgagtgtcacctgttgagagctctgttgacaaactggcatttgtccttgggagagtagcc

SEQ ID NO: 165470 - DNA, 201 bp, Homo sapiens
ggcacctatgttaactctatttcattttggaaaagttgagtagacaaaaggtgcagagtagagtatgcagtgatttcagggtgttgggctctgacaagatratgccgacttagacagtgttagtcaacatcaaatgtctggatcaagagaggcaagaatcccgtggatttggcgttggccagaacttgtctggaatcttgt

SEQ ID NO: 165471 - DNA, 201 bp, Homo sapiens
gacctcggtgctcacggtaatgcttccttccaccatatcagaaggtcctcagcagccgcagccacttaacatgctcggtgcttctctgtaggaggattttkaaaaagcaggaactgtcagggtcccaaatgttcagtggcacttcagccagaggtaggatagggattttgaagtgtttggagaagtgttttcatatttgaa

SEQ ID NO: 165472 - DNA, 201 bp, Homo sapiens
ggaggcacctatgttaactctatttcattttggaaaagttgagtagacaaaaggtgcagagtagagtatgcagtgatttcagggtgttgggctctgacaaratgatgccgacttagacagtgttagtcaacatcaaatgtctggatcaagagaggcaagaatcccgtggatttggcgttggccagaacttgtctggaatct

SEQ ID NO: 165473 - DNA, 201 bp, Homo sapiens
aagctctcaaagtgactttttattttattttttatttttacatggagtctcgctctgttacccaggctagagtacagtggcgtgatctcagctcactgcartctccatctcccaggttcaagtgattctcccgtctcagcctccagagtagctgggattacaggcacccaccatcacgcccagctaatttttgtattttta

SEQ ID NO: 165474 - DNA, 201 bp, Homo sapiens
caggcagcttctactcatggtggaaagtgaaggggagccagcatgttcagagaacatatagggagaaagggagcaagagaggggaggggaggtgccagagmctttaaaagaaccaactctctgggaacaaatagagggagaacattaatctagccatgagggatccacccccgtaacctagactcctgtcatcagccacgg

SEQ ID NO: 165475 - DNA, 201 bp, Homo sapiens
tgtgtcttctcccccatttatttatttaatcatttatttatatcacagtacactcatggacatttattttatgctttatgttataatcctatactactttrtttattttgttgcttaaatttttccagatggaacaatttggtcttcaaaagttgctgctgttggctcctgtgttcttgtgatgtacacacatcatggtgt

SEQ ID NO: 165476 - DNA, 201 bp, Homo sapiens
gtttaacctgacagttgatcaattgatatcctttgacttgttggaattttattctttacattcgtcttttaaaaagctttattttatgccagatgcagtgmctcatgcctgtaatgtcagcactttgggaggctgaggcaggtggatcacttgtggtcaggagtttgagaccagcctggccaatatggcgaaaccctgtct

SEQ ID NO: 165477 - DNA, 201 bp, Homo sapiens
ttgcattgcatagttaaagttctttaaattcttctctaaaccccaaggctaagcaatatacaatctagttacaatggtctgcttgctgttaccagaatctrtcaagctctttcctatctaagggttttttccatgtactggtttctctcctgcgtggtcttgttctacccttgaggagggtaccacttcctcattgcttag

SEQ ID NO: 165478 - DNA, 201 bp, Homo sapiens
ttggaggagtgttgctgtgcccagctcacgcttgtggagtggggatttaatgttctcactcttcgagggtagagtatctgcataaactacttggaattctrcatggaatatttgtgtcttctcccccatttatttatttaatcatttatttatatcacagtacactcatggacatttattttatgctttatgttataatcc

SEQ ID NO: 165479 - DNA, 201 bp, Homo sapiens
ttagttatttatctttgggactgctataatgagatccacttagatctagctataatggaattttgtttagtggttctctgatttaaacatgacttttatcyttttcagatatcgtttcattaacatcactacctctttttaaatcctaatgttgtcatggaagcctgtgtaggggctgaccttgaagtctctgaaagctga

SEQ ID NO: 165480 - DNA, 201 bp, Homo sapiens
aggctgaggcaggtggatcacttgtggtcaggagtttgagaccagcctggccaatatggcgaaaccctgtctctactcaaaatacaaaaagttagccgggygtggtggcacgtgcctgtaatcccagctactgaggaggctgaggcaggagaattgcttgaacttgggaggcagaggttgcagtgagccaagatcgtgcca

SEQ ID NO: 165481 - DNA, 201 bp, Homo sapiens
gaagcagtgtcacgcattttagaagaatgggtaagcgcttgactgttgttgttttttttaattgtcaaatacacatgccgggctaaccatatggagatttyagtggagtgtgtaaagtttattgctcttggaatcatgtctttatttttaaagtcatcttcactttgtttgtcttatgaatgaaagcatgagcaagtccat

SEQ ID NO: 165482 - DNA, 201 bp, Homo sapiens
atggattatccttggttgtagtgtttatgtccacatcacatggaatattttatttttcaggcctcttcatgtgcttgtgtgcaacgcagcaacttttgctstaccctggagtctcaccaaagatggcctggagaccacctttcaagtgaatcatctggggcacttctaccttgtccagctcctccaggatgttttgtgccg

SEQ ID NO: 165483 - DNA, 201 bp, Homo sapiens
ggctgacacaggcagatcacttgaggtcgggagttctagaccaacatggtgaaaaccagtctctactaaaaatacaaaaaattagctggccgtggtggtgygcacccgtagtcccacctacttgggaggctaaggcaggagaattgcttgaaccgcggaggcagagattgcaatgagccgagatcgcgccactgcactcca

SEQ ID NO: 165484 - DNA, 201 bp, Homo sapiens
gctcagtctttgaagggttacagaaacagtttcactagaaggtgtgacattgtgtaacagaaatcggttccttaacctgccaaagggaagaaaatagtgcrgaatcttttctccaggtttcaggacccatgtctgttgtccttcctttaccttaacttcagcagggcaagaatggttcaagccacattagaaagcagttac

SEQ ID NO: 165485 - DNA, 201 bp, Homo sapiens
tctgttgtccttcctttaccttaacttcagcagggcaagaatggttcaagccacattagaaagcagttactttctcacccaattttaaaggagaaaggtaratgcggtgggttctagggatttcagtgacgtaacaggtgtttcccaggcattaagacctagtaaggtttccatttccattaggtattatggatgcattcc

SEQ ID NO: 165486 - DNA, 201 bp, Homo sapiens
ccaattttaaaggagaaaggtagatgcggtgggttctagggatttcagtgacgtaacaggtgtttcccaggcattaagacctagtaaggtttccatttccrttaggtattatggatgcattccaagaatttaattactataacatcacttcattcattgtaattccttactagagttatgagaacttgggattgtgtggtt

SEQ ID NO: 165487 - DNA, 201 bp, Homo sapiens
caagaatttaattactataacatcacttcattcattgtaattccttactagagttatgagaacttgggattgtgtggtttcttattcaatcgattaaaagstacttgctatagttttctaactagctatttatatgaaatttagtacttgtcaatatgtattaaatcaatacagttatatttatcaaagtggtgagaagag

SEQ ID NO: 165488 - DNA, 201 bp, Homo sapiens
tacttgtcaatatgtattaaatcaatacagttatatttatcaaagtggtgagaagagtttacatctgaacatagaatagattgcttgccttggccgggcgygggagctcacacctgtaatcccagcactttgggaggccgaggcgggcagatcacgaggtcaggagatcgagaccatcctggctaacacggtgaaaccccg

SEQ ID NO: 165489 - DNA, 201 bp, Homo sapiens
gcatcagccttagcccagacccccaaagttcctgggcttcattctgctttgcattcatctcaaagttaagccttctggctggcaggggtttctgagacagwctgacagtattagcgtgctgcagtttcatgatggcaagaaggaggttaccaaagccgttttcatacaccttaactcatgagtggtagtgagtggccccag

SEQ ID NO: 165490 - DNA, 201 bp, Homo sapiens
ggaggtatgtgctgaggatctctttggcttctgcatctcaaaggatgagtgatttagccaggtggagaggttggggcggtatcctgaatgaaagaatagcrcagacaaaagtagtgagttgaaaacagaacagcatggcaggctcccagtaatcccatgagtcacgtgttctgcccacatggaatggatggtggagaaggg

SEQ ID NO: 165491 - DNA, 201 bp, Homo sapiens
aggatcctaaagagaagatgtaattataagatctaaaacgtggaggggggtggtgaattcagcctgcaggcatgtgtttgctgcccccacccccacatccyctttttttaaagttcgcataaaaacctggattcttggtttctcttaaaaaactggaaggtctggcacctttgctcccacatttcccgggcgcagcccttg

SEQ ID NO: 165492 - DNA, 201 bp, Homo sapiens
tttggctcgttttcagtttttattaatttcctgtgcttctggttcatgaatcccaagtcatgatgtgaatcagttcagttcagcaagcactgagctcccaygatataacaggtttttttcttttccgagctgtggcccatgcagagtttactgagacttggctcttgcctttatgctttaaggatcctaaagagaagatgt

SEQ ID NO: 165493 - DNA, 201 bp, Homo sapiens
agttttccaaactttatccccaggtggttgaactttctaagtttccccaagctgatcagtgttttggggtggtatggaactcagaatagatcactttttttattgactaactctgaccataagtatgcttctgtgcgagcctgacctccacggtaccaggcagagaacaacatgtatgcagagaactcattcactcaataa

SEQ ID NO: 165494 - DNA, 201 bp, Homo sapiens
atgctaatagtaatgatactagtaataaaatcaggataatgctgtttttaattcaccacactgtatgccatttgcttaaaatcagaaaggactcatcggtraggagtagggtggtagtatcattttggtctgcctttcacccccacaagacaacatccttaacagcagctatgttgaaggtttaggagtgcttgtcattag

SEQ ID NO: 165495 - DNA, 201 bp, Homo sapiens
ttgttgtaaactcgtcctgccgcctggactagttacgcttcccttgattagctctgagaaacgaggcagcgggcactggggcagccacatagacaacatcyaaatttttgttgctttcctgggtcttgccctgtccttactgtttcccttgggcacgctgttcaccccttaggacatactacagtaaccttttcccaccac

SEQ ID NO: 165496 - DNA, 201 bp, Homo sapiens
ccaagcaccttggataggcaatgggaaatgttcacaacgttcccatttttacctataacagcagtagcaataatgctaatagtaatgatactagtaataaratcaggataatgctgtttttaattcaccacactgtatgccatttgcttaaaatcagaaaggactcatcggtaaggagtagggtggtagtatcattttggt

SEQ ID NO: 165497 - DNA, 201 bp, Homo sapiens
tcttaatacaaactggcgtatgttatagttactgtcagttgttgtaaactcgtcctgccgcctggactagttacgcttcccttgattagctctgagaaacraggcagcgggcactggggcagccacatagacaacatctaaatttttgttgctttcctgggtcttgccctgtccttactgtttcccttgggcacgctgttc

SEQ ID NO: 165498 - DNA, 201 bp, Homo sapiens
cctcattacctatagaataactccaaactttctgatgattaagtgagatatcatgtaaagtaccaagcaccttggataggcaatgggaaatgttcacaacrttcccatttttacctataacagcagtagcaataatgctaatagtaatgatactagtaataaaatcaggataatgctgtttttaattcaccacactgtatg

SEQ ID NO: 165499 - DNA, 201 bp, Homo sapiens
cccatgtgtgtatgtctaacccagtgacaggtaaggcagccaggagctgctgttatttcagtgcaaagctgttttcacaatcacagacatgcacagctcaraaaccctcacaggtcacgcctgaataccttcaatgtgccccatgtaaaaatacactgcaagtcgattggacatgccctatgaattataccttatttatga

SEQ ID NO: 165500 - DNA, 201 bp, Homo sapiens
agcaccatgccattcacacttcagaaccaagctcagatccatgtgtgacactctggaatgtggcagctgatggaggaagggggctgaagttgaatctgcastagttgagttaaccttcccatggtgcctgcactagcagggactggactgagaccccagctttcccagtcaggccttcatttttctctcatggtgagagct

SEQ ID NO: 165501 - DNA, 201 bp, Homo sapiens
ctggagggtccaggagccccctgaactgagtatccggtgggaggtcagatttccgcattcagaacgagagctcatacggcatccacgcgtgtctttctcaygcatatccccagcccgagtagaagaggacttctgcatctctgttagttctttctcctcctaagaaaaagcagattttaagtaacttatcatttgttcatt

SEQ ID NO: 165502 - DNA, 201 bp, Homo sapiens
tgggcttgcttccacttgtggccaggagaggatatttcttactccagatcaaagagttgagacattgccttcccacaattcccagtgagcccaactccttrccacaattcccaccccatgccttccccaaattcctgatgagccctatgccttcccacaattccctgtaaattttgctccttcccacaaccccagtgagcc

SEQ ID NO: 165503 - DNA, 201 bp, Homo sapiens
aaatcagccatcagccttattagagtggttgattttttttttaatctaagagctttcttggttattttctgttcttaatcattgttgtatatccttaatgygcaggacatgacaccgtataacaagtgttttaaaaatatttacaattctgatcttataaaggaaaaagttacatatggtcctttgaactaattgctaaaa

SEQ ID NO: 165504 - DNA, 201 bp, Homo sapiens
taagtgtgtaagcagggaacagaaagtactgtgatttaaaatatgttaatttttctactgtacagatgagagccagcttggagatgggctgtagctcaagyatcttacctacctctgatttcttaatgccacgttataaggctgctgcttatagctcttgaagtcactccaaaaacagatgagtgagaccctgttgctaaa

SEQ ID NO: 165505 - DNA, 201 bp, Homo sapiens
ccatctcattgtctttatagtttaaccctttgaagttgtgactgccaacgtgctagtcttgtcgtcttacacgttaatggtaatgatctttttagatttaytgtgaacctctaggaatgttttttttaaccagtaaatgcactgaaacatggaatcaaagtctctttcccgtgggccccttttcattgggaataaatgcta

SEQ ID NO: 165506 - DNA, 201 bp, Homo sapiens
tcccctttccaatacatctctctctctctttctctctctctctctctctctctcacacacacacacacacacacacacacacagccaaatcagacaccaayataaactgtagagttaacattctttttccaccctcacactttttttagctccgatctgtgttcaatttctgcctgagagagtgatatattcatatattta

SEQ ID NO: 165507 - DNA, 201 bp, Homo sapiens
agaaaggaagagtttcctgagtcacctttgggaggtaggaagggtttgacatgtaggctgggcatctgggaacgagtgagggattctgtgagccccatctyagtggaccactcaaggaaggtgggtaagccctgggtataagtgtgtaagcagggaacagaaagtactgtgatttaaaatatgttaatttttctactgtac

SEQ ID NO: 165508 - DNA, 201 bp, Homo sapiens
aacatggtgaaaccctgtctctactaaaaatacaaaattttttttgtattttgggattcggtttaggtgatgtgtgtctgtaatcccagctacttgggagrctgagacaggagaatcacttgaactccagaggcagaggttgtagtgagccaaacttgcacaactgaactccagcctgggcgacagaggaagactctgtct

SEQ ID NO: 165509 - DNA, 201 bp, Homo sapiens
tgtgtcattccgttgtgcctgtcgtcttgaccttgtaaaaggtcttgggtaagcatgcaagaagttttgaagagggagatacagctaatttgcagataaaragcaagggaagaattcctggagaaaggaagagtttcctgagtcacctttgggaggtaggaagggtttgacatgtaggctgggcatctgggaacgagtgag

SEQ ID NO: 165510 - DNA, 201 bp, Homo sapiens
acttgtgtcattccgttgtgcctgtcgtcttgaccttgtaaaaggtcttgggtaagcatgcaagaagttttgaagagggagatacagctaatttgcagatraagagcaagggaagaattcctggagaaaggaagagtttcctgagtcacctttgggaggtaggaagggtttgacatgtaggctgggcatctgggaacgagt

SEQ ID NO: 165511 - DNA, 201 bp, Homo sapiens
ttctcatgtacttactttaaatcagagagcccacctgtccaattctagcttctcctgggcatcctgtatttgacacagcccctcccagcattctgagtcaycgtctgctgctcttgcactgtccgttttccaaatgaggaactcatcggtaaggccagaaaggaaagggagaaaaaacaaacaaacaaacaaacaaaaaat

SEQ ID NO: 165512 - DNA, 201 bp, Homo sapiens
  misc_feature (1)...(201): n = A,T,C or G
atggattatccttggttgtagtgtttatgtccacatcacgtggattcccgaaggagcatggattatccttggttgtagtgtttatgtccacatcacatggnatattttatttttcaggcctcttcatgtgcttgtgtgcaacgcagcaacttttgctctaccctggagtctcaccaaagatggcctggagaccacctttca

SEQ ID NO: 165513 - DNA, 201 bp, Homo sapiens
catggtgggaatctagaagacggagaaagaatttctcattcccgaaggagcatggattatccttggttgtagtgtttatgtccacatcacgtggattcccraaggagcatggattatccttggttgtagtgtttatgtccacatcacatggaatattttatttttcaggcctcttcatgtgcttgtgtgcaacgcagcaac

SEQ ID NO: 165514 - DNA, 201 bp, Homo sapiens
tggagtacagtggcgcgatctgagctcactgcaacctctgcctcccaggttcaagcaattctcctgcctcagcctcccaatagctgggattacaggtgcaygctaccatgcccggctgatttttgtatttttagtagaggtggggttttgctgtattggccaggccagtctcaaactcctgacctcaagaaatccgcccac

SEQ ID NO: 165515 - DNA, 201 bp, Homo sapiens
tcctaataagcctctcatcctcagcaacggaggacagttgcccactcaaagccttgtgacattctagggtatcctatttctacatggtgggaatctagaaracggagaaagaatttctcattcccgaaggagcatggattatccttggttgtagtgtttatgtccacatcacgtggattcccgaaggagcatggattatcc

SEQ ID NO: 165516 - DNA, 201 bp, Homo sapiens
gggaatagatgaagcaagctgcttctttcaaatgctcttccaatatgaagcaaaatattattgatctagactgcctgctactttcatttaccatgttactrctcgtgggattacaggcacaaaggtttcataaatttcaaatgaaatatgaacatttgttgtcaaagtactgttaaggtatgaaaaccctgctagtattag

SEQ ID NO: 165517 - DNA, 201 bp, Homo sapiens
gagtaaaagtcctttatgattagcaaattgcaggtcctcccctttctgatatttacagcccttgcaaccgcctgtacaaaaatcgggaaaaggcagaagasggctgtcattaatgtaaaagcagctggttacctccccctccccagcgcacacatcacctcctagtacaattagtcaccatgtcttttcccttccgtcaag

SEQ ID NO: 165518 - DNA, 201 bp, Homo sapiens
gatacagatttcactatccatgaattgtggccttaactttctcatgtacttactttaaatcagagagcccacctgtccaattctagcttctcctgggcatyctgtatttgacacagcccctcccagcattctgagtcatcgtctgctgctcttgcactgtccgttttccaaatgaggaactcatcggtaaggccagaaagg

SEQ ID NO: 165519 - DNA, 201 bp, Homo sapiens
agagtaaaagtcctttatgattagcaaattgcaggtcctcccctttctgatatttacagcccttgcaaccgcctgtacaaaaatcgggaaaaggcagaagmcggctgtcattaatgtaaaagcagctggttacctccccctccccagcgcacacatcacctcctagtacaattagtcaccatgtcttttcccttccgtcaa

SEQ ID NO: 165520 - DNA, 201 bp, Homo sapiens
tcactgtccaatatggtagccacgtgtgactattaaaatgtaaattaattaaaattaaaagttcaattgctctgaaatagcagccacatttcaaatcttcwgtagccagatgtggttattggctaccatattgggtagcaccgatatagaacatttctaccatagtagaatgctcttttggatacatctgctttaaagcat

SEQ ID NO: 165521 - DNA, 201 bp, Homo sapiens
atgcatgacctgtgcaatgcacctgcttcggtgcctggcacagagtcgcaaagccacaaagatggtgcttgttggttgtatgtgttgtttccatctgataycaccattgaggggagcaagatgacatgtgcctaccccacgtgtccagcagcaaagccacctggcatagtgggctgctcagcgtgcctggttcatactgcg

SEQ ID NO: 165522 - DNA, 201 bp, Homo sapiens
ataaaaataaaaagtcaaaaggaaacaaacaatgttgctgagaagtgatagaatattctagtttatatctcagtcattttacagctctggcatttctgggkaacactttagaatacttccactccggttggtccataaaaagctgcctgtgtttttatgttttgaaaatacacgcagagagacccactgcatgtcctatta

SEQ ID NO: 165523 - DNA, 201 bp, Homo sapiens
attttaagcaactgacccttgggataaaaataaaaagtcaaaaggaaacaaacaatgttgctgagaagtgatagaatattctagtttatatctcagtcatwttacagctctggcatttctgggtaacactttagaatacttccactccggttggtccataaaaagctgcctgtgtttttatgttttgaaaatacacgcaga

SEQ ID NO: 165524 - DNA, 201 bp, Homo sapiens
ttcaccatgttggccatattggtcttgaactcctgacctcaagtgatcctcccgcctcagctgcccagggtgctgggatcacaggcgtgagccaccgtgcrcgacctcagggtcccttctaacctgtgctgttgtcataaaccctggaggagaagcaagatctttctagcaggagcaacatcatcccaaataaagtgatag

SEQ ID NO: 165525 - DNA, 201 bp, Homo sapiens
gagcactggatacctagactctgctgggctctagagaagtgctgggctacagcgcccagtgccctacctcttggggccagccagcctcaccaaaaaatcasgcttctggcttgctccaaactcaggaagttgctgggaagtctggctagcaacaccctcattcccagtcctggccatgcctctctgctctccctagcacag

SEQ ID NO: 165526 - DNA, 201 bp, Homo sapiens
agagaataaggtgttggtttgttataaggtggtcctttataaagtttagacctattttaataaggctgacttgggttgaagataactagagccatgacttycatcttgatggacaatgagtactcactctacttttttagtttatatttttattttagttcatttcatttaagacagcgtctgttacccaggctggagtgc

SEQ ID NO: 165527 - DNA, 201 bp, Homo sapiens
tattcagttgcccagctcttttcattccctgtcctttccccctctggctgggtctgcctttccaaccgctaccaccttccaccaccattttttttttgttkcctctgcaagcaacatctgaaaggcccagacccagcttgttggccttgggctctgataagatctgtctgcactccttttgtctggcctgtacctgccttt

SEQ ID NO: 165528 - DNA, 201 bp, Homo sapiens
tgttgcaaatttccagtggctagttcagggacagtgccggggcttgaacccctgtctctgtgtctcccagctcataaggtgtgctaccaagtcacccatgwgtagcaattaggcgacttctaacatgtccagctttaaacctgtgacctcaaggcaaatgacttccacatctcattagcactccccagagccttccagccc

SEQ ID NO: 165529 - DNA, 201 bp, Homo sapiens
gattcctccccattctataaaataacagctaccatttcctgagggcatactgagtgctgacaggcacatcaacatcagaccatcaccttcttatacctcaraatagtctgcagggtgactcagaagctcctggctggtaagtggcagatccagagatgaaacccagatctaactggacccaagacagaaatttctagaaca

SEQ ID NO: 165530 - DNA, 201 bp, Homo sapiens
gtcttcgtaatatagctagtttttgtccattcattttgctttgacttccttgtataggtacaaaggtgtaagtaggagagtctaccaggcagcacacagaygtggccctgtaaccacccttgtgtaaaatcagagtaatcctccctatccttgcttatttcactgggttcatgggtgatgactgtaaatgacacaggagac

SEQ ID NO: 165531 - DNA, 201 bp, Homo sapiens
ttttttttttttgccaagcaccctgcctttttgcttgtctgtttcgtctttatctctccttccagtaaagttcttggcccagaggttctgctgccactcartgacatttgtgaaatgcaagggagcttgcaccatgggttcaagctcctgcagatccctgagcctgctacccttgtgcttctctgtccacgcaaagccaag

SEQ ID NO: 165532 - DNA, 201 bp, Homo sapiens
cccagtgtgtcacgccattacatgcttacagcctatttttacaaagtttgaatattgtaatttgcctttaaaaaattgttttaaagatctgcctaggtcarcaaattttatttactctctagaaccatttgattggggtactgccttaagaaataaagcagattccttcagtcgcatgtgggcctggagtcactggaaaat

SEQ ID NO: 165533 - DNA, 201 bp, Homo sapiens
tggttttaaaagacgccatggttgccatgaggaggacaatgcgtaggaggcaggagtgaaagctaaaggatatgctgggaggtgaccctggagttaaagaragcaactaaggtgaccaggtgacaataatggagatagagaaaacaggatggattcaggaaacatgaccacactgagcatattcaaatgtaattgtcagtt

SEQ ID NO: 165534 - DNA, 201 bp, Homo sapiens
ttcattgttgtccttttttattaaaacaggttttgtttttttgtgtgtgtgttattttgttttttgtttttttgtttttcgggggctggagtagtgtgcaragcctggcggtgattgttctcattagaaagtatagtgtaatactcaataaattacttttgttctcaccttgggaagtggactcagaggccaagtgacttt

SEQ ID NO: 165535 - DNA, 201 bp, Homo sapiens
ttttttttttttgagacagggccttgctttgtcaccctggctcaagtgcagtggtagaatcatagctcactgcagcctcaaactctttggctccagtgatyctcccacctcaacctcccaagtagctgggactacaggcgtgtaccaccatgaccagctaatcttttagtttttgtagagacaagttcttgctatgttgcc

SEQ ID NO: 165536 - DNA, 201 bp, Homo sapiens
ctgcagaactgaggtgggccccaaaacttgcgtttctaaaaggtactagctgagcatgatgactcacatttgtaatcccaccactttgtgaggccgaggcsggtggatcgcttgaggccaggagtttgagaccagccttgccaacatggtgaaactccatctctactaaaaatataaaaatttgccgggtgtagtggtgca

SEQ ID NO: 165537 - DNA, 201 bp, Homo sapiens
ctttttctttcttttttttttttttgagacagggccttgctttgtcaccctggctcaagtgcagtggtagaatcatagctcactgcagcctcaaactcttkggctccagtgatcctcccacctcaacctcccaagtagctgggactacaggcgtgtaccaccatgaccagctaatcttttagtttttgtagagacaagttc

SEQ ID NO: 165538 - DNA, 201 bp, Homo sapiens
gcttggaaggtggcgcaaataactgcttgaggctccctctcttgggccaagcttgactctggattttcattgttgtccttttttattaaaacaggttttgkttttttgtgtgtgtgttattttgttttttgtttttttgtttttcgggggctggagtagtgtgcagagcctggcggtgattgttctcattagaaagtatag

SEQ ID NO: 165539 - DNA, 201 bp, Homo sapiens
gctggagtgcagtggtgcgatctcagctcactgcagcctctgccccctgggttgaagcgattctcctgcctcagcctcccgagtacctgggactacaggckcccatcaccatgacaggctgattttcttttttttcgtaggacgaggtttcagcatgttcgccaggctggtcttggattcctgatctcacatgattcacca

SEQ ID NO: 165540 - DNA, 201 bp, Homo sapiens
ccttggtctcagggtggttgaccttttgccgatgtgtttttctttcttttcttttcttttcttttgttttcttttcttttctcttctcttcttttcttttytaacagtcttgctctgtcttccaggctggagtgcagtggtgcgatctcagctcactgcagcctctgccccctgggttgaagcgattctcctgcctcagcc

SEQ ID NO: 165541 - DNA, 201 bp, Homo sapiens
tttccacaccctcagcacctccagtttttcctggccttggtctcagggtggttgaccttttgccgatgtgtttttctttcttttcttttcttttcttttgktttcttttcttttctcttctcttcttttcttttctaacagtcttgctctgtcttccaggctggagtgcagtggtgcgatctcagctcactgcagcctctg

SEQ ID NO: 165542 - DNA, 201 bp, Homo sapiens
cagagcatttatctttgatgctgggaatgcgttcattttctttatcttgccattactgtacctctattgggaaatttactctctcttcatagataggatcmgattcagtacatatttataaaaccacacttacatttaaatacaggcctttcccatttcacagtgtttctagctcccctttccaatacatctctctctctc

SEQ ID NO: 165543 - DNA, 201 bp, Homo sapiens
aagagactggagaaagccaatctgtttctccctgaaaatcatcttacttttttaacgcttcgtacctagatttggcctgggcagcccagggagactgttcragcactggatacctagactctgctgggctctagagaagtgctgggctacagcgcccagtgccctacctcttggggccagccagcctcaccaaaaaatcag

SEQ ID NO: 165544 - DNA, 201 bp, Homo sapiens
agtatagacacgtggcaccacgcctgggtaatttttgtagttttagtggagacaggatttcaccatgttggccaggctagtcttgaactcctgacctcaastgatagacccacctcagcctcccaaagtgctaggattacagacatgagccgacctttttatgtattgttgatacagtatgacaagggaagagttaactga

SEQ ID NO: 165545 - DNA, 201 bp, Homo sapiens
gcccatcccaaatgaattctaatcctcagcctctagaatgcctggagtgagaaaacagaatattgttcttttctgtttatattatttcatactgagttaayacacttgccaagactccgaggcagcttctggcttgacaatgccttctttaactagcctagtttctagaataaagttcgggtccaccaggccctctgagtg

SEQ ID NO: 165546 - DNA, 201 bp, Homo sapiens
tcgagttcttaatctgagcagtttcgaaaccaagcccacattaattaatataaataatgactgggaaacgttgcaggactccccggaaaagaatgtataarttgatgtgtttttgtatatgcttatgtatatgcctttgtgcacgaaaggagataaatggtgtatttcacacagttccttctcctcctctaagggatatta

SEQ ID NO: 165547 - DNA, 201 bp, Homo sapiens
cttaggcatccatgctcagggctctctgtggtaggcaacagctggattatttactttctagaatatctcgagttcttaatctgagcagtttcgaaaccaarcccacattaattaatataaataatgactgggaaacgttgcaggactccccggaaaagaatgtataagttgatgtgtttttgtatatgcttatgtatatgc

SEQ ID NO: 165548 - DNA, 201 bp, Homo sapiens
tataagcaatagtccctgaacatcatttggcctgaactaggctagagtttctcttaatcaaaataataacgatgatttttccatgccaaggagtggtgtcrtatcatgaagtagatttatgtacacattaaataaacttttacattttaatgtaccaatttgcaatttttttttctattcaccaaaatattccagataacg

SEQ ID NO: 165549 - DNA, 201 bp, Homo sapiens
ttccttcctcagaccccaaagtagctgggaccacaggtgcacaccaccacttccagctgattatttaaaaaaaattttgtagtgacagtgtcttgctgtgyttcccaggctgttcttgtactcctgggctcaactgatcttcccagcttggcctcccaaagtgctgggaatacaggtgtgagccactgtcccaggccagtt

SEQ ID NO: 165550 - DNA, 201 bp, Homo sapiens
gaagtgggcgtcgtgatgccagtgtcttcgtaatactatctttctttcccctttagcacccagaacttatgaaatatgactcggtttatcctgaacacatstctgtgcatcagggaggatgggagaattaattccagtttctcaattgcaaaagtgaggctggtcatggggcttggaaccacgccacggacgcatgaagcc

SEQ ID NO: 165551 - DNA, 201 bp, Homo sapiens
caaatggggaacagtcctgtgcagtgtttctaggaagttaccagcttcatcataggaagacgttctccatcgtttggatctttttcaccagcaccttttgrttgtggtggtttgggatgtgatgatctcagaactttacatcctccatgaaatctctgcagcgatagttgaatgtcttgccttttctattattgccctttt

SEQ ID NO: 165552 - DNA, 201 bp, Homo sapiens
tgctctcatttcattttcactgaactgaaaataaggtaacagaccctcaggtctacctataagtaccttccaactgttccacttttgtaaatttagttcarataatacatatgctgaaattcctatatcccccccatactccagatcttcagtgtggaatttaaatataattccttattgtaaaaaaaaaaaatttttttt

SEQ ID NO: 165553 - DNA, 201 bp, Homo sapiens
tgaataccttttgctttctataaaatggtgtggcattgctggtattttcactcttccttcctaccctggatgctgatttgatgcttccagccttagcggtyttcttgcttctaggactgaacagggaagagggaaaagtcaaaagaatgacagaaggtcctcacgttgcagaacactgaccaatgttggcaactacaagac

SEQ ID NO: 165554 - DNA, 201 bp, Homo sapiens
agtgcacctgaccctaggataatcttaattttaagtaactggtaactcataaatttttaaacactctgcagttcaaagaaaacatgtttgtggtaggtagycagtttataacctgtgtaagactgtgttattagcaaatccctcaatgtgttgaccaagagtgggtaggaatcctgcagacagaatcttttgaaggtggtt

SEQ ID NO: 165555 - DNA, 201 bp, Homo sapiens
ccgggaagagcgcatcctaaatcagccattagatttgttcctcatttctttgctttacaaattgtttttctgtatagtattggattttcaataaataaagkatgatataaacaagtctgcaaaccagcaagaactatataagccacttgctcaagtcaataagcgcatgctcacaaaggaacgtaaagttctgaagttctt

SEQ ID NO: 165556 - DNA, 201 bp, Homo sapiens
tggacaagaggtcacattgccttttctagcttggaaggtggcgcaaataactgcttgaggctccctctcttgggccaagcttgactctggattttcattgktgtccttttttattaaaacaggttttgtttttttgtgtgtgtgttattttgttttttgtttttttgtttttcgggggctggagtagtgtgcagagcctgg

SEQ ID NO: 165557 - DNA, 201 bp, Homo sapiens
ttccttttgagcccagctctccctttgtgacccagcaacttccttccccgatgatggccaagccttgaggatgtgaaactgcccagtgccccaatctggartccaccatcctgggtctagctggggacatccttgaatcagcctctgggaatcactgaaccaacatgagtcacttgctactgtgagatctcaaaacacatg

SEQ ID NO: 165558 - DNA, 201 bp, Homo sapiens
gttattagcaaatccctcaatgtgttgaccaagagtgggtaggaatcctgcagacagaatcttttgaaggtggtttgtttttttattcctttataagtacwgttgtagatttacaaagtaattgagtatatagtacataaggtcttgtgtacccaccgatcgcaattgagcatatagtacatgctgtcctgtgtacccact

SEQ ID NO: 165559 - DNA, 201 bp, Homo sapiens
catttccacaccctcagcacctccagtttttcctggccttggtctcagggtggttgaccttttgccgatgtgtttttctttcttttcttttcttttcttttgttttcttttcttttctcttctcttcttttcttttctaacagtcttgctctgtcttccaggctggagtgcagtggtgcgatctcagctcactgcagcctc

SEQ ID NO: 165560 - DNA, 201 bp, Homo sapiens
tcatttccacaccctcagcacctccagtttttcctggccttggtctcagggtggttgaccttttgccgatgtgtttttctttcttttcttttcttttcttttgttttcttttcttttctcttctcttcttttcttttctaacagtcttgctctgtcttccaggctggagtgcagtggtgcgatctcagctcactgcagcct

SEQ ID NO: 165561 - DNA, 201 bp, Homo sapiens
tggaagggatatttaatttccattaaaacatgaatttcattctgcccttgccatgcttttcttggtcttagcccaacctgagctgctgatattaaggaatrataggataattccataattttcattttaccttttgctttttgttttccatagcagttatctagaggattcccattatgcttcttcattacccggtgccca

SEQ ID NO: 165562 - DNA, 201 bp, Homo sapiens
atcatttccacaccctcagcacctccagtttttcctggccttggtctcagggtggttgaccttttgccgatgtgtttttctttcttttcttttcttttcttttgttttcttttcttttctcttctcttcttttcttttctaacagtcttgctctgtcttccaggctggagtgcagtggtgcgatctcagctcactgcagcc

SEQ ID NO: 165563 - DNA, 201 bp, Homo sapiens
aggcctgagcaaaagacacagaaaggatttctttatcgtaagcacacttctctacattacctttataatccaacaactctgctattagtaaattatagaamcaacttttgtaacactatcttgtttgcagagtatatgaaaaatttgaagttaaaattcagctccacgaatactgcagtggtgagaaaatggcgacaaaga

SEQ ID NO: 165564 - DNA, 201 bp, Homo sapiens
gaaatctctagcttctcaaactgtttcgtggtggagtgccttttgggcacaggagaaggaaataagagcctcgcgaggtttgggaatgctgcctctagctytcacactgcatgcagaattcctactctgagagctcactttatctcaaaaacccatgcatattctgcatctactctgaattccgcagtgttgtgtgttact

SEQ ID NO: 165565 - DNA, 201 bp, Homo sapiens
acagcttctggcgccgcaaacaccttgggtcctagagaaacctgcacacttgtgtctccacctttttacctcttgcgggcatgagtctggtctcagtaatmacattgtccagcccatcataaagggctcttgaacacattttcatcaactttaggttaagtctgtttgggtaaatgcgtcttggagggctgggtagaagat

SEQ ID NO: 165566 - DNA, 201 bp, Homo sapiens
aggccaagaaaggggtgggagaaacgagcaaggtgttgatagaaccccttagtgtcctcctcataccacagacactctcttcccccacttacttggccaawttttttttttttttttttttttttttggtggagtctcgttctgtctcccaggctggagtgcaatggtgcgatctcagctccctgcaacctctgcctccca

SEQ ID NO: 165567 - DNA, 201 bp, Homo sapiens
aatcatttccacaccctcagcacctccagtttttcctggccttggtctcagggtggttgaccttttgccgatgtgtttttctttcttttcttttcttttcttttgttttcttttcttttctcttctcttcttttcttttctaacagtcttgctctgtcttccaggctggagtgcagtggtgcgatctcagctcactgcagc

SEQ ID NO: 165568 - DNA, 201 bp, Homo sapiens
tgcactcctgtctgggagacagagggaggagactccatcaacactaataataataaagtaaataaaagggcactaaccctactcaggaagccttcactctmatgacataattacctcccaaagtccgcacttcctaatgttaccactctggaggttagaatttcaacatataaattttggggggacacattcagaccacaa

SEQ ID NO: 165569 - DNA, 201 bp, Homo sapiens
cacgaacaaattgccaaatgcaaggcctgagcaaaagacacagaaaggatttctttatcgtaagcacacttctctacattacctttataatccaacaactytgctattagtaaattatagaaacaacttttgtaacactatcttgtttgcagagtatatgaaaaatttgaagttaaaattcagctccacgaatactgcagt

SEQ ID NO: 165570 - DNA, 201 bp, Homo sapiens
gtgtcatacagcagagggctgtgatgctctactgaggagtggaagtgtttttctgagggcatcaaacacgccgtcaagcagggaggcaacaaatctgagtygttccacagatactttgagtgcagtacaagttggtaatgggtaacaggctaaaccatgtggcaccccttccctcttatcagcttcttgctaccatgcaga

SEQ ID NO: 165571 - DNA, 201 bp, Homo sapiens
tggagcacttgaaaactgctgttttgtgtcagtaggtaaacaacaaacattggtgactactgaattttcagcagatgtgattcctttgtttcacagaaaawctgtatcttttgttctaaatttttttcttctaatgggtataatcctctgttggagagtcctttgatagctaggagtgtgttttcttctttactttcccaa

SEQ ID NO: 165572 - DNA, 201 bp, Homo sapiens
aaatcatttccacaccctcagcacctccagtttttcctggccttggtctcagggtggttgaccttttgccgatgtgtttttctttcttttcttttcttttcttttgttttcttttcttttctcttctcttcttttcttttctaacagtcttgctctgtcttccaggctggagtgcagtggtgcgatctcagctcactgcag

SEQ ID NO: 165573 - DNA, 201 bp, Homo sapiens
tcccatcacgaacaaattgccaaatgcaaggcctgagcaaaagacacagaaaggatttctttatcgtaagcacacttctctacattacctttataatccamcaactctgctattagtaaattatagaaacaacttttgtaacactatcttgtttgcagagtatatgaaaaatttgaagttaaaattcagctccacgaatac

SEQ ID NO: 165574 - DNA, 201 bp, Homo sapiens
tgaaaactgctgttttgtgtcagtaggtaaacaacaaacattggtgactactgaattttcagcagatgtgattcctttgtttcacagaaaaactgtatctkttgttctaaatttttttcttctaatgggtataatcctctgttggagagtcctttgatagctaggagtgtgttttcttctttactttcccaaagacaattt

SEQ ID NO: 165575 - DNA, 201 bp, Homo sapiens
cttgaagccaagcaaaatcatttccacaccctcagcacctccagtttttcctggccttggtctcagggtggttgaccttttgccgatgtgtttttctttcttttcttttcttttcttttgttttcttttcttttctcttctcttcttttcttttctaacagtcttgctctgtcttccaggctggagtgcagtggtgcgatc

SEQ ID NO: 165576 - DNA, 201 bp, Homo sapiens
gaaaactgctgttttgtgtcagtaggtaaacaacaaacattggtgactactgaattttcagcagatgtgattcctttgtttcacagaaaaactgtatcttwtgttctaaatttttttcttctaatgggtataatcctctgttggagagtcctttgatagctaggagtgtgttttcttctttactttcccaaagacaatttt

SEQ ID NO: 165577 - DNA, 201 bp, Homo sapiens
tcttgaagccaagcaaaatcatttccacaccctcagcacctccagtttttcctggccttggtctcagggtggttgaccttttgccgatgtgtttttctttcttttcttttcttttcttttgttttcttttcttttctcttctcttcttttcttttctaacagtcttgctctgtcttccaggctggagtgcagtggtgcgat

SEQ ID NO: 165578 - DNA, 201 bp, Homo sapiens
tactgtggttacatttggaagtgtttacaaaggtgataagatgtttttatagtttggtgttcatttatcgaccatattaagaaccttcttctatgaaatgsttttagtaggaagtattttgaatgaagaaagcgtattttccacaatatatttggtagattatttttcaaaaccaaaggacttcaaaaatgtcttcctatt

SEQ ID NO: 165579 - DNA, 201 bp, Homo sapiens
ttgataatgctgatgtgactggacttttgacaagcagtctgggacttctgctgaaaagtgctcttgaagccaagcaaaatcatttccacaccctcagcacytccagtttttcctggccttggtctcagggtggttgaccttttgccgatgtgtttttctttcttttcttttcttttcttttgttttcttttcttttctctt

SEQ ID NO: 165580 - DNA, 201 bp, Homo sapiens
ggaagtgtttacaaaggtgataagatgtttttatagtttggtgttcatttatcgaccatattaagaaccttcttctatgaaatggttttagtaggaagtaytttgaatgaagaaagcgtattttccacaatatatttggtagattatttttcaaaaccaaaggacttcaaaaatgtcttcctattagtggacaccagtatt

SEQ ID NO: 165581 - DNA, 201 bp, Homo sapiens
ccaagcccagagttcatttaagtggcagcgatgggaccaaattataggccaggtctgtcttatgaaagatgataaatggatgtgtcatatcgggaaagaartcactctgtcatcatatgacaggctggcttgatttctttgcaccagtgtccctaaaagttgggatgggggtgtgaagcgtgccagctttcaaagccagtt

SEQ ID NO: 165582 - DNA, 201 bp, Homo sapiens
tgtttaatttataatttttgtttttatcattaaaagcaacagattgctgtattcttgcctgccactgacatggacttaattgtttcatttagacatttaartgggcaatacacttaaaatgcagatataactttaattgtcaaaacatgcttattttaggaaatgtgtttctccagtaaagctcagtatctggggcttttt

SEQ ID NO: 165583 - DNA, 201 bp, Homo sapiens
gatgctgggaatgcgttcattttctttatcttgccattactgtacctctattgggaaatttactctctcttcatagataggatccgattcagtacatattyataaaaccacacttacatttaaatacaggcctttcccatttcacagtgtttctagctcccctttccaatacatctctctctctctttctctctctctctc

SEQ ID NO: 165584 - DNA, 201 bp, Homo sapiens
cagcccaacacaaatgtataaacttgcttaaaacatgatgagatattttttgccattttttttcaactcatcagctatcattagggttagtgtattaataytttatgcacagcccaagataattctttgtccagtgtcacccagggaagccaaaagattggacaccctgggaataaaacagaaaaaaggtgtaaaaggctt

SEQ ID NO: 165585 - DNA, 201 bp, Homo sapiens
agtgagctgagatggcaccactgcactccagcctgggcaatggagcaagactctatctaccccccaccctgcaaaaaaagaaaagaaaggaaaaaaaatcytggtgcttgtaggagaggcatttatttcttttaggactggacggggcttggagggtttccaggaaacagcctcaacctaaaaatagtagacacagttcat

SEQ ID NO: 165586 - DNA, 201 bp, Homo sapiens
accacaagcattatcttctttaatcatctcacaatcttatgaaggagatactaatattttgcttgcaaagatgagggaagtgagtttccgaagttgctaartgcgtaaaggaggtggtggtgtcagaatgttatcctgctcagatggttgcatgggacagtgtccagaggaaggcctctgattccttccccagcattaggc

SEQ ID NO: 165587 - DNA, 201 bp, Homo sapiens
gcacctgcatgttgtaaaaacacaaaataaaaaaaaaataaataaaagcagaccccttggttcagatatctttgtttgtgtaaatgttttggcattctttrtgaaaatcttcagattttcaagagcttaagatgacctcctctagccggctgcagcagtgtctaggtatctgtgaatgtgtaagaaattgagacagcctgc

SEQ ID NO: 165588 - DNA, 201 bp, Homo sapiens
cgctgccattcagttttactctgcacaaaatacagccaacatttttgcatttctttcttccttcctccttttcttctttctttccttccttccttcctttytcccttcatctatctttgttccgcttttgtttgtttttttttagatcgctgcatgctgccgcgttgggttaaccatggtagcattttaccatgagaagcc

SEQ ID NO: 165589 - DNA, 201 bp, Homo sapiens
ccttccaacatctagcattattgtgtgttgaataaatacttgttcgattaggtctaatcactcttcatgattggatttccaaaatgtggactctcagcagkacattacagggacagtggttgggtctggagatgtcacccttagctgtttttcacaatgagaggttgttttatcataaataaatcaataaatggcagatta

SEQ ID NO: 165590 - DNA, 201 bp, Homo sapiens
caggcacgccaccacacctggctaatttttgtatttttagtagagatgggggtttcaccatgtgggccaggctggtcttgaactcctgacctcaggtgatygacctacctcggcctcccaaagtgctgggattacagtcatgagtcaccatgcccgaccagcaagaccccactgctattgtccagtgtggtaggtaccttt

SEQ ID NO: 165591 - DNA, 201 bp, Homo sapiens
tctgatggccagtgatgatgagcattgtttcatgtgtctgttggctgcataaatgtcttcttttgagaagtgtctgatcatatccttcgcccacttgggtsgatgaagctggaaaccatcattctcagcaaactgttgcaaggacaaaaaaccaaacaccgcatgttctcactcataggtgggaattgaacaatgagaaca

SEQ ID NO: 165592 - DNA, 201 bp, Homo sapiens
attgtttgtttaaaatcactttggattctcatttaccttttccccctcaagatctttgtttttgactttggagataaccagaaataactaagcatgcttcsttccctctacgatttcatcctcatggggaagcaagaccccactcttttattttcatgtatgtatatatgtatgtatgcatgtatgtatgtatgtttgaga

SEQ ID NO: 165593 - DNA, 201 bp, Homo sapiens
caaagaattgtagttggatcaaatgagttggagtgggatacagcaacaatctatattctgatttcagcaacactgtgcagtgtaattccatattatattayaccacatcttctgtgggtctttctttgggggaagctaacattttaaaaggtttccctttgtaacctgtaaccccctctaccccaaaagtatattcaagag

SEQ ID NO: 165594 - DNA, 201 bp, Homo sapiens
cactttaaacattgcatccttgagttgcatatgatgggatctcttgaatcatttacattttgaaaaaagaaagtgaaatattctttaagaagccaaagtamtccacgagaatgtatggtgtttgttcagctggatatcttatttatttgaagtactgagagagaaatcttttctgactgctcaaaacagggaataataaac

SEQ ID NO: 165595 - DNA, 201 bp, Homo sapiens
aggctagccaatcatttcaaagcctgtgtagaatatctagactatatgtaatcctaggatttgttgttgttttgttatgattttttttaagcaggaagctwaaaaaaataaccacccgttactttgctgcttttagaaaataggtttgagattgattttgaatactaaagtatagttttcatgttataaagccaaccatgt

SEQ ID NO: 165596 - DNA, 201 bp, Homo sapiens
aaaaactagccagaaagcgtgaactttttttttttttaagccataaagcttggtaaggctagccaatcatttcaaagcctgtgtagaatatctagactatwtgtaatcctaggatttgttgttgttttgttatgattttttttaagcaggaagctaaaaaaaataaccacccgttactttgctgcttttagaaaataggtt

SEQ ID NO: 165597 - DNA, 201 bp, Homo sapiens
tggccatggaattgagaagcaggagcatggctcacaaattcacaaatcagcttctccactaatgaggggtgaggaagttaaaatatagactttgttgttgktgctgttttaatgaagaggctggacattaaaatcaaggggaggaataatcatgtcttctcttgaaatgggcagtgaacttcccggaaccagagtgttgcc

SEQ ID NO: 165598 - DNA, 201 bp, Homo sapiens
gctgttcttaactctgaaagcagagtgggccatttgaatgctcactttgatattttttaaaggaaaaatttgaggcattgacacatgccttttgcttactygcttggattggtttgatcaactttgttgcggtctaatttatgtaaaataaattgcatccatttaaatatacaattcaatgagttttgacagatgcacatg

SEQ ID NO: 165599 - DNA, 201 bp, Homo sapiens
ctgtatcatgatatcggagtgttagctgttttgggagtacgtgtgctcaggacttgggctgagtggaaaaccagagtatggggttagaaatggaggcagarggactaccatgtcggggaggatgcacaatgaattggacgaaggttgcaactcagtgagcaccgtacctgtagtgtgtcttagtaatagcagatgcccaac

SEQ ID NO: 165600 - DNA, 201 bp, Homo sapiens
cctcctaatactgcatgacggataatatgccatcacatggtgtcatttaatatattcattcctatttatagacattgaagttagatccatgtcttactatyacacatgacttagtaatgaatgttcctgcatgtatatttggtctgcttgagcaaggatattgggagggaggatttccagcagcagaagtggtggaacaaa

SEQ ID NO: 165601 - DNA, 201 bp, Homo sapiens
ttttttgcccttttgggggacaaaatgtctttatgttaaattgttttattattgttatctttatggagttaagggcacataaaatattcttacagagagarattctgtagtttccacaagtaaccagagaattgttcatggcagagaattattttttcaatgcctattttctcctgaattttctgacggagttagagatag

SEQ ID NO: 165602 - DNA, 201 bp, Homo sapiens
acagtggacctcacagctctcctgctaatggtgctgatggctaagctcagctcttacccttgaccactggaacaacttagacatgtcaccagctttctgascctgtctcattacgatgaaaattgtgatacaggttagtgtaaggaccgacaataatgcatataacatcaataatgatggatatagaatttctgcagttat

SEQ ID NO: 165603 - DNA, 201 bp, Homo sapiens
tgttgtgggcttggggaaacagaaggaaattggagacattgatatgcttcctgagaggtggaaggggccacttaacacagctttcatttttcagttgccartgggagaggagctggggtgggcatataatgagtaacattcaaagctccttctgtctttttttcagagaattcacaaaacaactcagggcctcctggtcct

SEQ ID NO: 165604 - DNA, 201 bp, Homo sapiens
tttagaaatatttctaacctctggccttttttcttatctctacttaaagcttttctggaaggaattcattttccactttccttaatgttccttaaatgttstacatatcttaaaagtggattcctcataaaacaatatggactatggtcttattctgtttaacggtatgaaagctcgcctgaaaggccaagagtaagattc

SEQ ID NO: 165605 - DNA, 201 bp, Homo sapiens
actaaaatgccagcatcactgttacttactgtgtttctctggatgtattacttaacctctctggctttatttctgcccgccctccccccgccccccccccscaatgcctcaatctgtggcagagttgttacattattgaaaaagaacataaagcatattttctggcatacagcatatgtttaatttataatttttgttttt

SEQ ID NO: 165606 - DNA, 201 bp, Homo sapiens
ggaaggaattcattttccactttccttaatgttccttaaatgttgtacatatcttaaaagtggattcctcataaaacaatatggactatggtcttattctstttaacggtatgaaagctcgcctgaaaggccaagagtaagattcttttaaaatcatgcccaagttttaaaggaatataaaactttctctttaaaaatata

SEQ ID NO: 165607 - DNA, 201 bp, Homo sapiens
tattctgtctttttatattctgccacccctatcatacttatgaaaatgccaggttgtaatcattcactgggagaaacaaggggttgaacattgttatcgcrcaaaggaagctgggcctagtaaaggaatgtaaatactaaaatgccagcatcactgttacttactgtgtttctctggatgtattacttaacctctctggct

SEQ ID NO: 165608 - DNA, 201 bp, Homo sapiens
tttctgttttcttcttccatttttatgttttgctatgccattcattcattctattcttttcatttctttttctttttgtaaaaattgtacagagtttaaarttagtcaggtatgtctattaaatttttacgtaaaaagttaaagcagccctcagcatcaacttcttcttcatttctaactcatttagtgaattcagttggt

SEQ ID NO: 165609 - DNA, 201 bp, Homo sapiens
aaatgtccagctttctttcttttattcaaaatttatacttcataattgaagttcacctcccaaaagacatagcttggtttagcatagagctatgatgtgtkttctctttgttccttttgcacactttccttgtctggaggcgttgggcttggatccttcattcttcatgaggctgatgtttttccatttcggtttccttaa

SEQ ID NO: 165610 - DNA, 201 bp, Homo sapiens
ggctggagtacagtggcacgatctcagctcactacatctctgcctcccgggttcacgccattctcctgcctcagcctcctgagtaggtgggactacaggcmcccgccaccatgcccggctaatttttttatttttagtagaaacggggtttcaccatgttagccaggatggtctcgatctcctgacctcatgatctgtcag

SEQ ID NO: 165611 - DNA, 201 bp, Homo sapiens
aaaatgtccagctttctttcttttattcaaaatttatacttcataattgaagttcacctcccaaaagacatagcttggtttagcatagagctatgatgtgktttctctttgttccttttgcacactttccttgtctggaggcgttgggcttggatccttcattcttcatgaggctgatgtttttccatttcggtttcctta

SEQ ID NO: 165612 - DNA, 201 bp, Homo sapiens
cgcctgaaaggccaagagtaagattcttttaaaatcatgcccaagttttaaaggaatataaaactttctctttaaaaatatacctttctgctttcatcccytaacccacaaagctcaagtctagtttaattcaaacttggaaatagttcttttattattgctccctgcaatgggaacagagctgaggctcctaaggtctag

SEQ ID NO: 165613 - DNA, 201 bp, Homo sapiens
gtttacatgaggggctgctgcttgtgttgtacattctataggtttgttcaatgcataatgacaggtgtctgtcatttcattatggagtgaaaccattccartttcatacagcgtagtttcacgcctctaaaagtcccctgaaagtgttattaaaagtactatctggccatgtcctcatttccccagcaaagtccttctgag

SEQ ID NO: 165614 - DNA, 201 bp, Homo sapiens
aactcctgagggatgctcaggaaaccaaaaaggatgtctgcatggaggacaagaaggcacaaatcgtctgatttcaccccatcctaagatcttgtgacttmagctttgttttggactggggcattggatctcccacatgccctctcttaagtcgtgcatttgacgcatatttaataagcacctactgtgtgccattagaga

SEQ ID NO: 165615 - DNA, 201 bp, Homo sapiens
ggtgcctaaagtttgagaacttctgatcaaaaatgccagataagaaaaaaaaacctttcgagacatcatttgaatcaattatcaaatgtttccaaagtgcrcttgctttgcaaaccactgtactactcatctctgcctccatcggagcgagttcaggagagttgtgtttacttttctaaaggagccttttccttcccattt

SEQ ID NO: 165616 - DNA, 201 bp, Homo sapiens
ccaaagtgctaggattacaggtgtcagccacagtgccatgccctgatgtgatgcttaaattcagaaattgggaaggagggtcaggtagctataagcaaaayacaagagaaatataagagaaagaaagacttgtatctgttgttagtgagtttttgtggtggtgatacattaatggaggcaacagagggtcagaaatcaggg

SEQ ID NO: 165617 - DNA, 201 bp, Homo sapiens
atttaaggtactgttaaaaagaaaaaacacagaacaacacagtgagagcagaaaaggtatcatctcctccccctcttcttctcttttagaaaccttgctgcgtgatccactgatggtaaatatttcatgtactttgcatatcagcctgagttccttttgtgaagtcaggtaaatggaatgtaaatcccctcgtcctccaga

SEQ ID NO: 165618 - DNA, 201 bp, Homo sapiens
atatactgaatgctaagccctccccactttttttttcttttttaaattcagaaatttctagttgtgtttattcccctcgtcagcatactttatcatatcaragccttttcagacactgtaaaactactgagttatgtttgggtcatgttttgcggtatgccctttaatagtgtagctttagaaatgcaattttcagcctct

SEQ ID NO: 165619 - DNA, 201 bp, Homo sapiens
gatttagaatcagaaagtgtgagttcaaattgccttcggctcttcacctgggtgggcgatttgaatagagctcacagccctgaaaaccctggttttcagaytctttattggtaaatgaagtcagcttagtgatatgagaattatgaaacataaatccctttgtaaaaatataaaataatcttacaatcatcatcgtcatcc

SEQ ID NO: 165620 - DNA, 201 bp, Homo sapiens
catttaaggtactgttaaaaagaaaaaacacagaacaacacagtgagagcagaaaaggtatcatctcctccccctcttcttctcttttagaaaccttgctgcgtgatccactgatggtaaatatttcatgtactttgcatatcagcctgagttccttttgtgaagtcaggtaaatggaatgtaaatcccctcgtcctccag

SEQ ID NO: 165621 - DNA, 201 bp, Homo sapiens
tcatttaaggtactgttaaaaagaaaaaacacagaacaacacagtgagagcagaaaaggtatcatctcctccccctcttcttctcttttagaaaccttgctgcgtgatccactgatggtaaatatttcatgtactttgcatatcagcctgagttccttttgtgaagtcaggtaaatggaatgtaaatcccctcgtcctcca

SEQ ID NO: 165622 - DNA, 201 bp, Homo sapiens
ggctgatgccttctttcactagctttatgtggctggcagttctgtcctgccactcttttcctcatcatctcagcctccctgcccatggcactcaagagtcsaccttggcagaacctgcaactcttcagcgcctccctaatgaactccttgcaagggcccttggttaagttacagtagagaagtggttgcttaagcaagtag

SEQ ID NO: 165623 - DNA, 201 bp, Homo sapiens
gcctgccttggcctgccaaagtgctgggattacagacatgagccaccaaacctggtcaattttctatggtgtgtgttacattttttaaaattttattttamtgtttatatagaaaaagttgccttatcaaccattataatcatggtatttagtgagtgtaatctgttctgatgtaatacttagtttaactggtaaaaaata

SEQ ID NO: 165624 - DNA, 201 bp, Homo sapiens
ggcaccacacacgatgagattggaggcacctgggtgtcagcctcttgggctggctcattacaggccactctgtctgaggaacactcaggtttgcaaaccgkttcttaaaattacaggatacctagggacctgttggggtgggagggaagaaccctatgggcagaaatgtgactttctgtagcaaagatgtactgtttccca

SEQ ID NO: 165625 - DNA, 201 bp, Homo sapiens
ccctggacctcgctctgctccgtagcgtgcagcattttgctgaagcattcaaggccaagaatgtgtgagtgttccagtggagggttatagatcataatttyttgctattgtaatatctttatcagatgaacacaattgggagaatgcaaggctgttgtgttgtcttggcgtccaaacaggaggctcatttatattggccct

SEQ ID NO: 165626 - DNA, 201 bp, Homo sapiens
tgcagtggtgtgatctcggcacactgcaaccttcgcctcccaggttcaggcgattctcctgcctcagcctcctgggtagctgggactacgggagcatactmccacacccaggtaatttttcatttttggtagagacggcgtttcaccgtgttggccaggcttgtctcaacccctgagctcaggtgatccgcctgccttggc

SEQ ID NO: 165627 - DNA, 201 bp, Homo sapiens
attgtgagccacacatgcaagggatctaggctgcatgctccttacgaaaatctaatgcctgatgatctgtcactgcctcccatcaccttcaagatgggatygtctagttctaggaaaacaagctcagggctcccaccgattgtacattatggtgagttggataactatttcattatatattacaacgtaataataatagaa

SEQ ID NO: 165628 - DNA, 201 bp, Homo sapiens
ccataacacatttactgtaacttgataccatgaactacacttgctgttatttatcatttctttttattttctctcattgcagcataaagccaaggtagaarcaatgaccctggacctcgctctgctccgtagcgtgcagcattttgctgaagcattcaaggccaagaatgtgtgagtgttccagtggagggttatagatca

SEQ ID NO: 165629 - DNA, 201 bp, Homo sapiens
caggcctggagtgcagtggtgtgatctcggcacactgcaaccttcgcctcccaggttcaggcgattctcctgcctcagcctcctgggtagctgggactacrggagcatactaccacacccaggtaatttttcatttttggtagagacggcgtttcaccgtgttggccaggcttgtctcaacccctgagctcaggtgatccg

SEQ ID NO: 165630 - DNA, 201 bp, Homo sapiens
cacacatgcaagggatctaggctgcatgctccttacgaaaatctaatgcctgatgatctgtcactgcctcccatcaccttcaagatgggattgtctagttstaggaaaacaagctcagggctcccaccgattgtacattatggtgagttggataactatttcattatatattacaacgtaataataatagaaataaagtgc

SEQ ID NO: 165631 - DNA, 201 bp, Homo sapiens
cctgtaggtttagcagaatcccagcctcacatcctccccgaacttggcagtaaaagccctgttcttccattcattccgatgatttatattctctctgggcrtcttatattaaacaggggaattccgacatgttccataacacatttactgtaacttgataccatgaactacacttgctgttatttatcatttctttttatt

SEQ ID NO: 165632 - DNA, 201 bp, Homo sapiens
cagttgctcacactcggtcaatacttgccttcctttgaggccatctgcactcactgacaatctgatcgctcccctgaatggaggtgaaagcatgcaagctmggagttaagatctttaactcagggaagaccctgtctatggaagtgctgagctcttcagtgtcatcacagaaaagcatgagcccctccctggtacggagtc

SEQ ID NO: 165633 - DNA, 201 bp, Homo sapiens
tgaagatgctgaggttgagggaagaaataaatgttaatgcaaagtgcccagtttagtgcctgccaagagtaactggtgggtctgtgtcaccttctgacatkatcagtgtgattgtctccaacgcatccatggaagtgaaaccgttggaggaagctaatgccgtgagccagctgttggttatgtttttgttttgtttttctt

SEQ ID NO: 165634 - DNA, 201 bp, Homo sapiens
taaatgttaatgcaaagtgcccagtttagtgcctgccaagagtaactggtgggtctgtgtcaccttctgacatgatcagtgtgattgtctccaacgcatcyatggaagtgaaaccgttggaggaagctaatgccgtgagccagctgttggttatgtttttgttttgtttttcttttttacttgctggatagtgggttctgt

SEQ ID NO: 165635 - DNA, 201 bp, Homo sapiens
atgccgtgagccagctgttggttatgtttttgttttgtttttcttttttacttgctggatagtgggttctgtttattgagaaatatttacatccgtctaawtcaggtgcttgctagggttcttggcacacagagcatcccaccaataaactgtggttcccaacaaggcttgcaactgaatctgggcaacaatgaacatgac

SEQ ID NO: 165636 - DNA, 201 bp, Homo sapiens
tagtgtcaagcagtacaggctttattcaatggccatggaattgagaagcaggagcatggctcacaaattcacaaatcagcttctccactaatgaggggtgrggaagttaaaatatagactttgttgttgttgctgttttaatgaagaggctggacattaaaatcaaggggaggaataatcatgtcttctcttgaaatgggc

SEQ ID NO: 165637 - DNA, 201 bp, Homo sapiens
gttttgtttgtaagaatcagttgaggacagatgggactatttgcatggattggtgtcatgtttgaagtcagttaccagagggtttctttcaacagagtatmccaaaaaaaaaaaaaaaaaaaaaaaaaaaaaagtaaattgcacagaccccagcttaggacctggacttaatcttcatgatgtttgtaaagtaatacttct

SEQ ID NO: 165638 - DNA, 201 bp, Homo sapiens
gggtcaacttcttaccgacaaagctggtgccccaaaagaatggggtcttatcctgttgggtgtcatgaagccaacacacaaaaccgaaagtagtgtcaagyagtacaggctttattcaatggccatggaattgagaagcaggagcatggctcacaaattcacaaatcagcttctccactaatgaggggtgaggaagttaaa

SEQ ID NO: 165639 - DNA, 201 bp, Homo sapiens
ggccacaaaaatcatgtcacaagatcttgttgatgtgcatgcattcattcattcaacaaatattattgagcatctaacataagccgggtgctttgctaggkacagaatgctgtacaaggtccctgtcctcatggggaccgtatgttgggaagacagatgataggcatggaaatgaagagacaaaccactccgacttcagcc

SEQ ID NO: 165640 - DNA, 201 bp, Homo sapiens
catgttaattagatatgcatgtatgtgtatgtatgatgtatatacccatatacacacagtctatatatacatgtatgcgcacatacacatattttaaggaragaattataaaatgatcaattcaagcttactatatgctagaggtgaggaatatttgaatacaagtcttatctagtagattaaaacagaaattaaagactg

SEQ ID NO: 165641 - DNA, 201 bp, Homo sapiens
tagagtctggattctttttatccagaagccattctttcagcctgtgcctttttgtaaataccataccccatctatttccacaaaggatttggggcattagsgagtaaagggggaatatgttctagaagaagggcgctcacctcagtaaattgatgggtgggccacaaaaatcatgtcacaagatcttgttgatgtgcatgc

SEQ ID NO: 165642 - DNA, 201 bp, Homo sapiens
ctggcagagggcttttttctgatcaccacccatgttaattagatatgcatgtatgtgtatgtatgatgtatatacccatatacacacagtctatatatacwtgtatgcgcacatacacatattttaaggaaagaattataaaatgatcaattcaagcttactatatgctagaggtgaggaatatttgaatacaagtcttat

SEQ ID NO: 165643 - DNA, 201 bp, Homo sapiens
ttaggagaggaatcactgtgaatgtagacctcgggttggtcattttcctagtaagatagaccagactgactggaaaagtcaccctcttgggctatcctgcrtatgtggctcggcattgcttccgtcaggataatgcatcagtttcttggacaaagggtgcatttctgctatttgaatgcagacatatttttggatataagc

SEQ ID NO: 165644 - DNA, 201 bp, Homo sapiens
tatatattttgaggtataaaaagtacgtgctcaaggtattggtcactcctcaatttgttttccttgaaacaaaatgaaggtataaatatttcagccgggcrcggtggctcacgcctgtaatcccagcactttgagaggccgaggcgggtggatcatgaggtcaggagatcgagaccatcctggctaacaaggtgaaacccc

SEQ ID NO: 165645 - DNA, 201 bp, Homo sapiens
tcccctttctggcagagggcttttttctgatcaccacccatgttaattagatatgcatgtatgtgtatgtatgatgtatatacccatatacacacagtctrtatatacatgtatgcgcacatacacatattttaaggaaagaattataaaatgatcaattcaagcttactatatgctagaggtgaggaatatttgaataca

SEQ ID NO: 165646 - DNA, 201 bp, Homo sapiens
ttctttttctttttgtaaaaattgtacagagtttaaagttagtcaggtatgtctattaaatttttacgtaaaaagttaaagcagccctcagcatcaacttyttcttcatttctaactcatttagtgaattcagttggtctttatatatgtagctttaagtaattgcatgtaaactgttacttcttcattttctagtcttag

SEQ ID NO: 165647 - DNA, 201 bp, Homo sapiens
tactggccaggtagaaagggcgtccaggtgaagggaccctggttcagtgatctccaacctgcacgtctcatttgtgaggaagccgtagggtgtggactttycttgtttctgaccttgagtgattagaaaatagcagcttttatatgtcacaaatggactttagataagcatgaagatgacgaagactgtggaatatgtagc

SEQ ID NO: 165648 - DNA, 201 bp, Homo sapiens
atgttataggcagttctgaaggaaaggattcgatgactatctttttttggcacaaatgtgatccttctggaggccagaagatagattcagtgggccccagwtctttcaggtttaaggaataagcattttggtctatgaaaaatggggtttgcctaaagtataagattgtcttatatttataaatgcctgtgttcattgctg

SEQ ID NO: 165649 - DNA, 201 bp, Homo sapiens
gtcgttgtgagcagtgccttggtcccgatgatgattctccaaaatgtaatctctgctgacagaacaagagtctgcaaattgggagtctggaaagggaagakaagggctttgtccctggccccaaagactcagggagaggtttactggccaggtagaaagggcgtccaggtgaagggaccctggttcagtgatctccaacct

SEQ ID NO: 165650 - DNA, 201 bp, Homo sapiens
tggccccccagaaattatctccagcagcagcaacagagaggactggaatgccattgacaggtcccacaagtcagcaatcagcacgccattttttaaaattwatgttgctattgtatcgtaaggttcttctgaagcgaccacttcataacactgtgtagtccaatccctaagctgggcaatttttttttcccctttcaatac

SEQ ID NO: 165651 - DNA, 201 bp, Homo sapiens
agaagacagttttttttgtttaaattgttataaataagtaagtgtatgcaccactatgccatgtagcatatcaagattatttttctttcctgcaccttatwttttccctggagttaatactcatctttttttagaaatttgctgagtttgtgatgtacctatcattcaacctcaaactttcatgtgattgtctaaatctca

SEQ ID NO: 165652 - DNA, 201 bp, Homo sapiens
tatcattcaacctcaaactttcatgtgattgtctaaatctcagttccttttattagaaaaaaaaaaaaaaacaactcccctggagcctttgtaccttctgyagtttggggttgttgtcctttttgcttggtgcacaggaatacttggtgatgttctttttaaaactgccctcacattgtatcctggaaagttcatttacct

SEQ ID NO: 165653 - DNA, 201 bp, Homo sapiens
ttaacatgctgttagtgcatgcaaaaaaaagcccagtaattgtagggctcatcagtacattgttaattgatcctcatttcctattattttacctcaaagcmaacacatcattcaccatagtgacaccagagttgtttatcttctctgtgcaagtgtgtgctctttttagcaagctttttggatcctctgtttcagagggcc

SEQ ID NO: 165654 - DNA, 201 bp, Homo sapiens
gaaagtgtcatgtcaaagataaagggagaacagcattttctttttttacaagtcactcttacttaaacacacagcatgactctccttacacatttatttcrgaagagcaaagtccgggtccccaggctcaactatcagccgccttctcatcccaagggctgtcaccaccagaaatttaacatgctgttagtgcatgcaaaa

SEQ ID NO: 165655 - DNA, 201 bp, Homo sapiens
tcagaaattgggaaggagggtcaggtagctataagcaaaatacaagagaaatataagagaaagaaagacttgtatctgttgttagtgagtttttgtggtgrtgatacattaatggaggcaacagagggtcagaaatcagggaaatcagggtggaaaatagcccagcagaggggaaaagaggaagtctgaacgagggccaca

SEQ ID NO: 165656 - DNA, 201 bp, Homo sapiens
aggcaacagagggtcagaaatcagggaaatcagggtggaaaatagcccagcagaggggaaaagaggaagtctgaacgagggccacattgcagatagaggcyggtgtactggtctgctcaggctgccataacaaaataccacaggctggatgacttgaacaacaaaaatacattttctcatagttgtggagcctagaattcc

SEQ ID NO: 165657 - DNA, 201 bp, Homo sapiens
tccccgattacaatatagagaggctaaattatagtccatatcacttttcctttaaatccctttacttttttgtgctacaagagtttcagaataataattcygcagaaaaaagtactgattgtccagcagttgtgtcaggtagaaaactgggatgcccgactgcattggtttagccagaactgtggccatgaaaccttgcct

SEQ ID NO: 165658 - DNA, 201 bp, Homo sapiens
gttgctgtactagatgaataatgtccccccaaattcgtgtctatctggaacctcagaatgtgacctcatttggaaataaggcctttttaattaaaaaaaawtttttatttaaaaaacagagatagagtcttgccatcttgcccaggctagtctcaaactgttgggctgaagcagttctcctgctttgacctcctaaagtgc

SEQ ID NO: 165659 - DNA, 201 bp, Homo sapiens
ttcaaattattcccccctttacagacacagaaactaagatttagagaggttatgcaatgtgccaacagggagaagttggagctggaatttgaaccaggctrgctgactccaaagctgtgtcctcaagcagtacatcagagccgaggaaggtcaagtttggaacgccatttagctgctctcagggagtctgattactgtttc

SEQ ID NO: 165660 - DNA, 201 bp, Homo sapiens
tagttctgtccctgaaggtgagggccagacaacacatcaaaactgactttttattttttttcaaagttgttaagactatctaagattcagatctccctaawactgttcctagttagtatttagaacgtatttgtttagaggatactagcctgaaatagccctatctccaggttgtctgatgcgatgaggatgtggtgttaa

SEQ ID NO: 165661 - DNA, 201 bp, Homo sapiens
cacagctggagtttaggaaggccaggcagcgtgtgttgaatgccagccactcttctacccagggtcatatccttggatgtttttctgtgcatctgtctttyccgaccctcccgtgattctggaaggaaacacctttccaagctccccagtgaccctggttcatcccggaaatatgcaggaaaagcattatgagcattgcag

SEQ ID NO: 165662 - DNA, 201 bp, Homo sapiens
ttccttctactttggtgccccatgatgatgtgcatcttttttatttctgcatcatatccatatagtgatatcatgtataatgatgtttaagaagacagttwtttttgtttaaattgttataaataagtaagtgtatgcaccactatgccatgtagcatatcaagattatttttctttcctgcaccttattttttccctgga

SEQ ID NO: 165663 - DNA, 201 bp, Homo sapiens
aatctctagcttctcaaactgtttcgtggtggagtgccttttgggcacaggagaaggaaataagagcctcgcgaggtttgggaatgctgcctctagctctyacactgcatgcagaattcctactctgagagctcactttatctcaaaaacccatgcatattctgcatctactctgaattccgcagtgttgtgtgttactat

SEQ ID NO: 165664 - DNA, 201 bp, Homo sapiens
ctcacatgtaggtcacctacgggagcaggggaggaaccatctgaggtgtttttttttttttttttagatttctcattgctgagaacagttccagctctgcygaccaaaggctgagtgtccttttattagtctgagcccctagagagaccaaagaggcaaccctcgagccaactgacagccagctgtggggttggaccctgt

SEQ ID NO: 165665 - DNA, 201 bp, Homo sapiens
aaggtaatattggcatatttatttttatctgtgtaatttttgcaacttataaccccttcaggtccaaatgaaacaggcaaccaggtaataaaccaattacrttctaatacagattacttcatgacagtgtcttattttccagtttatatgtaggtgagattctttggagaccgtcttcgtaatatagctagtttttgtcca

SEQ ID NO: 165666 - DNA, 201 bp, Homo sapiens
tttgaaaacttaccttgtttatatgtttcttctgttgcaatttcttccattacctggaatagctgctttggacggcaaaccaagcaatgccctttcacagstgtgggatgaatggggaaagaagtcttggtaaggaagcaattcagagaacatggaagcatctcatggcagcagtcacaattttgtgttgcgtaatatttc

SEQ ID NO: 165667 - DNA, 201 bp, Homo sapiens
aatatgttcgattgaggtttgtgtctgtaatttggaacggctttttgttgcaactaaaatattcatttgcagaaattatcactgagggtgttagcttcttyatgcttgcgtttcttgcatttgttactaaataaaatatttagaagtcacgtcgattttcaaaatgatagttaaggatgaaggtaatattggcatatttat

SEQ ID NO: 165668 - DNA, 201 bp, Homo sapiens
tgagactacaggcgcatgccaccaccgccagctaatttttgtatttttagtggagacgaggtttcaccgtgttggccgggatgctctcgatcttttgaccwcgtgatccgcccgccttggcctcccatagtgctgggattataggcgtgaaccaccgtgcccggcagggagtaacatttctatgcaactatatgtgggtgt

SEQ ID NO: 165669 - DNA, 201 bp, Homo sapiens
cctcagcctcccgagtaggtgagactacaggcgcatgccaccaccgccagctaatttttgtatttttagtggagacgaggtttcaccgtgttggccgggaygctctcgatcttttgaccacgtgatccgcccgccttggcctcccatagtgctgggattataggcgtgaaccaccgtgcccggcagggagtaacatttcta

SEQ ID NO: 165670 - DNA, 201 bp, Homo sapiens
ttgcctgatcgcctctccacccctgctacgtgtaatagaaaggtagggccatgttggagagggatccaacatttattatccccattttacagatgaagaasttaaggtggccaggcatggtggctcatgcctgtaatcctagcactttgggacactgaggtgggtggatcacttgaggtcaggagtttgagagcaatctgg

SEQ ID NO: 165671 - DNA, 201 bp, Homo sapiens
atgtcctaaattaatgtgtttaaagagaaaatttcaccagtggtaattttttttttttttcccctgagaaagtcttgctctgttgccaggctatagtgcastggcgtgatctcagctcactacaatctctgcctcctgggttcaagcaattctcctgcctcagcctcccgagtaggtgagactacaggcgcatgccaccac

SEQ ID NO: 165672 - DNA, 201 bp, Homo sapiens
atattttaccacaaattaaagaaaattaatatttccaacaagccaaagctctatgtaaatgtcctaaattaatgtgtttaaagagaaaatttcaccagtgrtaattttttttttttttcccctgagaaagtcttgctctgttgccaggctatagtgcactggcgtgatctcagctcactacaatctctgcctcctgggttc

SEQ ID NO: 165673 - DNA, 201 bp, Homo sapiens
acgaaggaggaggaggaggaaaaggtgacttgcctctagctgatgtggattatttctcttttttaatttccatgtctgcgtagcttcatcatagatctcarcttaaggacaatgaaagtcgtttattgagtacttagtatgtgctggttgcagagccaagtcttttttttttttttttttttcctccttttttgagagaga

SEQ ID NO: 165674 - DNA, 201 bp, Homo sapiens
cctcccaaagtactggattacaggcatgagtcactgcctggtgctttctttttgtctttttctaataaccattgctatagatggttgtccttaacgcgtawatgtttaaaatacctaaatgcctaaacgtttgaaaacattccttaaaaattgaagttatagcatactaacaagtgttcatttttataattgctgatttaa

SEQ ID NO: 165675 - DNA, 201 bp, Homo sapiens
tgccatccacggacggcttaagtgttaacagttcagtggagggtcagcgtgacagccttttgcacccacatctgggttcttgtccagtgtccaggaggaaygaggtctcatgagcaaattttaaggatggcaaatgtgggggattttattgctgatgaaagtggctttcactgggaagataagctaaaaagaagacaaagc

SEQ ID NO: 165676 - DNA, 201 bp, Homo sapiens
tttctttcttttttttttttagggagggtctggctgtattgcccaggccggagtacagtggcacgatcttggcttactatagccttgacctctctggctcmagtgatcctcccacctcagcctcctgagtcactgggactacaggtgcacactaccatgcccagctaagtttgttcattttttgtagatacagggtctgac

SEQ ID NO: 165677 - DNA, 201 bp, Homo sapiens
aaaattttcccctttctggcagagggcttttttctgatcaccacccatgttaattagatatgcatgtatgtgtatgtatgatgtatatacccatatacacwcagtctatatatacatgtatgcgcacatacacatattttaaggaaagaattataaaatgatcaattcaagcttactatatgctagaggtgaggaatattt

SEQ ID NO: 165678 - DNA, 201 bp, Homo sapiens
aaagtaaacagatcttagagagggacaccgatccctaccctgcatggggttattcacagagccatggggacactaaacgtaccttatctcttgaccatgcyattgattagttatgtgtttgcctgtgttattaataatgtatacattgaaaaatctatgtgcattatagtctttgatcttgtcatgaatttcaaagccaaa

SEQ ID NO: 165679 - DNA, 201 bp, Homo sapiens
agattttggaggacttgaaaggttcctgctacctttggctggggatggagggaacatggaagatgggtctttgtttagaggaagctctttatcctggtacsctggaagttggcatagtcttagcagttagtccagatgtgaatttcaggattattctgtgagtcttccaagtcctgtctcagcagtgaaataggctcagtg

SEQ ID NO: 165680 - DNA, 201 bp, Homo sapiens
cttgggaagtggactcagaggccaagtgactttgatttttcactttatcctggagtttctcaaccttggcactattgacattttaggccaggagattcttkgttgggggggatttcctgtgagttacaagacattaagcaacatcactggcctctacccactagatgccagtagcatcttctatttcctcaagtctcaaaa

SEQ ID NO: 165681 - DNA, 201 bp, Homo sapiens
tacttttgttctcaccttgggaagtggactcagaggccaagtgactttgatttttcactttatcctggagtttctcaaccttggcactattgacattttargccaggagattctttgttgggggggatttcctgtgagttacaagacattaagcaacatcactggcctctacccactagatgccagtagcatcttctattt

SEQ ID NO: 165682 - DNA, 201 bp, Homo sapiens
ggctggagtagtgtgcagagcctggcggtgattgttctcattagaaagtatagtgtaatactcaataaattacttttgttctcaccttgggaagtggactmagaggccaagtgactttgatttttcactttatcctggagtttctcaaccttggcactattgacattttaggccaggagattctttgttgggggggatttc

SEQ ID NO: 165683 - DNA, 201 bp, Homo sapiens
ataagccctgaagtctggacactgagagaattctaggcttgacttctctgtacagccatcttgggagtgctcaaccctttgaatcggatgtctagaatggmctcagatgtcactgtgcaggtgactcacgcctagaatcctctgcctatcgtgacagggagaagcctgtgtgaccctgtggccatctcagtctctgcaggg

SEQ ID NO: 165684 - DNA, 201 bp, Homo sapiens
caggttttgtttttttgtgtgtgtgttattttgttttttgtttttttgtttttcgggggctggagtagtgtgcagagcctggcggtgattgttctcattaraaagtatagtgtaatactcaataaattacttttgttctcaccttgggaagtggactcagaggccaagtgactttgatttttcactttatcctggagtttc

SEQ ID NO: 165685 - DNA, 201 bp, Homo sapiens
taagccctgaagtctggacactgagagaattctaggcttgacttctctgtacagccatcttgggagtgctcaaccctttgaatcggatgtctagaatggaytcagatgtcactgtgcaggtgactcacgcctagaatcctctgcctatcgtgacagggagaagcctgtgtgaccctgtggccatctcagtctctgcagggc

SEQ ID NO: 165686 - DNA, 201 bp, Homo sapiens
agaaacttggacagaggaaaatgaaaatgttctattaattccactagcatgagataatcactcttaatattttgttgcatgttcttttctttcttctgagkgatagcatttttttcaacaaattgggctcgtaatatataggcacatagatatataattaaaaaaacaagaatttctcatgtcattaaacattgcttgaaa

SEQ ID NO: 165687 - DNA, 201 bp, Homo sapiens
tctatgtaacctcagccatcttggattcccagcttactcacatcatagatggagagtcagttgtttagaaaaaaactttcttttttttttctttccttttkcttttcttttctttctttctttcttttttttttttagggagggtctggctgtattgcccaggccggagtacagtggcacgatcttggcttactatagcct

SEQ ID NO: 165688 - DNA, 201 bp, Homo sapiens
agcaacacacaaggattgggagatgttcatggcaagaaaaattcagaagggacattgttgtttcactaattctgtaaaggagagcagcggcatttacttakgccgattccccattctctctttctgtttttaaacagagacagatcttgctctgttgcccaggctggagtgcagtggcatgatggcatgatcatagttcac

SEQ ID NO: 165689 - DNA, 201 bp, Homo sapiens
caaggcgagtggatcacgaggtcagcagttgaagaccagcctggccagcatggtgaaaccccgtctctactaaaaatagaaaaaattagccgggcatagtrgcatgagcctgtaatcccagcgactcgggaggctgaagcaggagaatttctggaacctgggaggtggaggttgaagtgagctgagatggcaccattgcac

SEQ ID NO: 165690 - DNA, 201 bp, Homo sapiens
gaggtggtagatgcttttaaacaaacagatctcaggagaactctttcacaagacagcactagggggatggtgattagaaagcacctcatgatcccgtctasttcctgcagagaacagactagccccctatgcagcacacacctttgtgaggtccctcctccaacacagggattacaattcaacctgagacgtgggtgggga

SEQ ID NO: 165691 - DNA, 201 bp, Homo sapiens
cttggtaatgtagattttggaggacttgaaaggttcctgctacctttggctggggatggagggaacatggaagatgggtctttgtttagaggaagctcttyatcctggtacgctggaagttggcatagtcttagcagttagtccagatgtgaatttcaggattattctgtgagtcttccaagtcctgtctcagcagtgaaa

SEQ ID NO: 165692 - DNA, 201 bp, Homo sapiens
gcaaccaaagggagcataactctgataagaataataaaaagaaacaattcagcaactctcttacagatttttatcatcatcccattcataattgattccaracgtgcatgaatctttcaagataagtgtcttattgattatcctgaaaacaagcgatcacttggtgtcctgagattcgctcactgccctcccctgattacc

SEQ ID NO: 165693 - DNA, 201 bp, Homo sapiens
tataatttttttcttcttttctatctgctagcaaagtgggtaagttgacccatgacatggtccactggagggaccacatttgtgactctagcaattaagcytcccttctcatctgtggataaaactgacctcccagtgtgctggagtcaaacatattcagcatccaatccacattggactgtttgcatgtaacgtacagaa

SEQ ID NO: 165694 - DNA, 201 bp, Homo sapiens
agaaatggggcttctaaaataagtggaactgggacctcttctctctcaggctgttacttgttgtggttccagcctattttctgagctgtggagcagggagrgatctcacaggaaacttggtaatgtagattttggaggacttgaaaggttcctgctacctttggctggggatggagggaacatggaagatgggtctttgtt

SEQ ID NO: 165695 - DNA, 201 bp, Homo sapiens
caaatgcagcatcgcttgaagctgtgataaaatatcacacctttggaaatcaaggctcttcttgtttatttatttaactcacattaattagccttaatttwaaaaaaatgagaagagccagcatcatgatgcaagcattgactttgctcacaaaaacatcttgtggtcaacagtggggcttagggggcaggttttgtggct

SEQ ID NO: 165696 - DNA, 201 bp, Homo sapiens
agttccattaggtgacagtgtgtgcacagtttatggaggatgaagcggaaaacctgagccacaaggcagtagaggttggacgagacactcattccgaaggsgggtgtgtatgtgcaaactgtataatttttttcttcttttctatctgctagcaaagtgggtaagttgacccatgacatggtccactggagggaccacatt

SEQ ID NO: 165697 - DNA, 201 bp, Homo sapiens
agaggcatggctcccctgttatgtatttgggacttactgcagatgcttcctctggttcagggtgttgaggcttcgtgctgttaatattggaaggtgggtcrtttgtactgggcatctgtcctgtatcttggagatgtttagtaacatccctgacctctagccattagataccatctctcccagtagggataataaaaacat

SEQ ID NO: 165698 - DNA, 201 bp, Homo sapiens
taatataattaatgtaaaaacacatacttcttttcaacaaaaactggctctctttgtagtctcttttttaatttggtgcaatcacttaaaaagtttagcasatttaaaattttacatcattttaaaattgtttctcttttataagaaggatgctatttactattaatgtagaagtacaaaggaaacggttactttggattt

SEQ ID NO: 165699 - DNA, 201 bp, Homo sapiens
cagtgctttctgaagacagaggtgggacctggtgctggagacaatccattcctttcacaaagactgtaagccttacccaagcattaattttgctgcatagrcggcctgttctcccacaaagcactgagtaagaagaaaaggggcccggataaaccagcagggcctggcagacaacttctggctcccttgccatttaaggtc

SEQ ID NO: 165700 - DNA, 201 bp, Homo sapiens
caccccttccctcttatcagcttcttgctaccatgcagaaaagtgctgaaggtggcctgccctaaggcagtagcactagagcagggatggggaggacttgstggccagatgcatgtggacatgatggaaagggaagagaagaactgtcaagattttcactatcagtggtataagccccgtagtaatatgcctagtgttcca

SEQ ID NO: 165701 - DNA, 201 bp, Homo sapiens
agcctggccagcatggtgaaaccccgtctctactaaaaatagaaaaaattagccgggcatagtggcatgagcctgtaatcccagcgactcgggaggctgargcaggagaatttctggaacctgggaggtggaggttgaagtgagctgagatggcaccattgcactccagcctggcagacagagtgagactccatctcaaaa

SEQ ID NO: 165702 - DNA, 201 bp, Homo sapiens
atgtgtggccaatctcacaagatactaattctttttttcaaatgcagcatcgcttgaagctgtgataaaatatcacacctttggaaatcaaggctcttctkgtttatttatttaactcacattaattagccttaatttaaaaaaaatgagaagagccagcatcatgatgcaagcattgactttgctcacaaaaacatcttg

SEQ ID NO: 165703 - DNA, 201 bp, Homo sapiens
tgggattacaggcgtgagccactgtgcccagccaaacctcggcacttttatccaacaaatatttatttcgtgactattatgagtcaggcttaagaatacaytagtaggtacagcaggagagcatgtagaagaggatagatgtagaaaatcgggacggcatgttaggaatatagataggaattactaaggaaaattgtattt

SEQ ID NO: 165704 - DNA, 201 bp, Homo sapiens
gtgaaaccccgtctctactaaaaatagaaaaaattagccgggcatagtggcatgagcctgtaatcccagcgactcgggaggctgaagcaggagaatttctkgaacctgggaggtggaggttgaagtgagctgagatggcaccattgcactccagcctggcagacagagtgagactccatctcaaaaaacaaacaaaaaaaa

SEQ ID NO: 165705 - DNA, 201 bp, Homo sapiens
ttttttttttaatacttttctttttgccggcatctgcgtagaatttttttttttttttttggtagtttcttaatggtctttagcaaaggaagtaagtgacrctgatcggtgaaggcagacagtaagatttataatgtatttgtgctagctgattgccaacagaaccggcctttcccagtggtgctgtacgcagactcggaa

SEQ ID NO: 165706 - DNA, 201 bp, Homo sapiens
ttcctccccttttatcaagagccgtaagtccttggaaaatgcaaagagggggaaaaagaagaaaaacagcaacgagtttattggagagttaacacttaaakactccagtacattgagtgtgacatgcctgtgtaggagactgtctgtcccccaaataattgacaatttctctccatctaacaagaaaatatatggcacttt

SEQ ID NO: 165707 - DNA, 201 bp, Homo sapiens
atacacaatatgttatatgagatcttcacccaatcaaggattaaatggccaattcctaaatgatgcctacctttttatggccatgtatacctttgcctcartactactggcatttgctgacatccatttatcaagatacagggatggatttctagaaggcccaggcaggggtgctggccaggagacaccaggcatagacct

SEQ ID NO: 165708 - DNA, 201 bp, Homo sapiens
tcgcagacacggaaaaaaggattattcctccccttttatcaagagccgtaagtccttggaaaatgcaaagagggggaaaaagaagaaaaacagcaacgagkttattggagagttaacacttaaatactccagtacattgagtgtgacatgcctgtgtaggagactgtctgtcccccaaataattgacaatttctctccatc

SEQ ID NO: 165709 - DNA, 201 bp, Homo sapiens
gtggcgtttccacacacagggaagcagatagttccattaggtgacagtgtgtgcacagtttatggaggatgaagcggaaaacctgagccacaaggcagtakaggttggacgagacactcattccgaaggcgggtgtgtatgtgcaaactgtataatttttttcttcttttctatctgctagcaaagtgggtaagttgaccc

SEQ ID NO: 165710 - DNA, 201 bp, Homo sapiens
aagtagctgggaccacaggtgcacaccaccacttccagctgattatttaaaaaaaattttgtagtgacagtgtcttgctgtgtttcccaggctgttcttgwactcctgggctcaactgatcttcccagcttggcctcccaaagtgctgggaatacaggtgtgagccactgtcccaggccagttttaactcacaatgatttc

SEQ ID NO: 165711 - DNA, 201 bp, Homo sapiens
aagatgagtggcgtttccacacacagggaagcagatagttccattaggtgacagtgtgtgcacagtttatggaggatgaagcggaaaacctgagccacaakgcagtagaggttggacgagacactcattccgaaggcgggtgtgtatgtgcaaactgtataatttttttcttcttttctatctgctagcaaagtgggtaag

SEQ ID NO: 165712 - DNA, 201 bp, Homo sapiens
tgcaaatgataccatcacgaaagtgtacagatgacctacagaatgggggaaatacttacaaattaaatattaaataagggatttgtatctagaataaagamcttttacaattcaataatgaaaactcatttaaaaaatgagcataagatctaaatagatattcctccaaatatgatacacaaattgccaatgaatacataa

SEQ ID NO: 165713 - DNA, 201 bp, Homo sapiens
ctgggtttaaggaattctctgccttagcctcccgcgtagctgggattacaggtgcatgccaccatgcccagctgatttttgtattttcagttgagataagsgtttactgtcttggccaggctggtcttgaactcctgacttcgtgatccactcgcctcggcctcccaaagtgctgggattacaggcatgagccaccgcccc

SEQ ID NO: 165714 - DNA, 201 bp, Homo sapiens
caaaccctgttttgtagtatttgctgattactgtggtgtaaatactcacaccttggctgatttcaagttgcagcttggaacttggagttagaaagagatgygtagtcccataccattttatgtatgtaaagtatttgcactatgccgactaatagacataaataacctcatgagcatagataatagtcacatctactaaga

SEQ ID NO: 165715 - DNA, 201 bp, Homo sapiens
aatttccttgtgaatgctgttaccatattcctggtgtctatgtgagggggtgtgtggtggtatgccggtaagtgttgaacaacctgctctgttggcgggarctaggggaaacaaaccctgttttgtagtatttgctgattactgtggtgtaaatactcacaccttggctgatttcaagttgcagcttggaacttggagtta

SEQ ID NO: 165716 - DNA, 201 bp, Homo sapiens
aaatttgccgggtgtagtggtgcacacctgtagtcccagctatttggaaggctggggcaggagaatcgcttgaacctgggaggcagatgttgcagtgagcygagatcaggccactgcactccaacctgggtgacagagccagagtctgtctcaaaaaacgaaaaacaaaaaaaaccaaaagactaaatgtataaaaggtac

SEQ ID NO: 165717 - DNA, 201 bp, Homo sapiens
gttttccgggctgtttgtgtactacacagcctgtgtacctggcaaggcacgctctgctctgccctgccttctgatgagctgactaacaccttatagatgargttcccttagaaccaaagatgccccatgaaactccctaggatgaatgttggaagtccttccaactgggattcccagccggaaaggaaacagttcatctga

SEQ ID NO: 165718 - DNA, 201 bp, Homo sapiens
ctatgctgggcacaaggaatgttatggtggataaggggaaaatggtccctaccctctgtcagttttttatggaagaagaaagacggtctttaaagaaattyacataattaatcacaaaaagctaatactatgacaaagaatgtaagttactaatacagcttagaacagatgactctaaccttgtgtaggagctagagaagg

SEQ ID NO: 165719 - DNA, 201 bp, Homo sapiens
gtggtggctcctgcctataatcctagccctttgggaggccaaggtgggaacatcatttgagcccaggagttaaagaccagcctgggcacatagtgagacascagctttacaaaagagagagagagaaagaaagagagagagattatttctagaataagcaaaccaaacgtgaattaagttttcattctcattttagtgatt

SEQ ID NO: 165720 - DNA, 201 bp, Homo sapiens
tgggtatggttgtgcactcctgtggttccagctactcaggagactgcggtagggggatcacttcagcccagaagttcaaggctgcagtgagctgtgatcgytccactgcactctagcatgcgtgacagagtgagactatctcaaaaaagaaaaaatgagattatggccaggggtggtggctcctgcctataatcctagccc

SEQ ID NO: 165721 - DNA, 201 bp, Homo sapiens
acatcgcataaagatgcagatttgattccccctttactcacactataaaaacaaagtttttaaagtggttagccatacctggaaatgtaaatgcattcgcstaatgtaatgccaaagaaaaattaagacaaatgataccacatcgctgccacaaactgcggctcgtacaaaattcactttagttattatgctgtgaatacg

SEQ ID NO: 165722 - DNA, 201 bp, Homo sapiens
tggctgggcatggtggctcacacctctaattccagcactttgagaggataacttgagtccgggagtttgagaccagcctgggcaacagagccagaccatcyatctctacaaaaaatttaaaaattagctgggtatggttgtgcactcctgtggttccagctactcaggagactgcggtagggggatcacttcagcccagaa

SEQ ID NO: 165723 - DNA, 201 bp, Homo sapiens
atattaattattaataaaatccaactccttaataatacaatcatagttaccatttattgagagcactcttctgaacattttgcattctttatttaatcttmcctacaaccttattaagtagacattatcttcatcttattaagtagtcagttcctcatttgcagatgaggaaactggctgactgagttaaatgaatgccaa

SEQ ID NO: 165724 - DNA, 201 bp, Homo sapiens
tgtttatgtaagatccataatgactcttgccaattagcaggctgctctcttccaagtggtaacccagggactcaagctcttttcatcttgtggctcagccrtctgacacatgtggcttccagcactgccctgctgttgtctgcacaaagctggtggaagaagtaggaatttgcaggaccatgtgtggagcattttaaggat

SEQ ID NO: 165725 - DNA, 201 bp, Homo sapiens
agaatacatacttcataagcaggaggcatatatgtttgtatatatgtatgtacatagacttcatacacatgaaataaaatttcaaatggttcctctgttcmgcaaacgtgacccaaagttttggcttatttggcgttttgttttcttgaagacatacttgaattttaaatagttaatccatttaagaagtttcatttaagg

SEQ ID NO: 165726 - DNA, 201 bp, Homo sapiens
tggagatttcaaggatcatcagggaagctagtgtggctggagatgaatggagtgggtaggagaggtgctgttgggggatgggtatctggtagactctgagrtagcggtgaggaagacattagagggtttgagctagagagtgatgcgagctgtttgatttttgaaacatcgctggatttcagaatgaagtccagactgcat

SEQ ID NO: 165727 - DNA, 201 bp, Homo sapiens
actaatattctctctgactataattgtaaaacagtagatgtctttcaccaagcgctaacattatattaattattaataaaatccaactccttaataatacwatcatagttaccatttattgagagcactcttctgaacattttgcattctttatttaatcttacctacaaccttattaagtagacattatcttcatcttat

SEQ ID NO: 165728 - DNA, 201 bp, Homo sapiens
aagggaaggatggaaggaagagagggagagacggagggagatggaggatgacagggagatggagggaggcaaaaagaaaaagggagaaggaaagagaggaragaggggaagggaggaaggaaagaagagagagaaggaggaagagagggaaggaggcacagaggtagagaggcagggagataatggagatcctggccaaaa

SEQ ID NO: 165729 - DNA, 201 bp, Homo sapiens
gatgttaattgagatataggagtacttcattaagtctccagaatacatacttcataagcaggaggcatatatgtttgtatatatgtatgtacatagacttsatacacatgaaataaaatttcaaatggttcctctgttcagcaaacgtgacccaaagttttggcttatttggcgttttgttttcttgaagacatacttgaa

SEQ ID NO: 165730 - DNA, 201 bp, Homo sapiens
cctagccaagcagaaacccatgtttttgactttcaggatatttgtgaattaatttacttgcatatattggccaagatctagcataatctcttaatattcartgaataaaaaattgagttttgagagcaaatattttggtaggaaatagagaactgacactaatattctctctgactataattgtaaaacagtagatgtctt

SEQ ID NO: 165731 - DNA, 201 bp, Homo sapiens
tattgtgaaataccatttgacccagcaatcccattactgggtatgtaaccaaaggaatagaaatgattgtattataaaggtacatgcacatgtatgttgaytgcagcagttttcacagtagaaaagacatggaattcacccaatccgaattttaacaagtcttccatgtgattctgagacagactcatgttcgtgtggttc

SEQ ID NO: 165732 - DNA, 201 bp, Homo sapiens
agtacaagttggtaatgggtaacaggctaaaccatgtggcaccccttccctcttatcagcttcttgctaccatgcagaaaagtgctgaaggtggcctgccytaaggcagtagcactagagcagggatggggaggacttggtggccagatgcatgtggacatgatggaaagggaagagaagaactgtcaagattttcactat

SEQ ID NO: 165733 - DNA, 201 bp, Homo sapiens
cacccaatccgaattttaacaagtcttccatgtgattctgagacagactcatgttcgtgtggttctggctctgcagaactgaggtgggccccaaaacttgmgtttctaaaaggtactagctgagcatgatgactcacatttgtaatcccaccactttgtgaggccgaggcgggtggatcgcttgaggccaggagtttgaga

SEQ ID NO: 165734 - DNA, 201 bp, Homo sapiens
gtggccctgaagagggtgggaatgtctcatccccctgtgggcttagaagaaaaccagaggtctgtgcacactatggatttttactacaatgatgccctttyacatacagcgagaaggattaagaggtactgtattgttggttgataaagtcaaacttgtgaacagagcaaaagggcattgcttggtcattgcagcttccac

SEQ ID NO: 165735 - DNA, 201 bp, Homo sapiens
tacttcttggagaaacctcccaaatttctatcgacactagacatctcaggatttgaaatgttaagctaacaaattgttcatcaggtgtatctccagccctycgtaaacactgccggatggatgaacctacgtaatgatctcctggtgccattttcctgactgtagatacttgggtaaggaggagactttgactctagatga

SEQ ID NO: 165736 - DNA, 201 bp, Homo sapiens
gctggccaggagacaccaggcatagaccttcctttctcagagccttcgtggcccctagtttgaatctttgagtcactgcagtaaagttcctgatgtttgasagtactccttatgaagggagtcatatgagttgctagctgggttctctggatggtggtgtcatgccaacatgggagccactagcacaaagaacatgctagg

SEQ ID NO: 165737 - DNA, 201 bp, Homo sapiens
cgcagattgccagtgactccgggaatgcctaggtttatgtatggattaacacagtgatagaccctgagtagcaaaagacgaagactaattacctgacagarctcccctccactcgcctgggtcattgaaattaatttctgctttcaagcttggcagaaagcagctgcagaatttcagttcaatacttaaattaacggggag

SEQ ID NO: 165738 - DNA, 201 bp, Homo sapiens
ggattaagttagggagacagtaatggtattgttagcaggctatttcaatgattttctctgcggaagagtagggaaaggtgacattccaactgggaatattmgactctgcagatccctactcggagtttttcagccctgttttaagtgccgagctgggttttgcctcatgatccaattgttttattagcgaaatcatcatct

SEQ ID NO: 165739 - DNA, 201 bp, Homo sapiens
acagagcctcccttctacctgctcttacccgggcaccacagttgatgagttattttttggaccatcagcaacacacccaatcattgtacatggaatacttyggggatgcttttttctatattgattttacttcattaaactgagctccagaggagcagaaactttggctaatacatcttggtcttagcttgtaatatctgt

SEQ ID NO: 165740 - DNA, 201 bp, Homo sapiens
tccttctttctgatcttgagaccttgatttgtccagtattttctcatcattagctgagtgtaagcattttttggcaagaacattataaaaatgatgtggtrtctttcttagtatattatctcaggtagaacataatgttgatctgtctcatccctggtaatgttaaccttgatcacttggttaaggtgatgtctgctgagt

SEQ ID NO: 165741 - DNA, 201 bp, Homo sapiens
tacagaccccaaagcttgctgtcccctgggcaggtgcatgagggggtcccaggcaatcaggctcttctcaaacctgaattatacccggcctcagggtatargggtcaggcagctgtttgacaggattcttgcaaatgtttttggtttctctgtctactcattacgtacactctgccagaggttgaaaactcaatgttgaga

SEQ ID NO: 165742 - DNA, 201 bp, Homo sapiens
cctgcccttccctaactggtttcctatgctgtcatgcccacctttgagtgttgccttcactttaaccttctgtgcatgctcacaaagtaattagcatgtaycctccattctgagttaatataaggccccagacccagccacatggggcaactttactgccttcaggtaggggaaccacccccaccacattccctctccact

SEQ ID NO: 165743 - DNA, 201 bp, Homo sapiens
ggtgatgtctgctgagtttttccaatgtaatgttattaatttttcctttgaaattcataattatttgaagggagatgttttgagatgatgctggcagcccygttttccttaaactttcacatgctgactttctattgttggatcttgcctgcagcagtgtttaccatgatgcttggctagtggtgactatgtatttccctt

SEQ ID NO: 165744 - DNA, 201 bp, Homo sapiens
tgttgaaggtcatttgaaaaatactctgtctttattctttgaaatggatttactctcaagaaagttgcatgtcactttacttggaagagacgggtctcagkgaggtgtgcctccgctttcatgaaaagtctcccgtctgcagaagcattggctgacatggaagattttttttttttttaatacttttctttttgccggcat

SEQ ID NO: 165745 - DNA, 201 bp, Homo sapiens
gcaaagtcaagttggagatggctctcgatatgcatgagtgtgttagactgcttttcttctattttttaaaaatgcacccaaatgtaaaagacacttttacstttttgatttgatgttgaaggtcatttgaaaaatactctgtctttattctttgaaatggatttactctcaagaaagttgcatgtcactttacttggaaga

SEQ ID NO: 165746 - DNA, 201 bp, Homo sapiens
taatttttgtatttttagttagacaccaggtttcaccatgttagccatgctggcctcgaactcctcacttcaggtgatctgactgccttggcctccgaaartgctgggatgacaggcgtgagctgccttgcctagccaaataactccattatttaagaaaaattaaccagtatttattgaatacttactgggccctgtgct

SEQ ID NO: 165747 - DNA, 201 bp, Homo sapiens
tcttgcttgtaggaagaacaagagacgagacacagcaaggtgatgatgggtatgtgaagcaggataaagaaaaaaacaggacaggcattacaggcttaagyctgtaatcccagcactttggaaggccaatgcgggtggatcacctgatgataggagttcaagaccagcctcaccaacatggtgaaaccctatccctattaa

SEQ ID NO: 165748 - DNA, 201 bp, Homo sapiens
tcacagtgtttctagctcccctttccaatacatctctctctctctttctctctctctctctctctctctcacacacacacacacacacacacacacacagscaaatcagacaccaacataaactgtagagttaacattctttttccaccctcacactttttttagctccgatctgtgttcaatttctgcctgagagagtga

SEQ ID NO: 165749 - DNA, 201 bp, Homo sapiens
atcaaggctgggaggaggtctttccactggttttccgggctgtttgtgtactacacagcctgtgtacctggcaaggcacgctctgctctgccctgccttcygatgagctgactaacaccttatagatgaggttcccttagaaccaaagatgccccatgaaactccctaggatgaatgttggaagtccttccaactgggatt

SEQ ID NO: 165750 - DNA, 201 bp, Homo sapiens
ttgtctccatttctgtcccagttacatcaaggctgggaggaggtctttccactggttttccgggctgtttgtgtactacacagcctgtgtacctggcaagrcacgctctgctctgccctgccttctgatgagctgactaacaccttatagatgaggttcccttagaaccaaagatgccccatgaaactccctaggatgaat

SEQ ID NO: 165751 - DNA, 201 bp, Homo sapiens
gcagaatggaagggaaggatggaaggaagagagggagagacggagggagatggaggatgacagggagatggagggaggcaaaaagaaaaagggagaaggawagagaggaaagaggggaagggaggaaggaaagaagagagagaaggaggaagagagggaaggaggcacagaggtagagaggcagggagataatggagatcc

SEQ ID NO: 165752 - DNA, 201 bp, Homo sapiens
atggcttaccttactttttagacataatttttgttttctgttaaagggtcagttatagataagtatgctcccttgcaatgaaatgaacccactttatcaaytttgaaggaatcaaaattaacttgaatacattgtctttttgcatatgtatgtagtgctttgtataaacatatgaatttgtaggagctgctcttaatgatt

SEQ ID NO: 165753 - DNA, 201 bp, Homo sapiens
tctttaaggaaaaaggttggatggatgatgtcaaagacccactgttcagtctttctttcttatattttgagccttaattgggtccctgtgagtcaatttcmgatgatagaatttgctgttttatagttttactctaacatgtagtaccttgagatagaccagtgatcccagactaagaattattcagaatcattcaccgtc

SEQ ID NO: 165754 - DNA, 201 bp, Homo sapiens
ttatactgtgggctgcatcgcttaccaatatttcatctgtttcacttagctgctgttacttactcaataatgtgtggccaatctcacaagatactaattcwttttttcaaatgcagcatcgcttgaagctgtgataaaatatcacacctttggaaatcaaggctcttcttgtttatttatttaactcacattaattagcct

SEQ ID NO: 165755 - DNA, 201 bp, Homo sapiens
tctagtggatattttgttaaaaaaaaaaaatggggtctcattctgttgccccggctgcagtgcagtgacatgatcataactcatggtgacctcaaattcaygagcccaagcgatcttcccacctcagcctgagtagatgggactacaggcatgtgtcaccatgccaggctaatgtttaaaaatttttcttagaggtagagc

SEQ ID NO: 165756 - DNA, 201 bp, Homo sapiens
ctgagtttctgtggatttctataggctcctgcaaattttatctagtggatattttgttaaaaaaaaaaaatggggtctcattctgttgccccggctgcagwgcagtgacatgatcataactcatggtgacctcaaattcatgagcccaagcgatcttcccacctcagcctgagtagatgggactacaggcatgtgtcacca

SEQ ID NO: 165757 - DNA, 201 bp, Homo sapiens
ctagtgtgggtctatacgtgacactaggtgtagtgtaggtgacaaacaaaaagcagctttcgtttgcttaaaatttttgttctctgcctttatttttcaaraatattttcactaggtatagaattctaagatgaaagttttattttttttcagctgtggcttccatcattttcctgagaggtataactatcagtcttgtag

SEQ ID NO: 165758 - DNA, 201 bp, Homo sapiens
aattttgtgttgcgtaatatttcaggaacttgcaaccctgataacttgtgcctgcctgtctgtaggcctttaatgatgttttattgaattttggttttccmctagactttgcagtgcatgacacatagtaattgctcaataaatatgtgttcaactgaactatggtggttaggttagtaattagatgcacagacaaaatca

SEQ ID NO: 165759 - DNA, 201 bp, Homo sapiens
ttccattactcacctcctaggttaagcattgttattattattgatatagtaatttttgctatatattttaaaactcacagatttcactcttaccatttggrtcttaacatgtcgttaccctttatgttgctctttgttactttctgcatctctgggtttatagctaaggtcattttcctcctgcctgaagagcatccttta

SEQ ID NO: 165760 - DNA, 201 bp, Homo sapiens
cgagcatgctctgaactcctgaactgctcattctgttctctgagagaattgctcaagctgcagtttatcattatatgcctccaaagactttgtgtttcctrtgtttgacatcgagatagaatttttcataaccctttactagtaataaatttgattgttaagggaccgggttaatcttatttctaataccagcatctgatt

SEQ ID NO: 165761 - DNA, 201 bp, Homo sapiens
gaatgactccatggatgacctttccgtgcctttgtctgtagcctgccctcctctttaactgaacaccttccagacgagcatgctctgaactcctgaactgstcattctgttctctgagagaattgctcaagctgcagtttatcattatatgcctccaaagactttgtgtttcctgtgtttgacatcgagatagaatttttc

SEQ ID NO: 165762 - DNA, 201 bp, Homo sapiens
tcacgtttgtttaatattttaatttccccatgagtcttaaacctctgcgtggtgtgcaagttgaggcctggtgtatgcacttcggccacgggctttcccaytgtaatgaagatggaatgactccatggatgacctttccgtgcctttgtctgtagcctgccctcctctttaactgaacaccttccagacgagcatgctctg

SEQ ID NO: 165763 - DNA, 201 bp, Homo sapiens
ggttggagaatgttcatatcacattattttggatgtctggggttgcacctggaagctcagatagcaatatctaggcacggctgccagtgctctatacattsacgtttgtttaatattttaatttccccatgagtcttaaacctctgcgtggtgtgcaagttgaggcctggtgtatgcacttcggccacgggctttcccact

SEQ ID NO: 165764 - DNA, 201 bp, Homo sapiens
aagcggggcaaggggttggagaatgttcatatcacattattttggatgtctggggttgcacctggaagctcagatagcaatatctaggcacggctgccagygctctatacattcacgtttgtttaatattttaatttccccatgagtcttaaacctctgcgtggtgtgcaagttgaggcctggtgtatgcacttcggccac

SEQ ID NO: 165765 - DNA, 201 bp, Homo sapiens
aggcagcagaattgcctgaactcgggaggtggaggtagcagtgagctgagatggcaccactgcactccagcctgggcaatggagcaagactctatctaccmcccaccctgcaaaaaaagaaaagaaaggaaaaaaaatcttggtgcttgtaggagaggcatttatttcttttaggactggacggggcttggagggtttcca

SEQ ID NO: 165766 - DNA, 201 bp, Homo sapiens
taaacaagaacaaatggagaatctttcactatgactgcaactgaaaagaggagtaatggaaggacatgtactcttcccatatatttttaaacaattactgkatctgatttttcatttttcattttttttttttctggaagaaagagcagatctggataaagtcagtatacaatgtggtctttggtgacagacccaagttca

SEQ ID NO: 165767 - DNA, 201 bp, Homo sapiens
ttgataactccctggcaggttctcttcatcgggcctccacatagggtatgcgaacctcttcatgtttttaaaagggagagatttaataaaggcaatttggkacttaaaaattgttagaagagctaaaagagtagttttgaggttgaccttcagaacggcttcctgaataatacagaagtgaccctccaggaaggcccttcc

SEQ ID NO: 165768 - DNA, 201 bp, Homo sapiens
gtgacaataatggagatagagaaaacaggatggattcaggaaacatgaccacactgagcatattcaaatgtaattgtcagttttcgtgtctccctcccackggaccacaagcccctaactcttcatgtacacaccctgactcccagtgtgggctggccacccaggaggcacccagtttatgtgtgctgcgtgagtgatgtg

SEQ ID NO: 165769 - DNA, 201 bp, Homo sapiens
agaatcttgagttgatacctccttgggtggcatggagcctatacctttgtagatcttgggaaacaacttctaaagtaatcatagttgtatgtaatcgtagktacaacaatagttattttaggcacataacccaaaggttttcttacaaggaatctatgaaccttaagagtgagggcttctgttaagagtaagggcttccct

SEQ ID NO: 165770 - DNA, 201 bp, Homo sapiens
gcaacctctgtcgattctccttcctcggcctccgtagtagtcaggactacaggcatgcaccaccatagctggctaatttttgtatttttagttagacaccrggtttcaccatgttagccatgctggcctcgaactcctcacttcaggtgatctgactgccttggcctccgaaagtgctgggatgacaggcgtgagctgcct

SEQ ID NO: 165771 - DNA, 201 bp, Homo sapiens
attagtgaagcagaggttgaaggaggtcacttgctttttatcccaatgtcaaataactccataattttttttattattttttgagacagagtcttgctctkttggccaggctagagtgcagtggcgcgatcttggctcactgcaacctctgtcgattctccttcctcggcctccgtagtagtcaggactacaggcatgcac

SEQ ID NO: 165772 - DNA, 201 bp, Homo sapiens
gtcattgattgaaagagtcatggcatagatgctgaagttttgatgggaactttgcaggatgttcgtttgtttatcattagccctgggagagtcatccctcrcctcccaccaccccttaatttaaagggatttaaaatattttcaagtacatcctgatatcagcacgtggtacactgagcctagttgatggaattgtgaaaa

SEQ ID NO: 165773 - DNA, 201 bp, Homo sapiens
cccccttcacatacttatactgtgggctgcatcgcttaccaatatttcatctgtttcacttagctgctgttacttactcaataatgtgtggccaatctcamaagatactaattctttttttcaaatgcagcatcgcttgaagctgtgataaaatatcacacctttggaaatcaaggctcttcttgtttatttatttaactc

SEQ ID NO: 165774 - DNA, 201 bp, Homo sapiens
ctctctctctttctttctctttcctttctttcttccatttaaattgagacagggccttgctctgtcactctggctggagtgcagtggcataatcatagctsactgtgcccttgaactcttggactcaggcaatccctcgacatcagccttctgagtagctgggactaccggtacctgccaccacacctggctatttctttt

SEQ ID NO: 165775 - DNA, 201 bp, Homo sapiens
aagcagaatggaagggaaggatggaaggaagagagggagagacggagggagatggaggatgacagggagatggagggaggcaaaaagaaaaagggagaagkaaagagaggaaagaggggaagggaggaaggaaagaagagagagaaggaggaagagagggaaggaggcacagaggtagagaggcagggagataatggagat

SEQ ID NO: 165776 - DNA, 201 bp, Homo sapiens
ttattttcagtttatcaattaagttgttcaagtcttctatatactttgtgtttgtctgcttattttatctgttactaagagggatatgttaaaatcttccrttataattgtgaatttgtctatttattgtcctaattctgtcaatttttgacatatatgagaggctctattattaagtacatataaatttagaattgtcat

SEQ ID NO: 165777 - DNA, 201 bp, Homo sapiens
aaggggtccctagacatgaagggcctcttcaacctaccttttgttggcttcaaggttatgccatattttgcaaagtcaagttggagatggctctcgatatkcatgagtgtgttagactgcttttcttctattttttaaaaatgcacccaaatgtaaaagacacttttacctttttgatttgatgttgaaggtcatttgaaa

SEQ ID NO: 165778 - DNA, 201 bp, Homo sapiens
tgatcatcctcctgagtagctgggaccacaggtgtgcaccaccacgcccaactaattttttgtagagatggaattttgccatgttgcccaggctggtctcraactcttgggctcaagcgatccacccgcctcggccaccccgattcctgggattacagccatgagccactgtgcctggtcttctttttaatatatgtagtt

SEQ ID NO: 165779 - DNA, 201 bp, Homo sapiens
gacaggcgtgagctgccttgcctagccaaataactccattatttaagaaaaattaaccagtatttattgaatacttactgggccctgtgctaagtgctttscatgtgatttctaatttcctgaccattctatgaagtggctactataattatcctgatttcccaggcagagaaactgaggcttagagagttgaagtaatca

SEQ ID NO: 165780 - DNA, 201 bp, Homo sapiens
caagcacctatcgttttcctgtgtattccaagaggccagtgtggctggtggaataagatgttttcctgttttcaagatgcagtggactctcttttatttarcagcagtgtctatgtgttaggaatccatgtgagttctctaagtctgggacaacgataggtgtgtctgagtcctgcattaccatggtttattctttccttt

SEQ ID NO: 165781 - DNA, 201 bp, Homo sapiens
cttagggttcataggatctgtagtccttttctttatttttcatttttaaaaacaactttattgaggtatgattgacgtacaaaaagcctcacgtatttgaygtatagaacttgataagtttggagataagtatatacctgtgaaaccattatattttataagtacatgatacaatatgagcacagtactatatggtagatc

SEQ ID NO: 165782 - DNA, 201 bp, Homo sapiens
cttaagatcttcttagggttcataggatctgtagtccttttctttatttttcatttttaaaaacaactttattgaggtatgattgacgtacaaaaagcctyacgtatttgatgtatagaacttgataagtttggagataagtatatacctgtgaaaccattatattttataagtacatgatacaatatgagcacagtacta

SEQ ID NO: 165783 - DNA, 201 bp, Homo sapiens
tgattgccagtccattctctagccttctgaagaagatagattgtaatctttaattaagctatcactcacaccaaaaaaaaaaaaaaaaaaaaaaaaaaagyggggcaaggggttggagaatgttcatatcacattattttggatgtctggggttgcacctggaagctcagatagcaatatctaggcacggctgccagtgct

SEQ ID NO: 165784 - DNA, 201 bp, Homo sapiens
ttttttttattattttttgagacagagtcttgctcttttggccaggctagagtgcagtggcgcgatcttggctcactgcaacctctgtcgattctccttcmtcggcctccgtagtagtcaggactacaggcatgcaccaccatagctggctaatttttgtatttttagttagacaccaggtttcaccatgttagccatgct

SEQ ID NO: 165785 - DNA, 201 bp, Homo sapiens
gttgttcaccatatcttaagatcttcttagggttcataggatctgtagtccttttctttatttttcatttttaaaaacaactttattgaggtatgattgaygtacaaaaagcctcacgtatttgatgtatagaacttgataagtttggagataagtatatacctgtgaaaccattatattttataagtacatgatacaata

SEQ ID NO: 165786 - DNA, 201 bp, Homo sapiens
aacctgcctggccttgtgttatatcgatgctttctcaatctgttaaaaacgtagctgctattgaatgactaagaattgtttactctcatttccactctctkacatcttttttttttcttttaataccctgtgatgaaactgtgaagaaagatattcctgatcattgctttgacctggaaatttcaaagggacccacagtcc

SEQ ID NO: 165787 - DNA, 201 bp, Homo sapiens
accacccttacatatcccagtgtatatggtagccaaggacagtactgtttgagcctcccccattaagtgtcaacattgaatcaatgcaatcccatgcaaasaaagctgagcatgggattgtgccggtttagccagctaaagtgtggtctctgatgctgatcatgactatgaaaagggaaaatggaggagaatgatgacgaa

SEQ ID NO: 165788 - DNA, 201 bp, Homo sapiens
tgtcagatgtgccctttctggtaataaaaagtcctttgccgtgggttattttgtcaagtgagatagcaggacttaacaggtttgtttgggaaaataaaatytgatagaaaaacggcatgcttttcccccacagatttcttggtagcatcattcaaaactacagtgagcagtatctttgcaggattttaatatttattcatt

SEQ ID NO: 165789 - DNA, 201 bp, Homo sapiens
aagtatgggccacacaaaacaggtctgtgggcttgacttgtcctctgatcatcagtttgtgacctctgttctaaagagtgaaaactatgtaagatagtatmagataagtaggtatttaaattactttgcaccttttccatttcatagaacttgaatgtttgtgttcaaagcttaaaacccaagacagtgagctattaagcc

SEQ ID NO: 165790 - DNA, 201 bp, Homo sapiens
tgttcgtctcagcctcccaaagtgctgggatgacaggcatgagccaccgcacgcagcgtattgctttatattttaagactatacactgatatccccgagcmcccaagttcctgtccgctggtagaattcacaaagctggttttatgtctccttctcttcctcttccagtgttgtcttttccctgcattgagatagcattgc

SEQ ID NO: 165791 - DNA, 201 bp, Homo sapiens
ttaacttctttaaacctcagtttcttcatctgtaaaatgcacatcataatatctctattcagagatacaggtggttctattaaacacatcaactctgtgtwtataaagtcttaacccattgtggaataaattaagtgctcaattaaatgttagctgctgctattaataacaacaataataatattttcttcacgcatgaaa

SEQ ID NO: 165792 - DNA, 201 bp, Homo sapiens
gtaatgccagcagcacgggtgatgatcatggtcaacatgaccaactagaaagcccaaaccccacctctagctgacagtggcttctcagctaacctgtcacyacgtgggattgggcccccagtggtgtaagctttttcagagaagctacacatctagcttttggacctgtgatctccccaatgttttaatgctggcaactaa

SEQ ID NO: 165793 - DNA, 201 bp, Homo sapiens
attttattttttttgagacagagtctctgtctccaggctggagtgcagtggcacaatctcagctcactgcaacctccacctcccgggttcaagcgattccmctgccctgatcagcttcctgagtagctgggactacaggtgcgcgctatcatgcctggctaattttttgtattttagtagagactgggttccaccatggtg

SEQ ID NO: 165794 - DNA, 201 bp, Homo sapiens
ttttttattttattttattttttttgagacagagtctctgtctccaggctggagtgcagtggcacaatctcagctcactgcaacctccacctcccgggttyaagcgattccactgccctgatcagcttcctgagtagctgggactacaggtgcgcgctatcatgcctggctaattttttgtattttagtagagactgggtt

SEQ ID NO: 165795 - DNA, 201 bp, Homo sapiens
ttttagtcagggtacataagtgtcagctgctacgacaaacaacttgcaacgtctcattatcttcatacaacaaacgctgatttgttcctttcattacatayccagtgtgagttggctggaaggtccaccctacacaaccactcgtgaaggcagacttgaaggggactccactgtcttggagctacactctaaaacaaatag

SEQ ID NO: 165796 - DNA, 201 bp, Homo sapiens
ttatgagggaggctgagatgtgagaagcacatgggtgttgggagagcactaaaggtctctagcccagaagcatgacttccagccaagtgagacagggaagsccagaaaaatgtgtcacagaacttatggcatcagaatctgattcccaggcatgctttccaccatatgcatagacatttgcaccccagggatagcaccatt

SEQ ID NO: 165797 - DNA, 201 bp, Homo sapiens
ttgtacaattatttgagtatactaaaacagctgtacagtatacataggtagattttatggtatgtgcattatatttcagtaaagttctttaataaattagytaatgcttattgtagaaaagttggaaaataccaaaaaccataaacaggaaataggaaaaaaagtaatcctgactgtatatctggaaatcttttcgtgggg

SEQ ID NO: 165798 - DNA, 201 bp, Homo sapiens
ttctaggcacattaaacggtcagtgcacaggtcctcatttttctcatgcttccatttccatattctcaatcaatcactgatggccagctgtcaacaggcaycatttttggtgggacctgaagatgtatatcccttgttttcagattcctcgcctctcatcatgtaaggtgatgctctgagctgggtcttaaagcttctggg

SEQ ID NO: 165799 - DNA, 201 bp, Homo sapiens
gtacactgatggtgttttgggaataagagtgtaggtagatagagggtggctagtgattgctaatttttttttttttttttgagttaaaaaagtgctataawattagaatgtagttatggttgtacaattatttgagtatactaaaacagctgtacagtatacataggtagattttatggtatgtgcattatatttcagtaa

SEQ ID NO: 165800 - DNA, 201 bp, Homo sapiens
atatgcacccggctagggacctctttaatggtcattcatttgggagatgacctttggttcctaaactggtggacataccaaggactaaaggagtgacttgytctcagttctttgtcattcagctgctttaatattaatatgacacccgttttgggcttgaaaagttttccttctgctgagaaatgatgatggtgacaatga

SEQ ID NO: 165801 - DNA, 201 bp, Homo sapiens
acgtattgtatggttccatttagtatataaaatgtccggaataggcgaatctataggacagaaagtacactgatggtgttttgggaataagagtgtaggtrgatagagggtggctagtgattgctaatttttttttttttttttgagttaaaaaagtgctataaaattagaatgtagttatggttgtacaattatttgagt

SEQ ID NO: 165802 - DNA, 201 bp, Homo sapiens
gaaaacagtttggccattattcaaaaagttaaacattgaattaccatatgacccaataatcccactcctagatgtatcttgaagagaaatgaaaacatgcrtttccatagcatcttacaaatgaatgtacatagtagtgatattcctaatagccaataaatggaaacaatccaaatatccatcattggtgaatggataaac

SEQ ID NO: 165803 - DNA, 201 bp, Homo sapiens
acacatgtgcagccactgtatgacgtctggattttccttgacttatggtgatcactattgggaggtggtaagcaaacaggtgacataatttgaatcatggktttaaaagacgccatggttgccatgaggaggacaatgcgtaggaggcaggagtgaaagctaaaggatatgctgggaggtgaccctggagttaaagagagc

SEQ ID NO: 165804 - DNA, 201 bp, Homo sapiens
gggaaatacttacaaattaaatattaaataagggatttgtatctagaataaagaacttttacaattcaataatgaaaactcatttaaaaaatgagcataaratctaaatagatattcctccaaatatgatacacaaattgccaatgaatacataaaagatgttcaatctcattagggaaatgcaaatgaaagccacaatga

SEQ ID NO: 165805 - DNA, 201 bp, Homo sapiens
tgcaaaggccctggggtggaaacacactcgatgtgttcaagggagagtaagtggtgaatgggtttggagccaacagggataatagacaacgctatcaagargggggccaaccacacatgtgcagccactgtatgacgtctggattttccttgacttatggtgatcactattgggaggtggtaagcaaacaggtgacataat

SEQ ID NO: 165806 - DNA, 201 bp, Homo sapiens
aaatctcaagcacaggtgcagcaagtgcaaaggccctggggtggaaacacactcgatgtgttcaagggagagtaagtggtgaatgggtttggagccaacarggataatagacaacgctatcaagaggggggccaaccacacatgtgcagccactgtatgacgtctggattttccttgacttatggtgatcactattgggag

SEQ ID NO: 165807 - DNA, 201 bp, Homo sapiens
aaattagttatctctgccctttgggaggctgaggcaggtggatcacttgaggtcaggagtttgaacctagcctgggcaacatggtgaaaccccgtctgtascaaacatacaaaaattagctgggtgtggtggcgtgcctgtaatcccagctattggggaggctgaggcaggagaatcactcgaacccgggaggtggaggtt

SEQ ID NO: 165808 - DNA, 201 bp, Homo sapiens
caaaaattagctgggtgtggtggcgtgcctgtaatcccagctattggggaggctgaggcaggagaatcactcgaacccgggaggtggaggttgcagtgagycgagatcacaccactgcactccagcttgggaaacagagtaagactccatctcaaaaaaaaaaaaaaaaaaaagttattgattaaaatttaaatataaatt

SEQ ID NO: 165809 - DNA, 201 bp, Homo sapiens
tgggagatgagttaagaggttttattcttatacatgcggaagaattatgccttcttgagccatgctcaggagatgtcagccttttccattgtctccccgcycccaccgccagccctgcttaaattatcccctctttttaaacagaatatcctaatcttgcaagtggcatatcatgttccttcttttttaagagagaaggag

SEQ ID NO: 165810 - DNA, 201 bp, Homo sapiens
attatgccttcttgagccatgctcaggagatgtcagccttttccattgtctccccgcccccaccgccagccctgcttaaattatcccctctttttaaacaraatatcctaatcttgcaagtggcatatcatgttccttcttttttaagagagaaggagaaattcctgcagatcatcagggactgaggctaactgaaacttt

SEQ ID NO: 165811 - DNA, 201 bp, Homo sapiens
atagaatgatccaagtttataatttgtaaataagtagacatcttttgaggcgtatgcccttaatttttctaactgatgaaagcgtacttccatcaactcargacagttcaaagcagcttggagcctcttggattttaaaaagactctgtggcctctgtctctcttggttttcagtgctcagctgaggtctactctgtttat

SEQ ID NO: 165812 - DNA, 201 bp, Homo sapiens
ggactattgttgtccatatttcacagatgaggaaagagatgtgctaagaaaagaggtggcagagtagggattccagctcagtagccactttcagggtcccrtacttttcaatgtaagcatattggctctcaatttaaaaatgttattttttacagatagtacacagatgcactgacacaggtaccctctccagtcctctga

SEQ ID NO: 165813 - DNA, 201 bp, Homo sapiens
tatagaacatttctaccatagtagaatgctcttttggatacatctgctttaaagcattagtccccaaagtgtgaaggatgaaccacttgggttccgagagraaacattataacttctgtttatccattaaactctttcatttattattaaacatctcaacacatttattgggtggcaggtactgttttaagtgttttgcat

SEQ ID NO: 165814 - DNA, 201 bp, Homo sapiens
ggtagaagaaaagatttatgtaaattagttctctcagtagctatctaggagagagataatcctagctttcttcaagggacagaaccaggaccaatggacaraatctgcaaggaggcagcatttaactgattagaattgtcgggggtggggttggcgagagggtgttgcttttctaatgattcacattgtataaaaagcaga

SEQ ID NO: 165815 - DNA, 201 bp, Homo sapiens
aaatgtcatgtggtttatatcacaccttcacttaacaccctccccctaacaacctctacctggcaatcttcatttaactccaaactcaggacctcaatccyctgtttggcctgtgttccacgggacaggcatggggcacagatgtctgttatatataagggacaaatctctgggttggtcactcctggattccccagcccg

SEQ ID NO: 165816 - DNA, 201 bp, Homo sapiens
ggagatgttctttgagattcggtgattgagttgtgaacatatggactgagggtgttttgtggtaaggcttgagtcatgtctgtagcaaggatgtttcctgrataatgtgcactgagcatcaagtgcctgcagtggcctggcgggtaatgccagcagcacgggtgatgatcatggtcaacatgaccaactagaaagcccaaa

SEQ ID NO: 165817 - DNA, 201 bp, Homo sapiens
tgtgaaaactgtgaagacataacacatatctatgaaccttttctattaatcttcttggggctggagctttaaaataaaataaataacttttctgcagagasagaacctttccttacccaaagatttcgtaactttctcacatccttggttaaggctgagctgcctagctgtctgcatttctgataggttttgctttcatac

SEQ ID NO: 165818 - DNA, 201 bp, Homo sapiens
agtctcacacttgacatagtagggtttgacatggtttaaataaaatctcaaccagatcagtgggagatgttctttgagattcggtgattgagttgtgaacrtatggactgagggtgttttgtggtaaggcttgagtcatgtctgtagcaaggatgtttcctgaataatgtgcactgagcatcaagtgcctgcagtggcctg

SEQ ID NO: 165819 - DNA, 201 bp, Homo sapiens
gaaggatatcctttcaatagaggtgaaaatcctgaaataaaaggtttcataaatggggaaaaaagtcattgattgaaagagtcatggcatagatgctgaasttttgatgggaactttgcaggatgttcgtttgtttatcattagccctgggagagtcatccctcgcctcccaccaccccttaatttaaagggatttaaaat

SEQ ID NO: 165820 - DNA, 201 bp, Homo sapiens
tgagcctgctacccttgtgcttctctgtccacgcaaagccaagtgctactgcggggttttccaaggcatagctagcatcctaatagtctcacacttgacakagtagggtttgacatggtttaaataaaatctcaaccagatcagtgggagatgttctttgagattcggtgattgagttgtgaacatatggactgagggtgt

SEQ ID NO: 165821 - DNA, 201 bp, Homo sapiens
ttgacactaaaagcttaagtcccatgatttgcctttgtggatggaaggccttggccttcttttatgatatatgtgttggggggaggcatgtggtatgtggrgcgggtaaaatacgagcctcatgcctgtctaagctggtgacttggcttggaaaagatgatcattcgtcaacgcatcacaagtcacagggcttatctccat

SEQ ID NO: 165822 - DNA, 201 bp, Homo sapiens
cacatttcaaatcttcagtagccagatgtggttattggctaccatattgggtagcaccgatatagaacatttctaccatagtagaatgctcttttggatasatctgctttaaagcattagtccccaaagtgtgaaggatgaaccacttgggttccgagaggaaacattataacttctgtttatccattaaactctttcatt

SEQ ID NO: 165823 - DNA, 201 bp, Homo sapiens
aaacttaaaccagaaggaaccttcctggcatcggggaaagaagctgcctttttcttagctcctacctctgtgggagctttgtcagtatttgaggggacagrgttcccaccttcatgttttttgtgcctgaggattctgtgggcgactgtccccacctgtccagcctaccagtgagtctcatggtgtgcggctgcctgctcc

SEQ ID NO: 165824 - DNA, 201 bp, Homo sapiens
ttaggcctatcttcttgctttatgcataatggcagatctccagggagggagaggatgtgtgctggaagattctacaacttgttgattggttcctaaagatsgttttagtgctatgtttgtggggcggggctggagggggctggaaatcaccatctctgtggccttttaattgtgcccagttacaagtaacatttgtcccca

SEQ ID NO: 165825 - DNA, 201 bp, Homo sapiens
tttaggagctctgtgccaggaacctggatgaagacccagtatgtatttcttattatatcacaatatcacaaatccacagtcacatggtgattgtggtagtktggggggcctgatggtggggtacacctgcttgaagtcaggctaccatgcccattggggtcctcccccttttttgccctctgatcttgtgagttccttaac

SEQ ID NO: 165826 - DNA, 201 bp, Homo sapiens
accccatgcctggccaatttcaaggattttaggagctctgtgccaggaacctggatgaagacccagtatgtatttcttattatatcacaatatcacaaatscacagtcacatggtgattgtggtagtgtggggggcctgatggtggggtacacctgcttgaagtcaggctaccatgcccattggggtcctccccctttttt

SEQ ID NO: 165827 - DNA, 201 bp, Homo sapiens
tcagcttcccaatgtgctaggattacaggcatgagaccccatgcctggccaatttcaaggattttaggagctctgtgccaggaacctggatgaagacccartatgtatttcttattatatcacaatatcacaaatccacagtcacatggtgattgtggtagtgtggggggcctgatggtggggtacacctgcttgaagtca

SEQ ID NO: 165828 - DNA, 201 bp, Homo sapiens
catgattcaattacctcccacctggtccctcctgcaacatgtgggaattcaagaagagatttgggtgggtacacagccaaaccatatcaaaaaccatttayaaaactctaagcagccttaaaggaaaccaccaagggaccaaggcctgatgaagcaagagtaggagggaacagatgcttggatagggcaggtgagtcacag

SEQ ID NO: 165829 - DNA, 201 bp, Homo sapiens
caggcaagaaagaacttgtgtagggaaactctcccttatgataccgtcagattccttgagacttatttgctattgtgagaacaccttgggaaagacctgcytccatgattcaattacctcccacctggtccctcctgcaacatgtgggaattcaagaagagatttgggtgggtacacagccaaaccatatcaaaaaccatt

SEQ ID NO: 165830 - DNA, 201 bp, Homo sapiens
ggcgacacagtgatggcagaaggtgaaaggcacatctcacatggcagcaggcaagaaagaacttgtgtagggaaactctcccttatgataccgtcagattycttgagacttatttgctattgtgagaacaccttgggaaagacctgcctccatgattcaattacctcccacctggtccctcctgcaacatgtgggaattca

SEQ ID NO: 165831 - DNA, 201 bp, Homo sapiens
gctggggaggcgacacagtgatggcagaaggtgaaaggcacatctcacatggcagcaggcaagaaagaacttgtgtagggaaactctcccttatgataccrtcagattccttgagacttatttgctattgtgagaacaccttgggaaagacctgcctccatgattcaattacctcccacctggtccctcctgcaacatgtg

SEQ ID NO: 165832 - DNA, 201 bp, Homo sapiens
ccaccagccttggcctcccaaagtgctgggattacaggcattagccaccacacccggcccaaattttcttataaagtcaaatgggagatacttgtttgcargaaatagttcttttggttcttacttttccataaggattgagtctcaaaatgtctggtagcatccactgcattttgtaggggacaataacaaagaagatgc

SEQ ID NO: 165833 - DNA, 201 bp, Homo sapiens
agtagtagtgaatgccctgactttggggtttgcagtaagctaggattaagtgcttcacagtgaggcacagtggggagctactctgaggatgaattgcctartaaataagtgaggtttgtataaccgaggccagatcttagaacctcctgctatctgtacatagaagaatgttttagtcagaggcaaggcaaggtcaccagg

SEQ ID NO: 165834 - DNA, 201 bp, Homo sapiens
gtacaatggctgacgcccgtaatcccagcgctttgagaggccgaggccggtgtatcgcctgagtccaggagttagagaccagcctgggcaaacagcctgargcaaaacctcatctctacaaaaaatacaaaaaatcagctgggcgtggtgatatgcatctgtggtctgagctactcaggaggataaggtgggaggatcatt

SEQ ID NO: 165835 - DNA, 201 bp, Homo sapiens
acactctaaggaatggcatgacattctcctttcttctcctgcattcattggaacctgaatgtagtattaattataagactgttagacttcaggggactacmctcttattctaaaatagtggtcaactaactgtgcccttcagacagaattcctgcccagcacctggctttgtaattaaagttttactggaacagaggaata

SEQ ID NO: 165836 - DNA, 201 bp, Homo sapiens
ttgctgagaggtggggagggggtgggggctctgtgcatggaatggggggaaaagcttcagggaagggcagtgcaaattgtttctggactgatgccatcttytaataatagtagttaatagactgggtacaatggctgacgcccgtaatcccagcgctttgagaggccgaggccggtgtatcgcctgagtccaggagttaga

SEQ ID NO: 165837 - DNA, 201 bp, Homo sapiens
agaggaataccagttaatttatatctcgtctgttgccacttttgctttcatgctattaaagctgagtatttgggagatacttgaaaaatctaaaatgcttmctatctggccctttagagaaaaggttttccaatctctgttctagaggattcgtggtcatttggaaagaaaagtatgttaagacaaaatgagcaggtggtt

SEQ ID NO: 165838 - DNA, 201 bp, Homo sapiens
gaaaagtatgttaagacaaaatgagcaggtggttggattagtattttctttctacacatatagaaactgttcctatcatacctgactcagttttcaaactkgcttaatccaaagcctggggggtggatgtaggagagaagttgaaattagctggggttttttttttgtatcacaaaagttacatttttttttttttttttt

SEQ ID NO: 165839 - DNA, 201 bp, Homo sapiens
tcttctccctctccgttaaaatgcaacttaattggtaaagtttagttgactagagatttcatttatttatttatttatttatttatttatttatttgtttrtttgtttgtttgagatgagtcttgctcttttgcccaagctggagtgcagtggcatgatctcggctcactgcagcctctgcctcccgtgtccaagtgattc

SEQ ID NO: 165840 - DNA, 201 bp, Homo sapiens
tggaactacaggtgcccgccaccaggcctggctaattttttttgtattattagtagagatggggtttcaccgtgttagccaggatggtcttgatctcctgwccttgtggtccgtctgcctcggcctcccaaagtgctaagattacaggcacgagtctccgcacccggccctgtttttgcatttttagtagagacgggtttt

SEQ ID NO: 165841 - DNA, 201 bp, Homo sapiens
tggactattttgccaaatgcatttttattggtagaacgtaagcaaatttaaaaaagcaacaaaagcagtttttatgaatacctagcgtactttttttttttaatgaaccatgagctgtttttgcattcaaattctcgtaggcattatattgcatctacacataaggacacagtgtttacagaccccaaagcttgctgtccc

SEQ ID NO: 165842 - DNA, 201 bp, Homo sapiens
gacgggttttcaccaggttggccagcctggtctcaaactgttgaccttaggtgatctgcctacctcggcctcccaaagtgctgggataacaggcgtgagcmactgcgcctgtctacattttctgtctttactggtattatggtgggaacccataaaccactgcgaggcagataccattttaagcaggaaaccttatttttt

SEQ ID NO: 165843 - DNA, 201 bp, Homo sapiens
ttttgttcctgcattgccctccattcagatcttgtcacttaggccttggtagcatgagctattaacagccctccatatttactatttttttttttttttttaactctgggagttcctgttgcagaaattggatcacttacctaaaaagctccccacccccacctttggtgactggtgggtttcatcaccaggaaagcacat

SEQ ID NO: 165844 - DNA, 201 bp, Homo sapiens
attgggtagcaccgatatagaacatttctaccatagtagaatgctcttttggatacatctgctttaaagcattagtccccaaagtgtgaaggatgaaccamttgggttccgagaggaaacattataacttctgtttatccattaaactctttcatttattattaaacatctcaacacatttattgggtggcaggtactgtt

SEQ ID NO: 165845 - DNA, 201 bp, Homo sapiens
gactgcaactgaaaagaggagtaatggaaggacatgtactcttcccatatatttttaaacaattactgtatctgatttttcatttttcattttttttttttctggaagaaagagcagatctggataaagtcagtatacaatgtggtctttggtgacagacccaagttcaagaccaaggtgtatgcatgggtttgttcaagt

SEQ ID NO: 165846 - DNA, 201 bp, Homo sapiens
tatggagtgtcagaaatagtgaagcttctggagcttcactgtccaatatggtagccacgtgtgactattaaaatgtaaattaattaaaattaaaagttcarttgctctgaaatagcagccacatttcaaatcttcagtagccagatgtggttattggctaccatattgggtagcaccgatatagaacatttctaccatagt

SEQ ID NO: 165847 - DNA, 201 bp, Homo sapiens
atcactgtgtaacttcatccaatacgtattgaatacctactatgtgtctggcaccacttcagacagtaaggatatggatatgaatttgtatcagtcaagcyttccaggatcttattatctagagagaaagattaaaacatatgcaaataattttgatagaagcaaagacctaactcagcctgagaggaggttgggtttaga

SEQ ID NO: 165848 - DNA, 201 bp, Homo sapiens
cttcttccccctacttccttcttatatctggctatctgggagagaaaaaatttaatacaattgattactttttagaagagttaatttttacttattactgkggattttttgttttttaacagtcacaccgaggagaagactcagtgggaacatccaaaaactggaaaaagaaaacgagtggcaggaggtttgtatgttgtt

SEQ ID NO: 165849 - DNA, 201 bp, Homo sapiens
ctcagcctcttgagtaactgggactgcaggtgcatggcactgtgctccacaattttttttttttttttagagatgggatctcactgtgttgtccaggctgrtctcaaacccttgggtttaagtgatcctcttgcctcagcttcccaatgtgctaggattacaggcatgagaccccatgcctggccaatttcaaggatttta

SEQ ID NO: 165850 - DNA, 201 bp, Homo sapiens
cactagggggatggtgattagaaagcacctcatgatcccgtctacttcctgcagagaacagactagccccctatgcagcacacacctttgtgaggtccctyctccaacacagggattacaattcaacctgagacgtgggtggggacacagagccaaaccacactggaaggtaaaaaagttggcaaccagaggcttagagga

SEQ ID NO: 165851 - DNA, 201 bp, Homo sapiens
ttctcctgcctcaaggagctgcttctagtgtgtgctcttaaccctaaaggaaggaaacactgtgtcttcctcttctctcatacagagcccttcccatgacmaatgtgtggagtgttccctccttttacgtaattctccaattttctggaccccagcttggtgtcctacaattcagttttgacactaacgacccagagtcag

SEQ ID NO: 165852 - DNA, 201 bp, Homo sapiens
cttcaagtcagttacttaatggaataatacatgtttcctgcttccattgtcttcctggacctgacactcactctttaaccataagcagaagacacatacamaaatgtcctatgttaagaatctttatttaagacaggtggctagcattatttgggtccagaagcttccctggaaagaaaggattcactgcaagatcgacag

SEQ ID NO: 165853 - DNA, 201 bp, Homo sapiens
agaatagatggcaaatcccatgatttgtatttgactgacagtcaagaccctgtggggtgtgagcctggtgggggcattccaggctggtttctcctgcctcmaggagctgcttctagtgtgtgctcttaaccctaaaggaaggaaacactgtgtcttcctcttctctcatacagagcccttcccatgacaaatgtgtggagt

SEQ ID NO: 165854 - DNA, 201 bp, Homo sapiens
tatttggaccacttctccctctttccggacagctgcttagtaggtttagcttaaattatacacatgccaagcatgtacacatatgagaagcctatatctcrtaatatccacagagaatagatggcaaatcccatgatttgtatttgactgacagtcaagaccctgtggggtgtgagcctggtgggggcattccaggctggt

SEQ ID NO: 165855 - DNA, 201 bp, Homo sapiens
ctagggtgttgataagaaacagcaggcatagttactgggtgattgagaagagtttaacaaaagactatattagtctgttttcatgctactgataaaggcayacccaatactaggtcatttacaaaagaaaaaggtttattggacttacagttccttgtggctggggaggcgacacagtgatggcagaaggtgaaaggcaca

SEQ ID NO: 165856 - DNA, 201 bp, Homo sapiens
gaagagacctcaattctgtgccttgatgggattacaccgaagggagcactggtaggctgttgatgaaacaggtggtatttggaccacttctccctctttcmggacagctgcttagtaggtttagcttaaattatacacatgccaagcatgtacacatatgagaagcctatatctcgtaatatccacagagaatagatggca

SEQ ID NO: 165857 - DNA, 201 bp, Homo sapiens
tagctagggtgttgataagaaacagcaggcatagttactgggtgattgagaagagtttaacaaaagactatattagtctgttttcatgctactgataaagrcatacccaatactaggtcatttacaaaagaaaaaggtttattggacttacagttccttgtggctggggaggcgacacagtgatggcagaaggtgaaaggc

SEQ ID NO: 165858 - DNA, 201 bp, Homo sapiens
ttggttgtcttagtagataggagtgtgagtacagaattatacgaagtgagaccatgggtgtgtgtgtgcacgtgtgtgcgcatgcctgtgtgtgtcattgsttagttaacaaaaggattgccctctgaagaacatgaacttgggccagacagcacgtgtagggggtggaattatggagcaattgttactttcttgtattaa

SEQ ID NO: 165859 - DNA, 201 bp, Homo sapiens
ggattgatactagctagggtgttgataagaaacagcaggcatagttactgggtgattgagaagagtttaacaaaagactatattagtctgttttcatgctwctgataaaggcatacccaatactaggtcatttacaaaagaaaaaggtttattggacttacagttccttgtggctggggaggcgacacagtgatggcagaa

SEQ ID NO: 165860 - DNA, 201 bp, Homo sapiens
ctaaatcataaagaaccctgtctcgagcagacgagaaagagtaacggaggcctcaatggtgaaaggaaatcctgtaccagctgtgaaaacaatgagacacrttcagtaatagaatatagtgtgcttacaaattcagagttgggttcccttcttctcttgaagtggctataaattaattcatcaaaataaaaaaggccaaac

SEQ ID NO: 165861 - DNA, 201 bp, Homo sapiens
ctttctgttataaaatcatgtttttattgaattacattttaatattggtatcactttaaaatgaaaatgagtacttgcaaaatgtatttttgaaggagttkggtggtggtggggggatgccattttggcaacagatgacttcggttcaagtcctctctctgtctcttacttgctttgtggctttagaccagccacccactc

SEQ ID NO: 165862 - DNA, 201 bp, Homo sapiens
agagccaaggtcaatctgaatttttctttttctttcttcctttttttttttttttttttttttaaaaaaaaaaaggtgcttgaattagaaaggtagcacaytgtccacatggacagtgcaggatggggctggctttttcatttctgagagctggcaatggaatgaaggtctttttttttttcttaatttttcttttttaaa

SEQ ID NO: 165863 - DNA, 201 bp, Homo sapiens
ttttttttctttttcccttatgcatttgggagtggaagagctgtcagattctgaatttagttagatttataatgctagagacattcagcagtctgcctttycctttctgttataaaatcatgtttttattgaattacattttaatattggtatcactttaaaatgaaaatgagtacttgcaaaatgtatttttgaaggagt

SEQ ID NO: 165864 - DNA, 201 bp, Homo sapiens
aaagtaatataccacttttcgcttttttaatggtgagagccaaggtcaatctgaatttttctttttctttcttcctttttttttttttttttttttttaawaaaaaaaaggtgcttgaattagaaaggtagcacattgtccacatggacagtgcaggatggggctggctttttcatttctgagagctggcaatggaatgaa

SEQ ID NO: 165865 - DNA, 201 bp, Homo sapiens
ctacaataactttttcagtctctttctccctttcccaccttcccaaaagggtgggaaatttttaaagtaaagtaataaacaaataagttttgggttgggcrggagattagttagagacaggatctgtaggtcagaagtggtatttgggggagtagggagttttttttttttttctttttcccttatgcatttgggagtgga

SEQ ID NO: 165866 - DNA, 201 bp, Homo sapiens
gcacaactgaactccagcctgggcgacagaggaagactctgtctcaaaataaacaaacaaataaataaataaaaattgtttaaacctgccaactacaatawctttttcagtctctttctccctttcccaccttcccaaaagggtgggaaatttttaaagtaaagtaataaacaaataagttttgggttgggcgggagatta

SEQ ID NO: 165867 - DNA, 201 bp, Homo sapiens
tttttgatttggtttggttctttggagttgtttgcatttcgtgagtcttggcatctttttggtagagaaccttgctaggttctcacaatgtagaaattaarcagaaaacagaggtctcaatttgccttttcagcgtgaatgcagactcttacattcagtgctgggagtctttcttgagggacagtgagagcgaggaagggt

SEQ ID NO: 165868 - DNA, 201 bp, Homo sapiens
ctgaaaatgctgggattacacacatgaaccactgcgcccagccgctctactttattagatttaaaaagtttgctctcagctgggtgcagtggcttatgccwgtaatcccagcagtttgggaggccaaggcggggagggtcatgaggtcaagagatcaagaccatcctggccaacattgtgaaaccccatctctactaaaga

SEQ ID NO: 165869 - DNA, 201 bp, Homo sapiens
gttgctgagaggtggggagggggtgggggctctgtgcatggaatggggggaaaagcttcagggaagggcagtgcaaattgtttctggactgatgccatctyttaataatagtagttaatagactgggtacaatggctgacgcccgtaatcccagcgctttgagaggccgaggccggtgtatcgcctgagtccaggagttag

SEQ ID NO: 165870 - DNA, 201 bp, Homo sapiens
tagcaactcttcattgctgctttgcaaagaggatttgagattgtttatgtaggggcccgtgtataatacctcaagagaaaaagacacagatgaggctattrggattaagggaaaatcaagtaaatcgagaggtaaagcactgtgcagaaatattggccagaagctatgaacagttgccacagctgggctgaagagttacct

SEQ ID NO: 165871 - DNA, 201 bp, Homo sapiens
aggtgtttcttatttttatcattttccgtaaaggtaggattgtgttgacagccctgtaataaatgtctcttggaagagatgtgttgctgagaggtggggarggggtgggggctctgtgcatggaatggggggaaaagcttcagggaagggcagtgcaaattgtttctggactgatgccatcttttaataatagtagttaat

SEQ ID NO: 165872 - DNA, 201 bp, Homo sapiens
ttggatgtgcaatgtgaaatctcacaaattaaacatgttacataactgtattttgtttcctatctctgctgtaataaattttctcaatgttagtgacttakaaccacacaaaagttacactttacagttttggaggtcagtggtccaaaataggtctcagtgggctaaaatcgatgtgtcagcaggacaccatttctttct

SEQ ID NO: 165873 - DNA, 201 bp, Homo sapiens
tcttcttgtaaggtgtttcttatttttatcattttccgtaaaggtaggattgtgttgacagccctgtaataaatgtctcttggaagagatgtgttgctgaraggtggggagggggtgggggctctgtgcatggaatggggggaaaagcttcagggaagggcagtgcaaattgtttctggactgatgccatcttttaataat

SEQ ID NO: 165874 - DNA, 201 bp, Homo sapiens
actaggaattgaaatggcctgaagctgagtttccactcttgtgaaggctggactgtctcttgttattacagcgagggtataactctttaggatcccgaccmaaggtttggtgtgtttaccgtggccctttcctggtgggtcctgagctcaaatttatgtctttttccttgttataaaattgccaaaagctcagcccatctt

SEQ ID NO: 165875 - DNA, 201 bp, Homo sapiens
agcgcatcctaaatcagccattagatttgttcctcatttctttgctttacaaattgtttttctgtatagtattggattttcaataaataaagtatgatatkaacaagtctgcaaaccagcaagaactatataagccacttgctcaagtcaataagcgcatgctcacaaaggaacgtaaagttctgaagttcttctttgggg

SEQ ID NO: 165876 - DNA, 201 bp, Homo sapiens
atcatacaatgagtggcttaaatatttattcttacagttctagaggctggaagtccgagacgagggtgccaaccttgttgagttcttagtgaggtccctcyttctggtttttaagtagcctgtttcttgctgtgtcctcatatggtggagagctgagaggaattgagagagagagagagagaggtcgcactgtctcatgtg

SEQ ID NO: 165877 - DNA, 201 bp, Homo sapiens
gctggtcaaatgtttacatggggctgtggaccattttgtatcattggaggagaagccagggcacttggcaggggtgttcatgatgataatcaggtggctgrgtggagtcaccatttgtggcatcctcaaagacttgccaacatagacatttttggggagacagaaacacagaaataattctgcagtgctttaaagaatctg

SEQ ID NO: 165878 - DNA, 201 bp, Homo sapiens
ccatgcccaccttgctgttgcaccccccaccccaaggaaagccttcccacctttggaagctgcattaattcttccaggccacaagggggccgttgagttastggttcactgcactggctggcaggaaagagttttaatgcaggctccaaaggtgcttaatttcctgtggtccttatgaatatgcatacagtatgtgctcag

SEQ ID NO: 165879 - DNA, 201 bp, Homo sapiens
gcgtccaggactaaagtcatgtgcaatttaacaagatcttggtgagataaaggaagttgcgcttgaggaaacattgaaacacaccagatggaattttccarttccctcctacatgatagagactaggtgaagggagatagaccacaaattgattttgtgtaactcttaaattaagtggagcagagttaaaaaaaaaaaatc

SEQ ID NO: 165880 - DNA, 201 bp, Homo sapiens
tagccccctgtacagcacacaactcggggaattttaggtctggtgatttactgctgttggagcctggccttcttcctgggagaaggctggaaaaacttcawgtcagttacttaatggaataatacatgtttcctgcttccattgtcttcctggacctgacactcactctttaaccataagcagaagacacatacaaaaatg

SEQ ID NO: 165881 - DNA, 201 bp, Homo sapiens
tattcaaaatgtacacacagcgtaaatgcaagaaaagaatctgatgtaaaaatggcccttccaacatctagcattattgtgtgttgaataaatacttgttygattaggtctaatcactcttcatgattggatttccaaaatgtggactctcagcagtacattacagggacagtggttgggtctggagatgtcacccttagc

SEQ ID NO: 165882 - DNA, 201 bp, Homo sapiens
cagagaacagactagccccctgtacagcacacaactcggggaattttaggtctggtgatttactgctgttggagcctggccttcttcctgggagaaggctsgaaaaacttcaagtcagttacttaatggaataatacatgtttcctgcttccattgtcttcctggacctgacactcactctttaaccataagcagaagaca

SEQ ID NO: 165883 - DNA, 201 bp, Homo sapiens
ggacaattcattggcttatcgtatagtcacaaacttgtgcagacatcaccactatctaatttcagaacatttttatcacccctaaaagaaaccctgtacccttcagccagcattccctattttatacccccgatctcttgacaactactcattgactttgtttctatgactttacctatttcgggtaattgatataaatgg

SEQ ID NO: 165884 - DNA, 201 bp, Homo sapiens
caaagtaatataccacttttcgcttttttaatggtgagagccaaggtcaatctgaatttttctttttctttcttcctttttttttttttttttttttttawaaaaaaaaaggtgcttgaattagaaaggtagcacattgtccacatggacagtgcaggatggggctggctttttcatttctgagagctggcaatggaatga

SEQ ID NO: 165885 - DNA, 201 bp, Homo sapiens
gcaaagtaatataccacttttcgcttttttaatggtgagagccaaggtcaatctgaatttttctttttctttcttcctttttttttttttttttttttttwaaaaaaaaaaggtgcttgaattagaaaggtagcacattgtccacatggacagtgcaggatggggctggctttttcatttctgagagctggcaatggaatg

SEQ ID NO: 165886 - DNA, 201 bp, Homo sapiens
accatcccggtaaagtgacgttttgatgaaaacagcatggatcttcctgcagagaacagactagccccctgtacagcacacaactcggggaattttaggtytggtgatttactgctgttggagcctggccttcttcctgggagaaggctggaaaaacttcaagtcagttacttaatggaataatacatgtttcctgcttcc

SEQ ID NO: 165887 - DNA, 201 bp, Homo sapiens
acatttgggaaatttgtaaagccttactttgaatgtctttttcttcactctatctgtattgtttggtgctttctatataaatttataaattggatgtaccbccacagatgtcggttttctggtaataatacttttttacattaaaaaaaactcctgaaatgaaaatgtaacttagtcttattattgtaatctccccttgcc

SEQ ID NO: 165888 - DNA, 201 bp, Homo sapiens
gaaggcctaggaggtgcagggatgtttatatgggctgctagcgcttagtttcctgccacagggagacagtaagaaaggtgacgtcaatctgagatgagagrgagagcaaaacagttcttttgaccaccttgaccccgaccttgaaataaggtggaactaataaatcccgctttgtgctggagcaagttttggctgagtttc

SEQ ID NO: 165889 - DNA, 201 bp, Homo sapiens
aatgtccggtttggagttggaggagtcattgattttaggcaaggtgatggtgagcccacagagcacagagttaatggaactctggccgttgatgtagcttygaagcctgaatttaagtcatatttttgaaaagttgcgtcttaaaaagttactagcgatggagaatgaaaagtcaatttggacactttaaaagtgagcctc

SEQ ID NO: 165890 - DNA, 201 bp, Homo sapiens
cctgcaattctttgtacatatgaaatttaatatggtgagattggcatctagctgctgctagagatagtgctcataataatttttaacattgattgagtgtrgataataatccaggagctgtgctaaacgttttacaacacattatctcacttaatttcacaactccataaagtagttttcacttagttgagggatgaaaaa

SEQ ID NO: 165891 - DNA, 201 bp, Homo sapiens
atctaagatagtgatctggttacatagattatcagagatacttttttttttgattatcagagatacttttaaaaaagcaactacaaggtaaggattatcckttaatttagtgtttttctattaaactcaatttgctttaaagttttttacattttgcctcttttttgtatgtttgagtaccacttcctaaccaatcacaat

SEQ ID NO: 165892 - DNA, 201 bp, Homo sapiens
ctgcctcctgtccctatcattgatacctgcaattctttgtacatatgaaatttaatatggtgagattggcatctagctgctgctagagatagtgctcatartaatttttaacattgattgagtgtggataataatccaggagctgtgctaaacgttttacaacacattatctcacttaatttcacaactccataaagtagt

SEQ ID NO: 165893 - DNA, 201 bp, Homo sapiens
ctggcaggggatgcccgtgacccctgaaaccctaaaaggagtgttacagtcagtgctcttttagttttgccatccacggacggcttaagtgttaacagttsagtggagggtcagcgtgacagccttttgcacccacatctgggttcttgtccagtgtccaggaggaatgaggtctcatgagcaaattttaaggatggcaaa

SEQ ID NO: 165894 - DNA, 201 bp, Homo sapiens
gccaccttttgccgcagtaacaaacaatcccagactctcaaggcttgcaaaaataaatgtgtgtttgtttgctcataacacatgtggctgagggttggccrtggctccacagtcacaggtgggctttcctgggctcagcttctcacagcgtctccttgcagggcccaggctgtaggagatgtcatcagggcctgcagaggg

SEQ ID NO: 165895 - DNA, 201 bp, Homo sapiens
aagaaaactcacagaagcagaaacttagggcttgctttaaatgttatcagtgtgaattgagatggtgtcagcattatttttttaaagaccaaaacaacaakagtaacaaacacacacaagccactgttagattttacaaaactttaaaaagtaattatcttaaagatatctaagatagtgatctggttacatagattatca

SEQ ID NO: 165896 - DNA, 201 bp, Homo sapiens
tgaagcaggaaatttccctgacccctttgcaggcaggaagtggagtgcggatgctggaactagctggctgctttggtgccagtagaggtgaactgcactcwcttgaaccccctgcactccaccccttctgggaggaagcatgcaggtgagcaggtgcaggagccagggtaaatgcttttgggcactggcaggaatgaactc

SEQ ID NO: 165897 - DNA, 201 bp, Homo sapiens
tcgcaatgattcggtgtgttttgttccgtgcatcctggcatgtgaaagaagtgaggtaaagagtataatttacttccttgttttaaagctagcattgcccrtgccttccacgcgggactgttgtggatatttgaccactgcaagaaaactcacagaagcagaaacttagggcttgctttaaatgttatcagtgtgaattga

SEQ ID NO: 165898 - DNA, 201 bp, Homo sapiens
cgtgagtattatgttttattttgctgggagaacaatttgggaaaatttgagcagcaaaccataagtttcttggtgtctgtgtacttggagctctgaatcaytattgtcactgagggagtggacaggaagtgatgctgagataagtctagatgggataggtgggcaacatgcaggagaaacctcctgggaaaggtgagcaag

SEQ ID NO: 165899 - DNA, 201 bp, Homo sapiens
aatcactgaatatgttataaccaaaaaggtcaaactcgcaatgattcggtgtgttttgttccgtgcatcctggcatgtgaaagaagtgaggtaaagagtayaatttacttccttgttttaaagctagcattgcccgtgccttccacgcgggactgttgtggatatttgaccactgcaagaaaactcacagaagcagaaact

SEQ ID NO: 165900 - DNA, 201 bp, Homo sapiens
attggtcctgctgtcctgggacccaggtgtgagtgcatagggaaaagggaggagaaatttaatcctgtaactatctccttatggaaaacaggaaaccacaratgaatcaaatgaatccgtttcccctctttctgatcctctgcaaaagtcatcaaaatcactctgttctcaccaggcaactggagtttcgtcagctgagtc

SEQ ID NO: 165901 - DNA, 201 bp, Homo sapiens
cttaatctcccttttccatgggcccaacacctgaatctagggcaaacaggtgtcccccagattggatcctctgctctaggacacattcttgtcctagagcrggttgggcaagaggcttttctctcagtcaccagccccaaaccctgtggtcttgccagcccaggacgtgtcaagactgcagcctttgctgacctgtgacca

SEQ ID NO: 165902 - DNA, 201 bp, Homo sapiens
tataattttgatgaaagaagtttcccaacagtatttcggtgtgcatgctcacacaccagccctggtcgtcagtgaacagattcttccaggtcttcattgtrgcggaagaaagtgagatcagagatcccgaggaagggcttcagtttcaccagtagtggagctagggagtaggggggcagaagccgcaggaagtcagtgcag

SEQ ID NO: 165903 - DNA, 201 bp, Homo sapiens
tgcttctgacacccagtaagcagctctggcttttataattttgatgaaagaagtttcccaacagtatttcggtgtgcatgctcacacaccagccctggtcrtcagtgaacagattcttccaggtcttcattgtggcggaagaaagtgagatcagagatcccgaggaagggcttcagtttcaccagtagtggagctagggag

SEQ ID NO: 165904 - DNA, 201 bp, Homo sapiens
gattggaacattgtattttatggttgcagagcacacgtatcatcctatctgcttctgacacccagtaagcagctctggcttttataattttgatgaaagargtttcccaacagtatttcggtgtgcatgctcacacaccagccctggtcgtcagtgaacagattcttccaggtcttcattgtggcggaagaaagtgagatc

SEQ ID NO: 165905 - DNA, 201 bp, Homo sapiens
tttatgttgctattgtatcgtaaggttcttctgaagcgaccacttcataacactgtgtagtccaatccctaagctgggcaatttttttttcccctttcaawacatcacattgattttctgtatgactttatctgcttaatacaaagtgggattgaacagttatttgtctggatttgatcattccttattaaacatttatga

SEQ ID NO: 165906 - DNA, 201 bp, Homo sapiens
gtctcagtttcataatatgtgtaaaaattatcatgcccattcattatttaaagtgctgtggctttttagtgaataccaacattaacaaaccatgttaacaygatttaaaatatgtaatgaaatttgcaatgcatcagatgatggaactatcaaattagttcacgtggcgttggctgatcacccttatgaagagttacttgc

SEQ ID NO: 165907 - DNA, 201 bp, Homo sapiens
ccaagttgtgtaaatcaaagcttctcctgccacactagtgtgtattaggccaggacttcatagtgtgattcaaatcaccaactgaatttttttttcctttycttcccctttctgggggactacgtttttcatggagaccggggccctccagctgctgtgatgatcctcccttgccagggaggtgctgttaatagcaaatgc

SEQ ID NO: 165908 - DNA, 201 bp, Homo sapiens
tatgagcacggcatctaccgggctgttccacatcctccctgtgggactaggggccagggcaatgggaatcagtgcagaaataaagctcatgctgtttgctstgccatgagtaacgaagtcctctgtatctgatcctgggtctcctgttttctgctagcttcctcaaaacttggtagctaactcattaacttacaaggaaga

SEQ ID NO: 165909 - DNA, 201 bp, Homo sapiens
attctcagattcccagccaactggtttcacatgacaagtaaatgagcaacctggaagatgagtggcgtttccacacacagggaagcagatagttccattasgtgacagtgtgtgcacagtttatggaggatgaagcggaaaacctgagccacaaggcagtagaggttggacgagacactcattccgaaggcgggtgtgtat

SEQ ID NO: 165910 - DNA, 201 bp, Homo sapiens
tggtatccccaaacaaaatgttatcaaatgaagaactccttcccagctctcccttctgagtgtctgattttattcaagctcagatggcttctcagatagcktaaaaagtgatggagaatttcttttaccaattgtatgccctgtgggaacctgggtgctgtaatcactgaatatgttataaccaaaaaggtcaaactcgca

SEQ ID NO: 165911 - DNA, 201 bp, Homo sapiens
cctgactttctccctggtccaggtgcattttaagcatggaaggtgacacttgccattctcaatggacaaagggagtggggagtgtgggggtgtgctttggrgttagtctctgggttttcgaaacttagcattctcagattcccagccaactggtttcacatgacaagtaaatgagcaacctggaagatgagtggcgtttcc

SEQ ID NO: 165912 - DNA, 201 bp, Homo sapiens
tggttagattacacgtttcctgagaggtatagatttcaaaattggtgtatttcacccgtccctcatcatggtatccccaaacaaaatgttatcaaatgaaraactccttcccagctctcccttctgagtgtctgattttattcaagctcagatggcttctcagatagcgtaaaaagtgatggagaatttcttttaccaatt

SEQ ID NO: 165913 - DNA, 201 bp, Homo sapiens
actgcattgactcctgttttctacacagtggtcttcagctacaccttaccaagcaccccttacccagcaaacgtggcttctcttccccaggcagagcagtycgttacttagactaggaaatggctccgagaagctcacccatcaccatttgctctactgcaaaacaggactcattagcaggagctcataaaatgaaactgg

SEQ ID NO: 165914 - DNA, 201 bp, Homo sapiens
tactctaggaaggagaatctctgttgggatcttttggggagtacttgcctcccaagtgcttaggctcccgctgctgacaagaccctctgcctggcaagccstgcaggttggaatcctctgttagggttccaaagccttcaccaactcagagctctttctctctctgtttctcttttttgaatttaaattgatcctagtcac

SEQ ID NO: 165915 - DNA, 201 bp, Homo sapiens
gctgtttactctaggaaggagaatctctgttgggatcttttggggagtacttgcctcccaagtgcttaggctcccgctgctgacaagaccctctgcctggsaagccgtgcaggttggaatcctctgttagggttccaaagccttcaccaactcagagctctttctctctctgtttctcttttttgaatttaaattgatcct

SEQ ID NO: 165916 - DNA, 201 bp, Homo sapiens
ttaattatgaccataaaggccccatctccaaatgcagtcatgttgggggttagggcttcagtgtatgagtttgggatggcaggggagcagttcagctcgtragaatcgtaagattcctgatctgtttctcttccaagaaattgtttggtttcatgttgattttatctccttttccctatctgtctcaaagcactgaagaaa

SEQ ID NO: 165917 - DNA, 201 bp, Homo sapiens
agaaagtataattctttttcttctaactggagatataaaaatcatataagcatgatttatgatttgattggaacattgtattttatggttgcagagcacaygtatcatcctatctgcttctgacacccagtaagcagctctggcttttataattttgatgaaagaagtttcccaacagtatttcggtgtgcatgctcacac

SEQ ID NO: 165918 - DNA, 201 bp, Homo sapiens
gctttaaaaaaaaaaaaaaagggcaaggggaggtgtgagaagaaagtataattctttttcttctaactggagatataaaaatcatataagcatgatttatsatttgattggaacattgtattttatggttgcagagcacacgtatcatcctatctgcttctgacacccagtaagcagctctggcttttataattttgatga

SEQ ID NO: 165919 - DNA, 201 bp, Homo sapiens
tgtaaattgtctaaaattaaattttctgtggttgtcatccacatgggttctgaacttgctgttataattattcacattttcttgcagtgaaaatctacagrtcaaggtcatcttcacgtctttagttcttgttttgcttcaggtcagtttagaaccgaatgttaaaaggatattgtctattcgaagggtcagattgtggca

SEQ ID NO: 165920 - DNA, 201 bp, Homo sapiens
ttcttcctaccttccatatgagagaatagggaaaattaaagaataaatgtctctgggtttaatgcaactttactaaggaatgaaagtccgataagaatccrtatcttttgaaagaagattttttaaattccttatttttccttcctgcatggtcataaaacacactggggacagcccaccctgagaagtcaccaggcatct

SEQ ID NO: 165921 - DNA, 201 bp, Homo sapiens
tcaggcactttatatccctcatccaggaggatgcaaaaacctggtgtttttcttttttttttttttgcattttccagacgagccaagggatggctcagaarggtgaaggaactcacccgaattgcacagctggtgagctcagagtcaggctccttgcttggtccatctggcttccaaactccaagtctgtctgctccaccc

SEQ ID NO: 165922 - DNA, 201 bp, Homo sapiens
gcataatgcaattaaggcccattggattagaatttgcaggatgccattagcaataagctctgagtgtagattattgccgtgcttaaattttctccttcagyggtaacacttctcttgtaaattctaactgggtaaaataaatatgatataaaacagacacaaataagaatatatagatgatgttaatttcttcagagcttc

SEQ ID NO: 165923 - DNA, 201 bp, Homo sapiens
gtgccaggtggccaagatggggcttgtgatttgaagcttcttttcctagattcaggaaagtatcactggttaatcagggaatacatctttcggcccattgkaaaatgtctgttcttagcaccctaaatgcccaggtattagcatacttgggaaatgtctagaaacccctatttcaatttactgaccatttttggtaaattc

SEQ ID NO: 165924 - DNA, 201 bp, Homo sapiens
gagtagatgttagcaacatcatgagctcaaacccctccagcttacagcggagacagtgaggtcctgtaggatgaggttggagagcaggaacttgcccgagrtcatgtgcagagttcgaggcagggcctggatgggaagcccagcatggagaccccaggccgtctctccgccatcttgttgtgatgcttccggaagaatgcc

SEQ ID NO: 165925 - DNA, 201 bp, Homo sapiens
accaccaccattcaggttcttctattaaccctcctatatttgccaaccctcaacctgttagaaacaagaaatgggactctggagtagatgttagcaacatmatgagctcaaacccctccagcttacagcggagacagtgaggtcctgtaggatgaggttggagagcaggaacttgcccgaggtcatgtgcagagttcgagg

SEQ ID NO: 165926 - DNA, 201 bp, Homo sapiens
atagcttgctgcactcttgctgggtatgtgtaattattcccatttcacccgatccctgggagtttggtgaattaatcacccagcatccaaatagctaaccrgtagcagagctgggattcaaactcagttaggctgacttctgtgcctgttttcttgcctaagcggtggacgcattgagtaggagaaggccagttattcctc

SEQ ID NO: 165927 - DNA, 201 bp, Homo sapiens
tttaggcagcagaatgagactatgtctcaagaaaatgttcaagaagaaatacaaactattgaaaaaggaaggctgaatgctttatcagaaaactgtatttrgaggggacctttctggggtcttttagtcagggtacataagtgtcagctgctacgacaaacaacttgcaacgtctcattatcttcatacaacaaacgctga

SEQ ID NO: 165928 - DNA, 201 bp, Homo sapiens
ttaaatttttatattgaataatctttgatttgtattgtcatgttgttttatagcagttactgctgttttagtgtgatttgggatgaaaattttaaaaaatmaatatgtataatccaccatctttgttccttttatttttatgttactcattcttttaagcttgtcttagacgtgagtattatgttttattttgctgggaga

SEQ ID NO: 165929 - DNA, 201 bp, Homo sapiens
gggacagcgtgtagggtttgcatgatttgtggggccgtttcatgtttgcacggtttggcttggcttgggactctgccagtggtcactgcagtttaacaaaytccccccgggtgtgaaggaaagcgagataaatgcaggaaaaaggatacattttgaaatctggaaattttacataacaggcatcagatttgaagaatgtcc

SEQ ID NO: 165930 - DNA, 201 bp, Homo sapiens
tctccgaactctcattaatttttcacaggcttgtgatggatagtttttatttattcacgtctgagattccgttgtgtgaaaaggactcattttataacatwacatattcatggcttgggatggatgggataaggaacttattattaatgtgtcactgtgggaaacttactctagttcatttgcgaaccttgttaaattcgg

SEQ ID NO: 165931 - DNA, 201 bp, Homo sapiens
tgtgctttaagactgtaaaattttagcccattaaaaataaaatctgttgctttccacccacacctggcaatttggtgagggacgggggctaggatatttamtgtctgaaagttttagggaggcttttatgaactgggccatctctccttgtccccatttttctttgcatctccgaactctcattaatttttcacaggcttg

SEQ ID NO: 165932 - DNA, 201 bp, Homo sapiens
tgtagttcccgcaaatctatttacggttttcacaaggaggtcacgaacatgcgttgttttcaatgctgggctagtttcagacttctggcttgttgtgggayggaggagaaagaagacagggcattttgatgtggcccagagaccaaatgaaacaaacgatcctctgattgctcagatgtcctctttgacttggaaagcacc

SEQ ID NO: 165933 - DNA, 201 bp, Homo sapiens
ccctctgataatcctgcaagagccagcccagttttgctgacagcacagtctgctgtttaattattgtgtgttcaatgacttacctctttttagtttaattraaattatttctcagattaagagccatgctatgatgcttgccaacggatatttaaaacatgtaactgatttgttttttataatgcttcaggagaactcagt

SEQ ID NO: 165934 - DNA, 201 bp, Homo sapiens
cattcttcttaaaatacggagcgacataattaaccctctggggagactaatattagtttattagagacaatttctagttctgtttatttttaacactaaaygatttgttcagattggggaaaaaaattttttttttttttttggttgtggtggcgttggcttttacttggggttgacctttccttatcaaggacatacaag

SEQ ID NO: 165935 - DNA, 201 bp, Homo sapiens
gacgtctatgctttccagcttgccaattctggggcctggcacagtatctttcaccccggagtctcagtttcctcatctgtaaaatgggaaccatgacgtcrgcatcacagagttgtgagaattcgacaaggtggaatgaaagcaactagtgtggtgtctgaccgcttgtgttagtccatgaggaatttccttacgtattgt

SEQ ID NO: 165936 - DNA, 201 bp, Homo sapiens
atgcctatgcttttaaaaaattattgtgatacagtgaaacaaggaagaacgtgtagctggaaaaatagtatttgcttgtaatatacattcagattcataayaggcttatttgattcccaggacagggtgagcaaaggatgctgtttcctgggtgtctgctttggtgttcattgagtcatgtctctctctttagaccttact

SEQ ID NO: 165937 - DNA, 201 bp, Homo sapiens
attactgaaaaaaaaacaaaacaacaacaacaaacaacaaaaaaaacaccttccactaaaactgactcaaaaagataatagcagggaaaatgacatgtcgrtctgtgattccttttttacttgtcagtccttttgggagttgaacatataagcacatgtacctctatgtgacttttgagacgtctagaatagagaattcac

SEQ ID NO: 165938 - DNA, 201 bp, Homo sapiens
gcctgaaataatttcaaattaacccctgaggaacaaatgctcatgactttcaatgaatagaaaaatcagactgctagaacctccagactgcatgtcatgcrtagaagtagaatcctggggaagctagctcacaaaagcaagggagatacctgcaaggctgagctgagcttgcaagggaagaaaaatattagagagttgtca

SEQ ID NO: 165939 - DNA, 201 bp, Homo sapiens
agtggaatcacagacatgagccaccatgcctggcctgaaataatttcaaattaacccctgaggaacaaatgctcatgactttcaatgaatagaaaaatcaractgctagaacctccagactgcatgtcatgcgtagaagtagaatcctggggaagctagctcacaaaagcaagggagatacctgcaaggctgagctgagct

SEQ ID NO: 165940 - DNA, 201 bp, Homo sapiens
ggtccacctcctgggtaaaggagattctcctgcttcagcttcccaactagctgggacaacaggtgtgtgccaccacgtccagctaatttttgtatttttawtagagacggggtttcaccatgttggccaggctggtcttgaactcctaacctcaagtgatctgcccgccttggcctcccaaagtgctgggattacaggctc

SEQ ID NO: 165941 - DNA, 201 bp, Homo sapiens
caaattccaagcaaactttttacttcttattatgtaaaatggaagggttagccaaattaagatctcaccatcaaccttgagggagtgacttctacatgccrtgtattactggttataaagctagtcttgtttggattgaagaatttaatcatatttaacttttcaaaggatgctttttaaaaaaccttatccgcgtgttat

SEQ ID NO: 165942 - DNA, 201 bp, Homo sapiens
cattttattttgtgggcagatttcttttacagttctggctgggtttcttttagttggcttctttgctttgctcctgttacgacttagccctgtagctctgrgctcttcgattctcacgtgctgatggtgtagctgagctctgctaatgctggttattaatctgacaatctataccagggaggttttataattgccataatt

SEQ ID NO: 165943 - DNA, 201 bp, Homo sapiens
agctagtctgagtggcagccttacccattttattttgtgggcagatttcttttacagttctggctgggtttcttttagttggcttctttgctttgctcctrttacgacttagccctgtagctctgggctcttcgattctcacgtgctgatggtgtagctgagctctgctaatgctggttattaatctgacaatctatacca

SEQ ID NO: 165944 - DNA, 201 bp, Homo sapiens
ctaagcagacatactcgatacatcttcactaatgagttctgacttcataaaatgtattaatgacttctttttgaaagtaagagtgctttgaataccagtcrttattgctttagaagttcataaaagcaaaagcacagtatttcccccagtgtttgtgcgataagagaatagatgtaggtccagcgcctagaattttagcta

SEQ ID NO: 165945 - DNA, 201 bp, Homo sapiens
cagtgcagtgatgcaatcttggctcactgcaacctctgcctcgcaggctcaaatgattctcctacctcagcctcctgagtagctgggattacaggtgcccrcccccatgcccagccaatttttgtatttttagtagagatgcggtttcaccatgttgaccaggctggtctcgatctcctgacctcaggtgatccatccatt

SEQ ID NO: 165946 - DNA, 201 bp, Homo sapiens
tctgagagcagggccaagaaagggaaagagagagagaggaaaaaaaacaaaaaagaaaaagaaaaaagagaggtgggtagggagggaggagagacatggayccacggggaatgggaagagaaatagaaatagggaatttgaaatggaaataaaacaaaagggcaggaaaggaagaaataaagagaatgagataaaaggaaa

SEQ ID NO: 165947 - DNA, 201 bp, Homo sapiens
gtcatatgctgtgtcaggcactttatatccctcatccaggaggatgcaaaaacctggtgtttttcttttttttttttttgcattttccagacgagccaagrgatggctcagaagggtgaaggaactcacccgaattgcacagctggtgagctcagagtcaggctccttgcttggtccatctggcttccaaactccaagtct

SEQ ID NO: 165948 - DNA, 201 bp, Homo sapiens
atcttcacctgggaatgttctcctaatagtcacttttgttataaatcttcacctagcatgggagttaagtgcattttaaaactagacctggggactatgtrtcctaaaatgcaaaaatagcccccaaaatgaaaattaatgttgagaatctagtcaatctgccagcagtacgtacataactgttctgtgtatatttcacat

SEQ ID NO: 165949 - DNA, 201 bp, Homo sapiens
gtgaatgggtttggagccaacagggataatagacaacgctatcaagaggggggccaaccacacatgtgcagccactgtatgacgtctggattttccttgasttatggtgatcactattgggaggtggtaagcaaacaggtgacataatttgaatcatggttttaaaagacgccatggttgccatgaggaggacaatgcgta

SEQ ID NO: 165950 - DNA, 201 bp, Homo sapiens
aaacaaaaaggaggataccaatttaagcttgtcaaaaagattttcccccaaaagaaaaacacattaaaaacaacgacaaaaatcaacaaaaactaacactrttcccccatcaacaatcaatattactttctaaaagcaagggcgttttgacaccagatattgtgaggacatccacctgctctaagggacagccatttcact

SEQ ID NO: 165951 - DNA, 201 bp, Homo sapiens
ttcaaaagctacagagataccgtaacatttaaaaaaataaattttcattgtggaaatcaactgccacaaaaacacaaccttttacgagacaacgtgatgtrcatgagaagccctgatgttgagaagctcataattcggtgtgagaaacacacaaggcatgatgccattcccatctgggatgaacagggaagacttcctggg

SEQ ID NO: 165952 - DNA, 201 bp, Homo sapiens
ggattacaggcgtgagccaccacgcccggccttgatttttcttaacctttatttccaattatgcatcttctgagtaactataaagaaaagcaaaatctacrgtaggtatggagtgagtgcagagtcaccatcagcttgaacaaatgtgtgtatctgtggtcaagtttaattgcttcttctgtaatttatattaatcacgct

SEQ ID NO: 165953 - DNA, 201 bp, Homo sapiens
tggctaatttcttttgtatttttaatagagatgaggtcttgctatgttgcccatgctggtcttgaactcgtgggctcaagcagtccacttgcctcagcctmccaaagtactgggattacaggtgtgagccaccacatctggcgaaactctgggtagtttctaattatttctgtatttctatttgtatttaaaagtacagga

SEQ ID NO: 165954 - DNA, 201 bp, Homo sapiens
gtgttgttatgcagtgtgtgactgtaccagcagcttgatctttgtgcttctagagaacatttaaattgattcgcttttgtgagacagggtcttgctctgtyacccaggcttcagtgcatcagcgtgatcatagctcactgtagcctctccctcctgggccaagtgatcctctcacctcagcctcctgagtagcttggacta

SEQ ID NO: 165955 - DNA, 201 bp, Homo sapiens
aggatgtacttacaaatcctacgtggtataacccattatacacagaggctgtatgggatagcctgttgcttccaggctgcaaacttgtatagcatggtacygaactgaatactataggcagtcataacacaatggtaagtatttgtgtatctaaacacagaagtggtacagtaaaaatacagtgttgtaatcttatgggac

SEQ ID NO: 165956 - DNA, 201 bp, Homo sapiens
ggaggtgattagatcatgagggtggagccctcataagtaagatttgtgccctgatgagaagaggatagaaaggtagctaactttccttaagctatgtgaakgtgagaacacagtgggaaggcagccatctgtaactagtaggagggccctccccaagaacgtgaccatgctgccaccttgaccttggactttaagcctcca

SEQ ID NO: 165957 - DNA, 201 bp, Homo sapiens
agaaggacgtgtttgcttcctctcctgccatgattgtaagtttcctgaggtctccccagccacgtggaactgtgagtcaattaaacctctttcctttatamatttcccagtcttcgatatgtccttatagcagcatgaaaacagactaatacaggggcctctgggaggtgattagatcatgagggtggagccctcataagt

SEQ ID NO: 165958 - DNA, 201 bp, Homo sapiens
ggacatggttgtgtccccactgaaatctcatcttgaactatagttcccatgatccccatgtcttgtgggagggacccggtgggagataattgaatcatgcygttctcacgataatgagtgagttctcatgagatctgatggttttataaggggctttcttcccttttgcttggcacttctcttactgctgtcatgtgaaga

SEQ ID NO: 165959 - DNA, 201 bp, Homo sapiens
tctttttttttttgtcagactacttgccagcatactaaaatcaggatattttacttaaatgtagatttatgacagttttgaaaaatcagaatgagtattgkagactaaatgtttatgtcttccccaaaaattcctatgttgaaaccctaatcttaaggtcatggtatttggacatggttgtgtccccactgaaatctcatc

SEQ ID NO: 165960 - DNA, 201 bp, Homo sapiens
agtgattgacttacccgagtgtacacatgtttgcatctcacttgtatgttccttacatgtttacttaattattgggaaggtgtattaatgtcctgttgctrctataatggaccaccacaaactcggtgcttctatgctgcaaacctaagattataggcagtcataacacagtgttaagtatttgtgtatctaaacatagaa

SEQ ID NO: 165961 - DNA, 201 bp, Homo sapiens
ttttgctgttacgagcatggatttagctcatttttaccatcttccctagttgtatcaccttcctcccattatgtttgtaacttcagattttgtatatttcrcatatgtcaatatgtaaacattttatatatatatatatgcatgcacacacatgcatacatatatgtaatggtatatatacatgtaagtttccatttttgc

SEQ ID NO: 165962 - DNA, 201 bp, Homo sapiens
gtactttaaaatcgagtgtggctgtgtttgtcagtcgtggtttgtgttctttgatttgttctgcatgttcttcttttggagaggatgtgtcactttgccartcttggtccttgctgttgtctggtggagggaaacaagcctgccaggccggctcatctgacccctggtggcagggagtggaggtgcactcaggatgctctt

SEQ ID NO: 165963 - DNA, 201 bp, Homo sapiens
tcagttttcgtgtctccctcccactggaccacaagcccctaactcttcatgtacacaccctgactcccagtgtgggctggccacccaggaggcacccagtytatgtgtgctgcgtgagtgatgtggaatgactgcccacgtaggaagtggcaggttggagaaaaagcagtcacagctcctggctgctgtggctgctttgag

SEQ ID NO: 165964 - DNA, 201 bp, Homo sapiens
caataaaaataaaaagctgtgtgggaagtcagaacttggttgcttcatgtcatatttcctatttttaagatttacagatattaacgactccttgggaaaastggacttcagtcgcctctctccaacaaaaaacgactattgggcgatgctggcttataacaggtccaagctctgcaacatcctcttctccaacgagctgca

SEQ ID NO: 165965 - DNA, 201 bp, Homo sapiens
tatgactttacctatttcgggtaattgatataaatggaatcatacaatacgtggccaactgacttctttcatttaatgttttcaaggtttgtgttatttcrtgtattaatattatgttggtgcaatcacttttgaaccaatctaactaatacttcatccccttgtatggccaaataatattctattctatcaatatattat

SEQ ID NO: 165966 - DNA, 201 bp, Homo sapiens
atggcctgggaggcaagtgtgatcattcaggtaatcaaagtaactacagaaacagaggtatggattagctagtcattgcagatgtggcattgagcatatargcgtggtgtacatcttagaacttcatctggaaatgcctgtgggggagttggatttcaagatcatcgtcaatgtcatgtcactgtaatttcatttacatta

SEQ ID NO: 165967 - DNA, 201 bp, Homo sapiens
taagttcttaagatttggcagctgtggatcgtgtttagtaagcacgatctctaactctttggaactcagaactatgtaattgaaatggcctgggaggcaartgtgatcattcaggtaatcaaagtaactacagaaacagaggtatggattagctagtcattgcagatgtggcattgagcatataagcgtggtgtacatctt

SEQ ID NO: 165968 - DNA, 201 bp, Homo sapiens
gctttatgtggagaaaacagtattggaaattattactcagttcaagaaaacctcactgagcacctaccatgtaggtgctcatcccgataccactatcaggmcctttggaccagttgcaaggatgcaggatgaggaaggcaatgtgagaaaacagaaggagcaccaggcagtcgtgggcttgatttttattttactattttt

SEQ ID NO: 165969 - DNA, 201 bp, Homo sapiens
agatttccccttttcataaggacaccagtcctattggattagggctcccccattatgacctcatttatccttaattatgaccataaaggccccatctccaratgcagtcatgttgggggttagggcttcagtgtatgagtttgggatggcaggggagcagttcagctcgtgagaatcgtaagattcctgatctgtttctct

SEQ ID NO: 165970 - DNA, 201 bp, Homo sapiens
gcttcagggaagggcagtgcaaattgtttctggactgatgccatcttttaataatagtagttaatagactgggtacaatggctgacgcccgtaatcccagygctttgagaggccgaggccggtgtatcgcctgagtccaggagttagagaccagcctgggcaaacagcctgaggcaaaacctcatctctacaaaaaataca

SEQ ID NO: 165971 - DNA, 201 bp, Homo sapiens
acctgaggtctagggctaaactcttgcctttacctgttccatgcttagccgttcctgctttttgcctagaacctcagtgctattgctcacacagacccagytcatgtccccaggccatgaccactgcctccccttctcccacctgtgcaggtgttaagcatcagtacataactgaggagtaggagggcagcagcccaaatc

SEQ ID NO: 165972 - DNA, 201 bp, Homo sapiens
atgttaacctcctttggaaacacccgcacagacacacccaggaacagcaccttgcatccttcaatccaatcacattgacactcaatattaaccatctcagyaggcttcttcgtgttcacatagtctcctcaccgtgtgctgtgtccagatttccccttttcataaggacaccagtcctattggattagggctcccccatta

SEQ ID NO: 165973 - DNA, 201 bp, Homo sapiens
cccaggctcaactatcagccgccttctcatcccaagggctgtcaccaccagaaatttaacatgctgttagtgcatgcaaaaaaaagcccagtaattgtagsgctcatcagtacattgttaattgatcctcatttcctattattttacctcaaagcaaacacatcattcaccatagtgacaccagagttgtttatcttctct

SEQ ID NO: 165974 - DNA, 201 bp, Homo sapiens
ccgctgacttaaatgttaacctcctttggaaacacccgcacagacacacccaggaacagcaccttgcatccttcaatccaatcacattgacactcaatatyaaccatctcagtaggcttcttcgtgttcacatagtctcctcaccgtgtgctgtgtccagatttccccttttcataaggacaccagtcctattggattagg

SEQ ID NO: 165975 - DNA, 201 bp, Homo sapiens
ctcttacttaaacacacagcatgactctccttacacatttatttcagaagagcaaagtccgggtccccaggctcaactatcagccgccttctcatcccaasggctgtcaccaccagaaatttaacatgctgttagtgcatgcaaaaaaaagcccagtaattgtagggctcatcagtacattgttaattgatcctcatttcc

SEQ ID NO: 165976 - DNA, 201 bp, Homo sapiens
tgcatagacatttgcaccccagggatagcaccattactcccaaaaattgcaggtttgaaagggtacctaaaaacaagccaccagattgtcccattccactrtcattctgccatcaacaccgaggtgtcggagtagcaggagagccacatatttcttagtgaggggacccagaatgatcccttttgtgctagaggatctgag

SEQ ID NO: 165977 - DNA, 201 bp, Homo sapiens
cttccaaatgcccttaacccacagatgggaagaaaatgaggtggggggaaggggactttcttgcttcctcatagttctcccccatcctgtaaaggagcctrtgcttcccgactcccagggccctgcagcatgtcaagaacaatattggacaagcttgtcagtgagggtccaggtggttccctgccactacgatgcatgctg

SEQ ID NO: 165978 - DNA, 201 bp, Homo sapiens
ccaccatacccagccaaaatattcttttcaaagtgattagaagtaggagaagcttgctctctttttattggcacttctgtcttacatgcactttttgattkaaattattctgtcttctatgaaatgacagtgattggaggtggtttatttttttttaagtctgcttactcggaaaaataaaacaaagttgacaacctgatt

SEQ ID NO: 165979 - DNA, 201 bp, Homo sapiens
accttcaccaccacccaatgtgtcctgctcatcactgaggtttgtcatttttactctgagtctgtccattgtcatcatctccaccatcaccccttttgttytcattgccacccttgcctggggtgagtgaagacgctcttctctggcttccacccttccaaatgcccttaacccacagatgggaagaaaatgaggtggggg

SEQ ID NO: 165980 - DNA, 201 bp, Homo sapiens
actcctgggctcaagcaatctgctcacctgggtctcccaaagtgttgggattataggtgtgaaccaccatacccagccaaaatattcttttcaaagtgatwagaagtaggagaagcttgctctctttttattggcacttctgtcttacatgcactttttgattgaaattattctgtcttctatgaaatgacagtgattgga

SEQ ID NO: 165981 - DNA, 201 bp, Homo sapiens
ttcccttcggaaaactccctgggtgccccagcattatgtggtaaaggacatgtatttccaactggcaggggctctgcaaagtttctctgcctcctttgctmaccaaaccctaaataattgtctggatgttccttttattgtcacctctgaaacaagacgaagatttggacggtttgctttagagtgcattaacttctttat

SEQ ID NO: 165982 - DNA, 201 bp, Homo sapiens
agaataaaatatcatcaggagcagctcatgtgaccagaatgtgacaaagtctttgctctacaggtcaagttgggacttactgaggagaaatgaggggactkcaaagtccaggttgcaccatccactttatagatgaggaaagtaagaacccacagcatcttgcacgtagaattcaatatatgtcctgcttcttgaatcaca

SEQ ID NO: 165983 - DNA, 201 bp, Homo sapiens
gggattcatacggacattatttagacacacttccacctacagagtcacatattgtatagaataaaatatcatcaggagcagctcatgtgaccagaatgtgrcaaagtctttgctctacaggtcaagttgggacttactgaggagaaatgaggggacttcaaagtccaggttgcaccatccactttatagatgaggaaagta

SEQ ID NO: 165984 - DNA, 201 bp, Homo sapiens
tctgtctcaaaaaaaaaaaaaagtgtactttttgaggaaagttctatttttcattattttccactatgaatgaagaagaaaataatatacatacattactkggattcatacggacattatttagacacacttccacctacagagtcacatattgtatagaataaaatatcatcaggagcagctcatgtgaccagaatgtga

SEQ ID NO: 165985 - DNA, 201 bp, Homo sapiens
tgactcactgtgttgatgttatgttttctaacattgactttcctttaaaccatagggttcgaaaccgccaagtcttttgccctccatggtgcacatgtgaycttggcctgcaggaacatggcaagggcgagtgaagcagtgtcacgcattttagaagaatgggtaagcgcttgactgttgttgttttttttaattgtcaaa

SEQ ID NO: 165986 - DNA, 201 bp, Homo sapiens
ttcagtggagtgtgtaaagtttattgctcttggaatcatgtctttatttttaaagtcatcttcactttgtttgtcttatgaatgaaagcatgagcaagtcmattattattcacgcatttgtttgtagttcattgtcagtgtcatctgctttattagtcaggggtttgagaatgtttcttcctttaactcatttattaagaa

SEQ ID NO: 165987 - DNA, 201 bp, Homo sapiens
tgctttcaggtggagaaattgtaccattgctgaaaatagcttcgctgacagttagggcaagcttcattggtagcaagtttctatctggaaagatgtaggasaggaacactgactctggaagcagacgtgacctagttttgaaacctgggataaccacttcctatctgtatgacccgagcaagttactttccttctcagaac

SEQ ID NO: 165988 - DNA, 201 bp, Homo sapiens
aaatttgcctatctctgatgattagcaagattgataggcttttcttatgtcgggccatttgttttttaacgaattgccctttcatcttatatgcatgactrttggatatgtatcgattactaattgattgcttgcctcatgtgctataatttaattttcaaaatgtcccttagaagttaatttataaagtgtctattactt

SEQ ID NO: 165989 - DNA, 201 bp, Homo sapiens
ttggactgcttttggaaaaagaaccacaagtctctatttttaaaatagaggtacaatgataaaacaaaacaaaacaaaacaaaaaaacaacaaaaaaaaaacccacacaggtctcatcagccaagggatttaaaaatcaaatttaacttcaaaaaactgaagttgatatagcaggatcttggagatgcagtttcttcactt

SEQ ID NO: 165990 - DNA, 201 bp, Homo sapiens
agctcattcattttgttaatcctgagtttggaatcaaccaatttatttaaacccgtgaagcctcgctctgtgcccggtcaagtgctgggagtggcatctgyggggagggccaaggcagatgtcatttccagactgcattggatcctggattcagaagctgaagcttaggagtgggcatggtggttcacgcctgtaaaccca

SEQ ID NO: 165991 - DNA, 201 bp, Homo sapiens
gcacagaaactgaagttaaagctaatacaatgtttttcatttttacccttacctctacaatgtacttaattgttacagattcgtatttattgattatcatrttgtattacattgatagccgtttaaaatttatgaagattccgtacttgtcatatttaattctcagcaccgtgcttacagctgtcttgtgataatgtcgaa

SEQ ID NO: 165992 - DNA, 201 bp, Homo sapiens
gcctgggaataggatggcaggtcgtgggaccagcattttaattacctaaagggaacttattgattttagtccagaacacggtggggaggagttcatattcwtttttttttttgagtctggattttagaataaattcactgtgtacatagctattccatctttaaaaacctttgtgaatgttaatatacagcctttataaat

SEQ ID NO: 165993 - DNA, 201 bp, Homo sapiens
gcggggaggaaacctatttcagtgtctctactatttctacctaggtggaggataactagccagatgaacggagctaagccttttgtatgaagtttatttcwtataaagaggaacaaaatcagaatcaaatttcttctgtagttgcacagaaactgaagttaaagctaatacaatgtttttcatttttacccttacctctac

SEQ ID NO: 165994 - DNA, 201 bp, Homo sapiens
cgatctcggctcattgcaagctccgcctcccgggttcatgccattcttctgcctcagcctcccgagtagctgggactacaggcgcctgccactacacctgkctaatttttttgtagttttagtagggatggggtttcaccgtgttagccaggatggtctagatctcctgacctggtgatccgcctgtcttggcctcccaaa

SEQ ID NO: 165995 - DNA, 201 bp, Homo sapiens
ctgtgcttgatggttttactttttgtgatttttggagccttcatgttagaagccatagtcatatggtgctctctgaaagcaagacaaggtttcttcactasactctaagaggagatctgagacagagagatgggggcggggaggaaacctatttcagtgtctctactatttctacctaggtggaggataactagccagatg

SEQ ID NO: 165996 - DNA, 201 bp, Homo sapiens
tcttatgtgattcttactggtctattatttatcaagaaattaaaaaggaatgaatatctgtagctgtttttctttttctttcttttcttttcttttctttttttttaagatggagtctcgctctgtcaccgggctggagtgcagtggtgctatttcggctaactgcaatctctgcctcccgggttcaagcaattctcctgc

SEQ ID NO: 165997 - DNA, 201 bp, Homo sapiens
ttattattattgttgatctcttactgtgcctaatttataaattaaaatttatcctaggtatgtatgtataggtgaaagcatagaatacatagggtttggtmctatccagttttcaggcatcactgtgggtcttggaacgcatctcccgaggataagggggggctactgtcagtgtgaacctgattagatctcaactgaaac

SEQ ID NO: 165998 - DNA, 201 bp, Homo sapiens
aacttgttgtaacatgtaagaaattacatctgggctaaaaggttcaataatgattactcttataatggaatcttctacaaagcaagggatttcatgatatscctatgcttttaaaaaattattgtgatacagtgaaacaaggaagaacgtgtagctggaaaaatagtatttgcttgtaatatacattcagattcataacag

SEQ ID NO: 165999 - DNA, 201 bp, Homo sapiens
ttcttatgtgattcttactggtctattatttatcaagaaattaaaaaggaatgaatatctgtagctgtttttctttttctttcttttcttttcttttctttttttttaagatggagtctcgctctgtcaccgggctggagtgcagtggtgctatttcggctaactgcaatctctgcctcccgggttcaagcaattctcctg

SEQ ID NO: 166000 - DNA, 201 bp, Homo sapiens
agtttcttgcctaaatttgtgatctccctttggcttcataaataacggtacatttcatgaagagctggtctcagtctacacaagcctaactgaatggggtrcataggaagggttgcattgtgtgacaaggtttaaatctaattgttttaagtctttgagttatttgctcaccaggctgtgcttgatggttttactttttgt

SEQ ID NO: 166001 - DNA, 201 bp, Homo sapiens
cttcttatgtgattcttactggtctattatttatcaagaaattaaaaaggaatgaatatctgtagctgtttttctttttctttcttttcttttcttttctttttttttaagatggagtctcgctctgtcaccgggctggagtgcagtggtgctatttcggctaactgcaatctctgcctcccgggttcaagcaattctcct

SEQ ID NO: 166002 - DNA, 201 bp, Homo sapiens
atgagcgttttgcttcgtgtactcatttatttctgaaaataatgcagccccttgtagggctttctggctaattgagtggtgccatcattcatgcagttgcrcaattcacacaccaggctgccactttggcccctgcgtcaccttcaccaccacccaatgtgtcctgctcatcactgaggtttgtcatttttactctgagtc

SEQ ID NO: 166003 - DNA, 201 bp, Homo sapiens
cccaaaaattgcaggtttgaaagggtacctaaaaacaagccaccagattgtcccattccactatcattctgccatcaacaccgaggtgtcggagtagcagkagagccacatatttcttagtgaggggacccagaatgatcccttttgtgctagaggatctgagttcatttcatgaaactgaagcatcttcttggagatata

SEQ ID NO: 166004 - DNA, 201 bp, Homo sapiens
ggtggatgagcgttttgcttcgtgtactcatttatttctgaaaataatgcagccccttgtagggctttctggctaattgagtggtgccatcattcatgcarttgcacaattcacacaccaggctgccactttggcccctgcgtcaccttcaccaccacccaatgtgtcctgctcatcactgaggtttgtcatttttactct

SEQ ID NO: 166005 - DNA, 201 bp, Homo sapiens
gcaggagagccacatatttcttagtgaggggacccagaatgatcccttttgtgctagaggatctgagttcatttcatgaaactgaagcatcttcttggagmtataagctcaccttgggataggcccttgcagatgacaataaaggtattttggcacataaaaaaactgctcagcacaccttgtatttgtatttcctttgac

SEQ ID NO: 166006 - DNA, 201 bp, Homo sapiens
agggtgcttatgaggaaggtttcctactcctaaaagagatacacaggaagagagaccttctgcttcctctggacactggcgcagcctggactagcagttgscagcttgggtttggacaacctccgaccttagttgaaaatgaccctgtgtaggacagaggagcaagtggaaagaacctgggtgcattgtggcattttagag

SEQ ID NO: 166007 - DNA, 201 bp, Homo sapiens
gagaatcacttgaacccgagaggcaggggttacagtgagtgcggtggcagctgggacattaaccaagttgtgaaaggagccatgatgttattagctgagtyatgtcactgcacctccagcctgggcaacagagtcagactctgtctcaaaaaaaaaaaaaagtgtactttttgaggaaagttctatttttcattattttcc

SEQ ID NO: 166008 - DNA, 201 bp, Homo sapiens
ttagtgaggggacccagaatgatcccttttgtgctagaggatctgagttcatttcatgaaactgaagcatcttcttggagatataagctcaccttgggatrggcccttgcagatgacaataaaggtattttggcacataaaaaaactgctcagcacaccttgtatttgtatttcctttgacgtgaaccatggccatccagt

SEQ ID NO: 166009 - DNA, 201 bp, Homo sapiens
tccctagtgttggatagctaggccatttataatttggacactattttaaaaaataactcaggcttattttactatttatttttgccttacactttttgtamaagtaatcagagcagtaataatagatgactccccaaaatccttttgcctctaatgattagtctaagcccataatgctgtgttccttgccagtgattggtt

SEQ ID NO: 166010 - DNA, 201 bp, Homo sapiens
aaaatacaaaaatcagccaggcatggtggcgcatgcttgtagtcccagcgacttgagaggctgagggatgagaatcacttgaacccgagaggcaggggttrcagtgagtgcggtggcagctgggacattaaccaagttgtgaaaggagccatgatgttattagctgagtcatgtcactgcacctccagcctgggcaacaga

SEQ ID NO: 166011 - DNA, 201 bp, Homo sapiens
aagattacaccatgtaaatgaattgtattttatgtaaccattccctagtgttggatagctaggccatttataatttggacactattttaaaaaataactcrggcttattttactatttatttttgccttacactttttgtaaaagtaatcagagcagtaataatagatgactccccaaaatccttttgcctctaatgatta

SEQ ID NO: 166012 - DNA, 201 bp, Homo sapiens
gccaaattgaagggtaaactgagttcaccaggcaaactgaggaagggtactcaggctgaaggatcatgggaggggaggagcgtgagttcctcttaagtgartataaaccagggggtaggaaacaacatgagatgaggctggcgagagagaaggatgctaggtgaggtgctgtggtgcgccagagactgcggaagtggcttt

SEQ ID NO: 166013 - DNA, 201 bp, Homo sapiens
cagttcctcctagtgggcagtttgctgctgctgtcttacctcctcatcctcacccctttcacctctcccctggtaactgatttatttttccctcttggagktgcttattcttttcttcttccagttgcatctctccctctacttagatacacatttccattttacttctatttggtagtctcagaacttggcttttattgg

SEQ ID NO: 166014 - DNA, 201 bp, Homo sapiens
tcgtaatatataggcacatagatatataattaaaaaaacaagaatttctcatgtcattaaacattgcttgaaaaaacatactagtaatttcctaagattayaccatgtaaatgaattgtattttatgtaaccattccctagtgttggatagctaggccatttataatttggacactattttaaaaaataactcaggcttat

SEQ ID NO: 166015 - DNA, 201 bp, Homo sapiens
atagtgatagtaaaaagaaccatgtgaactgggcgtggtggctcatgtctgtaaagccagcacttcgggagtccaaggtaggagggtcacttgagcccagsaattggagaccagcctgggcaacatcatgagaccccatctgtatccaaataaaagcaacaaaaaaatgagacatgggggtgcatgtctgtggtcccagct

SEQ ID NO: 166016 - DNA, 201 bp, Homo sapiens
ggccccctgcatctcaaagccagcaacagaaactctcttgtgcatggagtcccctcctgctttgaatctctctgactttccttgactttgatgtctaggtytggatttcaagggctcagaaactctctcatgcatgtagttccctcctgctttgaatctctctgactttccttgattttgatgtctaggtctggatttcaa

SEQ ID NO: 166017 - DNA, 201 bp, Homo sapiens
acttggtaaagaagcagatatttctttaatacgtgtatatattagactgtgaatttattcatcttccttattcatcatataagtaaattatatgattggayccaggcataaaacgtgatttgactcccccttgcccatcacagttctggagttcacatatcatttgttactttgaaaaatgaacttttgttatttgattat

SEQ ID NO: 166018 - DNA, 201 bp, Homo sapiens
gccacgcaacattcccactgccatgttggcttgtttttcttttgttttcttgtcaacataagcctcatgagacaacagcaggatgcaagattgtacaatgrcaccatgactctgctttctgggtgtcctctgtgggctctcagcagtgtccccgatgtggagggtcttcttattctgtgtgtgtgccctctgctgttgaaa

SEQ ID NO: 166019 - DNA, 201 bp, Homo sapiens
acttttggccccctgcatctcaaagccagcaacagaaactctcttgtgcatggagtcccctcctgctttgaatctctctgactttccttgactttgatgtytaggtctggatttcaagggctcagaaactctctcatgcatgtagttccctcctgctttgaatctctctgactttccttgattttgatgtctaggtctgga

SEQ ID NO: 166020 - DNA, 201 bp, Homo sapiens
aggttcttctgtgataaaaatagacttggtaaagaagcagatatttctttaatacgtgtatatattagactgtgaatttattcatcttccttattcatcayataagtaaattatatgattggacccaggcataaaacgtgatttgactcccccttgcccatcacagttctggagttcacatatcatttgttactttgaaaa

SEQ ID NO: 166021 - DNA, 201 bp, Homo sapiens
ggtgcagcacctcacacctgtaatttcaacacgtagggaggctgaggcaggaggatctcctgaagcccagaattcaagaccaggctgggcagcatagcackacccatctctactataaatttaaaaattaactgggtgtggtggtgcacatctctagtctcagctgcttgggactactagaaaggtaaggcaagagaatcc

SEQ ID NO: 166022 - DNA, 201 bp, Homo sapiens
agctccctccctaatcttgctagaaggtagggctaatgcattgtcaattcagaaatagggggtgttcctgagtctggggacactctagtgaaattctatgkgtaaaataatttgtacaagtttatatttttagctaaattaaaatactcacattcccattattttttagaggttgtaagctaagtaataacattctagaaa

SEQ ID NO: 166023 - DNA, 201 bp, Homo sapiens
gttgattctcttcaaaaacttggcagtagcccttggatcccattaattgcattcaacagtcatgtattttattaatttttgttcctaaagaaaaaaaaaaatccagattgcttagaaaataaatgtgactcacgcagagcagaatccgaattttctaagtgatgaacatgttaacatattattttaatctaaagacatcct

SEQ ID NO: 166024 - DNA, 201 bp, Homo sapiens
taaatagatgcacaaagcagagggaatcaagtagaataacatggtttatttgtgtgtgtattgttctgtttttggtaaaatcatgcttatcatatcttcartgcatcatttattctgagtccacattgctgcctttgagccggggccctgaggtatctcctatactctggctggggtgagggcggcaggtcctctgggcca

SEQ ID NO: 166025 - DNA, 201 bp, Homo sapiens
ggtggaggttgcagtgagctgagatcacaccactgcactccagcctgggtgacagagcaagactgtctcaaaaaaaaaaaaaaaaaaaaaaaaattcaacwtacgaattttgcgaggacgcaaacatttaatccgtagtactgatgtggatatgatttgagctaagactctgctgttgattctcttcaaaaacttggcagt

SEQ ID NO: 166026 - DNA, 201 bp, Homo sapiens
ctgcttttgccatcaaatggttattgaaagaactatctgtgttgacagccttttgggtttcatacagtcctttccagcttgggcagtatagataaatagaygcacaaagcagagggaatcaagtagaataacatggtttatttgtgtgtgtattgttctgtttttggtaaaatcatgcttatcatatcttcaatgcatcat

SEQ ID NO: 166027 - DNA, 201 bp, Homo sapiens
ctacgttggcagagctcagtagtcatgacagtaaccatatgcccacaaagcctaaaatatttactatctggctctttgcagaaaatgcgctgaaccttgcrtgttgtgtcacccctggaggtagcaccttgtaattaagcacatgaatatctcacatcagaatgaatgaatattcacactcagtgggacaaacaacttctg

SEQ ID NO: 166028 - DNA, 201 bp, Homo sapiens
tttcacagtgtttctagctcccctttccaatacatctctctctctctttctctctctctctctctctctctcacacacacacacacacacacacacacacmgccaaatcagacaccaacataaactgtagagttaacattctttttccaccctcacactttttttagctccgatctgtgttcaatttctgcctgagagagt

SEQ ID NO: 166029 - DNA, 201 bp, Homo sapiens
ccatgagtaacgaagtcctctgtatctgatcctgggtctcctgttttctgctagcttcctcaaaacttggtagctaactcattaacttacaaggaagaggktgaacgtgtagacccttcacagtttgaaaaatcacctgatcaataactgagattatgaaaaggtaggaatgaaccaattatggcccaaaggctaactcca

SEQ ID NO: 166030 - DNA, 201 bp, Homo sapiens
aagagaccaatttaaaacattctaatgagcatcatctcataatttggtaatctcatgtaaaatgcttataataggggtgtgtgtatgttatatatattttwaaaataaatttgtaatcatgtatacagtagtccccccttatccgtggtgtttcagtttttttttttttgagtcagagtattactctgttgcccaggctgg

SEQ ID NO: 166031 - DNA, 201 bp, Homo sapiens
gagaccatcctggctaacaaggtgaaaccccgtctctactaaaaatacaaaaaattagccaggcgcagtggcgggcgcctgtagtcccagctactcgggargctgaggcaggagaatggcgtgaacccgggaagtggagcttgcagtgagctgagattgcgccactgcagtccgcagtccggcctgggcgacagagcgaga

SEQ ID NO: 166032 - DNA, 201 bp, Homo sapiens
gcttcttatgtgattcttactggtctattatttatcaagaaattaaaaaggaatgaatatctgtagctgtttttctttttctttcttttcttttcttttctttttttttaagatggagtctcgctctgtcaccgggctggagtgcagtggtgctatttcggctaactgcaatctctgcctcccgggttcaagcaattctcc

SEQ ID NO: 166033 - DNA, 201 bp, Homo sapiens
actgagcaggaagggccaggtgttttacgactctttggagttagcagcttgttggctctgatttggtaaaagcaacggaaatgccttcagcacggtgaacrttacatgcaaatgttgggaagtgttaggaaagggaatttttttaggcgagggaatttcgcattgaggaaggtccctgcttcgtttttagacacagcctat

SEQ ID NO: 166034 - DNA, 201 bp, Homo sapiens
tgcttcttatgtgattcttactggtctattatttatcaagaaattaaaaaggaatgaatatctgtagctgtttttctttttctttcttttcttttcttttctttttttttaagatggagtctcgctctgtcaccgggctggagtgcagtggtgctatttcggctaactgcaatctctgcctcccgggttcaagcaattctc

SEQ ID NO: 166035 - DNA, 201 bp, Homo sapiens
agatcaagaggcccggaaccccgcagtcctgaatgctaaccagtagagacaagggaggaattcatttctgtttgtgttcaacatagactgagcaggaaggrccaggtgttttacgactctttggagttagcagcttgttggctctgatttggtaaaagcaacggaaatgccttcagcacggtgaacgttacatgcaaatgt

SEQ ID NO: 166036 - DNA, 201 bp, Homo sapiens
catgttgcctaggctggtctcgatctcctgggctctagcaatcctcccacctcggcctcccaaagtgttgggattacaggcgtgagctaccgtgcccggcsttacgtttcagcatctttcaatccatctaatacgcagtgccagggaaggtttgtgaaaacatttgaatcacagagtcacaaacagtgagaatagctgcag

SEQ ID NO: 166037 - DNA, 201 bp, Homo sapiens
cgatggtagtttctgtttttggagtctctgtaggtctcagactcacagtctgtacttcttgttttgggggctaattaagtggacagtttcagtgttggtasctcatttaagccataaacatgcagaccatgtggaatcccattagtcaaaccttagcagagtgccttgatgagtacctccttttctttctgaattctatta

SEQ ID NO: 166038 - DNA, 201 bp, Homo sapiens
tgattttatgtctttatttgtttcttaatgagctactttatcattgtgaaaacagttaaatatcaatagtcaatgaataaatattaccaaaaaaaaaaaaaggtttgtcgtttaaaaatttggagctgggctggaaactagggatactacttggtatattttagttctactgatatgacagtatttgatacttaatcatat

SEQ ID NO: 166039 - DNA, 201 bp, Homo sapiens
tgctggaaggcaaagtaaaagccaacctcttgagaaagacatggaacacaggatggaacttgaactgcttaaaatggcttttctcaggccagctgcactggagtgtgctgctgtaacaaacacgcccggatctcagtggcttagcatggtgaattcatttcccattcgtgatatctgaccacagatgggaggtaaggggct

SEQ ID NO: 166040 - DNA, 201 bp, Homo sapiens
caccttccgcaggaatggcctttaacactgtcacctcaccccattcccctccactcttgggaagcatacgtctaggtgagtggtgaagatttttattctgmatttttgaaataatatcgtactgcaagttccaggcaatcaaaaactcacaaatcacttgcactctgcagcagtggtatcaggtctgaagaaaggaagagg

SEQ ID NO: 166041 - DNA, 201 bp, Homo sapiens
aacttttgtagttgctgctggtctctttggaaggcaagtgctaatttacccacagttgaaacctgacacacacacgcgcgtgcacacacacagacacacastctctctctctttctctgtctctctctctttctctgtctctcataaggaactaaatcctgcgttttctcaccagagggctaatgacacactgcttagtca

SEQ ID NO: 166042 - DNA, 201 bp, Homo sapiens
ggaggcacaggaggtaaaaatacattgttcaagggtcaattattgtgttgtacaaggtgtgaaatctaccaggttgccatccgagtggagaatttttttastgtacttgcctatgaaggtaaagaagcaaatggaaatttttttttaagaattgaaaggattttatttcaaatcaactctcatacctcatcctgggctcca

SEQ ID NO: 166043 - DNA, 201 bp, Homo sapiens
tcttttagttatataaaaatgtacagtttaagttattattgactatagtcaccctgttgtgttgtcaaatagtaggtcttatttattccttgtatttttttgtacccattgaccatccccacctcctcatcaaccccccactacccttcccagcttctggtaaccatttttgtgctctccatttctgtgagttcagttgtt

SEQ ID NO: 166044 - DNA, 201 bp, Homo sapiens
aaatagtcacatcatggagaatggggtatccatcccctcaagaatttatcctttgagtgataaacaattcagttatacccttttagatattttacaatgtrcaattaagttattattaactataatcaacttgttgtgctatcaaatagtaggtcttattctttctttctatcttttttgtacccattaaccatctgcact

SEQ ID NO: 166045 - DNA, 201 bp, Homo sapiens
gacgtctgtgtcacatatacatgacatcctacccccttcccataaaaaaaatcacatttgtgaatgtctctcttaggctgagttccagactccaagatccctcttctctcttgtcagaatccagcagctgatggcatttatgtctgtagatttcactgtcaatgagtcattgacaggctaagcaggctgttggatggagtg

SEQ ID NO: 166046 - DNA, 201 bp, Homo sapiens
ccactgccatgttggcttgtttttcttttgttttcttgtcaacataagcctcatgagacaacagcaggatgcaagattgtacaatgacaccatgactctgytttctgggtgtcctctgtgggctctcagcagtgtccccgatgtggagggtcttcttattctgtgtgtgtgccctctgctgttgaaagttgcctgtcaccc

SEQ ID NO: 166047 - DNA, 201 bp, Homo sapiens
gaggcggaggttgcagtgagcccagatcgcaccactgcactccagcctgggtgacagagcgagactccatctcaaacaaacaaacaaacaaacaaacaaactaagaacaacaacgaaaaaactcccatgtattatctatggattgactgtaaaatatgagaagcaataaatatgttcatcactagggccatctagaaattt

SEQ ID NO: 166048 - DNA, 201 bp, Homo sapiens
caacagcaggatgcaagattgtacaatgacaccatgactctgctttctgggtgtcctctgtgggctctcagcagtgtccccgatgtggagggtcttcttaytctgtgtgtgtgccctctgctgttgaaagttgcctgtcacccatgatgctgtgctgattgagcaaactaatccataacccaccgccacgttcctcgccta

SEQ ID NO: 166049 - DNA, 201 bp, Homo sapiens
cctgagtagatgggactacaggcatgtgtcaccatgccaggctaatgtttaaaaatttttcttagaggtagagcctcactttgctgcctaggctgatctaraactcctggcttcaagtgatcctcctgccttgagctcccgaagcgctgggaccaatagagatttctctgagaattaggtcccccactattaataaggtca

SEQ ID NO: 166050 - DNA, 201 bp, Homo sapiens
cccctgtttcaaatgaatacagattcattttgtcacctgtgtgaaattggtgtccgtgtgccttgcttcctaggctgtccaccatgacatcagcctgcccrtgcaatgcttgagatttgccctgtgactcaacccaaatctaaagcccgagtcgtatgaatccaggacacctgcctgcaaatgcatttttcatgtataggt

SEQ ID NO: 166051 - DNA, 201 bp, Homo sapiens
tgcagactgtataggcttctgcctctcgggaggcctcaggaaacttacagttatggcagaaggtgaaggggaagcaggtaatgtcttcacatggctggcastggaggaagagagaaagtagggaggtggtagatgcttttaaacaaacagatctcaggagaactctttcacaagacagcactagggggatggtgattagaa

SEQ ID NO: 166052 - DNA, 201 bp, Homo sapiens
aatacagataatttctctcttaaattccataagctggagacactgcccctgtttcaaatgaatacagattcattttgtcacctgtgtgaaattggtgtccrtgtgccttgcttcctaggctgtccaccatgacatcagcctgcccatgcaatgcttgagatttgccctgtgactcaacccaaatctaaagcccgagtcgta

SEQ ID NO: 166053 - DNA, 201 bp, Homo sapiens
tcttatttatcctgcatttataaatacacaaattcttgtacaattaactcagtttttcactcctttcttgcttgcaacttgtcaggtcgttccctccccastagttgtgaacttctttatgctagcttcttccatcaggggctcacaaccagggactgtagaggtttgcagaggtaaatcttggtagataaggattttatg

SEQ ID NO: 166054 - DNA, 201 bp, Homo sapiens
acgagacactcattccgaaggcgggtgtgtatgtgcaaactgtataatttttttcttcttttctatctgctagcaaagtgggtaagttgacccatgacatsgtccactggagggaccacatttgtgactctagcaattaagcctcccttctcatctgtggataaaactgacctcccagtgtgctggagtcaaacatattca

SEQ ID NO: 166055 - DNA, 201 bp, Homo sapiens
gggtattactctgttgcccaggctggtgttgaactcctggcctcaagcgatcctcctgcctcggcctcccaaagtgctgggattacaggcttgagctactkccccaggctcttcccccgtttgttaatacataccatgaccttggcctttcccacctcttaggttttgcttactttcccttctgtcctttacttatgactc

SEQ ID NO: 166056 - DNA, 201 bp, Homo sapiens
acactgtttaccagattggagtgcagtggtgcaatcctagcttactgcagcctgtaggtcccgggctcaagcgatcttcccacctctgccacttgaatagstgggactacaggtgggtaccaccatacccagctgttgaaaaaaaaatggtggggtattactctgttgcccaggctggtgttgaactcctggcctcaagcg

SEQ ID NO: 166057 - DNA, 201 bp, Homo sapiens
atgccgacccacaagctctggagcagtcaactcagaatggtcaggacttggtcagtaatgcccatttttgctaaattttgtccccacttccaacgcaggaycaaccagagaaagccacatatgctccccaaaccaatcatacaggatgtcctggtctagggagcccacctccggcttccccatgtccacagcctccaatcg

SEQ ID NO: 166058 - DNA, 201 bp, Homo sapiens
atgtctgatagatattaggcattcagtctctctctctctctctctctctctgtttattatagatagaaataaaaaaattataaatagaaatttatttctcrtggttctagaggctggaaaattcaagatcaagatgcagacaggcttggtgtctggtgagggctgctttctatccttcaaaaaggcaccacgttgctgtgt

SEQ ID NO: 166059 - DNA, 201 bp, Homo sapiens
cccacacttactcttattcacccagaacaggtgtgtgccaccttggagaagatgaagccagagagaaaatcagtcagacaggaattatgttgaaaggtgamtgaatacattaccacctcccaggagttgaatgaaaaacggctatttctttaggacgtcaaaccacctttttcctctctaattcatgcatatccctataca

SEQ ID NO: 166060 - DNA, 201 bp, Homo sapiens
acaaggcagtagaggttggacgagacactcattccgaaggcgggtgtgtatgtgcaaactgtataatttttttcttcttttctatctgctagcaaagtggrtaagttgacccatgacatggtccactggagggaccacatttgtgactctagcaattaagcctcccttctcatctgtggataaaactgacctcccagtgtg

SEQ ID NO: 166061 - DNA, 201 bp, Homo sapiens
caggaaggtaaaatttggaggtgcaggcagagtcaaggtcatgcctgaggcccaaccttcctgttgaagctggtgtttgattcaagctgtggctgagaacrtgcagctcatctggagggtagagttgcaagacatgggttcaggtctgagccaagccagaaactggagaaagcgtggcttctcaagactaggaatacctag

SEQ ID NO: 166062 - DNA, 201 bp, Homo sapiens
gcatttatctttgatgctgggaatgcgttcattttctttatcttgccattactgtacctctattgggaaatttactctctcttcatagataggatccgathcagtacatatttataaaaccacacttacatttaaatacaggcctttcccatttcacagtgtttctagctcccctttccaatacatctctctctctctttc

SEQ ID NO: 166063 - DNA, 201 bp, Homo sapiens
tggatgtctgaggtatgctaagcctaatctccatcttctcaaagctccactgccactgtcccgtaagggtgggcagattcctccccattctataaaataayagctaccatttcctgagggcatactgagtgctgacaggcacatcaacatcagaccatcaccttcttatacctcaaaatagtctgcagggtgactcagaag

SEQ ID NO: 166064 - DNA, 201 bp, Homo sapiens
ttcccatcaacaactcttgtgcccacgagggactggcctcctcagtgccacacagagcctcccctgagtagatttgtgtcattttcaaacaaagcatcctsgctgcagtgttggattttgtaggatggtgaccgtttacagaaacctctggtccgtgagccaatttggagaaaattgaatcattctctgtgcctttcggct

SEQ ID NO: 166065 - DNA, 201 bp, Homo sapiens
gcagaccattgtttagccctccttccacctgggagactggctgctggttctcattgcttctgtgggtctccaggtttctatcattacacagattagcacayggttccatgatcatggacccgttcagtacacaatgaaatcatttgcaaagcaccttggggtctgttagagaagggaatggatgtctgaggtatgctaagc

SEQ ID NO: 166066 - DNA, 201 bp, Homo sapiens
aaaaaaaatccccaaaaaatctcataatgttttaagaaagtttatgaatttgtgttgggccagattcaaagttgtcctgggccgcatgtggcccaccagcyatggtttggacaagcttagtctacaggttcttcaagaggggcttgagcatttgaaagacttctagtgggagagatcacaaggtacaagtagaaaatcctg

SEQ ID NO: 166067 - DNA, 201 bp, Homo sapiens
atgctttgtaattttttttaaggattgatactagctagggtgttgataagaaacagcaggcatagttactgggtgattgagaagagtttaacaaaagactrtattagtctgttttcatgctactgataaaggcatacccaatactaggtcatttacaaaagaaaaaggtttattggacttacagttccttgtggctgggga

SEQ ID NO: 166068 - DNA, 201 bp, Homo sapiens
gcaatctatggtctttatcacttctccattaactgtccttgttttattaatgctgattactttttgatttggtttggttctttggagttgtttgcatttcrtgagtcttggcatctttttggtagagaaccttgctaggttctcacaatgtagaaattaagcagaaaacagaggtctcaatttgccttttcagcgtgaatg

SEQ ID NO: 166069 - DNA, 201 bp, Homo sapiens
gctccaggtaaccactcatctactttctgtctctatatagatttgcctattctagacttttcatataaataaatcagatactgtgtggccctttgtgtctygatccttacacttagcatcatgttttcaagggtcattcatgttgtagcatgtatcagtacttctttttttagggctgagtaatattccatttacggatat

SEQ ID NO: 166070 - DNA, 201 bp, Homo sapiens
ggagaggtgcgatttccctccacataatcttcagttagtgatctctgtaagagaatgtttttcaaaaggctaatagagaagtaatgagatcagaaggaggycaacccggccttctccgtttggcagcttgattaatttatttctccttcttggagattgctgcaaggggcttttgtcaccctgtgtttttcatgggactgt

SEQ ID NO: 166071 - DNA, 201 bp, Homo sapiens
ggaatgcagtggcacgatgttggctcactgcaaaccctgcctcccaggttcaagcgattctcctctcccagcctcccgagtctctgggattacagacgtgyatcaccaggcccagctaatttttatatttttactcgagacgtagtttcaccatgttggccaggctggtctcaaactcgtgaccttaggtgatatgcgccc

SEQ ID NO: 166072 - DNA, 201 bp, Homo sapiens
ggaggcggaggttgcagtgagcccagatcgcaccactgcactccagcctgggtgacagagcgagactccatctcaaacaaacaaacaaacaaacaaacaaactaagaacaacaacgaaaaaactcccatgtattatctatggattgactgtaaaatatgagaagcaataaatatgttcatcactagggccatctagaaatt

SEQ ID NO: 166073 - DNA, 201 bp, Homo sapiens
tcaagcgattctcctctcccagcctcccgagtctctgggattacagacgtgcatcaccaggcccagctaatttttatatttttactcgagacgtagtttcrccatgttggccaggctggtctcaaactcgtgaccttaggtgatatgcgcccctcagcctcccaaagtgctgggattataggcatgagccaccacgcccag

SEQ ID NO: 166074 - DNA, 201 bp, Homo sapiens
aggaggcggaggttgcagtgagcccagatcgcaccactgcactccagcctgggtgacagagcgagactccatctcaaacaaacaaacaaacaaacaaacaaactaagaacaacaacgaaaaaactcccatgtattatctatggattgactgtaaaatatgagaagcaataaatatgttcatcactagggccatctagaaat

SEQ ID NO: 166075 - DNA, 201 bp, Homo sapiens
tgatgatccagagctttggagtcagcgagacagtagagagtggtggagatggtggcgcacaagagggtcagtgccccatctcaaggaacagctgcacctcrgcctacgcgattgtgaaaatgtgagcatatgcaggccagaccttggcttctctgtcttcatttttcacaggagccagaagtttggatgtgcaatgtgaaa

SEQ ID NO: 166076 - DNA, 201 bp, Homo sapiens
caggaggcggaggttgcagtgagcccagatcgcaccactgcactccagcctgggtgacagagcgagactccatctcaaacaaacaaacaaacaaacaaacaaactaagaacaacaacgaaaaaactcccatgtattatctatggattgactgtaaaatatgagaagcaataaatatgttcatcactagggccatctagaaa

SEQ ID NO: 166077 - DNA, 201 bp, Homo sapiens
tccagagctttggagtcagcgagacagtagagagtggtggagatggtggcgcacaagagggtcagtgccccatctcaaggaacagctgcacctcggcctaygcgattgtgaaaatgtgagcatatgcaggccagaccttggcttctctgtcttcatttttcacaggagccagaagtttggatgtgcaatgtgaaatctcac

SEQ ID NO: 166078 - DNA, 201 bp, Homo sapiens
ctgaggcaggagaatcacttgaacccaggaggcggaggttgcagtgagcccagatcgcaccactgcactccagcctgggtgacagagcgagactccatctmaaacaaacaaacaaacaaacaaacaaactaagaacaacaacgaaaaaactcccatgtattatctatggattgactgtaaaatatgagaagcaataaatat

SEQ ID NO: 166079 - DNA, 201 bp, Homo sapiens
cgaacatacatgttgaaaatttcaaaagggaaaaaagaaaagaaaggcacatctgagtcaggaaaacattaactagtcttatttctgagaatcaaaccggkggtcttttcagtgatcagtcaccccattaaccacacatgaatggcacaagtaggaaatgcctgctcagagtccctggaagaggtatccagatttatggct

SEQ ID NO: 166080 - DNA, 201 bp, Homo sapiens
aacccagtaggcggaggttgcagtgagccgagatcgcaccactgcactccagcctaggtgacagagtgagactccgtctcaaaaaaaaaaaaaaaaaaaaagaaagaaaacaaaaacaaataggacccatatccctggattgttgaggaaatacgtgaacatatgtggcacacattatagtgtctggcatacaataaatac

SEQ ID NO: 166081 - DNA, 201 bp, Homo sapiens
tctttgaaagttgtccttctgcacccattttccccagacctaacctcgatttgtgctccaggtctgagcagaaatgttattccctccagaaagccttcccyggatgttgagggatgaagttgtagccccctcccgaatgcgtcctcagaactcgctggttctcgtcctcgccctcagcatacttgctcattgtttgtttcc

SEQ ID NO: 166082 - DNA, 201 bp, Homo sapiens
ggggaaacctgttggtcccctcataaaacagttaacaggaagcccaaggcatctttcagtgccatttttggctgatgtttggaatggttccatcaatcacygctgttcatgtatagctggtttttatgtcagttaaaccatcttccatcaagttggtgaagcagagtcagggaacaagatgaatagcaaaacgtcttctgt

SEQ ID NO: 166083 - DNA, 201 bp, Homo sapiens
tgattattttgctctttgaaagttgtccttctgcacccattttccccagacctaacctcgatttgtgctccaggtctgagcagaaatgttattccctccaraaagccttccctggatgttgagggatgaagttgtagccccctcccgaatgcgtcctcagaactcgctggttctcgtcctcgccctcagcatacttgctca

SEQ ID NO: 166084 - DNA, 201 bp, Homo sapiens
tatattagttccatgctgaaataatatttgagacatactaggttaaataaaatatcattgaagttcatttaatctgtttctttttacctttttttttttttgacacggctcctggaaaggttaacaatatgtaggtgaccctttattttcatcagacattgccgacctagagggtaaccactggagaggaaaaaagtacaa

SEQ ID NO: 166085 - DNA, 201 bp, Homo sapiens
tggcccaccagccatggtttggacaagcttagtctacaggttcttcaagaggggcttgagcatttgaaagacttctagtgggagagatcacaaggtacaastagaaaatcctgggctggcctgagaggcagacctgtgattattttgctctttgaaagttgtccttctgcacccattttccccagacctaacctcgatttg

SEQ ID NO: 166086 - DNA, 201 bp, Homo sapiens
ccaggttcaagtgattctcccgtctcagcctccagagtagctgggattacaggcacccaccatcacgcccagctaatttttgtatttttagtagagatgggtttcaccatgttggccaggctggtcttgaactcttgacctcaagtgatccacccgcctcggcctccgaaagcgttgggattacaggtgtgagtcagagca

SEQ ID NO: 166087 - DNA, 201 bp, Homo sapiens
attcacagctttccccaagaatacaccacagtgcatacaaatcctcgaagccgcagaactttttcaagttgaactgtgaactgtgatttttttttttttttaagtaagtttacatgtagaagctcattggtagagagctttagatatattacttcccagggtggtgcatcctgtcaccatgaagtaggcatgaaatgctgg

SEQ ID NO: 166088 - DNA, 201 bp, Homo sapiens
aatctggagtccaccatcctgggtctagctggggacatccttgaatcagcctctgggaatcactgaaccaacatgagtcacttgctactgtgagatctcaraacacatggatcaggacagagggcagggctgtttccccaaggaaatccaaatgctttacaggaaggggagtggatgctggcccggcccaggcgaggatga

SEQ ID NO: 166089 - DNA, 201 bp, Homo sapiens
taaattttatttttcagtttacttggttttgcctccttctagaactagaacataagctctctgaagtcagggaccatgcctagaatcgccttccttttatytcccatcagccgaaactaactctgctgtgtcacgctgtgttaggctgtgttggctgtgagtaagagaagtctcacccaactagctgaagcgaggtgggtt

SEQ ID NO: 166090 - DNA, 201 bp, Homo sapiens
tgattttgatttggttgtttttggtagagatgatatcttgctctattgccaggctgatctcggactcctgggctccatcaatcctcttgcttcccaaagtrctgggattataggtgtgagccagtacacttggccttttggcaccattattctgcctgccatcctgtcctaactaaagaaagtaaggtccctccatcctcc

SEQ ID NO: 166091 - DNA, 201 bp, Homo sapiens
atctgccatgccaaataacacctttgcaggtttcagggtagagcatggatgccttttgattttgatttggttgtttttggtagagatgatatcttgctctrttgccaggctgatctcggactcctgggctccatcaatcctcttgcttcccaaagtgctgggattataggtgtgagccagtacacttggccttttggcacc

SEQ ID NO: 166092 - DNA, 201 bp, Homo sapiens
cagtattttgtcctattcatgcaatataatttatataacctaattgataaaacattttggttgattgcagtctgtcgtagataatgccgtactgaatattmctcccacatatttgcaagtctatttgtaggataaatttctggttgtggctgggtcaaagagcatgtccacttcaaatttgatagctatgtcccaactgcc

SEQ ID NO: 166093 - DNA, 201 bp, Homo sapiens
acaagtcacagggcttatctccattgttctgaacgatctgtagctaaacaaaaagataaaagctattaatattattaatagttgtagattaccgggaagarcgcatcctaaatcagccattagatttgttcctcatttctttgctttacaaattgtttttctgtatagtattggattttcaataaataaagtatgatataa

SEQ ID NO: 166094 - DNA, 201 bp, Homo sapiens
cttcgcaaagggaaataactcttctgctaaccctcctgcccaacctgagatgaagtatcaggggatgcagtatggatgtattttcctgacgattggtcctkctgtcctgggacccaggtgtgagtgcatagggaaaagggaggagaaatttaatcctgtaactatctccttatggaaaacaggaaaccacaaatgaatcaa

SEQ ID NO: 166095 - DNA, 201 bp, Homo sapiens
ccaggttcaaatgattttcctgcctcagcctcccaagtacctgggattacaggagcctgccaccacgcctggctaattttttgtacttttagtagagatgrggttgcaccatgtttaccaggctggtctggaactcctgaactcaagtgatctgcccgcctttgcctcccaaagtgctgggattacaggcgtgagccactg

SEQ ID NO: 166096 - DNA, 201 bp, Homo sapiens
cccaagaggatccgacagctctggaacttgtaatatttgcagcatgtcttgccctcttaatgtctaagaagtcaaaaaaggacacgtatgcctagaaaacrtgaataattatcatctatcaaatttttaccatgtgccaagcatagtcatatttggctaacgaaaacaacaaaatcaaccgtgacaaggttttattagtaa

SEQ ID NO: 166097 - DNA, 201 bp, Homo sapiens
ctggaatcctactgccaaattatggcactcatcctacttggtgtaaaatcctgggatgatagcttataatagtaataataagacctgcttcccggtgattmtctaaggattaaatcagttcatggagatgaaatacttaaactgtgcctggcacaaagtaaatgttagtgctactattatccctgctgctgttaaccccaa

SEQ ID NO: 166098 - DNA, 201 bp, Homo sapiens
ggtagaattcacaaagctggttttatgtctccttctcttcctcttccagtgttgtcttttccctgcattgagatagcattgcatggagatccttgtactcytcgaacagaggctgcagatggacacaggatctgctcagggagataagatcacctgctaattctgctttctccatcagagtctgaatgatcagtgatgggg

SEQ ID NO: 166099 - DNA, 201 bp, Homo sapiens
aacatgtaaatcagctcattcattctgctggccctaaataggtagaaggaagggaaacatgaaagggagccttcatctgttttcctgcagatgcccggctygtggttaacccaagcaagaggtagttaaacggccccgcagattgccagtgactccgggaatgcctaggtttatgtatggattaacacagtgatagaccct

SEQ ID NO: 166100 - DNA, 201 bp, Homo sapiens
tcagtggagggtcagcgtgacagccttttgcacccacatctgggttcttgtccagtgtccaggaggaatgaggtctcatgagcaaattttaaggatggcaratgtgggggattttattgctgatgaaagtggctttcactgggaagataagctaaaaagaagacaaagcaggaaggtaattttcccctggagctatgccat

SEQ ID NO: 166101 - DNA, 201 bp, Homo sapiens
gtgagccctcttactgaattatgtggctggggttcttgggtatgttttgttctattttctggttggtggttttctttctgtcgggtcccgtgggctctttytggacctcttctcagaatgtttttcgttttttttattttttgagatggagtcttgcactgtgtcctgggctggaatgcaatggcaagatccctgctcact

SEQ ID NO: 166102 - DNA, 201 bp, Homo sapiens
ttaacattctttggcagttgtaatttattaattgatttttaaatttggccggtgaaaatgaactttaggtaggggtttgaggaaaatgaaaaggcctattkgtttttcagtggctggttcttcgtgttcagcattaaggattggtagaaatcaggcaacctctatgtaacctcagccatcttggattcccagcttactcac

SEQ ID NO: 166103 - DNA, 201 bp, Homo sapiens
caggagccagaagtttggatgtgcaatgtgaaatctcacaaattaaacatgttacataactgtattttgtttcctatctctgctgtaataaattttctcawtgttagtgacttagaaccacacaaaagttacactttacagttttggaggtcagtggtccaaaataggtctcagtgggctaaaatcgatgtgtcagcagga

SEQ ID NO: 166104 - DNA, 201 bp, Homo sapiens
tacaagggccggatgcggtggctcacacctgtaatcccagcactttgggaggcctaggcgggtggatcacttgaggcctggagtttgagaccagcctggcyaacatggtgaaaccctgtctctactaaaaatacaaaaattagccaggtgcggtggcgcaaacctgtaatcccagctacttgggaggctgaggcaggagaa

SEQ ID NO: 166105 - DNA, 201 bp, Homo sapiens
cccaaatcctttggctcatggccccttcctctatcttcaaagccagggatggctgctcaagtccttctcaaactgccctgttcctggttctctctcttctkcttctgcttttaaggaaccttgtaacttcagggagtctaccctgataatctgggataatctgcctatttgaaggtcagccaattagcaatcttaatgcca

SEQ ID NO: 166106 - DNA, 201 bp, Homo sapiens
tgctcaagtccttctcaaactgccctgttcctggttctctctcttctgcttctgcttttaaggaaccttgtaacttcagggagtctaccctgataatctgsgataatctgcctatttgaaggtcagccaattagcaatcttaatgccatctacaaccttaattaccatttgctatgtaacatatttatagatatcagggat

SEQ ID NO: 166107 - DNA, 201 bp, Homo sapiens
ctcaaactgccctgttcctggttctctctcttctgcttctgcttttaaggaaccttgtaacttcagggagtctaccctgataatctgggataatctgcctrtttgaaggtcagccaattagcaatcttaatgccatctacaaccttaattaccatttgctatgtaacatatttatagatatcagggattagttcatgaaca

SEQ ID NO: 166108 - DNA, 201 bp, Homo sapiens
ttgaaggtcagccaattagcaatcttaatgccatctacaaccttaattaccatttgctatgtaacatatttatagatatcagggattagttcatgaacatmttggggtagagggcattccacatacagcagtacctataatgtatatgcttcttaaagaatgcatgagtctttattttatgtccttggagtgtatagcaga

SEQ ID NO: 166109 - DNA, 201 bp, Homo sapiens
ggaatttattttaaattacagctttttctattggaagcattcatttatgttggattattgttccctgagtgaaatttcactgatgctgtataattaaatayagatttttttagagatagtatatattttagatgtataagtggataaactggaggtatggaaggtctttatttaaggagaataaatagcccaccccatcaa

SEQ ID NO: 166110 - DNA, 201 bp, Homo sapiens
atgttagggctagcaggtaaacccagctgcaccccagagcaggtgtatacatgagtgctagtgggtaaatccagcagacgtccggactgtgcttgagggtrtcatcgagagagagaaggttgatccgaagttagtaaaggctttaaaaattaaaaggcctgagatgatggtagggttttggaggtaagtataaaaaccttc

SEQ ID NO: 166111 - DNA, 201 bp, Homo sapiens
gggttttaccatgttgcctaggctggtctcgatctcctgggctctagcaatcctcccacctcggcctcccaaagtgttgggattacaggcgtgagctaccrtgcccggccttacgtttcagcatctttcaatccatctaatacgcagtgccagggaaggtttgtgaaaacatttgaatcacagagtcacaaacagtgagaa

SEQ ID NO: 166112 - DNA, 201 bp, Homo sapiens
cgagatatggggtatacatgagtgctattgggcaaatccagctgcacaggagagtaaggggcatatgttagggctagtgggtaaacccagctgcacctgagagtaggggtatatgttagggcttgtgggtaaatccagttgcacctggcagttggggcatatgttagggctagtgggtaaacccagccgcaccggagagtt

SEQ ID NO: 166113 - DNA, 201 bp, Homo sapiens
tggtggtgcatgcctataatcccaacacttttggaggccaaggtgaggagaccacctgaggtcaggaattcaagactactgggcaacatggtgaagctctstctatcctaaaaatgcaaaaattagccgggagtggtggtgcatgtctgtagtcacagctacttgggaggctgaggcaggcgaactgcttgaacctgggag

SEQ ID NO: 166114 - DNA, 201 bp, Homo sapiens
ccttgaacctgggaggcagaggttgcagtgagccaaggtggtgccactgcattccagcctgggcgacagagcgagattccgtctcaaaaaaaaaaaaaaaagtaatcattttagaattgctttctcttcgggatggtttacctcgtgtttagtctgtaaacgcggataaccgagagctggtcaaatgtttacatggggctg

SEQ ID NO: 166115 - DNA, 201 bp, Homo sapiens
aggccactgcactccaatctgggtgacagagcaagactctgtctcaaaaataatagtaataataataataataataataataataataataataataagaatctgactaaggttattaaccattaaggtatgctgtgctaaggagcagggggccccttccatccgtagagggcagaaaggtgcctatcatgtcttcagtgt

SEQ ID NO: 166116 - DNA, 201 bp, Homo sapiens
aacttgtgtagggaaactctcccttatgataccgtcagattccttgagacttatttgctattgtgagaacaccttgggaaagacctgcctccatgattcarttacctcccacctggtccctcctgcaacatgtgggaattcaagaagagatttgggtgggtacacagccaaaccatatcaaaaaccatttacaaaactcta

SEQ ID NO: 166117 - DNA, 201 bp, Homo sapiens
caggccactgcactccaatctgggtgacagagcaagactctgtctcaaaaataatagtaataataataataataataataataataataataataataagaatctgactaaggttattaaccattaaggtatgctgtgctaaggagcagggggccccttccatccgtagagggcagaaaggtgcctatcatgtcttcagtg

SEQ ID NO: 166118 - DNA, 201 bp, Homo sapiens
ttcagcagtctgcctttccctttctgttataaaatcatgtttttattgaattacattttaatattggtatcactttaaaatgaaaatgagtacttgcaaamtgtatttttgaaggagttgggtggtggtggggggatgccattttggcaacagatgacttcggttcaagtcctctctctgtctcttacttgctttgtggct

SEQ ID NO: 166119 - DNA, 201 bp, Homo sapiens
tcaggccactgcactccaatctgggtgacagagcaagactctgtctcaaaaataatagtaataataataataataataataataataataataataataagaatctgactaaggttattaaccattaaggtatgctgtgctaaggagcagggggccccttccatccgtagagggcagaaaggtgcctatcatgtcttcagt

SEQ ID NO: 166120 - DNA, 201 bp, Homo sapiens
cttctaagcacttcttaggtgcctctgggctttttaacattctttggcagttgtaatttattaattgatttttaaatttggccggtgaaaatgaactttargtaggggtttgaggaaaatgaaaaggcctatttgtttttcagtggctggttcttcgtgttcagcattaaggattggtagaaatcaggcaacctctatgta

SEQ ID NO: 166121 - DNA, 201 bp, Homo sapiens
agatcaggccactgcactccaatctgggtgacagagcaagactctgtctcaaaaataatagtaataataataataataataataataataataataataakaagaatctgactaaggttattaaccattaaggtatgctgtgctaaggagcagggggccccttccatccgtagagggcagaaaggtgcctatcatgtcttc

SEQ ID NO: 166122 - DNA, 201 bp, Homo sapiens
acctcctgggctcaagtgatcctcccatctctgcctcctgagtagctgggactacaggcttatgccaccacacctggctaattttttttttttttttttttaatgtagaggaagggcttcaccacgttgcccaggctagtctcgaattcctctgctcaggcgatcctcctgcctgggtctcccaaagtgctgggattacag

SEQ ID NO: 166123 - DNA, 201 bp, Homo sapiens
gacctcctgggctcaagtgatcctcccatctctgcctcctgagtagctgggactacaggcttatgccaccacacctggctaattttttttttttttttttttaatgtagaggaagggcttcaccacgttgcccaggctagtctcgaattcctctgctcaggcgatcctcctgcctgggtctcccaaagtgctgggattaca

SEQ ID NO: 166124 - DNA, 201 bp, Homo sapiens
aaaaaacaaacaaacaaacaaacaaaaaataggaaaaaaagaaagagcgtatttatagatggtagagaattctgggcatgagaaacccagccaaacaagtrgaatgtgtgcataggtgggactgctgatcttgttttatgaaagaaataaaggcaagtcaaacagatcctttcgcaaggatccccatgtgtgtatgtctaa

SEQ ID NO: 166125 - DNA, 201 bp, Homo sapiens
ggaatgccatagtggtgagctaagagcaggcagttagttaagtgtatgacaagtatctcattataaatggatgctgaaatgtccaagtgtggaaatgataygcttcagctcttatttttaagtcatccttatctctttcacttattccctcattcaggcaccaaaaatgctgtttgactgggagagcaagtggagctgttc

SEQ ID NO: 166126 - DNA, 201 bp, Homo sapiens
gtgtttttttttttttttttagatttctcattgctgagaacagttccagctctgctgaccaaaggctgagtgtccttttattagtctgagcccctagagaraccaaagaggcaaccctcgagccaactgacagccagctgtggggttggaccctgtttttcatacagtgagcactcttgaacccagagaaggtgcaggttg

SEQ ID NO: 166127 - DNA, 201 bp, Homo sapiens
caaagccagcaacagaaactctcttgtgcatggagtcccctcctgctttgaatctctctgactttccttgactttgatgtctaggtctggatttcaagggytcagaaactctctcatgcatgtagttccctcctgctttgaatctctctgactttccttgattttgatgtctaggtctggatttcaagggctcacgtgatg

SEQ ID NO: 166128 - DNA, 201 bp, Homo sapiens
atttatgacttggcttacaatccgttgcagaaagcctagctccccagcttctcctgaatctacgtttttctattttgtctgaactagccaaggtctctggwgtttgctgttatattgcttcagagaaattagtgacattgaaaggctgttgtcttttttagtgtacttttggttgttaggagaaatttacaaggccatttt

SEQ ID NO: 166129 - DNA, 201 bp, Homo sapiens
tcctcctcaagggaaacattcttctcacaatagcttcctggtagaaagttctaactaatgactttaatcgtgtgaatgtattgcagaaatggacaggacarttctcagcccattcatcttacagacctcaagtgaacaggcacaaaacaacaggctccaccctccttcccccctctatctcatactttacctcaatttatg

SEQ ID NO: 166130 - DNA, 201 bp, Homo sapiens
ctgtagtcacagctacttgggaggctgaggcaggcgaactgcttgaacctgggaggtggaggttgcagtgagctgagatggagccactgcactccagcctrggtcacagagggagactctgtctcaaaagaaaagaaaagtagagaggatagtataatgaggttcctgtctgccagtcactctatagtaactattaggaaa

SEQ ID NO: 166131 - DNA, 201 bp, Homo sapiens
gctctttttttctctctcactctgagtatttagaggcttttattgctatttttctaaaaggcaacattagtaatcaactttgccaaaaatttcatatgaayggtgggcttttctttctcatttgctttcgcttagtattttccattattcatttggcttcttgaaccctccctatctgtaccccacacttactcttattca

SEQ ID NO: 166132 - DNA, 201 bp, Homo sapiens
gaaaagattactgacgatcaacatgctgaactgacatttcacagatatgcagatttattcatctctgttcaaggtatgccttttccaatcataatagccaygtagaggacattaaacaaatattttattgtggtaaaaacacttaacatgagacctacccttttaacaaatttttaaatatataatttattattattgttg

SEQ ID NO: 166133 - DNA, 201 bp, Homo sapiens
ccagtcactctatagtaactattaggaaacccctttttttctctgaagtcattgctcctgtgtgtgtgtgtctgtatataaaaaaaagtatgtatacatayacgtatatgtatgtgtatagataaaaatgcatgtatggtgctgggcgcagtggctcacgcctgtaatcccagcactttgggaggctgaggcgggcgaatc

SEQ ID NO: 166134 - DNA, 201 bp, Homo sapiens
gtgtgtgtgtctgtatataaaaaaaagtatgtatacatatacgtatatgtatgtgtatagataaaaatgcatgtatggtgctgggcgcagtggctcacgcytgtaatcccagcactttgggaggctgaggcgggcgaatcacgaggtcaggagatcgagaccatcctggctaacacggtgaaaccgtgtctctactaaaag

SEQ ID NO: 166135 - DNA, 201 bp, Homo sapiens
tgctgggcgcagtggctcacgcctgtaatcccagcactttgggaggctgaggcgggcgaatcacgaggtcaggagatcgagaccatcctggctaacacggygaaaccgtgtctctactaaaagtacaaaaaattagcctggcgtggtggcgggcacctgtagtcccagctactcgggaggctgagaccgaagaattacttg

SEQ ID NO: 166136 - DNA, 201 bp, Homo sapiens
tggctaacacggtgaaaccgtgtctctactaaaagtacaaaaaattagcctggcgtggtggcgggcacctgtagtcccagctactcgggaggctgagaccsaagaattacttgatgaaacatggcagacgacatagaccagcagcaaactaccaacactgtggaggaccccctggatcttaggctcagcccagaggagcga

SEQ ID NO: 166137 - DNA, 201 bp, Homo sapiens
tgtccaagaagcatggtgccaatgtatttctgatgagggcgtcaggcagcttctactcatggtggaaagtgaaggggagccagcatgttcagagaacatayagggagaaagggagcaagagaggggaggggaggtgccagagcctttaaaagaaccaactctctgggaacaaatagagggagaacattaatctagccatga

SEQ ID NO: 166138 - DNA, 201 bp, Homo sapiens
tgactttaacattattttcagatagggagcactcagtaccaaccattatattaggctcatgggctcaacattttgctgtgcttttcatagatactgacacytgtgttttcattttgttgttgttgttgttttccctgccgggaaactgccgcatcctgtgttttcatggcatgatattaaggaacgatgggtaggatgctg

SEQ ID NO: 166139 - DNA, 201 bp, Homo sapiens
tgtagtcccagctactcgggaggctgagaccgaagaattacttgatgaaacatggcagacgacatagaccagcagcaaactaccaacactgtggaggaccycctggatcttaggctcagcccagaggagcgaatttgtgtgaaaatgagaaacgaccgagagcttcgaggcagattacatacttatgatcaacatttaaat

SEQ ID NO: 166140 - DNA, 201 bp, Homo sapiens
cttaacttctttaaacctcagtttcttcatctgtaaaatgcacatcataatatctctattcagagatacaggtggttctattaaacacatcaactctgtgkatataaagtcttaacccattgtggaataaattaagtgctcaattaaatgttagctgctgctattaataacaacaataataatattttcttcacgcatgaa

SEQ ID NO: 166141 - DNA, 201 bp, Homo sapiens
tactatagaaattgatgaggaaacatatgaagagacatatgaatcaacaaaacagaatattccagtgttctttctccggggagatggcattttcctggttscccctccactgagagttggctgaaacaaagaatttgtcctgtatggaaaacaggagactttgtacagtggcctctctaaaggtgcaagatattcaaaaga

SEQ ID NO: 166142 - DNA, 201 bp, Homo sapiens
cactcacatatatatttctgtttgcggctcacacagacataaatatatatatatatatacaaacgtacatttctgcttgtagcttgcacatatatatatayacacacacacatacatgtagacacacacatttatacatatacatgtcaacacatacacatacatatttctgcttatggctcaggatacttctttttttgg

SEQ ID NO: 166143 - DNA, 201 bp, Homo sapiens
tttggttctttaacattctcttcttcactaaacccaaattaataattccttactattgtcattaaaagttctcactggatcattccatttatactcagagkaacaaagcaaacccaattatttgagagacactgaaatgaattttgagtctagaacagcatctgcaaactttgcaaaggttcacatgataaatattttctg

SEQ ID NO: 166144 - DNA, 201 bp, Homo sapiens
tacagatacacactcacatatatatttctgtttgcggctcacacagacataaatatatatatatatatacaaacgtacatttctgcttgtagcttgcacayatatatatacacacacacacatacatgtagacacacacatttatacatatacatgtcaacacatacacatacatatttctgcttatggctcaggatactt

SEQ ID NO: 166145 - DNA, 201 bp, Homo sapiens
atacagatacacactcacatatatatttctgtttgcggctcacacagacataaatatatatatatatatacaaacgtacatttctgcttgtagcttgcacmtatatatatacacacacacacatacatgtagacacacacatttatacatatacatgtcaacacatacacatacatatttctgcttatggctcaggatact

SEQ ID NO: 166146 - DNA, 201 bp, Homo sapiens
acaaaaagcagctttcgtttgcttaaaatttttgttctctgcctttatttttcaaaaatattttcactaggtatagaattctaagatgaaagttttatttkttttcagctgtggcttccatcattttcctgagaggtataactatcagtcttgtagctactggtctctaactacttctaaaactatctgcagtttttagca

SEQ ID NO: 166147 - DNA, 201 bp, Homo sapiens
tctggtaataaaaagtcctttgccgtgggttattttgtcaagtgagatagcaggacttaacaggtttgtttgggaaaataaaatttgatagaaaaacggcrtgcttttcccccacagatttcttggtagcatcattcaaaactacagtgagcagtatctttgcaggattttaatatttattcattattataaaggaaggaa

SEQ ID NO: 166148 - DNA, 201 bp, Homo sapiens
ctttggttctttaacattctcttcttcactaaacccaaattaataattccttactattgtcattaaaagttctcactggatcattccatttatactcagartaacaaagcaaacccaattatttgagagacactgaaatgaattttgagtctagaacagcatctgcaaactttgcaaaggttcacatgataaatattttct

SEQ ID NO: 166149 - DNA, 201 bp, Homo sapiens
tctttatttcaaaaagagtggctgtgaatctttaaaaatttctttggttctttaacattctcttcttcactaaacccaaattaataattccttactattgkcattaaaagttctcactggatcattccatttatactcagagtaacaaagcaaacccaattatttgagagacactgaaatgaattttgagtctagaacagc

SEQ ID NO: 166150 - DNA, 201 bp, Homo sapiens
aattccagttctctcatattaagtgacaagttgcagaatgcccctgtctttctgagctgtttttatatctgtacaatggggttaatactactagtatttgmttccagggattgttttggaggggagtgaggaataaatgatataattcactaaaacacgtagaatagtatttgacacagagtaggtcagcatgcccaaagt

SEQ ID NO: 166151 - DNA, 201 bp, Homo sapiens
cgtagtactgatgtggatatgatttgagctaagactctgctgttgattctcttcaaaaacttggcagtagcccttggatcccattaattgcattcaacagkcatgtattttattaatttttgttcctaaagaaaaaaaaaaatccagattgcttagaaaataaatgtgactcacgcagagcagaatccgaattttctaagt

SEQ ID NO: 166152 - DNA, 201 bp, Homo sapiens
caaaccaccaaacctgggttggcgtttcagtgcctgacacagttgtattcctaagacatagttgggaccagacctcaagaaaatagccaacaaatactggstgaatgaacgaaagaggccatatgcagtcagcccccctctctctgggttctacatatgtagatttaactaatgacagattaaaagcattcgaacaaacgg

SEQ ID NO: 166153 - DNA, 201 bp, Homo sapiens
atgaaaggaccagaatggcagttctgagctagaatgtgatgagtaagtaccaccatagttagcggctagggaagggaggttgttctacagagaaacatgcycatcatttcttctgttacctggtattcactctggcaatttctttttggactcattctaaaatcaggattaaggatatccactgagaagcttgcatttatt

SEQ ID NO: 166154 - DNA, 201 bp, Homo sapiens
ctcatttctgggggactaattaaatgcatcctgtgtgaccccactggaagaggacatttggaatcttgtacctggttttctccagacttcgcctcattcascatttccctgtgctcattttgccttgcatccttttgctgtgataaatctcagccatgagtgtgaccgtatgctgagtcttatgagtcttccttgcaaacc

SEQ ID NO: 166155 - DNA, 201 bp, Homo sapiens
agaaatagaaaattaattgagttttagtttttagaaaattatctaagaagtagatttttagaaatagaaaattaacgtagatcacagaaaattatccaaastcagttaattttcccttttccagcaactgtatttgtcctccccacttctcttccctgccttctttttttctccttagcacttacaatgtctcactcatgt

SEQ ID NO: 166156 - DNA, 201 bp, Homo sapiens
agacagtgttagtcaacatcaaatgtctggatcaagagaggcaagaatcccgtggatttggcgttggccagaacttgtctggaatcttgttttctgccttsagtgtcacctgttgagagctctgttgacaaactggcatttgtccttgggagagtagcctcaggaccaggggtgaagagttcagtaaactgtgtttaaccc

SEQ ID NO: 166157 - DNA, 201 bp, Homo sapiens
tttgttttaaataaaaatcatactagagcagtaggcagtgtgggtgagttctcccactttacattttactttgcataatttaggcccctttcaggccactyttccccctgtgccccaggtgtgtttgctaccatacctccccaggggatagccctccaaacctgattggccacctagtctggtcttaaagtcccaaaggga

SEQ ID NO: 166158 - DNA, 201 bp, Homo sapiens
tcataccactggattagtctcttgcctttcaattttatgtttatatacaaatatatgtgcataccaaattttatatatatatatatatatatatatatatwtttttttttttttttttttttttttttggtcggagtctcaccctttcacccaggctggagtgcagtggcgcaatctcggctcactgcaagctccgcctcc

SEQ ID NO: 166159 - DNA, 201 bp, Homo sapiens
tgttgatgcttttttgcctttttgacaattaaaaataatctcataccactggattagtctcttgcctttcaattttatgtttatatacaaatatatgtgcmtaccaaattttatatatatatatatatatatatatatatatttttttttttttttttttttttttttggtcggagtctcaccctttcacccaggctggag

SEQ ID NO: 166160 - DNA, 201 bp, Homo sapiens
ggtgtaaattagtcaccagtgtctcatagggttgggctgaaacttaacacatcccatcactttgattggctaaagtcagttacataaccaagcccagcttyagaagggaaattgtatgccttacaaggaggtgagaggatggaaaatgaatatttgctgaacagactttctgtccagtttgttgtatttggtggtggtgca

SEQ ID NO: 166161 - DNA, 201 bp, Homo sapiens
gaaaattcaaaaaattgcaacctgaggcataaatgggttttaagctccatacagtaaaacctagcatatgaaaacagttctggctgatgggttggtagaartgatagatatagatacatatatacacatatatgcacagtaatagatataggtaaagaccttgatatatgtacatatattgtatgatacatatccatgcat

SEQ ID NO: 166162 - DNA, 201 bp, Homo sapiens
cagaactcacaaaatgtccagctttctttcttttattcaaaatttatacttcataattgaagttcacctcccaaaagacatagcttggtttagcatagagytatgatgtgttttctctttgttccttttgcacactttccttgtctggaggcgttgggcttggatccttcattcttcatgaggctgatgtttttccatttc

SEQ ID NO: 166163 - DNA, 201 bp, Homo sapiens
tatatcctaccgctcaaagccatcaccaaggtctgatcgtgaaaattcaaaaaattgcaacctgaggcataaatgggttttaagctccatacagtaaaacytagcatatgaaaacagttctggctgatgggttggtagaagtgatagatatagatacatatatacacatatatgcacagtaatagatataggtaaagacct

SEQ ID NO: 166164 - DNA, 201 bp, Homo sapiens
ttacaccctgtgatttgaattttccatactccattccattctatatgtcagatgcatcttcctaaaacacacctttgtcacatcactcctctgctcaaaarcattcagtggctccctgggccctctgggactaagtttataatgctcagcttgtcattcctttgcccagtgtactctctgtctcactaatttgttcattat

SEQ ID NO: 166165 - DNA, 201 bp, Homo sapiens
gatattttctactatggatgaatgctcctcttttgaattttcatttttgtctgacataactcaaagtgcttgctttgggagttcttgttaaccctgacaawtcttgtcaaatatcttactcctgggctgtgctggggatggcagcagagtggggtggttggatgggaaggcgggaaagagctagcttggagatgatacgct

SEQ ID NO: 166166 - DNA, 201 bp, Homo sapiens
aaaaagcttccaactttttttttttttttttttgagttggagtcgcactctttcacccaggctggagtgcagtggcccgatcctgggtcactgcaacctcygcctcctggattcaagcgagtttcctgccttagcctcccgagtagctgggattacaggcacccgccgccacacccagctgatttttgtattttagtagag

SEQ ID NO: 166167 - DNA, 201 bp, Homo sapiens
tcatcctctgaaaaactcttctgaacaacatcggctgtgcatagtaactgccttgagtggggccattttagaaaatatatgaggtacgggatgaagatgasggaggaaaatggttcctacttatcattactttgtccctccaaaagcctgcatgcgggaagaaaaatccacccagtgcaagaaccgtggcagtactcagac

SEQ ID NO: 166168 - DNA, 201 bp, Homo sapiens
ctgggtgggtggaggttcagggatatctgggaaggactaagaatagctttttcttttagtagatcaggagtttcctcttacacacaaaaagctccaaattyaaactagcttaagaggaaagggtcattactggctgacaaaatgcgaagttttgtgcaagagtcagcaaagtttctctgtgatgggatatttaataaatat

SEQ ID NO: 166169 - DNA, 201 bp, Homo sapiens
gctgggaagtccaagatcaagctgctggcagattgagtgtttggcaacggcccactttctggttcctagatgttcacctccttgctatgtcctcatatcgkgggaggggcaaagggtctctctatctggcctcttttaagcccttaacccattcatgaaggctttgcctcaatgacctaatcacctcccaaaggccctacc

SEQ ID NO: 166170 - DNA, 201 bp, Homo sapiens
gggtgagatgaacattgattgagcctttacatcggagacactataacaaatgctttgtgtacatcagctctttcaaattaatacaattctactagaggggrcactattagtatccccaatttacagatgaaaaaaatgagggacagagaggttagatgtgtatctaaggtcacatagctcacaaacgacacagcatgcacc

SEQ ID NO: 166171 - DNA, 201 bp, Homo sapiens
aagaacatcatggcccccttcatatcctggttaatgtccccgctgaccctgagttctgcctccatcactggaacaagagcctgtctttgggaagaggtgtsttccctggcactcgtttgatttgtagccgccacacatggcaggtcccaagctgtctgaagtcttggctgccattcctaagctactaaaactttgctggag

SEQ ID NO: 166172 - DNA, 201 bp, Homo sapiens
gatttggacggtttgctttagagtgcattaacttctttatcacattaatactgactcatatcttatttcccacttgcaataagaaaaccattcaaatcttkccctcacaggacaatatctttaatagcttctgtgtgtttcctatttttggctgtttctgtataaacagactaatctaatagcatactgaacccatctaac

SEQ ID NO: 166173 - DNA, 201 bp, Homo sapiens
atctcttttcacgctgttgcattgaggagaggaaaaaatcccttaaatttgaattccatgtggatgctcttatttaatatgccgtttcaaagcctgtatgygatcaagccagagtattatcaggctctgagttcctgtgtgtattcccttggtccatgctccatctcaagtgtttctccacactgggataggcagcatatt

SEQ ID NO: 166174 - DNA, 201 bp, Homo sapiens
tttagtgagctctgctggcaagtgtgtcaaatttataaatatcactactataaagacatacttttggatatggatttcttcctcagtttatttcttctttsattttttcatgtccaggtcactacgtattgcgtatatttggttggaattttatttttgagcaattcatttacccagattgtgtttctggagattaaagca

SEQ ID NO: 166175 - DNA, 201 bp, Homo sapiens
cagtaagtattcttggggcaaatgggaaaagggttaaaatgaccagatctccagagatctcactcactgtggtgaagacagcgccaagccatgagggctcygccccagtgattcaaatacctcccattacggacatgtttcaacatgagatttgagcggggacaaatatccaaactatatcaggatcccagcagactgggt

SEQ ID NO: 166176 - DNA, 201 bp, Homo sapiens
gaaaacggagattgaatctggaaaacgcattcatctttagaggcagtgttaatgaatacatgaatttagtcctgtaaatgttttctcccttatttgggacwtggtgtattgaaggtgtctgttaactgtgctaccaatgagtgcccctgtatccgagggaaactggagaagtgtacttgggctaccgggttaccaagagca

SEQ ID NO: 166177 - DNA, 201 bp, Homo sapiens
gatttcataagaaatccacatctgagagtcccagaaggtaagatattcccctttcttctaaatatacttgaccaccaccattcaggttcttctattaaccytcctatatttgccaaccctcaacctgttagaaacaagaaatgggactctggagtagatgttagcaacatcatgagctcaaacccctccagcttacagcgg

SEQ ID NO: 166178 - DNA, 201 bp, Homo sapiens
tacctgaactgtctcttaaaaggctctgtctccaaacacagtcacattgtgaggtactgggggtttgggcttccacatacaaagtctgggacacagtacgytctcataagagacctcttctcaacaggatccatgtttgatccgggggaataaagctagagttgctttcttccttgtaatatgtataatgactcatgagag

SEQ ID NO: 166179 - DNA, 201 bp, Homo sapiens
gagttgtcaggattctcgtaaaattcctgggtgatggcttcttctgttctctttatttccttaactgaacatctgtctaattgttcacctccatcgctttmgtgctttcctcatgctttctctctttccagacaataaactttattttcttcataagaattcagtctacgcaagggtattaggcagcttgtttgcaccttt

SEQ ID NO: 166180 - DNA, 201 bp, Homo sapiens
aggaatgtagttcctcacagttctggaggttgggagtcctagatcaaggtgtcagcagggttggtttctctctgtaccattgtccctggcttggagatgaycatcttctctgtcttcacatggtcttccctctgtgtgcgtttgcatccttatggcctcttcttgtgagggcactggtcatattggattagggtccaccat

SEQ ID NO: 166181 - DNA, 201 bp, Homo sapiens
atgttgcctccagcatcccaggaactccgttaatgtttatttgaatgatggaatgaaggtgtcttgctatattttgacatttctgtcaaaatatgaatctrtctttgcctagcatcttttcatgtgcacattgcccatctttataacaaagtgtgagtgggaaaggacttttaatcttcattatattatcattcatatgaa

SEQ ID NO: 166182 - DNA, 201 bp, Homo sapiens
tagcttatagtttattttattctttaatgattttttaaaaatatttctctcacttacttgaaaagcagtcttagaaattaactggaatgggtaatttattygtctttcttcttttgtaaaataatggcagtttgtaactcagatttttgtatgaggaataaataaaatactgtctgttttcctttgatctttctatttgtg

SEQ ID NO: 166183 - DNA, 201 bp, Homo sapiens
tattccagtgggccccgctgcattcttcccagtcccaggaaatctttgtgcatggctgtcttttctgtgccatcttgggcatctcacgcattggccctatmcacatgttgcctccagcatcccaggaactccgttaatgtttatttgaatgatggaatgaaggtgtcttgctatattttgacatttctgtcaaaatatgaa

SEQ ID NO: 166184 - DNA, 201 bp, Homo sapiens
ttttttgttagtttttgagacagagtctcggtctcttgcccaggctggaatgcagtggcacgatgttggctcactgcaaaccctgcctcccaggttcaagygattctcctctcccagcctcccgagtctctgggattacagacgtgcatcaccaggcccagctaatttttatatttttactcgagacgtagtttcaccatg

SEQ ID NO: 166185 - DNA, 201 bp, Homo sapiens
tttaacaagagacacatgtcagatagtagacatgatctgagaagacacaaaacccagcgtggtgattttggcagccttgccatgcatctctaacatgcacrtggccagaaaaatagcttggacattctgttcaaccctccacatcaactggtcagtttagtctttaaaaggtgataggcctgttgtggtggctcacgcctg

SEQ ID NO: 166186 - DNA, 201 bp, Homo sapiens
catgaatcgctgtgcctggcctcaactttaaatttttatattgaataatctttgatttgtattgtcatgttgttttatagcagttactgctgttttagtgkgatttgggatgaaaattttaaaaaatcaatatgtataatccaccatctttgttccttttatttttatgttactcattcttttaagcttgtcttagacgtg

SEQ ID NO: 166187 - DNA, 201 bp, Homo sapiens
gataccaataattaatatctatggttgattgtaaaaatggccaccaattcttccctgtcccctgcatatgtacatccttgcactgtgaaattgtagatctygccctccaaaggtgaagttcgtttgtccactccttgaaccaggatggcatgaaacttgatttgaccaatgaggcatttggaaacacggcacaagcaaagg

SEQ ID NO: 166188 - DNA, 201 bp, Homo sapiens
aaagtccgcacttcctaatgttaccactctggaggttagaatttcaacatataaattttggggggacacattcagaccacaataatgttttataatgttcmttttgctttaacaagagacacatgtcagatagtagacatgatctgagaagacacaaaacccagcgtggtgattttggcagccttgccatgcatctctaac

SEQ ID NO: 166189 - DNA, 201 bp, Homo sapiens
tgcaaagacaggcgctgctctctggcagggacagcgtgtagggtttgcatgatttgtggggccgtttcatgtttgcacggtttggcttggcttgggactckgccagtggtcactgcagtttaacaaactccccccgggtgtgaaggaaagcgagataaatgcaggaaaaaggatacattttgaaatctggaaattttacat

SEQ ID NO: 166190 - DNA, 201 bp, Homo sapiens
aggtagatttttagaaccaaatgccttttaggaagctacctctcttccaccctgctgcctttgtgttgaataaactatattaaattatccaggaggaatgrttagtgatctgattcattaatatcccttgttattaagaactgtctgtatttgtgtcctggttggcagatattaagtccacagataccaataattaatatc

SEQ ID NO: 166191 - DNA, 201 bp, Homo sapiens
ctgggcaaggaaacaaaactgaacaacattagcaaaatcactacatattataggaatcaagtacattctgaacggcttaatcctacagtttagatatgaascctaagggtaagatgaacgtcttagatgatctgagatatccaaatacctgtaacaaacatttgtatggtgtatgtagggcaggaaccccatcagaattgg

SEQ ID NO: 166192 - DNA, 201 bp, Homo sapiens
catttgcaaaacactttgacaatactttcctttcagtctattttcctgtgtatggggtaagtgttgcccttctgcaactttccttttattttatttatttmtttcttttcaatactctgaatatcactggagcagctgcagattcagggcagtatggggtggttcaggaacagaactgacaggtattgaagccaaaaattg

SEQ ID NO: 166193 - DNA, 201 bp, Homo sapiens
catgctatctcgacttctgtgtgtctcctttttgtccatctcttaaatcagtcacttggcagcagcaagacatgtggccactccagaccatttgatcgaaragctcttgttaggagattaggctgctaatctgcaagcgagctaatggaaatcattctgggcaaggaaacaaaactgaacaacattagcaaaatcactaca

SEQ ID NO: 166194 - DNA, 201 bp, Homo sapiens
tttatattgctgaaaatgtcatttgcaaaacactttgacaatactttcctttcagtctattttcctgtgtatggggtaagtgttgcccttctgcaactttmcttttattttatttatttatttcttttcaatactctgaatatcactggagcagctgcagattcagggcagtatggggtggttcaggaacagaactgacag

SEQ ID NO: 166195 - DNA, 201 bp, Homo sapiens
gaccattaatcatgctatctcgacttctgtgtgtctcctttttgtccatctcttaaatcagtcacttggcagcagcaagacatgtggccactccagaccawttgatcgaagagctcttgttaggagattaggctgctaatctgcaagcgagctaatggaaatcattctgggcaaggaaacaaaactgaacaacattagcaa

SEQ ID NO: 166196 - DNA, 201 bp, Homo sapiens
ggcggtgcatgcctgtaatcccagctacttgggaggctgaggcaggagaatcccttgaacctgggaggtggaggttgcagtgagctgagatcacgccattrtactccagtctaggcaacaagagtgaaactctgtctcaaaaaaattaataataataatgttacaataataataatgttagtgatacatatcattttgaaa

SEQ ID NO: 166197 - DNA, 201 bp, Homo sapiens
atagttctctctgtgaccctgtagaatgcactgaagcaaaaataacaggtaatgctaatcataaagttttacaaatctcctgaagagtcttgttggtttcygtgttgatgaagcaggaaatttccctgacccctttgcaggcaggaagtggagtgcggatgctggaactagctggctgctttggtgccagtagaggtgaac

SEQ ID NO: 166198 - DNA, 201 bp, Homo sapiens
agagaaaaacaattacactagctgctggtctgtatttactggttagaatagaatattattaccatcaagaataacattagtggccaggtgcggtggctcaygcctgtaatcccagcactttgggaggccgaggtgggtggatcacctgaggtcaggagttcaaaaccagcctggccaacatggtgaaacccccgtctctac

SEQ ID NO: 166199 - DNA, 201 bp, Homo sapiens
acctggctaatttttgtattttttgtagaggtggagtttcgccatgttggccaggctggtcttgaattcctgacttcaagtgatgagactgcctcagccasccaaagtgctgggattacaggcatgagccatcgcgcccagccagacttgtatctcttaatgagtttaactacatttaaccatgtatgtgtcagtcctact

SEQ ID NO: 166200 - DNA, 201 bp, Homo sapiens
ctgcaaactacccccgcccccgggttcaagcaattgtcgcacctcagcctcccaagtaactgggattacaggtgcccaccaccaagcccggctaatttttstattttcaatagagatgaggttttgccatattggtcaggctggtcttgaactcttgacctcaggtgattcacccacctcagcctcccaaagtgcagggat

SEQ ID NO: 166201 - DNA, 201 bp, Homo sapiens
acatggtgaaaccccatctctactaacaatacaaaattagctgggtgtggtgatgcacacctgtaatccctgctacacaggaagctgaggcaggagaatcrcttgaacccaggaggtgaggttgtggtgagccgagatcatgccattgcactccagcctgggcaaaaagagcggggtaaaaaaacaacaaaaaaatgatgt

SEQ ID NO: 166202 - DNA, 201 bp, Homo sapiens
ggggttgggggagggagagcatcaggaagaatagctaatggatgttgggcttaatacctaggcgatgggttgataggtgcagcaaaccaccatggcacagrtttacctatgtaacaaacctgcacatcctgcacatgtaccctggaacttaaatttttttaaaaaatgtttttattgtgattttcacaggaaagaaggggc

SEQ ID NO: 166203 - DNA, 201 bp, Homo sapiens
gagggtggcagtgatcttgaggggggtctgggagggaggagccagcctggcctggtctggcctggcccagtgtgccagctagggcaggtgcaatggctcaygcctataatcccagcactttgggaggccgaggcaggtggatcacctgaggtcaggagttcaagaccagcctgaccaacatggtgaaaccccatctctact

SEQ ID NO: 166204 - DNA, 201 bp, Homo sapiens
aggcggagcttgcagtgagccgagagcccgccactgtactccagcctgggcgacagagcgagactccgtctcaaaaaaaaaaaaaaaaaaaaaaaaaaaaagacacgtacacagacaaatgttctgacagaaatacactgagatatctacagtgcttgtctctggataggatagggtataatttaattgtttatagttaag

SEQ ID NO: 166205 - DNA, 201 bp, Homo sapiens
cctgcttaggaaatttgggttgagggtggcagtgatcttgaggggggtctgggagggaggagccagcctggcctggtctggcctggcccagtgtgccagckagggcaggtgcaatggctcacgcctataatcccagcactttgggaggccgaggcaggtggatcacctgaggtcaggagttcaagaccagcctgaccaaca

SEQ ID NO: 166206 - DNA, 201 bp, Homo sapiens
gtggcgggcacctgtagtcccagctacttgggaggctgaggcaggagaatggcgtgaacccgggaggcggagcttgcagtgagccgagagcccgccactgyactccagcctgggcgacagagcgagactccgtctcaaaaaaaaaaaaaaaaaaaaaaaaaaaaagacacgtacacagacaaatgttctgacagaaataca

SEQ ID NO: 166207 - DNA, 201 bp, Homo sapiens
gttgacctggaatgacctagaccagcagtcacaagctcctgcccatggacaaaatacagccggtacctctttggctatggcctgcaggctcagaatagttyttacattttcaatcatctgcaaaaaagaataaagaggagaatattatttcttgaaggaggaaaatgatatggaattctgatttcagtgtcataaagtttt

SEQ ID NO: 166208 - DNA, 201 bp, Homo sapiens
taagatttacagatattaacgactccttgggaaaactggacttcagtcgcctctctccaacaaaaaacgactattgggcgatgctggcttataacaggtcsaagctctgcaacatcctcttctccaacgagctgcaccgtcgcctctccccacgcggggtcacgtcgaacgcagtgcatcctggaaatatgatgtactcca

SEQ ID NO: 166209 - DNA, 201 bp, Homo sapiens
cataccatatgctgaaagacttggaatgcaaaaacctaaggccaagggcacttctcaatattaaaccctcagttgtaatggaggcatcaagactataagayccaagaccttaacttttgtgctccttgtcttgtggagggaacatccatcctcaaaacagaaacctgtgagatcccttgaatatactgacaatacactgat

SEQ ID NO: 166210 - DNA, 201 bp, Homo sapiens
ttagaagaaaaccagaggtctgtgcacactatggatttttactacaatgatgccctttcacatacagcgagaaggattaagaggtactgtattgttggttrataaagtcaaacttgtgaacagagcaaaagggcattgcttggtcattgcagcttccacccatgcaccttacacagaagtttgggccctaacatggaaact

SEQ ID NO: 166211 - DNA, 201 bp, Homo sapiens
ctctagagtggcaggcgaactctgattttgaggaaaaaggatagggtaatggtgttgacacaggcactgttgaatacgtatgtacatattttaatagtttkctcattaatcaaatggaaatgctatcgattttataggatcgttgtgagaagaagtgagaattgaaatgaaaggcatctagtcttccccggtccccatcca

SEQ ID NO: 166212 - DNA, 201 bp, Homo sapiens
tgggaatctcaagttcccaggagccaaccacaagagcttcacagctcagaattttcaagatgtggatgtaggcagggagcctatgtagtaattcaagtaarcatctcttcttcttgttttccttataggatgatagaaggtcagtgcttgttcaccccagtgaggtggagcctctgaggtgggaggttttctctcatcctt

SEQ ID NO: 166213 - DNA, 201 bp, Homo sapiens
ggaagccttcactctcatgacataattacctcccaaagtccgcacttcctaatgttaccactctggaggttagaatttcaacatataaattttggggggasacattcagaccacaataatgttttataatgttcattttgctttaacaagagacacatgtcagatagtagacatgatctgagaagacacaaaacccagcgt

SEQ ID NO: 166214 - DNA, 201 bp, Homo sapiens
cattgttacatcctacaagcgtgcttacctgcatcaccttgctgggctgtttcagcattggaatatcactgggaatctcaagttcccaggagccaaccacragagcttcacagctcagaattttcaagatgtggatgtaggcagggagcctatgtagtaattcaagtaaacatctcttcttcttgttttccttataggatg

SEQ ID NO: 166215 - DNA, 201 bp, Homo sapiens
tggtgcccatcaccccgatcacatgaacgtctatgcccaggtcccatttcctgacattcccaacatctctaccttctccgggcctagggcagggatcactstttcagaaacatgagcgtatggaagccccagtgtgttccttgaagtcccgatgcgtgatttgtccccatgctgtgtcgcacttggtcatctggaccctgg

SEQ ID NO: 166216 - DNA, 201 bp, Homo sapiens
tgtcgggccatttgttttttaacgaattgccctttcatcttatatgcatgactattggatatgtatcgattactaattgattgcttgcctcatgtgctatmatttaattttcaaaatgtcccttagaagttaatttataaagtgtctattactttaagtacctgttcaatcctgtgatcaagaggaaattcacagagaaag

SEQ ID NO: 166217 - DNA, 201 bp, Homo sapiens
aaagaggtgtaaatggacaagaatgaaaagcaattgcaagggcccttgaaggtttgtgaaggatggcaaagtgacttggatgttgatttctaaaggaggtraaacttgaaggtagacaagctctttgtgtccatacatttgatgggtcatcctatgaaggagggcccatctcttacggcaggcagcgtggcgtaggcctca

SEQ ID NO: 166218 - DNA, 201 bp, Homo sapiens
cagcacagtgaggaggtattctttggagagcactgtttcccaagagtgattctaacaaagaggtgtaaatggacaagaatgaaaagcaattgcaagggccyttgaaggtttgtgaaggatggcaaagtgacttggatgttgatttctaaaggaggtaaaacttgaaggtagacaagctctttgtgtccatacatttgatgg

SEQ ID NO: 166219 - DNA, 201 bp, Homo sapiens
gtcaggagatcgagaccatcccggctaaaacggtgaaaccccgtctctactaaaaatacaaaaaattagccgggcgtagtggcgggcacctgtagtcccarctacttgggaggctgaggcaggagaatggcgtgaacccgggaggcggagcttgcagtgagccgagagcccgccactgtactccagcctgggcgacagagc

SEQ ID NO: 166220 - DNA, 201 bp, Homo sapiens
cctagagcaggttgggcaagaggcttttctctcagtcaccagccccaaaccctgtggtcttgccagcccaggacgtgtcaagactgcagcctttgctgacytgtgaccatctccaagtccatgcccaggcccctactaggagttgagggcaacaggggcagtgggtctctcctgcttaggaaatttgggttgagggtggca

SEQ ID NO: 166221 - DNA, 201 bp, Homo sapiens
gtttttagacagaatatcacttttttatattattcatggtaatgtaattcccccctttaatctcttcagggtttcccattcagtcatgatatgcggttcaragaaagttggatcgaccattaatcatgctatctcgacttctgtgtgtctcctttttgtccatctcttaaatcagtcacttggcagcagcaagacatgtgg

SEQ ID NO: 166222 - DNA, 201 bp, Homo sapiens
acgaggtcaggagatcgagaccatcccggctaaaacggtgaaaccccgtctctactaaaaatacaaaaaattagccgggcgtagtggcgggcacctgtagkcccagctacttgggaggctgaggcaggagaatggcgtgaacccgggaggcggagcttgcagtgagccgagagcccgccactgtactccagcctgggcgac

SEQ ID NO: 166223 - DNA, 201 bp, Homo sapiens
agaagatccattgcaaaatgaaaatatggggttctagccaggggcagggaacttaatctcccttttccatgggcccaacacctgaatctagggcaaacagstgtcccccagattggatcctctgctctaggacacattcttgtcctagagcaggttgggcaagaggcttttctctcagtcaccagccccaaaccctgtggt

SEQ ID NO: 166224 - DNA, 201 bp, Homo sapiens
ggagggacaatagaacctctgtagaatcaaaggcagaattaaaatctgcatgttaatagctttcctgccagccacgaatagattcattcttcacgtctcaratatataaagcttatttcaaaataaattctggggagcgttcaacctgattgaatctgctgtaagctctgttaatatatttgttcgagtcacttgcactca

SEQ ID NO: 166225 - DNA, 201 bp, Homo sapiens
agcaatttacaaaattgcacatactctataaatacacttctgttataaaaatagacacgtacggccgggcgcggtggctcacgcctgtaatcccagcactytgggaggccgaggcgggcggatcacgaggtcaggagatcgagaccatcccggctaaaacggtgaaaccccgtctctactaaaaatacaaaaaattagccg

SEQ ID NO: 166226 - DNA, 201 bp, Homo sapiens
gtgggcttagaagaaaaccagaggtctgtgcacactatggatttttactacaatgatgccctttcacatacagcgagaaggattaagaggtactgtattgktggttgataaagtcaaacttgtgaacagagcaaaagggcattgcttggtcattgcagcttccacccatgcaccttacacagaagtttgggccctaacatg

SEQ ID NO: 166227 - DNA, 201 bp, Homo sapiens
aatacaggcctttcccatttcacagtgtttctagctcccctttccaatacatctctctctctctttctctctctctctctctctctctcacacacacacacacacacacacacacacagccaaatcagacaccaacataaactgtagagttaacattctttttccaccctcacactttttttagctccgatctgtgttcaa

SEQ ID NO: 166228 - DNA, 201 bp, Homo sapiens
caggtttgtcccatttgtactgactctgacccaggttgtcatgacttgagactcactagaagtttcagaaagatgcagactgctttaaaaaaaaaaaaaaagggcaaggggaggtgtgagaagaaagtataattctttttcttctaactggagatataaaaatcatataagcatgatttatgatttgattggaacattgta

SEQ ID NO: 166229 - DNA, 201 bp, Homo sapiens
catgatctcggctcactgcaagctctgcctcctaggctcatgccattctcctccctcagcctcctgagtagctgggactgcaggcgccagccaccacgccyggctaattttttatatttttagtagagacggggtttcaccatgctaaccaggatggtctcgatctcctgacctcgtgatccaccagccttggcctcccaa

SEQ ID NO: 166230 - DNA, 201 bp, Homo sapiens
taaatacaggcctttcccatttcacagtgtttctagctcccctttccaatacatctctctctctctttctctctctctctctctctctctcacacacacacacacacacacacacacacagccaaatcagacaccaacataaactgtagagttaacattctttttccaccctcacactttttttagctccgatctgtgttc

SEQ ID NO: 166231 - DNA, 201 bp, Homo sapiens
tcttttttttttttttttttgaaatggagtcttgccctgtcccccaggctggtgtgcagtggcatgatctcggctcactgcaagctctgcctcctaggctyatgccattctcctccctcagcctcctgagtagctgggactgcaggcgccagccaccacgcccggctaattttttatatttttagtagagacggggtttca

SEQ ID NO: 166232 - DNA, 201 bp, Homo sapiens
aaaaccacacttacatttaaatacaggcctttcccatttcacagtgtttctagctcccctttccaatacatctctctctctctttctctctctctctctcwctctctcacacacacacacacacacacacacacacagccaaatcagacaccaacataaactgtagagttaacattctttttccaccctcacacttttttt

SEQ ID NO: 166233 - DNA, 201 bp, Homo sapiens
tttggcagttacctgaaagaaaatttagtgattgccagtccattctctagccttctgaagaagatagattgtaatctttaattaagctatcactcacaccmaaaaaaaaaaaaaaaaaaaaaaaaaagcggggcaaggggttggagaatgttcatatcacattattttggatgtctggggttgcacctggaagctcagata

SEQ ID NO: 166234 - DNA, 201 bp, Homo sapiens
tctaaaccaaaggacctaaataaaatattaatttttcatagtgtttaatatgtgccagtatatataaattcaaggtaaggtagacagctgtaaactggatsccctgctgtacccagcaaatgctgagagccctgcttcccctcttgtattcaaatggctctataagagaggaagtagtacagctatcagtaacaatgccat

SEQ ID NO: 166235 - DNA, 201 bp, Homo sapiens
cattgtcccccaccttattctaaataatgactttcttaaaactacatgttttgggggaatgtcctgcaatattgctttacatctttttatttttttatttyattttattttttttgagacagagtctctgtctccaggctggagtgcagtggcacaatctcagctcactgcaacctccacctcccgggttcaagcgattcc

SEQ ID NO: 166236 - DNA, 201 bp, Homo sapiens
gaattgtctttggctgcacataatatacaattgttgatgagctaaaaaaaaaaaaatccccaaaaaatctcataatgttttaagaaagtttatgaatttgkgttgggccagattcaaagttgtcctgggccgcatgtggcccaccagccatggtttggacaagcttagtctacaggttcttcaagaggggcttgagcattt

SEQ ID NO: 166237 - DNA, 201 bp, Homo sapiens
aggtcttgtgtacccaccgatcgcaattgagcatatagtacatgctgtcctgtgtacccactgatccctggtcctgcccctggtatgagggtattaacatyttgcattagtgtggcacatttgctacaattaataaaccaatatcgatacattattaactagtctatagtttacatgaggggctgctgcttgtgttgtaca

SEQ ID NO: 166238 - DNA, 201 bp, Homo sapiens
aagaattgtctttggctgcacataatatacaattgttgatgagctaaaaaaaaaaaaatccccaaaaaatctcataatgttttaagaaagtttatgaattkgtgttgggccagattcaaagttgtcctgggccgcatgtggcccaccagccatggtttggacaagcttagtctacaggttcttcaagaggggcttgagcat

SEQ ID NO: 166239 - DNA, 201 bp, Homo sapiens
gtctaatttatgtaaaataaattgcatccatttaaatatacaattcaatgagttttgacagatgcacatgcccatgaaaccaacacgaaaataaaaaaaawagaacatttacgtcacctcaaaaagatttcaaatgccacttctgtggtgtatgactctgagtccagacagcctcagctccaggaaaaccctggtctgttt

SEQ ID NO: 166240 - DNA, 201 bp, Homo sapiens
tttgatattttttaaaggaaaaatttgaggcattgacacatgccttttgcttacttgcttggattggtttgatcaactttgttgcggtctaatttatgtawaataaattgcatccatttaaatatacaattcaatgagttttgacagatgcacatgcccatgaaaccaacacgaaaataaaaaaaatagaacatttacgtc

SEQ ID NO: 166241 - DNA, 201 bp, Homo sapiens
ttgaaggaatgtttcacttccaaatccagatctctgacttcccttgaaaatttggagtgccactcaagtcggccgctctgagctagaatcctggtgttcaraattggcaggaagggcacaggggcaaggtataggctcacgtctccacattctgcacctcccaggctcctgccattgatgtgagcgggttcctgtactgca

SEQ ID NO: 166242 - DNA, 201 bp, Homo sapiens
ggatcttcaggtttggagggaggccgatagagagtgtctggagttgccaacgtcctctccttgggtcatgggtgtgtgtgtgtgtgttttcttcttgttgktgggtttttttttttttttttttttttttttggcttttgcgcctatggtgacttttagcgaatggatactattgaaggaatgtttcacttccaaatccag

SEQ ID NO: 166243 - DNA, 201 bp, Homo sapiens
aaaaaagtaaaataaagcatgggaagtcccttatacagtttgtgatatgggtacacactcagtgaaatggccattaatactgctgttcttaactctgaaarcagagtgggccatttgaatgctcactttgatattttttaaaggaaaaatttgaggcattgacacatgccttttgcttacttgcttggattggtttgatca

SEQ ID NO: 166244 - DNA, 201 bp, Homo sapiens
cccctgtgggcttagaagaaaaccagaggtctgtgcacactatggatttttactacaatgatgccctttcacatacagcgagaaggattaagaggtactgwattgttggttgataaagtcaaacttgtgaacagagcaaaagggcattgcttggtcattgcagcttccacccatgcaccttacacagaagtttgggcccta

SEQ ID NO: 166245 - DNA, 201 bp, Homo sapiens
aatggatcttcaggtttggagggaggccgatagagagtgtctggagttgccaacgtcctctccttgggtcatgggtgtgtgtgtgtgtgttttcttcttgktgttgggtttttttttttttttttttttttttttggcttttgcgcctatggtgacttttagcgaatggatactattgaaggaatgtttcacttccaaatc

SEQ ID NO: 166246 - DNA, 201 bp, Homo sapiens
gtgggaatgtctcatccccctgtgggcttagaagaaaaccagaggtctgtgcacactatggatttttactacaatgatgccctttcacatacagcgagaargattaagaggtactgtattgttggttgataaagtcaaacttgtgaacagagcaaaagggcattgcttggtcattgcagcttccacccatgcaccttacac

SEQ ID NO: 166247 - DNA, 201 bp, Homo sapiens
gacattagtcctataaccacaaggaaatgagttctgctagcaacctaagggagcttgaaggtgattgaccatccccagtcaagcctctgatgagaccgcasccccactaggcaactagatttcagcatggtaagaccctggatggagaacccagctcagccatgcccagactcctatcctatggaagctttaagataataa

SEQ ID NO: 166248 - DNA, 201 bp, Homo sapiens
ttaacagcaagatcttcagagctgcagctcacctgtgccacgatggtctcctaggagccctttcctgctgtagtcccgccccgaggggtttcacttcccaytgcctcttggtagccgtgggcactttggtgctctgatgatgtaacatggagattgtccttgtctccatcgctgtctttactggtgtatgcccatgaggta

SEQ ID NO: 166249 - DNA, 201 bp, Homo sapiens
aaatatttattttgagagcaagcacgggggtttatgtgatggctccacagagcagtgaaaagactcccgccctactgctcgcaacctcagatgtccctggscactagcccatctgtatgtctttaaaaaaaataaattaaatttttaaaaacatgactttctggccaggcgcagtggctcatgcctataaccctgcactta

SEQ ID NO: 166250 - DNA, 201 bp, Homo sapiens
aaccatttcacaaatatttattttgagagcaagcacgggggtttatgtgatggctccacagagcagtgaaaagactcccgccctactgctcgcaacctcaratgtccctgggcactagcccatctgtatgtctttaaaaaaaataaattaaatttttaaaaacatgactttctggccaggcgcagtggctcatgcctataa

SEQ ID NO: 166251 - DNA, 201 bp, Homo sapiens
tgtttgtaagaatcagttgaggacagatgggactatttgcatggattggtgtcatgtttgaagtcagttaccagagggtttctttcaacagagtatcccamaaaaaaaaaaaaaaaaaaaaaaaaaaaagtaaattgcacagaccccagcttaggacctggacttaatcttcatgatgtttgtaaagtaatacttcttgga

SEQ ID NO: 166252 - DNA, 201 bp, Homo sapiens
taataaacaaataagttttgggttgggcgggagattagttagagacaggatctgtaggtcagaagtggtatttgggggagtagggagttttttttttttttctttttcccttatgcatttgggagtggaagagctgtcagattctgaatttagttagatttataatgctagagacattcagcagtctgcctttccctttct

SEQ ID NO: 166253 - DNA, 201 bp, Homo sapiens
gactcatttaaccatttcacaaatatttattttgagagcaagcacgggggtttatgtgatggctccacagagcagtgaaaagactcccgccctactgctcscaacctcagatgtccctgggcactagcccatctgtatgtctttaaaaaaaataaattaaatttttaaaaacatgactttctggccaggcgcagtggctca

SEQ ID NO: 166254 - DNA, 201 bp, Homo sapiens
accagtccctagcctgtggagaaggggcaatctcttatctgaaggcctaggaggtgcagggatgtttatatgggctgctagcgcttagtttcctgccacarggagacagtaagaaaggtgacgtcaatctgagatgagagagagagcaaaacagttcttttgaccaccttgaccccgaccttgaaataaggtggaactaat

SEQ ID NO: 166255 - DNA, 201 bp, Homo sapiens
aaagtaaagtaataaacaaataagttttgggttgggcgggagattagttagagacaggatctgtaggtcagaagtggtatttgggggagtagggagttttktttttttttctttttcccttatgcatttgggagtggaagagctgtcagattctgaatttagttagatttataatgctagagacattcagcagtctgcctt

SEQ ID NO: 166256 - DNA, 201 bp, Homo sapiens
aaactcctgagggatgctcaggaaaccaaaaaggatgtctgcatggaggacaagaaggcacaaatcgtctgatttcaccccatcctaagatcttgtgactycagctttgttttggactggggcattggatctcccacatgccctctcttaagtcgtgcatttgacgcatatttaataagcacctactgtgtgccattagag

SEQ ID NO: 166257 - DNA, 201 bp, Homo sapiens
agcactttgggaggctgaggcaggtgaatcacttgaggtcaggagttcgagactagcctggccaacatggtgaaaccctgtctctactaaaaatacaaaawtttttttgtattttgggattcggtttaggtgatgtgtgtctgtaatcccagctacttgggaggctgagacaggagaatcacttgaactccagaggcagag

SEQ ID NO: 166258 - DNA, 201 bp, Homo sapiens
tccacaatgtccacataccagcttgatggtgacttgtgtcattctccatccccttgttaagagaaaatctactttatgagccctctttccaaccgcagtgwtgaggactagaccaggcaagatgatgccgctggaccactggatccagctggaccgctagaccacagagcccctggagcctcccaaggccaagcccgccag

SEQ ID NO: 166259 - DNA, 201 bp, Homo sapiens
ttagtttctcttacatgtatgaagttggatagttagaatgagatgaaaataaatgggctgggcgtggtggctcatgactgtaatcccagcactttgggagkctgaggcaggtgaatcacttgaggtcaggagttcgagactagcctggccaacatggtgaaaccctgtctctactaaaaatacaaaattttttttgtattt

SEQ ID NO: 166260 - DNA, 201 bp, Homo sapiens
gtttggtggaattaacatagatttcccacatggggaaggttttgggtgaggatttagaacaaggcaggttcttgatcctcggaagagattcttatctgagrggggatttgagaatggcattgcagagtgggaggcgctgctgtgtggaaaaatgaactggaataattattagaacagttctcagaatttacaggatatttg

SEQ ID NO: 166261 - DNA, 201 bp, Homo sapiens
acctcatagaagtgagccctcttactgaattatgtggctggggttcttgggtatgttttgttctattttctggttggtggttttctttctgtcgggtcccrtgggctctttttggacctcttctcagaatgtttttcgttttttttattttttgagatggagtcttgcactgtgtcctgggctggaatgcaatggcaagat

SEQ ID NO: 166262 - DNA, 201 bp, Homo sapiens
aggatatttgatcataggagtaactttcctcaggagtgatggatggaatgcctgtacttggaatatttttaaattaatctattttcattacattgaaagtrtgacacacagagaacactaaaattggatgaggcactacctggaattatataaagaatgacaaagatgcggttatccatttattttctaggcaagttagtt

SEQ ID NO: 166263 - DNA, 201 bp, Homo sapiens
cacacctgtaatccctgctacacaggaagctgaggcaggagaatcgcttgaacccaggaggtgaggttgtggtgagccgagatcatgccattgcactccarcctgggcaaaaagagcggggtaaaaaaacaacaaaaaaatgatgtaggaatgaacagatgaacaaccccacacaacctaaggacaactttgaatcaattc

SEQ ID NO: 166264 - DNA, 201 bp, Homo sapiens
gatcacatgaggtcaggaattcgagaccagtctggccaacatggcaaaactccgtctctactaaaaattcaaaaattaggcttggtggcacgtgcctgtartcccaagctactcaggaggctgaggcaggagaatcacttgaacccagtaggcggaggttgcagtgagccgagatcgcaccactgcactccagcctaggtg

SEQ ID NO: 166265 - DNA, 201 bp, Homo sapiens
atgctaaccaggatggtctcgatctcctgacctcgtgatccaccagccttggcctcccaaagtgctgggattacaggcattagccaccacacccggcccarattttcttataaagtcaaatgggagatacttgtttgcaagaaatagttcttttggttcttacttttccataaggattgagtctcaaaatgtctggtagca

SEQ ID NO: 166266 - DNA, 201 bp, Homo sapiens
gggcttagcttgggtatcatcgtggttattccaagcagtcttccagctggactagcttttcgggaacacgtgtgtgtttgtgctggaagccccagtaatatcatttaattcgaaagcttttttctatgatgaattattcaggcagtgtttaccaaaattgtcattgatcagtacagacccagagagcatgtacaacagcgc

SEQ ID NO: 166267 - DNA, 201 bp, Homo sapiens
ttgtcttctcctctgagcgggaactgggcaattggaggttctttcccctcccgtgctggtgggagaattgtttagtaggtcataaagtggaatctccattycagtctgatccggtcaattctggtaggacttcatccaagcacaaagaaacctttgttttcattcaagacttccctaaaaggtggctgggtgcggtgcctc

SEQ ID NO: 166268 - DNA, 201 bp, Homo sapiens
tttttttttttgaaatggagtcttgccctgtcccccaggctggtgtgcagtggcatgatctcggctcactgcaagctctgcctcctaggctcatgccattstcctccctcagcctcctgagtagctgggactgcaggcgccagccaccacgcccggctaattttttatatttttagtagagacggggtttcaccatgctaa

SEQ ID NO: 166269 - DNA, 201 bp, Homo sapiens
aaggctacagtgagctgtgatcctgtctctacacctcagtctgggtggcagagcaagaccctgtctcaaaaaaaaaaaaaaaaaaaaaaaagtaaaataawgcatgggaagtcccttatacagtttgtgatatgggtacacactcagtgaaatggccattaatactgctgttcttaactctgaaagcagagtgggccattt

SEQ ID NO: 166270 - DNA, 201 bp, Homo sapiens
tggtttactactccttagacggtggcccagagaccctttaaatgaaattcattttactagcaccctttttcatcatgagaaatatattctgtttttcttaraaaatgggttatgttaggtctggtcaaggtaaataagtgttgagagtcgatgttgtgtgcatagttaatttcaattctttgaagaagctcccccatgata

SEQ ID NO: 166271 - DNA, 201 bp, Homo sapiens
ggaggagactttgactctagatgacatgatgtaccctgtgttctgcaagctggagaacatcatgtagaatctgaaaattaggagagagaggcaatcagaaraagacagagtggtgttgcagggacctgcagtcagcctagtcccccagtttgcgtttgaatttggtcccagattttttttgtttttgttttttagtagtta

SEQ ID NO: 166272 - DNA, 201 bp, Homo sapiens
ggtgccattttcctgactgtagatacttgggtaaggaggagactttgactctagatgacatgatgtaccctgtgttctgcaagctggagaacatcatgtaraatctgaaaattaggagagagaggcaatcagaagaagacagagtggtgttgcagggacctgcagtcagcctagtcccccagtttgcgtttgaatttggtc

SEQ ID NO: 166273 - DNA, 201 bp, Homo sapiens
tttcaccatgttggtcaggctggtcttgaacttctgacctcgtgatttgcctgcctcagcctcccaaagtgctgagattacaggcgtgagccgccatgccygcccttatttttatatatcttccataacctttctatctctttctttctctttctctgtttctgtgtgtgtctgtgtctgataataaaatacattaaattt

SEQ ID NO: 166274 - DNA, 201 bp, Homo sapiens
aaaaaaaatgttttctggtcaagtcacatgcctctgaggtttttttttttctttctttcttttctttttttttctttttcccagactcctcatacccctcytaggagacagtgattccctggcttcaccaggcaggctcttgggggcttcctggtccctgtcactcttaaaatgcagcctgtctttggacatctactccaa

SEQ ID NO: 166275 - DNA, 201 bp, Homo sapiens
ttaaacaattactgtatctgatttttcatttttcattttttttttttctggaagaaagagcagatctggataaagtcagtatacaatgtggtctttggtgmcagacccaagttcaagaccaaggtgtatgcatgggtttgttcaagttgtctacccttattatcccctcagtgaaacatgattaaccatgcttaccttgaa

SEQ ID NO: 166276 - DNA, 201 bp, Homo sapiens
tctcatgggcttgccttattttttcagggcatgctctgtctccatcccttggctctgctttccttacattggtcttcttgggcatccgtcttccattccayagtgtagcaagccagaagctgggggaaacatggtgcgtgcctgtaatctcagctactcgagaggctgaggcaggagaatcacttgaacccaggagatgga

SEQ ID NO: 166277 - DNA, 201 bp, Homo sapiens
taggacccatatccctggattgttgaggaaatacgtgaacatatgtggcacacattatagtgtctggcatacaataaatactttgtaatgttactggtgtyttcttaccgttattgtctcactggtgaccgtttgaaatgttgaagctttattattacagataatggtggatatagtctcttccttgtttattttttgaca

SEQ ID NO: 166278 - DNA, 201 bp, Homo sapiens
taagactggaatgtgggtgtgtgcactcctcatgttccggtttctgtgatcattcaggcatgcacaggtatcctgatgggtagccaggtcattaggcccaragtcggcagtgtagcatggcaagagaagtcattgcatctccaaactgtgcctaaattgcctgtaatgggttctttgcaacttgcagaaccagatcttacc

SEQ ID NO: 166279 - DNA, 201 bp, Homo sapiens
tgctgtcctggttttcacactgaaagttccgtatcctaataagcctctcatcctcagcaacggaggacagttgcccactcaaagccttgtgacattctagrgtatcctatttctacatggtgggaatctagaagacggagaaagaatttctcattcccgaaggagcatggattatccttggttgtagtgtttatgtccaca

SEQ ID NO: 166280 - DNA, 201 bp, Homo sapiens
tgctctcccgagccttctctcctctctggaacccatggctaataggggacaggagagagcggaagcagaaagaataagagatatgaaagccagccgggcayagtggctcacgcctgtaatcctagcactttgggaggccgaggcaggcagatcacttgaggtcaggagttcgagaccagcctggccaacatggtgaaaccc

SEQ ID NO: 166281 - DNA, 201 bp, Homo sapiens
gtgttaatcttacacctacccattagtctataaaactcctgagggatgctcaggaaaccaaaaaggatgtctgcatggaggacaagaaggcacaaatcgtytgatttcaccccatcctaagatcttgtgacttcagctttgttttggactggggcattggatctcccacatgccctctcttaagtcgtgcatttgacgcat

SEQ ID NO: 166282 - DNA, 201 bp, Homo sapiens
atactttgtaatgttactggtgtcttcttaccgttattgtctcactggtgaccgtttgaaatgttgaagctttattattacagataatggtggatatagtstcttccttgtttattttttgacagaatctttttttaaaaaagtttttatttgtttggtgagaatttacttgttacaggtctagtgctgttatagttgaat

SEQ ID NO: 166283 - DNA, 201 bp, Homo sapiens
tgactaagactggaatgtgggtgtgtgcactcctcatgttccggtttctgtgatcattcaggcatgcacaggtatcctgatgggtagccaggtcattaggmccagagtcggcagtgtagcatggcaagagaagtcattgcatctccaaactgtgcctaaattgcctgtaatgggttctttgcaacttgcagaaccagatct

SEQ ID NO: 166284 - DNA, 201 bp, Homo sapiens
gggagggaagaaccctatgggcagaaatgtgactttctgtagcaaagatgtactgtttcccactgagaagaatcaaaaatagaaaagtgcttccttgtctytctatattgttattaaaacaagtagatgcattttcattgaatcaaggcagttttcctttataaaatgtcctatttcatatcactgttcaaacttgacatc

SEQ ID NO: 166285 - DNA, 201 bp, Homo sapiens
ttacaggtctagtgctgttatagttgaatgttttgaattatgtaacttaagtgaaacataaagctatgacttgaattttgtggttagaaattttctcagtygattgacaaggatggcgtattggccaccttttgccgcagtaacaaacaatcccagactctcaaggcttgcaaaaataaatgtgtgtttgtttgctcataa

SEQ ID NO: 166286 - DNA, 201 bp, Homo sapiens
tttccttctggattaagagtgatgtcgttttatataacaagaagtgaaaaaaaaaaagaatgatgttacacaacctattttttttttttttttttttttttactctgaatgtgtaactttaaatgaagaaccaggacacctcatcctttagtcttttctttactagtgagtggcagatatgtgtggaccacagagatggac

SEQ ID NO: 166287 - DNA, 201 bp, Homo sapiens
tcaggtgggactcatggagattttccgttctttggagactagcagcgactgcagattactcatcagctgtctccttgagtccacaatgccgggcggtggaygggcttcctgcctcctggcccagggcccctttgccggctcttagtgtagagcactagttgtaccatctggtagttgtttgtgcctgcgactctcttccct

SEQ ID NO: 166288 - DNA, 201 bp, Homo sapiens
ccgtgtcattgtggtctcctcagagtcccatcggtgggtttgaattgcatatttgttcacttatcccctttctcataccagctaatattcccccaaggctstcattctgaaaataattttcattagtcctgcttgagacatgtgggtggactcagcttggctcacttaatttttccaggtcttttttgttcgcctgtgatt

SEQ ID NO: 166289 - DNA, 201 bp, Homo sapiens
ttacaggatacctagggacctgttggggtgggagggaagaaccctatgggcagaaatgtgactttctgtagcaaagatgtactgtttcccactgagaagawtcaaaaatagaaaagtgcttccttgtctctctatattgttattaaaacaagtagatgcattttcattgaatcaaggcagttttcctttataaaatgtcct

SEQ ID NO: 166290 - DNA, 201 bp, Homo sapiens
gtaacaaacaatcccagactctcaaggcttgcaaaaataaatgtgtgtttgtttgctcataacacatgtggctgagggttggccgtggctccacagtcacrggtgggctttcctgggctcagcttctcacagcgtctccttgcagggcccaggctgtaggagatgtcatcagggcctgcagagggcaaaacctcacagagg

SEQ ID NO: 166291 - DNA, 201 bp, Homo sapiens; identical to SEQ ID NO: 30483

SEQ ID NO: 166292 - DNA, 201 bp, Homo sapiens
atttccttctggattaagagtgatgtcgttttatataacaagaagtgaaaaaaaaaaagaatgatgttacacaacctattttttttttttttttttttttttactctgaatgtgtaactttaaatgaagaaccaggacacctcatcctttagtcttttctttactagtgagtggcagatatgtgtggaccacagagatgga

SEQ ID NO: 166293 - DNA, 201 bp, Homo sapiens
tcgcagctggtgggtgtacacactgctgtttaccttggcgaggcctttcaccaagtccatggtaagagaacagcttctggcgccgcaaacaccttgggtcytagagaaacctgcacacttgtgtctccacctttttacctcttgcgggcatgagtctggtctcagtaataacattgtccagcccatcataaagggctcttg

SEQ ID NO: 166294 - DNA, 201 bp, Homo sapiens
gcaaggtagaaagacacctgaaggtgaacatctttggcccatgtgaaattttgttacgtgttgttaggtttcatttgtctctcagtcaatcagtcaatcartcagtctctctccttccatccccccttgtcccccttttctcttctctccccttccctgctccctctctttaaggttttctcacagattaagagagtagca

SEQ ID NO: 166295 - DNA, 201 bp, Homo sapiens
cacgtggccttgctgacatctgagtttgcaacttcttttatgccttctgctaactgggaccccagtgggcttccctgctacaccctctgaggttccccagwcctgccaagctgttccatccccagttccttggtgcctgctggtacttcaccctggagagcccagcccttccacttgttcagatctcagtctctcatctgg

SEQ ID NO: 166296 - DNA, 201 bp, Homo sapiens
atacttttaaaagtatatttatttccagaattcaatttgtaagaggtttgagggaaaaataatactgagttttgagtgtttctgattttaaaaatgtgttsagtagaattaaacgtgttcaccaaaacccattttatccctttaaattattgggcaattaattgtatttacttagcattgaatgcatgattagaaatggaa

SEQ ID NO: 166297 - DNA, 201 bp, Homo sapiens
ctaactgggaccccagtgggcttccctgctacaccctctgaggttccccagacctgccaagctgttccatccccagttccttggtgcctgctggtacttcmccctggagagcccagcccttccacttgttcagatctcagtctctcatctgggagggacagcttgagcactatgacctgtgtgaagcttttcccagtgctg

SEQ ID NO: 166298 - DNA, 201 bp, Homo sapiens
ctaccccacgtgtccagcagcaaagccacctggcatagtgggctgctcagcgtgcctggttcatactgcgtgtttatagtcccagggtgttttcagagagyaaaagtcctttatgattagcaaattgcaggtcctcccctttctgatatttacagcccttgcaaccgcctgtacaaaaatcgggaaaaggcagaagacggc

SEQ ID NO: 166299 - DNA, 201 bp, Homo sapiens
ttggcgtgagctgagatcgcaccactgcactccggcctgggtgacagagcaagactctgcctcaaaaaaaaaaaaaaaaaaagaaaaaaaaaagattgaamatgtggaatatgagacaaatgaaaaagattgaattccgttccaactgggcttttgaatttattttcgcacttcctattttttgagcccgggagtgcaaga

SEQ ID NO: 166300 - DNA, 201 bp, Homo sapiens
accattgaggggagcaagatgacatgtgcctaccccacgtgtccagcagcaaagccacctggcatagtgggctgctcagcgtgcctggttcatactgcgtrtttatagtcccagggtgttttcagagagtaaaagtcctttatgattagcaaattgcaggtcctcccctttctgatatttacagcccttgcaaccgcctgt

SEQ ID NO: 166301 - DNA, 201 bp, Homo sapiens
ctgtactctttaaccaaggctccttttgcaaagagaaatctgagctgctttttaaagaaggccgtttttaaataaaaatgcaaataagctactttgtaacyacattaattacccacctagcctcttattaccatgtttgtattgtttgcaaatactatttacagtcgtgtggaaattaacattactggtcctgaggaaaga

SEQ ID NO: 166302 - DNA, 201 bp, Homo sapiens
gttcaaaagtatcctctctaggcaaataacgagatttcgccagcaggatctcccgttaaaggcgtgcatgtgtggctttgtagacacgtatgtgtgtgtgmgtgcacacctgcctgcccttgcacagtgggcactgtttccagtgtgcagtgaggccctcccttcgtgtagaacaggacaggacaatgacaaagttattca

SEQ ID NO: 166303 - DNA, 201 bp, Homo sapiens
tcaggctggagtgtagtggcatgatcttagctcactgcatcctctgcctcccaggttcaagcaattctccgtgtctcaatctccctagtagttgagattasaggtgcccaccaccaagctttgctaatttttgtatttttttagtagagacagggtttcgccatgttggccgggctggtcttgaactcctgatctcaggtg

SEQ ID NO: 166304 - DNA, 201 bp, Homo sapiens
tggccccatacgtatttgtaaactttcttagaacatcaggatttttatgcacggaccttttatgcatggactgtggtgttttttgatttttggttgcgtgygtgtgtgtgtgtgtgtgtgtgtgacggagtcttgctctgtcactcaggctggagtgtagtggcatgatcttagctcactgcatcctctgcctcccaggtt

SEQ ID NO: 166305 - DNA, 201 bp, Homo sapiens
cgtgatgccagtgtcttcgtaatactatctttctttcccctttagcacccagaacttatgaaatatgactcggtttatcctgaacacatgtctgtgcatcrgggaggatgggagaattaattccagtttctcaattgcaaaagtgaggctggtcatggggcttggaaccacgccacggacgcatgaagcctccccgtttac

SEQ ID NO: 166306 - DNA, 201 bp, Homo sapiens
ggaatgccatttgacagttacaggctcccgtgaggcggtgcaggctcctccgagccagggatggagctggggattgagtgacacaagactctttgggtatstctcaaacaatataaatcaccagcaaaatctcactcctacaaggagaacctgcagggagctccgtgggaggcactgctgtttactctcctcattccccac

SEQ ID NO: 166307 - DNA, 201 bp, Homo sapiens
agcaggacacactgcaaatactaggaatccttaagtacagtggaaccccagagcactctacctgctttctttctcacctccttaaaaactttttttgcccwcacctcatcatttattcagcagtcacaacagtgccaagaacttggctagagattggaaataaagcttatgccttctctcatatctcctgtaccttatttc

SEQ ID NO: 166308 - DNA, 201 bp, Homo sapiens
cagctctgagagcaaggccaaatcaccagattgatgcctttggctgtgtatctaaaggacgtgccattgcagctaagtggacctgaatgtacagtaagacytagtggtcaccagaatgcatgccaccccggtgcttctgcatgcaaagggtgcgggccatgtgccagtcacagtggaaaaggcatgcttcgtgtcagcaca

SEQ ID NO: 166309 - DNA, 201 bp, Homo sapiens
agccaagggatggctcagaagggtgaaggaactcacccgaattgcacagctggtgagctcagagtcaggctccttgcttggtccatctggcttccaaactscaagtctgtctgctccaccccatggcccatctttttaccatgtttagtatcaatgttcatactttgcagattttgctttcaaactctctagctgcggttt

SEQ ID NO: 166310 - DNA, 201 bp, Homo sapiens
gtgctgggattacaggtgctagccaccacacccggcctcttctcgatagatcttatttggctgacaacgaaagctgttgtgctggtagcatcatccctttscatgcaaaagataaactgaaatctgaagtagccatatccttccggccaggtttttcaagtggttactctgttctgatcattgtcatgacaggaatagtga

SEQ ID NO: 166311 - DNA, 201 bp, Homo sapiens
ggggtggggttggcgagagggtgttgcttttctaatgattcacattgtataaaaagcagacagtaggtctggcactgttggctcatgcctgtaatcccagyactttgggaggccaaggcaggtgaatcatgaggtcaagggttcaagaccagcctggccaacatggtgaaaccccttctctactaaaaatacaaaaaatta

SEQ ID NO: 166312 - DNA, 201 bp, Homo sapiens
taaatgtctctgggtttaatgcaactttactaaggaatgaaagtccgataagaatccatatcttttgaaagaagattttttaaattccttatttttccttyctgcatggtcataaaacacactggggacagcccaccctgagaagtcaccaggcatctgcctgccttcagtagcaatcacccaactgctgtagaccgtaat

SEQ ID NO: 166313 - DNA, 201 bp, Homo sapiens
attcatatatttaggtatagttagaaaaagcaaaatggtaacaatagaatcttgatgggattgatctcctgcagcaaggagcaacagaaaaaaaaaaaaakggaatcaagaacccaggtgctttttataggttaattgtgcagggttatcatgtatctctttaaaatcaccatcttgattctgagctttggttctacacat

SEQ ID NO: 166314 - DNA, 201 bp, Homo sapiens
ctgggactacaggtgggtaccaccatacccagctgttgaaaaaaaaatggtggggtattactctgttgcccaggctggtgttgaactcctggcctcaagcratcctcctgcctcggcctcccaaagtgctgggattacaggcttgagctacttccccaggctcttcccccgtttgttaatacataccatgaccttggcctt

SEQ ID NO: 166315 - DNA, 201 bp, Homo sapiens
ttttggaaaccccagcagagccttcatctttaactgtgtgaccttgggccattgaaataacgtttaatcttggttttttcacctgtaaaatgggttgataygagggtcagttcaggcactgtgcgtaaagcacatagcaccgtgtctagtaggtactctctgttccttaactgtcgttccttgattgctcttaagatacga

SEQ ID NO: 166316 - DNA, 201 bp, Homo sapiens
caaatcagacaccaacataaactgtagagttaacattctttttccaccctcacactttttttagctccgatctgtgttcaatttctgcctgagagagtgawatattcatatatttaggtatagttagaaaaagcaaaatggtaacaatagaatcttgatgggattgatctcctgcagcaaggagcaacagaaaaaaaaaaa

SEQ ID NO: 166317 - DNA, 201 bp, Homo sapiens
aaaagagtgtttggctaacttgcataaaaaggatctcatttttctttgtaacacattactacatacagtgaccatagtgtttctctaatttcttcaggacktactttgaagatgaagaagtatgtgtatccgctttttgtctttcagaataacatactgctgtctgtaaaaatacagataatttctctcttaaattccata

SEQ ID NO: 166318 - DNA, 201 bp, Homo sapiens
caccactgtacagcatctttacttaatctgccctctttcacgtgtgtgcatccctggcatgcttaaacaagaaaggcaaatgagagagagcgagtgagtgygagcgagagagccctgaggtgccagaaggctgtggttcctttgtgtctacagaaaagatataacgattgaattagactcttaaatatctgtggatgtcag

SEQ ID NO: 166319 - DNA, 201 bp, Homo sapiens
gcggtgggctgggcaggaaaaccataaccacctgcaaatgtcatgtggtttatatcacaccttcacttaacaccctccccctaacaacctctacctggcartcttcatttaactccaaactcaggacctcaatcctctgtttggcctgtgttccacgggacaggcatggggcacagatgtctgttatatataagggacaaa

SEQ ID NO: 166320 - DNA, 201 bp, Homo sapiens
agagctgcaggcattaatgcaaagctgcactgcctcacgaggtcgctgatgcactctcattccttttcctccagggactcctgcactttgccaggcgtggrccagaatgccactcgtattgtttatcttaatgcttagtgatagtagctacctccagtgcacgccgcattagcctctccaatgagtttctcctttatttta

SEQ ID NO: 166321 - DNA, 201 bp, Homo sapiens
tggattggtgattttgactaagactggaatgtgggtgtgtgcactcctcatgttccggtttctgtgatcattcaggcatgcacaggtatcctgatgggtarccaggtcattaggcccagagtcggcagtgtagcatggcaagagaagtcattgcatctccaaactgtgcctaaattgcctgtaatgggttctttgcaactt

SEQ ID NO: 166322 - DNA, 201 bp, Homo sapiens
gtgcttgttaactttgcactctatagccaagtgcgatgatcagaaaatacatacattgaagacaccagaaaatagtgtatggattggtgattttgactaaractggaatgtgggtgtgtgcactcctcatgttccggtttctgtgatcattcaggcatgcacaggtatcctgatgggtagccaggtcattaggcccagagt

SEQ ID NO: 166323 - DNA, 201 bp, Homo sapiens
ttaaggaaactcggctcaaactagcttcggggactcgctgtggccataggtgccctaggctgcagtctgagagtgaaactgaggtctcactcccttcatastctgctctccgtctctgcctcatctggcttctcagggtggtggggcgtgggcactaatttgatttgatcacttagagacaacagcttacaaaatgctacc

SEQ ID NO: 166324 - DNA, 201 bp, Homo sapiens
tcttacacgttttacgggctatcagtagatgcatctaataatcctaacactgtcatccttatacttgaggtcttattgtccacttctaccttagctatgtwaacagatgagtaacctactctggatttacccagatagtgctgttaggcaccacacacgatgagattggaggcacctgggtgtcagcctcttgggctggct

SEQ ID NO: 166325 - DNA, 201 bp, Homo sapiens
attgcattgcaaataatagcagttagtgggagttgagagccagctctgcaccagactcgtatcagccacttgacctccattattccttattccttggtacytctgcgccatctgtgatatcagatccttttttctgcaaggaaactgaggctcggcgatactaagaaactcagccagggtccgtcagctgtcaagtggcat

SEQ ID NO: 166326 - DNA, 201 bp, Homo sapiens
caggaaggcccttccactgaagctacaactggagctaagcagatggataagccaaaaccacctccgttgctgtggccccatctccaccacaaggaagctgragaagggaccccagaaccggaagacaaaaaacttccttcacacactcccttgctaagaggagaagccccaaagaagctggatatggcccttccctcacat

SEQ ID NO: 166327 - DNA, 201 bp, Homo sapiens
ttgatgtaaaggactacctgaggctggctaatgtataaagaaaagaggtttaattggctcatggttccgcaggccatacaggaagcccagttagggaggcstaaggaaacttaaaatcatggcagaagatgaaagggaaacaggcatgttctgcatggctggagtaggaggcaaggagcgaaggaggaggtactacccact

SEQ ID NO: 166328 - DNA, 201 bp, Homo sapiens
ctggagtgacagagtgtgtcaagcctgcagctcgtcccgtgtctaatggaacagaaacaagcaccctgctgcccttgttttccagtggctcaccggggctytgcgaggtttattaatcttagcgtataatggaaaatgtgttgccatgtgaaatctagagcctctgttcactactccgcgaattgaaggcggcaggagtct

SEQ ID NO: 166329 - DNA, 201 bp, Homo sapiens
cccatataccacagtttctaatacgatattataccaagctttaatatgagcacacctcctggatgatgctgtaaattagttgcctcccaccacaccacatsaagtataatggatataatatgatttttcagaattcagctaattacctactgagctttacattttgtaacttttttgactgtccatcaaaatgtctttggg

SEQ ID NO: 166330 - DNA, 201 bp, Homo sapiens
gctgtttaccttggcgaggcctttcaccaagtccatggtaagagaacagcttctggcgccgcaaacaccttgggtcctagagaaacctgcacacttgtgtstccacctttttacctcttgcgggcatgagtctggtctcagtaataacattgtccagcccatcataaagggctcttgaacacattttcatcaactttaggt

SEQ ID NO: 166331 - DNA, 201 bp, Homo sapiens
ccagccagggtggtctcgaggaggcccattaccggctggagtgacagagtgtgtcaagcctgcagctcgtcccgtgtctaatggaacagaaacaagcaccytgctgcccttgttttccagtggctcaccggggctctgcgaggtttattaatcttagcgtataatggaaaatgtgttgccatgtgaaatctagagcctctg

SEQ ID NO: 166332 - DNA, 201 bp, Homo sapiens
gtagtttaactaaaaagtggccactgtctcctggtagcggttggtaagccatccagtctctgcaggcatctacgctccaggtctccagtctgaggagtctsgctcctggggcaggtgcctctgggggtctctgccaggcttgtctggtcatgcagctacttccagactgattcctagatcttgcatttttacataggacat

SEQ ID NO: 166333 - DNA, 201 bp, Homo sapiens
tgggaagtcagaacttggttgcttcatgtcatatttcctatttttaagatttacagatattaacgactccttgggaaaactggacttcagtcgcctctctscaacaaaaaacgactattgggcgatgctggcttataacaggtccaagctctgcaacatcctcttctccaacgagctgcaccgtcgcctctccccacgcgg

SEQ ID NO: 166334 - DNA, 201 bp, Homo sapiens
tctacctataagtaccttccaactgttccacttttgtaaatttagttcaaataatacatatgctgaaattcctatatcccccccatactccagatcttcaktgtggaatttaaatataattccttattgtaaaaaaaaaaaatttttttttgatcaaggtgattttgataaactaaatgcatctttaattttactcacagc

SEQ ID NO: 166335 - DNA, 201 bp, Homo sapiens
aactaaaaagtggccactgtctcctggtagcggttggtaagccatccagtctctgcaggcatctacgctccaggtctccagtctgaggagtctcgctcctrgggcaggtgcctctgggggtctctgccaggcttgtctggtcatgcagctacttccagactgattcctagatcttgcatttttacataggacatccccagc

SEQ ID NO: 166336 - DNA, 201 bp, Homo sapiens
aaagctgtgtgggaagtcagaacttggttgcttcatgtcatatttcctatttttaagatttacagatattaacgactccttgggaaaactggacttcagtygcctctctccaacaaaaaacgactattgggcgatgctggcttataacaggtccaagctctgcaacatcctcttctccaacgagctgcaccgtcgcctctc

SEQ ID NO: 166337 - DNA, 201 bp, Homo sapiens
ccctagttgtatcaccttcctcccattatgtttgtaacttcagattttgtatatttcgcatatgtcaatatgtaaacattttatatatatatatatgcatkcacacacatgcatacatatatgtaatggtatatatacatgtaagtttccatttttgctcaaattgctctggacagttctttgctctgggagttctttact

SEQ ID NO: 166338 - DNA, 201 bp, Homo sapiens
ctgagaatctctatttatgtctgaccccaggaaattccctttaagctgcttgtcagaggtgcatgctgagagcatgatgggaagatggagtcttccatccrctggtaaaatctggaatctgctctcatttcattttcactgaactgaaaataaggtaacagaccctcaggtctacctataagtaccttccaactgttccac

SEQ ID NO: 166339 - DNA, 201 bp, Homo sapiens
gttgcagtgagcccagatcgcaccactgcactccagcctgggtgacagagcgagactccatctcaaacaaacaaacaaacaaacaaacaaactaagaacarcaacgaaaaaactcccatgtattatctatggattgactgtaaaatatgagaagcaataaatatgttcatcactagggccatctagaaatttctaacccaa

SEQ ID NO: 166340 - DNA, 201 bp, Homo sapiens
gatttatgaggcctaactcgcaagcgatgtgtgtctggattaagagaacctgagaatctctatttatgtctgaccccaggaaattccctttaagctgcttrtcagaggtgcatgctgagagcatgatgggaagatggagtcttccatccactggtaaaatctggaatctgctctcatttcattttcactgaactgaaaata

SEQ ID NO: 166341 - DNA, 201 bp, Homo sapiens
gagaagcaataaatatgttcatcactagggccatctagaaatttctaacccaagggtcaactaatctttccctgtgttgtatttcctgctctgcggatccrgcatcatgacctttgtactacccaggaaagccagtgttctcatgggctcttctcttttttatgctctaccagatgctagcactgtggcatgccattcgct

SEQ ID NO: 166342 - DNA, 201 bp, Homo sapiens
gccaccatgcttgggtaatttttgtacttttattagagacagagtttcaccatgttggccaggctggtctcgaactcctgacctgaagtgatccacccacstcagcctcccaaactgctggaatctgagaagttacgtgaaactagcgatgccctgggctaatgaaatcaggctccatggtggggaaggatgttgcggtgg

SEQ ID NO: 166343 - DNA, 201 bp, Homo sapiens
tgtctgtttatagaaagtgtcaccaagttctgtcttgggcccgtccactcggttatatgtgctggaccctgggtggaagcactttgcacgtgtgcattcaygatgggctgtgctggaggggaaaacaggcatcactcccaaattctattcatgcaattaaaaattcctttcatttttatttgtgagagggtatgggtgcac

SEQ ID NO: 166344 - DNA, 201 bp, Homo sapiens
taactgggtgtggctgtgtcctaataaaactttatttacaaagaacaggaagtggcttggatttggtatctggcctggcagctgtggtttactactccttrgacggtggcccagagaccctttaaatgaaattcattttactagcaccctttttcatcatgagaaatatattctgtttttcttagaaaatgggttatgtta

SEQ ID NO: 166345 - DNA, 201 bp, Homo sapiens
tctttcttttttttttttgaggtggagtcttcctctgtcacccaggctggagtgcagtggtgggatcttggctcactgcaacctctgtctcctggcttcaygccattctcctgcctcagccttccgagtaactaggattacaggcatccgccaccatgcttgggtaatttttgtacttttattagagacagagtttcacca

SEQ ID NO: 166346 - DNA, 201 bp, Homo sapiens
ttggattatttatttatttatttatttatttatttatttatttattgtttgagacagtctcactttgtcaccaagtctggagtgcagtggtgtgaccttgrctcactgcaacctctgcctcccaggttcaagtgattctcttgcctcagccccctgagtagctgggactacaggcacgtgccaccatgcctggctaatttt

SEQ ID NO: 166347 - DNA, 201 bp, Homo sapiens
ttacaaagaacaggaagtggcttggatttggtatctggcctggcagctgtggtttactactccttagacggtggcccagagaccctttaaatgaaattcaktttactagcaccctttttcatcatgagaaatatattctgtttttcttagaaaatgggttatgttaggtctggtcaaggtaaataagtgttgagagtcgat

SEQ ID NO: 166348 - DNA, 201 bp, Homo sapiens
attattcccgctgccattcagttttactctgcacaaaatacagccaacatttttgcatttctttcttccttcctccttttcttctttctttccttccttccttcctttctcccttcatctatctttgttccgcttttgtttgtttttttttagatcgctgcatgctgccgcgttgggttaaccatggtagcattttaccat

SEQ ID NO: 166349 - DNA, 201 bp, Homo sapiens
agtgggagaacatggtatcagaaccaggagagggtcctctggctttctgagttctgccaaaaaccaagttttgctgccttgggcctgtggcttctcctccytgattgtcgctggccttgctgtaaattgtgaggcatccatgtgaggcacaggatggttccaaggaccaactgaggctgtctgtgctgaggctgggagggt

SEQ ID NO: 166350 - DNA, 201 bp, Homo sapiens
cccctttcctttcccaaacttttactagcttcttccatcctggacttgcaatctggctgaaaacctgctaaataagggaacaattttgacatggctcctgkactccccacaaacctagttgattccagaccagtaatgtcttggggacagtgttgtcccatcttcctttctaggctgggctcagattactgacgtggaaga

SEQ ID NO: 166351 - DNA, 201 bp, Homo sapiens
aattattcccgctgccattcagttttactctgcacaaaatacagccaacatttttgcatttctttcttccttcctccttttcttctttctttccttccttccttcctttctcccttcatctatctttgttccgcttttgtttgtttttttttagatcgctgcatgctgccgcgttgggttaaccatggtagcattttacca

SEQ ID NO: 166352 - DNA, 201 bp, Homo sapiens
agattaaattgaattattcccgctgccattcagttttactctgcacaaaatacagccaacatttttgcatttctttcttccttcctccttttcttctttcyttccttccttccttcctttctcccttcatctatctttgttccgcttttgtttgtttttttttagatcgctgcatgctgccgcgttgggttaaccatggta

SEQ ID NO: 166353 - DNA, 201 bp, Homo sapiens
acaaagcatcagggggccgggagcagtagctcacgcctgtaatgccagcactttgggaggccgaggcgggcggatcacaagatcgggagatcgagaccatyctggctaacatggtgaaatgctgtctctactaaaaatacaaaaagaaattagctgtgcgtggtggcgggcgcctgtagtcccagctactcgggaggctga

SEQ ID NO: 166354 - DNA, 201 bp, Homo sapiens
gtgaggacacatcacttgcacctcagtgtgagtttgaaagtgttttctctggagaataattctgaagaaataggccctccagatatcagtagtgacagggstatcagtaatgttgattactaagttcttgccacaggtagaagccatgctactgcacaagtttcatacttgaagagtggacatctgacacagtgttggtgg

SEQ ID NO: 166355 - DNA, 201 bp, Homo sapiens
ttattttaattttttaattgaattcagctttacagtatcttttgtagggggtaattttagcttctttctccgttgaaaacttcaagtaaggaaacacttayattgctagtgagtggccagctggagttgtaggtctaattctttttttttttttaagacggagttgtgctcttgtcacctaggctggagtgcaatggcatg

SEQ ID NO: 166356 - DNA, 201 bp, Homo sapiens
attcagaggttgtttttatagcagcaacacagtaagttgggaagagggacacatttttaacatagacaccaaaagagaggctggaagagttgaccacttaraaatgtcacgagtgtctgtgaatagtgttgggggctgagaggcaagagaagaaaatagtcctaatgttgtacaagtagcaatggaaacaaacttgttaaa

SEQ ID NO: 166357 - DNA, 201 bp, Homo sapiens
ggtctaattctttttttttttttaagacggagttgtgctcttgtcacctaggctggagtgcaatggcatgatttctgctcactgcaacctccacctcctgkgttcaagcagttctgcctcagcctcctgagtagctgggattacaggtgcctgccaccatacccagctaacttttgaatttttagtagagatggggtttca

SEQ ID NO: 166358 - DNA, 201 bp, Homo sapiens
tctgtttttcttagaaaatgggttatgttaggtctggtcaaggtaaataagtgttgagagtcgatgttgtgtgcatagttaatttcaattctttgaagaarctcccccatgatatttcacggctgagagaagaggaaagagtttaagtggaacagtgtgctttgctgagctttggaaatattaccatatagggaagcaggt

SEQ ID NO: 166359 - DNA, 201 bp, Homo sapiens
atataatgatgataataattgctaatatttatcagctatttatcatgtgtcatgtacagctaagcacttacataccatcccattttatccttataatgackctaagagtgggttaaaaaatggcagaagaatggcagtgtttaatggttcagcctggtgcaatgattaaccacattttacagactaagaaattaagaacct

SEQ ID NO: 166360 - DNA, 201 bp, Homo sapiens
caatggcatgatttctgctcactgcaacctccacctcctgggttcaagcagttctgcctcagcctcctgagtagctgggattacaggtgcctgccaccatrcccagctaacttttgaatttttagtagagatggggtttcaccacgttggctaggctggtgtcgaactcctgacctgaggtgatccacctaccttggcctc

SEQ ID NO: 166361 - DNA, 201 bp, Homo sapiens
atgggcatgtgctgtgtgccattctctccccttatcagtgggttcccagctgcctggtgtacaggagggttaagtagatacctgttgagtgattgtgaatrttttcattcacgggggcagatttgtgtcctactaacaccagacatgtcctgttttcagattacttctttttcaacatctgagtacctataacatctaaag

SEQ ID NO: 166362 - DNA, 201 bp, Homo sapiens
gaaaagaggtttaattggctcatggttccgcaggccatacaggaagcccagttagggaggcgtaaggaaacttaaaatcatggcagaagatgaaagggaarcaggcatgttctgcatggctggagtaggaggcaaggagcgaaggaggaggtactacccacttttaaacaaccagatctggtgagaactcactcactgtca

SEQ ID NO: 166363 - DNA, 201 bp, Homo sapiens
agttgcacaattcacacaccaggctgccactttggcccctgcgtcaccttcaccaccacccaatgtgtcctgctcatcactgaggtttgtcatttttactytgagtctgtccattgtcatcatctccaccatcaccccttttgttctcattgccacccttgcctggggtgagtgaagacgctcttctctggcttccaccct

SEQ ID NO: 166364 - DNA, 201 bp, Homo sapiens
agaagtggtggaacaaaggcactgtgtacacctttgaaacaattaacttcaccaaaattactaaactgtcctctagaatggttaaaccaatttcctctctwccattcacacgtgagaatgcctgtggccccccagaaattatctccagcagcagcaacagagaggactggaatgccattgacaggtcccacaagtcagcaa

SEQ ID NO: 166365 - DNA, 201 bp, Homo sapiens
tggtagtagtagtagtgaatgccctgactttggggtttgcagtaagctaggattaagtgcttcacagtgaggcacagtggggagctactctgaggatgaawtgcctagtaaataagtgaggtttgtataaccgaggccagatcttagaacctcctgctatctgtacatagaagaatgttttagtcagaggcaaggcaaggt

SEQ ID NO: 166366 - DNA, 201 bp, Homo sapiens
tgaatgccctgactttggggtttgcagtaagctaggattaagtgcttcacagtgaggcacagtggggagctactctgaggatgaattgcctagtaaataartgaggtttgtataaccgaggccagatcttagaacctcctgctatctgtacatagaagaatgttttagtcagaggcaaggcaaggtcaccaggattcactg

SEQ ID NO: 166367 - DNA, 201 bp, Homo sapiens
gaatgccctgactttggggtttgcagtaagctaggattaagtgcttcacagtgaggcacagtggggagctactctgaggatgaattgcctagtaaataagkgaggtttgtataaccgaggccagatcttagaacctcctgctatctgtacatagaagaatgttttagtcagaggcaaggcaaggtcaccaggattcactga

SEQ ID NO: 166368 - DNA, 201 bp, Homo sapiens
gccactgcactccagcctggatgatagagcgagaccatgtctcaaaataatgataataattgtagtagtagtagtggtggtggtggtggtggtagtagtastagtgaatgccctgactttggggtttgcagtaagctaggattaagtgcttcacagtgaggcacagtggggagctactctgaggatgaattgcctagtaaa

SEQ ID NO: 166369 - DNA, 201 bp, Homo sapiens
aagaatgttttagtcagaggcaaggcaaggtcaccaggattcactgagagtgttggtcagcatttcatctgcatatacaggactggaaaataagagagcgyaatgagacatctagtttttttctctttcgtttgttctgtttcccactgagagaattttctagctttatgtggagaaaacagtattggaaattattactca

SEQ ID NO: 166370 - DNA, 201 bp, Homo sapiens
tcctcttacagttttggttctttccatgagaaagtatttttaatagcaaagtaatgaacaagaaagtattaataagacccaaataataatataaactactmctttactaatggtcattatgtgccatgccctgctctaaacacttgccatgtagtcactaatttaatcctcacaagaattctgtaatgtagtgtagtttcc

SEQ ID NO: 166371 - DNA, 201 bp, Homo sapiens
tggaagccccagtaatatcatttaattcgaaagcttttttctatgatgaattattcaggcagtgtttaccaaaattgtcattgatcagtacagacccagasagcatgtacaacagcgcctgtgctgggcctgctaggagtcgatattttctggctcaaagaagttccaaaagaattcaaagccagtgtgtctctttctctg

SEQ ID NO: 166372 - DNA, 201 bp, Homo sapiens
gtttctcataacatttgtgtgtgtgtgggtgggtgggtgtgtgtgaaaggtaggatcacctctctgtgcctcagtctccccatcatccttcggtggtagawcaatgctatctgatgaggccttttttgggatcacccactccaacatgcatgtcctttctctgtcccctcctggtgcctgtattagtctgttctcacattg

SEQ ID NO: 166373 - DNA, 201 bp, Homo sapiens
gtatagtagtgggagaacatggtatcagaaccaggagagggtcctctggctttctgagttctgccaaaaaccaagttttgctgccttgggcctgtggcttytcctccctgattgtcgctggccttgctgtaaattgtgaggcatccatgtgaggcacaggatggttccaaggaccaactgaggctgtctgtgctgaggctg

SEQ ID NO: 166374 - DNA, 201 bp, Homo sapiens
actagcttcttccatcctggacttgcaatctggctgaaaacctgctaaataagggaacaattttgacatggctcctgtactccccacaaacctagttgatyccagaccagtaatgtcttggggacagtgttgtcccatcttcctttctaggctgggctcagattactgacgtggaagagttgttggtcctggtgcaacatg

SEQ ID NO: 166375 - DNA, 201 bp, Homo sapiens
aaagggggttaaaagggtttaggggaagtttagttgtcttccttttatctctaactctaaaacccaactgctggctgaattaaaagtctcttacataatgrtcagaggagttttgagtatcggatctttgtgtacttgctttttaaattcagtcacgtcttaaatagtacttttcactctcctcctctccacaccacttta

SEQ ID NO: 166376 - DNA, 201 bp, Homo sapiens
agtgattcagaaaatagcaagtatagtagtgggagaacatggtatcagaaccaggagagggtcctctggctttctgagttctgccaaaaaccaagttttgytgccttgggcctgtggcttctcctccctgattgtcgctggccttgctgtaaattgtgaggcatccatgtgaggcacaggatggttccaaggaccaactga

SEQ ID NO: 166377 - DNA, 201 bp, Homo sapiens
atagaagtttatgacggaaaaggcaaaattctctgtgtctttatggggagatattcgatatgttttttcttggcagaaataaaacatattcaataatatamttaggcaaacttgttttacttgacaagaagaccgtatctccgtctgcaagatgaaggcaagatcaagagatgtcagttaacattcttgcgaccacaggta

SEQ ID NO: 166378 - DNA, 201 bp, Homo sapiens
ggaaaaggcaaaattctctgtgtctttatggggagatattcgatatgttttttcttggcagaaataaaacatattcaataatataattaggcaaacttgtkttacttgacaagaagaccgtatctccgtctgcaagatgaaggcaagatcaagagatgtcagttaacattcttgcgaccacaggtagggaggagaactggg

SEQ ID NO: 166379 - DNA, 201 bp, Homo sapiens
aaggcaaaattctctgtgtctttatggggagatattcgatatgttttttcttggcagaaataaaacatattcaataatataattaggcaaacttgttttasttgacaagaagaccgtatctccgtctgcaagatgaaggcaagatcaagagatgtcagttaacattcttgcgaccacaggtagggaggagaactggggagg

SEQ ID NO: 166380 - DNA, 201 bp, Homo sapiens
aagcccacattttaaagggaatttggtatttttaacaaagcatcagggggccgggagcagtagctcacgcctgtaatgccagcactttgggaggccgaggygggcggatcacaagatcgggagatcgagaccattctggctaacatggtgaaatgctgtctctactaaaaatacaaaaagaaattagctgtgcgtggtggc

SEQ ID NO: 166381 - DNA, 201 bp, Homo sapiens
aggttgtgtctgagattcagaggttgtttttatagcagcaacacagtaagttgggaagagggacacatttttaacatagacaccaaaagagaggctggaaragttgaccacttagaaatgtcacgagtgtctgtgaatagtgttgggggctgagaggcaagagaagaaaatagtcctaatgttgtacaagtagcaatggaa

SEQ ID NO: 166382 - DNA, 201 bp, Homo sapiens
tctttggagaagaggcccacgttcttttcagattctgatttctccgtgatataaatagttttttaggtgatcacttgtttttaatgtacctacctatctawacctttctctctctctctctctctctgtgtgtatgtgtgtgtgtgtataaaattacatatccagtatgaaacctaaaaataagattttggggcctgtgaa

SEQ ID NO: 166383 - DNA, 201 bp, Homo sapiens
gttcaagaaggtcttgggcaagcgcgtgctagttattttcctcactggtgtggtcgtgacagatgaatcacattttactctcctccctttctcatagtatrattacataaaggagaccttccctggaaagagccctgtgcatggcttttgagagtgggcctgggctaacagtgagtgtggaagcttgctgccttgaattct

SEQ ID NO: 166384 - DNA, 201 bp, Homo sapiens
ttttgcatccctagacatcatcctttttgagagagaaaattccgagtgtcagttttcctttatcggaacctccttttatttgaactaaccacaatgggtcrtaatttataggcccagtcagcgcatcattgctcagatagagtcatttacctacaagtatccatcagttaggtgggggctgctagattttttaagtggaaa

SEQ ID NO: 166385 - DNA, 201 bp, Homo sapiens
gtacattacagggacagtggttgggtctggagatgtcacccttagctgtttttcacaatgagaggttgttttatcataaataaatcaataaatggcagatkatacaccggagttactgagaaatataaaaaaaaaaaaagcccacattttaaagggaatttggtatttttaacaaagcatcagggggccgggagcagtagc

SEQ ID NO: 166386 - DNA, 201 bp, Homo sapiens
gggctaacagtgagtgtggaagcttgctgccttgaattctttccaattctggagagttgatgggtaacaagtgtgtatctatagtctgcttggacatggcrgtgtggccactgacacgttgtcagccatcccctcaactccagggacaggaatggtgagaaggtggtgagggcacagtctgcccggagacgggacagtttg

SEQ ID NO: 166387 - DNA, 201 bp, Homo sapiens
tgcctctctttccttagtcctgtgtgcttccccttgatttcaccaggacaattttataccaatcccttgtattttagaagagcctgatacatttgcaaggwctctctttatattcctgaattttgcatccctagacatcatcctttttgagagagaaaattccgagtgtcagttttcctttatcggaacctccttttattt

SEQ ID NO: 166388 - DNA, 201 bp, Homo sapiens
ataattaaccctctggggagactaatattagtttattagagacaatttctagttctgtttatttttaacactaaacgatttgttcagattggggaaaaaawttttttttttttttttggttgtggtggcgttggcttttacttggggttgacctttccttatcaaggacatacaaggtgaatagctgggtgataatatatg

SEQ ID NO: 166389 - DNA, 201 bp, Homo sapiens
tcagaaatgcatgtcagagctacacaattctatccaaggcattaactgttgtcaagtctgttttttatgaatatgtttcaatataagaaattgtcttaggyccaaagtgaaacgtcttcctccttgactcatagcaagctcatgcaggtatttgaacattgttctgtataatatgtgcacctttgagaaatcccatgattc

SEQ ID NO: 166390 - DNA, 201 bp, Homo sapiens
atgcagtgttttccctgcaaaggagaagaaatatatttcttgcctctctttccttagtcctgtgtgcttccccttgatttcaccaggacaattttataccmatcccttgtattttagaagagcctgatacatttgcaaggtctctctttatattcctgaattttgcatccctagacatcatcctttttgagagagaaaatt

SEQ ID NO: 166391 - DNA, 201 bp, Homo sapiens
atgagggccaggacctcatggtcataaaagtaacattagacctattcctagtaatttgatctaggttggcctgatttttgttgtggtggcagtggtggctrtggttgtcaatttaatggaatgtatttggaaagagcaagcttcttcccaatgcagtgttttccctgcaaaggagaagaaatatatttcttgcctctcttt

SEQ ID NO: 166392 - DNA, 201 bp, Homo sapiens
atgcctttgtgtgtcctctcatggcagagagaggaaggggtctggaacctttctcttataaggatactaatcccatcgtaccccgtcccccatgatctcawttgaaattagtcacctcccaaagccccacctccaagtactgtcacactggggcatagggcttcagcatatgaatttgggggagctggggagaggaacaca

SEQ ID NO: 166393 - DNA, 201 bp, Homo sapiens
gccacttgcagaccttggcagttgctgttgctcctgctgctgctgctgctgctgcattgtcaagactacattgatgtcttggaaatatagaaaaaagaggmtgctggactgtgtgcttagaatcagtgtgctaactctgttaccaacaccgtagagaagtggttccagaaggaagagttcagggtgagaatgaataacgga

SEQ ID NO: 166394 - DNA, 201 bp, Homo sapiens
tgtgctctcttaagccagtcggacctggttgttgtacactactgggtgtgtttaattgacttccagttttgttttgttttgttttgttttgttttgttttsaaacagtctcactctgtcgcccaggctggagtgtagtggtgtgatctctgctcactgcagcctctgcctcctgggtttaaggaattctctgccttagcct

SEQ ID NO: 166395 - DNA, 201 bp, Homo sapiens
ctgttgctcctgctgctgctgctgctgctgcattgtcaagactacattgatgtcttggaaatatagaaaaaagaggctgctggactgtgtgcttagaatcwgtgtgctaactctgttaccaacaccgtagagaagtggttccagaaggaagagttcagggtgagaatgaataacggagtggctttgcagtgggaacctggc

SEQ ID NO: 166396 - DNA, 201 bp, Homo sapiens
cttgtctacattttgaggctcttctattatggaagagggctagagaggccatcagaatttggtttcactagcctttgatccttcctgtttaaggagctcarcatttagcttcacttccctgtcattcatcagaattcattctcagattggaattgtccagtcttagagtgatttttgtccccagtgacacttcccttatat

SEQ ID NO: 166397 - DNA, 201 bp, Homo sapiens
tggaggaggattcaagccccttgcaacggactgaagtgcccaagctctaaatccctgccacccacagcctctgttggccccaggttgtgtctgagattcaraggttgtttttatagcagcaacacagtaagttgggaagagggacacatttttaacatagacaccaaaagagaggctggaagagttgaccacttagaaatg

SEQ ID NO: 166398 - DNA, 201 bp, Homo sapiens
agggggtggaggaggattcaagccccttgcaacggactgaagtgcccaagctctaaatccctgccacccacagcctctgttggccccaggttgtgtctgarattcagaggttgtttttatagcagcaacacagtaagttgggaagagggacacatttttaacatagacaccaaaagagaggctggaagagttgaccactta

SEQ ID NO: 166399 - DNA, 201 bp, Homo sapiens
attttactcacccagaaggaagccgggtccctctttgcccctttgggtgtttgtgaaaagcaagttgtaaacactgaattctataaactgttggagacagrttctggagagacactcaggcttagctctagaaagaaacgggtaagacagaggaggttcagggcaactgtgttgccttccttgactggtgcatgggaattc

SEQ ID NO: 166400 - DNA, 201 bp, Homo sapiens
gcattacctggggctccctctggaaagaaaatggtggagaggttactggcctgatgacccagggacccaggcagtccttacagggacccagaatttcacawgcaaatgtgacctccaattaaagctggacttgattaaccccatttcccctcaaaagatgatacttgtaatgccgttccgatgaggccgtctcactccgta

SEQ ID NO: 166401 - DNA, 201 bp, Homo sapiens
ttccttttatctctaactctaaaacccaactgctggctgaattaaaagtctcttacataatggtcagaggagttttgagtatcggatctttgtgtacttgytttttaaattcagtcacgtcttaaatagtacttttcactctcctcctctccacaccactttatgtgtttgctagtagcttccatgaaactctatgggtga

SEQ ID NO: 166402 - DNA, 201 bp, Homo sapiens
atcagtggttaccaggcagtgttgcattttttccatcccatacctctgtgtgtgttccttatctgtttctaggatgtgccctctgccccgtcacatcacaytctgtgctgctctcagccaaagctcttcttaaatacactagccatcaaaaccatacaacttggctgggtgcggtggctcacacctgtaatcttagcattt

SEQ ID NO: 166403 - DNA, 201 bp, Homo sapiens
atatgaaaacaggaaaacacatggagtcttggagggtagggaagtcttgatgagtaagattgggtctgagataaacctaaaagagggtcaagattttgacrgagggctggaagggaggaacgataggaaactgaccttttttcagatctcttcttgtgcgtggcctggggttaagtgctttacatgcatcccctcattgac

SEQ ID NO: 166404 - DNA, 201 bp, Homo sapiens
tagaaacttggacagaggaaaatgaaaatgttctattaattccactagcatgagataatcactcttaatattttgttgcatgttcttttctttcttctgartgatagcatttttttcaacaaattgggctcgtaatatataggcacatagatatataattaaaaaaacaagaatttctcatgtcattaaacattgcttgaa

SEQ ID NO: 166405 - DNA, 201 bp, Homo sapiens
aaggagaagaaaatgaagaaaaatttagaaacttggacagaggaaaatgaaaatgttctattaattccactagcatgagataatcactcttaatattttgktgcatgttcttttctttcttctgagtgatagcatttttttcaacaaattgggctcgtaatatataggcacatagatatataattaaaaaaacaagaattt

SEQ ID NO: 166406 - DNA, 201 bp, Homo sapiens
aggcatttttctgttgactgtgcatgaagccacatagtaataaacagtttccatatccaagcagctaaggcttgtgccttgcaagttaagtggaacatcasgatctatatctcagttttccttatgtttccccagttggcacatcatggccaacaagagagtagggatcattaaggagtttattttcatctttattttatc

SEQ ID NO: 166407 - DNA, 201 bp, Homo sapiens
gaaactgttttctctggccaggagacaggcttcgttttcgaaactcacccaggaaggcagtgttcttcttttcaaaaggcatttttctgttgactgtgcaygaagccacatagtaataaacagtttccatatccaagcagctaaggcttgtgccttgcaagttaagtggaacatcacgatctatatctcagttttccttat

SEQ ID NO: 166408 - DNA, 201 bp, Homo sapiens
gcatgttaacatcctggtagctctatttatttgctaccatggtacataatcatgggagctctatttatttgaacatcttcttttgttattatttggtgtayttgggaaaggcatgtgggagcagcaagcaggtgagcatcctgtttggaatgcagggccgggaactgccctgcccagtccagcctcattccagaggctagc

SEQ ID NO: 166409 - DNA, 201 bp, Homo sapiens
ctttttctgactagctgattctgctgctgctggatttattcattcttctccctcacaattttggctcgcacatgcttcctttttagctcatgaccgtgcarttcaactcaacctcatggcatctttttatcagctgtccctgctgcaacaggcttagagttggtttcccaattccctagcgcagaaatccactggcatgag

SEQ ID NO: 166410 - DNA, 201 bp, Homo sapiens
aaaacttaacaattgtggaagcaatgaattgaaggactagggtcaccagtggagtcccataaataggttgtttatgatccctgtgaaacaagaagaccctyttaatttcatgcttcttaaactggggtatgagtggccccaggtttccctgttgggggtactgataccagagttcatttgaagtcattggaaaccaaggca

SEQ ID NO: 166411 - DNA, 201 bp, Homo sapiens
agctctctgcttctttggcagtctagtgctgtcacagaaggaaagctcactccatggaaaaggggggattgatttcttctctgagggcagaggctgatcartctaggctggtaggaatagatgtaacctcagaggaaacaatttgcattggcgaaagcaagtcaatggccatccccaaattcaaaaggacagggaagtgta

SEQ ID NO: 166412 - DNA, 201 bp, Homo sapiens
ggcgttctctttttctgactagctgattctgctgctgctggatttattcattcttctccctcacaattttggctcgcacatgcttcctttttagctcatgrccgtgcaattcaactcaacctcatggcatctttttatcagctgtccctgctgcaacaggcttagagttggtttcccaattccctagcgcagaaatccact

SEQ ID NO: 166413 - DNA, 201 bp, Homo sapiens
gagtgacaagccctggagacctgagggcttctggggcccccagggcggtttcaggaggctgtctccagacctgtccggggtgtgagcatgtcacgctgtgrcccgcgcctcccctgtacagctgcctctgctcttctaagcactgaaatgagaggtgtaacctgtgttccagagtctgcgcctcccagccactggggcagg

SEQ ID NO: 166414 - DNA, 201 bp, Homo sapiens
agctaattcctacctgtgcgatcactagccaagtactgaacctctctgaacttcaattatctcatctgtaaaaggtggttggtttgtaattgttcctaccycttagggcttttgtgagagtttagatgataaaccaccaagcaacagtggctggcattctgtgcacaatcgaagtctgctgctgtcagctctgtggtcgct

SEQ ID NO: 166415 - DNA, 201 bp, Homo sapiens
catgtaaatgaattgtattttatgtaaccattccctagtgttggatagctaggccatttataatttggacactattttaaaaaataactcaggcttatttwactatttatttttgccttacactttttgtaaaagtaatcagagcagtaataatagatgactccccaaaatccttttgcctctaatgattagtctaagccc

SEQ ID NO: 166416 - DNA, 201 bp, Homo sapiens
aggtggttggtttgtaattgttcctacctcttagggcttttgtgagagtttagatgataaaccaccaagcaacagtggctggcattctgtgcacaatcgawgtctgctgctgtcagctctgtggtcgctgtctgcactcccacccctgtcatcctccaagtctgatctcctcccgaagtctcttcctggacctcagccctc

SEQ ID NO: 166417 - DNA, 201 bp, Homo sapiens
gtgagatctgatagttttataaatggaagtttcccctggccttcattctctttcctgctgctttgcgaagaaggtgcttgcttctgctttgccttctgccrtgattgtaagtttcctgaggcctccctagccatgcggaactgtgagtcaataaacctctttcctttatacattacccagtctcgggtagtatcttcatag

SEQ ID NO: 166418 - DNA, 201 bp, Homo sapiens
tgagatattgggactgttcttattcccatttcacagatgagccactaactggctcctggcaggacagtgaataaggggcacaacagagacacaaacacatsgctaaccaatggtctcatccgtcagccacactgcctgtctcagcatgggccctgtgtggaccattccatctcaatttgtttctgattcttgtcaattaaa

SEQ ID NO: 166419 - DNA, 201 bp, Homo sapiens
gtggattacagaattgtgctgggtcctatggagtgtcagaaatagtgaagcttctggagcttcactgtccaatatggtagccacgtgtgactattaaaatrtaaattaattaaaattaaaagttcaattgctctgaaatagcagccacatttcaaatcttcagtagccagatgtggttattggctaccatattgggtagca

SEQ ID NO: 166420 - DNA, 201 bp, Homo sapiens
cttgggctaaaatgtagttgttggcatttctttctggaggctctgggggaaggtcgttccttggccttttcccatgacgtagaggctgacacattcctctkctatggcctcttcatttttcaaagccagcaagattgcatctctctgtctttcttttgtggtcacattttaccaggactcttctcctgcttttttttttct

SEQ ID NO: 166421 - DNA, 201 bp, Homo sapiens
gcagcctgtaactcccagactgaagcgatcctcctgcctcagcctcccgagtagcttgtactgcagatgtgtgtcaccatacctggctgatttatacttayatttatgtatgtgcatgtgtgtttatatatatatatttgtagaaatgggattttgccatgtttcccaggctgggctcaaactcctgggtttaagcagtcc

SEQ ID NO: 166422 - DNA, 201 bp, Homo sapiens
caaagtagggaaagcacgactttggggccagggccctttctggttcagaatgtccctggccagtgtgcgccgtgcagtgtggaagcacgcttcggtgcgcrtgtaagtttacgtgctatctgtagggacagtgatttttattcattagagtttttgagtctaattgtttttaaactgccacttttgtttgttaaagataca

SEQ ID NO: 166423 - DNA, 201 bp, Homo sapiens
tctgttggctgcataaatgtcttcttttgagaagtgtctgatcatatccttcgcccacttgggtggatgaagctggaaaccatcattctcagcaaactgtygcaaggacaaaaaaccaaacaccgcatgttctcactcataggtgggaattgaacaatgagaacagttggacacaggaaggggaacatcacacaccggggc

SEQ ID NO: 166424 - DNA, 201 bp, Homo sapiens
atgagtactcactctacttttttagtttatatttttattttagttcatttcatttaagacagcgtctgttacccaggctggagtgcagtgacatgatctcrgctcactgcaacctacaccttctgggttcaagtgattctgatgtctcagcctccccagtagctgggattacaggcatgtgccaccacaccggctaatttt

SEQ ID NO: 166425 - DNA, 201 bp, Homo sapiens
ttacagtcgtgtgccaccacgcctggttagtttttgtatttttagtagagatgggtttcactgtgttggctaaggtggtctcaaactcatgacctcaagtkatccgcccgcttcagcctcccaaagtgctgggattacaggcgtcagccactgtgcccggccggatagaaataatttttataaactccttggatgctacct

SEQ ID NO: 166426 - DNA, 201 bp, Homo sapiens
cgcctgccttggccttccaaagtgctgggatatacattttttttttttttttgagagatggagtgtcactctgttgccgaggctggagtgtagtggcgcartctcggctcactgcaacctcctcctccggggttcaagcgattctcctgcctcagcctccccagtagctgggattacagtcgtgtgccaccacgcctggtt

SEQ ID NO: 166427 - DNA, 201 bp, Homo sapiens
taatttccattacattacagcatataaatataaatatatatatatatatatatatatatatatatatatatatatatatatatattttattatttttttttgagacggagtcttgctctgtcaccaggctggagtgcagtggtgcaatctcggctcactgtaacctccgccgcccgggttcaagcgattcccctgccttag

SEQ ID NO: 166428 - DNA, 201 bp, Homo sapiens
taactgtctcttgcgatcccctcctgcacaactgtggcgttctctttttctgactagctgattctgctgctgctggatttattcattcttctccctcacarttttggctcgcacatgcttcctttttagctcatgaccgtgcaattcaactcaacctcatggcatctttttatcagctgtccctgctgcaacaggcttaga

SEQ ID NO: 166429 - DNA, 201 bp, Homo sapiens
ataatttccattacattacagcatataaatataaatatatatatatatatatatatatatatatatatatatatatatatatatattttattatttttttttgagacggagtcttgctctgtcaccaggctggagtgcagtggtgcaatctcggctcactgtaacctccgccgcccgggttcaagcgattcccctgcctta

SEQ ID NO: 166430 - DNA, 201 bp, Homo sapiens
aagactccgtctcaaaaaaaaaaaaaaaaaaaaaaaaaaaagtgccatgtatattttgattacaaaaaatttcatgcggtgttactttctttttattggtrgagggtctttatgttttatttttttgagacagaatctgctccatcactcaggctggagggcagtggcaggatcgtagctcactgtaacctcgaattccta

SEQ ID NO: 166431 - DNA, 201 bp, Homo sapiens
tggctgacagagggagactctatctcaaaaaaaaataataaaaataataaaaaaaaaattacatgaaaaatagagacaaagtctcgctttgttgcctaggstggtcttgaactcctgggttcacgtgatcctcctgcctcggcttcccaaagtgctgggattacaggcacgagctgccacgcctcacctcttgttttcaat

SEQ ID NO: 166432 - DNA, 201 bp, Homo sapiens
taaagacagtgcctccttccaggacaacggtttggcagatttgcttgataaaggttggggtttgtaagcttggggctcctcagccatgactgaaacgtacyatgagcacggcatctaccgggctgttccacatcctccctgtgggactaggggccagggcaatgggaatcagtgcagaaataaagctcatgctgtttgctc

SEQ ID NO: 166433 - DNA, 201 bp, Homo sapiens
atgatgatataatttccattacattacagcatataaatataaatatatatatatatatatatatatatatatatatatatatatatatatatattttattatttttttttgagacggagtcttgctctgtcaccaggctggagtgcagtggtgcaatctcggctcactgtaacctccgccgcccgggttcaagcgattccc

SEQ ID NO: 166434 - DNA, 201 bp, Homo sapiens
cagggctctgcccattagaatctctagggacagaccgaggtttgagagttcctgctcctgatctcaggggaatcctgaattacaggtgttaacctgattakccccagcccagctcttcgttaattacctgaagtgaatgggacagtttccaatactcagcacaaaggcgtgcgcagtgactctgtggcgtactatctattt

SEQ ID NO: 166435 - DNA, 201 bp, Homo sapiens
aggatgatgatataatttccattacattacagcatataaatataaatatatatatatatatatatatatatatatatatatatatatatatatatattttattatttttttttgagacggagtcttgctctgtcaccaggctggagtgcagtggtgcaatctcggctcactgtaacctccgccgcccgggttcaagcgatt

SEQ ID NO: 166436 - DNA, 201 bp, Homo sapiens
aaaaaaaaaaatcactggatttgaagttggcctatgttagattactccaaggaagttagttaatatgttaatatgaatctagatgaacattgagtgttttrctcttcttgttaatttgcgccatctactaatctctggacaatggagaaaaagtcgtaggttatgagttttttatttatggacattaagcaatatctttaa

SEQ ID NO: 166437 - DNA, 201 bp, Homo sapiens
tctggacaatggagaaaaagtcgtaggttatgagttttttatttatggacattaagcaatatctttaaaatgtaaaatgaagccgacaaaatgcacagccrgataacaacaacaaatctaatctaaagtgacaggaagagactctcccagacatttttctctttaatgtaacatgactttaaattgatgcaaccccacagt

SEQ ID NO: 166438 - DNA, 201 bp, Homo sapiens
tagagaaaaggtggcttggctgtttggtttatgtcctaaaaccttatcgtaatgtgattctccttaacagagggattcgtaagcttaggactgatagagawttggcttttctgctgttggattgatagctccttgactgctgaagccattgcccatctgttcaactgttgtattcacgaggaggttagacccctgacccaa

SEQ ID NO: 166439 - DNA, 201 bp, Homo sapiens
ctattcatgtgttcttgaattaaattttcatggcaagcctaagaggccatgactgtccacattttgcctctgagagacgcaaggcttggaggcaggaaatsactcactgaaggccacagcacaaagtggggacttgagtcccgatctcactgattctaaagtccttgctctccaacctctgtccatctgaaatggaaaagc

SEQ ID NO: 166440 - DNA, 201 bp, Homo sapiens
aattgtgatgttcagcagtttataccttgggagctggaagcgtttctccatggtgaatttgtaatattaattggccatgtcagttcatgacaaatgtagtracatctatttcaagtatttcagttttatggtgctgaagaagtgacacgcgctccagataagtaatctcacaaaagatcttcccgctcgctgtggagcgcc

SEQ ID NO: 166441 - DNA, 201 bp, Homo sapiens
ccttagcagacatcatttctctgtttaatctgtctacttgctaattgtctcactgccctccccctccccactggagagtgaatgaaggcttaaggttttgyctgccttggtctctcctgggtcctgagtaccagtggccttacgtggcatttggtagattacatgcttaatgaaaagtgagtgaatgggctgggtgtggtg

SEQ ID NO: 166442 - DNA, 201 bp, Homo sapiens
gggctatcaaaaatatagtttcgtttggaaaacaaaggggtgaggtgggtccaaagtacaggaagctataccatgcaaatgaaaatattttttccaaagcyatctgctaatccctgtgatttaaaaatgtgcgtgtttttagtttctgtctaatttcaaccttttcttgctttagtgattaattaccaggtttctctatta

SEQ ID NO: 166443 - DNA, 201 bp, Homo sapiens
aacagcagcacaacaaaatagccatttacatgtcaagactatattcatagaatccatatgtctaaggtggggaagttgtcattattcctgttttatagatraggaaacagaggcccagatggagtaagtgactgctgaagtacacatgatttgtcagtagaaaggaagagaccaaaggtggcatcaactttatctttcctt

SEQ ID NO: 166444 - DNA, 201 bp, Homo sapiens
gattgcagcaggttagagcacagcatgaagagctgacaatattgaccgactggccctctcagacaaagtttgccaacacccaggtgagcagatacacttatctgtgagcagacgtgattcaggggagattgttgtccctcctttcctaagaaaatgtggaaagatgagaatgttgccaccagtgctgatatggagcgtttt

SEQ ID NO: 166445 - DNA, 201 bp, Homo sapiens
attcttgcaaatgtttttggtttctctgtctactcattacgtacactctgccagaggttgaaaactcaatgttgagatcacatacatcctgaaaacactgkttaaataaaattttggcctgcatcctgtttttgaaaacttgcaatggcttgccaacgttttcaagttgagaagtttcacaaaaaaaattcggatttccag

SEQ ID NO: 166446 - DNA, 201 bp, Homo sapiens
taagtttttaatttttgttttacttttgtcttttaattttaattctattgcaaccaaatctatcagcctgtcttctatgatctctgcttttaattgttacsctttaaaaatccttctccatggtaacattatattgactcatatgtcttactggttgaacgtgcctatgtttgactttgaaatcattaaattcattgagga

SEQ ID NO: 166447 - DNA, 201 bp, Homo sapiens
ggaagtggaggttgcagtgagccgagatcttgccattgttctccagcctgggcgacaagagtgaaactccatctcaaaaaaaaaaaaaaaaaaaaaaaaawttatgtcatttcgttgtcacagcgtcagcagaataaatcttagatcaagatgggattactgcgccactcccttcttcccagtctgtggtttagcacggga

SEQ ID NO: 166448 - DNA, 201 bp, Homo sapiens
atgaaatattaggttaacatggaaaaaacatggcatcccatgttttagtattttttccttatttccaagcagcacctctctttgaattatattctgttctstgtttttataatttgactcccttctattctacatctaaatagtgcattgtctgttttcactcaggactttaaaaatagttctagtactaattgtattttt

SEQ ID NO: 166449 - DNA, 201 bp, Homo sapiens
aacggttatcagtttttgattctacacatacttcaaatactattaatgcaaaatccttctttagaaatgttacctaattccaatgtttcactttattcagygaagacattcctttgattattctggttaggtgttatgatgccaatttgcccacacattttttcttaggcgcctatgcttgcagtagacagagagttgagg

SEQ ID NO: 166450 - DNA, 201 bp, Homo sapiens
cactggataggtaatagacgccggcatggctatgctgtggttcctgctgatgggcacactattacaggtgcatgataagtgtgtcgtacgcaggaagtacrtttcccccagccttccctacctgctgagggctgctcccagcctaaggatttcatccagatagattcatagcgcttccagtaaatgcaccccttgcctttc

SEQ ID NO: 166451 - DNA, 201 bp, Homo sapiens
ctttgccactcagccccagaggtgcttctgcttccctgcaggcttgccctggagcctggcgctagggccctggggctcccttgctcctgcgtgccccctgygcctgccttcctgctgcctggcctttctcccatctgctttcttcctgagtggcccctggccaggggactcgggtgcatacatggtttccaaacgcctttc

SEQ ID NO: 166452 - DNA, 201 bp, Homo sapiens
atggctgtatgacagattctagccatcaagtaaaatcagaaaccaacagcacgtttccttgaataccttttgctttctataaaatggtgtggcattgctgstattttcactcttccttcctaccctggatgctgatttgatgcttccagccttagcggttttcttgcttctaggactgaacagggaagagggaaaagtcaa

SEQ ID NO: 166453 - DNA, 201 bp, Homo sapiens
cctgctgatgggcacactattacaggtgcatgataagtgtgtcgtacgcaggaagtacgtttcccccagccttccctacctgctgagggctgctcccagcstaaggatttcatccagatagattcatagcgcttccagtaaatgcaccccttgcctttcaaagttgaaaaagaaattactttggacacaaagaggtgtttc

SEQ ID NO: 166454 - DNA, 201 bp, Homo sapiens
cccctgcgcctgccttcctgctgcctggcctttctcccatctgctttcttcctgagtggcccctggccaggggactcgggtgcatacatggtttccaaacrcctttcctccagccctcccgactagtgtcttaaatctcaagctggcctctctggctccgctgtttttttttttttttttttttaatttaatttaacttta

SEQ ID NO: 166455 - DNA, 201 bp, Homo sapiens
acgccaccacacctggctaatttttgtatttttagtagagatgggggtttcaccatgtgggccaggctggtcttgaactcctgacctcaggtgattgaccyacctcggcctcccaaagtgctgggattacagtcatgagtcaccatgcccgaccagcaagaccccactgctattgtccagtgtggtaggtacctttgccta

SEQ ID NO: 166456 - DNA, 201 bp, Homo sapiens
tcatgtgttacctgagactctccgcccataggatgtagttcctttccattggaacacatggggaccgagggaataaagaatgttttcatctctgaaaatayctctcattcttccaatcaatgctgctcttttcttgcatactgtatactgggaagcatttgtttcgatttgtggttaaatgtatgtgtccactggacttca

SEQ ID NO: 166457 - DNA, 201 bp, Homo sapiens
atgtatgtatgcatgtatgtatgtatgtttgagacagaatcttgctctgtcgcccaggctggagtgcaatggcaccatcttgacttactgaaacctcctcstcctggattcaagccattctcctgcctcagcctcccaagtagctgggattacaggcacgccaccacacctggctaatttttgtatttttagtagagatgg

SEQ ID NO: 166458 - DNA, 201 bp, Homo sapiens
cgatttgtggttaaatgtatgtgtccactggacttcagtatccaccctttgaaggaccgcaggagaagttgttcaggtagaaacatacaagggccggatgyggtggctcacacctgtaatcccagcactttgggaggcctaggcgggtggatcacttgaggcctggagtttgagaccagcctggccaacatggtgaaaccc

SEQ ID NO: 166459 - DNA, 201 bp, Homo sapiens
tggagtgggatacagcaacaatctatattctgatttcagcaacactgtgcagtgtaattccatattatattacaccacatcttctgtgggtctttctttgrgggaagctaacattttaaaaggtttccctttgtaacctgtaaccccctctaccccaaaagtatattcaagagcgaaacttttggtatgacgatgtcttac

SEQ ID NO: 166460 - DNA, 201 bp, Homo sapiens
ttaaagcgatagtcctattttctaagtaaaagtccaggcatgtgacttaaaaaagaaaaaaaaaaatgttttctggtcaagtcacatgcctctgaggtttktttttttctttctttcttttctttttttttctttttcccagactcctcatacccctcctaggagacagtgattccctggcttcaccaggcaggctcttgg

SEQ ID NO: 166461 - DNA, 201 bp, Homo sapiens
cctacgttactgcacctgtttgagcctcagttttcctgtctgcaaaggagggatgatggtacttacctcaaagaattgtagttggatcaaatgagttggartgggatacagcaacaatctatattctgatttcagcaacactgtgcagtgtaattccatattatattacaccacatcttctgtgggtctttctttggggga

SEQ ID NO: 166462 - DNA, 201 bp, Homo sapiens
gggagtgctagggtaagtggaaaaagcacatgacttggaataaagacttagtacacatcccatgtctgatttatactaactagttcatggacctagcctasgttactgcacctgtttgagcctcagttttcctgtctgcaaaggagggatgatggtacttacctcaaagaattgtagttggatcaaatgagttggagtggg

SEQ ID NO: 166463 - DNA, 201 bp, Homo sapiens
caacggcaaaaaagagaattgcacagaggaacaccacctatcagagttcacactgagtttgcagattcatccttttgcttccagccatcccatggaatgcygttcttggaagggtcatctcatggtccattgtcggccctcttagaagagatttcaggccttcccttgtagcttgatagttacagggagtgctagggtaag

SEQ ID NO: 166464 - DNA, 201 bp, Homo sapiens
tttgcttttaaatgcccgtgttgatttcttaatattttcaacttcctcttctgaagccagttccccccgaccatcagtcatgagtccgttcttttaacctygttcaggtggcgtggggcggtgtgtttggtggggagtgatgggtgcttgcctggaagtgcgagcaattgatcagctgatgaggggtatttattatctgtc

SEQ ID NO: 166465 - DNA, 201 bp, Homo sapiens
aacttcctcttctgaagccagttccccccgaccatcagtcatgagtccgttcttttaaccttgttcaggtggcgtggggcggtgtgtttggtggggagtgmtgggtgcttgcctggaagtgcgagcaattgatcagctgatgaggggtatttattatctgtccctgactcccgagagaggaaataaatccttggaccccag

SEQ ID NO: 166466 - DNA, 201 bp, Homo sapiens
ttgcctgtcatctgttgtttttctaatcttctagtaaacatttggaaagtgaaggtttaggcatgtatgtttctcttatgtaggaaggggaaataaggccwtgagattgcatgagttttctttccaagtttgtgcagatctgcacaatgattgaaatatttgcaacctgtagagcagcagggtatttatttggcagcaaac

SEQ ID NO: 166467 - DNA, 201 bp, Homo sapiens
gtgaggatgatgatataatttccattacattacagcatataaatataaatatatatatatatatatatatatatatatatatatatatatatatatatattttattatttttttttgagacggagtcttgctctgtcaccaggctggagtgcagtggtgcaatctcggctcactgtaacctccgccgcccgggttcaagcg

SEQ ID NO: 166468 - DNA, 201 bp, Homo sapiens
tgtgaggatgatgatataatttccattacattacagcatataaatataaatatatatatatatatatatatatatatatatatatatatatatatatatattttattatttttttttgagacggagtcttgctctgtcaccaggctggagtgcagtggtgcaatctcggctcactgtaacctccgccgcccgggttcaagc

SEQ ID NO: 166469 - DNA, 201 bp, Homo sapiens
ttttgtgaggatgatgatataatttccattacattacagcatataaatataaatatatatatatatatatatatatatatatatatatatatatatatatatattttattatttttttttgagacggagtcttgctctgtcaccaggctggagtgcagtggtgcaatctcggctcactgtaacctccgccgcccgggttca

SEQ ID NO: 166470 - DNA, 201 bp, Homo sapiens
gattttgtgaggatgatgatataatttccattacattacagcatataaatataaatatatatatatatatatatatatatatatatatatatatatatatwtatattttattatttttttttgagacggagtcttgctctgtcaccaggctggagtgcagtggtgcaatctcggctcactgtaacctccgccgcccgggtt

SEQ ID NO: 166471 - DNA, 201 bp, Homo sapiens
tgattttgtgaggatgatgatataatttccattacattacagcatataaatataaatatatatatatatatatatatatatatatatatatatatatatatatatattttattatttttttttgagacggagtcttgctctgtcaccaggctggagtgcagtggtgcaatctcggctcactgtaacctccgccgcccgggt

SEQ ID NO: 166472 - DNA, 201 bp, Homo sapiens
ttgattttgtgaggatgatgatataatttccattacattacagcatataaatataaatatatatatatatatatatatatatatatatatatatatatatatatatattttattatttttttttgagacggagtcttgctctgtcaccaggctggagtgcagtggtgcaatctcggctcactgtaacctccgccgcccggg

SEQ ID NO: 166473 - DNA, 201 bp, Homo sapiens
attgattttgtgaggatgatgatataatttccattacattacagcatataaatataaatatatatatatatatatatatatatatatatatatatatatawatatatattttattatttttttttgagacggagtcttgctctgtcaccaggctggagtgcagtggtgcaatctcggctcactgtaacctccgccgcccgg

SEQ ID NO: 166474 - DNA, 201 bp, Homo sapiens
accaattttaagaaatcctttataggactatttgtgaaattgattttgtgaggatgatgatataatttccattacattacagcatataaatataaatatawatatatatatatatatatatatatatatatatatatatatatatattttattatttttttttgagacggagtcttgctctgtcaccaggctggagtgcag

SEQ ID NO: 166475 - DNA, 201 bp, Homo sapiens
tccactctgggtaactgttttggattattttctctattccaactgaaataaaaaaaaattaattaaatgtggctaggttatcttgacagcagaatccattsccagttaattattattttaatacttgatggtgtctgtcaaattgtcgacatgtgacggtcctttcaaatttaaaggaatagctgatggtcactggccacc

SEQ ID NO: 166476 - DNA, 201 bp, Homo sapiens
cagtgtttacagaccccaaagcttgctgtcccctgggcaggtgcatgagggggtcccaggcaatcaggctcttctcaaacctgaattatacccggcctcarggtataggggtcaggcagctgtttgacaggattcttgcaaatgtttttggtttctctgtctactcattacgtacactctgccagaggttgaaaactcaat

SEQ ID NO: 166477 - DNA, 201 bp, Homo sapiens
attattgttggtgttaaataatgattatgtaaagcactagactagacattcgtcggcaaagtttttctgcaaagaatcagatagtaaatatttttgctctyatcagccagacagtctctgcggcaaccattcaagcattgttgaatacattgttgagtgttacatgagactattgtaatataaaagtagcctgggacaaca

SEQ ID NO: 166478 - DNA, 201 bp, Homo sapiens
gtattgttccatttttgagtattactttaatacattattgataagttaatttagaagtatcaagtgaaaggggaagaaaaacagttttgaataaaaacggwgtttcctctggactattttgccaaatgcatttttattggtagaacgtaagcaaatttaaaaaagcaacaaaagcagtttttatgaatacctagcgtactt

SEQ ID NO: 166479 - DNA, 201 bp, Homo sapiens
cattgccctccattcagatcttgtcacttaggccttggtagcatgagctattaacagccctccatatttactatttttttttttttttttaactctgggasttcctgttgcagaaattggatcacttacctaaaaagctccccacccccacctttggtgactggtgggtttcatcaccaggaaagcacattgttccaactc

SEQ ID NO: 166480 - DNA, 201 bp, Homo sapiens
atttattttgagagcaagcacgggggtttatgtgatggctccacagagcagtgaaaagactcccgccctactgctcgcaacctcagatgtccctgggcacwagcccatctgtatgtctttaaaaaaaataaattaaatttttaaaaacatgactttctggccaggcgcagtggctcatgcctataaccctgcacttagaga

SEQ ID NO: 166481 - DNA, 201 bp, Homo sapiens
tgcggtggcgcaaacctgtaatcccagctacttgggaggctgaggcaggagaatcgcttgaactcgggaggcggaggttgcagtgagtcgagtcgtgtcartgcactccagcctgggtgacagagcgaaactctgtctcaaaaaacaaacaaaaagaaacataccgggagatctggttctattgaaccccagtgcagccat

SEQ ID NO: 166482 - DNA, 201 bp, Homo sapiens
cagtggtgtgatctcagctcactgcagccttgacctcctgggttcaagagatcctcccacctcagcctcctgagcagctgggaccacaggtgcttgccacyatgcccaactaacttttgtattttttgtagagacagggtttcaccacattgcccaggcaggtctcaaactcccgggctcaagcgatcctcccaccttggc

SEQ ID NO: 166483 - DNA, 201 bp, Homo sapiens
atcatattctcttcactgaaacatttcagatgacttaaaaattcaccttgtagaacttttaaaattgaaactttctggtgaacatcattagttgacagatrtgtcattgaagtttcatccttcttcatttcagagtctgctggaagacccttcatttaccactctctccttcctggaggtgtggaaatactctacctgggt

SEQ ID NO: 166484 - DNA, 201 bp, Homo sapiens
catattctcttcactgaaacatttcagatgacttaaaaattcaccttgtagaacttttaaaattgaaactttctggtgaacatcattagttgacagatatrtcattgaagtttcatccttcttcatttcagagtctgctggaagacccttcatttaccactctctccttcctggaggtgtggaaatactctacctgggtga

SEQ ID NO: 166485 - DNA, 201 bp, Homo sapiens
aatcttggggatggggggttccactggtatattttctttactgtttaagaaagctcaaaattctctctgctcttttccaagccaccaatcaaaactgacaytttctaagtgtcctcattgccctctgggaatgttcatggcctctgggagtccaagaactacctttacactggatcttcactgcttttactattgtgtggc

SEQ ID NO: 166486 - DNA, 201 bp, Homo sapiens
ttcaccttgtagaacttttaaaattgaaactttctggtgaacatcattagttgacagatatgtcattgaagtttcatccttcttcatttcagagtctgctrgaagacccttcatttaccactctctccttcctggaggtgtggaaatactctacctgggtgaggctctcgtggctttttgtgccaagtgtccgtaaacttc

SEQ ID NO: 166487 - DNA, 201 bp, Homo sapiens
ggaagaacatacttcatacaaagctatgaagcatattggaagattttaggtgccctgtcttcctggatataaaatgactccaaactcagtgatactgatcrccctggcttcttttccacctttctcacttcattgtctttttgtgtgtttctgacatctgttgacaaatgggcaatcttggggatggggggttccactggt

SEQ ID NO: 166488 - DNA, 201 bp, Homo sapiens
gggggcctggaaggggagaaggggcaccagaaggagaaatgggaggaaagggcgagtgagatagcaaagagaactcagaaagtaataaagccctgcagtartcagagggctgaggccaggtccccagtgagcggctgaacacacagtgattcaaacccactccagacctgtgttcttaatcattaccttcacctggaggga

SEQ ID NO: 166489 - DNA, 201 bp, Homo sapiens
tctgtagcttcttccagcatgtgatcatacatctacctaacctctcccattggttgaatttaatatactagtgaattttccattgcaaagatgaggttacraatcatagtgttcatactcagaaggactttataaatattttgcctttttgaagtatatacaagaaatgaaaaaaaaaacaggaataaataaaaagaataa

SEQ ID NO: 166490 - DNA, 201 bp, Homo sapiens
gagatttactgaactcagtcgtttcacctggctggggaggcctcaaaattatggcagaaggcaaaggaggagcaaaggcacatcttacatggcagcagacmagaaagcgtgtgcaggggaactgccctttataaaatcaccagatctcatgagatttattcactatcaagggaacagcacaggcagatcccatggctttga

SEQ ID NO: 166491 - DNA, 201 bp, Homo sapiens
gattccagcattttgggaggccaaggtggacggatcaccagagttcaggagtttgagaccagcctggccaaaatggtgaaatgccatctctactaaaaacmcaaaaattagctgggtgtgtggtagtgtgtgcctgtagtcccagctactctggatgctgaggcacgagaattgcttgaacctgggagtaggaggctgcag

SEQ ID NO: 166492 - DNA, 201 bp, Homo sapiens
cccaggctggagtgcagtggcatgaccatggctcactgcagcctcgacctctggggctcaagcgatccttctgcaacagcctccctagtagctgggactayaggtgcatgccaccacacccagctaatttttatattttttgtagagatggggttttaccatgttgcctaggctggtctcgatctcctgggctctagcaat

SEQ ID NO: 166493 - DNA, 201 bp, Homo sapiens
gaccctcaataaggagaatcagagaaagaagaaataaaacatattactccattcccatacttctgtgaagaaatacccgagactgggtaatttataaagaraaagagatttactgaactcagtcgtttcacctggctggggaggcctcaaaattatggcagaaggcaaaggaggagcaaaggcacatcttacatggcagca

SEQ ID NO: 166494 - DNA, 201 bp, Homo sapiens
tcgacctctggggctcaagcgatccttctgcaacagcctccctagtagctgggactacaggtgcatgccaccacacccagctaatttttatattttttgtrgagatggggttttaccatgttgcctaggctggtctcgatctcctgggctctagcaatcctcccacctcggcctcccaaagtgttgggattacaggcgtga

SEQ ID NO: 166495 - DNA, 201 bp, Homo sapiens
tctctcagcttctcctctctttcccatccaactgagcagcaccaataaatagataagaaacctgaaggtctacatcaaatcagcttctattgctgcaaaaytcttctagctaacttcattctaaaagctgtctgaaatatatttacttacacccgagaagattcaaaaacattaccgctgaaccccgatgctttgggaaca

SEQ ID NO: 166496 - DNA, 201 bp, Homo sapiens
atactctatttcagttgagtttttagtttgctctgttacgtgaggacacatcacttgcacctcagtgtgagtttgaaagtgttttctctggagaataattytgaagaaataggccctccagatatcagtagtgacaggggtatcagtaatgttgattactaagttcttgccacaggtagaagccatgctactgcacaagtt

SEQ ID NO: 166497 - DNA, 201 bp, Homo sapiens
gctcctaggttttcttacttccaaaacagtgggcaagaacagctaccttttagaagcaggaaaaaggaacataatgaataaacctaaaggatttaaaaacktggaagacactaagaaactatattgccgagaaagagaaatgtaaattccgctggataaattagcgtttgcggttacttctctctttgttgcttaagcaga

SEQ ID NO: 166498 - DNA, 201 bp, Homo sapiens
agccactgtacctggactccactatgccttcccctccccttccctcccttccccaccctaaagagtctcgctcttttccccaggctggagtgcagtggcastatctgggctcactgcaacctgtgcctcccggattcaagagattcttgtgcctcagccttccaagtagctggttttgcaggcatgcaccaccacacccag

SEQ ID NO: 166499 - DNA, 201 bp, Homo sapiens
cccggccttacgtttcagcatctttcaatccatctaatacgcagtgccagggaaggtttgtgaaaacatttgaatcacagagtcacaaacagtgagaatakctgcagttatgtttgtgatgctctaatgaacttacaaaaggccaggcctagtatttcagctgtgtccatgatgtctctgatggaaatggacaggtaacat

SEQ ID NO: 166500 - DNA, 201 bp, Homo sapiens
accccatctctattaaaaatacataaattagtcgggcatggtggcatgtgcctgtagtcccagctgctcaggaggctgaggcaggagaatcactcgaaccygggaggcagaggttgcagtgagcctagactgcaccattgtactccatcctgggcgacagagcaagactccatctcaaaaaaaaaaaaaaaaaaaaaaaag

SEQ ID NO: 166501 - DNA, 201 bp, Homo sapiens
ggacacatttttaacatagacaccaaaagagaggctggaagagttgaccacttagaaatgtcacgagtgtctgtgaatagtgttgggggctgagaggcaaragaagaaaatagtcctaatgttgtacaagtagcaatggaaacaaacttgttaaaaaaaatttaattttgtttatgcatgtgtgcataaacaaagcaatag

SEQ ID NO: 166502 - DNA, 201 bp, Homo sapiens
aacagtcagagtgtccaagtaatctgagctagaaagttccttctttcagagaaaagttataaaaagtatatttgccggatccaaaaaaaatactgtgtatsaactactgagacctgcataatgttttcttagtattctcactctttaaaagaaaaaagaaaacctgtaaaatttgggaacttaaactttttttgatatttt

SEQ ID NO: 166503 - DNA, 201 bp, Homo sapiens
gcctgggtgatagagcgagaccctgtctctgaagatacaagaaggccacatgtggtggttcacccctgtaatcccagcagtctgtgagactgaggcagaargattgcttgagaagtttgagattggcctgggaaatatagcaagatcccaaccctattaaaaaattaaaaatgaaaataaaattttaaagaaaggtatttc

SEQ ID NO: 166504 - DNA, 201 bp, Homo sapiens
tgagcacacttcagacttccagtcttgtgtggcctgtctaccacaccatgagacttcatgtctctcctaaatgaggagaaccaaagctggaaattgtcacyccctgtcagcccacagcactggtttctaaacctactggcctctaccgcttcacttctcactgtaatctctctgaccctaccttccagcttctcttgagaa

SEQ ID NO: 166505 - DNA, 201 bp, Homo sapiens
gtcatggtgattgtcaactgtcttggcgctggtgagggggctgtttagcatggaaataggattataatgacacctgaggtctttttgaagtccttgggtcrgctatcttgcttctaacaaatctcagctggtctggttacagagggaactttttatcacaggtgtcctgtttcttaaagataagcagtgttattacagggt

SEQ ID NO: 166506 - DNA, 201 bp, Homo sapiens
tcttgaaatgggcagtgaacttcccggaaccagagtgttgccttcctttttatccttttatggctgcttctgatcattgtcatggtgattgtcaactgtcytggcgctggtgagggggctgtttagcatggaaataggattataatgacacctgaggtctttttgaagtccttgggtcggctatcttgcttctaacaaatc

SEQ ID NO: 166507 - DNA, 201 bp, Homo sapiens
tggaaagttactctctaagtcagggcttcttttcttcaactttggtgtgagactccgctggagagctggttagaaaaacacaagtctcgggccccaccccscagagcccctcattctctagttctgggttggggcccaggagtctgcttttctagcaagcgcccagatgtcactgatgcttacagctctcagaccacagtt

SEQ ID NO: 166508 - DNA, 201 bp, Homo sapiens
tccatgctccaaatgactgtgacgactgagaaaatgcatgtatgtaaagtctgcagctggtgacattgtagacactcagcaaatggcctttggtgttactrttattttatttttactaattattttttacacctacaaatcaggatctgctacaatcgcttgatatttgaaaattgggcctaacccactatgccactcttc

SEQ ID NO: 166509 - DNA, 201 bp, Homo sapiens
ttccattttctttgacatgactatgtctgttcctcttgattttaggcatctttttcagatgagttgccataaaagcagcctgctctggataagtgaggtayagcaggacacactgcaaatactaggaatccttaagtacagtggaaccccagagcactctacctgctttctttctcacctccttaaaaactttttttgccc

SEQ ID NO: 166510 - DNA, 201 bp, Homo sapiens
ttttttaaggaaaattttgaaaagtctacaagttaaatttttttttctatcccatacattttccatcctaaggcattgaaaaagcacactgtgaaatacttagtgtatctagaaacatcagggaagaatgcttccctcctaagcaaaattttgccttctgaaactttttcagcattcagtctttttatataatacttagaa

SEQ ID NO: 166511 - DNA, 201 bp, Homo sapiens
tgtcaccggtataatttaaagaaattatacttaagctttgtctcacttagaagataatatagaacagtggtgtttttttaattaaaaaaaaagttaaaatracggttttgtatccttgctttacttcttaaacatatgggaggaaaaaaaatctttaacaagtttatttattttcattttctgctaaattactttcagaac

SEQ ID NO: 166512 - DNA, 201 bp, Homo sapiens
tgaactttctgtcaccggtataatttaaagaaattatacttaagctttgtctcacttagaagataatatagaacagtggtgtttttttaattaaaaaaaargttaaaataacggttttgtatccttgctttacttcttaaacatatgggaggaaaaaaaatctttaacaagtttatttattttcattttctgctaaattac

SEQ ID NO: 166513 - DNA, 201 bp, Homo sapiens
gattgtctagttctaggaaaacaagctcagggctcccaccgattgtacattatggtgagttggataactatttcattatatattacaacgtaataataatagaaataaagtgcacaataaatgtcatgtgcttgaatcgtcccaaagccacccccactcctttgagtctatggaaaaattgtcttccagaaaaccacttgc

SEQ ID NO: 166514 - DNA, 201 bp, Homo sapiens
ggattgtctagttctaggaaaacaagctcagggctcccaccgattgtacattatggtgagttggataactatttcattatatattacaacgtaataataatagaaataaagtgcacaataaatgtcatgtgcttgaatcgtcccaaagccacccccactcctttgagtctatggaaaaattgtcttccagaaaaccacttg

SEQ ID NO: 166515 - DNA, 201 bp, Homo sapiens
gggattgtctagttctaggaaaacaagctcagggctcccaccgattgtacattatggtgagttggataactatttcattatatattacaacgtaataataatagaaataaagtgcacaataaatgtcatgtgcttgaatcgtcccaaagccacccccactcctttgagtctatggaaaaattgtcttccagaaaaccactt

SEQ ID NO: 166516 - DNA, 201 bp, Homo sapiens
aggtcctccccctgtcagatcagcaacagcattagtctcataggaccgtgatccctattgtgagccacacatgcaagggatctaggctgcatgctccttasgaaaatctaatgcctgatgatctgtcactgcctcccatcaccttcaagatgggattgtctagttctaggaaaacaagctcagggctcccaccgattgtac

SEQ ID NO: 166517 - DNA, 201 bp, Homo sapiens
cccaaaagacctctagtttctaaagccttcgatgatttgatgtggtacatggatgtggttccaaaaaacatggactcacattccttttatttattttttttcatccttttcagtctttcaaaattccagttggagaaagccttagttagggcctagcatattttgatcctatcatatgctagcatccctttctaacagaga

SEQ ID NO: 166518 - DNA, 201 bp, Homo sapiens
acccaaaagacctctagtttctaaagccttcgatgatttgatgtggtacatggatgtggttccaaaaaacatggactcacattccttttatttattttttttcatccttttcagtctttcaaaattccagttggagaaagccttagttagggcctagcatattttgatcctatcatatgctagcatccctttctaacagag

SEQ ID NO: 166519 - DNA, 201 bp, Homo sapiens
attctccatgccactccttatctctttagtgcagaaaacggagaggaggttcagtattcttaagaaactcccatgattgctttgaggcaatggatttaacrggtatctttatcccttatttacgcactgactgtggtactgagtcatccctggtgtttctggattttattggcaatgccaagagagcaggaagactgggac

SEQ ID NO: 166520 - DNA, 201 bp, Homo sapiens
aatgagggcattggaaatccgctctcaggtggccatcgaaaatagtcagcctgagtgttgctacctgttttccataattgtgtagctttgcctttccttarttaatctgttcaataaactcctctgcagaatccaaatgcttaaattcagtttctttttgtctttatggtgtttttcattgttaacgtggcatcggagtag

SEQ ID NO: 166521 - DNA, 201 bp, Homo sapiens
ccaggacaggtgccctcctcagcggagacaactgtccccctccatcctgcaggagttttgcagccatccttccagccactgcttctctaccggggcaaatyttcccccaagggataattgataatgtctgaggcatttttaattgtcacaacttggggaaggggcaagggattgagggagagtgctcctggcatctggtgg

SEQ ID NO: 166522 - DNA, 201 bp, Homo sapiens
taattgtgtagctttgcctttccttagttaatctgttcaataaactcctctgcagaatccaaatgcttaaattcagtttctttttgtctttatggtgtttwtcattgttaacgtggcatcggagtagctcgacttttgcatcatgataaattcataacccaagagaaggcagaaaacataattattatcaattgcctctct

SEQ ID NO: 166523 - DNA, 201 bp, Homo sapiens
ttgtctttatggtgtttttcattgttaacgtggcatcggagtagctcgacttttgcatcatgataaattcataacccaagagaaggcagaaaacataattrttatcaattgcctctctcctggaattgccattggctgagtggaacaaaatacgaacttaaggagtagctgattcagagaaatccagggtaggaacgggtc

SEQ ID NO: 166524 - DNA, 201 bp, Homo sapiens
tctttatggtgtttttcattgttaacgtggcatcggagtagctcgacttttgcatcatgataaattcataacccaagagaaggcagaaaacataattattrtcaattgcctctctcctggaattgccattggctgagtggaacaaaatacgaacttaaggagtagctgattcagagaaatccagggtaggaacgggtccca

SEQ ID NO: 166525 - DNA, 201 bp, Homo sapiens
gcccttttgaagatcaaatgggatctgtaaaaactctttgaaaaatgtagactgcttcttatgtgattcttactggtctattatttatcaagaaattaaamaggaatgaatatctgtagctgtttttctttttctttcttttcttttcttttctttttttttaagatggagtctcgctctgtcaccgggctggagtgcagt

SEQ ID NO: 166526 - DNA, 201 bp, Homo sapiens
ttcttttcttttcttttctttttttttaagatggagtctcgctctgtcaccgggctggagtgcagtggtgctatttcggctaactgcaatctctgcctccygggttcaagcaattctcctgcctcagcctcccaagttgctgggactacaggcgtgcgccaccatgcccagctaatttgtaattgtttgtttctaaaagga

SEQ ID NO: 166527 - DNA, 201 bp, Homo sapiens
tctgtcaccgggctggagtgcagtggtgctatttcggctaactgcaatctctgcctcccgggttcaagcaattctcctgcctcagcctcccaagttgctgrgactacaggcgtgcgccaccatgcccagctaatttgtaattgtttgtttctaaaaggatattcagtgcttccactgtcttttagaagtctgtagaaggaa

SEQ ID NO: 166528 - DNA, 201 bp, Homo sapiens
tggatttgtcccattacactgctttctttagtgcataagatcttgaagggagggatgcattctatgcaccccaagtttctggtttactcgtggtttcaggwgtccctttagacaacatcactgacaactcactatgtaaaaccaaacaaattattagctttcttactgtgtgtttgcatttgctgtgcccagggaaatggg

SEQ ID NO: 166529 - DNA, 201 bp, Homo sapiens
cctcccgggttcatgccattcttctgcctcagcctcccgagtagctgggactacaggcgcctgccactacacctggctaatttttttgtagttttagtagrgatggggtttcaccgtgttagccaggatggtctagatctcctgacctggtgatccgcctgtcttggcctcccaaagtgctaggattacaggcgtgagcca

SEQ ID NO: 166530 - DNA, 201 bp, Homo sapiens
actatgtaaaaccaaacaaattattagctttcttactgtgtgtttgcatttgctgtgcccagggaaatgggaagtgcattgaggaagaggccccaagacawggagaagtcactccaactttccgggaacaccttttgctgtgccatgtgcatggaaggagaggaatgaatgactgttgaagccagatggccttgctcattg

SEQ ID NO: 166531 - DNA, 201 bp, Homo sapiens
agctttcttactgtgtgtttgcatttgctgtgcccagggaaatgggaagtgcattgaggaagaggccccaagacaaggagaagtcactccaactttccggraacaccttttgctgtgccatgtgcatggaaggagaggaatgaatgactgttgaagccagatggccttgctcattgattctctcctttcccgccctctcaa

SEQ ID NO: 166532 - DNA, 201 bp, Homo sapiens
tcatagtttaagtcatcaggtggtgactggaggagccagaaggtccctttgggcctgtcctctcaccagcatcaactgcaccaaaaagatctcattctgaktatcagggatgaacccccccactgggtgatcaggcaaactacatgcattttaaaaaactatatcctgctgggtgcagtgcctcatgcctgcaatcccagc

SEQ ID NO: 166533 - DNA, 201 bp, Homo sapiens
ttcttactgtgtgtttgcatttgctgtgcccagggaaatgggaagtgcattgaggaagaggccccaagacaaggagaagtcactccaactttccgggaacmccttttgctgtgccatgtgcatggaaggagaggaatgaatgactgttgaagccagatggccttgctcattgattctctcctttcccgccctctcaagcca

SEQ ID NO: 166534 - DNA, 201 bp, Homo sapiens
tgaagccagatggccttgctcattgattctctcctttcccgccctctcaagccatccagaaggagaatgaaatgctcaaatcaagggagttaactatggcmaagatgttagtaatgggaaactttggaggaaggcaaagtcagaaattattctgcagggagatttggggatgttggatgctaaggcccaagccgtctattg

SEQ ID NO: 166535 - DNA, 201 bp, Homo sapiens
cctgaggcataaatgggttttaagctccatacagtaaaacctagcatatgaaaacagttctggctgatgggttggtagaagtgatagatatagatacatayatacacatatatgcacagtaatagatataggtaaagaccttgatatatgtacatatattgtatgatacatatccatgcatatacgtgggtgtacacacac

SEQ ID NO: 166536 - DNA, 201 bp, Homo sapiens
cacccaaaagacctctagtttctaaagccttcgatgatttgatgtggtacatggatgtggttccaaaaaacatggactcacattccttttatttattttttttcatccttttcagtctttcaaaattccagttggagaaagccttagttagggcctagcatattttgatcctatcatatgctagcatccctttctaacaga

SEQ ID NO: 166537 - DNA, 201 bp, Homo sapiens
tccaagcacccaaaagacctctagtttctaaagccttcgatgatttgatgtggtacatggatgtggttccaaaaaacatggactcacattccttttatttattttttttcatccttttcagtctttcaaaattccagttggagaaagccttagttagggcctagcatattttgatcctatcatatgctagcatccctttct

SEQ ID NO: 166538 - DNA, 201 bp, Homo sapiens
aaaaaaatcagccccttaaaatgctgactagtaacatcagtttttggaaggatactatttttgtttccattctgtctttatagtttgaacttttccttttsatagtctgtaaatattcatcatctcagagccttttgaattgcaatggcttttagtcaaaactgagcgcaatgtgccatttgaataataagaacctcatta

SEQ ID NO: 166539 - DNA, 201 bp, Homo sapiens
aaaacttagcagttgtaagttacttacagagaagactgggctagttggctgtgctatcatttttgttgaaatactgctttggggtcgccatctgggaatgytcttcctgttttatgggggaaatacatacatgcgtttttataatatgtagcctgcatatcccttggggtttccactgggggcttggctgagcagagcaat

SEQ ID NO: 166540 - DNA, 201 bp, Homo sapiens
aagttaacaaccagaagatcacgagctaaaccaataaagtgaattatggtcagttgcagattcactgccagacctgggaggaaatctcaccttggcagatsgagtctcttgtcctcgcctaacaatcagcagttcacctctcgaaaaggggttccgtttgcaatctgtcagccactaccttcttatttagagcatgtccca

SEQ ID NO: 166541 - DNA, 201 bp, Homo sapiens
gctggatgatgggtatagggtgttctctgtaccagtttggccatgttttgtgaatctataattagtttcaaataaaagttaacaaccagaagatcacgagstaaaccaataaagtgaattatggtcagttgcagattcactgccagacctgggaggaaatctcaccttggcagatcgagtctcttgtcctcgcctaacaat

SEQ ID NO: 166542 - DNA, 201 bp, Homo sapiens
agtgtgagcaagtcataattctgggttattctaattaatggagatttgggggttgttccttactgaagcacatcctgattgatgcagaggatcttgtgagycatgctaaggaattcagcccacgtcttactgaccactctgacgtactaaagggttggttttgccaatgaagagagcaggctctgactgaacgaggcctga

SEQ ID NO: 166543 - DNA, 201 bp, Homo sapiens
acctctcctcggccttgcaaagtgctgggattataggtaccccgcctggctgatactttccttagttgttttcagtgtaataacctgtcttcagtctactytttgtccttttctctcctttcctccctgaatactcaagcttccagtgcacagatttctccaaccctgaatgtgactgataccaacaccatactagctctt

SEQ ID NO: 166544 - DNA, 201 bp, Homo sapiens
ggaagaatgaggatttggggaaggaaaattttgagagccattttacagcatttcaagattcagtgatctcagaacctcttttggttaaacaagcatgggargatggatgattggatggatggatgaatggataggtaggtgggaagataaatggatagacatataggtaggaaggaatgagggatatatggaaggctagca

SEQ ID NO: 166545 - DNA, 201 bp, Homo sapiens
ttccaagtagctggttttgcaggcatgcaccaccacacccagctagtttttctatttttagtagaggcggagtttcaccaagttggccaggttgttctcaractactgacctctcctcggccttgcaaagtgctgggattataggtaccccgcctggctgatactttccttagttgttttcagtgtaataacctgtcttca

SEQ ID NO: 166546 - DNA, 201 bp, Homo sapiens
gggtgagagacatcagcataatgcaattaaggcccattggattagaatttgcaggatgccattagcaataagctctgagtgtagattattgccgtgcttamattttctccttcagcggtaacacttctcttgtaaattctaactgggtaaaataaatatgatataaaacagacacaaataagaatatatagatgatgttaa

SEQ ID NO: 166547 - DNA, 201 bp, Homo sapiens
gagattcttgtgcctcagccttccaagtagctggttttgcaggcatgcaccaccacacccagctagtttttctatttttagtagaggcggagtttcaccawgttggccaggttgttctcaaactactgacctctcctcggccttgcaaagtgctgggattataggtaccccgcctggctgatactttccttagttgttttc

SEQ ID NO: 166548 - DNA, 201 bp, Homo sapiens
ttcatttctgcttgcacactggacaatgctttttttcaggaacacatctctttcttgtaatatctttgtaaaagcagcgtggagcagccagcacacaatgmcattttagctcttccctagagcttcagactcaataggtactagatctaccttatgagttatggcagagcacaattttaccaaaagtctttcagtgtaaag

SEQ ID NO: 166549 - DNA, 201 bp, Homo sapiens
gatccgcctgtcttggcctcccaaagtgctaggattacaggcgtgagccaccgtgcctggcctgatgattcagtttttaccccaagatgcagtatgcctcmgtctcactaaaatatgccaatatgttcttcttcttgaggatcagggctgatttcttctactgggaaaatgtatcccctgtgtttggccccagaggcatca

SEQ ID NO: 166550 - DNA, 201 bp, Homo sapiens
ggtggggaggagttcatattcttttttttttttgagtctggattttagaataaattcactgtgtacatagctattccatctttaaaaacctttgtgaatgytaatatacagcctttataaatttgaggtataatgttcaaaatgctctaatccctaaattttccagtctaggttattatacttttatgactattcattttg

SEQ ID NO: 166551 - DNA, 201 bp, Homo sapiens
cctcccggattcaagagattcttgtgcctcagccttccaagtagctggttttgcaggcatgcaccaccacacccagctagtttttctatttttagtagagrcggagtttcaccaagttggccaggttgttctcaaactactgacctctcctcggccttgcaaagtgctgggattataggtaccccgcctggctgatacttt

SEQ ID NO: 166552 - DNA, 201 bp, Homo sapiens
tttttttctaactgagggattaaggatataaacccaacttcaaatttctttctgggtggtcttgaaaacttaacagtaggtcctgtaaagaggtgggggaraggaaaaagaaatcctttactctcatctgctggttttaaaatgagaaaaatacacacacacacgtaatgatgttcgtgatgttaatggagggaaatatca

SEQ ID NO: 166553 - DNA, 201 bp, Homo sapiens
tgttttccttaaactctgtgcacatgaatatttgtggtatatggcttaattgtaagcgatcaggcatcaatggctttttatgaggcaaaatctactttctrcatttgcgtgtgccattattatagattgctgatgtttgccaatggatattcttggaagtcgtcttctggtttaaatgcagttaagtatttaaaaataata

SEQ ID NO: 166554 - DNA, 201 bp, Homo sapiens
tgggagatagtttgagatttgaggcctctgaagaataggtgtttttgtgatgattttggcttttcagtttgacagttggctttgcttttttgacagacacmttaagagcttcaagggtcatttcatggtttgtcctttccatgtcagggacacctttcacgtggccattttaagcacaggaattgccttcaagtagtttac

SEQ ID NO: 166555 - DNA, 201 bp, Homo sapiens
tctggcaaaaatggttttattgtagtttcatccttgttgagtcaataattaactgagtttgattaaagctgaattttcctaagtatgaaaaccatgtgggyccttctctttcctcgtgatgcacggtgatagtgcgtatctaacacttgaaggtgtccacgctggccctagctcagtgagatggctttgctttgggggggt

SEQ ID NO: 166556 - DNA, 201 bp, Homo sapiens
tagtaaccatgaacctgtatatcaaaaagcgtgactagagtttcatagttaaacatgtgctgaaatccacagtggacaccagagagggtcatggaatctgrgaatggatgacttgtcccatgatgataatatctgtgttcctacggctgggcccggtggctcacacctgtaatcccagcactttgggaggccgagatggga

SEQ ID NO: 166557 - DNA, 201 bp, Homo sapiens
cccctggctgtccaccagcccctttgtgatagtctcatagtcttatttgtcttttggcttgtatcccacctgttcactttttaccatagctaacctttctmagtggtcaggtgggactcatggagattttccgttctttggagactagcagcgactgcagattactcatcagctgtctccttgagtccacaatgccgggcg

SEQ ID NO: 166558 - DNA, 201 bp, Homo sapiens
gcccggtggctcacacctgtaatcccagcactttgggaggccgagatgggaggatcacgaggtcaggagttgaagaccaccttgatcaatatggtgaaacsctatctctactaaaaatacaaaagttagccggtgtggtggtgcatgcctgtaatcccagctactcaggaggctgaggcaggagaatcacttgaacccagg

SEQ ID NO: 166559 - DNA, 201 bp, Homo sapiens
ccagcactttgggaggccgagatgggaggatcacgaggtcaggagttgaagaccaccttgatcaatatggtgaaaccctatctctactaaaaatacaaaarttagccggtgtggtggtgcatgcctgtaatcccagctactcaggaggctgaggcaggagaatcacttgaacccaggaggcggaggttgcagtgagccgag

SEQ ID NO: 166560 - DNA, 201 bp, Homo sapiens
ttttttgaaagagactgtttaaaacacgtaattttgctaagttatggctcatatcgtatttgttattttggttttgaaaaattgagtaggaagcaattgcrttcttaaatgacttgaacatcaaaggcaagtagtgtcttgttttaggagcagccaggctcctatccctctgatccagccaagtgctttcacttggtccca

SEQ ID NO: 166561 - DNA, 201 bp, Homo sapiens
ggacccggttggctctgcaaaccgcatttccttggctgaacgccagaggagagaaatgatccggcaagaagacacaccattccccgtcagccccttcccgwcccttgcacccctggatcttctgctgagtatcggattggtctgcgtccaagagctcctcgcttggccagcaggggctgcctggagaaggggaggacaggc

SEQ ID NO: 166562 - DNA, 201 bp, Homo sapiens
tggactctgtgggtagagacatggatatttttccttttataagaaaggtcttgtctttcctcagaaggcattgtgagcaaaataagggaagaaaaagagamgtagataagaaaaacaaatcacaatattgaagcaggacccgagtactatagccttcctcatattttggtatctggaaccgaggttgctaattaatgaccc

SEQ ID NO: 166563 - DNA, 201 bp, Homo sapiens
ccctggttgacctggaatgacctagaccagcagtcacaagctcctgcccatggacaaaatacagccggtacctctttggctatggcctgcaggctcagaayagttcttacattttcaatcatctgcaaaaaagaataaagaggagaatattatttcttgaaggaggaaaatgatatggaattctgatttcagtgtcataaa

SEQ ID NO: 166564 - DNA, 201 bp, Homo sapiens
ggcgcgatctccactcaccgcaagctccgcctcctgagttcaactgattctcctgcctccgcttcccaagtacctgggattatagacacccaccaccatgyacagctaatttttgtatttttagtagagatggagtttcacccttttgattggttggccagtatggtctcaaactcctgacctcaagtgatccacctgcct

SEQ ID NO: 166565 - DNA, 201 bp, Homo sapiens
aaatattttgagaactctgaaataatgcacaccagaaacgtccagctgaaaacaaaaagggaacaagatgacattttgcaatcccatgcacgttgcaggcrcgttgaatgtgaaggtcagtagtacttcagagggcaggcctgttgcccccaagcctgttgcctaagaaatgcccaggccctttgaacaaaatggattcga

SEQ ID NO: 166566 - DNA, 201 bp, Homo sapiens
attgactttttcaactctgtaatgtcctaactttcatttctgcttgcacactggacaatgctttttttcaggaacacatctctttcttgtaatatctttgyaaaagcagcgtggagcagccagcacacaatgccattttagctcttccctagagcttcagactcaataggtactagatctaccttatgagttatggcagag

SEQ ID NO: 166567 - DNA, 201 bp, Homo sapiens
cctccatggtcccatctgaactggatctagagaagggttactctccttagggaaattagcagctgtcagcccacttcctgctggtgcatggttgaggctcygtttttttgtttttagcagttataggcttttaaggtcagattaatctttatttaatttcttaataatcttataggattcagatgtatttgtttcccatta

SEQ ID NO: 166568 - DNA, 201 bp, Homo sapiens
ccgcacccggccctgtttttgcatttttagtagagacgggttttcaccaggttggccagcctggtctcaaactgttgaccttaggtgatctgcctacctcsgcctcccaaagtgctgggataacaggcgtgagccactgcgcctgtctacattttctgtctttactggtattatggtgggaacccataaaccactgcgagg

SEQ ID NO: 166569 - DNA, 201 bp, Homo sapiens
atccaggtctgaaatctgctctctggagggaagtgccctgtccattatcctccatggtcccatctgaactggatctagagaagggttactctccttagggraattagcagctgtcagcccacttcctgctggtgcatggttgaggctccgtttttttgtttttagcagttataggcttttaaggtcagattaatctttatt

SEQ ID NO: 166570 - DNA, 201 bp, Homo sapiens
tgcgcctgtctacattttctgtctttactggtattatggtgggaacccataaaccactgcgaggcagataccattttaagcaggaaaccttatttttttcygaagcacatttaaaaatattttccagtttatctattaaacatcctcctttgcttctggagatcctctgaaagatttatctctttcgattcatctgtaaag

SEQ ID NO: 166571 - DNA, 201 bp, Homo sapiens
gtctgtgtgcgactgtcagctgctctctactgctcctcatagacttcctgtctgcctttttctgcatttctcagtctccccatctccccttcttatctaayccccttccttcctctctcaactcttccttcctctatcctttttctttcccttttttttttaactattcttctttagagtttgttttctcattgaacttgt

SEQ ID NO: 166572 - DNA, 201 bp, Homo sapiens
gatggctttctttccagtataataaagacagtgcctccttccaggacaacggtttggcagatttgcttgataaaggttggggtttgtaagcttggggctcytcagccatgactgaaacgtactatgagcacggcatctaccgggctgttccacatcctccctgtgggactaggggccagggcaatgggaatcagtgcagaa

SEQ ID NO: 166573 - DNA, 201 bp, Homo sapiens
atgtagtaaggcctcttttcaatgtggtaaaagctctgggccaccccataaggctgcaagcgctagaagctcttcccatagagaacatctatatcctcaamccaaggagaaaaaggaagctgctgttcataaatattgaagaggcagggagagcttgcactgaggccagggtgtattaacatgcatgccatcgtgaagtgg

SEQ ID NO: 166574 - DNA, 201 bp, Homo sapiens
actcagttttcaaactggcttaatccaaagcctggggggtggatgtaggagagaagttgaaattagctggggttttttttttgtatcacaaaagttacattttttttttttttttttttttttaagacgtagtcttgctctgttgcccaggctggagtgcagtggtgtgatttcggctcacagcaagctctgcctcccagg

SEQ ID NO: 166575 - DNA, 201 bp, Homo sapiens
gactcagttttcaaactggcttaatccaaagcctggggggtggatgtaggagagaagttgaaattagctggggttttttttttgtatcacaaaagttacattttttttttttttttttttttttaagacgtagtcttgctctgttgcccaggctggagtgcagtggtgtgatttcggctcacagcaagctctgcctcccag

SEQ ID NO: 166576 - DNA, 201 bp, Homo sapiens
ccttgtatctactgctgtcgtttagattaggaacagattgccagatgtggaagaaatagcctcattagtaacttttctgtaagcaatctccttatttcttkttttttgttcttttgttttttgtgtgtgcttctgcgtgcacctcctctatggctccccccaccaaatttctgtgtcttcatttgcaactctcttttctcc

SEQ ID NO: 166577 - DNA, 201 bp, Homo sapiens
taaaaatacaaaaattatctgggtgtggtggcacatgcctgtaatcccagctactcaggaagctgaggactgagaatcgcttgaacctgggaagtggagtwtgcagtgagccgagatagttctactgcactccagcctgagcaacagagcaagactccgtgtcaaaaaataaataatatatgtgtgtgtgtgtgtatgtac

SEQ ID NO: 166578 - DNA, 201 bp, Homo sapiens
ctttgggaggctgaggtgggcagatcacttgaggtcaggagtttgagaccagcctggccaacatggtgaaaccctgtctctactaaaaatacaaaaattakctgggtgtggtggcacatgcctgtaatcccagctactcaggaagctgaggactgagaatcgcttgaacctgggaagtggagtatgcagtgagccgagata

SEQ ID NO: 166579 - DNA, 201 bp, Homo sapiens
agacatggatatttttccttttataagaaaggtcttgtctttcctcagaaggcattgtgagcaaaataagggaagaaaaagagacgtagataagaaaaacraatcacaatattgaagcaggacccgagtactatagccttcctcatattttggtatctggaaccgaggttgctaattaatgacccaagagctaagccttgt

SEQ ID NO: 166580 - DNA, 201 bp, Homo sapiens
ctacaagtggagcgtgatttcatctttcatcaagagaagcagcttttcctcctcttgtatccgttttcttccttttctaactatcaaggtcatgcggtatstgccattttgcatattcttgctttgcttcatgttttccttaaactctgtgcacatgaatatttgtggtatatggcttaattgtaagcgatcaggcatcaa

SEQ ID NO: 166581 - DNA, 201 bp, Homo sapiens
acccaaagagatctgaaaagcaaaaacaaatttattgtatatttatagcaaatttatttggtggtgaaatttgacttcagctttagcgtccctgtttctcstttctagtgtgaatgttcattttgttttgtttgtttttttgaggcaaggtctcacttcatcacccaggctggagtgcagtagtgtgttcacagctcagag

SEQ ID NO: 166582 - DNA, 201 bp, Homo sapiens
ctgtgtcacctcagcatttaatttacttccgtcacaaaactacttgaagttgtcccaggctagttggtcctattaattacaacctagagggattctattartaaactaatggattacagtacctaaatggaagccagcagatgactttggaaggactgatccgcaagggccttctgtgtgaagattaaatgaagcttcctt

SEQ ID NO: 166583 - DNA, 201 bp, Homo sapiens
gtaatatgcagtatatgtgctaaattactttttttgttgttgttgagatggagtttcgctcttgttgcccaggctggagtgcagtggtgtgatcttggctygccgtgatctctacctcccaggttcaagcgattctcctgccgcagcctcccgagtagctgggattacagacatgtgccaccacacccggctaattttgta

SEQ ID NO: 166584 - DNA, 201 bp, Homo sapiens
catgtagaggttggcaaaggggacaggagactgtgggatgattagtatattcttatttggcctgggagggaaaaaaaatctttcatttccaacaatattcwttctctgtgtcacctcagcatttaatttacttccgtcacaaaactacttgaagttgtcccaggctagttggtcctattaattacaacctagagggattct

SEQ ID NO: 166585 - DNA, 201 bp, Homo sapiens
tatataagacagtgccctttagaagatccctgtctcattgagaagcgttgagtaaatgggtctctctggtcattctctccagaacatgaagccaaagggcygagagggagagactccaagaatgaattagtgtccagcaaggtatcgcttgtctcaggatgacaacttgcaatttggggatctctcaacgtcctgacctcc

SEQ ID NO: 166586 - DNA, 201 bp, Homo sapiens
tctctgccttcctttctctccctccttggtctgcttcctcctgttgctatcagagcctgcctgcctcatccttgttccagccttgatggtgatgatgattrtggttgctgttgctatttgtttttttggtttgtttgtttgttttgagagggagttttactcttgtcacccaggctggagtgcagtggcgccatctcggct

SEQ ID NO: 166587 - DNA, 201 bp, Homo sapiens
atgaaaagaagttgtatcaaacttgctgggcatcagaaataaagggttttagagacactggcttcaaacacaagttattccatccaagattctaaacttarcaatgcaacttgcacttaattttaaaacgctggaaaaataatgataaagattgtgtgatcaagtatagcagccctgtggtgtttcctcagaatggtgtat

SEQ ID NO: 166588 - DNA, 201 bp, Homo sapiens
ccatgcctggctaattctttgtagttttagtagagatggggtttcagcatgttgtccaggctggtcttgaactcctcagctcaaatgatctgcccacctcrgcttcccaaagtgttgggattacaggcgtgaaccaccacgcccctcacgcgcagccactgttgctattgatgattattatgacatcattgctcagattca

SEQ ID NO: 166589 - DNA, 201 bp, Homo sapiens
ccgatatttaatattatcaattgctggttcctgtaaatttgcatttatggatcacattataaaagcaattactcttatggattgttcatgcagaaatgcaytatgatgataatatacttttaaaagtatatttatttccagaattcaatttgtaagaggtttgagggaaaaataatactgagttttgagtgtttctgattt

SEQ ID NO: 166590 - DNA, 201 bp, Homo sapiens
taaaggcttactgggtatcagggctgctttcctttataatcttttacccgtcttatgggggatgaacagaaacacactttagtgctagaaaagctgggccyaaaagaccagtctcctgtcccatacttggacatttattgttctttttgggcaaggtgaaaacttgaaaccaaaagtctgttgagtttggaagacttgact

SEQ ID NO: 166591 - DNA, 201 bp, Homo sapiens
tgttttaaacccatctgtttttgtttctggtaactgtatccaaaagtaatacagaattttccgtaagaacatttattgtgtttccttctacccacgaattktcttatgctacacacacaacccactgaaatttcacctctattgtatgtggcttttctagaaacgtgtgcttctgggctttgtctcacacctcctggccag

SEQ ID NO: 166592 - DNA, 201 bp, Homo sapiens
tattatcaattgctggttcctgtaaatttgcatttatggatcacattataaaagcaattactcttatggattgttcatgcagaaatgcactatgatgatamtatacttttaaaagtatatttatttccagaattcaatttgtaagaggtttgagggaaaaataatactgagttttgagtgtttctgattttaaaaatgtgt

SEQ ID NO: 166593 - DNA, 201 bp, Homo sapiens
gcccctctgaaagcccttcactgcggctcagcctgtggtggaaggtgtccaaggtggctggaacacctcctgctgggggtgtcagtcttggctctcctgtkttctgcctgtgcaatggtgggtaggtcccttgatacctcgtaacctcagcatccctgtgggtgataaggagatgataatagtctcttcccgatgggggtt

SEQ ID NO: 166594 - DNA, 201 bp, Homo sapiens
cttttcaagtatcttactgtatgatggttgcttttgggttgaattccaccttgggttcaattcaacatgaaagttaaccttttggtgaaggaatgatccasgggaaatagtaaaatattagcctgtcctccaatacaaattgcctgtgagtcccactgatacttacaaatatacagaggtggtgtaaaaggattctgtgtc

SEQ ID NO: 166595 - DNA, 201 bp, Homo sapiens
ggtggtgtaaaaggattctgtgtcaaaactattaatatttgagaaatacaatacttatcagagcctttgtatgtaaatgtctcatatacccctctaagaasgggagcgaatagtattttccaaacttacgtcaccacttaccatccacctgcatactttacacgtcttggaatcaaccttacagggaacacttggtcgaaa

SEQ ID NO: 166596 - DNA, 201 bp, Homo sapiens
gtcattctagtatcaactgagttctttataaaatatctttggggtgtttaaggagaattattctttttacaagttctgattaatgacaccgcaaaaatgaraataatgagctaatatgtatctagtaattgctatgcacttatatgtatagaagcgtataatccacagcactccttctgaatacgttacgtaaatggaacc

SEQ ID NO: 166597 - DNA, 201 bp, Homo sapiens
cctttgtatgtaaatgtctcatatacccctctaagaacgggagcgaatagtattttccaaacttacgtcaccacttaccatccacctgcatactttacacrtcttggaatcaaccttacagggaacacttggtcgaaaaacagtgttttctaaatttatattacagttcccactccccccgcccccacttgtatcactttg

SEQ ID NO: 166598 - DNA, 201 bp, Homo sapiens
gtaaattgatgggtgggccacaaaaatcatgtcacaagatcttgttgatgtgcatgcattcattcattcaacaaatattattgagcatctaacataagccrggtgctttgctagggacagaatgctgtacaaggtccctgtcctcatggggaccgtatgttgggaagacagatgataggcatggaaatgaagagacaaacc

SEQ ID NO: 166599 - DNA, 201 bp, Homo sapiens
tccacctgcatactttacacgtcttggaatcaaccttacagggaacacttggtcgaaaaacagtgttttctaaatttatattacagttcccactccccccscccccacttgtatcactttgtatgacagtcttcttgggaacatccattgggaaactcttcccttgcaggtgtctgttacaagtcctggttcacacagtgt

SEQ ID NO: 166600 - DNA, 201 bp, Homo sapiens
ggatagggtaatggtgttgacacaggcactgttgaatacgtatgtacatattttaatagttttctcattaatcaaatggaaatgctatcgattttataggrtcgttgtgagaagaagtgagaattgaaatgaaaggcatctagtcttccccggtccccatccacttgacccaccatacctcaagccacttctggctccatg

SEQ ID NO: 166601 - DNA, 201 bp, Homo sapiens
gatcacctgaagtcaggacatcaagaccagcctggccagtgtggcaaaaccccacctctactaaaaatacaaaaaaaaattagctgaacctggtggttcaygcctgtaattgcagctactcaggaggctgaggcaggagaatcacttgaacccgggaggcggaggttacagtgaaccgagatcgtgtcactgcactccagc

SEQ ID NO: 166602 - DNA, 201 bp, Homo sapiens
cgcctgtaattgcagctactcaggaggctgaggcaggagaatcacttgaacccgggaggcggaggttacagtgaaccgagatcgtgtcactgcactccagmctaggcgacagagcgagaccctgtctcagaaacagaaaataaaacaaacaaaaaaatactattccatagctgactattttctgaaatgattttgttactt

SEQ ID NO: 166603 - DNA, 201 bp, Homo sapiens
acaaatcttgtttttgtctttttattgaatttaaccactattgacttgcgacttgcggcaatcaccagatcccagatctctgtgtttggagctacacgtcyttctgaatcgaggaggtggggcactgatttttcttttatcactgacttccccgaagtgggaagttccagtgcttaacaagtttcattaagaacacagcta

SEQ ID NO: 166604 - DNA, 201 bp, Homo sapiens
ctgggtaaaataaatatgatataaaacagacacaaataagaatatatagatgatgttaatttcttcagagcttcccggtgttacgtcttcaagaatatgaygacaggggaacagcccagtgtggcagtcatgtgacgacatgagcattggaaccagccacatctcagttggcaacacgtatctgtgtcttactagcttggc

SEQ ID NO: 166605 - DNA, 201 bp, Homo sapiens
gtgacgacatgagcattggaaccagccacatctcagttggcaacacgtatctgtgtcttactagcttggccactgtcacgtcactcagcctctgttttctmatctgtaaaatggggaaaattatagatgcttcagaagatatttgctatcactattaaatgaaaacaagcatgtcatcagtgcttattatttttgttgctt

SEQ ID NO: 166606 - DNA, 201 bp, Homo sapiens
tctcatatcgaaggataacctcttgtatttacaaaaaaaagaagaaaaagtgctgtcatcagtaaattcattcatgtatgttatacacttacatacaaaaygtatctatttgattaaattagaactctgctaatgaattactttccttgattgcacagtaataaagtcaatgttgtaaatataataattatagccaagtgc

SEQ ID NO: 166607 - DNA, 201 bp, Homo sapiens
taatcaacaattctcatatcgaaggataacctcttgtatttacaaaaaaaagaagaaaaagtgctgtcatcagtaaattcattcatgtatgttatacactyacatacaaaatgtatctatttgattaaattagaactctgctaatgaattactttccttgattgcacagtaataaagtcaatgttgtaaatataataatta

SEQ ID NO: 166608 - DNA, 201 bp, Homo sapiens
gtaaaagcatcatgcaccaggtaaaatgtttaataacacagagaaatctaattgtcaagtatcttctcaacacacattaatcaacaattctcatatcgaargataacctcttgtatttacaaaaaaaagaagaaaaagtgctgtcatcagtaaattcattcatgtatgttatacacttacatacaaaatgtatctatttga

SEQ ID NO: 166609 - DNA, 201 bp, Homo sapiens
gttctctggatggtggtgtcatgccaacatgggagccactagcacaaagaacatgctaggttctgttgagacctgactttgggaatagcataggtacttayctttctcagcaccacacaaacacactccagaatgcaaaggaacctgcactgtgccatcttgcttctccctgcatagccacttctctttccagtggtgttt

SEQ ID NO: 166610 - DNA, 201 bp, Homo sapiens
ggaacctgggaggtggaggttgaagtgagctgagatggcaccattgcactccagcctggcagacagagtgagactccatctcaaaaaacaaacaaaaaaaagttccaatacacaatatgttatatgagatcttcacccaatcaaggattaaatggccaattcctaaatgatgcctacctttttatggccatgtataccttt

SEQ ID NO: 166611 - DNA, 201 bp, Homo sapiens
tggaacctgggaggtggaggttgaagtgagctgagatggcaccattgcactccagcctggcagacagagtgagactccatctcaaaaaacaaacaaaaaaaagttccaatacacaatatgttatatgagatcttcacccaatcaaggattaaatggccaattcctaaatgatgcctacctttttatggccatgtatacctt

SEQ ID NO: 166612 - DNA, 201 bp, Homo sapiens
ctggaacctgggaggtggaggttgaagtgagctgagatggcaccattgcactccagcctggcagacagagtgagactccatctcaaaaaacaaacaaaaaaaagttccaatacacaatatgttatatgagatcttcacccaatcaaggattaaatggccaattcctaaatgatgcctacctttttatggccatgtatacct

SEQ ID NO: 166613 - DNA, 201 bp, Homo sapiens
ttgtagctcctgtgaagattcaggaattttttttttcttctatttgcaagctttagtcctaggcatggaaaaagaactttgaagaaaacctgagagatatsagtgtaaaacaagagaatgattccctctggggtgctggtagtgggggcttaatttcctaaaggcttactgggtatcagggctgctttcctttataatctt

SEQ ID NO: 166614 - DNA, 201 bp, Homo sapiens
tctggaacctgggaggtggaggttgaagtgagctgagatggcaccattgcactccagcctggcagacagagtgagactccatctcaaaaaacaaacaaaaaaaagttccaatacacaatatgttatatgagatcttcacccaatcaaggattaaatggccaattcctaaatgatgcctacctttttatggccatgtatacc

SEQ ID NO: 166615 - DNA, 201 bp, Homo sapiens
tttttttcctaaaaaaaaaaaaaaaaaaaaaagaagaatcgcttgaacccgggaggtggagcagtgagccaaggtcatgccactgcactccagcttgggcracagagcgagactctgtctcaaaataaataaataaaaatgcatatatgtatatttgtgtgaatcatatacacatatataaaatatatgtatcatatacat

SEQ ID NO: 166616 - DNA, 201 bp, Homo sapiens
aagctaaatggtattttcgtttttctcaagctcttccaataaatatgaccaccaagatttttttttcctaaaaaaaaaaaaaaaaaaaaaagaagaatcgmttgaacccgggaggtggagcagtgagccaaggtcatgccactgcactccagcttgggcaacagagcgagactctgtctcaaaataaataaataaaaatgc

SEQ ID NO: 166617 - DNA, 201 bp, Homo sapiens
aacttggctgggtgcggtggctcacacctgtaatcttagcattttgagaggccgaggcgggtggatcacttgaggtcaggaattcaagaccagcctggccrccatggtgaagccccgtctctactaaaaatacaaaaaattagccagctgtggtggcacatgcctgtaatcccagctactcgggaggctgggacaggagaa

SEQ ID NO: 166618 - DNA, 201 bp, Homo sapiens
attggtaaatgaagtcagcttagtgatatgagaattatgaaacataaatccctttgtaaaaatataaaataatcttacaatcatcatcgtcatcctcatcrtcgtgttccttcacaccagcggtatttatggtatttatcaactaactgctgtgtactatgctctattgaaaatgttagcaatatagtaatgaacaaaaca

SEQ ID NO: 166619 - DNA, 201 bp, Homo sapiens
tactagtgagtggcagatatgtgtggaccacagagatggactgaaaagagaagtaacagtccttggtttgtattccagcccccaccttcctatgtctttgrgcttggtaattagatgcttggagcttcagtttccccatctgttggatcagaacggcagtatgtgctctccagtattttcataagagtcacatgaaatatg

SEQ ID NO: 166620 - DNA, 201 bp, Homo sapiens
agtattttcataagagtcacatgaaatatgtacctacagagtctatcactgtgctttttaagttggggcttaatatgtggtagttgttgctgtttttgttrttattattattaatgttattttttgtttgtttgttttttgagatggagtcttgctctgtcacccaggctgaagtgcagtggcgtgatctcaactcaccgc

SEQ ID NO: 166621 - DNA, 201 bp, Homo sapiens
tgttattattattaatgttattttttgtttgtttgttttttgagatggagtcttgctctgtcacccaggctgaagtgcagtggcgtgatctcaactcacckcagcctccgcctcctgggatcaagtgattctcctgcctcagcctcccgagtagctgggactataggcacctggctaatttttgtattttatattagagat

SEQ ID NO: 166622 - DNA, 201 bp, Homo sapiens
acgtgagtgaccacgcctggcccataaatgttatctttatataacatactcacagctcccttaggagtacttttgtccatttctacacaatggaaacttayaattttagccttagcaacatgtatttactgggcatctagatttcatttatttaagaactttttattgaatgccgattgttcagcagccaccatgcaaggt

SEQ ID NO: 166623 - DNA, 201 bp, Homo sapiens
gaaaaaaacttgcttgtttactgtcttctgagctgatttctcacctactggcaagtggataggtctactttttgtttagctgtttttctaatttaatcttrtacatgagacagctatagatggatgtatagtctttgaagtggggccagttggctccgtctattagctgtgtggcttttgtgcaggtgacttgtggccccc

SEQ ID NO: 166624 - DNA, 201 bp, Homo sapiens
caacactaataagtaattgagcagatgagatgctcttgctagctttggtaaaaagtcggggcaaggttacaacagaggagctctgatgagacttgggatgrtaaagtcaagtcgaatatctggtagggttaaaaatctaacagtgggccaggcgcagtggctcacgcctgtaatcacggcactttgggaggccaaggcagg

SEQ ID NO: 166625 - DNA, 201 bp, Homo sapiens
tcctgggctcaagcaatccgcccacctcggcctcccaaagtgctgggattacaggcatgagccactgtacctggactccactatgccttcccctccccttycctcccttccccaccctaaagagtctcgctcttttccccaggctggagtgcagtggcactatctgggctcactgcaacctgtgcctcccggattcaagag

SEQ ID NO: 166626 - DNA, 201 bp, Homo sapiens
ctctcctcggccttgcaaagtgctgggattataggtaccccgcctggctgatactttccttagttgttttcagtgtaataacctgtcttcagtctactctwtgtccttttctctcctttcctccctgaatactcaagcttccagtgcacagatttctccaaccctgaatgtgactgataccaacaccatactagctcttcc

SEQ ID NO: 166627 - DNA, 201 bp, Homo sapiens
tttgctctgttacgtgaggacacatcacttgcacctcagtgtgagtttgaaagtgttttctctggagaataattctgaagaaataggccctccagatatcrgtagtgacaggggtatcagtaatgttgattactaagttcttgccacaggtagaagccatgctactgcacaagtttcatacttgaagagtggacatctgac

SEQ ID NO: 166628 - DNA, 201 bp, Homo sapiens
tttcatagataccactgacactatttttcacctcccatgttatcagtttgtgtaatagtagcttgctggtaatgtagttacagtaacaagttcaaatgacatgtgtgttttttgagcaaacctggtgaacttttggtgcaaaactgatattgagagcaaataggccaaagcttgcttgagagaagtctcccaggccaccat

SEQ ID NO: 166629 - DNA, 201 bp, Homo sapiens
acaacttcttaagctaaatggtattttcgtttttctcaagctcttccaataaatatgaccaccaagatttttttttcctaaaaaaaaaaaaaaaaaaaaaagaagaatcgcttgaacccgggaggtggagcagtgagccaaggtcatgccactgcactccagcttgggcaacagagcgagactctgtctcaaaataaataa

SEQ ID NO: 166630 - DNA, 201 bp, Homo sapiens
cacaacttcttaagctaaatggtattttcgtttttctcaagctcttccaataaatatgaccaccaagatttttttttcctaaaaaaaaaaaaaaaaaaaaaagaagaatcgcttgaacccgggaggtggagcagtgagccaaggtcatgccactgcactccagcttgggcaacagagcgagactctgtctcaaaataaata

SEQ ID NO: 166631 - DNA, 201 bp, Homo sapiens
tcacaacttcttaagctaaatggtattttcgtttttctcaagctcttccaataaatatgaccaccaagatttttttttcctaaaaaaaaaaaaaaaaaaaaaagaagaatcgcttgaacccgggaggtggagcagtgagccaaggtcatgccactgcactccagcttgggcaacagagcgagactctgtctcaaaataaat

SEQ ID NO: 166632 - DNA, 201 bp, Homo sapiens
caacaaaacagaatattccagtgttctttctccggggagatggcattttcctggttgcccctccactgagagttggctgaaacaaagaatttgtcctgtayggaaaacaggagactttgtacagtggcctctctaaaggtgcaagatattcaaaagagaaacccgcatacatttggatattaagaaataattctggggatt

SEQ ID NO: 166633 - DNA, 201 bp, Homo sapiens
tatacacttgagcttggcatttttcttaacgcagggctattttaggtgcactgcgcatgttggaggtgcccttgcaggtataggtaggcattgtccatccrtggtaaaaagcaatagaagaaattcttacccgatgcttaatgaattgccaggctggttaaaaaggataacccttgaaacctagggtgtccaactgctaat

SEQ ID NO: 166634 - DNA, 201 bp, Homo sapiens
gtgtggcttgtaccttatattcactctatctaatcttcactctaaccatagaaggcaatactattatgctcattcataattaaggcaattgaagcccagayccttccagtagctttcctgaagtcaagttgccagtgcattggacatactaggctgtagttccagggcagcctggctctggtgtctttgctgcaatgacaa

SEQ ID NO: 166635 - DNA, 201 bp, Homo sapiens
tgaatcaacaaaacagaatattccagtgttctttctccggggagatggcattttcctggttgcccctccactgagagttggctgaaacaaagaatttgtcmtgtatggaaaacaggagactttgtacagtggcctctctaaaggtgcaagatattcaaaagagaaacccgcatacatttggatattaagaaataattctgg

SEQ ID NO: 166636 - DNA, 201 bp, Homo sapiens
gtgtccaactgctaatttatatagactggagatatttccatgcctcgcagcaaaatttttctttaaattcacagaagcagcagctatccagcattgtccarttgtgctgagtagctgtcattattgataaacatgtaactggtcatttgtattgttttgagtaggatatggcttatcaggatgcatagtagagaaaaatga

SEQ ID NO: 166637 - DNA, 201 bp, Homo sapiens
gttctgttcgttgtaagatattgagtagcatccctgacctctgccccctggatgccagttcactttccaacaagttgcaacaagcagaaatgtctgtagayattagcagatgtctgctagcagttagaatggcctctggttgagaatcagagcagactctgctcacactgggctatcagggtatagttctctccctcccaa

SEQ ID NO: 166638 - DNA, 201 bp, Homo sapiens
gaggttcctgtctgccagtcactctatagtaactattaggaaacccctttttttctctgaagtcattgctcctgtgtgtgtgtgtctgtatataaaaaaaagtatgtatacatatacgtatatgtatgtgtatagataaaaatgcatgtatggtgctgggcgcagtggctcacgcctgtaatcccagcactttgggaggct

SEQ ID NO: 166639 - DNA, 201 bp, Homo sapiens
gtgagccaccacacccagcctgggggagggtttgttaaagaactgtctgttttatcacatgaccacaagttaaaatgttgggcaatgtccctgaatgataycttttcattagtaactcacatggacccataatctctgaatttaacatgcttttcaggaatgtgttcatattttccacctataaaacctgttttagtaatt

SEQ ID NO: 166640 - DNA, 201 bp, Homo sapiens
cagggacagcgtgtagggtttgcatgatttgtggggccgtttcatgtttgcacggtttggcttggcttgggactctgccagtggtcactgcagtttaacaractccccccgggtgtgaaggaaagcgagataaatgcaggaaaaaggatacattttgaaatctggaaattttacataacaggcatcagatttgaagaatgt

SEQ ID NO: 166641 - DNA, 201 bp, Homo sapiens
gagaggatagtataatgaggttcctgtctgccagtcactctatagtaactattaggaaacccctttttttctctgaagtcattgctcctgtgtgtgtgtgkctgtatataaaaaaaagtatgtatacatatacgtatatgtatgtgtatagataaaaatgcatgtatggtgctgggcgcagtggctcacgcctgtaatccc

SEQ ID NO: 166642 - DNA, 201 bp, Homo sapiens
ggccttactcgttttcaaatactcaaatgccattgagtcagatttcagaggcaaatggtgatacctcaggtttgaagttgcaagaagtcaccacatgcttrttatggaaatcgtcagggatatttattccctctcctgagaagcataattgagcctccaaaccacccatcaagatatccacctgtaaaatatttaagaact

SEQ ID NO: 166643 - DNA, 201 bp, Homo sapiens
acttagaaccacacaaaagttacactttacagttttggaggtcagtggtccaaaataggtctcagtgggctaaaatcgatgtgtcagcaggacaccatttytttctgtaggttctagaagagaacccacttccttgctgtttccagcttccagggactgcccaaatcctttggctcatggccccttcctctatcttcaaag

SEQ ID NO: 166644 - DNA, 201 bp, Homo sapiens
atttaagaactggtactatgaagacatttcccttatgcaatttgttttccatctaagagcagaacaaggaaaatatagctgactataagttacaaaggcasactcttaagctacaaaatacatctcttcacaggagcacttggagaagggctgaaggcaaaccaaaagtgagcaacaaggagactagtgttctgaaacaga

SEQ ID NO: 166645 - DNA, 201 bp, Homo sapiens
ggtatcacagaagccaagacaggaaagtgagccagaagtgagggaggagcaggatcctctgcaacagggcagtctagtcttagcagagaggaggttgctgratttattgattgagaagccactcctcgccaggcagttttgagaggttctggatggtgatagaatggaattcattcagctgatgatgagaagtagatttgg

SEQ ID NO: 166646 - DNA, 201 bp, Homo sapiens
ttacacgtttatggattgaaatggttctgctgaaattttaagtgttaacattgttcaaattttcattactaacacctctcacattgttagaaaacagtttyatgtttgacattttgatcatactaacctgggacattttatgctaaagttctcatttcatgccttaggaatcccctgcttattttgatttcagcacctttc

SEQ ID NO: 166647 - DNA, 201 bp, Homo sapiens
gtgcataatgcttccaggtacacttgtctacacatttttgtgtggatataggttttccttttttggggtatgctcctaagagtgcaatttctggatcacgkggaactccttgtttaaccttttgaggagccaccagattgttctccacagcagccacacccatctacattctaaccagcagtgtaggaaggttccgatttc

SEQ ID NO: 166648 - DNA, 201 bp, Homo sapiens
tctaaaccgatcatcacagaagatattttgtagtgatgaagaaagcttaaatgtctcatttgtcagattggtttaggtagaaaataaggatttccaccccytcatcgtggttcccttttagattttcttgtttgcttttctttaaagctgctgttactcaaacgacagtccgtaaactgcactttattttttataacagct

SEQ ID NO: 166649 - DNA, 201 bp, Homo sapiens
gaccttaggtgatctgcctacctcggcctcccaaagtgctgggataacaggcgtgagccactgcgcctgtctacattttctgtctttactggtattatggygggaacccataaaccactgcgaggcagataccattttaagcaggaaaccttatttttttccgaagcacatttaaaaatattttccagtttatctattaaa

SEQ ID NO: 166650 - DNA, 201 bp, Homo sapiens
gactattaaaatgtaaattaattaaaattaaaagttcaattgctctgaaatagcagccacatttcaaatcttcagtagccagatgtggttattggctaccwtattgggtagcaccgatatagaacatttctaccatagtagaatgctcttttggatacatctgctttaaagcattagtccccaaagtgtgaaggatgaacc

SEQ ID NO: 166651 - DNA, 201 bp, Homo sapiens
ccactttttaaacatgacattcgatccacgtggcatagcaaggatgggatccacaagatggagtgatctttacgccatcctcctgaccataaatactaaaygaatactctatttcagttgagtttttagtttgctctgttacgtgaggacacatcacttgcacctcagtgtgagtttgaaagtgttttctctggagaataa

SEQ ID NO: 166652 - DNA, 201 bp, Homo sapiens
gtcccgtacttttcaatgtaagcatattggctctcaatttaaaaatgttattttttacagatagtacacagatgcactgacacaggtaccctctccagtcytctgatggtcaggaattgtgtgcagtatgcagtacattccaaagtcaggctggccatttccccagggagagggtccatgttggaacctttgctccttgtg

SEQ ID NO: 166653 - DNA, 201 bp, Homo sapiens
tgacagggagatggagggaggcaaaaagaaaaagggagaaggaaagagaggaaagaggggaagggaggaaggaaagaagagagagaaggaggaagagaggraaggaggcacagaggtagagaggcagggagataatggagatcctggccaaaagttaatgctccgtttctagtagtccacagaaagcaccttgaccaagtg

SEQ ID NO: 166654 - DNA, 201 bp, Homo sapiens
gctatgtcagaagcaagtcaggatttgaaggcagatctgtctgcttttgcccctctgtaaatccagagctgctgcctcatttcttacgttgcccccacccrtgcagcaattcttcctgggaggcctcattgttcatattcataaagggccccattcagtctcctttttggagaaatggccactgcaactctctgttctgac

SEQ ID NO: 166655 - DNA, 201 bp, Homo sapiens
gcgcatttgagacaggttgagggttcaagctgtccaatccctgctcatctgcagcacaccaaggaatgtggactaatgaaaaataaactgcatgcatgcartgcccatcacactgcctgcattttctaatcttcacaataactctgtgttgagaaatattcctgtctgtaatcccggcactttgggaggctgaagcgggca

SEQ ID NO: 166656 - DNA, 201 bp, Homo sapiens
gggagcaggggaggaaccatctgaggtgtttttttttttttttttagatttctcattgctgagaacagttccagctctgctgaccaaaggctgagtgtccytttattagtctgagcccctagagagaccaaagaggcaaccctcgagccaactgacagccagctgtggggttggaccctgtttttcatacagtgagcactc

SEQ ID NO: 166657 - DNA, 201 bp, Homo sapiens
tctctaacatgcacatggccagaaaaatagcttggacattctgttcaaccctccacatcaactggtcagtttagtctttaaaaggtgataggcctgttgtsgtggctcacgcctgtaatcccagcactttgggaggctgaggcaggtggatcacttgagccccggagttgaagaccagcctgggcaacacggtgaaactaa

SEQ ID NO: 166658 - DNA, 201 bp, Homo sapiens
ctctgaaagatttatctctttcgattcatctgtaaagtaaaaataaccgtcgtcgtcatttctcaagcgtgacgatactgttacacgtttactgcatattstgcataccaagcacatatccgtcacacgcagtgtggccaacttccgagaggccggcattcagccaaacagcctgaagaaccaggagaaatgcctgagttt

SEQ ID NO: 166659 - DNA, 201 bp, Homo sapiens
ttcagccaaacagcctgaagaaccaggagaaatgcctgagtttccaaatggcttatggtaagttgttgctgccactatgagtagcctacttgcatttctayttaatggcttttccccatatttgatggtatgttaaacagtcaatcattcattttctaaattaaagcctgtcctgaaaacgtgctcagtgctattgactgt

SEQ ID NO: 166660 - DNA, 201 bp, Homo sapiens
aaaataatattaccggagaaacaatgagtaacatgtataggattttttttttttttttttgacggagtcttgctctgttgcccaggctccagtgcagtggygtgatgttggctcactgcaactccgcatcctggtttcaagtggttcttctgcctcagccttccaattagcggggactaccagcgcatgtcaccatgcctg

SEQ ID NO: 166661 - DNA, 201 bp, Homo sapiens
acacaaaacccagcgtggtgattttggcagccttgccatgcatctctaacatgcacatggccagaaaaatagcttggacattctgttcaaccctccacatsaactggtcagtttagtctttaaaaggtgataggcctgttgtggtggctcacgcctgtaatcccagcactttgggaggctgaggcaggtggatcacttgag

SEQ ID NO: 166662 - DNA, 201 bp, Homo sapiens
tttccccaggctggcttgtgtattaccttcgcattgcatcccttggctcccatgagtgagcgtggtgacttggtgcgtaggtggtacgtgaagacagttgstcactacccaagaactcagggccctaaaccatgctgtaaaatgcaagtgctgatatctaattacctccatcaaccttggcagaatctcttcgttggagtt

SEQ ID NO: 166663 - DNA, 201 bp, Homo sapiens
gcaatttccccaggctggcttgtgtattaccttcgcattgcatcccttggctcccatgagtgagcgtggtgacttggtgcgtaggtggtacgtgaagacasttgctcactacccaagaactcagggccctaaaccatgctgtaaaatgcaagtgctgatatctaattacctccatcaaccttggcagaatctcttcgttgg

SEQ ID NO: 166664 - DNA, 201 bp, Homo sapiens
ttaactgattgcagcaggttagagcacagcatgaagagctgacaatattgaccgactggccctctcagacaaagtttgccaacacccaggtgagcagatayacttatctgtgagcagacgtgattcaggggagattgttgtccctcctttcctaagaaaatgtggaaagatgagaatgttgccaccagtgctgatatggag

SEQ ID NO: 166665 - DNA, 201 bp, Homo sapiens
ccccaactccttactcatgcttcctctgtaaaatgatcactccccagtttgacaggaattgcccctggaatcccatctggtgttctaattgttaccaaatycaggcaaatcttgcctgtgatacaggtggtgaagctactggatagaactggagcatctaactggtgtgagatggtatctcattgtggttttgatttgcat

SEQ ID NO: 166666 - DNA, 201 bp, Homo sapiens
aaacaaacaaacaaaacaaaacaaaaaaggtttaagaaatgttctagtaccttgaaaccaaaataggtatcagatacttggctgttttgttttttcttctwagccattttgacctgtgagattttatgtgatgaaaacataagaatgtggtattacaccctgtgatttgaattttccatactccattccattctatatgtc

SEQ ID NO: 166667 - DNA, 201 bp, Homo sapiens
catgtaccctagaactgaaaatataataaaaaatacatattaaaaaaaaaagaactggagcatcgactttcgttttcatttcaagacccgtcccccatgaycacagaggatgaaaagtctgcttaaattataagctagctaattgcttcttcagttgaagacctaaatgagttttaaagtgaaatgcatatctctaagggc

SEQ ID NO: 166668 - DNA, 201 bp, Homo sapiens
tggggcagcacctttgcttgaacgctggctccagatgaaagaacagattgccgcggagccgcttttccaaggatccctctccccagcatggggcttcatayattattgagagcaaacctactttccaccgccactcctggatgcacttattttgcgagccttattcagaatgtcagcatggatcacttggcaacaaaggcc

SEQ ID NO: 166669 - DNA, 201 bp, Homo sapiens
ggctccgagaagctcacccatcaccatttgctctactgcaaaacaggactcattagcaggagctcataaaatgaaactggcagtgagctcatatggaagargcatcacgggcaactcggcttggctcaccagcccctgagctgcccccgagtgaccgctccagccttctttccttccacctctccctcttggccaacttca

SEQ ID NO: 166670 - DNA, 201 bp, Homo sapiens
taagtctccattccgcttgccaagattaaattgaattattcccgctgccattcagttttactctgcacaaaatacagccaacatttttgcatttctttctyccttcctccttttcttctttctttccttccttccttcctttctcccttcatctatctttgttccgcttttgtttgtttttttttagatcgctgcatgctg

SEQ ID NO: 166671 - DNA, 201 bp, Homo sapiens
catatactgatgcggtgtttattttattttagttttttgagacagggtctctgtcgctcaggctggattgagtgcagtgaatcttggctcactgtagcttytgcctcttgagctcaggcaatcctcctgcctcagccccaccagtagctgggactagaggcacatgccactacacccagttaattactacattttctgtag

SEQ ID NO: 166672 - DNA, 201 bp, Homo sapiens
gagattcacatatgtagattacattgttatgaaccaacatttataagcaagcttgatctctcagaatgcgtttgtctatctcagattttcaagaatcctcrtacaaattgtccagggtttccacctcgcagttttcttccagggttgctatggcatggaaagtacattgctattttgttatgtaaatgctcaacagactgg

SEQ ID NO: 166673 - DNA, 201 bp, Homo sapiens
gaaaaagatcatagagccaaagagctcgatacatatactgatgcggtgtttattttattttagttttttgagacagggtctctgtcgctcaggctggattragtgcagtgaatcttggctcactgtagcttctgcctcttgagctcaggcaatcctcctgcctcagccccaccagtagctgggactagaggcacatgccac

SEQ ID NO: 166674 - DNA, 201 bp, Homo sapiens
ttccagtttctcaattgcaaaagtgaggctggtcatggggcttggaaccacgccacggacgcatgaagcctccccgtttacatgccaaatccagagcttakgcatccatgctcagggctctctgtggtaggcaacagctggattatttactttctagaatatctcgagttcttaatctgagcagtttcgaaaccaagccca

SEQ ID NO: 166675 - DNA, 201 bp, Homo sapiens
gtaatgtcacttatatccaggaaagagtggcaaagaaccatcccagcagatagcttgagggtgggaagggggataggttgttgataatatggaataggagraaaaagatcatagagccaaagagctcgatacatatactgatgcggtgtttattttattttagttttttgagacagggtctctgtcgctcaggctggattg

SEQ ID NO: 166676 - DNA, 201 bp, Homo sapiens
ctaattatctccttcccccgccccctccattctctttccatcctttaaatgtcagtgtcccccacaattctgttgttgaccctttctccctctggccaatrctccttcccctgtagatcatacccattcccaagatttcagtcatcaaatccattccaatatgactcctgtatccatatgtccagttccaagtatctgtcc

SEQ ID NO: 166677 - DNA, 201 bp, Homo sapiens
tatgagtgaatggcagcgttttgacaggatgatgaataaatatgctgggcccagaggactccaggtgataagcatttctttgtggtctggtaagtgatagyacccattgcttaatttctctaaaatctgcatttgtcaattttgtatttttttatttgaaaggtatttgcttaaataaataggccatataaatctagctcc

SEQ ID NO: 166678 - DNA, 201 bp, Homo sapiens
tggggcactgagatctatgcatgttgtgggcccactttaagaaaaggagtcaaacatttagtgtggaatactggaaggggtccctagacatgaagggcctyttcaacctaccttttgttggcttcaaggttatgccatattttgcaaagtcaagttggagatggctctcgatatgcatgagtgtgttagactgcttttctt

SEQ ID NO: 166679 - DNA, 201 bp, Homo sapiens
ttttgtcagttcatctatctgtccatctctttgtccatccatccaactacccacttacccatccatccatacatttatccatccatctacccacccatccrtccatccatccatccatgcatccatccatccatccatcatccatccatgcatgtaagttgcagacatcaacaaactttacccttaaggactttggctggc

SEQ ID NO: 166680 - DNA, 201 bp, Homo sapiens
actcaacagttgctaatgttttgccatgttttgtcagttcatctatctgtccatctctttgtccatccatccaactacccacttacccatccatccatacrtttatccatccatctacccacccatccatccatccatccatccatgcatccatccatccatccatcatccatccatgcatgtaagttgcagacatcaaca

SEQ ID NO: 166681 - DNA, 201 bp, Homo sapiens
tcttttttttttctaaccactttcccagtgagacttcagttttcattctccccttagcagctttcaaatatgtacgtaacacaaatgttacatgtttgagmatttaaactgaatttggacagggcttctatttccagaaccttctaactctatttctttgtgacctgatagtcttgctctccagggtaaaagaagaggatg

SEQ ID NO: 166682 - DNA, 201 bp, Homo sapiens
agtgagccaagatcgcaccactggactccggcctgggtggctgagaaagactcagtcttaaaaaacaaacaaacaaacaaacaaacaaacaaacaaacaaaaacttgtctccaaatgagcagacaccagaatctcatggagggatttttcgaacacgtagcacagggcttcgcccccagcatttttattttcgaacttctg

SEQ ID NO: 166683 - DNA, 201 bp, Homo sapiens
ctcctaacatgtcatctgaaatctgggaccacagttccggctggaacacttgtcactaaagctgctgataagcaaagggtgtatcactggtatgggtaacwgttgtgggaggaggaggggtctgacagatagccggatgattttaatgtttatattccactggggtaagctctaacaaagacccatcatttcccagataac

SEQ ID NO: 166684 - DNA, 201 bp, Homo sapiens
cagtgagccaagatcgcaccactggactccggcctgggtggctgagaaagactcagtcttaaaaaacaaacaaacaaacaaacaaacaaacaaacaaacaaaaacttgtctccaaatgagcagacaccagaatctcatggagggatttttcgaacacgtagcacagggcttcgcccccagcatttttattttcgaacttct

SEQ ID NO: 166685 - DNA, 201 bp, Homo sapiens
aggagcagaggacaggatggctttctttccagtataataaagacagtgcctccttccaggacaacggtttggcagatttgcttgataaaggttggggtttstaagcttggggctcctcagccatgactgaaacgtactatgagcacggcatctaccgggctgttccacatcctccctgtgggactaggggccagggcaatg

SEQ ID NO: 166686 - DNA, 201 bp, Homo sapiens
gcagtgagccaagatcgcaccactggactccggcctgggtggctgagaaagactcagtcttaaaaaacaaacaaacaaacaaacaaacaaacaaacaaacaaaaacttgtctccaaatgagcagacaccagaatctcatggagggatttttcgaacacgtagcacagggcttcgcccccagcatttttattttcgaacttc

SEQ ID NO: 166687 - DNA, 201 bp, Homo sapiens
ggctctccatccttcaaaatccagctcttggcctcatatcttccacaaagccttcccagacctttactcacctgggccattaatcaccttccctctcagtyagctcctacaccatgagtgcttttgtatggtgactgtctggttacaaggtcatcttttcccctggatgagacgccccttggggaaaggaccaagttttat

SEQ ID NO: 166688 - DNA, 201 bp, Homo sapiens
tccatccttcaaaatccagctcttggcctcatatcttccacaaagccttcccagacctttactcacctgggccattaatcaccttccctctcagtcagctsctacaccatgagtgcttttgtatggtgactgtctggttacaaggtcatcttttcccctggatgagacgccccttggggaaaggaccaagttttattccct

SEQ ID NO: 166689 - DNA, 201 bp, Homo sapiens
ggcctcatatcttccacaaagccttcccagacctttactcacctgggccattaatcaccttccctctcagtcagctcctacaccatgagtgcttttgtatsgtgactgtctggttacaaggtcatcttttcccctggatgagacgccccttggggaaaggaccaagttttattccctgtttaaccttggcctgacaaccta

SEQ ID NO: 166690 - DNA, 201 bp, Homo sapiens
gaaggcaatactattatgctcattcataattaaggcaattgaagcccagacccttccagtagctttcctgaagtcaagttgccagtgcattggacatactrggctgtagttccagggcagcctggctctggtgtctttgctgcaatgacaatatctccccatttctctgtttaaataccacacactccccatatggtttct

SEQ ID NO: 166691 - DNA, 201 bp, Homo sapiens
taaagaaatattcgtaatcaataagaacacaaaatatggaatatattaactgagttataaaaatgtttgtagtatagcacagaatgaaaaacacagcaagktatgtacggtttaaagtgtaatcaattttgaggttgtatacaaggatatacatgataaatacaagtagtagcatttttagtaaaggctgttacaaaatac

SEQ ID NO: 166692 - DNA, 201 bp, Homo sapiens
cctcccttcctgatttcccatcttcttcctccctcttctctcccctctcccccttctcctttccgtccttcctccttcagttccctctttcctctttttcrcccttttatttaacattataaatacgatgggattgtgtctgcgcttttgttggtaattaaataaattatttatacatttaacacaatcttgaattaccag

SEQ ID NO: 166693 - DNA, 201 bp, Homo sapiens
tcttgggctggctcattacaggccactctgtctgaggaacactcaggtttgcaaaccgtttcttaaaattacaggatacctagggacctgttggggtgggwgggaagaaccctatgggcagaaatgtgactttctgtagcaaagatgtactgtttcccactgagaagaatcaaaaatagaaaagtgcttccttgtctctct

SEQ ID NO: 166694 - DNA, 201 bp, Homo sapiens
gaacctttctcttataaggatactaatcccatcgtaccccgtcccccatgatctcatttgaaattagtcacctcccaaagccccacctccaagtactgtcmcactggggcatagggcttcagcatatgaatttgggggagctggggagaggaacacatacatttagtccataacaactatctcacttacctctctactaag

SEQ ID NO: 166695 - DNA, 201 bp, Homo sapiens
acctgtagtcccagctgcttgggaggctgacgagtaaggatcacttgagccagcatggtggaggctgccatgatcatgctactgcactccagcctgggcarcagagccagaacctgtcttgtaaagaaaaggaaaaagagagagaagggcagaaagaaagaagggaaggaagaaaggaaaattgggcccaggaatgatctt

SEQ ID NO: 166696 - DNA, 201 bp, Homo sapiens
agggaaggaagaaaggaaaattgggcccaggaatgatctttacaatgcctgacaaccaagagaagaagggaaatgagcttcacattgcctgcaagctctarggtgacaagagccaagagaaattattgttactgtagtgatgttccactgaggatcataaagtactttattactctactgagtatggttttttgttttgtt

SEQ ID NO: 166697 - DNA, 201 bp, Homo sapiens
ttctcaattgcaaaagtgaggctggtcatggggcttggaaccacgccacggacgcatgaagcctccccgtttacatgccaaatccagagcttaggcatccrtgctcagggctctctgtggtaggcaacagctggattatttactttctagaatatctcgagttcttaatctgagcagtttcgaaaccaagcccacattaat

SEQ ID NO: 166698 - DNA, 201 bp, Homo sapiens
gagaaggacccggttggctctgcaaaccgcatttccttggctgaacgccagaggagagaaatgatccggcaagaagacacaccattccccgtcagcccctwcccgacccttgcacccctggatcttctgctgagtatcggattggtctgcgtccaagagctcctcgcttggccagcaggggctgcctggagaaggggagga

SEQ ID NO: 166699 - DNA, 201 bp, Homo sapiens
ttctgctgagtatcggattggtctgcgtccaagagctcctcgcttggccagcaggggctgcctggagaaggggaggacaggcttcgagttttttgggtagkgacttctgtggacgtgaaaagactgcaccagaaatcggaggcagccctccaaacataacttggcctcttcgttctccctgtggacacacaggctgtgttc

SEQ ID NO: 166700 - DNA, 201 bp, Homo sapiens
taacataataccatagactgggcaggttaaacagcagacctctattcctcacagtctagaggctgggaagtccaaggtgaagccatgggcacattctgtgsctgcctgaggctctctttctggttcccagatggatgcctttgtgtgtcctctcatggcagagagaggaaggggtctggaacctttctcttataaggatac

SEQ ID NO: 166701 - DNA, 201 bp, Homo sapiens
aaaaataatgataaagattgtgtgatcaagtatagcagccctgtggtgtttcctcagaatggtgtattacagaaaaggaaaaagccatatacatggagaaraaactcccgatatttaatattatcaattgctggttcctgtaaatttgcatttatggatcacattataaaagcaattactcttatggattgttcatgcaga

SEQ ID NO: 166702 - DNA, 201 bp, Homo sapiens
ttatccatgccatctgaaatcctccttcctttttaacaaggcaagtagaaaacgaaaacaacatcaaaggatacactacacaattgttggagccctaggamccgagagaagagtacaagcaggttcttgaactgttctctccccagcaactataactggaaggaacctcagtttgtccattcattcattcatcagagcagc

SEQ ID NO: 166703 - DNA, 201 bp, Homo sapiens
gtaagaggtttgagggaaaaataatactgagttttgagtgtttctgattttaaaaatgtgttgagtagaattaaacgtgttcaccaaaacccattttatcmctttaaattattgggcaattaattgtatttacttagcattgaatgcatgattagaaatggaatttttaaaaaagcaatactcaagtggagtgagttcatt

SEQ ID NO: 166704 - DNA, 201 bp, Homo sapiens
tatccactgccctggtgggggaatcagtgaggctaggaatcactggaaaatgacattccttgagactccttcaatgggtagagtttgctttagcttttcawgtatcttactgtatgatggttgcttttgggttgaattccaccttgggttcaattcaacatgaaagttaaccttttggtgaaggaatgatccacgggaaat

SEQ ID NO: 166705 - DNA, 201 bp, Homo sapiens
ttgtcagttcaggagggtagaggataggggggaaaaggtgctactggcatctagtgggcaaaggccagggatagtgctaaggatcctgcagtgcaaaggascatgcccaccacaaaatatcagcagtgccgaggttgggaagctctgtgccattgtgcaaagattcaaggtggctatgtcacaggactggtacatgtcctt

SEQ ID NO: 166706 - DNA, 201 bp, Homo sapiens
tggatttggcagctggttttgtctggatttgaaagggaggtaatcaggggtgtgctgggagggccagaacgatccacccacgtgttggtgccacccggcartggaaaagcctctggcctcggccttctccggaaggttgtccgcggtgccagtgagagctgcttttcaccttacagcagccccggcctatctctcaggagg

SEQ ID NO: 166707 - DNA, 201 bp, Homo sapiens
tgcagtgagccaagatcgcaccactggactccggcctgggtggctgagaaagactcagtcttaaaaaacaaacaaacaaacaaacaaacaaacaaacaaacaaaaacttgtctccaaatgagcagacaccagaatctcatggagggatttttcgaacacgtagcacagggcttcgcccccagcatttttattttcgaactt

SEQ ID NO: 166708 - DNA, 201 bp, Homo sapiens
tcattatatgcctccaaagactttgtgtttcctgtgtttgacatcgagatagaatttttcataaccctttactagtaataaatttgattgttaagggaccrggttaatcttatttctaataccagcatctgattttaaaaccctgatttaggagcattttctttctgctaccttcctaaaacgcatgggtggaaatgtata

SEQ ID NO: 166709 - DNA, 201 bp, Homo sapiens
gaggttgcagtgagccgatgtcatatcactgcactctagcctgggcgacagagtgagactctgtctcagaaaaaaaaaaaaaaaaaaaaaaaaaaaaaaaaggctttcctgaaaggtgattcacaggcctcttcggatcccttcgtgtttagcaatttggatttccacacagccttgctgtgccttctgcccatttgtcct

SEQ ID NO: 166710 - DNA, 201 bp, Homo sapiens
gatatccagtatattccatgaaacaaatatcatgaatttattccatgaaacaaatatcgtgaatatattccatgaaacaaaatactgtgaaatcataccastgatttttgaagaaacctaatgaaaacagcatgctcctatatcttttttctgggtgatctttagatatctcgtcttccaaacttttgtgtagcattgtct

SEQ ID NO: 166711 - DNA, 201 bp, Homo sapiens
caaagttacacaacggctgtaaaaaataaataaaaaaaaagcaaaattagcactttatcaagtttggggcatatttccaaggccaccagggagcagggaargtcaccaaaagaccgctccttgaaaccaggcaagaagccatctttgcagtgagctgagaggtctgatggccgccagctgagggagggaattccccttttg

SEQ ID NO: 166712 - DNA, 201 bp, Homo sapiens
ataaaatacaatgaatccacaaacagcttcttcttcattatgtaccccatacctattagaccatcataaaatataactatatgagtatcatagaaaagtttaaagctgtctctactctgttatgctaagatatattagtttcataaccactcaatatattcatagttaatttatcctttattttaaaaaaatgtcctgcag

SEQ ID NO: 166713 - DNA, 201 bp, Homo sapiens
cgatgtgttgttttctttgttcttttttttgagacagggttttgctgtcacccaggctggagtgcagtggcagagtctctgtgcactgcagcctccgcctyccaggttcaagtgatcctcctacctcagcctcctgagtagctgggactacagttgtgcgctaccacacctggctaccgtgtcttgttttcaatgcagtat

SEQ ID NO: 166714 - DNA, 201 bp, Homo sapiens
aaagtcatatcttacatggttggcagcaggcaaagagtgagcttgtgcagggaaactcccccttataaaaccatccgatctcgtgagacttgttcactatsacgagtaaagcacaggaaagacttgccctcatgattcagttacgttccaccggggccctcccacaacacatgggaattgtgggagcgacagttcaagatg

SEQ ID NO: 166715 - DNA, 201 bp, Homo sapiens
gcagactcttcatactcaaagcagtaaaaaataaaataaaataaaatacaatgaatccacaaacagcttcttcttcattatgtaccccatacctattagascatcataaaatataactatatgagtatcatagaaaagtttaaagctgtctctactctgttatgctaagatatattagtttcataaccactcaatatattc

SEQ ID NO: 166716 - DNA, 201 bp, Homo sapiens
cctcttcattgtccccttcatacaaatagatagcttttagtgagcagctactctgcctggcactgttctaaacacatgacaccaatagctcactcagattsccgcctctcaacagggaaactgaagcacaggaagtttcagtgatgcacttaggcaaccagtaagtggcagggtcggcattgaggtcaagactggttggac

SEQ ID NO: 166717 - DNA, 201 bp, Homo sapiens
gtagtatatttgggcagactcttcatactcaaagcagtaaaaaataaaataaaataaaatacaatgaatccacaaacagcttcttcttcattatgtacccyatacctattagaccatcataaaatataactatatgagtatcatagaaaagtttaaagctgtctctactctgttatgctaagatatattagtttcataacc

SEQ ID NO: 166718 - DNA, 201 bp, Homo sapiens
taggtaaggacagtggtaccattctgacggactctcggatgcttggttttatggagggatcttaaaacagtaatcggcccatatgtgcagcaacctttgcrcctaaatagctgaggacaaagtaggttgcttacttcaagagcccttccctttctcttctttgtcaggcctgtaatgttcctcacccactgagtatttaat

SEQ ID NO: 166719 - DNA, 201 bp, Homo sapiens
attctacggtggctctttacccattgccatcattttgtaggcagtgagtgcccgcatcagtgggcgttttatgttgcaccattttctgagcaatgtctttsgtccaccattaagcatttgtggccgcccaccccacaatatgctttgctttctgctttcagaaacaatactggtgacctgttttaagaaaagctgaaaagc

SEQ ID NO: 166720 - DNA, 201 bp, Homo sapiens
ggcaaagcgatctcagggtaaacactgcacaccagtaagtattcttggggcaaatgggaaaagggttaaaatgaccagatctccagagatctcactcactrtggtgaagacagcgccaagccatgagggctccgccccagtgattcaaatacctcccattacggacatgtttcaacatgagatttgagcggggacaaatat

SEQ ID NO: 166721 - DNA, 201 bp, Homo sapiens
ccaaagcctgtgtttttcttgctcacatgtgagtcttctccttgcttcaaccctccccgctgacagccacaagactctgcctccctgcagcctgtggaacrtaatattcgttgggatcatacattgaccaaagatccgccatgtctttgcaactaacatactcactcatgacttcacgtggctatgtacaagaccacatct

SEQ ID NO: 166722 - DNA, 201 bp, Homo sapiens
atttcatggcaaagcgatctcagggtaaacactgcacaccagtaagtattcttggggcaaatgggaaaagggttaaaatgaccagatctccagagatctcmctcactgtggtgaagacagcgccaagccatgagggctccgccccagtgattcaaatacctcccattacggacatgtttcaacatgagatttgagcgggga

SEQ ID NO: 166723 - DNA, 201 bp, Homo sapiens
ttgttattgtaaaagcatcatgcaccaggtaaaatgtttaataacacagagaaatctaattgtcaagtatcttctcaacacacattaatcaacaattctcmtatcgaaggataacctcttgtatttacaaaaaaaagaagaaaaagtgctgtcatcagtaaattcattcatgtatgttatacacttacatacaaaatgtat

SEQ ID NO: 166724 - DNA, 201 bp, Homo sapiens
atgacacaggagacagggaaagagttttgttatcctgatacacacattcttaaatgcctctagctgtgtagacattggtttgtccatattaatagtatttyacgaagtgccagttgtgtgcctgctttgtggcatatgcattggcattcattgctttatttaattcttccaacaacgtgtcagatgtctgttcaaattatt

SEQ ID NO: 166725 - DNA, 201 bp, Homo sapiens
tttgtcaaatggggtcatagagggtgagaatcagagtttatgcagggcatagcactagtgtaatgctgggcagagagtgagcatccagcaagtggttttgrcaatgataataattataacccaagcgacacatacaatttaatcaggcactgtgtgtccacagcgatgtcaaggaacaatgcacaaagcagagtttttcca

SEQ ID NO: 166726 - DNA, 201 bp, Homo sapiens
agatttggagtcagatgtcatattcctgccagcaggtttagcagtcgtgggactagggaagtggcaatggcaggagcaactggaaatgtcttttttttttyctcctttttcctgaatatggaaccaaagcctgtgtttttcttgctcacatgtgagtcttctccttgcttcaaccctccccgctgacagccacaagactct

SEQ ID NO: 166727 - DNA, 201 bp, Homo sapiens
tcctttcacaataaccctatccttactgttgaagacttgtggaaaagggacatggcccagggaaccagagtggtttgggaaagcactttgtcaagaggctkggggaccccagggtggaagctgccatgcgcatgaggctgtgttagcagaggcagtggcagaagaagacattgcaaacctgcaaaagcaacctctgaggat

SEQ ID NO: 166728 - DNA, 201 bp, Homo sapiens
taaagtttagacctattttaataaggctgacttgggttgaagataactagagccatgactttcatcttgatggacaatgagtactcactctacttttttaktttatatttttattttagttcatttcatttaagacagcgtctgttacccaggctggagtgcagtgacatgatctcggctcactgcaacctacaccttctg

SEQ ID NO: 166729 - DNA, 201 bp, Homo sapiens
tgcagggagatttggggatgttggatgctaaggcccaagccgtctattgtatgccttttgctttggcataaaacaacagatgaccttctgttaggtgtatstctgctcatgcttgagagtggtggtgtttggaaagactcaatagcatatgcacatgaggaagttgaccaaatgattccacagcgcatactcattttttgc

SEQ ID NO: 166730 - DNA, 201 bp, Homo sapiens
cctatctgtgatgacctgtaaatggaatttaagggaggaatcacacgtgttagcacggggttggcattgcgtggctgttttcaattaacttgaccactatsataacatcaaaggtgtgtgtaccattctatgaccattgaatctccatggacatgttttgggaaatggatttgtcccattacactgctttctttagtgcat

SEQ ID NO: 166731 - DNA, 201 bp, Homo sapiens
gaaaaggaacaacaaaaaagtatatctgtgaacttattaaatgactttaatcatatgaaaatcagccatcagccttattagagtggttgattttttttttratctaagagctttcttggttattttctgttcttaatcattgttgtatatccttaatgcgcaggacatgacaccgtataacaagtgttttaaaaatattta

SEQ ID NO: 166732 - DNA, 201 bp, Homo sapiens
gtttttatatgcagtttgtatttatccatgccatctgaaatcctccttcctttttaacaaggcaagtagaaaacgaaaacaacatcaaaggatacactacmcaattgttggagccctaggaaccgagagaagagtacaagcaggttcttgaactgttctctccccagcaactataactggaaggaacctcagtttgtccat

SEQ ID NO: 166733 - DNA, 201 bp, Homo sapiens
aatggtgaataccctcggcgggaggcaggcacctgatgccactgcccccgccccacctgcccccgccccgtttctcagatcacacaggcaggctgaggagygcttaacaccccagcctcccatgaagcatcctgaaaaagcagactttgtcttcctccatcagctttgtttgtcctctgccgagactccagggacatgatt

SEQ ID NO: 166734 - DNA, 201 bp, Homo sapiens
aaacagaaaccactttcagctttcccgttccagggttaagtgcccaagcaggtgttgtttctgttatgtggtttgcagtgagcaaaaccaccccctcttamctgtggcagcaaaggcagggagactttgagacctggggagggctctctgctgtgttaacagaactggctcttggttggggggtggggggcacccattctt

SEQ ID NO: 166735 - DNA, 201 bp, Homo sapiens
cttacaatccgttgcagaaagcctagctccccagcttctcctgaatctacgtttttctattttgtctgaactagccaaggtctctggagtttgctgttatmttgcttcagagaaattagtgacattgaaaggctgttgtcttttttagtgtacttttggttgttaggagaaatttacaaggccatttttttctcccgtctc

SEQ ID NO: 166736 - DNA, 201 bp, Homo sapiens
gttgtcacattcttctgcctagagtatgccttttccttcaccaaaccaagtggctctttcggaagacttgcctgaatcctagaccccttctctctacaacmttcagtctgagttgggtaccttgcatcctcctttgttcccatactaacccctacaaccatggtcattttgtggttatctgtttaattctctgctggctat

SEQ ID NO: 166737 - DNA, 201 bp, Homo sapiens
atcatacccattcccaagatttcagtcatcaaatccattccaatatgactcctgtatccatatgtccagttccaagtatctgtccatggtgttggtcccakgttattcgcacctcatatgtctttggcacagcactcttgacagctcataaagtcacgctgttacccccacaatgtccccccacatatcattgctatccct

SEQ ID NO: 166738 - DNA, 201 bp, Homo sapiens
gatcttaccctgacagtcacagaaagcactgggagcgtttatgaatgttgtggtatctcacataataaggggaccatgcatgtattttagaaagagccctytggcttcagggaagaacgatggatttgtgagggtcaggactggtagcaggtgggctcctagaatagtcccggcaagagatcatggaggccagagccaggg

SEQ ID NO: 166739 - DNA, 201 bp, Homo sapiens
gctcactgcaaactacccccgcccccgggttcaagcaattgtcgcacctcagcctcccaagtaactgggattacaggtgcccaccaccaagcccggctaakttttctattttcaatagagatgaggttttgccatattggtcaggctggtcttgaactcttgacctcaggtgattcacccacctcagcctcccaaagtgca

SEQ ID NO: 166740 - DNA, 201 bp, Homo sapiens
gtctttggcacagcactcttgacagctcataaagtcacgctgttacccccacaatgtccccccacatatcattgctatccctcctcgacacccacacctcytgcatgttcctgagcttcttaggcgtgttgcatcttcctgaccttcccagtccgaagcccaaggagatacttgataaatattcgtctaataaataaatga

SEQ ID NO: 166741 - DNA, 201 bp, Homo sapiens
ccgggaggattttcttttctttttctttttaatcctcctcctcaagggaaacattcttctcacaatagcttcctggtagaaagttctaactaatgactttratcgtgtgaatgtattgcagaaatggacaggacaattctcagcccattcatcttacagacctcaagtgaacaggcacaaaacaacaggctccaccctcct

SEQ ID NO: 166742 - DNA, 201 bp, Homo sapiens
ttttcttttctttttctttttaatcctcctcctcaagggaaacattcttctcacaatagcttcctggtagaaagttctaactaatgactttaatcgtgtgmatgtattgcagaaatggacaggacaattctcagcccattcatcttacagacctcaagtgaacaggcacaaaacaacaggctccaccctccttcccccctc

SEQ ID NO: 166743 - DNA, 201 bp, Homo sapiens
gcaatgggaacagagctgaggctcctaaggtctagagtcaacatgaaaatacctttgcttctgggccatagctgtgtttcttcttaacaaggcagaagccyagaagagacttcatgtactgtgactgtaataaagagggttgtaagtagagaagctggaatttgaaaggttacgtacaagtcaagctgcctctgtaatgtc

SEQ ID NO: 166744 - DNA, 201 bp, Homo sapiens
tcctcctcctcaagggaaacattcttctcacaatagcttcctggtagaaagttctaactaatgactttaatcgtgtgaatgtattgcagaaatggacaggrcaattctcagcccattcatcttacagacctcaagtgaacaggcacaaaacaacaggctccaccctccttcccccctctatctcatactttacctcaattt

SEQ ID NO: 166745 - DNA, 201 bp, Homo sapiens
gcaagtaaagaattataattaagagaaccagaagggcctgtctctcaggaaagcagtgatttcctttcacaataaccctatccttactgttgaagacttgyggaaaagggacatggcccagggaaccagagtggtttgggaaagcactttgtcaagaggcttggggaccccagggtggaagctgccatgcgcatgaggctg

SEQ ID NO: 166746 - DNA, 201 bp, Homo sapiens
ccaaagtgctgggattataggcttgaaccaccatccctggccttgatactgatattttattgtcctaactgacagttttgtctgcccagcattttcccccrtcacccttgtactatcccattttcctttgccatgcacctgtcttcctcttcaggattgatcacaaaatcaaaaccattcctaccagccagaggtgggcac

SEQ ID NO: 166747 - DNA, 201 bp, Homo sapiens
caaaccaggtgtcattgccctccccaccctaccttgctcccctggagtgtatcctgattcttttgaggatcacttgatcctgattttttttttatgtgtawagatgggatttcattatattgcccagactggtcttaaactcctggcctcaagcaatccagccacctcggcctcccaaagtgctgggattataggcttgaa

SEQ ID NO: 166748 - DNA, 201 bp, Homo sapiens
cgaatatttgggacccactgggagtttgtgccaaaccaggtgtcattgccctccccaccctaccttgctcccctggagtgtatcctgattcttttgaggawcacttgatcctgattttttttttatgtgtatagatgggatttcattatattgcccagactggtcttaaactcctggcctcaagcaatccagccacctcgg

SEQ ID NO: 166749 - DNA, 201 bp, Homo sapiens
ctttagccaaggaagaaatgacaacgaatatttgggacccactgggagtttgtgccaaaccaggtgtcattgccctccccaccctaccttgctcccctggrgtgtatcctgattcttttgaggatcacttgatcctgattttttttttatgtgtatagatgggatttcattatattgcccagactggtcttaaactcctgg

SEQ ID NO: 166750 - DNA, 201 bp, Homo sapiens
tgagtctcagctgaccaagctctaaaatgagcataaccatatcagtttgtgtttcctgttacagggagaaaagactgagataactaaagtacctgattgastaactgctctctgaaggtggaggctggactgcttcactggacagggtggcctggggttattctagtgcagtggtagctggtgacaaaactcaaagaagat

SEQ ID NO: 166751 - DNA, 201 bp, Homo sapiens
caagggaacctttccccaaagcccctcaacacacttaggctgacatctccttgaccagaactgtatcaaatttacatagcctcaaatgaagcatctgggamcaccaggattgggtgtttaggccatggaagagtaacagcccagtacacaactgtctccagtggccagcacgtagaccttccctcacactttccactctct

SEQ ID NO: 166752 - DNA, 201 bp, Homo sapiens
taaggcagatggaaatgtcttgtaactcagtaaaacagtttagaaatttaaagcctttggagagagtaagtattgagaaggcacatctctacgttgttgaygtgaaggagttgcaaggtcgggtagatgggatcagtgccaggtctaatgggcttcatttgcaagacctaatttctagcagatcatggtgtaagcctcaaa

SEQ ID NO: 166753 - DNA, 201 bp, Homo sapiens
tgcttcttacgtgtcacgcactgtgataagtcctaggattatagaagtcaataagctatgatgcctatccttaaggagagaaacacatataggataggaamatagcttgccatgtctgatagatattaggcattcagtctctctctctctctctctctctctgtttattatagatagaaataaaaaaattataaatagaaa

SEQ ID NO: 166754 - DNA, 201 bp, Homo sapiens
gccagtgtgtctctttctctggacggccaagtgatgcaggtaccacgcttaggtctgctggtgtttagcttgacttaaaacccagccagggaaatatgttwcactttgctggggtgcaggtggaggaggctattattcttaggcatttaacagtgaagaatgttgggcagggcagagggtcagctgaatggcagggattcc

SEQ ID NO: 166755 - DNA, 201 bp, Homo sapiens
tctatttctttgtgacctgatagtcttgctctccagggtaaaagaagaggatggaaatggctgtggggcgcctgaggtgggccctggcatgatggcaagtkgccgttctgggttcactgggatggctcaaggggagtttggaaaccctcctaacatgtcatctgaaatctgggaccacagttccggctggaacacttgtca

SEQ ID NO: 166756 - DNA, 201 bp, Homo sapiens
cttctatttccagaaccttctaactctatttctttgtgacctgatagtcttgctctccagggtaaaagaagaggatggaaatggctgtggggcgcctgagstgggccctggcatgatggcaagttgccgttctgggttcactgggatggctcaaggggagtttggaaaccctcctaacatgtcatctgaaatctgggacca

SEQ ID NO: 166757 - DNA, 201 bp, Homo sapiens
agcatgtagaaagatcactgcagatgtccttgtcgtgttgaccttattggagaatttcctatctgtgatgacctgtaaatggaatttaagggaggaatcamacgtgttagcacggggttggcattgcgtggctgttttcaattaacttgaccactatcataacatcaaaggtgtgtgtaccattctatgaccattgaatct

SEQ ID NO: 166758 - DNA, 201 bp, Homo sapiens
aaacaaacagatctcaggagaactctttcacaagacagcactagggggatggtgattagaaagcacctcatgatcccgtctacttcctgcagagaacagaytagccccctatgcagcacacacctttgtgaggtccctcctccaacacagggattacaattcaacctgagacgtgggtggggacacagagccaaaccacac

SEQ ID NO: 166759 - DNA, 201 bp, Homo sapiens
agccttcatctgttttcctgcagatgcccggctcgtggttaacccaagcaagaggtagttaaacggccccgcagattgccagtgactccgggaatgcctargtttatgtatggattaacacagtgatagaccctgagtagcaaaagacgaagactaattacctgacagagctcccctccactcgcctgggtcattgaaatt

SEQ ID NO: 166760 - DNA, 201 bp, Homo sapiens
ggaccaagttttattccctgtttaaccttggcctgacaacctaataggtgctcagtgaacagttcttgaatttaattctctccctttccccacactgatgkgtatttaagctccagtggtactcgatgtgttgttttctttgttcttttttttgagacagggttttgctgtcacccaggctggagtgcagtggcagagtct

SEQ ID NO: 166761 - DNA, 201 bp, Homo sapiens
acaccagactaatgcttctgacttttccatggtgccccagcagcaggctggagggaagggcgggggcggtcagaggagagatagagcacttcagattccamtcgaatacattagagcattagagcttttctcttcctcagggtgctctctctctctgggttgggaggagatgtggcatttctaggaattcacagtaaaatc

SEQ ID NO: 166762 - DNA, 201 bp, Homo sapiens
atggccgctggaaaagaagccaactcccagggggcacgaggggctaagctgtctcctgggaagtttgagggaggccaagtgttttccagttcatttccaaygcgtatttcttcagggccaagggcccagctgtgcctcattaggggtgagagtttggctgtgacacgacttaatagaaaaaaaaaaaaaaaaaggagaagt

SEQ ID NO: 166763 - DNA, 201 bp, Homo sapiens
tctcccgtctctgcagttcaggagattatattagaaaatattctatacaaaaaatatgcatagtagggcttttctccagctagtagctcagaataagtcaktactactgaaacaggtaccttttgtggaattgattctgaaatctgtttggatctgaaatctttctttcttgcctttgagtaagatacggcagagaaaaac

SEQ ID NO: 166764 - DNA, 201 bp, Homo sapiens
aaaattcaaaaaattgcaacctgaggcataaatgggttttaagctccatacagtaaaacctagcatatgaaaacagttctggctgatgggttggtagaagkgatagatatagatacatatatacacatatatgcacagtaatagatataggtaaagaccttgatatatgtacatatattgtatgatacatatccatgcata

SEQ ID NO: 166765 - DNA, 201 bp, Homo sapiens
cccgtctctgcagttcaggagattatattagaaaatattctatacaaaaaatatgcatagtagggcttttctccagctagtagctcagaataagtcagtaytactgaaacaggtaccttttgtggaattgattctgaaatctgtttggatctgaaatctttctttcttgcctttgagtaagatacggcagagaaaaacaat

SEQ ID NO: 166766 - DNA, 201 bp, Homo sapiens
ctcaggatgaggatgttcaatttgtactgctggtggagctgcctttccattaagtgagtctttctccaagggaacagaagtcttaggttgttgatctggckgtcagaacctaggacaggcaaggcagtgggctgttgtagaggagatgaagctgatcagagcacacccacaccagtgacaaccggtcaggacctgggaagg

SEQ ID NO: 166767 - DNA, 201 bp, Homo sapiens
ccttactgttgaagacttgtggaaaagggacatggcccagggaaccagagtggtttgggaaagcactttgtcaagaggcttggggaccccagggtggaagytgccatgcgcatgaggctgtgttagcagaggcagtggcagaagaagacattgcaaacctgcaaaagcaacctctgaggatgggtagacatatacttcatt

SEQ ID NO: 166768 - DNA, 201 bp, Homo sapiens
gctcagaataagtcagtactactgaaacaggtaccttttgtggaattgattctgaaatctgtttggatctgaaatctttctttcttgcctttgagtaagayacggcagagaaaaacaattacactagctgctggtctgtatttactggttagaatagaatattattaccatcaagaataacattagtggccaggtgcggtg

SEQ ID NO: 166769 - DNA, 201 bp, Homo sapiens
acttagcagttcacattcacatcttgtttattaactacaattctctagatcagaagcctagacacaatgtgactggcttctctgctcagggtctcttgggkacaaaataaaggtgtccgctggaggaacatcctttcctgcatgctctgtggaagaatccactgccaagctcattcaggatgctggcaggattcagatcct

SEQ ID NO: 166770 - DNA, 201 bp, Homo sapiens
actgccaagctcattcaggatgctggcaggattcagatccttgaagttgtaagactagggcccctgtttcctactgacttctgctggtggctgccctcagytcccagaggcaacccacattccttgacttttggccccctgcatctcaaagccagcaacagaaactctcttgtgcatggagtcccctcctgctttgaatct

SEQ ID NO: 166771 - DNA, 201 bp, Homo sapiens
agagagtattttgtaacctgtgacgctcttttcaagtcttagagaggaagtatggaaagagcatgcgcttttgactgaggaggtcttgggtttaaaggtcraattttgccacttactttctccatggccttggtcaacatcctgaagtctcaggtccttgtctgcctttgctttgacacgagatgttgcctgcctcaggcg

SEQ ID NO: 166772 - DNA, 201 bp, Homo sapiens
aaaatggaaaactccaggggaagagggtctttacttagggagttggcatttgttggaatttcccaagaacatttcatgattagtgacaggttatcttctastttacctgaaggctatggtcactcaacaaattttgtgttgcttcttacgtgtcacgcactgtgataagtcctaggattatagaagtcaataagctatgat

SEQ ID NO: 166773 - DNA, 201 bp, Homo sapiens
ttttttgaggtggaatctccttctgtctcccaggctggaatgcagtggcattttctcggctcactgcagcctccgcctcccaagttcaagccattctccartctcagcctcctcagtggctgggattacaggcatgtgctactacccccggcaaacttttatatttttagtagagacagagttttgccatgttcaccaggc

SEQ ID NO: 166774 - DNA, 201 bp, Homo sapiens
tccttctgtctcccaggctggaatgcagtggcattttctcggctcactgcagcctccgcctcccaagttcaagccattctccagtctcagcctcctcagtrgctgggattacaggcatgtgctactacccccggcaaacttttatatttttagtagagacagagttttgccatgttcaccaggctggacatgaacttctga

SEQ ID NO: 166775 - DNA, 201 bp, Homo sapiens
agaggaggaggaggaacttctcaggaagaagtggcagttccctcctttgtttcttatctctactgtttagcagccactctccaaagcctcttgctgggaaygtggccatcatagaagtaaatgagacatctctttcatctgcaccaacctccttattaagaccttatcagttacctgtagattctcccactgttgtacttg

SEQ ID NO: 166776 - DNA, 201 bp, Homo sapiens
tggcattttctcggctcactgcagcctccgcctcccaagttcaagccattctccagtctcagcctcctcagtggctgggattacaggcatgtgctactacmcccggcaaacttttatatttttagtagagacagagttttgccatgttcaccaggctggacatgaacttctgacctcaagggatccacctaccttggcctc

SEQ ID NO: 166777 - DNA, 201 bp, Homo sapiens
gaaacaattcagcaactctcttacagatttttatcatcatcccattcataattgattccaaacgtgcatgaatctttcaagataagtgtcttattgattaycctgaaaacaagcgatcacttggtgtcctgagattcgctcactgccctcccctgattaccgtaaacagagatgttgatgagaagaaatgtcactttcttt

SEQ ID NO: 166778 - DNA, 201 bp, Homo sapiens
ccttttttagagataaagcctcaccctgttgcccaggctggagtgcagtggcgtgatcacagcccactgtagccttgacctcccaggctcaacctatcctyttacctcagcctcttgagtggctggaaccacaagcagatgccaccatgcctggctaactttttttttttttttttttttttgtagaaacagagtctctct

SEQ ID NO: 166779 - DNA, 201 bp, Homo sapiens
tatagcatctgaatttgaaaacctctactaattcatgaggcaatctatttgataatggcatgatttagttagtgttccttttttagagataaagcctcacyctgttgcccaggctggagtgcagtggcgtgatcacagcccactgtagccttgacctcccaggctcaacctatcctcttacctcagcctcttgagtggctg

SEQ ID NO: 166780 - DNA, 201 bp, Homo sapiens
tcaaatgcgcgtttaatcttcttaagctcaacttcatgcaagagacctaggaattcacagagtgaagatgatttctccattcccttctccgagcagagctsttgaagaagatgggagttaggagaagtgaatcttttgttttcgaagcctttgtccttgtgagtctcttaattggggtgtcttgtaatgcaaagtctttaa

SEQ ID NO: 166781 - DNA, 201 bp, Homo sapiens
ataagtctaatttagtagccagctaaaggatatctgtgaacccttcgcaaagagtaatctattgaaaaggaacaacaaaaaagtatatctgtgaacttatkaaatgactttaatcatatgaaaatcagccatcagccttattagagtggttgattttttttttaatctaagagctttcttggttattttctgttcttaatc

SEQ ID NO: 166782 - DNA, 201 bp, Homo sapiens
gaacaaattgccaaatgcaaggcctgagcaaaagacacagaaaggatttctttatcgtaagcacacttctctacattacctttataatccaacaactctgstattagtaaattatagaaacaacttttgtaacactatcttgtttgcagagtatatgaaaaatttgaagttaaaattcagctccacgaatactgcagtggt

SEQ ID NO: 166783 - DNA, 201 bp, Homo sapiens
atccagtgttataggagacaaaccatagcaagcaatggcctctcacccttcccttcacaccctccactctgtccacttgtttgttccttcaataaatactratggagaatgggctctatgccagtgtttctctggatgttggctgcagggatgaacaaaggcaacttctaggagaaatttctgtttttgatgctctcgtgg

SEQ ID NO: 166784 - DNA, 201 bp, Homo sapiens
ttacagcaaatttgtagttatggtggagcaaagggcagttttcactcctcttccctaaaactgtagtttaactaaaaagtggccactgtctcctggtagcrgttggtaagccatccagtctctgcaggcatctacgctccaggtctccagtctgaggagtctcgctcctggggcaggtgcctctgggggtctctgccaggc

SEQ ID NO: 166785 - DNA, 201 bp, Homo sapiens
agcattcacacaggcactaagacggtgagtactcactacttagcgctgtcaacatcatctccgtccacatcaatgtcgtcatcgtccttatgaaaagccckgggcatcattttgcccttgagctggatgtccatgttggaaaaacagctagtggaaggcgtgcccaaatctcagaagttggcgtttccttgcagatatcat

SEQ ID NO: 166786 - DNA, 201 bp, Homo sapiens
ccacacccggcctcttctcgatagatcttatttggctgacaacgaaagctgttgtgctggtagcatcatccctttgcatgcaaaagataaactgaaatctraagtagccatatccttccggccaggtttttcaagtggttactctgttctgatcattgtcatgacaggaatagtgaaaataacaataaatcatttttcttt

SEQ ID NO: 166787 - DNA, 201 bp, Homo sapiens
tcccgctttgtgctggagcaagttttggctgagtttctgtcacttgcaaccaaatcagtcctatccagtatacctagtgactctctggtctccaaaggctrtgcctgctgggtactgagtgtctccccgaccgaccccatgatggctacagtgcacatcccttccagccaactctattgtgcacacatattcgtagggtga

SEQ ID NO: 166788 - DNA, 201 bp, Homo sapiens
ttggttatttctttattcaagggttgttgagaggatgaagtgctaaaaatgcttgaccagcattcacacaggcactaagacggtgagtactcactacttakcgctgtcaacatcatctccgtccacatcaatgtcgtcatcgtccttatgaaaagccctgggcatcattttgcccttgagctggatgtccatgttggaaaa

SEQ ID NO: 166789 - DNA, 201 bp, Homo sapiens
gctcctacaccatgagtgcttttgtatggtgactgtctggttacaaggtcatcttttcccctggatgagacgccccttggggaaaggaccaagttttattycctgtttaaccttggcctgacaacctaataggtgctcagtgaacagttcttgaatttaattctctccctttccccacactgatgtgtatttaagctccag

SEQ ID NO: 166790 - DNA, 201 bp, Homo sapiens
ttttggaggacttgaaaggttcctgctacctttggctggggatggagggaacatggaagatgggtctttgtttagaggaagctctttatcctggtacgctrgaagttggcatagtcttagcagttagtccagatgtgaatttcaggattattctgtgagtcttccaagtcctgtctcagcagtgaaataggctcagtgtag

SEQ ID NO: 166791 - DNA, 201 bp, Homo sapiens
tggttcagggtgttgaggcttcgtgctgttaatattggaaggtgggtcatttgtactgggcatctgtcctgtatcttggagatgtttagtaacatccctgrcctctagccattagataccatctctcccagtagggataataaaaacatgtctccagatgttggcaaatgtctggccttctggggagtaaaatggcccctg

SEQ ID NO: 166792 - DNA, 201 bp, Homo sapiens
ggtgatcctgctgcttggcagcatcttcccagcgtacaacagaggaaaactgcctgttgtagttaaaaaaaaaaagagagagagagagagagactgatacmcaaagagaatcagaaaggagtagagatgaaacaaagatagagctagcatgattgcaagctgaggacatacgaggagtccctgggtcagctgggccataca

SEQ ID NO: 166793 - DNA, 201 bp, Homo sapiens
taatacaaaagttttccccataccaactagtagtgtaagttgatttcatatccttttatttcataaagttttgcttatcgggtttgtcatcctctatttgmaattaaaatgtgtggtctcgagatgaccttaaagtatctgacccccaaatctaatcactcctagcatctgtgaaaattgacaaatatgtcaggtataact

SEQ ID NO: 166794 - DNA, 201 bp, Homo sapiens
cttggccaaatatccgagtgtggaagctctcactgtgaacctgctaacatacatttcagtgtctacaaaatgtcttttgagagaaaacagcagggacattygtgagctcttttttttttctaaccactttcccagtgagacttcagttttcattctccccttagcagctttcaaatatgtacgtaacacaaatgttacatg

SEQ ID NO: 166795 - DNA, 201 bp, Homo sapiens
atttctttatcgtaagcacacttctctacattacctttataatccaacaactctgctattagtaaattatagaaacaacttttgtaacactatcttgtttscagagtatatgaaaaatttgaagttaaaattcagctccacgaatactgcagtggtgagaaaatggcgacaaagattagtcttctgtgagaagtctgctaa

SEQ ID NO: 166796 - DNA, 201 bp, Homo sapiens
atgggagttaggagaagtgaatcttttgttttcgaagcctttgtccttgtgagtctcttaattggggtgtcttgtaatgcaaagtctttaaagatgtgtgytcctgaaactcaggaggctgctctatcccatggttcaaccaaagaaccagggccaaagcagtgctgaaggaacaactgattctcttggccctccttagag

SEQ ID NO: 166797 - DNA, 201 bp, Homo sapiens
ccttgctgaaatggttggtgctaagatgagcacttggcttaggccagaccagtccctagcctgtggagaaggggcaatctcttatctgaaggcctaggagstgcagggatgtttatatgggctgctagcgcttagtttcctgccacagggagacagtaagaaaggtgacgtcaatctgagatgagagagagagcaaaacag

SEQ ID NO: 166798 - DNA, 201 bp, Homo sapiens
ttaagttttttataggagtcattaatctccctcagcctcagtttccctatctgtgaagtgagtctaaccaggatgataatgaagagttaggtcaagtgagrttggcagccagacacccaccaccagctgtaacataagaacagatgttctctccagacccccaggtcagctgaggtcgctctgcttggaataatgaactgc

SEQ ID NO: 166799 - DNA, 201 bp, Homo sapiens
agtggccctaggatggctcctcagatagctgctggcagaaacctgcactcagtacatctatacatggtgtaatgattgactcaagataattagcatagccrtcatctcaaacctttattatttgtgatgagaagattcaaaacccgctttttgaactgttctgaaatatgcaataccttgttgttaactgtattcaccttt

SEQ ID NO: 166800 - DNA, 201 bp, Homo sapiens
tatacaatgtcagtgctctgagctcattaggcgtcatctgagacagtggctgtaggggaggggaggtaggctctgagtcaagcagacctggaattttcttyatgggccattaggaactgtgtgacgctggggcatctgacttcacctttctgagtcttagtttccttacctgttgaataggtctaatgatatcattatggc

SEQ ID NO: 166801 - DNA, 201 bp, Homo sapiens
tggctggaggtacccctcagctcctagaggcatcaacagttcctgaatatctgggcttttcccacaaagcagcttccttcatcaagccagcaacaagagtytctggggcaagttggtcaacaagatggtgtcttacatgcccaatgtaatcatggaagccatgtatacctcatcacatttgccagatttctgctgattaat

SEQ ID NO: 166802 - DNA, 201 bp, Homo sapiens
acacaggctgctgtggcaacccacagcaggaatagccagtcctgccccagcagggcgtatcaggggtgctaaggtgacttccaagattgaggttggcgagwtcgtgacaggtgtgcaagatggggtgttccaagactggggacaggacaggtgtgcaaggaccagccagctgaggtagaggaaacctagacctatggaaca

SEQ ID NO: 166803 - DNA, 201 bp, Homo sapiens
gtgttattacagggtagaaattcacctatgtcaagtaggcattataccaggtaacaatctcaagactcagcagggaaggatccacttgcaagcccacgtgsttgctggtaggactcagttccttatggcccagtggattgaaggcttcctttcctgcctggtgtttggttccttgccacgtagggatctccatcatggctg

SEQ ID NO: 166804 - DNA, 201 bp, Homo sapiens
ttggtgggaggtgtgcaggacacagctgaaacctttggtgtatagtggatactaaagcaatgctagtcttcttcgtgtgctaccagttagaatgaattttrctgacatcttactggtttctgagggtatacagacacttattgtcaaagatattattgattatctgatccccaaacatatggagttacatcacagcaggtg

SEQ ID NO: 166805 - DNA, 201 bp, Homo sapiens
gaaaatccttggggagccgccatcattccttccacgaaggaatgaaattataacgtaatgtattgttggagcccttagttcaacactgtcttttttcaggycatattaatgcaatggttagcatatcaacttccttctgtttttagtgactctaatacattatattcaccttgttctctgcatgttctttctttaagtcat

SEQ ID NO: 166806 - DNA, 201 bp, Homo sapiens
gggagccgccatcattccttccacgaaggaatgaaattataacgtaatgtattgttggagcccttagttcaacactgtcttttttcaggtcatattaatgsaatggttagcatatcaacttccttctgtttttagtgactctaatacattatattcaccttgttctctgcatgttctttctttaagtcatgttagatccct

SEQ ID NO: 166807 - DNA, 201 bp, Homo sapiens
tgaagtacaggcatatcccacagaatctcttaataccaggccaaaagtaactttatcttgatctgtagttcggacatatttcttggattgtccgcactcawaaaaagagattgcgtaacaccctttgaacaaatggatatttgagaaccatcctgtcttcagatttagattttttcaatttttttttactgtcatatgatt

SEQ ID NO: 166808 - DNA, 201 bp, Homo sapiens
ttgtgagaaatgaggagataatatctttaaatctcctacggtgatacctggaacatgatggtgcttgggaaatgtctcttcttctgaaatgaggctgcctsgaagactcactggaacccaagcaaagtgtctctgcatttcactccgagccatcgacttctgttctgaatgttaaaatgcaggtggctgtgagggagtctt

SEQ ID NO: 166809 - DNA, 201 bp, Homo sapiens
gaaggatcatgggaggggaggagcgtgagttcctcttaagtgaatataaaccagggggtaggaaacaacatgagatgaggctggcgagagagaaggatgcyaggtgaggtgctgtggtgcgccagagactgcggaagtggctttctaattaagaaacagaagccaggaaactcctgtacttcaaggttttggagtgggaaa

SEQ ID NO: 166810 - DNA, 201 bp, Homo sapiens
gtagctttgttgattgttgatattacttatgaactttcttgcttttcagaaaccaccaccacaaaagaggcagtaacattagtattacattatacatcttmggcatttttttcctttgcccttttcgtaggtttttgtttgtttgttttttcttgtcagccacttcatcatgtttggtctctcgtctttggctgtgttttt

SEQ ID NO: 166811 - DNA, 201 bp, Homo sapiens
aattatatattatacacacaaacatacacacacgcacacaccaaatttaaaaagacagatacataggcagttgttatgcagtgtttgaaataaatttattkccagctatgggtcatttggaaaaagatcaatatgatgcatcaacataacaagtaaatggaaatgaatacaaccgcatggttttctgaaagcacggtttcc

SEQ ID NO: 166812 - DNA, 201 bp, Homo sapiens
ggtgagaaggagctggcagtgtgaatagccaggggaaaagtgttttgggtagaaggaacagaaagtgaaacggtgccctggcaaggcaaagattattcatkgctgaagagactatgttgcccagatgacttgttcatgtaatctgtgatttttaaatttagaattgaggtttgaagggaagtattgctcctttctttatct

SEQ ID NO: 166813 - DNA, 201 bp, Homo sapiens
gaaggcgggcggggcaagctttggaaagcacgggcaggtaaggacagggtttcaaaggtgagaaggagctggcagtgtgaatagccaggggaaaagtgttktgggtagaaggaacagaaagtgaaacggtgccctggcaaggcaaagattattcattgctgaagagactatgttgcccagatgacttgttcatgtaatctg

SEQ ID NO: 166814 - DNA, 201 bp, Homo sapiens
actgattaatcacagttatagagtagacataacatttttattaaactctcagtgagcaggaaaattagcacttcctgcaataacgatactaatttcattastgaacgttttcatttataaagtgcttcttccttatcttgaaccttttatcctcttcttattgaccaaagagagggcatatctttgggagctgctaataaa

SEQ ID NO: 166815 - DNA, 201 bp, Homo sapiens
gttggagaaaagggggaaaaagttaaatgttaatgattcttttcgtaactgcaattttatcggctcctttttgtacatatatgattatgaagcaatttgcrtgaaatttacaccttttcaaattttgaaaattgccttgttgaaaaagaatcgctgtacttctcaatactacactgattaatcacagttatagagtagaca

SEQ ID NO: 166816 - DNA, 201 bp, Homo sapiens
agttggagaaaagggggaaaaagttaaatgttaatgattcttttcgtaactgcaattttatcggctcctttttgtacatatatgattatgaagcaatttgyatgaaatttacaccttttcaaattttgaaaattgccttgttgaaaaagaatcgctgtacttctcaatactacactgattaatcacagttatagagtagac

SEQ ID NO: 166817 - DNA, 201 bp, Homo sapiens
gctcttatttttaagtcatccttatctctttcacttattccctcattcaggcaccaaaaatgctgtttgactgggagagcaagtggagctgttcaaagttstagggacagccgggcgcagtggctcatgcctgtaatcccagcactttgggagggcgaggcgggcagatcacaaggtcaggagttcgagaccagcctggcc

SEQ ID NO: 166818 - DNA, 201 bp, Homo sapiens
cctggcttggtgtgttttgtggcatttggcaggcaaacgttttgaaaagaaatctcctttcaaaaatcacagcactggttgaagcaggagcatctctcccyttaaatgcaaaaggagttaatatgccagtgactacagtgtgcctggaaaggtcactggaggcatttttgtctggggcagcccctggagtcttggcttttg

SEQ ID NO: 166819 - DNA, 201 bp, Homo sapiens
gccaaaatattcttttcaaagtgattagaagtaggagaagcttgctctctttttattggcacttctgtcttacatgcactttttgattgaaattattctgkcttctatgaaatgacagtgattggaggtggtttatttttttttaagtctgcttactcggaaaaataaaacaaagttgacaacctgatttcagacctccca

SEQ ID NO: 166820 - DNA, 201 bp, Homo sapiens
gtttcagtgcctgacacagttgtattcctaagacatagttgggaccagacctcaagaaaatagccaacaaatactggctgaatgaacgaaagaggccataygcagtcagcccccctctctctgggttctacatatgtagatttaactaatgacagattaaaagcattcgaacaaacggagggtggtatctgtactgaaaat

SEQ ID NO: 166821 - DNA, 201 bp, Homo sapiens
gcctatcatataggaatgatagaggcagcacagtgctgtaatggaaaccataagggcacgcacaatggctcatgcctgtaatcccagcactttgggaggcmgaggcgggaggatcacataagaccaggagtttgagaccagcctggccaacatggtgaaaccccatctctactaaaactacaaaaatagccaggtgtcctg

SEQ ID NO: 166822 - DNA, 201 bp, Homo sapiens
cataagaccaggagtttgagaccagcctggccaacatggtgaaaccccatctctactaaaactacaaaaatagccaggtgtcctggtgcatgtctgtaatyccagctacctgggaggctgaagcatcagaatcgcttcagcttgggagctggagcttgcagccagccaagatcacaccactgctctctatcctgggagaca

SEQ ID NO: 166823 - DNA, 201 bp, Homo sapiens
agcccctgggcattatttccccaattccgtatcccatctactaatacaaactaatgagatctattaaggatgagtccacaagtttgaagggagtctcttaytaatgttccgtctttgcatggtgttacaacagcgggaccattttacactgagggtttgcgagaggcatggctcccctgttatgtatttgggacttactgc

SEQ ID NO: 166824 - DNA, 201 bp, Homo sapiens
ttttttcccttttctttttttttctccccatcttgaacatgttgctgtagacaggtgctaggtttccctgaatgactaaagcagagatttggttattttcytcccagaaaaagtagatgcatcagcagagttgagcccctgggcattatttccccaattccgtatcccatctactaatacaaactaatgagatctattaag

SEQ ID NO: 166825 - DNA, 201 bp, Homo sapiens
actaggggaaacaaaccctgttttgtagtatttgctgattactgtggtgtaaatactcacaccttggctgatttcaagttgcagcttggaacttggagttrgaaagagatgtgtagtcccataccattttatgtatgtaaagtatttgcactatgccgactaatagacataaataacctcatgagcatagataatagtcac

SEQ ID NO: 166826 - DNA, 201 bp, Homo sapiens
cctctttaaggataagactttctgatttttcaactggatttaccattgtggcatctgcacatgagcagactgactgctttttggccctacctggagcctgrgtcctcaggtagctgacccgagagaccgtggagctgcttgtgatatacaatgtcagtgctctgagctcattaggcgtcatctgagacagtggctgtaggg

SEQ ID NO: 166827 - DNA, 201 bp, Homo sapiens
aatgtctccagacatttgcttctgtcccctggggatcaaaatcacccctggttgagaacttggggtaatttaagtggtgctccggtaaaggccattcaacwtgactcactgtgttgatgttatgttttctaacattgactttcctttaaaccatagggttcgaaaccgccaagtcttttgccctccatggtgcacatgtga

SEQ ID NO: 166828 - DNA, 201 bp, Homo sapiens
gatgggtctttgtttagaggaagctctttatcctggtacgctggaagttggcatagtcttagcagttagtccagatgtgaatttcaggattattctgtgartcttccaagtcctgtctcagcagtgaaataggctcagtgtagcttatgtctaggtggctgagttcattttctagtctaggtaaagggcacctcctgtaat

SEQ ID NO: 166829 - DNA, 201 bp, Homo sapiens
ctgtagcaaagatgtactgtttcccactgagaagaatcaaaaatagaaaagtgcttccttgtctctctatattgttattaaaacaagtagatgcattttcrttgaatcaaggcagttttcctttataaaatgtcctatttcatatcactgttcaaacttgacatccacatttgagttggtttaaaatatcactgttttgtt

SEQ ID NO: 166830 - DNA, 201 bp, Homo sapiens
agttccagctcatccaccctgcctctgtggctgagtcggggagaaaaggacaaagtttttctcccgcaactgggccaccaaaccagcagagcctccagccrgggtggtctcgaggaggcccattaccggctggagtgacagagtgtgtcaagcctgcagctcgtcccgtgtctaatggaacagaaacaagcaccctgctgc

SEQ ID NO: 166831 - DNA, 201 bp, Homo sapiens
tgtaatcatagcagaaactcacatgtgtgtgctttctatgtgccaggcatgaggctgaagtcatacattcattatttgttaatcccaccctaagtgatagktgtattcatcattctcagtatcagaagaagaaactgaggttcagaatgacccagtaaagatcacaagcccaaccctggtgaagggcgtgattggcagaag

SEQ ID NO: 166832 - DNA, 201 bp, Homo sapiens
caagttcaaaatcagtctcacctggtcaagatgtcagtagggcttgttccttctggaggctctaggggagaatctgtttccttgcgtttttcatcttctasaggcctcctgcattccttggctcttggccccttcctctggcttcaaaccagcagtttaatatcatcacatctcctttactgattcctcttccgttgtccc

SEQ ID NO: 166833 - DNA, 201 bp, Homo sapiens
gatagctgatttgttataaacaaattaccaaaaacgtactggctttaaacaacacatgcttatcatgttgcagttctggggagtcacaagttcaaaatcastctcacctggtcaagatgtcagtagggcttgttccttctggaggctctaggggagaatctgtttccttgcgtttttcatcttctagaggcctcctgcatt

SEQ ID NO: 166834 - DNA, 201 bp, Homo sapiens
tgcctctaagtttgaagtctaactccatcactgtgtttctttcctcttgctgatagctgatttgttataaacaaattaccaaaaacgtactggctttaaasaacacatgcttatcatgttgcagttctggggagtcacaagttcaaaatcagtctcacctggtcaagatgtcagtagggcttgttccttctggaggctcta

SEQ ID NO: 166835 - DNA, 201 bp, Homo sapiens
tttattgtgtgaaatgagcctggtcatatgactgccctgcctccctggaggcctccctgccctcctccttcccacagacacttatgggaggtactggccarctctgtatggccagtactgccctaagcaagaccaagaagcttagtctcaatttcagagagttattttggcaacatatttgggaaaatgatagttagatgc

SEQ ID NO: 166836 - DNA, 201 bp, Homo sapiens
tctccctcacaaggatcaggtggcaggatctaatgggaggggtagagagtgagtgttaacacacagagaacccaggagacctttctcagaggtctcatatsaagaaaagatcatttctcctaagcaatcaatttctttttaaatctgaacctcatatctgagaatattcccttcttttatctggccactcgggagctcaaa

SEQ ID NO: 166837 - DNA, 201 bp, Homo sapiens
tccctccctttattttttctagcctttatagaaatgacaaagggtcaggtggtcttaaattccaaatctgggcacatgaatggtctgacctcggaaacttmctatatgctcgaaacgatttaactagcagcaataaaatctctactctttttatgacaaataatctagcatgtctggggagcatatttgattcttcatatt

SEQ ID NO: 166838 - DNA, 201 bp, Homo sapiens
atttgtgtcctggttggcagatattaagtccacagataccaataattaatatctatggttgattgtaaaaatggccaccaattcttccctgtcccctgcayatgtacatccttgcactgtgaaattgtagatctcgccctccaaaggtgaagttcgtttgtccactccttgaaccaggatggcatgaaacttgatttgacc

SEQ ID NO: 166839 - DNA, 201 bp, Homo sapiens
actgtggaagggtcaagtgcagggtcaccaacccgttccatcttcctgtcagttggcgtccacccttggtttcaaagggaacaggcattactgacatgacsggacctttacagttcccagctgctcatttggagtactgcggacccaggacaactaaagccggggtcgcctgccctccaggggttcctgggttgaagtatc

SEQ ID NO: 166840 - DNA, 201 bp, Homo sapiens
tatccaggaggaatgattagtgatctgattcattaatatcccttgttattaagaactgtctgtatttgtgtcctggttggcagatattaagtccacagatwccaataattaatatctatggttgattgtaaaaatggccaccaattcttccctgtcccctgcatatgtacatccttgcactgtgaaattgtagatctcgcc

SEQ ID NO: 166841 - DNA, 201 bp, Homo sapiens
cttactctgtgctcttgccccaggcagagtggaagttgccttataaagctgcgacttggccacagtgttttccctttcagcagggaaaccggagttctccstgctgttgggaggttcaagagccactctgtgcagaaatgcccagaaagagttaagtgaggtaagttcgtcagacttctgcagacccatactgtggaaggg

SEQ ID NO: 166842 - DNA, 201 bp, Homo sapiens
gttcaggaacagaactgacaggtattgaagccaaaaattgaacaataacaacgtaggagggagaatccaaagatagtatgtgttcaggatacgggcactcrtgtgggtgaacacacacacacacacacacacacgcttttttttttttttctttttttttttctcctattgcaatagaacgtaaaggtagatttttagaac

SEQ ID NO: 166843 - DNA, 201 bp, Homo sapiens
gactctgcagatccctactcggagtttttcagccctgttttaagtgccgagctgggttttgcctcatgatccaattgttttattagcgaaatcatcatctrtttcattttgctttggtaatagtgcagtgtctgtctaacaataaattatagagtcaggcaaacaatggtttcgtattagggatataatgaaatatcttat

SEQ ID NO: 166844 - DNA, 201 bp, Homo sapiens
tcctttcttcttcagtgccacctgccttattttactcacccagaaggaagccgggtccctctttgcccctttgggtgtttgtgaaaagcaagttgtaaacwctgaattctataaactgttggagacagattctggagagacactcaggcttagctctagaaagaaacgggtaagacagaggaggttcagggcaactgtgtt

SEQ ID NO: 166845 - DNA, 201 bp, Homo sapiens
ggttggcgtttcagtgcctgacacagttgtattcctaagacatagttgggaccagacctcaagaaaatagccaacaaatactggctgaatgaacgaaagasgccatatgcagtcagcccccctctctctgggttctacatatgtagatttaactaatgacagattaaaagcattcgaacaaacggagggtggtatctgtac

SEQ ID NO: 166846 - DNA, 201 bp, Homo sapiens
aagattcctttcttcttcagtgccacctgccttattttactcacccagaaggaagccgggtccctctttgcccctttgggtgtttgtgaaaagcaagttgyaaacactgaattctataaactgttggagacagattctggagagacactcaggcttagctctagaaagaaacgggtaagacagaggaggttcagggcaact

SEQ ID NO: 166847 - DNA, 201 bp, Homo sapiens
acagggacaagaaataaataactttgatgcaaatcctgggaagactctggaacaacatggaggcacctatgttaactctatttcattttggaaaagttgastagacaaaaggtgcagagtagagtatgcagtgatttcagggtgttgggctctgacaagatgatgccgacttagacagtgttagtcaacatcaaatgtctg

SEQ ID NO: 166848 - DNA, 201 bp, Homo sapiens
tgattacaggcgtgagccaccacgcccggcctctttgcacattatttaagggtgttttaacaaaatggcaatttccccaggctggcttgtgtattaccttygcattgcatcccttggctcccatgagtgagcgtggtgacttggtgcgtaggtggtacgtgaagacagttgctcactacccaagaactcagggccctaaac

SEQ ID NO: 166849 - DNA, 201 bp, Homo sapiens
ttgaaggaaagttttggctacccagttgttagctgctgaagtttaactgtgcattctaagcacaccagtattttattacatcatacctgggcagcagatarttttagtaaaaccttgaaaagatatgactattgggaagaaatttgggattctatcctttttctctccattcttctctcctgcaccaagtttctaagctcg

SEQ ID NO: 166850 - DNA, 201 bp, Homo sapiens
ccagaggtctgttttcatcacatcgtatcaagcattccaccttcatcatgactcttcactgttgatggtgactctgattcacctggtcaaggtagtgttcrttaggtttctccactgcacacttagtctttccctctactttccacactgctgcctttggaggagtgttgctgtgcccagctcacgcttgtggagtgggga

SEQ ID NO: 166851 - DNA, 201 bp, Homo sapiens
tacctttgtctcagtcaatatttacctctgaggtcaatacgtgtggatattcacctcagctgcagtcaatatccatttcgtattacaatatatgatgtgcrtatgtgaaaataaagaacagcatggtacaaaaaaggtctgctaggcaaagaagctttttgcaaagcggatgtgtttttgttttattttttgtttgtttgt

SEQ ID NO: 166852 - DNA, 201 bp, Homo sapiens
ccactgaccactctctgtacagatgcgctcaagcgaccataaccaccagtgttcctaacaatgcgcctattgacttcttatttcaatagatatccagattkattatccctcaaggtaagcatcgattttacctttgtctcagtcaatatttacctctgaggtcaatacgtgtggatattcacctcagctgcagtcaatatc

SEQ ID NO: 166853 - DNA, 201 bp, Homo sapiens
cctgattgagtaactgctctctgaaggtggaggctggactgcttcactggacagggtggcctggggttattctagtgcagtggtagctggtgacaaaactsaaagaagatgtaactagagaaaaggtactcagtgcagcctctgtgagctaccaccactgcctctagttttccagaaaaccaccactgaccactctctgta

SEQ ID NO: 166854 - DNA, 201 bp, Homo sapiens
ggcttcatatattattgagagcaaacctactttccaccgccactcctggatgcacttattttgcgagccttattcagaatgtcagcatggatcacttggcracaaaggcctaaagggcaagccaggaagcttccatggatacgttatttatggtgtttaattattattgtacagatttattaaatgactctgttacctagg

SEQ ID NO: 166855 - DNA, 201 bp, Homo sapiens
tgaaactacatgttcattgaaaatgatcttttgggtggttgatgttcgattttggctctgtgttgggcctgcccagtgaggtccttttgactccctaaggraccctgttttgggtttcttttgaggttgaagatatttcagactctttccccctcaacttccataggaaccaaactctctttcttcctcccgtttggttgg

SEQ ID NO: 166856 - DNA, 201 bp, Homo sapiens
tctcagttaatgcccacaaatttctgaactttgaacataaataccctcactgcaatacatgtttttctttctctctctttctttctttctctttttttttyttttttgaaaaacttttttggagcagcacctgcatgttgtaaaaacacaaaataaaaaaaaaataaataaaagcagaccccttggttcagatatctttgt

SEQ ID NO: 166857 - DNA, 201 bp, Homo sapiens
ataaagtttatttttacagtaattttaagttcacagcaaaactgagtgggaagtgtagagtttcatatactccctgtcctcacacatgcacagcctcctcyagctatgcacattttcaatgaaactacatgttcattgaaaatgatcttttgggtggttgatgttcgattttggctctgtgttgggcctgcccagtgaggt

SEQ ID NO: 166858 - DNA, 201 bp, Homo sapiens
catgtacaacagcgcctgtgctgggcctgctaggagtcgatattttctggctcaaagaagttccaaaagaattcaaagccagtgtgtctctttctctggamggccaagtgatgcaggtaccacgcttaggtctgctggtgtttagcttgacttaaaacccagccagggaaatatgtttcactttgctggggtgcaggtgga

SEQ ID NO: 166859 - DNA, 201 bp, Homo sapiens
ttatttgtcttttggcttgtatcccacctgttcactttttaccatagctaacctttctaagtggtcaggtgggactcatggagattttccgttctttggaractagcagcgactgcagattactcatcagctgtctccttgagtccacaatgccgggcggtggacgggcttcctgcctcctggcccagggcccctttgccg

SEQ ID NO: 166860 - DNA, 201 bp, Homo sapiens
ttatctttgggactgctataatgagatccacttagatctagctataatggaattttgtttagtggttctctgatttaaacatgacttttatccttttcagmtatcgtttcattaacatcactacctctttttaaatcctaatgttgtcatggaagcctgtgtaggggctgaccttgaagtctctgaaagctgaacactcag

SEQ ID NO: 166861 - DNA, 201 bp, Homo sapiens
ggcagcaccactgccatggaaattctccagggccgggatttcactggcaaagtggttgtggtcactggagctaattcaggaataggtaggctcttcacttmgttatttatctttgggactgctataatgagatccacttagatctagctataatggaattttgtttagtggttctctgatttaaacatgacttttatcctt

SEQ ID NO: 166862 - DNA, 201 bp, Homo sapiens
tcagtgggccccagttctttcaggtttaaggaataagcattttggtctatgaaaaatggggtttgcctaaagtataagattgtcttatatttataaatgcytgtgttcattgctgtgggttcactgctttctcttttgggcagccatataaataaaagaaccacctacttggacccaagactggcgtttactgtggatgat

SEQ ID NO: 166863 - DNA, 201 bp, Homo sapiens
gcattaatatcacctgggaattcaataaaaatgtacattcccaggcccccaccccagacctactgaatcagcactggggtggggcttgcaatctgcgctckaatagtcatccaggggatcctgatgttccctagcttgagagcctcccgtctagagcaggggctgtctcctttgcctgtaaagggctagataatatgtttt

SEQ ID NO: 166864 - DNA, 201 bp, Homo sapiens
aaaaaatatgagaaggttcctgcccttaagaggtttaggatccagctgaagaatcaacatgtgcacatgaaaaaaaatggccgtgccctctaatgtcatakgaggtcagcgtatgaatgacgttgggtgcctgccctgcatatacatatgttctttgagctcattcaagggagaattcccatggattggcacaaccagtat

SEQ ID NO: 166865 - DNA, 201 bp, Homo sapiens
gcccctgagaccagtgctaggattatttccattttgcagatgaggggatggagattaaggagtggggtcacttgaccaaaggtgcacagcgcacagctagrtgccctatgggaaggtcttactgcatctcttaactacctcttgggaccagttaggaaccagtgcttaatgaaacactttgaagttacatctgtggaaaga

SEQ ID NO: 166866 - DNA, 201 bp, Homo sapiens
tagaatcttgagttgatacctccttgggtggcatggagcctatacctttgtagatcttgggaaacaacttctaaagtaatcatagttgtatgtaatcgtarttacaacaatagttattttaggcacataacccaaaggttttcttacaaggaatctatgaaccttaagagtgagggcttctgttaagagtaagggcttccc

SEQ ID NO: 166867 - DNA, 201 bp, Homo sapiens
tattgacctatgtttttaattataactttgggtggtggtctgaaatgaaatgttaagtttgacgcaaaaataggactagtttgtgtaactgatttgttcaraataacagcttacatttctcagagctttttgtatgccaagtgctatgcgaaaccctggatgtacaatattcttatagtagcccctgagaccagtgctagg

SEQ ID NO: 166868 - DNA, 201 bp, Homo sapiens
ttatttcttttcaatactctgaatatcactggagcagctgcagattcagggcagtatggggtggttcaggaacagaactgacaggtattgaagccaaaaaytgaacaataacaacgtaggagggagaatccaaagatagtatgtgttcaggatacgggcactcgtgtgggtgaacacacacacacacacacacacacgctt

SEQ ID NO: 166869 - DNA, 201 bp, Homo sapiens
gggaagtggaggttgcagtgagccgagatcttgccattgttctccagcctgggcgacaagagtgaaactccatctcaaaaaaaaaaaaaaaaaaaaaaaarattatgtcatttcgttgtcacagcgtcagcagaataaatcttagatcaagatgggattactgcgccactcccttcttcccagtctgtggtttagcacggg

SEQ ID NO: 166870 - DNA, 201 bp, Homo sapiens
ttgacaatactttcctttcagtctattttcctgtgtatggggtaagtgttgcccttctgcaactttccttttattttatttatttatttcttttcaatackctgaatatcactggagcagctgcagattcagggcagtatggggtggttcaggaacagaactgacaggtattgaagccaaaaattgaacaataacaacgta

SEQ ID NO: 166871 - DNA, 201 bp, Homo sapiens
ttggagaggcctgtttccatacatagctctttgtcagttgctcacactcggtcaatacttgccttcctttgaggccatctgcactcactgacaatctgatygctcccctgaatggaggtgaaagcatgcaagctaggagttaagatctttaactcagggaagaccctgtctatggaagtgctgagctcttcagtgtcatca

SEQ ID NO: 166872 - DNA, 201 bp, Homo sapiens
tctctggaaatctctagcttctcaaactgtttcgtggtggagtgccttttgggcacaggagaaggaaataagagcctcgcgaggtttgggaatgctgcctstagctctcacactgcatgcagaattcctactctgagagctcactttatctcaaaaacccatgcatattctgcatctactctgaattccgcagtgttgtgt

SEQ ID NO: 166873 - DNA, 201 bp, Homo sapiens
tctgactttccttgactttgatgtctaggtctggatttcaagggctcagaaactctctcatgcatgtagttccctcctgctttgaatctctctgactttcmttgattttgatgtctaggtctggatttcaagggctcacgtgatgaggatagtttctttatcttaagggcaactgatgtggagtcttaattaacactggca

SEQ ID NO: 166874 - DNA, 201 bp, Homo sapiens
ccaagctcattcaggatgctggcaggattcagatccttgaagttgtaagactagggcccctgtttcctactgacttctgctggtggctgccctcagctccsagaggcaacccacattccttgacttttggccccctgcatctcaaagccagcaacagaaactctcttgtgcatggagtcccctcctgctttgaatctctct

SEQ ID NO: 166875 - DNA, 201 bp, Homo sapiens
tcccttgaacctgggaggtggaggttgcagtgagctgagatcacgccattatactccagtctaggcaacaagagtgaaactctgtctcaaaaaaattaatrataataatgttacaataataataatgttagtgatacatatcattttgaaaccagttcttaagcaattaaaaaaaagcagctatggtgattgagtttttgt

SEQ ID NO: 166876 - DNA, 201 bp, Homo sapiens
tgataaaacctgtatcacaaaccagctttgctagaattttttttacagcatgattcttaacctggagttaataatctcaaaaaatttagctctccttttgyatttatttatatatattaatttttatatcaatacatgtatatacatatgcatatttattagccatgaaaataaatatttattcataatagtaaaaaatca

SEQ ID NO: 166877 - DNA, 201 bp, Homo sapiens
ggactagaattagttcagtgttgcatcgtatcagtgcagatatatttactgaatacatctagtgtctcatgcactgggccaggtataagatcacagtgatmaataaggccccacatgtgacctaagcatctcttttccctctcccctttcgtcagaacagagtagaggaaataacaccagtgcttaggaaacactagttct

SEQ ID NO: 166878 - DNA, 201 bp, Homo sapiens
cactacccagggccaaagactcggcagcctcagaagactcaatggaagctgagcacaggactagaaagggtcagggccctcctctgtatgtaggggtggcmcatggccactagctgggtgatggggcactgagaaattaaatgtttgacataaaaatgtaatcaggacccgagaggaggtgggtggtgtaatgaacagcat

SEQ ID NO: 166879 - DNA, 201 bp, Homo sapiens
taaaaaataaaaatactttgtagattaaaaataaatcagaatttcaaatttaaaattgtccacacactaggaaatagaactgtgttaatatataagaaatytggggataattaagaatgaaggacttttctatcatttccattttataaattgccacctgtgaaaatggtttttgcacattatttgtatttttctttgtat

SEQ ID NO: 166880 - DNA, 201 bp, Homo sapiens
  misc_feature (1)...(201): n = A,T,C or G
taggctaagtaatctacctctagtaaggactagatttgccattctgggcaaaccactagcttgtactgaatggctcttcccaccaacactgacacattgcngtacaagattgactttcttgacccattggcagcctctgcagctatttggccccaaataactttgtcattatgcactgccccattggaaacatcactcttt

SEQ ID NO: 166881 - DNA, 201 bp, Homo sapiens
ttgctgggtctgctggggcctccgcagggacagccagggtcaaacgagtcaggaaacaggcccctgcttgtgggccgcctgcccgccctcatcccaaccargccgcctgcagcgccctcggcgggagacgccggggaggggagagaagggaggagacgggaggggcggccccgtcttgggcactcgcagggactggcggga

SEQ ID NO: 166882 - DNA, 201 bp, Homo sapiens
tggtgactgggagcctacaggccagctgtgactttatggctttgcttatttgccaagccaaacagttagtgttgggcgtaaatattctatcagagtgtgcrtggaataagtcctgagctagggacctccagcaggcaggagagactcagtagtcttggcccagcagcatctgtcccccgcctgccccctccaccgtaggta

SEQ ID NO: 166883 - DNA, 201 bp, Homo sapiens
aacaatggtaagctatgttccagttttcaattaagcctgctgaatatacctgccttgaaagagtgggatttagagtgaccttacagttcagacagaaacarctttgctgctgggcgtgactctcaaccctgcatttagccctcattatccaagacaaatgtcaagctgcctctgctggagggtggagctagacagccacac

SEQ ID NO: 166884 - DNA, 201 bp, Homo sapiens
ggcagtagctgcagtaagacatggagtcaaagaaaggggcttttgttgttttttaaggtaagtgagattcaagcatgtttaaatgttgataagcagaatcytgttcagatgagaggttgacaatgcctgagaaaacagggacaacaaacataaaagtgtttttgacaaaccaggagggcttgccagggcccctcagcaggg

SEQ ID NO: 166885 - DNA, 201 bp, Homo sapiens
gtgctgtttcggtgaagtgaggcaggtagaggccaggctgtcatggacaggaggcatgtgaggtgtgaggaaagagacagtgctctggagatgtttgaccrtggttgagaggagggtggggcagtagctgcagtaagacatggagtcaaagaaaggggcttttgttgttttttaaggtaagtgagattcaagcatgtttaa

SEQ ID NO: 166886 - DNA, 201 bp, Homo sapiens
tcatcatcttagtgtcccatattcaataggaaagttcaaaattttggcagaaaggagagcagtcagccaacacagaggaggccacacagtgtgccttggcyatgtcccaagccttcgttccatcttgcagtcacattctctgtctgtcatcagccagcacctctgcagcccttactttctggcttcctttggccaccagag

SEQ ID NO: 166887 - DNA, 201 bp, Homo sapiens
agtgctgtttcggtgaagtgaggcaggtagaggccaggctgtcatggacaggaggcatgtgaggtgtgaggaaagagacagtgctctggagatgtttgacygtggttgagaggagggtggggcagtagctgcagtaagacatggagtcaaagaaaggggcttttgttgttttttaaggtaagtgagattcaagcatgttta

SEQ ID NO: 166888 - DNA, 201 bp, Homo sapiens
atcactgtcatcatcttagtgtcccatattcaataggaaagttcaaaattttggcagaaaggagagcagtcagccaacacagaggaggccacacagtgtgycttggccatgtcccaagccttcgttccatcttgcagtcacattctctgtctgtcatcagccagcacctctgcagcccttactttctggcttcctttggcc

SEQ ID NO: 166889 - DNA, 201 bp, Homo sapiens
tccccagtcctgacaggtcaaccaggccagtcttggcaccacagaattaagagtacaggggacctctgacctctacgtcacacccagcctggccaggccayttacagggccattcaaagccaggactgcctcaccctcttagacactggaccaggacataaagttctctttgtgggcagaatgagcttgggcactccaagg

SEQ ID NO: 166890 - DNA, 201 bp, Homo sapiens
gttatattcttatgactccattctttgctaatcctaaaggcacccagaaggctgtatttaccttttcagattaaaatctcctatttaacttatgaccactmtgtgcatatctgaggctataaatattatttctgacacccttctcaaatactttctgctgaaaattactgtgaatttggcttgtttccttatgacagtttt

SEQ ID NO: 166891 - DNA, 201 bp, Homo sapiens
gagctcatagcccagccttggggtaagagaggacttcctgagtaaatgacatttaggccgagtattaaaggataagatcactgggcaaaggtgaaatcacraggagcaaggaaaagaagttaagtcaggtttgtgacatgtattttagaaagatctccctggtgaggatggcgaagggggactgggagggaggcaggccag

SEQ ID NO: 166892 - DNA, 201 bp, Homo sapiens
ggcttacctggtggtgtgagccaaaccttcattctaggggtgagaggagggggagggaaggggataaatgctaaataatcaaacccttctcagggttgctrcatatcctttcacaattacagtggggctacctggaggtgcacagtggatcacatgggctccacacacattcctcctgccctcattatccagaagcagcct

SEQ ID NO: 166893 - DNA, 201 bp, Homo sapiens
gtgctattgttcttaaaaatacactggccttgatggttgctttttggacccactagcagtgttacaactaggaaatttcatgttttggggtgtggactggyattttagacctttggaccctgattctgtctaccagtgcatttgctgttttcaagccttttgtcatccatacatttgatcattgttctcatgtgattcttc

SEQ ID NO: 166894 - DNA, 201 bp, Homo sapiens
tggttatgaagaaaccagatttgctccccatcatcagtgggggaccaggcttcactactggaaaagagtctcaataaaagtgattttccagcctggcgcgrtggctcatgcctgtaatcccagcagtttgggaggctgaggcgggcagatcacaaggtcaggagatcgagaccatcctggttaacacagtaaaaccccatc

SEQ ID NO: 166895 - DNA, 201 bp, Homo sapiens
gcaacctctggaagctagtaaaaggaagaaaatggattctccctcagagctccagaaatgaacatagccctgccaacaccttgattttagcccagtaacaycattctggacttctggcctccagaatagtaagaataaatctgtattgttttaagctgctaaatttgtagtaatttgttacaatagcaataggaaactaat

SEQ ID NO: 166896 - DNA, 201 bp, Homo sapiens
aagaaaccagatttgctccccatcatcagtgggggaccaggcttcactactggaaaagagtctcaataaaagtgattttccagcctggcgcgatggctcaygcctgtaatcccagcagtttgggaggctgaggcgggcagatcacaaggtcaggagatcgagaccatcctggttaacacagtaaaaccccatctctactaa

SEQ ID NO: 166897 - DNA, 201 bp, Homo sapiens
taaatttgtagtaatttgttacaatagcaataggaaactaatagggctatataatgaaccacagtgatttgtgcaattgcatcgtattcgtacaacagctrtatactgggggcaggagctcagaacaagcaaattggatgggggatggcctagggagaataagatgaggcagaggggcataggtgcaatgtgatatgcaga

SEQ ID NO: 166898 - DNA, 201 bp, Homo sapiens
agtctcaataaaagtgattttccagcctggcgcgatggctcatgcctgtaatcccagcagtttgggaggctgaggcgggcagatcacaaggtcaggagatygagaccatcctggttaacacagtaaaaccccatctctactaagaaatacaaaaaaaaaaaaaaaattagccgggcgtggtggcgggcgcctgtagtccca

SEQ ID NO: 166899 - DNA, 201 bp, Homo sapiens
tattggcacagctgctggcattcacccatgcaaacttctagcttccttgtttatgtctgcagctcaattttacaggctgctctttgttagaaaagaaaatyatttgggagctacttttcataaaaggaaaaccttaccaaggacttccttaccctatctgcctaatttcttaactcctcctatatcaactttattcaggat

SEQ ID NO: 166900 - DNA, 201 bp, Homo sapiens
cttaaaaatacactggccttgatggttgctttttggacccactagcagtgttacaactaggaaatttcatgttttggggtgtggactggtattttagaccyttggaccctgattctgtctaccagtgcatttgctgttttcaagccttttgtcatccatacatttgatcattgttctcatgtgattcttcgtttaaaaaaa

SEQ ID NO: 166901 - DNA, 201 bp, Homo sapiens
ccaaagctatgaattaagcagtgaataaagcagtgttgacgaagagatagggtttacagcagcaccatcaaacatatataatgcaagccccatagatatcytcaagttaaaaaaagacattaattttaatatatttgtttttaccatatgtttactccaatatatcaaaaatattttaatgagtaaacaataccaaaaaaa

SEQ ID NO: 166902 - DNA, 201 bp, Homo sapiens
aaatatattttgtactctaccacaactagccttatttccactgctaccacactaaacaatgcatatttacagcaaatagcctgctcacagcagagcctgcsggggtagggaagagctgggtggcaagagacctggcttctagtgctggctctcttctaatgtaatctatgaccttgaatcagtcccttaactttgctgggc

SEQ ID NO: 166903 - DNA, 201 bp, Homo sapiens
taacccatgtggagattaatatcatttgaaatccctgtctgcttcacatgtgctattgttcttaaaaatacactggccttgatggttgctttttggacccmctagcagtgttacaactaggaaatttcatgttttggggtgtggactggtattttagacctttggaccctgattctgtctaccagtgcatttgctgttttc

SEQ ID NO: 166904 - DNA, 201 bp, Homo sapiens
ttgtactctaccacaactagccttatttccactgctaccacactaaacaatgcatatttacagcaaatagcctgctcacagcagagcctgccggggtaggraagagctgggtggcaagagacctggcttctagtgctggctctcttctaatgtaatctatgaccttgaatcagtcccttaactttgctgggctttgactta

SEQ ID NO: 166905 - DNA, 201 bp, Homo sapiens
gttcaagcgattctcctgcctcagcctcctaagtaagtgggattacaggcatgcaccaccacacctggctaattttgtatttttagtagagacggggtttyaccatgttggtcaggctggtctcaaactcctgacctcaggtgatcagcctgcctcggcctcccaaagtgctgggattacaggcatgagccaacgtgcctg

SEQ ID NO: 166906 - DNA, 201 bp, Homo sapiens
cagggccacctcaccagagggaggtcgcacccatatcccatccatcagcaaatcctgattaccttcaaaatacgtcctaaactggaccacttatcactgcyctcaccactgccaccctggtccaagccaccaacatctctcacctggatttctgcagttgcctcctaagtggtctccctgtctgtctccctttcccacctt

SEQ ID NO: 166907 - DNA, 201 bp, Homo sapiens
actaaacaatgcatatttacagcaaatagcctgctcacagcagagcctgccggggtagggaagagctgggtggcaagagacctggcttctagtgctggctytcttctaatgtaatctatgaccttgaatcagtcccttaactttgctgggctttgacttataaaaatgcaggacgcagatgatctgttactttgtgattcc

SEQ ID NO: 166908 - DNA, 201 bp, Homo sapiens
tttacaaaattcacttttttcccttttgaaaaccatacacatcttggtcctttggatactttcttttcctgcctttagttaactctgaatatccccagttsaaatggttgtagtccactcaccatccttatcactctgaacactccacagaattgaacccagcactctaggtgttctcacagcctaaaactgcattagcta

SEQ ID NO: 166909 - DNA, 201 bp, Homo sapiens
tgcagcctccaactcctgggcttgagcaatcctcctgcctcaagctcccaaggagctaagactacaggtgtgtgccaccactcccagctaaatttttaaartattttttgggacagagtcttactatgttgcccaggctggtcttgaactcctggcctgaagcagtcctcccacctgggcttcccaaagtgctgggattac

SEQ ID NO: 166910 - DNA, 201 bp, Homo sapiens
ctggtgagggtctgcttcctggctcacagagaactagctatcaacaatccatgttcacattctgtccagccacctgtgcctatctatctaatctgatgtartctagtctatcatcagcctaaatagtcatcatcctaaacattcctttatttatgttacatacatctactcactatcctcacaactcatttataatacaaa

SEQ ID NO: 166911 - DNA, 201 bp, Homo sapiens
gatggttgggggatatcatcaaggcgttgttgttcatgaatcttcattttgagttgcttggataatgagaagctatgccctgtgctttcaagcccaatctrtgcttggaagggtagccctgtgctggttttccagacctgggctctttctggaagcataatgaggcaatcaagaagtaggtgtggtaaaaccagcattaca

SEQ ID NO: 166912 - DNA, 201 bp, Homo sapiens
catacatttattgatgcttcttctgtgctaatgcctgctcctggatactctggaccccaaataaaataacctactatccaagatatgatttctggtgtaaycagagctatgatagggtgagagcaagtaggagcctgcagaaagatgggaggagctcatagcccagccttggggtaagagaggacttcctgagtaaatgac

SEQ ID NO: 166913 - DNA, 201 bp, Homo sapiens
tgctaattatttattttctattcaagttgtaagaaaatttatgaatatctgttgtccttgtagtgagtccatcccctgtcctctttaaactgtctgggccratttcagtgattctgttttgcttcacccaaaccaggcttatatgcccatcaacccagaattgctctcacaattgtgtatactttttgctcctcatttaga

SEQ ID NO: 166914 - DNA, 201 bp, Homo sapiens
caaatctcagtctctcccctcacagctgtatgatggaacctattatgaatgagctggtcacccaaaaccagtgtgtccatcttcccatgcacttgtctgtscattttctttcattcaacatacatttattgatgcttcttctgtgctaatgcctgctcctggatactctggaccccaaataaaataacctactatccaaga

SEQ ID NO: 166915 - DNA, 201 bp, Homo sapiens
ggctggagtgcaatggcgcaatcttggctcactgcaacctccgcctccaaggttcaagcgattctcctgcctcagcctcccgagtagctgggattacaggygcccgccactacacccagctaatttttgtatttttagtagagatggggtttcaccatgttagtcaggctggtctcgaactcctgacctcaggtgatctgc

SEQ ID NO: 166916 - DNA, 201 bp, Homo sapiens
ttatccccatttctctagtgaatgattacctaaatggccataggtccctttgggggaaaaaaatgaaggaatcattgtgacatatacttgctgcaattctrcaaggtccttcctcttagagagctggccagctctttagtcaatggttctcaaacctaagctaattttcagatatggaaccattcctttctaagggaagca

SEQ ID NO: 166917 - DNA, 201 bp, Homo sapiens
aaggctctgtggtgaggaaaggcaaacccatgcccagaataagtctctatccctgtagagatgaaccattggcccttccagaattgaaagggcctgatgcrgttgacttgccccaagtgatgagttggtctcaaggaatagtgccatttcaggggctcagcattggcctctcttgctgacacactggacatctgaaggccc

SEQ ID NO: 166918 - DNA, 201 bp, Homo sapiens
ctatggccctgctcaggccatgagaccgttttcctgacagtgggcttccaatatggctccaactaaagaaaggggacacgaaggccaactttatggtatgsatgaatctcaggcatccccctggagcacaaggagctccctcaccttcagtgcattggtgcagtgcatgggaaaggttaaaggcaccattcattgctgacc

SEQ ID NO: 166919 - DNA, 201 bp, Homo sapiens
gagattagctaagagtctagtaccttttattaaaggtctgaataggaaatatttgctatctgttgcctctaagggcagccacctatgagacttcatctacstaagaacctaggtctctacaaccccttatcttaacccagactctcctttcaattaatttcagccttttagataataactctttcagccaattgccgatca

SEQ ID NO: 166920 - DNA, 201 bp, Homo sapiens
actccagcctcgtgacagaacaagactccgtctcaaaaaaatgtatatatatattttaaaaccaaatactctgttttctgcttctcataccccatttcctrtttctgatttaagaaacatttatcaagcacataatatgtggaagggtctgtgcttagtacagtacacaccttcgtatcctatttaatccactgtgaggga

SEQ ID NO: 166921 - DNA, 201 bp, Homo sapiens
gacagagcaagactccgtctcagtaaaaaaaaaaaaaaaaaaagtgattttccagcgttacaagaaagcaatcaagcaaatagagcaatttactccttccrgcagcttcccagctgttttagttgcccgagcagccttagtcaggtcttggctgtggcttctgtgggtgctttacttcctctggtcagaagtgtgggtagt

SEQ ID NO: 166922 - DNA, 201 bp, Homo sapiens
gtaagccctgaccatgcacatgttctcccaaatctcagtctctcccctcacagctgtatgatggaacctattatgaatgagctggtcacccaaaaccagtrtgtccatcttcccatgcacttgtctgtccattttctttcattcaacatacatttattgatgcttcttctgtgctaatgcctgctcctggatactctggac

SEQ ID NO: 166923 - DNA, 201 bp, Homo sapiens
cagaccatgatgggggtggaccgctgtgaaagagagagggaaggaaggaacaaatatattgaataaattataaacatctggtgcatactgggcactgaatkgctcccaaggaatctctggatgaatacagtacagctcagcccccaaagaactcacaacctaaagtagacccaggctatttgctgtaagcagaataatccc

SEQ ID NO: 166924 - DNA, 201 bp, Homo sapiens
ttttggtttggttacatgaatctgtaaatgatttggctcctttcccttgcttgtttctaaatatcttctgagagcaaaaataaatattctaaatggcaggkgcaggatggctatttaaaagccactaggacagttgtcactatctaaaacatgggtccaaactcttgacattctctgacaggatttataggattttctttg

SEQ ID NO: 166925 - DNA, 201 bp, Homo sapiens
catctaaatcagtgcatctcaaattgtaatgcatacatgaatcatcttgttaaaatgagattctgattcagtaggtttggggtggggcttgacattctgcrtttctaatgaggccagtgctgctggtccacggaccacagcattggtccttggtaacagaattgttcttggagtaacaggaatgtgtctcagtcctctgag

SEQ ID NO: 166926 - DNA, 201 bp, Homo sapiens
aaagatactcctaaagggtggggtgtgttaggaataacaaactatcacttagggaatttctagggttttagacactgtgcgccaggaacccagaacaaagracaaatatattttgtactctaccacaactagccttatttccactgctaccacactaaacaatgcatatttacagcaaatagcctgctcacagcagagcct

SEQ ID NO: 166927 - DNA, 201 bp, Homo sapiens
tttgagactatacacagtgcttcttttgtaactggattactttaactttcgtgaaggcattacattgcctcacattcactaaccaccttgaattaaatttmtttcttaagaaaaagcatccctcatttactgtgaactaaagttcattctgtagtgcacagcattcaggagggtaacactcaggattcatacatgggacta

SEQ ID NO: 166928 - DNA, 201 bp, Homo sapiens
aaattaactgatgcattcataagatttcaataatgaaatggttcccttttaaaaaataaaaatactttgtagattaaaaataaatcagaatttcaaatttmaaattgtccacacactaggaaatagaactgtgttaatatataagaaatctggggataattaagaatgaaggacttttctatcatttccattttataaatt

SEQ ID NO: 166929 - DNA, 201 bp, Homo sapiens
agaccctgtctcaaaaaaaatgaaataaaataatagtaaaatagaacacaagcatatatgttatgtaaaatgagtgaatgattttgggagcaccgataagygtatcactaagcttttagttggaaaacaattgaaacttattccactggttgctgatttttttaaatctaatttaaatttactatatttcatattcaactt

SEQ ID NO: 166930 - DNA, 201 bp, Homo sapiens
ctgagtgaaagaataagaccctgtctcaaaaaaaatgaaataaaataatagtaaaatagaacacaagcatatatgttatgtaaaatgagtgaatgattttrggagcaccgataagcgtatcactaagcttttagttggaaaacaattgaaacttattccactggttgctgatttttttaaatctaatttaaatttactata

SEQ ID NO: 166931 - DNA, 201 bp, Homo sapiens
agaaattaatataataaagtctttggtcctaggcaattttcattccagcaaaccagagtattcacagatggaaactaggttataccaatcttttttctttytcctgggaagcatccaaatacatttaacagcttcagaggtaagatgagcttctgtgccatgtgatatgagatatccatcctcactcttacaagtcatacg

SEQ ID NO: 166932 - DNA, 201 bp, Homo sapiens
tctctccctcgtccactatctattccgaattcccccgaccctcaacaacctcctcagatgttggtggcttacctggtggtgtgagccaaaccttcattctrggggtgagaggagggggagggaaggggataaatgctaaataatcaaacccttctcagggttgctgcatatcctttcacaattacagtggggctacctgga

SEQ ID NO: 166933 - DNA, 201 bp, Homo sapiens
tgtatgttggaagaactcaagaagtggtactctgctcctccgatctggaggattccatgggaagggagtcgttggtcttttcaaatctcagaactcccctsaggccggtaagcatctctctataacacaattaccacccgttcacataaggacagtgctaaaaataaaggaagtaaaatctgggaatggtgccttttcatc

SEQ ID NO: 166934 - DNA, 201 bp, Homo sapiens
tctttaattatttatattcaccattggaaatagaggtagagtaagaaatcatttatgtttcactttctgaaattttgtgttaaggttttccttagttttamcatatataagcagtttaagctttttataaacattggactaggtttcataccaaaaagctatttcaaagtttgagacactataggtttgggttgtgacaca

SEQ ID NO: 166935 - DNA, 201 bp, Homo sapiens
ttttatgttttttattttattttgttttttaaatttatttattatactttaagttctggaatacatgtgcagaacgtgcaggtttgttacataggtatacrtgtgccatggtggtgtgctgcagccatcaatccatcatctaggttttaaaccctgcatgcattaggtatttgtcctaatgctatccctccccttgtccgg

SEQ ID NO: 166936 - DNA, 201 bp, Homo sapiens
tgttattaactatttaaactcatttgacatttgaacaaattgttctcatgccaaaaataatttggttttggtttttaagcctttcaccatctcaggcagtstaatattggcatgctgtattctctaatgtcatctcagtgatctatgaattgtttacaatttgacttgtcattctcataaagttgacattaatctggtaat

SEQ ID NO: 166937 - DNA, 201 bp, Homo sapiens
aagatataggattagtggttaggaggttataaatataaaatctgttttgtgtaatatttctaattaaactaaaaaaaagaaatgactctgaaacctgcctrtcttcttgcatttattaatctgtgtgtactcttacatgttattttcccagcatcatatcctgtaactttataagctaatcttttaaaataagtatcaaca

SEQ ID NO: 166938 - DNA, 201 bp, Homo sapiens
tgggcgacagagcgagactgcatctcaaaaaaaaaaaaaaaaatcaccaaaaaaaagatataggattagtggttaggaggttataaatataaaatctgttytgtgtaatatttctaattaaactaaaaaaaagaaatgactctgaaacctgcctgtcttcttgcatttattaatctgtgtgtactcttacatgttattttc

SEQ ID NO: 166939 - DNA, 201 bp, Homo sapiens
cggtgaaaccccgtctctattgaaaatacaaaaaattagccagggatggtggcaggcgcttgtagtcgtagctactcgggaggctgaggcaggagaatggmgtgaacccgggaggcggagcttgcaatgggccgagatcgtgccactgcactccagcctgggcgacagagcgagactgcatctcaaaaaaaaaaaaaaaaa

SEQ ID NO: 166940 - DNA, 201 bp, Homo sapiens
gccctgcaaagctgtatcttgtgcggggggaggggatttacattctgtagaggatccctttcccttccccggtgtttttctgatcctgaagagattagctmagagtctagtaccttttattaaaggtctgaataggaaatatttgctatctgttgcctctaagggcagccacctatgagacttcatctacataagaaccta

SEQ ID NO: 166941 - DNA, 201 bp, Homo sapiens
gcctgctcacagcagagcctgccggggtagggaagagctgggtggcaagagacctggcttctagtgctggctctcttctaatgtaatctatgaccttgaaycagtcccttaactttgctgggctttgacttataaaaatgcaggacgcagatgatctgttactttgtgattccaaatatttaccttggcaaggactcagtt

SEQ ID NO: 166942 - DNA, 201 bp, Homo sapiens
ggactgtacgttctcctggaatgataaaaggttttttatcttttttggtttaaagacaagtgtctttctggattgagtactctggtttctccagaatccaygttctttctgcaagacatgacttctctggtaaattcacttttgtttctttcttcgttgtgatggttaatactgagtgtcaacttgattggattgaaggat

SEQ ID NO: 166943 - DNA, 201 bp, Homo sapiens
tgccacctgtgaaaatggtttttgcacattatttgtatttttctttgtatatgaaataattttttgtactttgtaaaatatggagcccattgtaccttcarctatttgagactatacacagtgcttcttttgtaactggattactttaactttcgtgaaggcattacattgcctcacattcactaaccaccttgaattaaa

SEQ ID NO: 166944 - DNA, 201 bp, Homo sapiens
aagggcagttatgaatagcaaaagatactcctaaagggtggggtgtgttaggaataacaaactatcacttagggaatttctagggttttagacactgtgcrccaggaacccagaacaaagaacaaatatattttgtactctaccacaactagccttatttccactgctaccacactaaacaatgcatatttacagcaaata

SEQ ID NO: 166945 - DNA, 201 bp, Homo sapiens
ttttttgttagaaaaataatagtttattgattttttctaataatgaaagtaataatgttcatttttttgaaagaacacacagaaagttataaaagatgagratcacccataatttataacctagaagtaaaccactatgctatcaaacttgttttacccttataaattcacatataaaagagattttctagacatactatt

SEQ ID NO: 166946 - DNA, 201 bp, Homo sapiens
caaagacgacactaagaaaatgcaaaataaggcgctcccagtgtgtctccctttcctgccagtacccttctatcaacatcccctatgactctagagaccasaaaagtaaaggcaataacagtatggtagttgaggaagaaaaattcatacagacgttctggggcagtatggaaaagaaaggtcacaggaactgatttacca

SEQ ID NO: 166947 - DNA, 201 bp, Homo sapiens
agagcactggtgagaccattttccaccctgtttatacttccagacctttgttggctcatggaattgttattcttcacatcacaatcagaaaccttaatttyttaagcatctgcatactgcttattgggaaggtagtaagtataactggttacaactgccccaggcctggtctttttttttttttttttttttttttttttt

SEQ ID NO: 166948 - DNA, 201 bp, Homo sapiens
agccataaaaaatattccacttttttatctgctgcatgcatcatacgttttttggcaaagtgtgaatttatttaattttgttttgttggatttttttaatytacaggaactttatttgatgataaaggagaaaagcatgccaaaaaaggagtctgtatttgggaatgtattgacagaatgcacaagaggagtcccattttc

SEQ ID NO: 166949 - DNA, 201 bp, Homo sapiens
taggtaggccatggggcactttataggccacataatagaaggagacttatgtagtccctggagtcaagcagggctttataaagaggataggtcatcctctrtggccctgctcaggccatgagaccgttttcctgacagtgggcttccaatatggctccaactaaagaaaggggacacgaaggccaactttatggtatgcat

SEQ ID NO: 166950 - DNA, 201 bp, Homo sapiens
tgcccgagcagccttagtcaggtcttggctgtggcttctgtgggtgctttacttcctctggtcagaagtgtgggtagtcagtggcctgatgggagtgctgycaaccatcttctgcaaggaatgttccggaaccaacccctcctggcagtagccagcctgaggaatagctttgagccctgatatgggccagacagttcctaa

SEQ ID NO: 166951 - DNA, 201 bp, Homo sapiens
tgtactcagcctgatgctctcaccagccttttcagtgtaagtcaactgtagacacacacctaggggcaccaggggccctggaggcatgagggcaaaggaaycaggctaagtaacttctgaacatggctctccttactctgagctagggttatggttatgaagaaaccagatttgctccccatcatcagtgggggaccaggc

SEQ ID NO: 166952 - DNA, 201 bp, Homo sapiens
cctcccctggactctataaatgttaggggtttgcctgacagtgagcttggggtactttggggtcaagatgaaactatatttctgttttctttaacaggctytaaagcccaatgtaaacgtctctagcctcaagaagtgggattactacatagaagagaccctgtccacaggcccttcctatgactggatgatgctaacccc

SEQ ID NO: 166953 - DNA, 201 bp, Homo sapiens
agcctacactgtgtaaaaaagttccattaagcttctaaatataacataggagaatgtcataatttttctataatttacatcaaattacacttgcattcttaccagtcttctggacttctttaacatgaaagatagatacagttttttccacttagccctgctcataccatgcctgagaggagagacagagaaaagtctcag

SEQ ID NO: 166954 - DNA, 201 bp, Homo sapiens
gcttctaaatataacataggagaatgtcataatttttctataatttacatcaaattacacttgcattcttaccagtcttctggacttctttaacatgaaadatagatacagttttttccacttagccctgctcataccatgcctgagaggagagacagagaaaagtctcaggtcagagccacggtatcagaagcaccactt

SEQ ID NO: 166955 - DNA, 201 bp, Homo sapiens
catgatcttggctcactgcaagctccgcctcccgggttcacgccattctcctgcctcagcctcccgagtagctgggactacaggcgcccgccaccacgccyggctaatttttttgtatttttagtggagacggcgtttcaccgtgttagccaggatggtctcgatctcctgacctcatgatctgcccgcctcagaaagaac

SEQ ID NO: 166956 - DNA, 201 bp, Homo sapiens
tctccaacatccttcattgatgttggcgcccggctggcaggcaaggatcactcggcctccttcagtaacagcagctacctacaaaaccagctcttgaaacrgcaagcagccctttacatatttggtgaaaagtcgcaactaagggtaagatttcttttttctcacttagaaactttatggatacgctagggctgttgataa

SEQ ID NO: 166957 - DNA, 201 bp, Homo sapiens
atatctttcattacgaaatgagactggtactgggagtagcttctcttggtctttaggcttcacacaatttgccccagcatgaggggctctccagctgtcaygcaagcccatgtcaggaagcaggagagagccatagatcttgtatgtaacagaggatggtctgtgtgtagtgctcattcacagtggaaggagatggctcac

SEQ ID NO: 166958 - DNA, 201 bp, Homo sapiens
tatatgtaaaaggttaaaacaataaaacaataggtttgttattaaggttaaagcaaataagcttaaaacaataaagcttctagaagataagagaatgtctycatgaccttgaggtatagggaaagatttcttgggataggaaaaacattatctataaagtaaaaaattgataaatttagaacttctgtatatcaggagata

SEQ ID NO: 166959 - DNA, 201 bp, Homo sapiens
ggatggacagagtgcccagcaatggatggacaagatccagagttgtatctctgatgcctgatgcccatggtcaacccacgcagaagaaacagaagaactcmtgctgccagatagatagaaaaagaagcatggatccttgaggagctgacaacaagttatcccagggcctgaggttctcctgcccagtcccctcttgcaggg

SEQ ID NO: 166960 - DNA, 201 bp, Homo sapiens
tatttgaatctttaataggccatttgcatccatagccctgagatagataaaaatgcctgaaaataagaacaaggtctccaggatacgagcaagcatctcaytggcattctcggaacaattaccttactgaaagtacctctagtaggtgagaaggtgaaaggtaaagtactcaccccctatgaatttctcttgtctttctct

SEQ ID NO: 166961 - DNA, 201 bp, Homo sapiens
taagttgatcttacttctcttttcctggctctgtctgcacatcattctgtctgtctccaagaatgatggagccctcagagtaattggtggtgactacagakggatgacagacccccttggctatgggaattgttccagagcttgaactcagcattattgacccccaaggctatcctctcttcctgtctgtatgtctcagaa

SEQ ID NO: 166962 - DNA, 201 bp, Homo sapiens
tcccgttcaagacccgagtattttagaattactgcctccaacaggatgtattcactctgccggaggtaagtgtgtcagtgggctccaaaaagaggtcttcyttcctttcttcttatttgaatctttaataggccatttgcatccatagccctgagatagataaaaatgcctgaaaataagaacaaggtctccaggatacga

SEQ ID NO: 166963 - DNA, 201 bp, Homo sapiens
ggtcttactcaggctggagtgcagtggcaggatctcagctcactgcagctcgacctcacaggctcaagcaatcctcccacctcagcctcctgggtagctgsaactacgggcatgcaccaccacgattggctgatttttgtatgtttttgtagagacggggtttcaccatgttgcccaggctggtctcgaactcctgggctt

SEQ ID NO: 166964 - DNA, 201 bp, Homo sapiens
gaatttcaattgatctgtccaagcagtaactggaggagctggtcacaaggttaagcatgtacctttaaactctttgcagcaaagagtatactatatttgtkttctgtttgaatattggcccttttattcatactccttttggcaaatagatgagggagaagtttggagaccattgtctctgaaacagaaagcttacctgag

SEQ ID NO: 166965 - DNA, 201 bp, Homo sapiens
tggcccaataaggcttattccctagcagtctctttgacttttttccttttttctttttttttttttttcttttgagacagagtctcgctttgtcacccagrctggagtgcagtggtgcaatctcggctcactgcaagctccacctcctgggttctcgccattctctggctcagcctcccgagtagctgggattacaggcgc

SEQ ID NO: 166966 - DNA, 201 bp, Homo sapiens
ctctattcacttgtttggtctttcagatgaccagcccacatccttaacctagctagggaccccaccctgaatcaccttgttagcataaactcaggtgttgygaagggcagttatgaatagcaaaagatactcctaaagggtggggtgtgttaggaataacaaactatcacttagggaatttctagggttttagacactgtg

SEQ ID NO: 166967 - DNA, 201 bp, Homo sapiens
gtgaaatccacagattatggcccaataaggcttattccctagcagtctctttgacttttttccttttttctttttttttttttttcttttgagacagagtstcgctttgtcacccaggctggagtgcagtggtgcaatctcggctcactgcaagctccacctcctgggttctcgccattctctggctcagcctcccgagta

SEQ ID NO: 166968 - DNA, 201 bp, Homo sapiens
agggaggcaacacaccacccgcccagcatctgatgtgttcaccaacccagaggcactccttatctcattattcaagagtttttacaacccagtctccagtwaccctccctcccccgaggttgggggtggctgaaagttcccaccctctattcacttgtttggtctttcagatgaccagcccacatccttaacctagctagg

SEQ ID NO: 166969 - DNA, 201 bp, Homo sapiens
atggagggaggcaacacaccacccgcccagcatctgatgtgttcaccaacccagaggcactccttatctcattattcaagagtttttacaacccagtctcmagtaaccctccctcccccgaggttgggggtggctgaaagttcccaccctctattcacttgtttggtctttcagatgaccagcccacatccttaacctagc

SEQ ID NO: 166970 - DNA, 201 bp, Homo sapiens
gacttctttaacatgaaagatagatacagttttttccacttagccctgctcataccatgcctgagaggagagacagagaaaagtctcaggtcagagccacrgtatcagaagcaccactttcttgccatgtatactagagagtgaaatccacagattatggcccaataaggcttattccctagcagtctctttgactttttt

SEQ ID NO: 166971 - DNA, 201 bp, Homo sapiens
aaacactttacttacatttaccagcttatttctaagggatacacctcaggatcagccaaagggaagagatgcatggtatggagggaggcaacacaccaccygcccagcatctgatgtgttcaccaacccagaggcactccttatctcattattcaagagtttttacaacccagtctccagtaaccctccctcccccgaggt

SEQ ID NO: 166972 - DNA, 201 bp, Homo sapiens
ggtctgtcctcaagactgcccccacttcaaacactagttgcaagttccaagggccaccagaacttctaaccaaccagctataaatatgaaggtttccacartcccccctcctcaggttcagtaatttgccagaacaaatcatataactcaggaaaacactttacttacatttaccagcttatttctaagggatacacctca

SEQ ID NO: 166973 - DNA, 201 bp, Homo sapiens
cactctgttgcccaggctctggagttctggagtgcagtggcgcaatctcggctcactgcaagctccacctcccgggttcacaccattctcctgcctcagcstcccaagtagctgggactacaggggcccaccaccacgcccagctaattttttgtatttttagtagagatggggtttcaccgtgttcgccaggatggtctc

SEQ ID NO: 166974 - DNA, 201 bp, Homo sapiens
attcatcaccatacttagggaaatgctgacatagaattaatttattagctgaaatacctatcattcccaattctacataatataataaggctaaatttatktgaagcacacttgcctttaggtccccaaaatcttgtggccaacaataaagaaaactaatgaaaccaaaagctgttctttgagaatatcaataaaattgat

SEQ ID NO: 166975 - DNA, 201 bp, Homo sapiens
aagcccaagaaggataacatatctcggggcaactgccccaccatgcacatctacataacacacgccctggaatggaacagactggtctgataagcagttcyaccattacttagggccaagagaggcccctcccctgggccccaatcatagaaccctagtctggccttcctccagctgcatcctcctcatggaggtgagcag

SEQ ID NO: 166976 - DNA, 201 bp, Homo sapiens
aggtggtctaagctgaaaaaccttaaaatactttagaaaaggtttctttaagttcatctgtaccaaagccatggaaggacccctgtaggaagcagagataytcggagccaagcccaagaaggataacatatctcggggcaactgccccaccatgcacatctacataacacacgccctggaatggaacagactggtctgata

SEQ ID NO: 166977 - DNA, 201 bp, Homo sapiens
cttaattccaagaaaatatttactgatgttctcagttttaaatctgaaatcaggaaataccgctttccagggcatcctattgaaattgtctagtatgataytgcatacttttgataagggaaagagcactggtgagaccattttccaccctgtttatacttccagacctttgttggctcatggaattgttattcttcacat

SEQ ID NO: 166978 - DNA, 201 bp, Homo sapiens
cttggagagtgtgaatgtttggtctcactgagaagtcaggtcacttcaagctccagttctatcctaacaatggtaagctatgttccagttttcaattaagyctgctgaatatacctgccttgaaagagtgggatttagagtgaccttacagttcagacagaaacaactttgctgctgggcgtgactctcaaccctgcattt

SEQ ID NO: 166979 - DNA, 201 bp, Homo sapiens
acacacacatttcttttgaccagaaaacatctcttgctgtccccttaagcagccaccttctcttctcaatccttttcattgccaaacttctgtaagaacartttttcttgttgtatgtcacactattacaccacagttgcctggaaagcaagaaccataacttatgttaatatatatctatcaattgccaaacacagtata

SEQ ID NO: 166980 - DNA, 201 bp, Homo sapiens
ttcttggggttcctcaactaaaggcaactgtgtttgtatgtgtataatcttaacatatatacacacacatatatatatagtagcttatgtattacacacakatatgatatattctatagatatagatctgtcagacatatgcgtacatatataacttcaatagcttgccataaaactctgcccaaatgaggttctctgtac

SEQ ID NO: 166981 - DNA, 201 bp, Homo sapiens
ccactgcataggagtcaaactcttttttaatgcatcttcctaaaatccattttattttacattacttacaagctaaaattttacttcaattcaaaagccartaagaaaatgtagaaaaccctttaatgatcacagaaaaccaggttcctaaccagatgataaattttgataaatcaatgatatccagatcacgactttaaa

SEQ ID NO: 166982 - DNA, 201 bp, Homo sapiens
cctggctaattgtttgttttaatttttgtagagaaaaggtctcactatgttgcccaggttggtctcaaactcctggcctcgagatccttccaccttggtcycccaaaggtgctgggattacaggcgtgagccaccacgcccagccagtttttataattagttgcttgtattgcatgatcataggaaacccatgatttctta

SEQ ID NO: 166983 - DNA, 201 bp, Homo sapiens
tgatccacccgcctcggcctcccaaagtgttgggattacaggcgtgagccaccacgcctggcccttgaggctttaataaagatttttaaaagaaattttaraacatattgtagactggttcagtggaaagaactcttcctcccttggaaacagtgagtgaggggctggcctgtgactactgaaggtttatcccaagggctg

SEQ ID NO: 166984 - DNA, 201 bp, Homo sapiens
tctccctgaaatgcctgtaagttcaacttaagatcatatttccattctactgttacctcagaagtgggtcttcaaaattgtattcctgagtagattaaatrtcagaatcatcaagaaaagatacaagtatgtatgaggtatctggtttctatgaagaatagtcattgagagaaatgttattttgaggctttaatacagttt

SEQ ID NO: 166985 - DNA, 201 bp, Homo sapiens
ggtatattcaagagtttctgctgtctgctgcctattcaactgcaaactggcaaaaatgaacataatccaatctgttttataacaaggcaattttgcatcamagcttaatatttaaggccatgtaatatggaaggatgtaacacaaagcacacaatgtttgttaaatcttaatttgtgaaataacaaaaattaatattagct

SEQ ID NO: 166986 - DNA, 201 bp, Homo sapiens
gcttggataatgagaagctatgccctgtgctttcaagcccaatctgtgcttggaagggtagccctgtgctggttttccagacctgggctctttctggaagyataatgaggcaatcaagaagtaggtgtggtaaaaccagcattacagtggaggattagccatttaatagactggcaatttaagtggggctggtttctatat

SEQ ID NO: 166987 - DNA, 201 bp, Homo sapiens
tttaccacgataactaactctgagattgatacctttgtacattattgttgcttattagtccagttttttccttgagataaatatttgtaaatgaaattttccagtcagtcagtagtttaagtgtctgtaaaggtttcctagctcctgtcctgtctttttcagtcccaaagacacctgtcgagatccccaggaattgtgtct

SEQ ID NO: 166988 - DNA, 201 bp, Homo sapiens
accctgctcgctgtgctgaagacttccccacagcacctgaggctaaaccacaggtccctcaataagctaggcctgtgcagtacagccttttataaacttgraatggatttgctttaatttttgtaatgttttagatgtttctttgaaaagacaaaaaacaaaaattacaactaaaaataattcgaagaggttgtagttatt

SEQ ID NO: 166989 - DNA, 201 bp, Homo sapiens
attgtctcatattctacctggactaggtttcctatgagagacatctacttgtaatgcctgacctttgagatgctcagttctctggtgctgccaaaagatgyttccatggtccgtgctctgccagtggggttcacaacaagagacgtcattgttcagtagcaggcaaagagggagcacacagcattattctgatggaaaaag

SEQ ID NO: 166990 - DNA, 201 bp, Homo sapiens
gctcacatcaaggaagcagttccgtggtttgcaggcccactgcataggagtcaaactcttttttaatgcatcttcctaaaatccattttattttacattasttacaagctaaaattttacttcaattcaaaagccaataagaaaatgtagaaaaccctttaatgatcacagaaaaccaggttcctaaccagatgataaatt

SEQ ID NO: 166991 - DNA, 201 bp, Homo sapiens
gccaccatgcccagctaatttttgtatttttagtagagacggggtttcaccatattggtcaggctggtctcaaactcctgacctcaagtgatccacccgcytcagcctcccaaagtgttaggattacaggcatgagcaaccgtgcccggcctggaaagatgtttcaataggcataaacattctaaattttagttgatattg

SEQ ID NO: 166992 - DNA, 201 bp, Homo sapiens
ctcctgggttctcgccattctctggctcagcctcccgagtagctgggattacaggcgcctgccaccatgcccagctaatttttgtatttttagtagagacrgggtttcaccatattggtcaggctggtctcaaactcctgacctcaagtgatccacccgcctcagcctcccaaagtgttaggattacaggcatgagcaacc

SEQ ID NO: 166993 - DNA, 201 bp, Homo sapiens
agaaacagcatcttcgctacaaccactgacaccagctggcgtcataggtagctagatcattgcatttgttttgaaatgttaatatgttaaatactaaactratatttcaaaaatgtgtatatatgatttctatatccttgtttttcagatagcctgcttataatttaatataaattaactgatgcattcataagatttcaa

SEQ ID NO: 166994 - DNA, 201 bp, Homo sapiens
tcgaacaccacctctgtgcccactgctgtactggttactaaaggaggcactgttacccttcaaagatggcagcaacaggggagtaaaggggccccaaaagyggcagaaggggatgtgcccacccaaacttggaattcaccgtgggcaagtactagactggtccttgctgactatgtcaagaaatcttttgactactgttag

SEQ ID NO: 166995 - DNA, 201 bp, Homo sapiens
aagccaaaagaaattacttctgtctaggctagtcccagtccctggctattatgtggctctagcagacagatagattcctcatgtacagactgcttttttagtgcctctcatatgtagtctggaggctcctcaagggccccagatgtccctgagtaagggcaatagccttctgagggagtttcccaagtagctcggcctggt

SEQ ID NO: 166996 - DNA, 201 bp, Homo sapiens
gaaaggttggaagccccgttggtttgttttggatgtaacaaaacatcaggtaatactcttaaagccaaaagaaattacttctgtctaggctagtcccagtycctggctattatgtggctctagcagacagatagattcctcatgtacagactgcttttttagtgcctctcatatgtagtctggaggctcctcaagggcccc

SEQ ID NO: 166997 - DNA, 201 bp, Homo sapiens
tagctgggtgtggtggcgcatgcctgtaatcccagctactcaggaggctgaggcaggagaatctcttgaactcaggaggcggaggttgcagtgagtgagcygagatcgtgccaccacactccagcctcgtgacagaacaagactccgtctcaaaaaaatgtatatatatattttaaaaccaaatactctgttttctgcttc

SEQ ID NO: 166998 - DNA, 201 bp, Homo sapiens
tatcagatttcccatgggctgcccaagggtgcagatgtctgagatacatatttcacatcctagtatgtaagctatcctgtacaaaaaggcctagttatagrtcctaataaaccatctttgccacagtacggcacaccaactagagctctcaccactattcctggctgggagacctcacaggcccatgtccaccactttcct

SEQ ID NO: 166999 - DNA, 201 bp, Homo sapiens
aattctctattgaacttgaccttctacgtcattaggaagttacatttctcaatgtaggagggaggattggagaatgttttatttaataatttatcttgatktatgatttttaaatatttagaaatatggtatttgaactccattcatactcttcctcccctggactctataaatgttaggggtttgcctgacagtgagctt

SEQ ID NO: 167000 - DNA, 201 bp, Homo sapiens
tgtaggaagcagagatattcggagccaagcccaagaaggataacatatctcggggcaactgccccaccatgcacatctacataacacacgccctggaatgsaacagactggtctgataagcagttccaccattacttagggccaagagaggcccctcccctgggccccaatcatagaaccctagtctggccttcctccagc

SEQ ID NO: 167001 - DNA, 201 bp, Homo sapiens
taccacgataactaactctgagattgatacctttgtacattattgttgcttattagtccagttttttccttgagataaatatttgtaaatgaaattttccagtcagtcagtagtttaagtgtctgtaaaggtttcctagctcctgtcctgtctttttcagtcccaaagacacctgtcgagatccccaggaattgtgtctac

SEQ ID NO: 167002 - DNA, 201 bp, Homo sapiens
ttctggtttcagctcattctctttctgtctacaaaggtgcctagagcctatttcaacttgggctgactaccacacagcctttcagtctaatccatgcctcraggcgccaaatggagcaatatacaaggtggctttcaaaatcttactgcaacccctagagcatttgcaactttggacattggagttacttgaacttttaaa

SEQ ID NO: 167003 - DNA, 201 bp, Homo sapiens
accacgataactaactctgagattgatacctttgtacattattgttgcttattagtccagttttttccttgagataaatatttgtaaatgaaattttccagtcagtcagtagtttaagtgtctgtaaaggtttcctagctcctgtcctgtctttttcagtcccaaagacacctgtcgagatccccaggaattgtgtctacc

SEQ ID NO: 167004 - DNA, 201 bp, Homo sapiens
ccacgataactaactctgagattgatacctttgtacattattgttgcttattagtccagttttttccttgagataaatatttgtaaatgaaattttccagtcagtcagtagtttaagtgtctgtaaaggtttcctagctcctgtcctgtctttttcagtcccaaagacacctgtcgagatccccaggaattgtgtctacca

SEQ ID NO: 167005 - DNA, 201 bp, Homo sapiens
cttaagtggtatgattaaagcaatttaacatacactaagatgtagcataacttacattcctattatctttagaatacaatagatgctaaaactacaaaagsctaagttaattaaaacaatttggggtatatgcttaatttctgctgttttgttttatttactaatcagctgaatttaagattcatctgtttttttttcaag

SEQ ID NO: 167006 - DNA, 201 bp, Homo sapiens
tcacgccattgcactccagcctgggcaacaagagtgaaactccatctcaaagaaagattcgtgcatgtgaagctgaaatgaccaataaaaacttttcttgrgaactggtctcctgaccccgtaaatgcttataaagagaaagagaagcagatgtgacatcatggtgacttctggtcacctagaaacatgactttaatacta

SEQ ID NO: 167007 - DNA, 201 bp, Homo sapiens
atctttaattagtaagtccaacatctcagtaaactagagttccagaaaaagaaaacagcagctaccttgtttctacggagaagaatttgtctggggcccaraaagtacttgtaggtctggctgcttgctttatggaaacagggcaggaaataggtccagggaaatcccagttcagtaatgcaggcttttcgttttttccat

SEQ ID NO: 167008 - DNA, 201 bp, Homo sapiens
agggaaattttatttttaaataataattcaataaatctggaggaaaaaataataatctttaattagtaagtccaacatctcagtaaactagagttccagaraaagaaaacagcagctaccttgtttctacggagaagaatttgtctggggcccagaaagtacttgtaggtctggctgcttgctttatggaaacagggcagg

SEQ ID NO: 167009 - DNA, 201 bp, Homo sapiens
gtaagattccagaggccttcccagaagcagatgccactatgcttcctctacagccttacagcctgcaaaccatgaaccagttcaacctcttatagttttgtttttttttttttttgagacagggtcttgctatgacacccagactgtagtgcagtggcgcaatgacagctcacttcaaccttgacctcctgggctcaagca

SEQ ID NO: 167010 - DNA, 201 bp, Homo sapiens
gttctgtatcatgattgtggtgatggttacacaactgtgtacagtgaccaaaactaataaaactatacacttaaagtagggaaattttatttttaaataayaattcaataaatctggaggaaaaaataataatctttaattagtaagtccaacatctcagtaaactagagttccagaaaaagaaaacagcagctaccttgt

SEQ ID NO: 167011 - DNA, 201 bp, Homo sapiens
aaccagttcaacctcttatagttttgtttttttttttttttgagacagggtcttgctatgacacccagactgtagtgcagtggcgcaatgacagctcactkcaaccttgacctcctgggctcaagcaatcctcccagctcagcctcctgagtagctgggactacaagtgtgctccaccatgcccagctaatttttttatag

SEQ ID NO: 167012 - DNA, 201 bp, Homo sapiens
tattctgaaaataatcttgaatttggcctttacctaggtaaattcacatactttaatactttattattaggaacaaattccttacaacctaatggagtgtytcaatactttggttagtaactcctggtttataagataagcatacctagctcatgtatagttgggaaataggaatctacctttcctgaaaagtaaactatg

SEQ ID NO: 167013 - DNA, 201 bp, Homo sapiens
ccagttctcagaatgaacgcattcttaggctaagtaatctacctctagtaaggactagatttgccattctgggcaaaccactagcttgtactgaatggctsttcccaccaacactgacacattgccgtacaagattgactttcttgacccattggcagcctctgcagctatttggccccaaataactttgtcattatgcac

SEQ ID NO: 167014 - DNA, 201 bp, Homo sapiens
ctttgagaggctgaggtgggcggcttgcttgagccccaggagttcaagaccagcctgggcaacatgacaaaaccccatctctacaaaaaaaaaaaaaaaamacacacacacacacacacaaattagctgggtgtggtggcgcactcctgtagttgcagctgttcaggaggctgcggtgggaggatcacttgagcccaggag

SEQ ID NO: 167015 - DNA, 201 bp, Homo sapiens
agctaatttttttatagagacagggtcttactatattgcccaagatggtcttgaactcatgggctcaaacaatcctcccaccttggcctcccaaagtgctrggattccaggcatgagccaccacacctgacgtcaggtatttctttttttttttttttttttttttttttttgagacggagtctcgctctgtcgcccaggc

SEQ ID NO: 167016 - DNA, 201 bp, Homo sapiens
tatagagacagggtcttactatattgcccaagatggtcttgaactcatgggctcaaacaatcctcccaccttggcctcccaaagtgctaggattccaggcrtgagccaccacacctgacgtcaggtatttctttttttttttttttttttttttttttttgagacggagtctcgctctgtcgcccaggccggactgcggac

SEQ ID NO: 167017 - DNA, 201 bp, Homo sapiens
ggtataagatcacagtgatcaataaggccccacatgtgacctaagcatctcttttccctctcccctttcgtcagaacagagtagaggaaataacaccagtrcttaggaaacactagttctctgaacagtaacgcattcctatggggaaaatgaactgtgtcatatcttccctgaagcagtccccttagccggttcttactg

SEQ ID NO: 167018 - DNA, 201 bp, Homo sapiens
gagtctcgctctgtcgcccaggccggactgcggactgcagtggcgcaatctcggctcactgcaagctccgcttcccgggttcacgccattctcctgcctcrgcctcccgagtagctgggactacaggcgcccgccaccgcgcccggctaattttttgtatttttagtagagacggggtttcaccttgttagccaggatggt

SEQ ID NO: 167019 - DNA, 201 bp, Homo sapiens
attgtcagcaaggaaagtcagtaatttttccactcaacttttagacagtgcaactttcagcagatgtctagttaattgaaaccctcccaccccacaacctsatcttgtattttgccattgtacacgtcaccatgttatccattccaacatttggccaggtggcctataatataaattgtagctgcacagttgtctcctcct

SEQ ID NO: 167020 - DNA, 201 bp, Homo sapiens
gatctcataaacataatattgagcaaaagaagccaaacatgaaagaataaactctgttgattccctttatctagaattcaaaaagaagcaaaattcatccmcattgttagtcaggatagtagtaatcttttttttttttttttttttttttgagacaaggtcttgctctgtctcccaggctggagtgcagtgatgtgattc

SEQ ID NO: 167021 - DNA, 201 bp, Homo sapiens
agacatctacaagaatgttcatggcaacattcttaataattaaaaaaactagaaactactcaaaatcaacaagagaatagataaatggtatcatactcacmcagtgaaatacagtaatgaaaatgaacaaactacacgtgagtacaaataacacggatggatctcataaacataatattgagcaaaagaagccaaacatga

SEQ ID NO: 167022 - DNA, 201 bp, Homo sapiens
gcctatcaagggggtttccggaagttaactttctagtatctctgtttgcatgtagactcccagggtgccctgggagaaatggagaaatgaagcccaggacwtgaggcattgggatggatggtccatctttcacatgtgctgggattaacttcctttaagaaaaaaggaaggcaaaagggttcccagccttagggttgggtg

SEQ ID NO: 167023 - DNA, 201 bp, Homo sapiens
ggtcttgaactcctggcctcaagtaatcctcccaccttgacctcccaaagagctgtgattacaggcatgagctgccacgcctggcccccattatttgttaycaccttgcagaaattcccagtcccctgcctccatctacctccaagcatcctgcctcttgtttcccacagcacattggactaaaaggcaaaaaaaaaaaaa

SEQ ID NO: 167024 - DNA, 201 bp, Homo sapiens
cccaaccacttaaatcagaatctgtgatggtaaggcccaggcatcaacagcttttaaaactccccaggtaaggccaggcacggtggttcacgcctgtaatsccagcactttgaggaggccaaggtgggtgaattgcttgaggccaggaattcgagaccagtctggccaacacggcgaaaccccatctctactaaaaataca

SEQ ID NO: 167025 - DNA, 201 bp, Homo sapiens
tcaactgccctctggccatgctgctcatctgggcctagtacagaagcagtgtggctttggggcccatcctgatttctatgaaatactgatcagaaaacttytaatttctttgcaggaaattgaaaaattggagcacaaattgaaccaagcccctgagaagtggcagcagctgtgggaaagggtaaccgtggaccttaaaga

SEQ ID NO: 167026 - DNA, 201 bp, Homo sapiens
ttccctaaatctaggcccgagcctcattcattcttgctttcccaggatcttattctcttagttattagctaacaaatttttctaaaatttgttttctctaytggctccttctggattgccttcagacacacacacatttcttttgaccagaaaacatctcttgctgtccccttaagcagccaccttctcttctcaatcctt

SEQ ID NO: 167027 - DNA, 201 bp, Homo sapiens
tcactgatgagaaaactctacgtaatacaaatgcttacagttctacaaacctggagtatggcacgctacctagctattcagagccatgtcccatggaaagytctgctgtcctgtggagatctgatgcaacaggaaggcattggctcacatcaaggaagcagttccgtggtttgcaggcccactgcataggagtcaaactct

SEQ ID NO: 167028 - DNA, 201 bp, Homo sapiens
gatcctcctcctcagcctcctgagtagctggggctacaggcacgtgccaccacacctggctaattgtttgttttaatttttgtagagaaaaggtctcactrtgttgcccaggttggtctcaaactcctggcctcgagatccttccaccttggtctcccaaaggtgctgggattacaggcgtgagccaccacgcccagccag

SEQ ID NO: 167029 - DNA, 201 bp, Homo sapiens
caataggacccttgctatcatactgtcccccagttaagtgctgtgctgtgtggaattccatgcctttggatcaggcattctgtacatccctggaaagtgaygctaactaaggctctgtggtgaggaaaggcaaacccatgcccagaataagtctctatccctgtagagatgaaccattggcccttccagaattgaaagggc

SEQ ID NO: 167030 - DNA, 201 bp, Homo sapiens
ggtgcattttctctcaggccaagcctctccctttttggtagaagctcttgactttgaacaggagttgttgtctaaggtaatacccgaggttcattgcctcrtgccaagaaaattaaggacacagacacacacaaggagtgagtttaagagcagaggtttactaggcaaaagaaagagaaagaacagctagctctgtccttc

SEQ ID NO: 167031 - DNA, 201 bp, Homo sapiens
taatcccagcagtttgggaggctgaggcgggcagatcacaaggtcaggagatcgagaccatcctggttaacacagtaaaaccccatctctactaagaaatmcaaaaaaaaaaaaaaaattagccgggcgtggtggcgggcgcctgtagtcccagctactcgggaggctgaggcaggagaatggcatgaacctgcgaggcgg

SEQ ID NO: 167032 - DNA, 201 bp, Homo sapiens
actactcaaaatcaacaagagaatagataaatggtatcatactcacacagtgaaatacagtaatgaaaatgaacaaactacacgtgagtacaaataacacrgatggatctcataaacataatattgagcaaaagaagccaaacatgaaagaataaactctgttgattccctttatctagaattcaaaaagaagcaaaattc

SEQ ID NO: 167033 - DNA, 201 bp, Homo sapiens
gtatatattgaaagattatcatgattatttgaaaatataagcatttccatcctatgaaacatgtttcctcttaaaactcataaacacaggctgggtgcaayggctcacacctataatcctagcactttgagaggctgaggtgggcggcttgcttgagccccaggagttcaagaccagcctgggcaacatgacaaaacccca

SEQ ID NO: 167034 - DNA, 201 bp, Homo sapiens
aaagacatctacaagaatgttcatggcaacattcttaataattaaaaaaactagaaactactcaaaatcaacaagagaatagataaatggtatcatactcmcacagtgaaatacagtaatgaaaatgaacaaactacacgtgagtacaaataacacggatggatctcataaacataatattgagcaaaagaagccaaacat

SEQ ID NO: 167035 - DNA, 201 bp, Homo sapiens
cattaattattaattgactaaatgttccaattcaaagaaagagatcagggtttgctttaaaaaaaaaaaaaaaaaaaaagtggctgggctcagtggctcaygcctgtaatcccagcactttgggaggccgaggcaggcagatcacgaggtcaagagatggagaccatcctggccaacatggtgaaaccctgtgtctactaa

SEQ ID NO: 167036 - DNA, 201 bp, Homo sapiens
tgaggcaggagaatcacttgaaccctggtggtggaggttacagtgagccgaggtcaagctactgcactccagcctggtgacagagcaacactccgtctccaaaaaaaaagctttctgctgcttttaagggacaaatctaatatacaagtatataaaaaggtagaaagtaaaaggatagaaaaaatataccacgcaaaacta

SEQ ID NO: 167037 - DNA, 201 bp, Homo sapiens
tggagtacagtggcacaattgtggctccactgcagcttcgaactcctggacacaagcgatcctcctcctcagcctcctgagtagctggggctacaggcacrtgccaccacacctggctaattgtttgttttaatttttgtagagaaaaggtctcactatgttgcccaggttggtctcaaactcctggcctcgagatccttc

SEQ ID NO: 167038 - DNA, 201 bp, Homo sapiens
gctgagaaaggagaattgcttgaaccccggaggcagaggttgcggtgagctgagatcacgccattgcactccagcctgggcaacagtgaaactccatctcaaaaaaaaaaaaaaaaggatagcatgataaattttatgttaggtatattttcccaaaatttataaatcaccagctgggcacggtggctcatgcctgtaatc

SEQ ID NO: 167039 - DNA, 201 bp, Homo sapiens
gaaagacatctcagaaaattccttatgtttcttaatgtcggattctaaacgtggtatctaggtactaatcaacccaggcttgaggtctatctgacttttcyttttccaccaaagaaatgtttacatgcttgttactttattgctgaagagtaaaaaacaaattgctctgcatcttctcttccacttccagtagacctgatc

SEQ ID NO: 167040 - DNA, 201 bp, Homo sapiens
cagatcacgaggtcaggagatcgagaccatcctggctaacacggtgaaaccccgtctctattgaaaatacaaaaaattagccagggatggtggcaggcgcytgtagtcgtagctactcgggaggctgaggcaggagaatggcgtgaacccgggaggcggagcttgcaatgggccgagatcgtgccactgcactccagcctg

SEQ ID NO: 167041 - DNA, 201 bp, Homo sapiens
ggtgaaaccccgtctctattgaaaatacaaaaaattagccagggatggtggcaggcgcttgtagtcgtagctactcgggaggctgaggcaggagaatggcrtgaacccgggaggcggagcttgcaatgggccgagatcgtgccactgcactccagcctgggcgacagagcgagactgcatctcaaaaaaaaaaaaaaaaat

SEQ ID NO: 167042 - DNA, 201 bp, Homo sapiens
ataatataataaggctaaatttatttgaagcacacttgcctttaggtccccaaaatcttgtggccaacaataaagaaaactaatgaaaccaaaagctgttstttgagaatatcaataaaattgataaacctctagctagactgcttgagaaaaaaaagacacatattaccaatataagaaatgagaaagatgacgtcacta

SEQ ID NO: 167043 - DNA, 201 bp, Homo sapiens
tgaggcaggagaatggcgtgaacccgggaggcggagcttgcaatgggccgagatcgtgccactgcactccagcctgggcgacagagcgagactgcatctcaaaaaaaaaaaaaaaaatcaccaaaaaaaagatataggattagtggttaggaggttataaatataaaatctgttttgtgtaatatttctaattaaactaaa

SEQ ID NO: 167044 - DNA, 201 bp, Homo sapiens
aggagtgggagaggtctagatgctggaaggtaacctgtattctgtgagtaccccttaagtggtatgattaaagcaatttaacatacactaagatgtagcayaacttacattcctattatctttagaatacaatagatgctaaaactacaaaagcctaagttaattaaaacaatttggggtatatgcttaatttctgctgtt

SEQ ID NO: 167045 - DNA, 201 bp, Homo sapiens
aatttgaaaccagcctgtacaacaaagtgagaccctgtctctacaaaaataaaaataaaattaaaaaagaaaataaatatatcttacccttcaactaataygtttctgaatcttagaaaattactatgatattagtattcaatttcttatattctctgtctccctcttctctcatttcctttccccttttcttcccctctg

SEQ ID NO: 167046 - DNA, 201 bp, Homo sapiens
atgagcttgtacagccaaatctggcttaagttaaatggactacttaatatgttaaatctctatgttcaacttgcagaattctgcacacctaaacattaggktcagcgaaataatccactcacaatcagtaagagataggaggttctcatgtaagatacactgtcctcaaagatgggaacatcattgtctcccaagtacaat

SEQ ID NO: 167047 - DNA, 201 bp, Homo sapiens
tctgtatcatgattgtggtgatggttacacaactgtgtacagtgaccaaaactaataaaactatacacttaaagtagggaaattttatttttaaataatamttcaataaatctggaggaaaaaataataatctttaattagtaagtccaacatctcagtaaactagagttccagaaaaagaaaacagcagctaccttgttt

SEQ ID NO: 167048 - DNA, 201 bp, Homo sapiens
atacaatccttttattcccctccacaaaagtcttcaaagcaaacaaacaaaaaccttcagtggctccacatttcctaaagaattacccttccacatatccratttgaatataactggggggaacccaaatgtctgtcctacagtaggtgaatggctacacaatctgggatacatccataccgtggacgactactcaacagt

SEQ ID NO: 167049 - DNA, 201 bp, Homo sapiens
tctactaaaaatacaaaaaatcagccagacgtgggggcgcacgcctgtagtcccagctacttgggaggctgaagcaggagaatcgcttgaacccgggaggyggaggttgcattgagctgagaagcccccactgcactgcagcctgggagacagagcgaggctccgtcttgggggaaaaaaaaaaaatctagaatatcctaa

SEQ ID NO: 167050 - DNA, 201 bp, Homo sapiens
agaaagcaggaggtctgtgggactaactacggcccctaccaatgaagttaatcttggagccataactggccttcattctctccctcgtccactatctattmcgaattcccccgaccctcaacaacctcctcagatgttggtggcttacctggtggtgtgagccaaaccttcattctaggggtgagaggagggggagggaag

SEQ ID NO: 167051 - DNA, 201 bp, Homo sapiens
atgagttcttcatgaaagcacttcttatcttgcttttttattatgcttatcaattggactagactatttcctgcctccgtataccaccattactaacaatrattactaatttgtgtcgactgcttactatgtgccaggcactgttctgagcactacacatgttattttagttcataattctttgaatcttttgctgaccct

SEQ ID NO: 167052 - DNA, 201 bp, Homo sapiens
tttaggtatttaaaacattatgtggttcttttgtgcaagcgctttatccctaagtcgtttgattatccagggttgaaagcaactctctctgacttctgcaytcagaaagcgcttggtctaattgtgttctccttcctgtctcttagcttcacaggataatgcagctggctgtggttgtatcagaagtacttgagaatggtt

SEQ ID NO: 167053 - DNA, 201 bp, Homo sapiens
agcctgggcaacaagagcaaaactccatctcaaaaaataaacaaaagtgtgtgtgtatatatatacatacacacacacacatacacacacacacacacacwtatatatatatatatatacacaccacacactaagtaagtaatcttgtttctgcttgaacatcatcagtaatgggaaactcatttcttccccaaaataatc

SEQ ID NO: 167054 - DNA, 201 bp, Homo sapiens
ttttaagtttttgagatggagtctcactctgtcgctaggctggaatgcagtagcatgatctcggctcactgcaacctccacctcccaggttcaagcaattytgccccagtctcctgagtagctgagattacaggcacgcgtcaccacgcccagcttttttttttttttttttttttttttttagttttagtagagatgggg

SEQ ID NO: 167055 - DNA, 201 bp, Homo sapiens
agaacagcctgggcaacatggcaaagccccatctctacaaaaagtataaaaattaggcaagcatggtggcatgcacctgttgtcccagcttcttgggaggytgaggcaggaggatcaattgagcccaggaggttgaggttgcagtgaaccatgattgcaccactgtactccagcctgggcaacagagcgagaccctgtctc

SEQ ID NO: 167056 - DNA, 201 bp, Homo sapiens
ttgagatggagtctcactctgtcgctaggctggaatgcagtagcatgatctcggctcactgcaacctccacctcccaggttcaagcaattctgccccagtytcctgagtagctgagattacaggcacgcgtcaccacgcccagcttttttttttttttttttttttttttttagttttagtagagatggggtttcaccacg

SEQ ID NO: 167057 - DNA, 201 bp, Homo sapiens
tggcacatgcaacaccttgaagggatctcaaggacattatattgaaagaaaaaaaaggcaatctcaaagggtccaactgagtatgattccatgtatataatttttttttttttttgagacagagtctcactctgtcacctaggttggagtgtagtggtgtgatctcggctcactacaacctccgcctcccaggctcacgca

SEQ ID NO: 167058 - DNA, 201 bp, Homo sapiens
gaggccaaggtgggttcacttgagcccaggagttcaagaccagcctgggcaacacagcaagaccccacctctaaaaaacataataaatactttttttggcyaggcacggtggctcacgcctgtaatcccagcactttgggaagccgagacaggcagatcacgaggtcaggagatagagaccatcctggctaacacagtgaa

SEQ ID NO: 167059 - DNA, 201 bp, Homo sapiens
agataatctcaatgaatatatgagaatttgaaagaccacaagtcttgttcatgctcttaccacccttcatcaagaccatctagaatatcctggtcgggcgyggtggctcacgcctgtaatcccagcactttgggaggccaaggtgggtggatcacgaggtaagagatcaaaaccatcctggccaacatggtgaaaccccat

SEQ ID NO: 167060 - DNA, 201 bp, Homo sapiens
caaatcatatcaaggaaaattcagggctaaaatggtctaacgtggtggctcatgcctgtaatcccagcactttgggaggccaaggcaggtagatcacttgrggccaggagttcgaaaagaggctggccaacatggtgaaaccccatctctgccaaaattacaaaaattagccaggtgtggtggtgtatgcctgtagtccca

SEQ ID NO: 167061 - DNA, 201 bp, Homo sapiens
cacaaccacgcccagctaatttttgtatttttagcagaaatggtgtttcaccatattggccaggctggtcacaaattcctgacctcaagtgatccacccayctcagcctctcaaagtgctggaattataggcatgagccactatgcccggccaacagcttatttttgaaatgggcaaaacatttgtactgatttcaccaaa

SEQ ID NO: 167062 - DNA, 201 bp, Homo sapiens
ggacatgctgaaatcttagcagtagactcctaggaatggaaaagaaaaaaaattagttggtttctgaaactaggacagctaagctggctgttgggcttgcsccaagtgaagtagccagcactctaaatgaccatcttcaaagaagagaagcaaacttgggcttattacctaagaacaaaatctctaggtaatacgggtcct

SEQ ID NO: 167063 - DNA, 201 bp, Homo sapiens
aacgtggtggctcatgcctgtaatcccagcactttgggaggccaaggcaggtagatcacttgaggccaggagttcgaaaagaggctggccaacatggtgaraccccatctctgccaaaattacaaaaattagccaggtgtggtggtgtatgcctgtagtcccagctacttggtagggtgaggcacaagaatcacatgaacc

SEQ ID NO: 167064 - DNA, 201 bp, Homo sapiens
tgtcttaatcttgctgatcctatgctttctcaattgtaaagtggagataataatgcctctcttgctataccgtagagattaaatgagattatgtttatttaaaaaaaaaaaaccctcgtctggtgtctggcacacagtaggtgctcggaaaagctggttcccttcccatctctacttatggtagggattcaggtatttgtt

SEQ ID NO: 167065 - DNA, 201 bp, Homo sapiens
cttaaatcagaatctgtgatggtaaggcccaggcatcaacagcttttaaaactccccaggtaaggccaggcacggtggttcacgcctgtaatcccagcactttgaggaggccaaggtgggtgaattgcttgaggccaggaattcgagaccagtctggccaacacggcgaaaccccatctctactaaaaatacaaacattag

SEQ ID NO: 167066 - DNA, 201 bp, Homo sapiens
gttcccacaggtaatgtctgaagcagcttctttctttataactcaaagaaacagaggcccaagtagatatacagaactgtatttgagaaaaaaaatacttygttcccctactccccaacattctcctccttcattgtgtgccatcagtaaaggcctttcagactaaggaaatcatctggtataggaggtgagggagtagaa

SEQ ID NO: 167067 - DNA, 201 bp, Homo sapiens
acctataatcctagcactttgagaggctgaggtgggcggcttgcttgagccccaggagttcaagaccagcctgggcaacatgacaaaaccccatctctacaaaaaaaaaaaaaaaaaacacacacacacacacacaaattagctgggtgtggtggcgcactcctgtagttgcagctgttcaggaggctgcggtgggaggat

SEQ ID NO: 167068 - DNA, 201 bp, Homo sapiens
tttctcaatatttatctctaccttttttcatttttattatgaatatgttttacttgcataataagaaacaaatatgtgcatatctacaaactttaatacaygtacagtctggaactccaacagtgtgttacctatcccttaccatatacatcttgggaagacttagtttacactgttggagtaatcatactgtccatgtat

SEQ ID NO: 167069 - DNA, 201 bp, Homo sapiens
cctataatcctagcactttgagaggctgaggtgggcggcttgcttgagccccaggagttcaagaccagcctgggcaacatgacaaaaccccatctctacaaaaaaaaaaaaaaaaaacacacacacacacacacaaattagctgggtgtggtggcgcactcctgtagttgcagctgttcaggaggctgcggtgggaggatc

SEQ ID NO: 167070 - DNA, 201 bp, Homo sapiens
ttatctgaagccttaacattatgtttccatgtcatatagtcttcataactattttagtcactattcatcccatgttgttggatgtttaggtttctttatcwtctgtatataaaattacagtcacaattccaagcaaataagttattttgttattttttttaattgagataccattccctgggggttttttcctattagatt

SEQ ID NO: 167071 - DNA, 201 bp, Homo sapiens
ttccttacaacctaatggagtgtctcaatactttggttagtaactcctggtttataagataagcatacctagctcatgtatagttgggaaataggaatctrcctttcctgaaaagtaaactatgttttgtctattataagtttttaaaaataatagaaaggaactcatgtatatcgctaggttatttatctgaagccttaa

SEQ ID NO: 167072 - DNA, 201 bp, Homo sapiens
tcatctctaaccctttcaggcattcctcatctccctccccatccttttcttctctctccctcttcctcagccctctctccctgtctctgcctatcctgcatctctcttttctcaatcctttccacctgctttccttcccctttgctctcctcccctttctgtcttaccccctctcccgcatccctctctcttccattctca

SEQ ID NO: 167073 - DNA, 201 bp, Homo sapiens
tccatcctatggccgtgaggcctctagctccagcctgctaccctggcatggcacccaggctcccatcaagccagaggggggcccagccccaccagggactmctgggctctcctgccactgtcacacatttccctcagtcagtgctgctgccctgagctcagcttggggctgcacattggaggaagagaggtgcctgaggcc

SEQ ID NO: 167074 - DNA, 201 bp, Homo sapiens
catctctaaccctttcaggcattcctcatctccctccccatccttttcttctctctccctcttcctcagccctctctccctgtctctgcctatcctgcatctctcttttctcaatcctttccacctgctttccttcccctttgctctcctcccctttctgtcttaccccctctcccgcatccctctctcttccattctcag

SEQ ID NO: 167075 - DNA, 201 bp, Homo sapiens
agctaccctcagcatccccatctggcagcagacagcattcccagagtgcgctccccgctacatctccagtcctccctgactcctataagatgcccggccaygttaaaaataccccttgtgatgctaagtacaggctcaggactctcacaggaggcctatttatgatgccaatcatatgcgctccagaaagacgccctgtta

SEQ ID NO: 167076 - DNA, 201 bp, Homo sapiens
ccccatctggcagcagacagcattcccagagtgcgctccccgctacatctccagtcctccctgactcctataagatgcccggccatgttaaaaataccccktgtgatgctaagtacaggctcaggactctcacaggaggcctatttatgatgccaatcatatgcgctccagaaagacgccctgttactccagcaggattct

SEQ ID NO: 167077 - DNA, 201 bp, Homo sapiens
atgccaatcatatgcgctccagaaagacgccctgttactccagcaggattctgttactataacaggatgccccattattccaaccagcaccttgctatccyatttagaagccctttgagttcaacaggtctccatggtgctgtggtcttataattatgacgccctggctttctttttttgggacggagtttcactcttgtt

SEQ ID NO: 167078 - DNA, 201 bp, Homo sapiens
agagactttgcgacgcacagaccctgagacccagagacctaagtggatggggcggccccgccacctgccccagccggcgcttggcagcccctctgaaggcytcttcctggaatcccatctcctagggcactggctttcaaagtccgcggcctgttggactgcaaacattcgtggaagaggctgaaggacattaggaaaatt

SEQ ID NO: 167079 - DNA, 201 bp, Homo sapiens
tccccaggatcccttcctcaatgttcccactctctagaagctgagaccccagccatccccacctgggccttgcttatggtggccttggttccattgctgaccccccacaggagcagcagggggtggtgtgtggcatcgaccgcagggagtgaggctgcttgttctgtctggcccttggcggtgggcagggcaagccacagg

SEQ ID NO: 167080 - DNA, 201 bp, Homo sapiens
gttactccagcaggattctgttactataacaggatgccccattattccaaccagcaccttgctatcctatttagaagccctttgagttcaacaggtctccrtggtgctgtggtcttataattatgacgccctggctttctttttttgggacggagtttcactcttgttgcccaggctggagtgcaatggcacgatctcggc

SEQ ID NO: 167081 - DNA, 201 bp, Homo sapiens
gcaggattctgttactataacaggatgccccattattccaaccagcaccttgctatcctatttagaagccctttgagttcaacaggtctccatggtgctgyggtcttataattatgacgccctggctttctttttttgggacggagtttcactcttgttgcccaggctggagtgcaatggcacgatctcggctcactgcaa

SEQ ID NO: 167082 - DNA, 201 bp, Homo sapiens
gtgatgctggtggccaggcaggaatggggttgggtggggccgctgccacgcaacaggacagggagacttgagtcacccatagggccctcaaaggagtgagkcttccgccctggggatgaaaacgagctaggtctctgggttgcacaactccagggagcactgttcatccagaatacaacatgagctgaggcaggtggagga

SEQ ID NO: 167083 - DNA, 201 bp, Homo sapiens
ctggtggccaggcaggaatggggttgggtggggccgctgccacgcaacaggacagggagacttgagtcacccatagggccctcaaaggagtgagtcttccrccctggggatgaaaacgagctaggtctctgggttgcacaactccagggagcactgttcatccagaatacaacatgagctgaggcaggtggaggagggaga

SEQ ID NO: 167084 - DNA, 201 bp, Homo sapiens
gctccggcggagaccccggccctcctcccggcctccctcgcgggcatccccgtctctccccacctccggcgcccgcgccagtcccaggcaagcccgcaccycgcgtccctgtccccgtcccacccctgcccctagtcgccagcgccctgtgcacctgcggcgcgggtcacgggcttcccgtgtgggtgcctacttgccacc

SEQ ID NO: 167085 - DNA, 201 bp, Homo sapiens
agacagccccagaggttggaatggccaggaaggcagagggagctgaaacgcagacccagaaaacctgagacatgatcccagagacctagagatgcaaagaycttgagacatgggacccagagactttgcgacgcacagaccctgagacccagagacctaagtggatggggcggccccgccacctgccccagccggcgcttg

SEQ ID NO: 167086 - DNA, 201 bp, Homo sapiens
accacaccctgccccctcccgcaacttccctagggccctggctcaggctggactggctcccccaccctgaaggcgccttcatccacggcatcttctatccrccctttcagaggcaggcccagtgccctgcctgctcttcctccccaccagctcccagaaggcttggagcccagacacctgctcactcaccaccagctgggc

SEQ ID NO: 167087 - DNA, 201 bp, Homo sapiens
gagagccataagcagctgctgaaccactttgggagagactttgcaactggggcggtaagagtgtgtgtgtgtgtgtgtgtgtgtgtgtgtctgtgtgtgtstgtgtgtgtgtctgtgtgtgtctgtgtgtgtctgtgtgtctttgtggccccgggaggggtgaaggtgcgcagggggagccaggtgagctgagcttggcga

SEQ ID NO: 167088 - DNA, 201 bp, Homo sapiens
tcccagagtgagcagatctgacgttacagaaatggggagctgagctcctttgggggccacttcagccctctctcttcatcctccttgctctccccacagcycctcatcccccatacccgatacaccgtccagatcaacagcattggccgggccgttctcctcaatgagggggggctctctgccaaggtaagacttctgccc

SEQ ID NO: 167089 - DNA, 201 bp, Homo sapiens
caaccagcaccttgctatcctatttagaagccctttgagttcaacaggtctccatggtgctgtggtcttataattatgacgccctggctttctttttttgrgacggagtttcactcttgttgcccaggctggagtgcaatggcacgatctcggctcactgcaacctccacctcccaggttcaagcgattctcctgcctcag

SEQ ID NO: 167090 - DNA, 201 bp, Homo sapiens
ggcttttcccccgccggtcaggcttccctaggtgcttgcgaaccgtgcctgagctgatccgatatgtcactatagtcatctacacctgctctgccaagcamgctgctgtcaacacaggccaggtaccggtggtctcaccaacccaggcccagcccgaggctcagaccttctaaatttcgtccatgccccaacctcaaaccc

SEQ ID NO: 167091 - DNA, 201 bp, Homo sapiens; identical to SEQ ID NO: 30498

SEQ ID NO: 167092 - DNA, 201 bp, Homo sapiens
gtctgtgtgtctttgtggccccgggaggggtgaaggtgcgcagggggagccaggtgagctgagcttggcgaggagaggctggagagctgaggcacagctcygaaggcagtgggctccccagtggctctacacgccttgtccagagctggcttccagcccctcgcccatgtcccagatctctgggccatccttctccatcct

SEQ ID NO: 167093 - DNA, 201 bp, Homo sapiens
cccagagttctggtctccacactatttattgagtacagtcacttagatctaagaagcagatgttcagggtgaaacactgaaagggaggcagtgcgtcacaggcgtaatctatagcaatagcggtttaaacgaatctcctttgtgctcaaacagcacatctttaacttatcggagagcagctagtgggaacaggcttaacta

SEQ ID NO: 167094 - DNA, 201 bp, Homo sapiens
gatgagggtacggatgcggcagcttgaagcttttgcaaaacggtgagagcggggcatggtggcgccctctgccgggcagccagtaccagggcacgactgaygtcgcctgggcttttcccccgccggtcaggcttccctaggtgcttgcgaaccgtgcctgagctgatccgatatgtcactatagtcatctacacctgctct

SEQ ID NO: 167095 - DNA, 201 bp, Homo sapiens
tgaacacagtgtttatagataagacagcaggttaacgctcagagcatgggaccataatggcgataagaacgctttcctcctcagaggccttttgtgacttwccacagcttactgtcacatatttttatggccagtttatacaggcaccccacaagcccttttcccaatacctgggacctagtaagtgctaaacaactgtca

SEQ ID NO: 167096 - DNA, 201 bp, Homo sapiens
ctaagccttggttccctcatctgtaaaatggagataacaacagaacctacttcatagggtggatgtgagaatccaataagatgacatctgaacggagttgttttttttttgttttgtttttgttttttcttttgagacagagtctcgcttcgtcacccaggctggagtgcagtggcatgatctcagctcattgtaacctct

SEQ ID NO: 167097 - DNA, 201 bp, Homo sapiens
cgtggggtccaggacctgcctggatattactaccgcgatgacagcttggcggtgtggaatgcactggagaagtgagctcaggacagcagtgggtggctctyagggtggacaacctgggatgttggagagggtgtggggagcttctagagaactgagtgtgggtctggtgtcatccaggggcttggccttggggaaggggcc

SEQ ID NO: 167098 - DNA, 201 bp, Homo sapiens
ggtctgctagggccctcctgggctggatcagaacatattttattgtagactgaaggagaccaaattgctgccctaggattttgacaggctcttctctggcycctggagcagtggcatctcagagaggttggggaagaaaacatggctggcaatgggtccctgtctgagattaggggctgtgggtcatctctgcagagacct

SEQ ID NO: 167099 - DNA, 201 bp, Homo sapiens
gtacttccctaaagtaagttgtggggaagcccagggaaggcgcctaacccactttgggaaggggtagtggagagaagacagggcaggagcagcaagctaasatctagctgaaatctaacttcttggctaacatctagctaagatctgcaggatggagaggttagcctcgagatgactgaggatggggacggagagttccgc

SEQ ID NO: 167100 - DNA, 201 bp, Homo sapiens; identical to SEQ ID NO: 30496

SEQ ID NO: 167101 - DNA, 201 bp, Homo sapiens
agccataagcagctgctgaaccactttgggagagactttgcaactggggcggtaagagtgtgtgtgtgtgtgtgtgtgtgtgtgtgtctgtgtgtgtgtgsgtgtgtgtctgtgtgtgtctgtgtgtgtctgtgtgtctttgtggccccgggaggggtgaaggtgcgcagggggagccaggtgagctgagcttggcgagga

SEQ ID NO: 167102 - DNA, 201 bp, Homo sapiens
agctgctgaaccactttgggagagactttgcaactggggcggtaagagtgtgtgtgtgtgtgtgtgtgtgtgtgtgtctgtgtgtgtgtgtgtgtgtgtcsgtgtgtgtctgtgtgtgtctgtgtgtctttgtggccccgggaggggtgaaggtgcgcagggggagccaggtgagctgagcttggcgaggagaggctggag

SEQ ID NO: 167103 - DNA, 201 bp, Homo sapiens
gcgctctcaccgcgattccgttctctgcggccgcggggttcaggtaggagtagggcagcgccaggccccggctccactccaggacgtccgccgagatctgrgccaggcggctctgccgcggggccttctcggtgaagtgctcctctgggtaggtgtccaggaggggagaccgaaaggctgggaccttggccggctgcattt

SEQ ID NO: 167104 - DNA, 201 bp, Homo sapiens
agctcagcttggggctgcacattggaggaagagaggtgcctgaggcccagcagctaccctcagcatccccatctggcagcagacagcattcccagagtgcrctccccgctacatctccagtcctccctgactcctataagatgcccggccatgttaaaaataccccttgtgatgctaagtacaggctcaggactctcacag

SEQ ID NO: 167105 - DNA, 201 bp, Homo sapiens
cacattcccagttaccgccctccggtgcggaggcatcgcaaccccaaccggcctgagtaaggacccgaagctgtgctgggccccgcccatggttttcccckgggcgcctgcctcctccccgccccctggatcccagttgccctgcgcttctccccacaggtggaatggctatattccgggattcccaattctcatcaactt

SEQ ID NO: 167106 - DNA, 201 bp, Homo sapiens
ggctgcacattggaggaagagaggtgcctgaggcccagcagctaccctcagcatccccatctggcagcagacagcattcccagagtgcgctccccgctacmtctccagtcctccctgactcctataagatgcccggccatgttaaaaataccccttgtgatgctaagtacaggctcaggactctcacaggaggcctattta

SEQ ID NO: 167107 - DNA, 201 bp, Homo sapiens
ttctcatcaactttaaggccaccaagttcctgaacttaaatctccgctactccttcctcaagacggcctccttcttcgtccgcctggggcccatgtgagtscgtgtgagtgacgggagaacgagggctcctgcaagaactttccctctcccccaaccttggcggcctccaagacagccccagaggttggaatggccaggaa

SEQ ID NO: 167108 - DNA, 201 bp, Homo sapiens
ggatgggggaggataactagcggcgtcaagaggggagcagggagtgagaggccactgaaaccaaagggtggaggggccagggccaccggcaggaggagggrgtgctggccggccctggtcccagctgtcgagctctctgcccgcagcggcccctgggacacttcccggacattcacttcgtggaggaggccccgcggagga

SEQ ID NO: 167109 - DNA, 201 bp, Homo sapiens
ctgttactccaaaaggccccccttaatccagtaaggatctatctaataggggccctgttattcagatagactgtcagggtttctccaaggttaaggctggmcaaggctgcccagtgggttttccacttgcttggttactcccatgggagagacataggaccggagtggctgagctccttgcacccacccctgccagagccc

SEQ ID NO: 167110 - DNA, 201 bp, Homo sapiens
agggcccgaagccccatcctccctgcagctgactacctctcttccgtttctcattgccctgtgctggaatcttcccccaggattggggaacagggcctgarctggggaaaggagaggcgaggaaagcctgggagatggtgagcatgccaaggggagggtctcactggggacacagagcatcttcctgcagtgacaggtctg

SEQ ID NO: 167111 - DNA, 201 bp, Homo sapiens
ctgtcgtctccggtatggaatggggcgtcccggatcgagcagggggagccaggcggtctccggcgtgctaggcaggcccccgacttcggggcagtgggackggagaggcagcgaggcgcgcgcgcgccctctggcggcttcttggaaaatgtcgcaccgggctcctccggccgctcagcgccaggctgggggcctcgtttt

SEQ ID NO: 167112 - DNA, 201 bp, Homo sapiens
gttgggtggggccgctgccacgcaacaggacagggagacttgagtcacccatagggccctcaaaggagtgagtcttccgccctggggatgaaaacgagctrggtctctgggttgcacaactccagggagcactgttcatccagaatacaacatgagctgaggcaggtggaggagggagagggtggtgaggtaagggacttg

SEQ ID NO: 167113 - DNA, 201 bp, Homo sapiens
tgtggatggcccctagttagcaaccccagtgagtgtgaatccttcccagaaacctctcctcctcactggctcccgcccctggtccaggagaaccagttctkcagcccaatgagcacctatcaagagtcacgcgtctacgttttggtcatagctggggagtgccccatctacatcctcatgcctgatcccgtccctgtccct

SEQ ID NO: 167114 - DNA, 201 bp, Homo sapiens
gtttaaacgaatctcctttgtgctcaaacagcacatctttaacttatcggagagcagctagtgggaacaggcttaactaggagcctgcgcgtctgtccacmttccaggtttcaaaggagtgtctttctccttgaacacagtgtttatagataagacagcaggttaacgctcagagcatgggaccataatggcgataagaac

SEQ ID NO: 167115 - DNA, 201 bp, Homo sapiens
gcctgcgcgtctgtccacattccaggtttcaaaggagtgtctttctccttgaacacagtgtttatagataagacagcaggttaacgctcagagcatgggamcataatggcgataagaacgctttcctcctcagaggccttttgtgacttaccacagcttactgtcacatatttttatggccagtttatacaggcaccccac

SEQ ID NO: 167116 - DNA, 201 bp, Homo sapiens
gacacaaggagagagccataagcagctgctgaaccactttgggagagactttgcaactggggcggtaagagtgtgtgtgtgtgtgtgtgtgtgtgtgtgtstgtgtgtgtgtgtgtgtgtgtctgtgtgtgtctgtgtgtgtctgtgtgtctttgtggccccgggaggggtgaaggtgcgcagggggagccaggtgagctg

SEQ ID NO: 167117 - DNA, 201 bp, Homo sapiens
cctgggtgagctcatcatcatccgcctgcacaaagagcggtacgccttcttccccaaggacccttggtactgcaactatgtgcagatctgtgcccccaacrgccgtatctaccacttccccgcctaccagtggatggatggctacgagaccctggcactccgggaggccacaggtaagccctcatcaccctgctccatcct

SEQ ID NO: 167118 - DNA, 201 bp, Homo sapiens
ccccaggggtctgaagggttcctgcaacctcaggtgcctggagaggggagtgggagaagacaggagctggggatggagagaaggaggggctggagtcctayatagccctgggtagaggaatccagtaggagacccccaagctggagaagtcagaaggaagctcaatgatcaggtcaatatcctgtccctccgtcagtccag

SEQ ID NO: 167119 - DNA, 201 bp, Homo sapiens
ggctcccgcccctggtccaggagaaccagttcttcagcccaatgagcacctatcaagagtcacgcgtctacgttttggtcatagctggggagtgccccatytacatcctcatgcctgatcccgtccctgtccctgccccagccacattgacatcctcagcatccctgcctccatctctgtctccctcaggaacctaattcc

SEQ ID NO: 167120 - DNA, 201 bp, Homo sapiens
cacaaggagagagccataagcagctgctgaaccactttgggagagactttgcaactggggcggtaagagtgtgtgtgtgtgtgtgtgtgtgtgtgtgtctstgtgtgtgtgtgtgtgtgtctgtgtgtgtctgtgtgtgtctgtgtgtctttgtggccccgggaggggtgaaggtgcgcagggggagccaggtgagctgag

SEQ ID NO: 167121 - DNA, 201 bp, Homo sapiens
gggagaagacaggagctggggatggagagaaggaggggctggagtcctacatagccctgggtagaggaatccagtaggagacccccaagctggagaagtcrgaaggaagctcaatgatcaggtcaatatcctgtccctccgtcagtccagggaggtgagcattgcgcagcatgagcagggcctaggtgaggggccagaggg

SEQ ID NO: 167122 - DNA, 201 bp, Homo sapiens
acaaggagagagccataagcagctgctgaaccactttgggagagactttgcaactggggcggtaagagtgtgtgtgtgtgtgtgtgtgtgtgtgtgtctgygtgtgtgtgtgtgtgtgtctgtgtgtgtctgtgtgtgtctgtgtgtctttgtggccccgggaggggtgaaggtgcgcagggggagccaggtgagctgagc

SEQ ID NO: 167123 - DNA, 201 bp, Homo sapiens
ctattctttattcttactatttccaatttcatctctgtttgatgaagtccatatttacatttagtgagagtattggacaggtatcacttaattcttacctygggtttttttgttgttgttacaaatcttcttttttcttccctctgaaaggtgcctttgttgtctctttctctttagaggttgtctttttcttttaatttt

SEQ ID NO: 167124 - DNA, 201 bp, Homo sapiens
tgtcttctgaccaggatcttataatatccgaatgtgcagtaggactgatacaattttcaaaggtttgtttcccttcaaacatactgtagctttaagaggaytggatgatagtgaaactgtcctaaattatatcagattttgtttcgcatcactgcttaagcagacatgagaaaataatagcatactggggaagagaaaatt

SEQ ID NO: 167125 - DNA, 201 bp, Homo sapiens
tttcagtttctttgaatgatttcacctgtccttttttcctgctcacctcttaagtagctgcttcttaacctgtctttattcttactattctttattcttastatttccaatttcatctctgtttgatgaagtccatatttacatttagtgagagtattggacaggtatcacttaattcttacctcgggtttttttgttgtt

SEQ ID NO: 167126 - DNA, 201 bp, Homo sapiens
aaaaaaaaaaagaaagaaagaaagaaatgaaaatatttgcatattcttcagcattgttggctcactgttgactggttctacagacatagactggttgggawatatttcagacgttgctctggcctgcagaatagggtcctagatttttgttcctattcggttgatgtaacatttggcaagttaccctgtcttctgaccagg

SEQ ID NO: 167127 - DNA, 201 bp, Homo sapiens
agtagcttttctctgcagcttgagaggagatggcttcaagcttggcctccacaatgatacttaacctttctacttttgtattttcagtttctttgaatgakttcacctgtccttttttcctgctcacctcttaagtagctgcttcttaacctgtctttattcttactattctttattcttactatttccaatttcatctct

SEQ ID NO: 167128 - DNA, 201 bp, Homo sapiens
aggcaggagaatcgcttgaacccaggaggtggaggttgcagtgagtcgagattgtgccattgcactccagcctgggtgacagagcaagactctatttcccmaaaaaaaaaaagaaagaaagaaagaaatgaaaatatttgcatattcttcagcattgttggctcactgttgactggttctacagacatagactggttggga

SEQ ID NO: 167129 - DNA, 201 bp, Homo sapiens
tgtttttgtttttaaattgtataattgatctttgaaatttttattttatctatgtattattgaagtacatagtactttatatatattataaataataccayatgtatatagtagaaagtaatgttttcaacatttacaattttttgcacatccaatttttgtttgtttgttttagagacagtgtctcactatgttgtccag

SEQ ID NO: 167130 - DNA, 201 bp, Homo sapiens
tttgaggttgtcagagcaaactctcaccaaattcaacaaacaaggatattgttccagttttccaatgaataagcacttaaaaatctaaatgatcccaccaytttgggaggtcgaggtgggcagatcacttgaggtcaggagttagaaaccagcctgaccaacatggtgaaattccatctctactaaaaatacaaaaattag

SEQ ID NO: 167131 - DNA, 201 bp, Homo sapiens
accattgtaatctaccacctggccttttattattacttttcagtagcattgtggtttttttcttcaagggctattttttacactggcatttcgtaaacatytttgtgacaattttttagacttccgtgtttagcttatttgatgatgcaactctgcagtctctaatctcttcattattcagttctttaaaaagcatgtaca

SEQ ID NO: 167132 - DNA, 201 bp, Homo sapiens
ctctttataacatgcctttgtgcatgtgtccatcccgctgcttgaaatgcctattttcttctttcctactcattcaactcctgttcatcttcagagtcaaytcaaatgcagtttccttcatgacttcaccttcctcagttcccccagtggttggatccatcacaccctcttctgcattgcatgccactttgtttgcaactc

SEQ ID NO: 167133 - DNA, 201 bp, Homo sapiens
taacagttaatattagttgaatactcatatgtgccaggctccaggctgattggtattcattgttttacacaacagtgttccagatttgtattccttgtttyacataattgttacaatttccccatgaggtaggtattattattagcctttgtacaagggcatagctgagattcagacaggcattgtaacttactgaaggcc

SEQ ID NO: 167134 - DNA, 201 bp, Homo sapiens
tatacatagagtgtttgtgacagctgtttatgttggatcccgtatttcccagctttatctccccgcttcatcccccacccccaccactgcacacgtccacmtggttccatgcattacccatgctcccacatcctgctctttataacatgcctttgtgcatgtgtccatcccgctgcttgaaatgcctattttcttctttcc

SEQ ID NO: 167135 - DNA, 201 bp, Homo sapiens; identical to SEQ ID NO: 30503

SEQ ID NO: 167136 - DNA, 201 bp, Homo sapiens
aaatgtgtatttacacattgcccctcagtctcctcagttgccttagggatagcctgtgcttccatcctgtacctggaatgtgaagaagaaagtgctgttcrctgaatttggtaggaacatgttcatttccatttctagagttttctaaggggaaggatactttaaagataatcaattgcctaagaccttaataataaataa

SEQ ID NO: 167137 - DNA, 201 bp, Homo sapiens
cttctcttgaataagtagtcagcaataggaatattaactgccattttctttcctcaaaacatgggcctagagatgaattttacatgatagattggtgttaygatatgattgatttaactgtaccatgggacaagtaattcattctctccttaacaaatagcaggtgctattttttcaaggaaaccacctacatagaagtaa

SEQ ID NO: 167138 - DNA, 201 bp, Homo sapiens; identical to SEQ ID NO: 30501

SEQ ID NO: 167139 - DNA, 201 bp, Homo sapiens
taatatgttgcttggattaacagcagttttaccaatggtaaaattagaatgagagaaaggtgaagtggagggcagtgttaaagcattttattttttattttacttacttatttatttttttgagacagggtctcactctgtagcccaggctggagtgcagtggcacgatcacagctcactgcagccttgacctcccaggct

SEQ ID NO: 167140 - DNA, 201 bp, Homo sapiens
ttgtattgcatctattcaaaggaatgaaaagggggcatttcttcttctgagatcaagcccctggtctttctccttttcctaatggtaggtatatgcccacmccaacccgtgtgtatgtgtgtgtgtgtgtgtgtgtgtgtgtgtgtagttacataaattgattgattgctgttgtggtttcaaatatttgtagcactagaa

SEQ ID NO: 167141 - DNA, 201 bp, Homo sapiens
aatatgttgcttggattaacagcagttttaccaatggtaaaattagaatgagagaaaggtgaagtggagggcagtgttaaagcattttattttttattttacttacttatttatttttttgagacagggtctcactctgtagcccaggctggagtgcagtggcacgatcacagctcactgcagccttgacctcccaggctc

SEQ ID NO: 167142 - DNA, 201 bp, Homo sapiens
ggcgtttgtcaggattagagatgatgtatgtgaactaccttgttgatattattgttgtgattgtcatttgacccataacttcttgtcaccatcttttctgratatcctttgtagacatcatttatacctcaaatgattagtgataatgatccttgcaatttcctcttaacttattcaaagctaaaaataagaactatattt

SEQ ID NO: 167143 - DNA, 201 bp, Homo sapiens
atatgttgcttggattaacagcagttttaccaatggtaaaattagaatgagagaaaggtgaagtggagggcagtgttaaagcattttattttttattttacttacttatttatttttttgagacagggtctcactctgtagcccaggctggagtgcagtggcacgatcacagctcactgcagccttgacctcccaggctca

SEQ ID NO: 167144 - DNA, 201 bp, Homo sapiens
taccctttaaaaaaatcatgcttttcttggagcattatgggatattggtccatttattttttataagcatagtaaaatctttattcaagtacaacataaayagaaaaaaggacacaaatcatgggacacagctcaagaaattttcacaaagtggatacgcttctgtagccagcacccgggtcatgaattgggacttttcct

SEQ ID NO: 167145 - DNA, 201 bp, Homo sapiens
cacgatcacagctcactgcagccttgacctcccaggctcaagtgatcctccttcctcagcctctggagtagctgggactacaggtgcaagccaccatgccragctaatttttgtattttttgtagagatggggattcactatgttgcccaagcttgtctcgaactcctgggtgatctgcctgccttggcctcccaaggtgc

SEQ ID NO: 167146 - DNA, 201 bp, Homo sapiens
gggtagaaaacagaggacaacttagcatgtgtatcgtggttcctgcttgaccataacacttcctgcaccacagacagcagctctaacaaccctaggccccragacccttacccagggtgacagatcagatccagaatggaattccctagcacggtagagtggcatgatgtttgagccagataggaaaattgccaagcagtt

SEQ ID NO: 167147 - DNA, 201 bp, Homo sapiens
ggtttcaccatgttggccaggctggtctcgaactcctgacctcgtgatccgcctgactcggcctcccaaagtgctgggattacaggcatgagccaccatgmccggcctcaccttgctttctttttattttttatctatttattttattttcttttattttatttcttttttgagacaaagtctcgctctgtcgcctaggct

SEQ ID NO: 167148 - DNA, 201 bp, Homo sapiens
caccatgttggccaggctggtctcgaactcctgacctcgtgatccgcctgactcggcctcccaaagtgctgggattacaggcatgagccaccatgcccggyctcaccttgctttctttttattttttatctatttattttattttcttttattttatttcttttttgagacaaagtctcgctctgtcgcctaggctggagt

SEQ ID NO: 167149 - DNA, 201 bp, Homo sapiens
actgattttttgtatttttagtagagacggggtttcaccatgttagccagggtggtctgccctgtcctgacctcgtgatctgcccgccccggcctcccaargtgctgggattacagatgtgagccaccgcgcccggccggctttgccttgctttctaattctccccaaatctagggagattgaagtccttctggtgtagcc

SEQ ID NO: 167150 - DNA, 201 bp, Homo sapiens
tcaccatgttagccagggtggtctgccctgtcctgacctcgtgatctgcccgccccggcctcccaaagtgctgggattacagatgtgagccaccgcgcccrgccggctttgccttgctttctaattctccccaaatctagggagattgaagtccttctggtgtagcccctcatcacatcacatactgttttcgggaaggta

SEQ ID NO: 167151 - DNA, 201 bp, Homo sapiens
ccgccccggcctcccaaagtgctgggattacagatgtgagccaccgcgcccggccggctttgccttgctttctaattctccccaaatctagggagattgawgtccttctggtgtagcccctcatcacatcacatactgttttcgggaaggtattatatctgtgcaacatggccctaggtgtcatcctttaacttgattcct

SEQ ID NO: 167152 - DNA, 201 bp, Homo sapiens
gggtggatcacgaggtcaggagttcgagaccagtctggccaacatagtgaaaccctgtctctactaaaaatacacaaaaaattagcagggtgtggtggtgygtgcctgtaatctcagctactcaggaggctgaggcaggagaatcatgtgaacctgggaggcggaggttgcggtgagccaagatcgtgccactgcactcca

SEQ ID NO: 167153 - DNA, 201 bp, Homo sapiens
ctgtgacttgtgctgactgtggccatggggaggataaagcagagaaaggccatgattcaggactatcggcttttggggtggtggcaggctcccccaagtctttacaaagggaggtaactttgagaagcatcaatctattttgtttcataaccaaacagattgttagattgtctatatatgatttttaaaagttagtgtgac

SEQ ID NO: 167154 - DNA, 201 bp, Homo sapiens
ctctacacttcagtcatttggagagtgggaataataatgccaccttgcttggcgtttgtcaggattagagatgatgtatgtgaactaccttgttgatattrttgttgtgattgtcatttgacccataacttcttgtcaccatcttttctggatatcctttgtagacatcatttatacctcaaatgattagtgataatgatc

SEQ ID NO: 167155 - DNA, 201 bp, Homo sapiens
ttttttttttttttttttttttttttttggagacgagtgtccctctgttgcccaggctggagtatagtggcgctgtctcggctcactgcaacctccacctytcgggttcaagcgattctcctgcctcagcctcgcgagtagctggcattacaggcatgtgccaccatacctggctaatttttgtatttttagtagagatgg

SEQ ID NO: 167156 - DNA, 201 bp, Homo sapiens
cacgctgtaataaaatttgttttcctccatgttaaatatcctgagtatgatgattgtattatgattacttaggagaatgtttttgtttgtaggtaatacaygtggaagtatttgaggtgagatgtcatgatgtttaactctgttacagttcagaaagaatatatagagttacacacacacagagaagcaaaggtggcagga

SEQ ID NO: 167157 - DNA, 201 bp, Homo sapiens
tgcccacctctcccataggctacatggtgtcaggatctgtgctttgctgtacagtattgctggaacttaagtttgaattttaccaaccttccttctgtaarcttcaggaatgtcactttaatttcccacactttgcttcccctgtcttttacaagaagaaaacattttaataagttttcctgaggtactaagtacttcagt

SEQ ID NO: 167158 - DNA, 201 bp, Homo sapiens
tgatttccatcaatgtagaaaaacaggacttagagctcataaattctctgcctggccagggttggggatgggagttctattgtagagcctgggggaagggcctgaagcttgagggtggaggatgttaaaggacttccatcaggatactgtttcttcagtttttgaatctgtctttcacggtggacatttttatagggccat

SEQ ID NO: 167159 - DNA, 201 bp, Homo sapiens
actgagcgattgagttgcttatacttgtattgactgtgacttgtgctgactgtggccatggggaggataaagcagagaaaggccatgattcaggactatcrgcttttggggtggtggcaggctcccccaagtctttacaaagggaggtaactttgagaagcatcaatctattttgtttcataaccaaacagattgttagat

SEQ ID NO: 167160 - DNA, 201 bp, Homo sapiens
gtaatcccagctacttgagagattgaggcataagaatcatttgaactcgggaggtggaagttgcagtgagctgcgatcgcaccactgcactcgagcctggrtgacagagtgagactctgtctcttaaaaaaaaaaaaaaaaaaaaggaaagaagtccaaatttctaagcacaggggacattccacatctgtgggttctaca

SEQ ID NO: 167161 - DNA, 201 bp, Homo sapiens
gagtcaatactgtaaaactactgggtggaagaaagaaaatgcctgcctcgtattcatttgtcacactgaaaaaatgaaaagccacatacagaaaactgagmgattgagttgcttatacttgtattgactgtgacttgtgctgactgtggccatggggaggataaagcagagaaaggccatgattcaggactatcggctttt

SEQ ID NO: 167162 - DNA, 201 bp, Homo sapiens
ctcaaagaggtctcaggggaagagaggaagggcttgagtcaatactgtaaaactactgggtggaagaaagaaaatgcctgcctcgtattcatttgtcacaytgaaaaaatgaaaagccacatacagaaaactgagcgattgagttgcttatacttgtattgactgtgacttgtgctgactgtggccatggggaggataaag

SEQ ID NO: 167163 - DNA, 201 bp, Homo sapiens
tattccctaaatgcttgattaaattaagaagtttaagctcatgcaatacatggattctcttgagttcagatgacactgaatcgacctcaggaatagttgcytgacccaatcaaatggaaacactcaatagcatctgattctgtttatcaggatgtgaaagtcactgggttcatttctagccagagaagagggatcaggatc

SEQ ID NO: 167164 - DNA, 201 bp, Homo sapiens
gggtggggaaggagaatgaacattttttcccattcaagtttataacattcaaggaggtctttcctgtctgaaacacttttaaaggggacaaaacctatttygtttttctcactcagatatcgggatgtgggtaggatcagcaccccacccaaactccaccattatagctgccatttgaaaactcctgttctgatgaaaggg

SEQ ID NO: 167165 - DNA, 201 bp, Homo sapiens; identical to SEQ ID NO: 30511

SEQ ID NO: 167166 - DNA, 201 bp, Homo sapiens
aagtgtcagcctgtccttgaaactttgaagccaggtattaacttctctgtagctatgaaattcctacatggcatcttcttctatcttccacgttgtctacrtggaaaatctgttgtttggtgtagccaccttcatcaataattttatgtagatattctggataactttttgcaacttctgtgtcagtacctgctgcttcat

SEQ ID NO: 167167 - DNA, 201 bp, Homo sapiens
tcagactgattcgcttaatgtgtttggagtaagtataattaaatgtcaagggagatatatcatgaagtaatgaagctgaagccaatttatcaaaaataagrtctggagagagacatttcaaataataaacagttctctaaccttcctttttaaggtgatttgcttagtctgggccaagatttacatgttttttgagacttg

SEQ ID NO: 167168 - DNA, 201 bp, Homo sapiens
tacttagttcaagaaggaaacaacgagtcatttgagacagagattgaaatagcatggagaaggtccttctttgtctcctggtagcattgagtacgatttaygtcttccatatcctaagatcattggtttactttgcatctctgagtaacagctggaatctctcaaatgtggtgagaatattcatatatcaataattctaga

SEQ ID NO: 167169 - DNA, 201 bp, Homo sapiens
attcatcttttaagtgttcagcttctgaatcccatttgattccctgtcccctctctctttcctaccacctcctcttgatgtggccagaatagttaactcasacaattagtaaatgctgaatcattgagtcagtgaataaggcaagtgtctgtgtgaggtatacaacttcctgagtgggtttaatggaagcctaaagagatt

SEQ ID NO: 167170 - DNA, 201 bp, Homo sapiens
attaactcatttaatcatcacaaaactgtatgcaatgggtaatattattattctccgtttaatacacgaggaatctgaggtgcggggctcgttgtgcgacrtcaccatcagatgtctagcaagtggggggttgcgggggctggaattgcggcctggctccagcgtgtacttgacagtctctcctgggactgagctctctct

SEQ ID NO: 167171 - DNA, 201 bp, Homo sapiens
gctgctaattcaagcctggcctctgatcattcatcttttaagtgttcagcttctgaatcccatttgattccctgtcccctctctctttcctaccacctccycttgatgtggccagaatagttaactcacacaattagtaaatgctgaatcattgagtcagtgaataaggcaagtgtctgtgtgaggtatacaacttcctga

SEQ ID NO: 167172 - DNA, 201 bp, Homo sapiens
tgaactaagtccgtggcttctccccttaaagtacgctgtttcaagtcatctggctgattgtgcttgcaaagagccttgattttgagctctaactaccagcygctaattcaagcctggcctctgatcattcatcttttaagtgttcagcttctgaatcccatttgattccctgtcccctctctctttcctaccacctcctct

SEQ ID NO: 167173 - DNA, 201 bp, Homo sapiens
tagagacggggtttcatcttgttggccaggatggtctcgatctcctgacctcgtgattattggtattttactcgttatagatttttttgaattgatttcatttttttttttttttttttgagacagagtctcgctctgtcgcccaggctggagtgcagtgacgcgatctcggctcactgcaagcttcgcctcccgggttca

SEQ ID NO: 167174 - DNA, 201 bp, Homo sapiens
catctccttgttgctaggtgttcagctagctcctgaagcgctaggctttgtttctcagtttctaaaacccaggcttctttgaaatttgcttctgacccccracagccttaggaccctgtttcctaatttgaactcagcattctcctggtcagcccctggtcttcctggcaccattgctaactagaaccactctacctatgc

SEQ ID NO: 167175 - DNA, 201 bp, Homo sapiens
agagacggggtttcatcttgttggccaggatggtctcgatctcctgacctcgtgattattggtattttactcgttatagatttttttgaattgatttcatttttttttttttttttttgagacagagtctcgctctgtcgcccaggctggagtgcagtgacgcgatctcggctcactgcaagcttcgcctcccgggttcat

SEQ ID NO: 167176 - DNA, 201 bp, Homo sapiens
ttggcctcccaaagtgctgggattacaggcgtgagccactgcgccgggcctgatttgaatttttaaaaaatatcgcatcttgtttatctttatatctgttttgttgttgttgttgttgttgttgttgttgttttggtgttcgccttccattttgcacctaaagcaagtaagtaccgcatttgtcttatcctaatctcggtc

SEQ ID NO: 167177 - DNA, 201 bp, Homo sapiens
cgcacgaagaggatatagggtcaggggaggcaagggaaagaggaaaccgcagtttatgaaaggacatttaacctctttgcgagcgtgcatgcgcgcgcgcrcgcacacacacacacacacacacacacaaaagtacaaacaacattaaggaaatacacactacattaaaaattgggcatagggacttggaatcggagttga

SEQ ID NO: 167178 - DNA, 201 bp, Homo sapiens
tggcctcccaaagtgctgggattacaggcgtgagccactgcgccgggcctgatttgaatttttaaaaaatatcgcatcttgtttatctttatatctgttttgttgttgttgttgttgttgttgttgttgttttggtgttcgccttccattttgcacctaaagcaagtaagtaccgcatttgtcttatcctaatctcggtcc

SEQ ID NO: 167179 - DNA, 201 bp, Homo sapiens
gcaataacaactatgagcctttgtgggtagatgacattgtgtcccgaatttattccttccggtgggttcttggtcttgctgacttcaagaatgaagctgcrgactctcacagtgagtgttacagttcttaaagatggtgtgtccagagtttgttccttcggatgttcagatgcgtctgcagtttcttctttccagtgggtt

SEQ ID NO: 167180 - DNA, 201 bp, Homo sapiens
gacattgtgtcccgaatttattccttccggtgggttcttggtcttgctgacttcaagaatgaagctgcggactctcacagtgagtgttacagttcttaaasatggtgtgtccagagtttgttccttcggatgttcagatgcgtctgcagtttcttctttccagtgggttggtggtcttgctgatttcaggagtgaagccgc

SEQ ID NO: 167181 - DNA, 201 bp, Homo sapiens
tcctgaactccaggactccacataaaagtccttttctgctcattgggatcaggctgttaaataagcaaggtcttgtggcggaaaagggtcatctgctttcyctaattcaatatatacaattttaacttattcttttcctgcctcccatatccctaacaggacggctagttccttgagtttgtgttttgctcaattttttat

SEQ ID NO: 167182 - DNA, 201 bp, Homo sapiens
catctccacaaatgtaagtttagttttggcagatttgcaacaatgataaaaatatttttttgaatggaaccagtcgtagcatagttttttttttttttaayctcacagagctattaaattaaagccttgaattgaattgaatcaatggtcaattcatctttaaatttctggttttcatctcagatgttttccacaatattt

SEQ ID NO: 167183 - DNA, 201 bp, Homo sapiens
catgtcactgcactctggcctgggtgacagagtgagaccctgtctcaaatatataggcttaattttgatgtgataaatagctatcagaaggctacttatcyacacagaaaatagtcgtttcaaaagtctgtgatgtatttgtaaaatgtgtatatacttggccacaaactcatactctgtgagtgacaagtaataacaaag

SEQ ID NO: 167184 - DNA, 201 bp, Homo sapiens
atttagacttggttagtatatttaaataatcaggactactgtgctgtgtttaataacaccatacctgacgccaaacgtgtggttttttttttttttttttkctcacaccaaccaattctccaactctccagacaccaagtaggtgttcaacaactcaattcaattctgacactatctacctggagttagcatcctatccct

SEQ ID NO: 167185 - DNA, 201 bp, Homo sapiens
aagtaatgaaagtggcctaaatgtatcctgattccaaggagaaaagtttaatcaagggaaaacaacaacatcagcacacaaaaaccctgcaattatctagrtgacaaaaacaggttgcctcagaggaaaaaaaaaataatgctggcattagatgtcttccttgaaatattacatttcagaaagcattagcctaatattaca

SEQ ID NO: 167186 - DNA, 201 bp, Homo sapiens
tgggccgggtgcggtggctcacgcctataatcccagcactttgagaggccaaggcgggtagatcacctgaggtcgggagttcgagaccaggctgaccaacrtggagaaactcgtctctactaaaaatacaaaaaaaaatattagctgggcgtggtggcacatgcctgtaatcccagctactcgggaggctgaggcaggaga

SEQ ID NO: 167187 - DNA, 201 bp, Homo sapiens
ggatcagggatctactcttccaacctcacttaaccatttttttttttttttttggaaacagagtctcgctctgttgcccaggctggagggcagtggcgcartctctgctcactgcaacctccacctctcccgagttcaagtgattctcatgcctcagcctcccaagtagctgggactgcaggtgcacgccaccatgcccag

SEQ ID NO: 167188 - DNA, 201 bp, Homo sapiens
gaagtctctggaaatgggattctcagttcccagaatagtgcccagccagcagcaaagtatgtggcagcccccatagaaaaccaccactgtgggccgggtgyggtggctcacgcctataatcccagcactttgagaggccaaggcgggtagatcacctgaggtcgggagttcgagaccaggctgaccaacatggagaaactc

SEQ ID NO: 167189 - DNA, 201 bp, Homo sapiens
ctacaaaccaataggagtatatacatagagtgtttgtgacagctgtttatgttggatcccgtatttcccagctttatctccccgcttcatcccccaccccsaccactgcacacgtccacatggttccatgcattacccatgctcccacatcctgctctttataacatgcctttgtgcatgtgtccatcccgctgcttgaaa

SEQ ID NO: 167190 - DNA, 201 bp, Homo sapiens
gttttagctttaccactctggataaagctccacttctgtgttctatggttaccacaaacttatggccaaaactgaaaaggttatcttttgtacttgctttktgtgtgtgtgtgtgtgtgtgtgtgtgtctctctgtgtgtgtgtggtgtgtgtgtgtgtgtgattatgaagcttgacttgacttgaaacagctttggtatc

SEQ ID NO: 167191 - DNA, 201 bp, Homo sapiens; identical to SEQ ID NO: 30502

SEQ ID NO: 167192 - DNA, 201 bp, Homo sapiens
tagagatttctaagtgggagactataacccatctcttagtaatagcacagataaataataggctttctgagggtcaagatactctctcggtattgttaactttttttttttttaccataatccatgttatttatctgcatatacatacatacaaacagatgaatatgaaatacatgttcacgaaacaattacttctcttat

SEQ ID NO: 167193 - DNA, 201 bp, Homo sapiens
gacattaacgccatttatagaaacaaagacttgagttatctcagctactactaagtagagcaagcaggatttggactgtccacatcatgcattcatcctaycacattctcctacctacctagtcaaggggaagaaaacttgcaggttatggtttcataacaagactctaatgcctgtgattgcttcgggatctatggaatt

SEQ ID NO: 167194 - DNA, 201 bp, Homo sapiens
atatacatacatacaaacagatgaatatgaaatacatgttcacgaaacaattacttctcttatgctatgctgtctgatattttttatctgatcctattttrctgtattccactttttaaattaaatgttggtggcaattttctaaagcagtggttttcatcagaggacagttttgcccccaggagacatttggccacgtct

SEQ ID NO: 167195 - DNA, 201 bp, Homo sapiens
tggagggaagggaggttgctactggcatctatctattcagtccagagatgctgcctaaattttacaatgcatagaacagcccccaaacaaagaattatccwtcctggaacgtcagtcgtgttggggttgagaaactcctatctaaagagttgtatccacagatgtaaacacacttccctcaatcctagggttaccaagaag

SEQ ID NO: 167196 - DNA, 201 bp, Homo sapiens
ccccaaacaaagaattatccatcctggaacgtcagtcgtgttggggttgagaaactcctatctaaagagttgtatccacagatgtaaacacacttccctcratcctagggttaccaagaagagaggaacattgcctgtaacaatatgataaagttcttctaagaggaataattagagcaatttttgtctatatgaagaccc

SEQ ID NO: 167197 - DNA, 201 bp, Homo sapiens
attcacctttagagaaatatccctaaacatttcatagacgtaaaaaggacatggtaaggagagagatgaagagagacagaaaaaataaatctatccagcamcatttggttacccagaaaagcattttcctgtggagtctctgtgttttttaaaaacattattggcagggtgctgtggctcatggctgtaatcccagcactt

SEQ ID NO: 167198 - DNA, 201 bp, Homo sapiens
gccatttatagaaacaaagacttgagttatctcagctactactaagtagagcaagcaggatttggactgtccacatcatgcattcatcctaccacattctyctacctacctagtcaaggggaagaaaacttgcaggttatggtttcataacaagactctaatgcctgtgattgcttcgggatctatggaattgagacaaac

SEQ ID NO: 167199 - DNA, 201 bp, Homo sapiens
gtttaatggcaatcttttccgtttttgagtacttgttccaagcatcttaaatatgtatctgctttaattttctcagtaacactgtaagttagacattaacsccatttatagaaacaaagacttgagttatctcagctactactaagtagagcaagcaggatttggactgtccacatcatgcattcatcctaccacattctc

SEQ ID NO: 167200 - DNA, 201 bp, Homo sapiens
gctggagtgcagtggcacgatcttggctcactgcaacctctgcctcctgggttcaagtgattcttctacctgcacttcccaagtagctgggactacaggcrcccaccaccaagcccagctaattttttttttttttttttttgtatttttgtagagacggggatttcaccgtgttggccgggctggtcttgaactccagac

SEQ ID NO: 167201 - DNA, 201 bp, Homo sapiens
gctgggattacaggtgtgagccactgcaccctgccattatttatttttttgagacagggtgtcactctgttgcccaggctggatggcagtggcagcatcayggctcactgcagccttgatctccctgggctgcagcaatcctaccacctcattctcccaggatgctggaactacaggtgcatgccaccatgcccggctaac

SEQ ID NO: 167202 - DNA, 201 bp, Homo sapiens
gaaaaaaaaaagaggaggaacacttcctgtcatttgttcattggtcaaactgtttgccaggaaagtctttttttgtgtgtctgtttgcttaagtcaaggtrattttaaaataggaagaaaatttcacaccgttctcaggtgacatttaggaaagaaaaaagtatgagtctgtgtgttacattctattggcacagaaatgcc

SEQ ID NO: 167203 - DNA, 201 bp, Homo sapiens
agacgtggtttctccatgttagtcaggctggtcacgaactcccaacctcaggtgatctgcctgccttggcctcacaaaatgctgggattacaggtgtgagmcactgcaccctgccattatttatttttttgagacagggtgtcactctgttgcccaggctggatggcagtggcagcatcatggctcactgcagccttgatc

SEQ ID NO: 167204 - DNA, 201 bp, Homo sapiens
aaatgctggtaatgaggatgggaggatggtttcaaggtccgtggtatcaaatactacagaaaggatgaatacaggttttattatttgccttgtgagttaaraagtcgttggtgaccttgaagccaggtgggcttttgcggtgtgacagaagccacatggcatggggtgatgagtaaatggaaatgtgtcagaagacacagg

SEQ ID NO: 167205 - DNA, 201 bp, Homo sapiens
attctcttaataaagataaactgatcctctacctagcagagctcaggctatgattccaatgtgtttgatgctaggagtgcatgagtgattggctcacgacstgccctaggcagatggatggatggatggatgctctgaagcacaaagttgacaccatacagaagtctgcgtatgtgagctatcatagttgcagaggaggta

SEQ ID NO: 167206 - DNA, 201 bp, Homo sapiens
cctgccaaatagaaagtcagattgttgttcttagatgatataagattgctttatttctctagctgctttataaaaatacatatgcataaaatatgccacaygatgcagctggagtgaatgaagtccactctatttatccaagaaaagattgtattcctaacctgcctgtctgttagctcattctcttaataaagataaact

SEQ ID NO: 167207 - DNA, 201 bp, Homo sapiens
acttgaaagaaaattgaatggaaggatccaattactcatgtgaaaaatgaatcttctacccaaggtttggccactgctggtatgcttgttttaaaactgarttataggcgcaatacatttgccagagacacaggcattaatttctctcaaaccattcaagattgggaggacagaatagaagggagcagagagaaaataaga

SEQ ID NO: 167208 - DNA, 201 bp, Homo sapiens
gtataacttttcttattttaaccataaaagtatcgctaaacccaagcatattacttgacttataagttctgagaaatagaactctgtccagcagttgcaarattagtaactgtggttctctaggtcattttgggaaggttctggagtcaccagaaccttgctgatatttcagtttctcatcttaatgaaagaatctagtat

SEQ ID NO: 167209 - DNA, 201 bp, Homo sapiens
ctccgtcaactaaagctaaatgagtgactgtagctgatatcacatggagcagatgaatcacttagctgagccctttctaaatttcagaattatgagcaaayaaatgttttgtattgttgcaagcattaagtttaaggatgctttgttaaacagcagtacatgacagttagttggccaagagatttctgatagattttgttt

SEQ ID NO: 167210 - DNA, 201 bp, Homo sapiens
ggctcactgcagccttgatctccctgggctgcagcaatcctaccacctcattctcccaggatgctggaactacaggtgcatgccaccatgcccggctaacttttttttttttttttttttttttttttttggattttgtagagatgaagtttcaccatgttacccaggctggtctcaaactcctgggctcaagcaatccac

SEQ ID NO: 167211 - DNA, 201 bp, Homo sapiens
gctcactgcagccttgatctccctgggctgcagcaatcctaccacctcattctcccaggatgctggaactacaggtgcatgccaccatgcccggctaacttttttttttttttttttttttttttttttggattttgtagagatgaagtttcaccatgttacccaggctggtctcaaactcctgggctcaagcaatccacc

SEQ ID NO: 167212 - DNA, 201 bp, Homo sapiens
ctcactgcagccttgatctccctgggctgcagcaatcctaccacctcattctcccaggatgctggaactacaggtgcatgccaccatgcccggctaacttttttttttttttttttttttttttttttggattttgtagagatgaagtttcaccatgttacccaggctggtctcaaactcctgggctcaagcaatccacct

SEQ ID NO: 167213 - DNA, 201 bp, Homo sapiens
gtgacagagccaaagccagccacctaagatgaggcagaaacggcctcctctgaatccccctttgacgttgcccttgagaatgcttccttggggaagctgtmttgatcaacactggaatcgtattttgccctgccatgcctggtgcttaggttatcagtattgtggtcagccaagggaaaattaaagtgttcaagaaccggc

SEQ ID NO: 167214 - DNA, 201 bp, Homo sapiens
tcactgcagccttgatctccctgggctgcagcaatcctaccacctcattctcccaggatgctggaactacaggtgcatgccaccatgcccggctaacttttttttttttttttttttttttttttttggattttgtagagatgaagtttcaccatgttacccaggctggtctcaaactcctgggctcaagcaatccacctc

SEQ ID NO: 167215 - DNA, 201 bp, Homo sapiens
gcctcctctgaatccccctttgacgttgcccttgagaatgcttccttggggaagctgtattgatcaacactggaatcgtattttgccctgccatgcctggkgcttaggttatcagtattgtggtcagccaagggaaaattaaagtgttcaagaaccggccaggtgcggtggctcacgcctgtgatcccagcactttaggag

SEQ ID NO: 167216 - DNA, 201 bp, Homo sapiens
tcaaaggaatgaaaagggggcatttcttcttctgagatcaagcccctggtctttctccttttcctaatggtaggtatatgcccaccccaacccgtgtgtakgtgtgtgtgtgtgtgtgtgtgtgtgtgtgtagttacataaattgattgattgctgttgtggtttcaaatatttgtagcactagaactcattttttttcct

SEQ ID NO: 167217 - DNA, 201 bp, Homo sapiens
cctcatgaagccaatggctattctactggctgctcaaggcactggaggcagagtcagaggagggggcattgaaggcttgcagtggaggactgatttcacasaccccctctggttctgctgtggaaatctagttctcggtggcatacggatgcacactgggataggtggccgttgaggaatctagaggaccgatgatagagg

SEQ ID NO: 167218 - DNA, 201 bp, Homo sapiens
gaggagaatatatattttttaaccttgaggaaatgaaaattaatcacagaccaacccaataatatatatatatatatatatatatatatatatatatatatataaattaaagttgtatccaagttcaatatggcaataaaaatttttgctttaagtgtttccttccccccaattcccagtgacatggccaaagaaatagta

SEQ ID NO: 167219 - DNA, 201 bp, Homo sapiens
ggagaatatatattttttaaccttgaggaaatgaaaattaatcacagaccaacccaataatatatatatatatatatatatatatatatatatatatatataaattaaagttgtatccaagttcaatatggcaataaaaatttttgctttaagtgtttccttccccccaattcccagtgacatggccaaagaaatagtagc

SEQ ID NO: 167220 - DNA, 201 bp, Homo sapiens
tatggcaataaaaatttttgctttaagtgtttccttccccccaattcccagtgacatggccaaagaaatagtagcaagaaggaaaaagcactgtcagtaayggaaaaagaacaatcaccgtctacctactaaagagctcataaattctctaagatacaatgcagggaagtctggattgaggcgacagcaactgggaagttg

SEQ ID NO: 167221 - DNA, 201 bp, Homo sapiens
tgtggaaatctagttctcggtggcatacggatgcacactgggataggtggccgttgaggaatctagaggaccgatgatagaggcttgaactagagcagtgyggtatgcatgggaagtgagggaaatatttggtagatgtttcagaagtaggacttataacactgtgtggaatactagccatgcgaaaaggaggaggaaagg

SEQ ID NO: 167222 - DNA, 201 bp, Homo sapiens
attcttagctcgtttccttagggggaaatcttcctccaccaagtgatagtaacttggctgaaaaagagcatcgtttcttggtatgggtttcctaatgataktaaactccaagcttttagaaaatttgttctgcttaagcgatgagttgcaattgtgaacataaggtttcttattaaatatgtgcctctaatatgtaatcag

SEQ ID NO: 167223 - DNA, 201 bp, Homo sapiens
cccagtcgggaacttgatattcttagctcgtttccttagggggaaatcttcctccaccaagtgatagtaacttggctgaaaaagagcatcgtttcttggtrtgggtttcctaatgatagtaaactccaagcttttagaaaatttgttctgcttaagcgatgagttgcaattgtgaacataaggtttcttattaaatatgtg

SEQ ID NO: 167224 - DNA, 201 bp, Homo sapiens
agatgcttacttcatgagaagagtgttgcagagcaaacaaaactctctgatatcaacaacaacaacaacaacaacaaaaaaaaaggcctcgtatctctccrggacacagttgaacaattgcaaattgcaatcaccatcagtcaaattgctgggcccagtcgggaacttgatattcttagctcgtttccttagggggaaatc

SEQ ID NO: 167225 - DNA, 201 bp, Homo sapiens
aaataaggaattcaacaacgctgctgaggagaggcccagacagctcccagatcttcagccaccacagctgaggacccagatatgtgagtgaagccacctcratatcattctagccccagctgacctctccgtcaactaaagctaaatgagtgactgtagctgatatcacatggagcagatgaatcacttagctgagccctt

SEQ ID NO: 167226 - DNA, 201 bp, Homo sapiens
atttgagctggccttgggatttgcatcagctactagaatgtggcagcagcaatgttgtgccaactccaggcttagccacttagagccctgacagcttctgytgtggctcaccttggagccctgagccaccaaataaggaattcaacaacgctgctgaggagaggcccagacagctcccagatcttcagccaccacagctga

SEQ ID NO: 167227 - DNA, 201 bp, Homo sapiens
ttccgagtcctactggtgcttatttctattctagacccaaagggagaatttctgtagtctataccatgcatgcagaaatgtttagtgtgaactgctctccmcaatttactttgaaatgcattttaaaaaggaaaaaaaaaaaggagaatagggccaggtgcactggctcatgcctgtaacctcagcactttgggaggctga

SEQ ID NO: 167228 - DNA, 201 bp, Homo sapiens
tagtcataaacattgaaaactgttactgaccacgatgtcctccagcagttaaatggataaacaaatcgtggtgcatgtaggcaatagaatactattcagcaaaaaaaaaaaaaaaaaaaaaaactgaaacaaactggttggacacagtggctcatgcctgtaatcccagcactttgggaggcgaaggcaggcagatcacct

SEQ ID NO: 167229 - DNA, 201 bp, Homo sapiens
ggcatccattcaaaaactcattcaaaccacagagtagaactttaaaggaggcctttggggatatgtggggtcagttggaatagtttatatcatagctttcrgtttaaaacaattttttacagcatcagtagggagaattatatcacaatacataaatagatttagcaggatttacaaatccacatgtgttcccttaagcag

SEQ ID NO: 167230 - DNA, 201 bp, Homo sapiens
ctccacttctgtgttctatggttaccacaaacttatggccaaaactgaaaaggttatcttttgtacttgctttgtgtgtgtgtgtgtgtgtgtgtgtgtgyctctctgtgtgtgtgtggtgtgtgtgtgtgtgtgattatgaagcttgacttgacttgaaacagctttggtatcattaaatattattttgccattttttta

SEQ ID NO: 167231 - DNA, 201 bp, Homo sapiens
tcttttgtagtcttagcctctttagcagaggagataggaaatctttggcatccattcaaaaactcattcaaaccacagagtagaactttaaaggaggcctytggggatatgtggggtcagttggaatagtttatatcatagctttcagtttaaaacaattttttacagcatcagtagggagaattatatcacaatacataa

SEQ ID NO: 167232 - DNA, 201 bp, Homo sapiens
aattagccaggcctggtgggtgcctgtaatcccagctatttgggaagctgaggcaggagaatcgcttgaacccaggaggtggaggttgcagtgagtcgagwttgtgccattgcactccagcctgggtgacagagcaagactctatttcccaaaaaaaaaaaagaaagaaagaaagaaatgaaaatatttgcatattcttca

SEQ ID NO: 167233 - DNA, 201 bp, Homo sapiens; identical to SEQ ID NO: 30505

SEQ ID NO: 167234 - DNA, 201 bp, Homo sapiens
aaccattaagtagtaagacacattatttctgttgtattaaaaaacactatagagatgatgtgtcatttaaaatacacaaatgtagccctgacagaccaaayagatgtttcttaatacaagcatcttttgaaaccctggcacagtaaagcaatcgctaaagaatgtttattgtattagttgaacaagtccgttaaatccaat

SEQ ID NO: 167235 - DNA, 201 bp, Homo sapiens
ttaggaacctctgccttggcggggcacagtggctcacgcctgtaatcccagcactttaggaggccgaggcgggcgggtcacgaggtcaggagatcaagacyatcctggctaacacggtgaaaccctgtctctactaaaaatataaaaaattagccgggcgtagtggcaggcgcctgtaatcccagctacttgggaagctga

SEQ ID NO: 167236 - DNA, 201 bp, Homo sapiens
agaactatattttaggtgggactgcatatgtctgagcaggagtgtcctttgggaactttgtattgcatctattcaaaggaatgaaaagggggcatttcttyttctgagatcaagcccctggtctttctccttttcctaatggtaggtatatgcccaccccaacccgtgtgtatgtgtgtgtgtgtgtgtgtgtgtgtgtgt

SEQ ID NO: 167237 - DNA, 201 bp, Homo sapiens
gaggccgaggcgggcgggtcacgaggtcaggagatcaagaccatcctggctaacacggtgaaaccctgtctctactaaaaatataaaaaattagccgggcrtagtggcaggcgcctgtaatcccagctacttgggaagctgaggcactagaccataattctgtgtaaatacattgatctgtttgatttaatgggagaaaga

SEQ ID NO: 167238 - DNA, 201 bp, Homo sapiens
ttttaaaaaccactataaataaaaaaagaaacaagaaaggataaactggatgtttgctacctaaaagacaagggataaatatcattaatgtaaagaaaatrtttgaaatctaagaaaaaaaatcccattagaaaaaaatagacaaaacatacataaccaaaaaatgtctttgaaaatcataatcttgataaacatctggga

SEQ ID NO: 167239 - DNA, 201 bp, Homo sapiens
tttttgtttgtttttttttttttggagacggagtctagctttgtcaccctggctggagtgtggtggcgcaatcttggctcactgcaacctctgcctcccgsgttcaagcgattctcccacctcagccacctgaggagctgggattacaaggctccacccccaggcctggctaattttttttttttttttttgtattttagt

SEQ ID NO: 167240 - DNA, 201 bp, Homo sapiens
ctaatactattttgtctccattagaaacctcatgcagaaaccctaactttaaaaaaaaaaaaaaaaaagtaactccaactctactgaaacagaaatccaattttttttttttttttttttgagatgaagtcttgctctgttgcccaggctggagtgcagtggcgagacctcggctcactgcaacctccgcctcccgggttc

SEQ ID NO: 167241 - DNA, 201 bp, Homo sapiens
acctcatgcagaaaccctaactttaaaaaaaaaaaaaaaaaagtaactccaactctactgaaacagaaatccaattttttttttttttttttttgagatgragtcttgctctgttgcccaggctggagtgcagtggcgagacctcggctcactgcaacctccgcctcccgggttcaagtgattcattctcctgcctcaacc

SEQ ID NO: 167242 - DNA, 201 bp, Homo sapiens
cctcccgggttcaagtgattcattctcctgcctcaacctcctgagtactgggattacaggcacgcgccaccacacccggctaatttttgtatttttagtaragacggggtttcaccatgttggtcaggctggtctcgaactcctgacctggtgatctgcccacatctgcctcccaaagtgctgggattataggcgtaaacc

SEQ ID NO: 167243 - DNA, 201 bp, Homo sapiens
agtttcttcttcaaagcatacccctgcctttatcttaccagtgtgtttcatttgcaatgtcttatgaatttggcaaattatgaaatcaaaattgaggctgrgaatttcatgtctttctgacctcatccattatccatttcttttttgaacctaaaagatgctttttccctacttagtgtaggagtttgcaatttgatggag

SEQ ID NO: 167244 - DNA, 201 bp, Homo sapiens
ccctctgaactccattgacttagtgattcccagagttagagagtgtcagagctaaaagaacctctggatttctgtgaagctgctctagagatgaggacaayttacatgctccctctctgccccccacactggggtcaacactttagactagtagctggacatatctgacattttcttagtttgcttacatcctcacaaaat

SEQ ID NO: 167245 - DNA, 201 bp, Homo sapiens
gtgacgggttcctaggcaactgcaaaacatgaaattccatggttaaataagtttgctaaaagttgcataccatatgaagttttatactgcttagtagcccrtcggaaggtctgaaaagttttagagtaaagattaaacacatttttctcagctctccctacacttgtctccagaatcccttttatcatgacacaagtattt

SEQ ID NO: 167246 - DNA, 201 bp, Homo sapiens
aacatggattaagagtccaaagtaagattactcagcatcacccgccagtgaatcactctggcacttgggtcagaattaatatctgagaattctttgaaacyttatggctggaatttttctttccccctggcttggcttcttttgtagtcttagcctctttagcagaggagataggaaatctttggcatccattcaaaaact

SEQ ID NO: 167247 - DNA, 201 bp, Homo sapiens
gccaacagatgaccatctggtcacgatgttcaaaggctcaacctaaacaacattgaaaattaccaaaactaaggcaaagggtatgattctactaaagaaaragactccttaaggagcaagagtctctaggaactgactcttcagcagtactgaatgtaaaattggaataaccaccctctcaaatctcagagaaactggact

SEQ ID NO: 167248 - DNA, 201 bp, Homo sapiens
ggcatgaaccactgtgcccgacccctcatttaactttaataacctcctttaatgccctttaatcttcaaatacagtcacattgagagttgaggcttcaacwtaccaattttgaggggatataattccgtccattccaggtatcaatgaagtcaaggcatccattccttcaacatgctttactacatgtacagaaaccacag

SEQ ID NO: 167249 - DNA, 201 bp, Homo sapiens
gctatttttgtattttttatagggatgcagttttgccatgctggccagactggtctcagactcctaacctcaagtgatccacctgccttggcctcctaaastgctgggattacaggcatgaaccactgtgcccgacccctcatttaactttaataacctcctttaatgccctttaatcttcaaatacagtcacattgagag

SEQ ID NO: 167250 - DNA, 201 bp, Homo sapiens
gacctgaagtcttccaacagccacgtgagtgagcttggagtgactcttccaccttattcaagcatccatatgtctgcagctccagctgatgactgtgatcscaagagatacactgagctgagctgggaccacccacttaagcagctgcagcattcctgactctgggcaactgtgtgagataatcaatgtttgttattttaa

SEQ ID NO: 167251 - DNA, 201 bp, Homo sapiens
gtttcactaaggctttttgttgctcttcttcttatgatgtaaggcaaacttccagggtttgggtttttaatggttttatatgattgccttttcatgagaarcacagttatatttatatttttaaagcaaacccaaagtaagaaaaaatgtatatattttcatcatatgaatggaaagcattatatattttttcttttcttg

SEQ ID NO: 167252 - DNA, 201 bp, Homo sapiens
cttgcaagggaccctggacatcagttttagtgttttacaattaccatctattgacatggggaacatttttgagcagggtgattatgagacatgcccttcatttttttgtgtgttttttgtgtgtgtgtgtgtgtgtatttgttttgtttggttttgttttcagatggagtcttgcactcttgcctaggctgcagtgcagtg

SEQ ID NO: 167253 - DNA, 201 bp, Homo sapiens
agaacactctgttcagtttcactaaggctttttgttgctcttcttcttatgatgtaaggcaaacttccagggtttgggtttttaatggttttatatgattrccttttcatgagaaacacagttatatttatatttttaaagcaaacccaaagtaagaaaaaatgtatatattttcatcatatgaatggaaagcattatata

SEQ ID NO: 167254 - DNA, 201 bp, Homo sapiens
aaaattgtcagtcattgaggtgaagtgaggttggccagttggtaacctgtgccatctaggttgccctcagaaagcgattttcttcctgcagtcgtcaaagygtagagcacttgctaaaataatgcatcaactgaattatgtaaaatatgagaataggaagactgagtttctttgaaaacagacacacataatttatagatc

SEQ ID NO: 167255 - DNA, 201 bp, Homo sapiens
cctttctgttgtccatgctggtggctgcactttttttttttttcctggagggttcagctttgcagatcctcttagaaaacttggatctttgcttatcccamcacccatcccatttataataattactcttgttccaaggagcagggtgcggggagaggctctgggtttgtggaggcgccatctgctccttattgctcacct

SEQ ID NO: 167256 - DNA, 201 bp, Homo sapiens
cagtggtgcagccagtgctagagtgcttggcttgcctcttggaccatcgttaaggcacagccatggaggcaggtctgtcccctcagtagtgtggcagtggraaagtcctctgggtcattttagtactcccaccattaattcctgacctggttgaaggctggggtagaaaacagaggacaacttagcatgtgtatcgtggtt

SEQ ID NO: 167257 - DNA, 201 bp, Homo sapiens
tcaactgaattatgtaaaatatgagaataggaagactgagtttctttgaaaacagacacacataatttatagatccaattaagtaatgtccatcaaagcaktccccagcagaggttatgtacttactctagtattgccgtcacacagagtatttcgggggatttttatctggaattccctctagaactacatgtgtcacaa

SEQ ID NO: 167258 - DNA, 201 bp, Homo sapiens
ggatgcagcaagctgaacgccccgcttagcatcgtcatttcattaatcagattagcacaacgcccaattgagtgagcaccatgttcctaaacaatctccartcagggttcctttctgttgtccatgctggtggctgcactttttttttttttcctggagggttcagctttgcagatcctcttagaaaacttggatctttgc

SEQ ID NO: 167259 - DNA, 201 bp, Homo sapiens
actgatgtctccattcattgtgcaggtccctctcacactgctttcattacttgaacactatctggtgtcattaagatatcaattttatttaggtatatctkcattggcagtttaattatgtctgggtaaggcccgatatttattcatgggtgatcttggtagttgtcagacaccagcctgaagataaaggcgtccatgcct

SEQ ID NO: 167260 - DNA, 201 bp, Homo sapiens
tgcagtggtgtgatctcagctcactgcgacctccacttcctgggttcaagttattctcctgactcagcctcccgagtagctgggacttgtaacaggtgccygccaccacacccagctaatttttgtattttttggtagagacggggtttcaccagttggtcaggctggtcttgaactcctgacctcatgatccacccactg

SEQ ID NO: 167261 - DNA, 201 bp, Homo sapiens
ggtgcgcaccaccacacccggctaatttttgtatttttagtagagaaagtttcaccatgttagctaggctggtttcgaactcctgacctcaagtgatccaygcgcctcggcccccgaaaatgctgagattaccacctgatgctttttagcattttgctggatgtactgagtgatgcagacatgagcaacggaggtttctcc

SEQ ID NO: 167262 - DNA, 201 bp, Homo sapiens
ccagagggagggtgaaggagcaaaagacaacatgagggcaacgagaattcagggcaaatggcccaaattgataagaagagtgaggcacatgggggaagttmtttttattctttcttgcatatatcggatgcaccatgcatatgtgttgttgagtgtcatggagagctctcccaggtggttccctgatcatagaggtggcag

SEQ ID NO: 167263 - DNA, 201 bp, Homo sapiens
tggagtgtatgtcagaatttctgaatagtattccattgtatgcataaaccacattttgtttatccgttcatctgtcaatacacacttgtgttgcttccacyctttggctattgtgaattctctttgagttctatggggagaagaacaactgtgtataacctaccttgtaataattcttaattcgcttgtgaaatttctgct

SEQ ID NO: 167264 - DNA, 201 bp, Homo sapiens
tattcagaagggaggttggaatggtctacactacttagcttggaaagaaagttctcctaggacctatgcctcccatcatccagttgaatttctcccatacwtcttcacctgttgtgtcttcaggcaaacctcacgtgatttatcagtgcacacaccttcgtgctcccatagcctgcctcatatttcttcagaccttttata

SEQ ID NO: 167265 - DNA, 201 bp, Homo sapiens
ggcctcccaaagtgctgggattacaggcgtgagccactgcgccgggcctgatttgaatttttaaaaaatatcgcatcttgtttatctttatatctgttttgttgttgttgttgttgttgttgttgttgttttggtgttcgccttccattttgcacctaaagcaagtaagtaccgcatttgtcttatcctaatctcggtcct

SEQ ID NO: 167266 - DNA, 201 bp, Homo sapiens
gaaagacgtggaggagccctcggtgacccccagttcgccctcctccccacttcatgcagaaggcgaagggtcgtcaagggtctttcttccctctccgccttctccttcctgggaagtggatgttgaaggagagagtgggagggaaattctggccttcataattttcatccttgggaatcccttgccagcaaatagccagtc

SEQ ID NO: 167267 - DNA, 201 bp, Homo sapiens
taagcatctaagtggatgaaagaagacatgttctaaaaggctatgtagcgtgactgtacctaattttatgatgagactttaatcacccttcttgattttcrtcacgattaaacataatgccacatacctatcccctattgtcttatcaagaacatttctttccctgattcctttcctaagaggtgccttggacaggctgtg

SEQ ID NO: 167268 - DNA, 201 bp, Homo sapiens
aaagacgtggaggagccctcggtgacccccagttcgccctcctccccacttcatgcagaaggcgaagggtcgtcaagggtctttcttccctctccgccttctccttcctgggaagtggatgttgaaggagagagtgggagggaaattctggccttcataattttcatccttgggaatcccttgccagcaaatagccagtct

SEQ ID NO: 167269 - DNA, 201 bp, Homo sapiens
agacgtggaggagccctcggtgacccccagttcgccctcctccccacttcatgcagaaggcgaagggtcgtcaagggtctttcttccctctccgccttctccttcctgggaagtggatgttgaaggagagagtgggagggaaattctggccttcataattttcatccttgggaatcccttgccagcaaatagccagtctgg

SEQ ID NO: 167270 - DNA, 201 bp, Homo sapiens
ctggatcttattttccatggacctttctgagctcctgtaaggggaggaaggtttcaaggtaactagaaacacaagtagttttttaaaaaaaagaaagaaaraaaaaaaaagagtcataaacttgtaggccactctttcctttggaaactgaatgcatgctataaagtaaatctcttcttggattgtttactgcagcagaag

SEQ ID NO: 167271 - DNA, 201 bp, Homo sapiens
ttattctagagcatacaggaagatcaaagattgtccagctcacagtttaggagctagtgctcccctgacttcatccaaatttgaaattttctggcctcgawcgatcatggccccgtttttcaagtccattagagaggcatactgagcagaggccctttcgattcctaggaggagaaattggcatttcgtagcagctgggag

SEQ ID NO: 167272 - DNA, 201 bp, Homo sapiens
ggggacccaaaatactgtcatctagtttgctaaatgtctgaactctgggctcatccccaatagacaaccagaagtgcaagttgatcagcctagttcctctgtgtgtgtgtgtgtgtgtgtgtgtgtacgcacgcgcacaccctcacacatgcgggagcagacaccgagaaggcagggacaatgatggaatttatgagagga

SEQ ID NO: 167273 - DNA, 201 bp, Homo sapiens
ataccattctctacttgtttggcatttttccattttagtggctatacacttttcttcatgcgttttagccttttttaaaatagcaaaataattggaccccrcggtatatctttgatgaaatctatcattttagaggtgaggtgatattaactgtatttgttgaggctacactatgtgctggatgatgcggaatgatctgtt

SEQ ID NO: 167274 - DNA, 201 bp, Homo sapiens
gggacccaaaatactgtcatctagtttgctaaatgtctgaactctgggctcatccccaatagacaaccagaagtgcaagttgatcagcctagttcctctgtgtgtgtgtgtgtgtgtgtgtgtgtacgcacgcgcacaccctcacacatgcgggagcagacaccgagaaggcagggacaatgatggaatttatgagaggaa

SEQ ID NO: 167275 - DNA, 201 bp, Homo sapiens
tcaacccagcactgtcatagctgaagggaggaatgactccagctctctacttagccatagagacacagtgaaatcatttgttactgggatcctgtattttrtttgcaccctttagccaaagcaattcttgtagtctctgccccatgaaaaacattgtagactctgccccatgaaaaacaaaagaagctttaactaacatgg

SEQ ID NO: 167276 - DNA, 201 bp, Homo sapiens; identical to SEQ ID NO: 30507

SEQ ID NO: 167277 - DNA, 201 bp, Homo sapiens
agcctctgcttcctgggttcaagcgattctcctgcctcagcctcctgagtagctgggactctataggtgcgcaccaccacacccggctaatttttgtattkttagtagagaaagtttcaccatgttagctaggctggtttcgaactcctgacctcaagtgatccacgcgcctcggcccccgaaaatgctgagattaccacc

SEQ ID NO: 167278 - DNA, 201 bp, Homo sapiens
gtgcttgcatcttagtggtgaggagttggtccacgtggtagacagtcaattttatgaagtcagagagggcggacaggtggaaattagtcagataaatgcayatacgcactctctctctcaaacgacccccagagctggcaagaggctggagatcagattcacctggtacttttttttaaattattttgagaaggagactcg

SEQ ID NO: 167279 - DNA, 201 bp, Homo sapiens
aaaaccttagaaaccattcatcagcattggaaaagccatttgataccaacttgccattttgcaatgaacaggtgtgtttctgacttatacatatttttacytttttaagaaagattttttttaagagggagaagctgatttggaagaacagacatcccaatatatttggcctattttcatgggtttttaatttcttttttt

SEQ ID NO: 167280 - DNA, 201 bp, Homo sapiens
gtttcagaggcagattcattttttcctgggagtggcatataaagataaaggactagataagatgaaagtgcttgcatcttagtggtgaggagttggtccaygtggtagacagtcaattttatgaagtcagagagggcggacaggtggaaattagtcagataaatgcacatacgcactctctctctcaaacgacccccagag

SEQ ID NO: 167281 - DNA, 201 bp, Homo sapiens
gagaggctgaggcaggagaatctcttgaacctgggaggcagagattgcagtgagccaagatcacgccgctgcactccagcctagcaacagagtgagactcygtcaaaaaaaagaaagaaagaaaaagaaaaaagaaacatgataaggagttgtagaaatggtttcagaggcagattcattttttcctgggagtggcatata

SEQ ID NO: 167282 - DNA, 201 bp, Homo sapiens
atgatcacaggactttaaaaggaaagacatagtgttagatgctatggggagggatgaagttgaagacttattttcttcccttgaggtgaatgggagtgatrgatgggtctctgtgtaagacatgtggtcatagaatttaatagccaaaagaaatttggtaatcattaaatctaatgtatattctgtgacgggttcctaggc

SEQ ID NO: 167283 - DNA, 201 bp, Homo sapiens
aaatctaatgtatattctgtgacgggttcctaggcaactgcaaaacatgaaattccatggttaaataagtttgctaaaagttgcataccatatgaagtttyatactgcttagtagcccatcggaaggtctgaaaagttttagagtaaagattaaacacatttttctcagctctccctacacttgtctccagaatccctttt

SEQ ID NO: 167284 - DNA, 201 bp, Homo sapiens
gggagcaaccaccatcagaagaggatgagtggacttagtgctttggaagtcatcagtgttcaggaaagtgccctgaggtcagaggattgtcgaacagcggyggaacaaaggaatgcggcaagaggaaatttttacacagaaggaaggaagagagctcagaggctgagcagtgcaatgcaataacaactatgagcctttgtg

SEQ ID NO: 167285 - DNA, 201 bp, Homo sapiens
tgccatactggaagggaggttggcaaatgaggtgtagctgtgttctcaggaagaagagggaataggctgggtgaacagccagtgaacctttctgtcatgartcctgaaaagaaaatttaaactaaagtcattcaaaatttagtccatgcactctaaaaaattaaaacaaaacaaaacaaaacaaaatgattactactacta

SEQ ID NO: 167286 - DNA, 201 bp, Homo sapiens
tgttttgttgttgttgttgttgttgttgttgttgttttggtgttcgccttccattttgcacctaaagcaagtaagtaccgcatttgtcttatcctaatctyggtcctgaatatatcttcaaattttagtgtctacataacaaagtttatttttcactcataaaactgacaatgcaggcgttcttggtcaggtgactcagct

SEQ ID NO: 167287 - DNA, 201 bp, Homo sapiens
agttctcctaggacctatgcctcccatcatccagttgaatttctcccatacttcttcacctgttgtgtcttcaggcaaacctcacgtgatttatcagtgcmcacaccttcgtgctcccatagcctgcctcatatttcttcagaccttttataatactgtaatagatctttcactacccatcccgggccccagtttttacac

SEQ ID NO: 167288 - DNA, 201 bp, Homo sapiens
gcctcatatttcttcagaccttttataatactgtaatagatctttcactacccatcccgggccccagtttttacacaaagcacagtcatagtattaggttkgtgcaaaagtaattgtaggttttgccattaaaagtgttaggttgatgcaaaagtaattgcggttttgccaataattgcaaaagccacaattacttttgca

SEQ ID NO: 167289 - DNA, 201 bp, Homo sapiens
ggacccaaaatactgtcatctagtttgctaaatgtctgaactctgggctcatccccaatagacaaccagaagtgcaagttgatcagcctagttcctctgtgtgtgtgtgtgtgtgtgtgtgtgtacgcacgcgcacaccctcacacatgcgggagcagacaccgagaaggcagggacaatgatggaatttatgagaggaaa

SEQ ID NO: 167290 - DNA, 201 bp, Homo sapiens
agaccttttataatactgtaatagatctttcactacccatcccgggccccagtttttacacaaagcacagtcatagtattaggttggtgcaaaagtaattrtaggttttgccattaaaagtgttaggttgatgcaaaagtaattgcggttttgccaataattgcaaaagccacaattacttttgcaccaacctaatttgtg

SEQ ID NO: 167291 - DNA, 201 bp, Homo sapiens
acaataaccactaaaaacactctccaaactgctatgtgagaaagccaatatgttgtcagaaatgtaatcagagctgggtgcggtggctcatgcctgtaatyccagcactttgggaggctgaggtgggcagatcacttgaagtcaggaattcgagaccagcctgggcaacatggtaaaaccctgtctctacccaaaatacaa

SEQ ID NO: 167292 - DNA, 201 bp, Homo sapiens
ttgggaaataattgcccatctccacaaatgtaagtttagttttggcagatttgcaacaatgataaaaatatttttttgaatggaaccagtcgtagcatagttttttttttttttaatctcacagagctattaaattaaagccttgaattgaattgaatcaatggtcaattcatctttaaatttctggttttcatctcagat

SEQ ID NO: 167293 - DNA, 201 bp, Homo sapiens
tatatcatgcctgtaatcccagcactttgggaggccgagacggtcaagaccatcctggctaacacggtgaaaccccgtctctactaaaaatacaaaaaaawtagctgggcgtggtggtgggcgcctgtagtcccagctacttgggaggctgaggcaggagaatgccgtgaacccgggaggcagagcttgtagtgagctgag

SEQ ID NO: 167294 - DNA, 201 bp, Homo sapiens
cccagcactttgggaggccgagacggtcaagaccatcctggctaacacggtgaaaccccgtctctactaaaaatacaaaaaaattagctgggcgtggtggygggcgcctgtagtcccagctacttgggaggctgaggcaggagaatgccgtgaacccgggaggcagagcttgtagtgagctgagattctgccacagcactc

SEQ ID NO: 167295 - DNA, 201 bp, Homo sapiens
gaaagggagagtagttcagttattagtaactgtaactgtgataaggaacacagaggcgggttgtggtggctcacgcctgtaatcccagcactttgggaggstgaggcgggcggatcatgaggtcaggagattaagaccatcctggtcaacatggtgaaaccccgtctctactaaaatacaaaaaattagccgggcgtggta

SEQ ID NO: 167296 - DNA, 201 bp, Homo sapiens
taaggaacacagaggcgggttgtggtggctcacgcctgtaatcccagcactttgggaggctgaggcgggcggatcatgaggtcaggagattaagaccatcytggtcaacatggtgaaaccccgtctctactaaaatacaaaaaattagccgggcgtggtagtccgcgcccgtagtcccagctacttggaggctgaggtagg

SEQ ID NO: 167297 - DNA, 201 bp, Homo sapiens
agcaagtggggggttgcgggggctggaattgcggcctggctccagcgtgtacttgacagtctctcctgggactgagctctctctgcacatctctgacatgyctttttgcgtttctcagggacctgatgcccagaaccctggacgggcagatcaccatggagaagacgcccagttacttcgtcacgcgggaggcccccgcgc

SEQ ID NO: 167298 - DNA, 201 bp, Homo sapiens
acgcctgtaatcccagcactttgggaggctgaggcgggcggatcatgaggtcaggagattaagaccatcctggtcaacatggtgaaaccccgtctctactwaaatacaaaaaattagccgggcgtggtagtccgcgcccgtagtcccagctacttggaggctgaggtaggggaattgcttgaacctgggaggcagaggttg

SEQ ID NO: 167299 - DNA, 201 bp, Homo sapiens
gccgggcgtggtggtgcatgcctgcagtcccagctactctggaggctgaagcaggagaatcgcttgaacccgggaggcagaggttgcagtgagctgagatygcaccactgcactccagcctgggcgacagagcaagactctgtctcaaaaaaaaaaaaaaaaaaaaaaaaaaaaaagcacagaaaaatgagtatttagatt

SEQ ID NO: 167300 - DNA, 201 bp, Homo sapiens
acctcacgtgatttatcagtgcacacaccttcgtgctcccatagcctgcctcatatttcttcagaccttttataatactgtaatagatctttcactacccrtcccgggccccagtttttacacaaagcacagtcatagtattaggttggtgcaaaagtaattgtaggttttgccattaaaagtgttaggttgatgcaaaag

SEQ ID NO: 167301 - DNA, 201 bp, Homo sapiens
atggcaaatgcaagacatggcaaatgcaaaactggtagccttgcttttgttttgtttttaacctaattaagatcatagtatatgtataatttcttttttcyttttttttttttttttttttagacagagtcactctgtcacccaggctgagtgcaggggcacgatctcagctcactgcaacctctgcctcccaggctcccg

SEQ ID NO: 167302 - DNA, 201 bp, Homo sapiens
gaataaactgagcatagagatgctaaattactatctagtgatcatgcagcaggcagtgggcatggaccacaaacctcgtttttttatttgagatcagctgyacaaaaatctcataaattattgtatttcccttttagcaaaaccagagcccccttcagcagtaccttgttgtaatgtttaattagccataaagcaaaaaga

SEQ ID NO: 167303 - DNA, 201 bp, Homo sapiens
tctcacccaaactcagaattctctgtggtttttattctagatgaccagtgggtgtgtcatagtatggtattgtgttttaatttacattttcctgatgaccratgaagttcagtgccttctcgtgtgtttattgattacttactttatttatttttcatttcatttttagttgacacctaataattatacatacttacggga

SEQ ID NO: 167304 - DNA, 201 bp, Homo sapiens
cttttccgccttttttttttgaagatgtctacattgtttcagtcataaatcagctatctagcctcaccgattatactctaaatattccttttgtcctcacmcaccttgtctttcccactatcagcaccctaatcctggtctttaactcctcgagcttggattctgttggaagagccccctaaagtattaaaccacctgcag

SEQ ID NO: 167305 - DNA, 201 bp, Homo sapiens
gcatttttctggaggggatgagggagaagagaaattgagagtatgaggagcccagaaaactggagaatgtaaaagctggtggcttaagtttaaacaaataygtgcctgagatcttcacttttctaatatcctgattaaaataaagccagactccttgtgactctctgcatatatgtaacaaaatttagaatatttcattgc

SEQ ID NO: 167306 - DNA, 201 bp, Homo sapiens
agtcagattttttcaaggaataactctgaagacttctgtgagtcctaaaattcacagatgccgaaatgtttgtatcttctctacgtctcccgcgtctcatrcctttctatggccgtggatttccagtggatttcctcatacccacaatttattgcctttcagttaccactataattttgttcacaaagttgcatttttctc

SEQ ID NO: 167307 - DNA, 201 bp, Homo sapiens
ttcagtctattattttggtacaagataggaaatatttattatccagtctcttacactagcatgtctatttcttatatttcagtttcttttctttagccaartctggacaatttcagcagagaaggacatcactagaatcattttattctagagcatacaggaagatcaaagattgtccagctcacagtttaggagctagtg

SEQ ID NO: 167308 - DNA, 201 bp, Homo sapiens
atgtatataaatgtttagattcaataatatttcagtctattattttggtacaagataggaaatatttattatccagtctcttacactagcatgtctatttyttatatttcagtttcttttctttagccaagtctggacaatttcagcagagaaggacatcactagaatcattttattctagagcatacaggaagatcaaag

SEQ ID NO: 167309 - DNA, 201 bp, Homo sapiens
ggaccgaatacctctactgtagttcaagagcaggcgagcttagaatttaataaggaggctctcttctgcttgtttctgtctgtaccaactaaaaggtatgyctcttttttcttgtaagctaaaagatacttattaataaagtagttaaatatgtgtgtacacatacacatacatatgtatgtatataaatgtttagattca

SEQ ID NO: 167310 - DNA, 201 bp, Homo sapiens
ggaggtgggaactctgccagagacacagctactgtcttttgggctggtggcgatgaagacctggaccaggaaagactggagaggaagaatcatcagatttygatttctggttggttcaggagactaaaaaggaatcataaatgatgactttcccaactttgcagcatggtggtgtggaaatgggtagaactgagggggcat

SEQ ID NO: 167311 - DNA, 201 bp, Homo sapiens
gagatggaggagctgagaaaggaaggattgcagggcagcctgccaaatagaaagtcagattgttgttcttagatgatataagattgctttatttctctagytgctttataaaaatacatatgcataaaatatgccacatgatgcagctggagtgaatgaagtccactctatttatccaagaaaagattgtattcctaacct

SEQ ID NO: 167312 - DNA, 201 bp, Homo sapiens
cttttttttttcttggaatgaaatttatttaagcagggaaaatcgtttagagccaaaagtgaagaactctggctgggcagttttgagatatctagtaaccscttctgaacaggacagtgatatggccacagtggtgggactgtttatctatcaattgctgtgtgagtgttggaaacctctgtcagctgggtatggctgctg

SEQ ID NO: 167313 - DNA, 201 bp, Homo sapiens
caaatgcgtggaaaacaaatcattatggtcaagttgcacacaggaggtcattggaccttaactaataaggatttgatatgatcaggaagatgatcaagaaygaaattctaggaatgggaagctgtttgaggacaagcatgaagaagtaagtgaatacaatttattcaaaataacgtaaaaatacccccccccctttttttt

SEQ ID NO: 167314 - DNA, 201 bp, Homo sapiens
atttacatttgaaaaagttctccagccttgcctaaaacagttaatcattttgggttcagcactgttcctccaaccagtaggcagagttctggagaaagacrtatttctgtatacatggggattctctttataagtaaacttagaaatgaggtgacagagccaaagccagccacctaagatgaggcagaaacggcctcctct

SEQ ID NO: 167315 - DNA, 201 bp, Homo sapiens
acaaggtatgtcatggcggtcttcatggccaaccccaatgctgcacctgctggggcatcagcgcttcctgtcctgtgaacttacagaacacctctcctcarcccagcactgtcatagctgaagggaggaatgactccagctctctacttagccatagagacacagtgaaatcatttgttactgggatcctgtattttgttt

SEQ ID NO: 167316 - DNA, 201 bp, Homo sapiens
gtagagaagatcttagttgtttcaactaagagagaaggcacagtatcctcatcaaagaggtctgtaatgatgctgttatttaaagctgccagtgcaatgayggcttctggcttaaaccattggtgaatgcagccacaagacccactcctttctgcaagcagcttctctcacacaaggtatgtcatggcggtcttcatggcc

SEQ ID NO: 167317 - DNA, 201 bp, Homo sapiens
ctcttggaccatcgttaaggcacagccatggaggcaggtctgtcccctcagtagtgtggcagtgggaaagtcctctgggtcattttagtactcccaccatwaattcctgacctggttgaaggctggggtagaaaacagaggacaacttagcatgtgtatcgtggttcctgcttgaccataacacttcctgcaccacagaca

SEQ ID NO: 167318 - DNA, 201 bp, Homo sapiens
ttttaagggaagtttaattaagatgtggatagttaggtcaggggcctacttacagatttcaaaggaagtacctgagaggggagaatgtgtgagagaagggsattagggatgatgagcttaaaaaaaggtattttgataaactagtattatttcacatgtctagaaagaactctaggagttgccagaaaagagtaagttagc

SEQ ID NO: 167319 - DNA, 201 bp, Homo sapiens; identical to SEQ ID NO: 30509

SEQ ID NO: 167320 - DNA, 201 bp, Homo sapiens
tgagcgctgtgaattttcctgctacttttctggaatccgtggaaggctcagagctactcaaaccaccaggttttggccttaggctttgcaactggaccagyagtcttgccaagcctctgcctagaacacagactagccactcaatagaaactctcagaaaaaaggtacaatcgaatgtcttgcttatgaggcaggaagttt

SEQ ID NO: 167321 - DNA, 201 bp, Homo sapiens
caatgttgtgccaactccaggcttagccacttagagccctgacagcttctgctgtggctcaccttggagccctgagccaccaaataaggaattcaacaacsctgctgaggagaggcccagacagctcccagatcttcagccaccacagctgaggacccagatatgtgagtgaagccacctcaatatcattctagccccagc

SEQ ID NO: 167322 - DNA, 201 bp, Homo sapiens
ggttcaccgcagcctctgcttcctgggttcaagcgattctcctgcctcagcctcctgagtagctgggactctataggtgcgcaccaccacacccggctaatttttgtatttttagtagagaaagtttcaccatgttagctaggctggtttcgaactcctgacctcaagtgatccacgcgcctcggcccccgaaaatgctga

SEQ ID NO: 167323 - DNA, 201 bp, Homo sapiens
gcgccgggcctgatttgaatttttaaaaaatatcgcatcttgtttatctttatatctgttttgttgttgttgttgttgttgttgttgttgttttggtgttygccttccattttgcacctaaagcaagtaagtaccgcatttgtcttatcctaatctcggtcctgaatatatcttcaaattttagtgtctacataacaaagt

SEQ ID NO: 167324 - DNA, 201 bp, Homo sapiens
gatgttattaataggatttatatttttatgcaggtcctatcattttctacattttatagatcagaaaagaggctcagaaagatgaaataacttgtccaagrtcatagaactatgtaggtcatagaactactgccaaacccagattcacccacctccagcatgccagagcctcaccactggggtgaatggtctctgtgatgg

SEQ ID NO: 167325 - DNA, 201 bp, Homo sapiens
tgctatcaatggcgctggtcagtgtcctgggctctaaccctgatgtttagcttatcttgatgatgatttggttcttagaattgcatatccagattcggttrgtgtgggagctgcttcaaaaatataagtcttcctctcccacagaagccaattcaaacaacaagtaaagggagttttctttccatccttataagtcacgtt

SEQ ID NO: 167326 - DNA, 201 bp, Homo sapiens
ataagaatcaatttttttttctctttcttctttacctggtcgttaaaagttttaaaaggagtctgctatcaatggcgctggtcagtgtcctgggctctaaycctgatgtttagcttatcttgatgatgatttggttcttagaattgcatatccagattcggttggtgtgggagctgcttcaaaaatataagtcttcctctc

SEQ ID NO: 167327 - DNA, 201 bp, Homo sapiens
catagaaagaacagtgagccaagcatcagaagactcagaatctaagcctggctttttgtgttctttcggctgaatgacttaggacaagccccttctcaaamctttcaacatctgtgaaatgaagcagctggattaggggatttctaaggttctttccagttctaatttttagtggtgctgcttggaagaatacagtccttg

SEQ ID NO: 167328 - DNA, 201 bp, Homo sapiens
tagttaaaaataatttctgtgatttaataccattctctacttgtttggcatttttccattttagtggctatacacttttcttcatgcgttttagccttttktaaaatagcaaaataattggaccccgcggtatatctttgatgaaatctatcattttagaggtgaggtgatattaactgtatttgttgaggctacactatg

SEQ ID NO: 167329 - DNA, 201 bp, Homo sapiens
ttagcacctaccgtgtgtccagaatctaactagtagaataaaataaactgacagaaaaatagcgaatgaacaaacaaccaacaacaaaaaaaaccaccatygccaaaatatgacgaagaacctttctaaaattttgatttatcctcatcatgtttctctctcagcttccccactctccttagattgttgatttgcaagcaa

SEQ ID NO: 167330 - DNA, 201 bp, Homo sapiens
atgccatagaggttggggaaaggtcattttaaatgtggacaggaaggaggctaaggagagccaagaatactgaaaatctgatggatttgtcaactaggagrtcagggtgaggaatctcatggtgttcaatgaaatccagacatcagtggaaaaactttagtggagttggctgtaatctttcttccaggacctcctgaactc

SEQ ID NO: 167331 - DNA, 201 bp, Homo sapiens
aggatacatttgcaaatggacatggctatgtttcaataaaactttattgacaaaaatagctgaccaccactgctatccaatcccagagcactttcatctcrtcaaaaggaaacgtcatgcctgttaagcactcactcctattccccacacccctcagcccttggcaacaactaatctgctttctgtcactatagatttgct

SEQ ID NO: 167332 - DNA, 201 bp, Homo sapiens
gagccaagaatactgaaaatctgatggatttgtcaactaggagatcagggtgaggaatctcatggtgttcaatgaaatccagacatcagtggaaaaacttyagtggagttggctgtaatctttcttccaggacctcctgaactccaggactccacataaaagtccttttctgctcattgggatcaggctgttaaataagca

SEQ ID NO: 167333 - DNA, 201 bp, Homo sapiens
gtctgccggccttgttttccttcaccatgacttagctctaagtcctggtgtgttttcttctggcccaccctttacatttcaggtccctgaatgaaggcccrcataccatatgtctgaacatttaaaaagttatgaatcaagctaataaactgttacatgaaatacatcctattctcctattttgacaaatattccctccta

SEQ ID NO: 167334 - DNA, 201 bp, Homo sapiens
atccgtaccctacactctctttttgccctttgtctgtcctctttgtacccctgggatccggacattggcactggcacaattcacagctctgtcattttgcrcttgtgtgagtgaagtgcctgcagttgggtgtggcgtccatctcctgctggaatcccgcagtgtctccagcctggtgggaggtctgacacattgtggaca

SEQ ID NO: 167335 - DNA, 201 bp, Homo sapiens
tcctgggttcaagcgattctcctgcctcagccttccgagtagctgggattacaggcacgtgccaccatgcctggctcattgtttgtatttttagtagcaasgggctttctccatgttggccaggctggtctcaaactcctgacctcgtgattcgcccgcttcggccttccaaactgctgggattacaggtgtgagccaaca

SEQ ID NO: 167336 - DNA, 201 bp, Homo sapiens
attcagacagggttcctatttttacaaagcatgcagcttagttagatagagtagactcagatctgaagcgttagctagtaatcctcaagttaaattatatwagaaaaaacatacaagaggaagaggaaatgccacaaggaaataccaaatgcgtggaaaacaaatcattatggtcaagttgcacacaggaggtcattggac

SEQ ID NO: 167337 - DNA, 201 bp, Homo sapiens
aagtctgtatgggggtttagggggcttggctaggtgatgtccaatagtccagtgctggagcccagtagagtggggagcaaccaccatcagaagaggatgartggacttagtgctttggaagtcatcagtgttcaggaaagtgccctgaggtcagaggattgtcgaacagcggtggaacaaaggaatgcggcaagaggaaat

SEQ ID NO: 167338 - DNA, 201 bp, Homo sapiens
cttatgcctccattttttcaagcacttttcttctagaatccttcctctcccagttgactctgataaactataataaaactctattagaaaataaatttackgccaggcacagtgactcatgcctgtaatcccaacactttgggaggccgaggccaatggatcacctgaggtcaggagtttgagatcagcctagccaacatg

SEQ ID NO: 167339 - DNA, 201 bp, Homo sapiens
cacagtttgagaaatgatgatcttgtccaacttcagcgattttcaggtgagcaaattaagtctatgaataatcacattttagtcaaaggaggtagttaaaragagaggctgaaagagggggtgccatttccatagggaaatcagtaggaaaaatctactgcaagataacggcaattaagaaacgtaatatgggctgggcgc

SEQ ID NO: 167340 - DNA, 201 bp, Homo sapiens
atgaattttctattcattatttcttttcaatggatgaggaaactaagatacagaaattaagaaaattagggtcagatagttattaggagatggaatcaggyacttttaaccctcaaacttgacatagtttcatgctattttcccatcctgctacctctaataagttctatgcttcacacgggagaagactctctgatattt

SEQ ID NO: 167341 - DNA, 201 bp, Homo sapiens
gagagagcaagcaagagtggccttggtatgctaaagcaaatgggggaaagcctcctgaaggagatgggattattaaaaaatggataggaattagataaacagagagagactgagaaaaaattccaggtaggggcaactgtgaagtggaagagggaagcatatgtggatgcattacaggatggtggcaagaggattaatttg

SEQ ID NO: 167342 - DNA, 201 bp, Homo sapiens
ggccttgttttccttcaccatgacttagctctaagtcctggtgtgttttcttctggcccaccctttacatttcaggtccctgaatgaaggcccgcataccmtatgtctgaacatttaaaaagttatgaatcaagctaataaactgttacatgaaatacatcctattctcctattttgacaaatattccctcctaacaacaa

SEQ ID NO: 167343 - DNA, 201 bp, Homo sapiens
agagagcaagcaagagtggccttggtatgctaaagcaaatgggggaaagcctcctgaaggagatgggattattaaaaaatggataggaattagataaacagagagagactgagaaaaaattccaggtaggggcaactgtgaagtggaagagggaagcatatgtggatgcattacaggatggtggcaagaggattaatttga

SEQ ID NO: 167344 - DNA, 201 bp, Homo sapiens
tgagaaaaatggatgaaaatacaaccccgagttcttgattttgaagagtgagctatttactaatggacatgttttaagagttggtcattctttgagcaaastcaacccatgctttgctttgaattcacttaggaaagatatcgtgataaaattgcacagccatctttttgtgcttattccctaaatgcttgattaaattaa

SEQ ID NO: 167345 - DNA, 201 bp, Homo sapiens
gacatcagttttagtgttttacaattaccatctattgacatggggaacatttttgagcagggtgattatgagacatgcccttcatttttttgtgtgttttktgtgtgtgtgtgtgtgtgtatttgttttgtttggttttgttttcagatggagtcttgcactcttgcctaggctgcagtgcagtggcatgatctcagctca

SEQ ID NO: 167346 - DNA, 201 bp, Homo sapiens
ccaaattgataagaagagtgaggcacatgggggaagttctttttattctttcttgcatatatcggatgcaccatgcatatgtgttgttgagtgtcatggaragctctcccaggtggttccctgatcatagaggtggcagtggtgcagccagtgctagagtgcttggcttgcctcttggaccatcgttaaggcacagccatg

SEQ ID NO: 167347 - DNA, 201 bp, Homo sapiens
gtgtgtgtatttgttttgtttggttttgttttcagatggagtcttgcactcttgcctaggctgcagtgcagtggcatgatctcagctcactgcaggctccrcctcctgggttcatgccattctcctgcctcagcctcctgagtagctgggactacaggcgcccgccaccatgtcccgctaattttttgtacttttagtaga

SEQ ID NO: 167348 - DNA, 201 bp, Homo sapiens
ccaggcgtggtgacacacacctgtagtcccagctacttgggagtctgaggcaggagaatcacttgaacccgggaggtggaggttgcagtgagctgagatcrcgccactgtactccagcctgagtgatagagtgagactccatctcaaaaaaaaaaaaaaaaagagtgatatggcaatgggtatatactgaattaattgagc

SEQ ID NO: 167349 - DNA, 201 bp, Homo sapiens
tccagtgtttgtggttcaaaagctgccgagaggatacatttgcaaatggacatggctatgtttcaataaaactttattgacaaaaatagctgaccaccackgctatccaatcccagagcactttcatctcgtcaaaaggaaacgtcatgcctgttaagcactcactcctattccccacacccctcagcccttggcaacaac

SEQ ID NO: 167350 - DNA, 201 bp, Homo sapiens
tccgatctgtatgacctgccttgggggagagagattttagtttctgtggttagtctttggtaagagtaggattgaaagacagaggggcaagagaagttcasagaaaaacttctgcttctgaggctgcttttgaggccttcactttggagtactgttttctgagtcccagtacctgcatcattaaaactaaggaagtatcgg

SEQ ID NO: 167351 - DNA, 201 bp, Homo sapiens
acagaagccagagatttaattacagccaatacaattgtgagccctatatcaacctcaggatcaaatccctgtagcagctctcgcatactttctgctggccycccttgatgcccttttttcgtgggtatttcttagcaccccgactttctctaagcctccatttacaatttccaaatgcattgttttcctagtccttccaga

SEQ ID NO: 167352 - DNA, 201 bp, Homo sapiens
catgttttccctctgtcgaatttgctccattggagccgtcgtctgtatactatttttgtaatcccctttggctgctgactttctcttatctgctgcaataraaatactctcgcactaggcattgggaggaccacccattaccttccataccctgattgtgaacatgtcagcatactgctcagtctctctgaacctcagctt

SEQ ID NO: 167353 - DNA, 201 bp, Homo sapiens
tacagccaatacaattgtgagccctatatcaacctcaggatcaaatccctgtagcagctctcgcatactttctgctggccccccttgatgcccttttttcrtgggtatttcttagcaccccgactttctctaagcctccatttacaatttccaaatgcattgttttcctagtccttccagatagggtcccacaagaaagtg

SEQ ID NO: 167354 - DNA, 201 bp, Homo sapiens
agtggcccatgtgaggggcagctgctgtccttatgatttgcctgaggtgagggagaagtggtcttggagaggacgcctgactcctaggtatatgagctccmctcctttacctttgtgatctgaatttacagaaattggaaacatagtgggcttcgcaaataccctttaaaaaaatcatgcttttcttggagcattatggga

SEQ ID NO: 167355 - DNA, 201 bp, Homo sapiens
ttatcaataaaattccttgtcttctatgggcgtggtttgaggcacctcaaaacaattacaatagtaacatcaaagaccaccaatcacagatcaccataacrgatacaatagtcatgaaaaagtgaaatattgagaaaaataccaaaatgtgacacagagacacagcatgtgagcatgctattggaaaaatgaccccgatag

SEQ ID NO: 167356 - DNA, 201 bp, Homo sapiens
gtaatatgttgcttggattaacagcagttttaccaatggtaaaattagaatgagagaaaggtgaagtggagggcagtgttaaagcattttattttttattttacttacttatttatttttttgagacagggtctcactctgtagcccaggctggagtgcagtggcacgatcacagctcactgcagccttgacctcccaggc

SEQ ID NO: 167357 - DNA, 201 bp, Homo sapiens
catgcctttttgcgtttctcagggacctgatgcccagaaccctggacgggcagatcaccatggagaagacgcccagttacttcgtcacgcgggaggccccygcgcgcatctcggccatgtccaaggacaccaagctcatcgtggtggtgcgggacccggtgaccagggccatctcggactacacgcagacgctgtccaagc

SEQ ID NO: 167358 - DNA, 201 bp, Homo sapiens
ttttacctttttaagaaagattttttttaagagggagaagctgatttggaagaacagacatcccaatatatttggcctattttcatgggtttttaatttcttttttttatacatccatttaacaaatgcagttgatcctcactattcacagatttgtgtctgcaaatttgcctacttgctaaatttatttgtaactccaga

SEQ ID NO: 167359 - DNA, 201 bp, Homo sapiens
gtctgtgagttatttgcaaatcaggcacgtgctgctgaatgaggttaagtgacattattctcagggggcttgaggaatactaatttggcacaccaggacayagggtggaatagagttagggggcagtctgcctgtggggagataatttatggggatattaccatcgtttagtttcaagataataaggtactagacttgttg

SEQ ID NO: 167360 - DNA, 201 bp, Homo sapiens
agggtttgcgaaagacttcctggagtggaatggagggaggatgaactccaggcagaaaaggcccacccagcgggaggcataagggtgtaatctgtgctcargaagccataagtgtttttgttcagcagaaatgggggtcaccgctggggagtagtgggtgagaacaccgacgaggtaggtagcgtgggacaccattggtga

SEQ ID NO: 167361 - DNA, 201 bp, Homo sapiens
ctgaccaggatcttataatatccgaatgtgcagtaggactgatacaattttcaaaggtttgtttcccttcaaacatactgtagctttaagaggattggatkatagtgaaactgtcctaaattatatcagattttgtttcgcatcactgcttaagcagacatgagaaaataatagcatactggggaagagaaaattaatgag

SEQ ID NO: 167362 - DNA, 201 bp, Homo sapiens
atatgtggattactttttctattatgtacatagggtcaatgatcctgggcaattaacatattttctctgggacttagtttcctcatctgtgttctctttcygttcccagttactatgattctattatagtaattgtttctgtttgggcacattcaataatggtgacagcattgcagtcatttttatgcagggtgggtggag

SEQ ID NO: 167363 - DNA, 201 bp, Homo sapiens
catttgttttggtttgaaaaacttactgaagaaatattcaaagaagtgtttgcagtctgtttattttttgaagataatttttaaatattggatgaagaacrtaattttttaagcttagatgatctggtaggatatagtagcaggatatgttgtcttgccatcaaagttaaaagctattcttcattttatttaaaatttagt

SEQ ID NO: 167364 - DNA, 201 bp, Homo sapiens
gctatgaaatttatctttgaacctaagtttattggcctaacttgcaatttcaatatcgatattagttttaaagacagttgccgacactgcatcagagcccygtttgtccccaggcattgggagtcaaagtgaattctgctgccacatggagggtttctttcaggcttgaatctgtctcttttattgcggtacacagcttgc

SEQ ID NO: 167365 - DNA, 201 bp, Homo sapiens
ctgagtggggtggcaaaactggagaggattttgagacaaggcatggtgtaatgtgactaagtataaattctatgtagcacagccttaaatgttagagaggkagaaaacagatcagtggcggcctggcaacaggggataggccacaaaagggcacaagaaacttttaagggtaatagaaatattctgtaccttgatggtaat

SEQ ID NO: 167366 - DNA, 201 bp, Homo sapiens
tgcggtacacagcttgcttatcagttaagtgtttcgtttatggatgtggtttgataaatgtctactgaacagtgacaaatgaacagcagtagggcctgtaytgtgctcagctgataaaccactgttagatcctcaaatgcttctcgtgaggatggatttttaacacttagaatactctgactttgtcagcttttctccatc

SEQ ID NO: 167367 - DNA, 201 bp, Homo sapiens
aatgggttaatgaattaatggattatcatcggagaggaactggtggctttataagaagagaaaaacagacctgagctagcatgttcttccccctcaccatytgattccctgtgccacctctgccaaagtggagagtccccactagcaagaagacttttgccagatgtgccctctccaccttggacttcccagcctttgtaa

SEQ ID NO: 167368 - DNA, 201 bp, Homo sapiens
tatcatttgtcagacattggcatgtctagtgattcggaaagcccttggagtagcacagaaatgctatcataactccggagtgatcttttgcccttaccagkactttggcttttttaagttgccacttgaacttgggtaagaggccaaggaggtggtggctgaggcagtcaaatcttgtggaatgtggctgtcaattgatgc

SEQ ID NO: 167369 - DNA, 201 bp, Homo sapiens
ccatataaaatcccattgccaatttaatgtgagttgggcggtagtggcatactatttaatattaacaaaatcataatattaattattctgtctcctggagsttcagtagacaaaatttaaataaaaatagtaaatgccgtgtgggcagaacttcagtaggagtgagggtcttctgaaaactagctgaggtcgggctcggtg

SEQ ID NO: 167370 - DNA, 201 bp, Homo sapiens
ccatttgggtaaagatatcagtgaagttggtgaagcctccaaagggccttattttcattgtgtgtctttgctgttaaaaatcttgttaagaggccgggcayggtggctcacgtctgtaatcccagcactctgggaggctgagatgggcagatcacttgaggtcaagagtttgagaccatgctagccaacatggtgaaacct

SEQ ID NO: 167371 - DNA, 201 bp, Homo sapiens
caaggcaggtggatcacgaggtcaagagattgagaccatcttggccaacatggtgaaaccccgtctctactaaaaatacaaaaattagctgggcatggtgrcgcgcgcctgtagtcccagctactcgggcggctgaggcaggagaatcgcttgaacccgggaggcggagcttgcagtgaggtgagatcgtgccactgcact

SEQ ID NO: 167372 - DNA, 201 bp, Homo sapiens
gattagtgatgtctgccatagtcaccccagctgctgctatccatcagaagtcatcagccctgtgcttccatctccatttctttttttggttttttttttttcatttttttcattttttttcattctgagtgtcatcatttaggagactcacacaaaagtaagagaatctttctagggaaatgttctcttttctttgcttga

SEQ ID NO: 167373 - DNA, 201 bp, Homo sapiens
atctactaaaaatacaaaaattagctgggcatgctggtgcaggcctgtagtcccagctacttgggaggctgaggcaggagaattgcttgaacccaggaggsggaggttgcagtgagccgagatcacgccactgcactccagcctggcgacagagcaagactccgtctaaaaataaaaaaaagaacgaagcagcccggccct

SEQ ID NO: 167374 - DNA, 201 bp, Homo sapiens
ctactcgggaggctgaggcaggagaatggtgtgaacccgggatggggagcttgcagtgagccgagatcacgccactgcactccaacctgggcaatagagcragactctgtctcaaaaaaataaataaataaaataaaataaagtactagattatgtttttcttcccaattaaacagatcatgagttcttttggtgactagg

SEQ ID NO: 167375 - DNA, 201 bp, Homo sapiens
taggccaggcacggtggcacacacctgtaatcccaacactttgggaggccgaggcgggcggatcacgagatcaggagattgagaccatcctggctaacatrgtgaaaccccatctctactgaaaaaaaatacaaaaaattagccgggtgaggtggtgggcgcctgtagtcccagctactcgggaggctgaggcaggagaat

SEQ ID NO: 167376 - DNA, 201 bp, Homo sapiens
atggggagcttgcagtgagccgagatcacgccactgcactccaacctgggcaatagagcaagactctgtctcaaaaaaataaataaataaaataaaataawgtactagattatgtttttcttcccaattaaacagatcatgagttcttttggtgactagggtgttgtggcattttggaggcaggaaagatacaggaagttc

SEQ ID NO: 167377 - DNA, 201 bp, Homo sapiens
ttaggccaggcacggtggcacacacctgtaatcccaacactttgggaggccgaggcgggcggatcacgagatcaggagattgagaccatcctggctaacayggtgaaaccccatctctactgaaaaaaaatacaaaaaattagccgggtgaggtggtgggcgcctgtagtcccagctactcgggaggctgaggcaggagaa

SEQ ID NO: 167378 - DNA, 201 bp, Homo sapiens
agacactcacaacccccatcataggcatattcacttatttgtgtgttcatttttacgttgtaggtattactagactaacacatgtgttcatcataaatgawtgtataatatatatattttaaatgataaaatataaataatgagaaagaataaagatgaaaataatgttttattttgtttgttaatgattcaaaacaaatc

SEQ ID NO: 167379 - DNA, 201 bp, Homo sapiens
tttgggaaaatttacaaggctatacttttatgatttatgcactttgatgcgtatatttgcatttcatcaagaaatgcataaaatatgcgtagaaaaattayttgaggaaagtattaaaagaaaacaaaacatggtttggttttgttttgtttttgagacaaagtctcactctgccacccaggctggaacacagtggtacaa

SEQ ID NO: 167380 - DNA, 201 bp, Homo sapiens
cttcataagcaccctaggtgatatagtttggatgtttgtcctgggctccaatctcgggttgaattgtaatccccagtgctggagatggggcctggtggaargtgtttggctcatgggggcagatccctcatggcttggtgttgtctttgtggcacctccttccacccaaccttgctcccaccatgtgagatgctggcttcc

SEQ ID NO: 167381 - DNA, 201 bp, Homo sapiens
ttttatttttgtgaaaattaaagttgggcattggcaacccaataccttttagtgttccactagaacaaaattaaatattaggccagtaatttgatgcagtkgtatccaaacttttccatttcatgccctaaaaattagacactcacaacccccatcataggcatattcacttatttgtgtgttcatttttacgttgtaggt

SEQ ID NO: 167382 - DNA, 201 bp, Homo sapiens
tatcctgctcctgataaccactatttcattctctatctctgtacatttgactgtttccttctaggattccgcatataagtgaatcatgcaatctttttttwctgtgtctgtgccagacacagaaaattatgcttatttcacttagcataatggcttccaagtattgtgttcgagatttttgctaagtgaatagctatagct

SEQ ID NO: 167383 - DNA, 201 bp, Homo sapiens
cttctgcacttagacttgtagaaaaggtccagatctgcaatgtggatgctgttggagtgctggcattttttccttctgcttctcacacggatattatgaatgataaatttttatgatggatgagttcctgacaccagagccagcaattcctactccccatatagtaatacagaaagcatgaaaagtagataactgaatcta

SEQ ID NO: 167384 - DNA, 201 bp, Homo sapiens
aaaattatatttcagcagaattctgtcattaaattataagttaatgaggaactacctgtgcctcgttcactaatcagttttcaagtaatgcagttttaagwttgtcgaactgctttcataataagcagataagcagcatgcttaatgcccaagaattgcgattgctcccctttttctgtttcacatacatcttactaagga

SEQ ID NO: 167385 - DNA, 201 bp, Homo sapiens
acacacgcacacacacatgaaaaaagcattacacacccatatatataaatagaaatgtgtaagtaaaccccagaaatttaagaatagaaatgctgaaaatwgttgtcaagaaacagaactaggacgtagaagtgatcattgcctttccaacccctctgaacaacttttaagaaactctgtctctgtttcatcgataaataa

SEQ ID NO: 167386 - DNA, 201 bp, Homo sapiens
ttaaaagtataaagataccaggataaagtgaagaaagcttggaaactggggacagaaaggcaatgtaacaaaaggacagattgagtgcaagactttctgcrggggcttatagaccataaaggaaggaagaacatttgtgaagcagatatttatcaaaatacccaggcaccccacaaatatttatctctatattcatattat

SEQ ID NO: 167387 - DNA, 201 bp, Homo sapiens
gagataaaatttgactctatatccttaactaactattagaataaccacaaatatgactcttctggttaaaaaagaactgttttttttggtatttgagcccrtgaagctgcattcagctgagctgggcccagatcagcagaaccattgatatgtcccatacacacatgagcaaagatgaggctttgctgtatgctgttgagc

SEQ ID NO: 167388 - DNA, 201 bp, Homo sapiens
gaagggtggggataaatgtaccagaaatgtattatccaaatataaaccatgctaaaacatgtaagattttcaaaaactgaaaaaagaacttaaaaagatamatatatacttgttattaggaatgttcccttcggaaagccatgtgggttatggtgttggaactgaaacaaataatctgatatattctaatatatggcctag

SEQ ID NO: 167389 - DNA, 201 bp, Homo sapiens
aatacccaggcaccccacaaatatttatctctatattcatattatttttgttttttacagcatctcattacataaaaattcaagatctggttgaaaatgarctgttttttgtgcctgctgtgatttgaaataacatttacaggaaatggaaaagcttccatgtgttaccctgtttatgaatttaaatgtcaacccccaaca

SEQ ID NO: 167390 - DNA, 201 bp, Homo sapiens
aggagttctaagaaaatctggcttccttgtttaaatttctccctccacatataaaatattggtgttggcaggggaatactgacatactttgagaaaggcargttgatctgtttcacctactaccttgatattggttgtcatctttagtagttaagccaaatgatgcccaatgaaaagctggcactaaggattaaaaatact

SEQ ID NO: 167391 - DNA, 201 bp, Homo sapiens
aggaaacagcaaaagagactgagaatggtatatacgtaaaagaatagaaggcaggaacttgaacagacacttgtgtaccaacgtccatcgatggatgagtrgatatacaaaatgtcgcatacacttacaatggaatattgtttagccctaaaacagaatgaaattttgacacatgctacaacctgagggaaccttgaagac

SEQ ID NO: 167392 - DNA, 201 bp, Homo sapiens
atttgcatgttggcctatcttgctaggttggggaagttctcctggatgatatcctgaagtgtgttttccagcttcttttcattctccttgtccctgtcacktactccattcaatcgtaggttcagtctttctacatagtcccatatctcttggaggctttgtttgttccttttcattattttttctctaatcttgtctgca

SEQ ID NO: 167393 - DNA, 201 bp, Homo sapiens
tgtgcctagcctggaagcaagaacatgagcaccacaaaaaaaaaaaaaaaatcaccgtgactttttggaaggaagaggagttctaagaaaatctggcttcyttgtttaaatttctccctccacatataaaatattggtgttggcaggggaatactgacatactttgagaaaggcaggttgatctgtttcacctactacctt

SEQ ID NO: 167394 - DNA, 201 bp, Homo sapiens
agtaagccctgattgcattaccggtgtgcctagcctggaagcaagaacatgagcaccacaaaaaaaaaaaaaaaatcaccgtgactttttggaaggaagargagttctaagaaaatctggcttccttgtttaaatttctccctccacatataaaatattggtgttggcaggggaatactgacatactttgagaaaggcagg

SEQ ID NO: 167395 - DNA, 201 bp, Homo sapiens
gaagttctcctggatgatatcctgaagtgtgttttccagcttcttttcattctccttgtccctgtcacgtactccattcaatcgtaggttcagtctttctrcatagtcccatatctcttggaggctttgtttgttccttttcattattttttctctaatcttgtctgcatgccttatttcagcaaggtggtcttcaaactc

SEQ ID NO: 167396 - DNA, 201 bp, Homo sapiens
tatcaaggttcttagcttctttgcattggattagaacatgctcctttagctcagtggagttttttattatccatcttctgaagcctacttctgtcagttcrtccatctcatcctctgtccagttctgcacccttgctggagaggcattgaggtcctttggaggagaagaggcactctgcattttgggttttcagtgttttt

SEQ ID NO: 167397 - DNA, 201 bp, Homo sapiens
cctcaagagacatgaggttcttatatttatttttattctgggaacatgtgcattgaggtaagaattttgaaacacttgcgtatattctgtacaaaatgtgygctttatctcgtttctattttgaatttcaaacaaatttatgatgagtaagcagtagctgtaagtttgactttaaatgaaaaatgattaagaaaaaagaaa

SEQ ID NO: 167398 - DNA, 201 bp, Homo sapiens
attggttgcttaaggcttttcctagaataattctctctccagcttgccaggattctcagtaggaggacccaggtggcattcattacgatggcttccatttycctaatcttttttcccaaagctaaccttattcccactcagagttactgtgactgtcacttccctacccagcagttactccacgctttcttaagcaaatga

SEQ ID NO: 167399 - DNA, 201 bp, Homo sapiens
cacagatcaccataacagatatattaattattcaaatgttgtgaaaattaccaaaatgtgacacagatacatgaagcatacacatgctttgtaaaaatggmaccaacagacttgctggactcaggaatgccacaaaccttcaatttgtaaaaacaaacaacaaaaaacccccacaatatctgcaaagcacaatgaagcaaa

SEQ ID NO: 167400 - DNA, 201 bp, Homo sapiens
aaaacccccacaatatctgcaaagcacaatgaagcaaagtgcaataaaatgaggtgtgcttgtagctattgtagtcaaatccttagagatagaaagttgcrtggtggttgctgggcctgggggaggagaaaatggggagttattgtttagtgggtacagagttttagtttgagaagatgagaaagttctagagatggatgg

SEQ ID NO: 167401 - DNA, 201 bp, Homo sapiens
ggaaagggactgttatcatctttgttttaaaatcaaactatatactaatttcctcccatagttatcttggcctgtactcaggaatgagcaaggacagttartttgtgaggttagaagcaagatggagtcagctatgtcagatttctctcactgtcatgatttttgcaaaggcagtcaaatctacattctcacagtattacc

SEQ ID NO: 167402 - DNA, 201 bp, Homo sapiens
caggaaaaataactaatggatgccaggcttaatacccgggtgacaaaataatctgcacaacaaaccccagtgacataagtttatttatataaaaaaaaaaacctgcacgtgtagccctgaatttaaaataaatgttaaaaaaaattactaaccttagacaacacctatggacaccctgcaatggaagatgagctatagctc

SEQ ID NO: 167403 - DNA, 201 bp, Homo sapiens
tgagtgaaagggtcatgattgattgagcaagcaggcggtgcgtgactgggggctgcatgcaccggtaatcagaacagaacaggacgggattttcacgatayttttccatacaatgtctgaaatctatagataacacaagcagttagctcaggggttgatttttaactaccaggcccagggcgcggtgctgggctatctgcc

SEQ ID NO: 167404 - DNA, 201 bp, Homo sapiens
caacctgggtgacagagagaaactctgtctcagaaaaaaaaaaaaaagcttgtgtggtggactctaacctaatcagggctgatttatatgttgtttttttytcacatattttcctcaatgttctgttcatatcacatagaatcactgagaattcttctctgacattcacagggcccctaagtactgcttcacagactgaac

SEQ ID NO: 167405 - DNA, 201 bp, Homo sapiens
gcttgaacccaagagatggaggttgcagtgagccaagatcgcgccactgcactccaacctgggtgacagagagaaactctgtctcagaaaaaaaaaaaaaagcttgtgtggtggactctaacctaatcagggctgatttatatgttgtttttttctcacatattttcctcaatgttctgttcatatcacatagaatcactg

SEQ ID NO: 167406 - DNA, 201 bp, Homo sapiens
aggtggatcacctcaggtcaggagtttgagaccaggctggccaacatggcaaaacccggtctctactaaaaatacaaaaattatctgggcgtggtggcacrtgcctgtagtcctagctatttgggaggctgaggcaggagaatcgcttgaacccaagagatggaggttgcagtgagccaagatcgcgccactgcactccaa

SEQ ID NO: 167407 - DNA, 201 bp, Homo sapiens
cttggccaggtgcggtggctcacgccagcactttgggaggccgaggtaggtggatcacctcaggtcaggagtttgagaccaggctggccaacatggcaaarcccggtctctactaaaaatacaaaaattatctgggcgtggtggcacgtgcctgtagtcctagctatttgggaggctgaggcaggagaatcgcttgaaccc

SEQ ID NO: 167408 - DNA, 201 bp, Homo sapiens
ccaggaatcaaacattatcgcagcatgctagaaagcctatctgcttttgatttctcagtcacattattttttagtaattcttaaaaaaaaaaaaaaaaaamgccttggccaggtgcggtggctcacgccagcactttgggaggccgaggtaggtggatcacctcaggtcaggagtttgagaccaggctggccaacatggca

SEQ ID NO: 167409 - DNA, 201 bp, Homo sapiens
tatttgcagccactgagataaaatttgactctatatccttaactaactattagaataaccacaaatatgactcttctggttaaaaaagaactgttttttttggtatttgagcccgtgaagctgcattcagctgagctgggcccagatcagcagaaccattgatatgtcccatacacacatgagcaaagatgaggctttgct

SEQ ID NO: 167410 - DNA, 201 bp, Homo sapiens
ggaagtagatcttaacaccattgccatcacccacccacacacatccctacaagtgaagaaacggaaacctcaaagcaggtaagtgactggtcagaaaaatsacaggtaataaagccaggaatcaaacattatcgcagcatgctagaaagcctatctgcttttgatttctcagtcacattattttttagtaattcttaaaaa

SEQ ID NO: 167411 - DNA, 201 bp, Homo sapiens
tgcctggctgcacagttgattatcttatttgcagccactgagataaaatttgactctatatccttaactaactattagaataaccacaaatatgactcttytggttaaaaaagaactgttttttttggtatttgagcccgtgaagctgcattcagctgagctgggcccagatcagcagaaccattgatatgtcccatacac

SEQ ID NO: 167412 - DNA, 201 bp, Homo sapiens
gtattactagactaacacatgtgttcatcataaatgaatgtataatatatatattttaaatgataaaatataaataatgagaaagaataaagatgaaaatratgttttattttgtttgttaatgattcaaaacaaatctttgccctccatatagagagtccatgtgtttgaatagactttattattttcaaaactcctcac

SEQ ID NO: 167413 - DNA, 201 bp, Homo sapiens
tcaaactcctggctttgagtgatcctcctgcctctaccttgttttcaaattgttggtgatgtgcttgctgtgtagatcattacttagttcagatgttttgwaaattaatttcttgtagaagaaaaacaatgtatagtgaaaatccagagtaaatgctttgactaaaaggaaagaaagaggcatcttctttagacattagtg

SEQ ID NO: 167414 - DNA, 201 bp, Homo sapiens
ttttttatcccttttgagttagagtcaaggaattattctcctccatggaaaccattttcttgccctcagatgactaaaccaagtgaaatttagcagagttragaacaagcgtgaagttttattccccagggcctttctgttaactccttaaaaggtttggaacattgagctgggagagttatcatgaatggcaaacaaacc

SEQ ID NO: 167415 - DNA, 201 bp, Homo sapiens
ctcaaacaggatacaccttagcaaatctacaccaagatacatcatgtgtaaacttctgaaaacaaaggcaaaggaaaaaaatcttcaaagcagactaagaraaatgatgcattaactacagagaagtaccaattcaaatgatagcagtttcttatccggaaacatggagaccagaaggcagtgcatctttcaatggctgaa

SEQ ID NO: 167416 - DNA, 201 bp, Homo sapiens
aacaaacatttattgagggcctagtatgtgccaagcacctcgctgggcactgaggattcatcagtgacccaacatagtccctaccctcaggtactgatgayccaccactttgactgttgcaccattctgttctagcagctcctaactacttgtgattcttctacctttacaattgtaatattaatgcctttataatatggt

SEQ ID NO: 167417 - DNA, 201 bp, Homo sapiens
gcatttgggaaacatttctcaattttaattcttttaaacgcaataatgcgccatcttgtggacatatccgatattaaattcttaaattaattctacatagygaactgctctctaagccagggttttcaatcatgggttctaatatagagatatgagaagcacttggggagcttttaaaatcctgatgtgcaggccacaccc

SEQ ID NO: 167418 - DNA, 201 bp, Homo sapiens
ccctctgtttctattcctaatttcctcttctaataaggaacaagttgtattgcattagggcccaccctcatgaatgcatttaacttaattacctctttaargcactattgctaaatactattaccttctaaattactgggggttaatacttcaacatataaatgttgaggggacacaagtcagcccttaacagtgttccct

SEQ ID NO: 167419 - DNA, 201 bp, Homo sapiens
ttcctaatttcctcttctaataaggaacaagttgtattgcattagggcccaccctcatgaatgcatttaacttaattacctctttaaagcactattgctaratactattaccttctaaattactgggggttaatacttcaacatataaatgttgaggggacacaagtcagcccttaacagtgttccctcattacattacaa

SEQ ID NO: 167420 - DNA, 201 bp, Homo sapiens
caggcaccacactttgacaatctcttccttagagaagcttgggcacagtgttgccagatcttgaattttcttctaaaaggagctgcaaaatccatgaaagrtgttaaatattggcaacagttgtttaaaaacaccatgtgaaccaaaaaaacattaactatggtctgagtaagacttgggagcttccatttggcagctttt

SEQ ID NO: 167421 - DNA, 201 bp, Homo sapiens
tgcttttgcagagtggctttagtacagaatatgttgatttggcattatcagcactaatttctgcatgccccagggcacccagtatgtgtctttgtgtattrcaagtgcctataagagtatagttattaaggtcacaagctcttgggtcagaaagccaagccacaacaccaataacaagctgtataatcctgcaagttatat

SEQ ID NO: 167422 - DNA, 201 bp, Homo sapiens
tactttattttgctgtatatgaatggatagttggatggataaattaatacagaaaaaacagattctaagtgtttgcaaaatatttttaaaatatgtttccmcaaatgaactatattccttttataaaaagtgaccaatttatgggatgcactaaatctcaattaaaaacatgcaataaatggcagtggctttcagggaagc

SEQ ID NO: 167423 - DNA, 201 bp, Homo sapiens
actgggtgaaatgatccctcttctccaatgcttctgataccccatttcattgtctgcctacacagaggggagagggcaacagctgaggtttcttacagtcycaagagaaccatttttaaaactcagtctatataaaatatttcctggatgttttcaccaaagctcattaatgtaattttcacatcattattgcagctaatg

SEQ ID NO: 167424 - DNA, 201 bp, Homo sapiens
tataagagatttatacttttgtagctgtggcatttaaacctactgattaaaatctaacttctatgtattagctatagaaaaatgaacttgaggcatatttmtctttgcagccaaacacctacccccagagaactatcacagcaatattgttgtactaagacttacagttcttatttagaaaactgtctagatttgccaaca

SEQ ID NO: 167425 - DNA, 201 bp, Homo sapiens
aagagctttctttttccatttttatagtttataaaatactagtgatagtccttctccttcatataacttccttcaagagttgagaatatgaatctaagaawactttgagttctgcatataatatatgtgccttacagagcttctcatgtcatgcatcacaactacagggtcacttcatgtcagtgtgcattgtctaagtat

SEQ ID NO: 167426 - DNA, 201 bp, Homo sapiens
aatcgcttgaacccaggaggtggaggttgcagtgagccaagatttgccactgcactccagcctgggtgacagagtgagactgtatctcaaaaaaaaaaaawaaataaataaagagaataaggcatttgatatagtttctttgcataacaaaatacaaataaaaccacattctatttcatctaaacactttctcccaagtca

SEQ ID NO: 167427 - DNA, 201 bp, Homo sapiens
agaccttatgacagaaaaccatcagcattgcccacatattactcaaaacacaagaatttcatttattcccatagcacctggaatctatgctggcatttagwcaagcctaatgcctagtgtaccactagagtgagattctctgtccactcttaactatttctagagcctatttttctatggtttcacatcttatgacttata

SEQ ID NO: 167428 - DNA, 201 bp, Homo sapiens
acacacaaacccatacctagctacccagtcctctcatctcatttaataaaaagtccatctttccccagtgaattgagacaccagttttttcaaaatatatrtaaattgcctcagtctttcttacacaaaatgtaacattctatctatgtgcttttataggttgcctgttttacttaatataacgtcaatacctcttcatat

SEQ ID NO: 167429 - DNA, 201 bp, Homo sapiens
cactttggacttctataacaaattataaatatgtcttagtcactttgggcttctgtaacaaattaccatagactggtggctgaaataaaaacattacccamagttctggaggctgggtagtccaagggcaaggtgccagcaaatctcatgtctgctgagggcccacttcttggtttgcagttggctgcattctcattgagt

SEQ ID NO: 167430 - DNA, 201 bp, Homo sapiens
tttgaaattttaagtgctatttattaacaaatccagtttaggaaaaaatctatattcaaaatgtcagtataattttctataacgaataaaatttaaatccytgaaaaaaataattttaaacagcccaacttccaaggaaatctgtaattgattttaggtaaaatatgtgttacaaatgctgtaaagctaaatgttgaaatg

SEQ ID NO: 167431 - DNA, 201 bp, Homo sapiens
acatttgtatgttgcatataattttcccatgtatattgcagtataccatgtatgttgcatataattttacatatctcagcataacaccttattattttatktttcacattctcctactagtcttgggacttcctgaagccagggctgtgtctcactcatgtctctgcctagcacctgtcacagtgctaggtttgcagaagt

SEQ ID NO: 167432 - DNA, 201 bp, Homo sapiens
aaacaagtccacggagtcagttccattcagtcagataagaaaacagagtgatttcgtgacatctagaactttatgaatggttccattactgggttttggawgaggaacgtgagctgacattgcagcaggtaatattaaagacaattgtaaccttcttatgaagaagaaaccatgccaaactttgccacaggttactgagga

SEQ ID NO: 167433 - DNA, 201 bp, Homo sapiens
aaaaatgtcaacacaagatcactgagctatgtgctggccacgcattgcatggaagagtcgcggcttgggaaaggagggaaagatgaaggagggatagatagtatatctgttttcggggtcatagagaccctgagagagtgtttgtatatcaaaatagaatacatgtaccatagaaagcaaactgtattaaatgccagcaaa

SEQ ID NO: 167434 - DNA, 201 bp, Homo sapiens
gagaggcagctggagacacctgattccttttggttaaagcctcctaaggtagaaagtcccagtggtcacaattaagtccaaaggctgttaatcatctttgyaatttcagaggctaaaatttggctgtttattcatgaataattggcatcaggtgaattaattcatgctaaccaaattctaaggaaactgtctcgtgaaagg

SEQ ID NO: 167435 - DNA, 201 bp, Homo sapiens
gggcttgagggagcctgctttgctctttttgcccttctgccatgtgaggacacagcaaaaaggtatcatcttggatgcaggagatgagccctcaccagacrccaaatcttctggtgccatggtcttggaattcccagcctccagaactgtgagaaataaatttctattaattataaattacctggtctaagatattatgtt

SEQ ID NO: 167436 - DNA, 201 bp, Homo sapiens
gaaaaatgtcaacacaagatcactgagctatgtgctggccacgcattgcatggaagagtcgcggcttgggaaaggagggaaagatgaaggagggatagatagtatatctgttttcggggtcatagagaccctgagagagtgtttgtatatcaaaatagaatacatgtaccatagaaagcaaactgtattaaatgccagcaa

SEQ ID NO: 167437 - DNA, 201 bp, Homo sapiens
  misc_feature (1)...(201): n = A,T,C or G
gctggactgctggaagggacggactgcagaagaggaacctgtcatcacccatggcttcaccatgacaactgaaatatctttcaaggtagagtatatgaatnttactaagagaggcagctggagacacctgattccttttggttaaagcctcctaaggtagaaagtcccagtggtcacaattaagtccaaaggctgttaatc

SEQ ID NO: 167438 - DNA, 201 bp, Homo sapiens
actgcgaattgttgggtcccatgaagtattttatagaaagctctgccaaacaattttttaattatttaattaaaagaatcccctctctgattttttttttttaaaaaaaaaaggtaataagaacttgggacaaaaatttcattataaaaatgcttaagtggcaataccctaaaagaatgtgtctctaatattgtagtaaga

SEQ ID NO: 167439 - DNA, 201 bp, Homo sapiens
gactgcgaattgttgggtcccatgaagtattttatagaaagctctgccaaacaattttttaattatttaattaaaagaatcccctctctgattttttttttttaaaaaaaaaaggtaataagaacttgggacaaaaatttcattataaaaatgcttaagtggcaataccctaaaagaatgtgtctctaatattgtagtaag

SEQ ID NO: 167440 - DNA, 201 bp, Homo sapiens
ggcaaattttatttttgtgaaaattaaagttgggcattggcaacccaataccttttagtgttccactagaacaaaattaaatattaggccagtaatttgaygcagtggtatccaaacttttccatttcatgccctaaaaattagacactcacaacccccatcataggcatattcacttatttgtgtgttcatttttacgtt

SEQ ID NO: 167441 - DNA, 201 bp, Homo sapiens
tccaccagcagttttgataattaaagtacacaaaatgtatcaaacatttgagataggccaagtattccgttgaatttgttacagatcttgaagtggactcratcactacttgctacttttcagagaacctttccaggtatactagctaggtatgaatatcagaaggctattaccactgtttgaccacaaaggtaaagaaca

SEQ ID NO: 167442 - DNA, 201 bp, Homo sapiens
tttaaaacgtgtgatttataattacaagtttcaggtgatttctgagaatgctttttctcttctgagtgtaccaaaaagaaccccacaaaattacaagtackaatatgttttctctttgaaccttgtctcaatggtgttcaaaaactttgatgcaattaatcaattcataaaacaccttgttatcaagtttaattagccttc

SEQ ID NO: 167443 - DNA, 201 bp, Homo sapiens
tactgttatttagaattgtcaagtattaatgtttccctttcgttgacaaagatggggtgtgctgccacaggaaacccttgttatatggaggctcttccagstttatttaaattgtgaacatttgtacttaataacacgaacaatgagcagtctggatttttctttttcaagttgtcagtgcaagtaaaggcattttaaaat

SEQ ID NO: 167444 - DNA, 201 bp, Homo sapiens
  misc_feature (1)...(201): n = A,T,C or G
aaagggtccaatgtatagatctgattcatctccaaatattttcccactaaagactgtggaagtaaatatattgatggactctgtaatcactgatttaaaangtgtgatttataattacaagtttcaggtgatttctgagaatgctttttctcttctgagtgtaccaaaaagaaccccacaaaattacaagtactaatatgt

SEQ ID NO: 167445 - DNA, 201 bp, Homo sapiens
aaataaatgaagaaaagatacagttttaaagataaaatgaccagtgctggaaaagaaagcaaagcatagtttaaatcaatgtgctccatcaccgaaaaagsacgttagtaagaaacttggcttgttacatactttaaattctctgtttacattcagaactatatggttttaaaatattgtggtttcttctgagtaagtgtt

SEQ ID NO: 167446 - DNA, 201 bp, Homo sapiens
ttcatgagtatgaaaaaatgagtaaggtatatcttctgcacgaaaaatgtttctggtatcaaaaataaaatctaaaggtcatgaagagatgttttattttstagatacttggcatgcaaataaaataacctttttaaaaagtggtattaaaaagtaaggattcaaaccagcatttaactctttttttaaatcatcctttag

SEQ ID NO: 167447 - DNA, 201 bp, Homo sapiens
ctggtacaccctggtgaacagaatgatagccttcatcacactcatatataaaagaaagaaaccttgaaaatgagaggtatgaggataagcattgattcaargggaatttgttagtctgtgttttattttctgagatgcaaatgttgaattcaagggtttgatgggaaaccagcctggacgtaaatttatacatttcctcca

SEQ ID NO: 167448 - DNA, 201 bp, Homo sapiens
aatcttctggtgccatggtcttggaattcccagcctccagaactgtgagaaataaatttctattaattataaattacctggtctaagatattatgttatarcagcaggaatgaaccgagacagcagcctatttcagaagcctgtctctgatgctcctattccaaccaaaatctttaagccagagatcgcaaccagtaacct

SEQ ID NO: 167449 - DNA, 201 bp, Homo sapiens
cttcttcatcaacagttttctatacttatacagtgactttataaattcatcattattccatcccaaaacaaatatgaatactcttgttatggtaatgccaytgcgggatatgaaagggcagtcctctaccagctcgtttttttcctagtatgtacccatagttgcttttctttgacatagtcagtctgttctccttctact

SEQ ID NO: 167450 - DNA, 201 bp, Homo sapiens
gttataatgtttttttcttagtgttctttcatcttcttgttgaacaggatgccaactttaaaaataaggagatatcctttaaaaatgtttccttgctttawttgaaatattcaaagacctggctcactggggccatgttccaatggacttggcagcaattagctggatctgaggagtggaatccccgattagatgaccttg

SEQ ID NO: 167451 - DNA, 201 bp, Homo sapiens
caagcctgacagcttcaaaccgctttatttcagatgaagatgcatggctaagctaattatattttctcttcttcatcaacagttttctatacttatacagwgactttataaattcatcattattccatcccaaaacaaatatgaatactcttgttatggtaatgccactgcgggatatgaaagggcagtcctctaccagct

SEQ ID NO: 167452 - DNA, 201 bp, Homo sapiens
gtagtcattgcttgaagatttatactgggctgcaaaataaccctgagtgtctactcaactttcagttcgaagtgccttatcctgtatggtagtgggttacyttttgcatgccaactccatcatatggtagcagatgcctgggactttttgttgataaggattccaaggctatctagatggcctggaagtaccactaagatt

SEQ ID NO: 167453 - DNA, 201 bp, Homo sapiens
aagatttatactgggctgcaaaataaccctgagtgtctactcaactttcagttcgaagtgccttatcctgtatggtagtgggttactttttgcatgccaaytccatcatatggtagcagatgcctgggactttttgttgataaggattccaaggctatctagatggcctggaagtaccactaagattgattagtgatgtct

SEQ ID NO: 167454 - DNA, 201 bp, Homo sapiens
aacttcattaagtcattctctatcagaataggagctattgagaatttctgcagaactaggattgtgtcttctctacctatgaaatgagtggtgtcatgacraagcactctagggagccctgccaacctatttgataatgttgatggacaagattgtatggggagtggggagaaaaaacaccttttatattcttccctgatg

SEQ ID NO: 167455 - DNA, 201 bp, Homo sapiens
ctggccaagacttccagtactatgatgaagaagggtggtgagagtgggcatccttgttttgttcccgttctcaggaagaatgctttcagcttttccccatycagtattaagttggctgtgggtttgtcataggtggcttttaattcattaaggtgtgtcccttgtatgccaattttgctgagctgtgctctttttagtaat

SEQ ID NO: 167456 - DNA, 201 bp, Homo sapiens
ccctgccaacctatttgataatgttgatggacaagattgtatggggagtggggagaaaaaacaccttttatattcttccctgatgtatgtataagtagttstttaggaagagatgaaatgcgtggctttgtcctgaatagattcccttaggggacacccagggaattcctaggcccagtggaattaatgttctagaaagag

SEQ ID NO: 167457 - DNA, 201 bp, Homo sapiens
agattttaaaataattaaaatataaactctaggacaatcagggttaaaaaaaagtagcctgagactctgatttatcttttcttctatttttctgtctcaawtgcctgtttttttattgtttcgattaaaatctttatcaacagacgttatataattctttgaaagggttttgtcctgtagcttttgaatgtgtactttcat

SEQ ID NO: 167458 - DNA, 201 bp, Homo sapiens
gagactactttctgttcccctcactcaaagttatagccataatactgctgcctaacaaccaaccataaaaatcagtcacaaaacaagcatttgctaagttratgagtctatgaactggttctggtctggaccaggctcacctgatctcagtaggcttgttcatgcctgtgtttagctggtggtcagctaggggtgagctgg

SEQ ID NO: 167459 - DNA, 201 bp, Homo sapiens
gctttgtgttagataattctccccaactgtaggctaatgtaagtgttctgagcatgtttaaggtgggccagactaagatacgatgctcagaagattaggtwtaataaatgcattttgatttataatattttcaacttacaatgggtttatcggaacatagccccaacataagtagagaagcatttttattatagtgatttt

SEQ ID NO: 167460 - DNA, 201 bp, Homo sapiens
tttttaaaaccattagatcttgtgagacttattcactatcatgagaacagcagaggaaagacctgcccccatgattccattacctcccaccaggtccctcmtacaacacgggggaattcaagatgagatttgggtggggacacagccaaacctatcacttgtcaagctctttctatatttaatcagcaagacaagtctctt

SEQ ID NO: 167461 - DNA, 201 bp, Homo sapiens
ttcctggtaagacacctctgtcttccttctacacactattcaataccgtcttctctttgacatgaccttttccttccacctcttttcacttctctcttacytgcagggttaggagacacctgctatgtgagtgtatgtaaaccatacttcacagagcaagccttaaaaaaataccagctttcatcctttttccttcccttc

SEQ ID NO: 167462 - DNA, 201 bp, Homo sapiens
tgtgcactcaaatctcctgggaattttgttgaacatgtagattctgacttagttgatctggagtagggcccgagaacttacatttctaatgtgctccctgrtgatgctcttgccactggtatgtggactacactttgagtagcaagatctagaaagccaggtcgtcagctcagagtttctagaacagtgcctgctatttag

SEQ ID NO: 167463 - DNA, 201 bp, Homo sapiens
tctaactatagcacagtaccatggaaggaagtagatatcattacaaaataggaaaacttaaatctcaccaataaagaactcatcaactagggagatgctgyggactcattgtaaaagtgtctgtgcattctattaacaaacaggcgtcattatgatagctagaagcattgaccttggatgaaagttgaggggaatataatg

SEQ ID NO: 167464 - DNA, 201 bp, Homo sapiens
tctaaacatttattaagaatggaaggttgaaatggtgacatccctttgtgggagcaataataagatatttacatacaaaaggtatgtctgtaaatgatacyctgtaggaaaaaccaattagggggccaacacccagagttatctgggcagtcaaaggggagaattacctaaggctggcttagaaagggaaggggcagagag

SEQ ID NO: 167465 - DNA, 201 bp, Homo sapiens
tcgaagtggaattgtgaatcttccaatcgtctaaaccacatttcttctaaactacatttcacaaaaacatattgggtgggactcgtttgagaaaaaaaggytatatatatatctttttaatcccatatcatatactgctattttttaagtacctaagatagtgtttggtataaattaaccatatagaaaatatttgaataa

SEQ ID NO: 167466 - DNA, 201 bp, Homo sapiens
ttagttggtttcatagcatgaagagttgttaacatggatttttaatgttttatatcatatttttggacctgtaccatggcaagaaaaccacctaacctccrttctccatagcttttgtggcaccttagcccagatttgcttgtgaattgaatttttttatttaaccaaattctgagaataaatatgcaggaagtcctcctg

SEQ ID NO: 167467 - DNA, 201 bp, Homo sapiens
atgggatcaggcagagaccagactccatccttctgagaccacacccttgctcagctccttccccagccccgtctgctttcctggctcccctactctgagartccctcagtaaatcacgtgcacctgaatccccatcttgcattctgcttctagggaacccaaactaaaaatatatgtattcgaatgaagcaattgggtctc

SEQ ID NO: 167468 - DNA, 201 bp, Homo sapiens
caaatgaacgctacggttgacctcataggtgtgttatgaatgtttaccctgacctcctagaagaaaaggaaaaagaaaggaaagagagagggagaaggtgwgggaaggggggaagaaaagaaaggagagaaaagaagacagagaaaaaacagggagggaggaagctggggaaggaaaaagaccatttgctgactccgttgt

SEQ ID NO: 167469 - DNA, 201 bp, Homo sapiens
gacacagggaatgccatgtcagaacaaagtcacaacatggctatgaattctgttcatgtcctctcaacagtgatcattttgtttctgtattaccttgtaaygaaggccatattggaaggtgagtagaggaccgacatataatatcaatttctggcttctacaagaaggcatcagggagaccttgacaatttcttcttcgtt

SEQ ID NO: 167470 - DNA, 201 bp, Homo sapiens
ccaaatgaacgctacggttgacctcataggtgtgttatgaatgtttaccctgacctcctagaagaaaaggaaaaagaaaggaaagagagagggagaaggtragggaaggggggaagaaaagaaaggagagaaaagaagacagagaaaaaacagggagggaggaagctggggaaggaaaaagaccatttgctgactccgttg

SEQ ID NO: 167471 - DNA, 201 bp, Homo sapiens
cctggaagctttacatcattatttaagagtttttataactcaatctttagctctcccaccaggttagtgagggaggctgaaagttccaaccctccagtcasttgatctgtctggtgatcacccctatcctgaggctctccaggggccctattctaaatctacttattaacataaattcagatatgattgaaaggggtttac

SEQ ID NO: 167472 - DNA, 201 bp, Homo sapiens
atgcccttagagtatagtttgaaatcaggtagtgtgatgcttccagatttgttctttttgcttagtcttgctttggctatgcgggctattttttggttccrtatgaattttagaattgttttttctaactctgtgaagaatgatggtggtattttgatggagattgcattgaatttgtagattgcttttggcagtgtggcc

SEQ ID NO: 167473 - DNA, 201 bp, Homo sapiens
ataagaagaaaaagcaaaagctctaacttggaatgtaataaatacaattttgaaattagttcattaataattgtatggctgtttaaaaagagtgaaatatrtggcacttaatatgtcatgaagcagtgacttagtttagaatataataaaatctactactatcccatgatgaaagtctactacagttataacttagccaca

SEQ ID NO: 167474 - DNA, 201 bp, Homo sapiens
aatgaacaagtatttagtttataagaagaaaaagcaaaagctctaacttggaatgtaataaatacaattttgaaattagttcattaataattgtatggctktttaaaaagagtgaaatatatggcacttaatatgtcatgaagcagtgacttagtttagaatataataaaatctactactatcccatgatgaaagtctact

SEQ ID NO: 167475 - DNA, 201 bp, Homo sapiens
ttgctttgtcgaagatcagttggctgtaagtatttgggtttatttctgggttctctattctgtcccattgttctgagtgcctatttttatgccagtaccayactgttttggtgactatgcccttagagtatagtttgaaatcaggtagtgtgatgcttccagatttgttctttttgcttagtcttgctttggctatgcggg

SEQ ID NO: 167476 - DNA, 201 bp, Homo sapiens
tagcctgctacttatttacatgacttgcctggcccctgtaacatctgagtttgcaacccttgggctggaatagctctagaccactgatggatggggctttkttggaacggagccagaattaccctgtattcttttcatattttcttacaatgaacaagtatttagtttataagaagaaaaagcaaaagctctaacttggaa

SEQ ID NO: 167477 - DNA, 201 bp, Homo sapiens
tttttcccccactttatgtttttgtttgctttgtcgaagatcagttggctgtaagtatttgggtttatttctgggttctctattctgtcccattgttctgwgtgcctatttttatgccagtaccacactgttttggtgactatgcccttagagtatagtttgaaatcaggtagtgtgatgcttccagatttgttctttttg

SEQ ID NO: 167478 - DNA, 201 bp, Homo sapiens
ttgactgacttacatctctgggtatcagttggatgttgatgaatctaggataatttggggtatgggactgggatgactgaggtgactcaactcttttcctygtgttaaatcttctactagagtagtctaagcatgttcccgtgacatgccataggaataggagtgaaagctaagtaagggcttttttaagcctctgcatag

SEQ ID NO: 167479 - DNA, 201 bp, Homo sapiens
tcctacatgtggctagccaattaccccagcacactttgttgaaaagggtgtttttcccccactttatgtttttgtttgctttgtcgaagatcagttggctrtaagtatttgggtttatttctgggttctctattctgtcccattgttctgagtgcctatttttatgccagtaccacactgttttggtgactatgcccttag

SEQ ID NO: 167480 - DNA, 201 bp, Homo sapiens
gacaaacgtctttgggttattatcttgattatttttttttattatactttaagttttagggtacatgtgcacaacatgcaggttatttatcatttttgtamaatcaaaatttgtttcctaattcacaatcatttttatgcccagctgagtcttccaaaagaaaacacctaactaaaaatagaaaacttctaggccttaatc

SEQ ID NO: 167481 - DNA, 201 bp, Homo sapiens
gatccagtttcattttcctacatgtggctagccaattaccccagcacactttgttgaaaagggtgtttttcccccactttatgtttttgtttgctttgtcraagatcagttggctgtaagtatttgggtttatttctgggttctctattctgtcccattgttctgagtgcctatttttatgccagtaccacactgttttgg

SEQ ID NO: 167482 - DNA, 201 bp, Homo sapiens
agcacactttcatttacagctgctttcctctgtctccctcttcctttcccagcccatcctttccactttgaccctggaccctagcttctcaatgatttcayactaaaattgatcccttccctttcttatgttgtcaatatttcccctgtaaccagatctgtacatcaatattaaacatgacatgcttacccatcttaaaag

SEQ ID NO: 167483 - DNA, 201 bp, Homo sapiens
agcatgtgcaggggaactgtcctttataaaaccatcagatctcatgagacttattcactatcatgagaacagcacaggaaaaacccacctccatgattcarttacctcccactgggtccctcccattactcatggggattatgggatctacaattcaaaatgagatttgggtagagacacagccaaaccatatcgatgtat

SEQ ID NO: 167484 - DNA, 201 bp, Homo sapiens
accaacactccttctactgtagtgcattatcacttctaaaaggaaagtaatttctttccactagtgatttagttcagattgcattattagatagtgacgtrgttgaatgtataattaaatctgctttacaaaagaaaaagcagtattttatcatttctttttaaattatgagttgtctcttaagagggatttctcttttat

SEQ ID NO: 167485 - DNA, 201 bp, Homo sapiens
taacgctttttcatggcttcgtattactttattgcatgaatgtagcttaatttatttatctagttccctactcgaggtggtgtattagtccgttttcacayggctgataaagacatagccaagactgggcaatttatacccaaactgtgaggtttaattgaactcatagtttcacatggctggggaggcctcataatcatg

SEQ ID NO: 167486 - DNA, 201 bp, Homo sapiens
ttttcttcaggggtatttacagttttcggttttacgtttaagtctttaatccatttggagtttatttttgtatatggtttaaagaaatggtcctgtttcartcttctgcatagggctggccagttatcctagcaccatttattgaataggcaatccattccccattgcttgttttgtcgactgtgtcgaaggtcatatggt

SEQ ID NO: 167487 - DNA, 201 bp, Homo sapiens
aaagatccaaatccatatagttttcaatttgcttcttttacttagcattatgccatggtgatttttcatgtcatgctttttaacgctttttcatggcttcrtattactttattgcatgaatgtagcttaatttatttatctagttccctactcgaggtggtgtattagtccgttttcacacggctgataaagacatagcca

SEQ ID NO: 167488 - DNA, 201 bp, Homo sapiens
caatatgccaaaagaccctgcacttggcctttttagtccaagtgatctatattttagctgagtttcctagaagtatatacaaggattctcagtggtgactrgaatgaacagactagctgttcaggaatctaatgcctaccatagctattaatagctaccactggctgttcgtggtggctcacacctgtaatcccagtgctt

SEQ ID NO: 167489 - DNA, 201 bp, Homo sapiens
tactaaacaagaaatgacaaataagcaaaagatgttagtagtgaaataagaaataaaataattgttgacatttttgtcaattttcctgattattaccccartgggattcaaacacacacacacacacacacacacacacacaaagatccaaatccatatagttttcaatttgcttcttttacttagcattatgccatggtg

SEQ ID NO: 167490 - DNA, 201 bp, Homo sapiens
tgggaatttcaaggctccagttacagcaaatgacatgctgtcccctccacctatgtctatgcaggtctgccttgggaaccacctcacacatcagtgccttygctgtccatctgtgtatgttattcaaattcacataagttaagataaagatccaggatgataaaaaccaatcctgatgggtgggattagagaattacttct

SEQ ID NO: 167491 - DNA, 201 bp, Homo sapiens
caaatatttttctgcctctccccctctttcaaggactctaatgacttttacattagaccacttttctgggaacaagttccagactggaaaagtggtctaaygtaaacgttgtctaatgttccactgggaacaagtactgtgtgtagtgctgaccattgttaccccgaaatcttgaaatcttgtgggtagtctttcctcaac

SEQ ID NO: 167492 - DNA, 201 bp, Homo sapiens
aggtggatcacctcaggtcaggagtttgagaccaggctggccaacatggcaaagcccggtctctactaaaaatacaaaaattatctgggcgtggtggcacrtgcctgtagtcctagctatttgggaggctgaggcaggagaatcgcttgaacccaagagatggaggttgcagtgagccaagatcgcgccactgcactccaa

SEQ ID NO: 167493 - DNA, 201 bp, Homo sapiens
aatacaaatcctttctttagatatatgatttttcaaatattttctccaagtctgtggcatgtcttttcattcttataacaccgtctttcaaacagcataartattttacttttataaaatctagttatcaatttgttcttttatggattttggtgtttgtgtcatatatatatataaatatttgcctaactcaaatatttt

SEQ ID NO: 167494 - DNA, 201 bp, Homo sapiens
gcctaactctatcaatcgataagcacctagaggatatttttgatgtaattgttcatatcatgatacgagatgtaaaatgcacaccaagctctgtagactcyacttttgtgcaaaaaaaaaaaaaaaaaaaaaaaaggatctgtgtccctagagctctacatctaaataactctacagtctggctactcaaagtgtgaagtg

SEQ ID NO: 167495 - DNA, 201 bp, Homo sapiens
tgtggcagtgttgcggtaatagatacatgatccatctggcttcatccttgtagagaaggagattggctatctttccttcagggttccagtcctggttcttyctttaactagctatgtggctttagcaaatattttaacatcattaagtggcatatgtaaaatggaaaaaaactaatttttgtctaactcacaaaattgcta

SEQ ID NO: 167496 - DNA, 201 bp, Homo sapiens
cgcttgaacccaggaggtggaggttgcagtgagccgagatcatgccattacacttcagcctgggtgacagagcaagactccatctcaaaaaaaaaaaaaaagaagtctggacaccccaatattagtccatttccatgcttctaataaagacatacctaagactgggcaatatgaaggaggtttaactggacttaaacttca

SEQ ID NO: 167497 - DNA, 201 bp, Homo sapiens
agcaacagaaatcgtttgtgaaacttcaaaagaaacactacaaagaaatgaaagacctggttaagagacaccacaagaaaaccactgaccttatcaaagarcacactaccaagtataatgaaattcagaatgactacttgagaaggagagccgctttggaaaagtccgccaaaaaggacagtaagaaaaagtaagttcaat

SEQ ID NO: 167498 - DNA, 201 bp, Homo sapiens
gcttaaatacatgcaagaacttcattaagtcattctctatcagaataggagctattgagaatttctgcagaactaggattgtgtcttctctacctatgaawtgagtggtgtcatgacaaagcactctagggagccctgccaacctatttgataatgttgatggacaagattgtatggggagtggggagaaaaaacaccttt

SEQ ID NO: 167499 - DNA, 201 bp, Homo sapiens
tttgctgggagttgcctggtgagggaaatattttaaaaagactttgagtaaaactgttgtaagaccaacaggttcgtatgcccatttgcacagtaacaaaycatttgcagcagagaaagagtttaatcattgcaagtgcagatcagggagataagaggaaaccctcaaatccatctccctgaaggagttctgggctgggat

SEQ ID NO: 167500 - DNA, 201 bp, Homo sapiens
ttggaggaatcaaaattgaacaatcaagcctgaggacttgatagagtctcaactttgactttttagttttttttctctctctcaatctttttctttcttaraaaatagaaaaatgactgcttactactgattgtaatgtgtctcaacttttgaaattcagccttaaacttgttttactgtgcacatttgcttttgttgaat

SEQ ID NO: 167501 - DNA, 201 bp, Homo sapiens
gagttagcaaatatgctgaatataaaattaatttataaaaatccatttcatttccatatataagcaacaggcagctagaataacttaaaaaatatataacrtcataacaagtaaagttattattgggtataacatcaaacaaggtctattataacatgcttatgaattggaagagccaatagcataaaaataagttctggc

SEQ ID NO: 167502 - DNA, 201 bp, Homo sapiens
ccatgccaacttctactgttttttgattcttggattatggccattgttgcaagagtaaggtggtatcgcattgtggttttgatttgcatttccctgatcaytagtgatgttgagcattttttcatatgtgtgttggtcatttgtacatcttcttttgagagttgtctattcatgtccttagcccactttttgatggaattg

SEQ ID NO: 167503 - DNA, 201 bp, Homo sapiens
tacattcccaccagcagtgtagaagtgttccctgattgctgcatccatgccaacttctactgttttttgattcttggattatggccattgttgcaagagtraggtggtatcgcattgtggttttgatttgcatttccctgatcattagtgatgttgagcattttttcatatgtgtgttggtcatttgtacatcttcttttg

SEQ ID NO: 167504 - DNA, 201 bp, Homo sapiens
cgtctctaatctcatccaagtcattggaaatgctgttaattcattcctttttgtggatgagtagtgttctatcatgtatacataccacagtttctatatcyactcattgactgatgggcatttcagttggttccacgattttgctattgtgaattgtgctgctgtaaacatgcgtgtgcaagtatctttttcaaatagtga

SEQ ID NO: 167505 - DNA, 201 bp, Homo sapiens
tggatttgaatgaagacatgtctcagcccctttctcactatttcattaattcctcgcacaacacctacctcacaggtatgaattttctagttctttgttastttagccagtctcaccaaatttcaccaacctctactttctgttgttcggaagctgaagtgtgttttcttccatttcctgcgaagtgcctctgagaactct

SEQ ID NO: 167506 - DNA, 201 bp, Homo sapiens
tttccatctgctacctcattatatctaccaagatatcaatccacttaatttttttttcctgaaccatttcacggtaagttgcagacaggatagcccttcaycttaaataattcagtgcatatactccaagaacaagaacattttttacgtgaccacagtgcataattatcaaaatcataatggtgcatactactatccagt

SEQ ID NO: 167507 - DNA, 201 bp, Homo sapiens
gaggttctgcatttgtattagtcgattctcacactggtgtgaagaaatacctgagactgggtaatttataaagaaaagaggtttaattggctcacagttcygcttggctggggaggcctctggaaacttacaatcatggtgcaaggtacctcttcacagggtggcaggagcgagaatgagagcagagtgaagtggggaaaa

SEQ ID NO: 167508 - DNA, 201 bp, Homo sapiens
aaataccacagaagtgatgctgtgcctttcccagcacattctatcagacagaaaatgatattttgaaataccatttggcagttggctctttgaccaatttrcctctaattcaaactctgtatcattattgagcaagcatttagtagcttgaaattgtagctgcatattctccattttgctcacaagtgtatcacatttaga

SEQ ID NO: 167509 - DNA, 201 bp, Homo sapiens
agaattggaattattaagtcaagtatataaaaaattgagtcttattgcatatagttaaattgtctctcagaataaaactgctccaatttcaacttccaccrcgaatgtatgaatgtgcctattgccatgaatgtttgccgaaataaatctttggcaatatcaaaatatatccatgtagcctctattttatttctttatttt

SEQ ID NO: 167510 - DNA, 201 bp, Homo sapiens
gaattggaattattaagtcaagtatataaaaaattgagtcttattgcatatagttaaattgtctctcagaataaaactgctccaatttcaacttccaccaygaatgtatgaatgtgcctattgccatgaatgtttgccgaaataaatctttggcaatatcaaaatatatccatgtagcctctattttatttctttattttg

SEQ ID NO: 167511 - DNA, 201 bp, Homo sapiens
gggtttctttagttagttatttaagctttgttatgttcccagttcttctcagccatttactactagtttctgtcttgtgtgttttatttattaaaaaaggrcccccctccagcaatagtataaaaataatcacctctgtttttcttatattttgaaatattgtgggtttttttaacctttaaatcttaaatagataactta

SEQ ID NO: 167512 - DNA, 201 bp, Homo sapiens
agtgttacacagtggaagtatttagaggagaggaaatttccattcatatctgaaaaacaacatcattaatatttcttcttctaaaaaatctagagacatayacttttagtttagtctacatgatatgatataatcacagagaagtaaccatactttgtagctagaaccctactggcataaaaataatgtagtttcacaaga

SEQ ID NO: 167513 - DNA, 201 bp, Homo sapiens
tttgcaaaagagggaaactacaccgttagagatacattctgaattatttacaggtataattatatgatatctgggactggattaaagtagaataggggcaygggagaaggggttggggttggataggatgaccacgaatgaatggtttttgaggctggtttatggctttgagtgtgcattatactattaagtttacttttg

SEQ ID NO: 167514 - DNA, 201 bp, Homo sapiens
tttttttaagacacgagatcttggtctgtcacccaggctggtgtgaagtggcatgatcacaggtcactgcagcctcaaactcttgggttcaaggaattctyccacctcagactcctgagtagctgaaactagagtcatgcaccacaacgcccaactaattttttaatatttagtagagacaaggtctcactctgttgtcca

SEQ ID NO: 167515 - DNA, 201 bp, Homo sapiens
tattcagagtgtcttaacaggtaaatgccaccctttccccccatggaattaagcagctcagtgttacacagtggaagtatttagaggagaggaaatttccrttcatatctgaaaaacaacatcattaatatttcttcttctaaaaaatctagagacatatacttttagtttagtctacatgatatgatataatcacagaga

SEQ ID NO: 167516 - DNA, 201 bp, Homo sapiens
gggacaggcttaaatacatgcaagaacttcattaagtcattctctatcagaataggagctattgagaatttctgcagaactaggattgtgtcttctctacmtatgaaatgagtggtgtcatgacaaagcactctagggagccctgccaacctatttgataatgttgatggacaagattgtatggggagtggggagaaaaaa

SEQ ID NO: 167517 - DNA, 201 bp, Homo sapiens
ccagacacaagctgctctcattacaaccatctcttctcatctcttgaggatgagctcactaataagagtacattatctcttattgggacaggcttaaatamatgcaagaacttcattaagtcattctctatcagaataggagctattgagaatttctgcagaactaggattgtgtcttctctacctatgaaatgagtggtg

SEQ ID NO: 167518 - DNA, 201 bp, Homo sapiens
agatgacattttagaaactttaaatccttattctgtactagcctttataaattaaagaataatagaaatatgggtaaacgatatgaatgggaaagtaaagycccccaaagaaagaaagaaatgcaaacacaaatagatatgagaaagttattaatttcagcaataatcaaagaaatacatactataacaataattattttc

SEQ ID NO: 167519 - DNA, 201 bp, Homo sapiens
ggtcatttaaatcaatgagttgaatacaaacagaagtataattgccaaattatgggttttgggaaactatgatgaacacgagattctttacttgtctgttktaggttatttttccaggttatgtgatcctgtgatcacatatctgccaacattttcatgttttgggtatttcctaatgtaattgaatttctcctggtttag

SEQ ID NO: 167520 - DNA, 201 bp, Homo sapiens
atgttgggtcacaattgtctgatgatcctggctaagcatttggttaacctcattttgggtcctctttctctcttcacatggaggagcacagcacttgaackctctcgtgtttgaggacaactgggctgacatcgagtgaatttttggaaaactattatgtctttgtagtcacttaatgtcagcttgatgttgaagcaaagt

SEQ ID NO: 167521 - DNA, 201 bp, Homo sapiens
ggtggtcggcacaaacaaccatatattgtatggttacatttatatgaaataattagaataggcaaatctatgaatacataaagtgatgaatgattgcctgrgactaggtgtgtggggtggggtgcaggaatgaggagtgactgctagtgggtacatggtttctttttgaggcgataaaaatgttctaacttatattgggat

SEQ ID NO: 167522 - DNA, 201 bp, Homo sapiens
atacttgaagtcattttcttaagagtggaaatgactttaggctcttacatagacactttgtctcctaagccatctcatggcaactgctctgtgttcaagaragcaccatggtttcactggggcagcaggcagataccatgtaattgagaaatcagatcaaacagatgcatctagagagggtcaagacaaataatacattct

SEQ ID NO: 167523 - DNA, 201 bp, Homo sapiens
gctacggttgacctcataggtgtgttatgaatgtttaccctgacctcctagaagaaaaggaaaaagaaaggaaagagagagggagaaggtgagggaagggrggaagaaaagaaaggagagaaaagaagacagagaaaaaacagggagggaggaagctggggaaggaaaaagaccatttgctgactccgttgttttatttcc

SEQ ID NO: 167524 - DNA, 201 bp, Homo sapiens
ctcactctgttacccatgctagagtgcagtggagcgatcctagctctatataacattgaactgctgggcacaagtgatcctcccaccttagctttccaagyagctaaggccacaggcttgtgccactacacctggctgatttttaactattttgtagagatggggtattattatgttgtccgggcttgtcttgcactcctg

SEQ ID NO: 167525 - DNA, 201 bp, Homo sapiens
tcattaattcctcgcacaacacctacctcacaggtatgaattttctagttctttgttactttagccagtctcaccaaatttcaccaacctctactttctgytgttcggaagctgaagtgtgttttcttccatttcctgcgaagtgcctctgagaactctggggttccaccactaaagcctcccgcctcccataagcagtca

SEQ ID NO: 167526 - DNA, 201 bp, Homo sapiens
ctctaaccctaggtgatctctgcaataagtgcagtgaaaccatggggtcagagcctcaggaaatggtagagttgaaggccaagatctgctgattgataacytcacagagaagaaaactcaagaagaaaccaagggactgaatgaagaagaaagaaaagagatgagatggagtaccccatctctccctgaggatggaaggag

SEQ ID NO: 167527 - DNA, 201 bp, Homo sapiens
aatcactaatatattgagatgcatatgctgttagaataacttgctttccttttacatcttcatatttaaatgagagtattatattgtcttttaagaaatcrtatcagtggctagacagattgcatgatgaatacattttattttcttatacgtatttgttagtggcaatgttgggactgctgtgggtgagaacttctgcta

SEQ ID NO: 167528 - DNA, 201 bp, Homo sapiens
atattcaaattaggccgtttatttaagggttgtcaaatctcaaatagctcatcatagaatctggatgccaatatataaatctcataatgagctgttatttrgatgttatacaacagtggtttcaatgaatcatccatgaggcctggagttgaaatgaatgctttatttattgtctcccattgctgattataagctgtttcc

SEQ ID NO: 167529 - DNA, 201 bp, Homo sapiens
ataagaatttgaattgttatatgttaaaaacttatttcttcacattgatgcatttgatatattattatttataagtagtacatgtggcccatttaaacaaygtgagggtttcataagtgattttttctttgggttgcaaactattgacaggtggggagtcaaatttgaatatctttgtgctcttgttaactaaaacaatgc

SEQ ID NO: 167530 - DNA, 201 bp, Homo sapiens
acatcatgttgtatgccttgaatttacacaataaaatttatttttttcaacgtgcatacagatcacttgagaatcttgttacaatgcagattcagattcartaggtctggcacagatcacaaaacaccgcatattcaacaagcttccaggtgatgcttatggcccatggaccatatttggattagcagggctctcaaactt

SEQ ID NO: 167531 - DNA, 201 bp, Homo sapiens
ccagatatcagaacatttttaaaacgaatatgtggtgttctgtcagtaattagccattgaatatgtcaagttaatcacctaattatgtcttgctgtagaargacatacatgagaaacttacaagcctgttttgtacaacgttgtgtcttaaacactgtgtgtgatccatctgtcctctgaaattacttggagtcacctccc

SEQ ID NO: 167532 - DNA, 201 bp, Homo sapiens
ttttttatgttgccctattttacattatttttaataattttgttcaatatttgtcttcaatattgtaatcagatgcaaataaactggctttctcaaccttrattacatcagccttctctgtgaaataaattcaatcctttattacacagtttttttttacaacagctattcaacaaatgtgtatgtcatcctttctgtaaa

SEQ ID NO: 167533 - DNA, 201 bp, Homo sapiens
cttctgtccactaatcctacagcttcccttggtacttgtgcactccctgctgctttctctccactagctgtagtgtgttggaccctgtgaggtcacctttkcctggtcacctccctcacgtttgccatttgactgtgcccaggtcatactgagcacactgccaggaggaaggttgagcttggaggacatgaatgaggagaa

SEQ ID NO: 167534 - DNA, 201 bp, Homo sapiens
cttattaatttgaattagtttgagtccttagggaaccctgcgagggtttagttgtcttgattacaaaggcccacatccctcagaaagtaccctcatgtcgscagctggacaaccttaaggattgtcattgtggaatcacggcacaatccaatttcttatctcactgttatgagttgagtggtggtcaccaaaaagacatgt

SEQ ID NO: 167535 - DNA, 201 bp, Homo sapiens
aactttaccttaataagtaactgtttaaaactttacttattaatttgaattagtttgagtccttagggaaccctgcgagggtttagttgtcttgattacaraggcccacatccctcagaaagtaccctcatgtcggcagctggacaaccttaaggattgtcattgtggaatcacggcacaatccaatttcttatctcactg

SEQ ID NO: 167536 - DNA, 201 bp, Homo sapiens
tcgaaagcctggcccacaggtgactcccttgtctaaagaaaacgcttggtcttgctttcagcacatggcttcctgaaaacgaactttaccttaataagtarctgtttaaaactttacttattaatttgaattagtttgagtccttagggaaccctgcgagggtttagttgtcttgattacaaaggcccacatccctcagaa

SEQ ID NO: 167537 - DNA, 201 bp, Homo sapiens
tccatggattagagcacatgataactcttgagccagattataggaatccctatcataagattaggagaagtgagagaaaagaatcagaatcgaaagcctgrcccacaggtgactcccttgtctaaagaaaacgcttggtcttgctttcagcacatggcttcctgaaaacgaactttaccttaataagtaactgtttaaaac

SEQ ID NO: 167538 - DNA, 201 bp, Homo sapiens
tgtgtattacaggtgttcaatgatgggtaatgattaagtgaaaagatcagggcatgaggtatgtgtgcaaaaggctgggggctgtcagaggcagattcgtrtctctgccttggccagataagctgggtatgtatgtgagccgatgggagcatcccactccgtcctcctccctaatctttctctctaccgacataccctcat

SEQ ID NO: 167539 - DNA, 201 bp, Homo sapiens
aacctttggcagaaaaaaaattgtgatacattttggaataaataactggagaaaatgagactatccagatggatataaccaatcagctactaaggtaaagmaaggataaatgccgtctatctatacttcagaaaatatggaagtcaccagatatgccatactgtgtgatgagagagaaaagaaaatacgttggttgagaaa

SEQ ID NO: 167540 - DNA, 201 bp, Homo sapiens
agctgttagcagctgacaccttcagcatctgcaggatgggtgcaatggccccgtgaagggaacctgagtggggcacggaagtactaactacagttactgayccaccttcctctttcttgcctccaacagtcactctattactctgttatgtatagtcatagcatttatcactatctggaaatagcaggtatatttatatat

SEQ ID NO: 167541 - DNA, 201 bp, Homo sapiens
gtcatagcatttatcactatctggaaatagcaggtatatttatatatttactgcttattatctgtctcctttccactagataccataagctccagagcacrtcagtgttgtatcatcagtttctaaacaagtgccaggcacatagttaggtaccggggacacaatttgttgaatgagtaggggcgggatgaggtaggaact

SEQ ID NO: 167542 - DNA, 201 bp, Homo sapiens
cgggatgaggtaggaactttggaaatctgtgtcatgcccaactgtagtggatgctatcagtgtcccatccagatcacctcagatcctggctttttcaaccygggttcccattctccagcttctgcatgcttcactcctaacaagtgtcgtctgcttattagtgtgtgctttattagttgagatagtaatagctagaattga

SEQ ID NO: 167543 - DNA, 201 bp, Homo sapiens
aacccggaaggtgatgttgcagtgagccaaggttgcaccattgcactccagcctgggcaacaagagcaaaactccatctcaaaaaaaaaaaaaaaaaaaaaaaggaatagcacataaaggtataaagctgtcatgtgtttgccaaaggataatgttttctattatgatagaagattggccccaagagtagtcatcacataa

SEQ ID NO: 167544 - DNA, 201 bp, Homo sapiens
gaacccggaaggtgatgttgcagtgagccaaggttgcaccattgcactccagcctgggcaacaagagcaaaactccatctcaaaaaaaaaaaaaaaaaaaaaaaggaatagcacataaaggtataaagctgtcatgtgtttgccaaaggataatgttttctattatgatagaagattggccccaagagtagtcatcacata

SEQ ID NO: 167545 - DNA, 201 bp, Homo sapiens
aggctttaatgtgcacacaagtcccctgtggatcttgttaaaatgcagactctttcagtgggtctgatgagggacctgaggaactgcatttccactgagaytcccgggaaagctgatgctgctggtctccagaccacactaagagtggcaagggatttgttcattaatcttcataacagctcggtgaaataggttctatta

SEQ ID NO: 167546 - DNA, 201 bp, Homo sapiens
tgtgtgatgtaaatgcaaatgtctggagtcatcggggatgcttcataaagtgtggagcagacctagagaaaggttatgaaaatgtacaatgcttttccatygttgtagcttcatgcagacattatatatcatgaaatgaccatatgtttgagtaaccatttatatggaagatgagagagtttgaaagttcatttttttgat

SEQ ID NO: 167547 - DNA, 201 bp, Homo sapiens
agatgccaaatctttgccagctccttcctctgccccatcctacatctctcactcccttacaggtttcccctaaatgcattcccttaataaatcatgggacrattattttcatctcagcctctgcttctgggaaacccagctaacaatatcgaatatggaaacatcaaacccctgaatataaccagggctgcctcttactta

SEQ ID NO: 167548 - DNA, 201 bp, Homo sapiens
cctccacctcctgggttcaagtgttctcctgcctcagcctcccaagtagctgggactacaggcgccccctcaccatgcccagataattttttcatttttartagagacagggtttcaccgtgttggtcaggctgttctcgaactcctgacctcaagtgatcctcccgaagtgctgggattacaggcatgagccaccggcct

SEQ ID NO: 167549 - DNA, 201 bp, Homo sapiens
aataaaacatatgtttctctatagttcaatttattttgtgcttgaaggaattttttttttttttttttttttttttttttgagagggagtctcgctctgtygccaggctggagtgaagtggcgtgatctcggctcactgcaacctctgcctctcgggttcaagccattctcctacctcagcctcccaagtaactgagatta

SEQ ID NO: 167550 - DNA, 201 bp, Homo sapiens
ccaaatgtccaacaatgatagactggattaagaaaatgtggcacatatacaccatggaatactatgcagccataaaaaatgatgagttcatgtcctttgtrgggacatggatgcaattggaaatcatcattctcagtaaactatcacaagaacaaaaaaccaaacaccacatattctcgctcataggtgggaattgaacaa

SEQ ID NO: 167551 - DNA, 201 bp, Homo sapiens
ctgcaggtggcacaatgtcttcttggcctgtccctgctggctgttctctatttccttggatgcaccttttggtgtggcacaactcaggtcgcccattgcawtgatgatatctctgctttgggaaggaaagcagcagaaatatcctaaagtagcattttccttcccgcacccttttgcccaatctccatgcatttgtaagtg

SEQ ID NO: 167552 - DNA, 201 bp, Homo sapiens
tagcaaagacttggaaccaacccaaatgtccaacaatgatagactggattaagaaaatgtggcacatatacaccatggaatactatgcagccataaaaaakgatgagttcatgtcctttgtggggacatggatgcaattggaaatcatcattctcagtaaactatcacaagaacaaaaaaccaaacaccacatattctcgc

SEQ ID NO: 167553 - DNA, 201 bp, Homo sapiens
acccagccatcccattactgggtatatacccaaaggactataaatcatgctgctataaagacacatgcacacgtatgtttattgcggcattattcacaatwgcaaagacttggaaccaacccaaatgtccaacaatgatagactggattaagaaaatgtggcacatatacaccatggaatactatgcagccataaaaaatg

SEQ ID NO: 167554 - DNA, 201 bp, Homo sapiens
aataccatttgacccagccatcccattactgggtatatacccaaaggactataaatcatgctgctataaagacacatgcacacgtatgtttattgcggcaytattcacaatagcaaagacttggaaccaacccaaatgtccaacaatgatagactggattaagaaaatgtggcacatatacaccatggaatactatgcagc

SEQ ID NO: 167555 - DNA, 201 bp, Homo sapiens
cttttacactgttggtgggactgtaaactagttcaaccgttgtggaagtcagtgtggcgattcctcagggatctagaactagaaataccatttgacccagscatcccattactgggtatatacccaaaggactataaatcatgctgctataaagacacatgcacacgtatgtttattgcggcattattcacaatagcaaag

SEQ ID NO: 167556 - DNA, 201 bp, Homo sapiens
aattatggatcagcttaccctagttattgcatgtggaggaatacattgtaaggtattattagttattgctacagtaaagctgcataacaaaacccatcaarcacaatagtttacaacaacatgcatttattttattgttcaggtacatatatgctggtgagttatgctgtgtgctggctgagtttggatccagatagccag

SEQ ID NO: 167557 - DNA, 201 bp, Homo sapiens
tgtgggtgacaatgtcatatttcctgattggatttttatctgaggagggtgagaactgtcagtttcacttcctcttagaaagatattttaagttgaataarttttcctttaagtgacttgtcacaggtggcaactgtctgagcctgtgtattctattctttgtgccagaattttcttaccactgattaccaggcacataat

SEQ ID NO: 167558 - DNA, 201 bp, Homo sapiens
accccccttgcagtgtattacagaatctttattcacacagtctcaccacaaagtgtattgttaagcttgttatttttgccactttgacaggaaatgtgatyaatacattttaacttacctttttcttacctatgcatgaaactaagcctcctttcacatgtttaaggaccatgcatgtatatacatacatatatttctaaa

SEQ ID NO: 167559 - DNA, 201 bp, Homo sapiens
ttatagtaaggactcctgcagtaatcaccaagtataatgggggcacttaaccctcagcttttttgcaccttaaatggtttaataataattgcaacaaaaartatttataaagcattcgggaatgcttataagggattaaagtaatattaaagaaatcactagagtctcagcattaaatgatttttaatgcaacaaaatctc

SEQ ID NO: 167560 - DNA, 201 bp, Homo sapiens
aatgtatcatactaatgtaagatattaaccatagggagaactgcctgtgacatacatggaaattctctgtacaaattttctgtaaatctaaaattattctrgaatagaaggctatttaaaaaaaaaaaaaagaccaaagctaaacatataatcgtggtggcctggggctggaagtgaaggttagagaatggagagttattg

SEQ ID NO: 167561 - DNA, 201 bp, Homo sapiens
tggctgcatgaatcaatgtcagctggatacaaatatatctctggaaaggggacattgggaaaaagggtggatacactaagcatagaccccagaacctgttctcagaaaaatattttcatggtaaatcctgagatattaaaggacaggtttaaaatgctggctgcatgctttctctgtcttttattttcattggatgctaga

SEQ ID NO: 167562 - DNA, 201 bp, Homo sapiens
agacattgggggagtgatatgggtcctgggatgggaacagtaggattctgataacaagccaaagagatcagaaattcctttaagtattttaccggtacccyatagtcctcaaaatcacatacacaaaatatcatgggtacagatcaacaacaaacttagactggctttataacagtgcaaggtctaaaactttgttaccaa

SEQ ID NO: 167563 - DNA, 201 bp, Homo sapiens
agagtgtcattgcttagaacttcttaggaaaacaaatcaataaatctgtaggaaataggctgtgtgctgaaccttatttggtttctgctttttgaccgagragaagcatattatattgaaagggtatatacttggtacatagaaggaaggcgacctttaatctctgactttatataaacataaaaaccgtgaatagaaaag

SEQ ID NO: 167564 - DNA, 201 bp, Homo sapiens
catcaagagaatcccaggatggaaagcagattgtgacaaataatatctatattataaatatagacaacaaccttactgaaggcaataagggaggaagttgmtaactgaagtaactggaaatgaatggaatctgtgaaactgaaagcaaaaagaatggttgttaacaactgttaacagttctgagaccagtattcttatata

SEQ ID NO: 167565 - DNA, 201 bp, Homo sapiens
ctcaagaagctgcattttatagccgtagaagagccatgctgcattgataaaatgtgctccttagcaggcgctcaaatgttacaccagctcactggcttgastaatcagtcctcctttcactggttcagttgcatcagacgagtgttcatttttcacacccagcaaccactctcagttcttaattctgatgaatgcatgtca

SEQ ID NO: 167566 - DNA, 201 bp, Homo sapiens
aggtgctggagaggatgtggagaaacaggaacacttttacactgttggtgggactgtaaactagttcaaccgttgtggaagtcagtgtggcgattcctcarggatctagaactagaaataccatttgacccagccatcccattactgggtatatacccaaaggactataaatcatgctgctataaagacacatgcacacgt

SEQ ID NO: 167567 - DNA, 201 bp, Homo sapiens
tatatgcctgatgggcctacttcttttttgaaaggtgctcttctcctaacttctgggacaccggatttgctgttttttcttcctggattcttttctctcakatcttcatggggatgtttcttctcatcatggatataacccctttgcagaggccctcccagtcccaagcgatcctaatcaaagcagcttccttcaaccttt

SEQ ID NO: 167568 - DNA, 201 bp, Homo sapiens
taaaaagtcaggaaacaacaggtgctggagaggatgtggagaaacaggaacacttttacactgttggtgggactgtaaactagttcaaccgttgtggaagwcagtgtggcgattcctcagggatctagaactagaaataccatttgacccagccatcccattactgggtatatacccaaaggactataaatcatgctgcta

SEQ ID NO: 167569 - DNA, 201 bp, Homo sapiens
tggcaatcattaaaaagtcaggaaacaacaggtgctggagaggatgtggagaaacaggaacacttttacactgttggtgggactgtaaactagttcaaccrttgtggaagtcagtgtggcgattcctcagggatctagaactagaaataccatttgacccagccatcccattactgggtatatacccaaaggactataaat

SEQ ID NO: 167570 - DNA, 201 bp, Homo sapiens
caatgagataccatctcacaccagttagaatggcaatcattaaaaagtcaggaaacaacaggtgctggagaggatgtggagaaacaggaacacttttacaytgttggtgggactgtaaactagttcaaccgttgtggaagtcagtgtggcgattcctcagggatctagaactagaaataccatttgacccagccatcccat

SEQ ID NO: 167571 - DNA, 201 bp, Homo sapiens
gaagacatttatgcagccaaaaaacacatgaaaaaatgctcaccatcactggccatcagagaaatgcaaatcaaaaccacaatgagataccatctcacacyagttagaatggcaatcattaaaaagtcaggaaacaacaggtgctggagaggatgtggagaaacaggaacacttttacactgttggtgggactgtaaacta

SEQ ID NO: 167572 - DNA, 201 bp, Homo sapiens
gtctcttcagagtctttagtttgttttcatccttttccagcagaagagccctacaaaagaagacatttatgcagccaaaaaacacatgaaaaaatgctcaycatcactggccatcagagaaatgcaaatcaaaaccacaatgagataccatctcacaccagttagaatggcaatcattaaaaagtcaggaaacaacaggtg

SEQ ID NO: 167573 - DNA, 201 bp, Homo sapiens
ctgggcgtggtggcacacacctgtaatcccagctacttgggaggctgagggatgagaatggcttgaacctgggaggtggaggttgcgatgagccgagattrtgccattgcactccagcctgggcaacaggggagaaactccatcacaaaaaaaaaaaaaaaatactggtcaattggaagtatctggaaggtaattgctata

SEQ ID NO: 167574 - DNA, 201 bp, Homo sapiens
actgcaggtggcacaatgtcttcttggcctgtccctgctggctgttctctatttccttggatgcaccttttggtgtggcacaactcaggtcgcccattgcmttgatgatatctctgctttgggaaggaaagcagcagaaatatcctaaagtagcattttccttcccgcacccttttgcccaatctccatgcatttgtaagt

SEQ ID NO: 167575 - DNA, 201 bp, Homo sapiens
tttcaatacctgatatttaatttgaatggagtataacaactacattgatatagggaaagttttattgaatgaacaaagccatcacataaatttttctttcatttttttttttgtcagtctctgaaattagtgaataggtagagacatccatcagttggatcattcttaggtaacattttgtttataagaacagggcagtgc

SEQ ID NO: 167576 - DNA, 201 bp, Homo sapiens
agacagtccaagaggacaggcctctgctcactcccagggaacctcgtcacacctctttgagatgaatggattggcaaaacaggacactgcaggtggcacartgtcttcttggcctgtccctgctggctgttctctatttccttggatgcaccttttggtgtggcacaactcaggtcgcccattgcattgatgatatctctg

SEQ ID NO: 167577 - DNA, 201 bp, Homo sapiens
atttcaatacctgatatttaatttgaatggagtataacaactacattgatatagggaaagttttattgaatgaacaaagccatcacataaatttttctttcatttttttttttgtcagtctctgaaattagtgaataggtagagacatccatcagttggatcattcttaggtaacattttgtttataagaacagggcagtg

SEQ ID NO: 167578 - DNA, 201 bp, Homo sapiens
  misc_feature (1)...(201): n = A,T,C or G
ttagagaattacttctttctgtagttaataacacaaagcaatcctgttcaggttctttggataagcctccctactttccttcttctgttcttgttctcccntagcccaaagcagcaagccaagatggcggagtactgccgactgatctttggggatgcccttctcatggagcccctggaaaaatatccagtaagcagttct

SEQ ID NO: 167579 - DNA, 201 bp, Homo sapiens
tagcatcctgcttctctgtagcagacgctggtgattcatcacaccacatttctttggcactctggatttcagcacaagtgctgtagacagttaattgcctrtcgctagtgtcccgcttccttcaagtgcatgtgggaaagaaggagagggaagagaatctgaaagaccgttcagcaggcaggtgcaactcagaattaagag

SEQ ID NO: 167580 - DNA, 201 bp, Homo sapiens
attttttgtgccaagcagtttttgaaatattttacatgcctcagctcatgtaagccttaccacaaacccaggtgcttctaagagtaaatattatgattatygccattttacagatgatggaactgagtcctaaagaggatgaataacttgctcaaggccatgtaactaaaacatgacagagatgggattccaatccagtta

SEQ ID NO: 167581 - DNA, 201 bp, Homo sapiens
tgcacctgaattaagaccattttgactagtcaaatgcagatatgcagatattttaggccttctgaacctttcatttcatagaaatagaaattgcccccccmctttttctttggtagtcatccagcttgtttctctgttgtacaaataaaacagaaattaggacagcgctgagattgttttattcatccctgagttctcaga

SEQ ID NO: 167582 - DNA, 201 bp, Homo sapiens
ctaacgattctcaatggatcatttagtatacttccaggcttcttggcatgctgtaacacacagttaggtataagcagccctaagaagtttttcagaggccygcccctctggttatctcaatagctgctatgagatatagcccacccagttcacatgcctgtatttatcagtgatttagagaattctttatttcaggaactt

SEQ ID NO: 167583 - DNA, 201 bp, Homo sapiens
ctttgggaggccgaggcaggtggatcacgaggtcaggagatcgagaccatcctggctaacacggtgaaaccccgtctctactaaaaaatacaaaaaaaaaacaattagccgggcgtggtggcgggcgcctgtagtgccagctactcaagaggctgagacaggagaatggcgtgaacctgggaggtggagcttgcagagagc

SEQ ID NO: 167584 - DNA, 201 bp, Homo sapiens
aattttttaaaaaaaaggagaagaaaaagaggaggaggagaaagatgtgctctatgggttgatttggaaatatcccctagaaagaaggcaagaataatcayatttgcatatatttgcataaaggaactagaaggagatataaaaaacagaataaaagtgttttgtagtgggtggaaactggtagatggagacaagggtggg

SEQ ID NO: 167585 - DNA, 201 bp, Homo sapiens
ccgaagtaggcttattgtatagtaagagtttaatagtaagttgattgacaggtagttccattttcaaagttctatgctaatcccttttttctttgtctctrccaacattatcttcctctacatctgagatggcatctcgagagtcatcttcagtccattagtaacagctgtcttggagaattatataaagaacaactctag

SEQ ID NO: 167586 - DNA, 201 bp, Homo sapiens
tatatttgcataaaggaactagaaggagatataaaaaacagaataaaagtgttttgtagtgggtggaaactggtagatggagacaagggtgggtgtgaaaktcttcactctgtaaaactttttatacttcataatttctgagctgtttctgtactagttaatggaaaaaatgaaaagagaactattgtgttcttataagaa

SEQ ID NO: 167587 - DNA, 201 bp, Homo sapiens
aaacataacatcctccagatttctaccagtgtttttcttatgactggaaatagtaagtagaacaatgtcatacttggacaactatattcaaactggctaawagttttgttaattgggactacaaatgagaaatagaagtcccatgatgacctagtccattgaagtgtcaagtttaagtctcctagttcagaatcaaaggga

SEQ ID NO: 167588 - DNA, 201 bp, Homo sapiens
aaacattcctccagtctgcacctccttctcattcccacagcgactctcccttttaggatattgttgttcatctcctagtccacttttcaaacttaatgtgygtaccaagcatgtggggctctaggtaaaatacagatcctggctcagcaggtatgagatggggcctgagattctacatttctggccagcttccaggagatg

SEQ ID NO: 167589 - DNA, 201 bp, Homo sapiens
aggagatacacctaatgctaaatgacgagttaatgggtgcagcacaccagcatggcacatgtatacatatgtaactaacctgcacattgtgcgcatgtacmctaaaacttaaagtataataataataataataataataataataataataataataaaagttttggtagggtcgggcgcagtgactcacgcctgtaatcc

SEQ ID NO: 167590 - DNA, 201 bp, Homo sapiens
tataaaaaacagaataaaagtgttttgtagtgggtggaaactggtagatggagacaagggtgggtgtgaaagtcttcactctgtaaaactttttatacttsataatttctgagctgtttctgtactagttaatggaaaaaatgaaaagagaactattgtgttcttataagaatggcaaggactgctaattttctaccctaa

SEQ ID NO: 167591 - DNA, 201 bp, Homo sapiens
taaaaaacagaataaaagtgttttgtagtgggtggaaactggtagatggagacaagggtgggtgtgaaagtcttcactctgtaaaactttttatacttcawaatttctgagctgtttctgtactagttaatggaaaaaatgaaaagagaactattgtgttcttataagaatggcaaggactgctaattttctaccctaaca

SEQ ID NO: 167592 - DNA, 201 bp, Homo sapiens
atttttgccccttaatgatctgtgttttctttatgcagcataacccgaggcaattaaaggcaggaaactactctaaccaactggcaattatgttttagtayatttggtacaatgcatactcgctctccatattttcagaatttttgaaaagtaaagaagcttcaaaactgtcaaagttggctcttctttcactcttcacga

SEQ ID NO: 167593 - DNA, 201 bp, Homo sapiens
tggataataccctgcaagccagccctttggaggaatcaaaattgaacaatcaagcctgaggacttgatagagtctcaactttgactttttagttttttttytctctctcaatctttttctttcttagaaaatagaaaaatgactgcttactactgattgtaatgtgtctcaacttttgaaattcagccttaaacttgtttt

SEQ ID NO: 167594 - DNA, 201 bp, Homo sapiens
aacaacacatttaaaaattggttactagtgtcaacagttaggtgttatcctctcagaagattatctgtgtaaaccgaaacctacacctatatacgtacatrtttttaattatgcgtatatatttaagaatagttttacaaaaatgggattatggcccatgtattttccttaaactgggaatcaaatttggatttcatataa

SEQ ID NO: 167595 - DNA, 201 bp, Homo sapiens
gtatcaatgagcataaccagccccctgaacttggtttctagtgccgttcttcaataaaaggaactagggctcttggagaaatggctgattctagagctggrgaagggaatttacaagattaggctggagcatctaacaatgccaggaagcaagaaagtttctcaaaggaacatatggaaccaactaaaagacttctcaatg

SEQ ID NO: 167596 - DNA, 201 bp, Homo sapiens
cccgtagttgctctcctcctgccttggagattgcttggtgctcctgcaatgtcttccttcaagcatgatgcacattataattattctgttctgcttcaggratgcatatcaagttctatgcaattaatgccattacaaggcaaatacagagctcttcttggcatctccaggacatctgtaacgctgcagaagcaaagcatt

SEQ ID NO: 167597 - DNA, 201 bp, Homo sapiens
gttagattacagggtatttatgcatatgttttcccagtagtactcactatattttaaaacctgattaagatgacataagataaaatgtggcgtattgtgaytgagaacccctagtctcgaatgctcatatttagtgggtataatgatgaaaactattttcgaggacatttttgaaagattccaaaaacatacagaaatata

SEQ ID NO: 167598 - DNA, 201 bp, Homo sapiens
aaagcttggaagtagatcttaacaccattgccatcacccacccacacacatccctacaagtgaagaaacggaaacctcaaagcaggtaagtgactggtcasaaaaatcacaggtaataaagccaggaatcaaacattatcgcagcatgctagaaagcctatctgcttttgatttctcagtcacattattttttagtaattc

SEQ ID NO: 167599 - DNA, 201 bp, Homo sapiens
gcaaatcaataaacgtaatccagcatataaacagaaccaaagacaaaaaccacatgactatctcaatagatgcagaaaagccctttgacacaattcaacarccctttgttttaaaaactctcaataaattaggtattgatgggatgtatctcaaaataataagagctatttatgacaaacccacagccaatatcatactga

SEQ ID NO: 167600 - DNA, 201 bp, Homo sapiens
tcaacatatgcaaatcaataaacgtaatccagcatataaacagaaccaaagacaaaaaccacatgactatctcaatagatgcagaaaagccctttgacacmattcaacaaccctttgttttaaaaactctcaataaattaggtattgatgggatgtatctcaaaataataagagctatttatgacaaacccacagccaata

SEQ ID NO: 167601 - DNA, 201 bp, Homo sapiens
tctagacctaattagccttctctgtgggcagccattgtcttcatttaatatctagggcagagattctcaaacttcagattgcatctgaatcactgggaggkgaatcacccagcacagattgtcgggccaccccagagtttctaatttagtaggcctagagttgaaccagagaatttgcatttttcacttgttcccaaatga

SEQ ID NO: 167602 - DNA, 201 bp, Homo sapiens
tgggatgcaaggctggttcaacatatgcaaatcaataaacgtaatccagcatataaacagaaccaaagacaaaaaccacatgactatctcaatagatgcaraaaagccctttgacacaattcaacaaccctttgttttaaaaactctcaataaattaggtattgatgggatgtatctcaaaataataagagctatttatga

SEQ ID NO: 167603 - DNA, 201 bp, Homo sapiens
attgggttcctcattttctttttagtggcagagagaaagggatgcagttaaactccagaggggtggctgtggtatgttaatagaagtgggagacactattkgaatcatcgctttgtagccaaatgagttcatggacggcatttccacccaggtcttccccacgccacattacccttgatgacagtgccctgcggtggtttt

SEQ ID NO: 167604 - DNA, 201 bp, Homo sapiens
gcagtatggccattttcatggtattgattcttcctatccatgagcatggaatgttcttccatttgtttgtgtcctcttttatttcgttgagcagtggtttstagttctccttgaagaggtccttcacatcccttgtaagttggattcctaggtattttattctctttgaagcaattgtgaatgggagttcactcatgattt

SEQ ID NO: 167605 - DNA, 201 bp, Homo sapiens
tatctctgttttggtaccagtaccatgctgttttggttactgtagccttgtagtatagtttgaagtcaggtagcatgatgcctccagctttgttcttttgrcttaggattgacttggcaatgcgggctcttttttggttccatatgaactttaaagtagttttttccaattctgtgaagaaagtcattggtagctttatgg

SEQ ID NO: 167606 - DNA, 201 bp, Homo sapiens
ttataatcattagttgaggttaatctttgatttgtcaaggaggtgtttgaatttcctcaaataatattttcagattttgaagagtcacacacacacacacatatacacaataacacatttatacagacacacgaacaactttatacaattggagagaagcttagcagattaaccattttggcatcaaaatggatttcgccc

SEQ ID NO: 167607 - DNA, 201 bp, Homo sapiens
attataatcattagttgaggttaatctttgatttgtcaaggaggtgtttgaatttcctcaaataatattttcagattttgaagagtcacacacacacacacatatacacaataacacatttatacagacacacgaacaactttatacaattggagagaagcttagcagattaaccattttggcatcaaaatggatttcgcc

SEQ ID NO: 167608 - DNA, 201 bp, Homo sapiens
cttggaaagacttagcaaagcccagatttcaggaaagtagaaaaattgcatttaatgctttgattataaaattatcttgtgagtttcttgtttttttttttgtttttttttttgagatggagtctcgtcctgttgcccaggctggagtgcagtggcacgatctcagctcactgcaatatctgcatcctgggttcaagcgat

SEQ ID NO: 167609 - DNA, 201 bp, Homo sapiens
actccctgaaacataaaaaaagtctattttatgaattttatatacttatagtttattttattatttgtagaacttttaaaatttatatcttcatatatgartttcatttttattttgtgtgttctatcttatatatttgtagataatttcataaatgtttatttttgctagttaagcatctgatataaatgacatttccaa

SEQ ID NO: 167610 - DNA, 201 bp, Homo sapiens
gtctgtgacatttggaaataattgtagtgaaacagaataatcctacactcttatttatccatactaaaatgtcttctaccttggacactacaagatatttytggaaaaaaaaaaaaaaagaggcgacttgacacccataaaagaatgcattcacatcctttctaacttcatttcctccaggacaaatatcagtggatgggt

SEQ ID NO: 167611 - DNA, 201 bp, Homo sapiens
agcatagaccccagaacctgttctcagaaaaatattttcatggtaaatcctgagatattaaaggacaggtttaaaatgctggctgcatgctttctctgtcttttattttcattggatgctagaatttgaatgggccctgtttctgctttattaatccatattttgtggcaggagaaattcaggagaactcaggaatggcag

SEQ ID NO: 167612 - DNA, 201 bp, Homo sapiens
aagcatagaccccagaacctgttctcagaaaaatattttcatggtaaatcctgagatattaaaggacaggtttaaaatgctggctgcatgctttctctgtcttttattttcattggatgctagaatttgaatgggccctgtttctgctttattaatccatattttgtggcaggagaaattcaggagaactcaggaatggca

SEQ ID NO: 167613 - DNA, 201 bp, Homo sapiens
taagcatagaccccagaacctgttctcagaaaaatattttcatggtaaatcctgagatattaaaggacaggtttaaaatgctggctgcatgctttctctgtcttttattttcattggatgctagaatttgaatgggccctgtttctgctttattaatccatattttgtggcaggagaaattcaggagaactcaggaatggc

SEQ ID NO: 167614 - DNA, 201 bp, Homo sapiens
ctaagcatagaccccagaacctgttctcagaaaaatattttcatggtaaatcctgagatattaaaggacaggtttaaaatgctggctgcatgctttctctgtcttttattttcattggatgctagaatttgaatgggccctgtttctgctttattaatccatattttgtggcaggagaaattcaggagaactcaggaatgg

SEQ ID NO: 167615 - DNA, 201 bp, Homo sapiens
catgattagaatcatacttgcttaacttttaggatcttatttgactaaaatatttatgtagctgctttggaaggtgcatagctgtggcacagatggctagmtgatcactaaaaatacacgtgccttttcatggcatagggtaattgctggcaaaagtcttctcaacgagggactacgtgaccatttctcaccaataaaatg

SEQ ID NO: 167616 - DNA, 201 bp, Homo sapiens
actttggacaaatcatttaatccttttgcctcaactgcttcatacctaagatagaattgatatcggcaactaactcctaggtttactgggaagagtaaaaktgtcagtaaatgtgaaatactttgaacagtgcatggtgctcagtaagaactcagtacatgtaagcacctatgctttcaaatggactctcattcgttgaga

SEQ ID NO: 167617 - DNA, 201 bp, Homo sapiens
aaaaaaaaaaaaaagatgcaagaacttgaatcaagaatataaagctctgcgtctgcaccacaagagacaagagtaattggtagagtttgtgttatcctttwaagagtgcttgtgactagcagatgctgagagaaaaaccaacatatttttcttgttcctcaagctactcattattatcttgataatatttctaatatttat

SEQ ID NO: 167618 - DNA, 201 bp, Homo sapiens
tatacatatgcatgtatatctatatgtgtatatctatatgtgtatgtttataagtataaaatgtacgtataaaattgcggataagatggacctagtatgcsactataccacttgtgtttcttttccatattgaaaattgtcaatctttccccatttctgtagaaaaaatgaatttacactcaaaaaagttgattagccatg

SEQ ID NO: 167619 - DNA, 201 bp, Homo sapiens
aacatttttgaagatacggtctctgttctattttttatttttcattcctataaagttttattgaatgcctatatgtgtccaacataccagatcctaaggtatgtttcacataagtcagattggtctctgtccttaatggtgttatcatatagcagaggacaaaatcataaaataataataatatatgaaagatatgtaagc

SEQ ID NO: 167620 - DNA, 201 bp, Homo sapiens
caactatcctttaaaatatacttatctagagggaagagttaagtgagaaaactgaagatttagaagtatgatgttgatttctaaatcaagaaaaacatatrtactattgctttttcactgaattaaactgatttttacagagtgactgctataatcataacactgggctagactactgtgattaatacaggtaagtaaaga

SEQ ID NO: 167621 - DNA, 201 bp, Homo sapiens
tatattttctattaaaggtgaacatacacgtgtgttatggctaagcaaccccaattccaggtatgcactgttggaaatatattctcctccaccctaggaarcaggcataagaatgctcttcttaacattattctcagtagcctcagaccagaaataacctaaattaaatatccaccagcagcaaaataaacacgactatac

SEQ ID NO: 167622 - DNA, 201 bp, Homo sapiens
ccatctccctgaaggagttctgggctgggatttttaaagggattatgaagagtgaggggctggaaatttgggattcttgattggttggagtaaggaggatraaatcatcaggttttggaaaatgaattatttggtaagtcagcttctcttggagccctatagaccagctggcgtcagtagttttactggtatgcaggacct

SEQ ID NO: 167623 - DNA, 201 bp, Homo sapiens
atttttgaagatacggtctctgttctattttttatttttcattcctataaagttttattgaatgcctatatgtgtccaacataccagatcctaaggtatgtttcacataagtcagattggtctctgtccttaatggtgttatcatatagcagaggacaaaatcataaaataataataatatatgaaagatatgtaagcatg

SEQ ID NO: 167624 - DNA, 201 bp, Homo sapiens
catttttgaagatacggtctctgttctattttttatttttcattcctataaagttttattgaatgcctatatgtgtccaacataccagatcctaaggtatgtttcacataagtcagattggtctctgtccttaatggtgttatcatatagcagaggacaaaatcataaaataataataatatatgaaagatatgtaagcat

SEQ ID NO: 167625 - DNA, 201 bp, Homo sapiens
acatttttgaagatacggtctctgttctattttttatttttcattcctataaagttttattgaatgcctatatgtgtccaacataccagatcctaaggtatgtttcacataagtcagattggtctctgtccttaatggtgttatcatatagcagaggacaaaatcataaaataataataatatatgaaagatatgtaagca

SEQ ID NO: 167626 - DNA, 201 bp, Homo sapiens
ttttttttctgtgacagagtctcactctgttgcccaggctggaatccagtggtgcaatctcggctcactgcaacctctgtctcccgggttcaagcgattcycctgcctcagcctctcgagtagctgggactacaggtgtgtgccaccacactcagctaatttttgaatttttagtagagatgtggttttgccatgttggcc

SEQ ID NO: 167627 - DNA, 201 bp, Homo sapiens
gctgaagtgaagttacaaaggtcacactcccgtgcaaacatctgattggttgctttttgcaaccaatgacctgcattctgaggtgttttttttttttttttaacttaagatacatgaatcctctgggctgcgttctgtccttggctgctttttgcaaccaatcagaggctagggtgaagttacaaagttgccaaggaagac

SEQ ID NO: 167628 - DNA, 201 bp, Homo sapiens
gctaggaagtcagctagccactttctcacatctagcaaactgctcctacctactatccttgcaagaggcagaactcagatttgtcatttttaaatattcartgaaccactgggcttattcaggattatttgaaactataaatacatatattttttaaaattcttggattcaaggggtacgtgtacaggtttgttacatgga

SEQ ID NO: 167629 - DNA, 201 bp, Homo sapiens
cttggccaggtgcggtggctcacgccagcactttgggaggccgaggcaggtggatcacctcaggtcaggagtttgagaccaggctggccaacatggcaaarcccggtctctactaaaaatacaaaaattatctgggcgtggtggcacatgcctgtagtcctagctatttgggaggctgaggcaggagaatcgcttgaaccc

SEQ ID NO: 167630 - DNA, 201 bp, Homo sapiens
agtttgaatttttttaagataactatactagacttaatgttgtggtaggtttgtgactgtccttgattttagtcctcaaatatctatagcagcagcagtttgtatctgaaattattacaaggggatttgcctattagaaatatgcctaagttccattattcattaaggtcacagcagcaattctgattaatggagctgatt

SEQ ID NO: 167631 - DNA, 201 bp, Homo sapiens
attatataattatgtataatatataattttttataattatgtgtaatatataattatttatcatataattacaatatatattattaacataatatctaaayatattaataatctaatatctataattaatataatatataaatattacttcttgaaatccaacgtgcacctgaatcacctgagccgttgttaaaatgcaga

SEQ ID NO: 167632 - DNA, 201 bp, Homo sapiens
gcaatggcaggaaatggaaccagctgttcaaaagcatactttgtttgtaacttaaatgtttatacatccaatcttcttataaagtttgaatttttttaagmtaactatactagacttaatgttgtggtaggtttgtgactgtccttgattttagtcctcaaatatctatagcagcagcagtttgtatctgaaattattaca

SEQ ID NO: 167633 - DNA, 201 bp, Homo sapiens
aatgctgtctctacctaaagccttatctagcacgtgggaaggacagaggctttggagtccaacggttagaatatggctaaagggccagccacctgctaccrtataacgtgcatcctcagtcaccccaggggactccagcacccgttcagaagttctggctggctgtatttgtagctccttcttctctagaatccatatgaa

SEQ ID NO: 167634 - DNA, 201 bp, Homo sapiens
ttatagtgattttacatggaggcaatggcaggaaatggaaccagctgttcaaaagcatactttgtttgtaacttaaatgtttatacatccaatcttcttayaaagtttgaatttttttaagataactatactagacttaatgttgtggtaggtttgtgactgtccttgattttagtcctcaaatatctatagcagcagcag

SEQ ID NO: 167635 - DNA, 201 bp, Homo sapiens
ttgcctagtggtctctgtacagaaaaattttggctaatgctgtctctacctaaagccttatctagcacgtgggaaggacagaggctttggagtccaacggytagaatatggctaaagggccagccacctgctaccatataacgtgcatcctcagtcaccccaggggactccagcacccgttcagaagttctggctggctgt

SEQ ID NO: 167636 - DNA, 201 bp, Homo sapiens
gaaatgtgtctttagccactagccgaggacagaccaataaacagcatccaaaaatgttaatgattatatatggttccagaatttacaatggtttgtgttaygattttttttaattttacagtggctggaaagtgaaacacattcaataaaaactgtatttcaaatacccatacaatgattctacttttcactttcagcaca

SEQ ID NO: 167637 - DNA, 201 bp, Homo sapiens
gcctctgcactccagcctgggcaacagagcaagattccgtctcaaaaaaaaaaaaaaaaaaatatgtatatatatatatatatatatatatatatatatttaaatgacacttttaaaaatggagggaggagagtagttatgatatatcagtttactgtaagaataattttgacagatgggatattttcgcatgtcagcatc

SEQ ID NO: 167638 - DNA, 201 bp, Homo sapiens
cgcctctgcactccagcctgggcaacagagcaagattccgtctcaaaaaaaaaaaaaaaaaaatatgtatatatatatatatatatatatatatatatatwtaaatgacacttttaaaaatggagggaggagagtagttatgatatatcagtttactgtaagaataattttgacagatgggatattttcgcatgtcagcat

SEQ ID NO: 167639 - DNA, 201 bp, Homo sapiens
agcaaggtcttttattgttgtttccacaggaacaaataggcaaggtaatgtaaggcaggcttaggattggcttgtttgaataatttcagcaggctctggggtgtaggagctctctctattgtctggtacctggccctgggtgatggagcagtagaatattggccctgagtatgacagcctaatgagaaggtggtgggtatg

SEQ ID NO: 167640 - DNA, 201 bp, Homo sapiens
cacgcctctgcactccagcctgggcaacagagcaagattccgtctcaaaaaaaaaaaaaaaaaaatatgtatatatatatatatatatatatatatatatatttaaatgacacttttaaaaatggagggaggagagtagttatgatatatcagtttactgtaagaataattttgacagatgggatattttcgcatgtcagc

SEQ ID NO: 167641 - DNA, 201 bp, Homo sapiens
atcacgcctctgcactccagcctgggcaacagagcaagattccgtctcaaaaaaaaaaaaaaaaaaatatgtatatatatatatatatatatatatatatatatttaaatgacacttttaaaaatggagggaggagagtagttatgatatatcagtttactgtaagaataattttgacagatgggatattttcgcatgtca

SEQ ID NO: 167642 - DNA, 201 bp, Homo sapiens
actacctccctggatccatgcccttagacatgtaactttataattgccttctactcagcaatgtgacacattgcaaatgagatgttggcaaatgtcacatmtacagagaaataaaaagcagttgtgcaattgggcttgctcttagggttgtcctctgacactgccatgagaaggataggcccaggctatccggccagagga

SEQ ID NO: 167643 - DNA, 201 bp, Homo sapiens
acctgggaggcggaggttgtggcaagctgagatcacgcctctgcactccagcctgggcaacagagcaagattccgtctcaaaaaaaaaaaaaaaaaaatatgtatatatatatatatatatatatatatatatatttaaatgacacttttaaaaatggagggaggagagtagttatgatatatcagtttactgtaagaata

SEQ ID NO: 167644 - DNA, 201 bp, Homo sapiens
ttaagttatacttgctgctatttacttcgccagaagactgattgcattattggccccaattcttcatcattactacctccctggatccatgcccttagacrtgtaactttataattgccttctactcagcaatgtgacacattgcaaatgagatgttggcaaatgtcacatctacagagaaataaaaagcagttgtgcaat

SEQ ID NO: 167645 - DNA, 201 bp, Homo sapiens
ggcgaggtggctcatgcctgtaatcccagaactttgggaggccaaggcaggcagatcacttgaggctaggagttccagaccagcctggcccacatggtgaractctttctctactaaaaatacaaaaaattagccggacatagtggcacatgcttgtaatcccagctacttgggaagcagaagcaggaggattgcttgaat

SEQ ID NO: 167646 - DNA, 201 bp, Homo sapiens
aggtcaggctttttaccctaagttgggacagcaccgtggtaccattcatactccagaactctccaggatcaggctgagaccagtctccagctgtaactacrtccttgcctagctgcctctgcttccctatattgcttcccttattccctcatctgtttcccctgagagcttctctcaatgaatccctgccttatgttcata

SEQ ID NO: 167647 - DNA, 201 bp, Homo sapiens
acgccctacacccaatagtggcccgtagcccatgattgactcatagagtggtgtcaaaggtcaggctttttaccctaagttgggacagcaccgtggtaccrttcatactccagaactctccaggatcaggctgagaccagtctccagctgtaactacgtccttgcctagctgcctctgcttccctatattgcttcccttat

SEQ ID NO: 167648 - DNA, 201 bp, Homo sapiens
actgctttattttgaatttttttttttctttacacagagtagggaagaattcaaatgttcagcaagtattcttaagcacctaagtcattgcactaaagtaratctcatttgatggctctcttaaggtggattctctagaaccaaagactgagagacacttttgggtacaaagagtttatctggaaggtgatgtcaacaagc

SEQ ID NO: 167649 - DNA, 201 bp, Homo sapiens
caaataggtgtgggtgacagacaagtacttaacagggtaatagaatatcataaggcaagtggaggcagggcgagatcacaggaccacaggaccacaggacygaggcaaaattaaaattgctaatgaagttttgggcaccattgtcattgataacatcttatcagtagacagggttttgagatcaactggtctgaccaaaat

SEQ ID NO: 167650 - DNA, 201 bp, Homo sapiens
aaatgtcaacacaagatcactgagctatgtgctggccacgcattgcatggaagagtcgcggcttgggaaaggagggaaagatgaaggagggatagatagtatatctgttttcggggtcatagagaccctgagagagtgtttgtatatcaaaatagaatacatgtaccatagaaagcaaactgtattaaatgccagcaaact

SEQ ID NO: 167651 - DNA, 201 bp, Homo sapiens
acgttgtgccttaaagctgtgattttattaataaaataataaatcatgactgttaacattgtaggacatggtggttaataaagggaaatgacaatgacaasaggagcagcaatagacagtagagtaaaagaacaaaatcaagtgtgagacatgtgaagaaagaccaaagcacaggacagcaaagtaggtattaataaatgg

SEQ ID NO: 167652 - DNA, 201 bp, Homo sapiens
tttagtagttctattgtctgcgttttttattgtaaataggtaccatgatgaattcctctgtgcttttcttccatgaggttgctccatgaccatctttttgygtctggatttgaaggttgcccatgaagattgttggttccatgtcaaactaaagcatttcttgagggtttttcttcatggcttaaaaacgttgtgccttaa

SEQ ID NO: 167653 - DNA, 201 bp, Homo sapiens
cctgaagattcatatgaagggcaactcatcaagattataagattataaagatatagctgttgtctgtatctgtctatctagttgtccatctagttatttgrtttggccttgatttttaaaaactagctgcagctatattgatatgtgctttggaaataaaacaacatggaggaaacacagcatgttaacgatgcctatatt

SEQ ID NO: 167654 - DNA, 201 bp, Homo sapiens
ttctctgtcttttattttcattggatgctagaatttgaatgggccctgtttctgctttattaatccatattttgtggcaggagaaattcaggagaactcasgaatggcaggaagtggatgagaaagagtgtgtgatagaaactgcaagtagccttaagggcaaaacaagaataatgctactgagatgatgaggcttgcata

SEQ ID NO: 167655 - DNA, 201 bp, Homo sapiens
taagggcaaaacaagaataatgctactgagatgatgaggcttgcatatccagctggctactgtattctggccaccagaattggatttcagcttggattttygaggcttagcagtacaatgaggactgggattcataaattataattataagtgttatttattaaaaggtagttttggtctcagaaggaaccaaataataat

SEQ ID NO: 167656 - DNA, 201 bp, Homo sapiens
atgagaaacttacaagcctgttttgtacaacgttgtgtcttaaacactgtgtgtgatccatctgtcctctgaaattacttggagtcacctcccatcacccrtcagtgttctttcaggaatcatacagattaatagagtcctcacttccgtgctgtgctctgaacctttttaactttaatttagtcctgacagtggggaaca

SEQ ID NO: 167657 - DNA, 201 bp, Homo sapiens
gattcataaattataattataagtgttatttattaaaaggtagttttggtctcagaaggaaccaaataataataatgcatgcatcactgaaagataaaaayccataaaaaataattggggaatatgagataaggggaaaattgagaataagaataaaaaggtaacttggagtaagggaggaaaaattagtaagccaatcat

SEQ ID NO: 167658 - DNA, 201 bp, Homo sapiens
agcttcttgttagtcagcttcttgtccttgaggggcctggaggctacaaaaaaatgagaagtagccattcatcttgatatctggaactcttgccctgggakgctgtcaaagaaagaaaattctggaaagaagaggagaagttactattttttgtcagacggtctagaagcagagcttgagatggagattctgatgcaagtg

SEQ ID NO: 167659 - DNA, 201 bp, Homo sapiens
tcaagaacctcactctcctctaatattttcaaagcctggttctattaaacattacctgtgtggctttcctgagactccagcttcttccttgttggctaaakggtgaagataatgataataataagtacttgaaatggttgctataaggattaaatgaaataattcattaggaaacctttagcacaggagttctcaaattta

SEQ ID NO: 167660 - DNA, 201 bp, Homo sapiens
catgtgctaaaccaaagaacttctctatctgaggtgtaactgtctattatatttcttccactgacttaggctagttgcagaggaccctccaatcggtacaytggaaattcttggctgaacttgaaggctgtgttttaggtctgcccttctctatcttgcgtttctatccagatgccaatatgaactaaaatagagcttctt

SEQ ID NO: 167661 - DNA, 201 bp, Homo sapiens
agaatgcattcacatcctttctaacttcatttcctccaggacaaatatcagtggatgggttcatgcgctatctgagtggagaagaaaacggagtcgtttcrcctgagaaactggatttgaatgaagacatgtctcagcccctttctcactatttcattaattcctcgcacaacacctacctcacaggtatgaattttctag

SEQ ID NO: 167662 - DNA, 201 bp, Homo sapiens
gagggaatgctctctggagaaagagagtgagaaagaaaaatagggtaggattagaaataaagtaaaggtgggacagaaggtctagcctcaacctggtcccrcagggagctttggggtaggaattgcaccacagagctgtcctgcagaatgtcatggactaccagcagcctacctctcccagaggtgcatgcataaacttcc

SEQ ID NO: 167663 - DNA, 201 bp, Homo sapiens
tttcctgaggcctccccagccatgcaaaactgtgagtcagttaaacctctttgttttataaactaccatcttgggaagttctttatagcagtgtgagaacrgactaataccgggtccttttccatcttcaggttccccttggatgctaccctctgcacaccacccttggcagctcctggcctccccacctaacagtgtcat

SEQ ID NO: 167664 - DNA, 201 bp, Homo sapiens
ttctacagtggtgtctattaaatatttcctacctattcatgtgtgactctttactctatatcccaaaacaatctcacctcagtataagtaaacttagtccrtatttatgtttatgtataaatatatttaatatttaatagtgtgttatatatgatgttgtagtagcctgtgatataatatatacatgtacattgatttttt

SEQ ID NO: 167665 - DNA, 201 bp, Homo sapiens
aaaattctcatactgtagaaattatcagtggacttttgtctatacttcttccatttgctttgtatatagtaagaccagccaaggatataaattctcatatmcaaatttttcatctaatattttaatatttaactttttaatccaacaggattttatgttgaattttttgtgataagagagatttaaaggaatgtactttcc

SEQ ID NO: 167666 - DNA, 201 bp, Homo sapiens
tcatgtggaaaattaaagatgttaaattaaaatattgacactgatgttagtaagtaatgattgtttataagatgtctggatttaaaagctttgtttacttaatttgttaaaaatggaagtttacttgtctttggtgtagaaaattaaacatgtgactctgaactttgtagagtgcttaacagcttttataatacttttata

SEQ ID NO: 167667 - DNA, 201 bp, Homo sapiens
atcatgtggaaaattaaagatgttaaattaaaatattgacactgatgttagtaagtaatgattgtttataagatgtctggatttaaaagctttgtttacttaatttgttaaaaatggaagtttacttgtctttggtgtagaaaattaaacatgtgactctgaactttgtagagtgcttaacagcttttataatacttttat

SEQ ID NO: 167668 - DNA, 201 bp, Homo sapiens
gaggcctccccagccatgcaaaactgtgagtcagttaaacctctttgttttataaactaccatcttgggaagttctttatagcagtgtgagaacagactawtaccgggtccttttccatcttcaggttccccttggatgctaccctctgcacaccacccttggcagctcctggcctccccacctaacagtgtcatatgggg

SEQ ID NO: 167669 - DNA, 201 bp, Homo sapiens
gtcaggaagagccattaaataaactgatatcaatattttacttttaaattagaagacaagaaaaaaaaaaaaaactgtgtttaagagtcactattccaagrccttcacaggcagtgagaatggtcaaagatggaacaatcaaggccaaagacaaagaatcgttcttatagcagaggaagaactaacgggattgagttacca

SEQ ID NO: 167670 - DNA, 201 bp, Homo sapiens
gatcatgtggaaaattaaagatgttaaattaaaatattgacactgatgttagtaagtaatgattgtttataagatgtctggatttaaaagctttgtttacttaatttgttaaaaatggaagtttacttgtctttggtgtagaaaattaaacatgtgactctgaactttgtagagtgcttaacagcttttataatactttta

SEQ ID NO: 167671 - DNA, 201 bp, Homo sapiens
agtagagacatgaacttagtgagggagagcattcctctttgccggggatacagcaagagcaaagcatatttcaggaatagaggaaggccaatgtggctacygtagagttcagaccttttaggccatgaaaatgacttgggcttttcttctgatggaagagggaaggcttctgaaagttctgagcacagaagtgatgggatc

SEQ ID NO: 167672 - DNA, 201 bp, Homo sapiens
gcatagtttaaatcaatgtgctccatcaccgaaaaaggacgttagtaagaaacttggcttgttacatactttaaattctctgtttacattcagaactatayggttttaaaatattgtggtttcttctgagtaagtgtttctcaaatctaagtgttcctttagttcatacacagaaacctttttaaatttttttttcccaaa

SEQ ID NO: 167673 - DNA, 201 bp, Homo sapiens
tgatcatgtggaaaattaaagatgttaaattaaaatattgacactgatgttagtaagtaatgattgtttataagatgtctggatttaaaagctttgtttacttaatttgttaaaaatggaagtttacttgtctttggtgtagaaaattaaacatgtgactctgaactttgtagagtgcttaacagcttttataatactttt

SEQ ID NO: 167674 - DNA, 201 bp, Homo sapiens
atcctgagacttggctaaagttgcttatcagcttaaggaatattggggttgagatgatgtggttttctaaatatagaatcatgttgctgcagacagagacragttgacttctctcttcctatttgaataccctttatttctttctcttgcctgattgccctggtcagaacttccaatactaggttgaataggagtggtgag

SEQ ID NO: 167675 - DNA, 201 bp, Homo sapiens
cctgatcatgtggaaaattaaagatgttaaattaaaatattgacactgatgttagtaagtaatgattgtttataagatgtctggatttaaaagctttgtttacttaatttgttaaaaatggaagtttacttgtctttggtgtagaaaattaaacatgtgactctgaactttgtagagtgcttaacagcttttataatactt

SEQ ID NO: 167676 - DNA, 201 bp, Homo sapiens
tccagatgttctatttggtttattttcaaatatataatctgtatgtcttagcttgttgcagggaagctttcctgtgagatttctcactctgggaaagcctmagctcttgactgtaggctcctcacctttcaaggctatcaaagggtgaacacacaatttccatcatgagcaaaagcctatcagggcaaaagcagcttcctt

SEQ ID NO: 167677 - DNA, 201 bp, Homo sapiens
gtcgcttcagctgtaaacacatatatatgtagttttaaatacatatatgtgtatacacacacacacacacacacacacacatatatatatatatatatatwttttttttttttttttttttttttttttgagatggagtctcactctgtcgcccaggctggagtgcagtggcgcaatctcggctcaccacaagctccgcct

SEQ ID NO: 167678 - DNA, 201 bp, Homo sapiens
acacacacacacacacagagtcgcttcagctgtaaacacatatatatgtagttttaaatacatatatgtgtatacacacacacacacacacacacacacayatatatatatatatatattttttttttttttttttttttttttttttgagatggagtctcactctgtcgcccaggctggagtgcagtggcgcaatctcgg

SEQ ID NO: 167679 - DNA, 201 bp, Homo sapiens
cacacacacacacacacagagtcgcttcagctgtaaacacatatatatgtagttttaaatacatatatgtgtatacacacacacacacacacacacacacmtatatatatatatatatattttttttttttttttttttttttttttttgagatggagtctcactctgtcgcccaggctggagtgcagtggcgcaatctcg

SEQ ID NO: 167680 - DNA, 201 bp, Homo sapiens
acacacacacacacacacagagtcgcttcagctgtaaacacatatatatgtagttttaaatacatatatgtgtatacacacacacacacacacacacacayatatatatatatatatatattttttttttttttttttttttttttttttgagatggagtctcactctgtcgcccaggctggagtgcagtggcgcaatctc

SEQ ID NO: 167681 - DNA, 201 bp, Homo sapiens
acgtagaggttacttggctaagatcaaggtgccagcaggtgcatttcttcctggaggccctgggggaaaatctgtttcctcaccttttccagcttcatagrccccttcctccaacttcaaaggcagcaagattaggctgagtccttctcatgctgacatgtctctggttctttcttcaaattccctcttccactctaaagg

SEQ ID NO: 167682 - DNA, 201 bp, Homo sapiens
aaagtgttttaagagttttaaaagaccagtgtacactgtatcaaatattcctgcttatttccaaagaaaagtgaactgctttattttgaatttttttttttctttacacagagtagggaagaattcaaatgttcagcaagtattcttaagcacctaagtcattgcactaaagtaaatctcatttgatggctctcttaaggt

SEQ ID NO: 167683 - DNA, 201 bp, Homo sapiens
aaagaactgctatggtttaattctatcagtgaaaataacagggtttgtgatgtttttaatttatttttccctccccacattaactttcctcatttgtgttyggtaaatttgcttcaactgctcaatttgcatgaggattaaatttcattaacagatgcaattagaaagtggaatttatagaataagtcttctttataccct

SEQ ID NO: 167684 - DNA, 201 bp, Homo sapiens
gggaaaaatgtcaacacaagatcactgagctatgtgctggccacgcattgcatggaagagtcgcggcttgggaaaggagggaaagatgaaggagggatagatagtatatctgttttcggggtcatagagaccctgagagagtgtttgtatatcaaaatagaatacatgtaccatagaaagcaaactgtattaaatgccagc

SEQ ID NO: 167685 - DNA, 201 bp, Homo sapiens
gaattcagatattcattcatttaattcatataatagcctcagatgatatctttctttctcaccacaaggctatgctttgtctaaatggccaggtaaacatyccagaagtgagtggtccctgaagtggtccgtgaaccgatttccacgaccggttctttcctacgtgtgaaccgtgctctgctgcaatctactagtgcctcg

SEQ ID NO: 167686 - DNA, 201 bp, Homo sapiens
ttgactttctcccagaaagtcctccctgcttgtttctggctttaaatctattgagtaaaatttatctgaaggaaatttaatcaataattcaaaacaggaayagattattcatagggagagctgtgctcacagttttgttaatttgcagtggtagcattctttatcactggctgaaactcaagtaaaggagtgaaagatcaa

SEQ ID NO: 167687 - DNA, 201 bp, Homo sapiens
ttaccctgacctcctagaagaaaaggaaaaagaaaggaaagagagagggagaaggtgagggaaggggggaagaaaagaaaggagagaaaagaagacagagraaaaacagggagggaggaagctggggaaggaaaaagaccatttgctgactccgttgttttatttcccagaatgattcaatacctcaagaagatttcactc

SEQ ID NO: 167688 - DNA, 201 bp, Homo sapiens
gggatcacgaatatttaataatataaaatttgtgattagaataaagaagaggataagatgtcaccagcttattgatggtaactgccacccccaatacctcrtcttgtccccaggaggcttgctaaggcatgtggaggaggaatggagagccagatggtgcctgtggctccatgtagatgattcctacagggctggaaagca

SEQ ID NO: 167689 - DNA, 201 bp, Homo sapiens; identical to SEQ ID NO: 30520

SEQ ID NO: 167690 - DNA, 201 bp, Homo sapiens
gcgtggtggtgcgtacctgtagtcccacgtactggggaggctggggccagagaataagttgaatcggggaggcaaaggttgcagtgagccaagagcgcacsactgcactccagcttggagtagacagagcaagacttaatccccctaccccccaccctcccaaaaaagaaaaagaaacatgtaaaatacattttcatttaa

SEQ ID NO: 167691 - DNA, 201 bp, Homo sapiens
gctttgtcataaatagctcttattattttgagatatgctctatcaatgcctagtttattgagagtttttagcatgaagtgatgttgaattttatcaaaggscttttctgcatctattgagataatcacatggtttttatcttggttctgtttatgtgatggattacatatattgatttgcatatgttgaaccagccttgca

SEQ ID NO: 167692 - DNA, 201 bp, Homo sapiens
tctcttcgttttgcttttatatatatatatttctatacatataaatataaaatatttctaaatatatatatttatatctatatacatatacatcacagtaycttcagggctcaatcttttgaaatgtttttattccttttcatatttattcagaattgaacatagagactatgaagtaggccagatatttgaccataaaca

SEQ ID NO: 167693 - DNA, 201 bp, Homo sapiens
gagccaccgtgcccagccagaaattatttttaaaactgtggttttgtattcccaggataaaatgtgtatcttttgtacagcttcacaaattagtatgtccmtttacctatagcagtgcataaaaggatatttctttaaagatctatttgtataacattctacagtcccctctttattgaaagtactaatagcaatatttct

SEQ ID NO: 167694 - DNA, 201 bp, Homo sapiens
ccagttctgcacccttgctggagaggcattgaggtcctttggaggagaagaggcactctgcattttgggttttcagtgtttttttgttgattctttctcgwctttatgagtttgtctagttttgatctttgaggctgctgacccttggatggagtatttgtggggattttttgttgttgatactgttgttgttgctttctg

SEQ ID NO: 167695 - DNA, 201 bp, Homo sapiens
tcattctgggagaatttaaagggtttgttcctgtaccagtggtttgctttttctgatctgacatttatgtgctcgttttctaataaagattttaatattgwtatggtatttttatttctcagtgttatgttagcctaccctgttcttgttttgtttctgcatgtgtctagctcctgttttatctcattctctggcattttt

SEQ ID NO: 167696 - DNA, 201 bp, Homo sapiens
tcttggggccatctgagaggctgggcatgtaagggaggaagacatcagcatgtgtgggaactgtgcacctaagctgcaggagtcaccttagatggtggacrtggtgtaggacaccaacagggtcttgtacaccataataggaattgcttatgtaatgggatcctacccttcatgtggggcagaaaaatatcaatgtctgct

SEQ ID NO: 167697 - DNA, 201 bp, Homo sapiens
ggcaggagaatcgcttgagcccaggaggcagaggttgcagtgagctgagattgcaccattgcactccaacctgggcaacaacagcaaagactccgtctcaraaaaaagaaaaaaaaagaagacaatttcctcagtaaagaaattgacgcttataaataataaaattatggatcagcttaccctagttattgcatgtggagg

SEQ ID NO: 167698 - DNA, 201 bp, Homo sapiens
ctgcagatattttcttgaatgaaatttgacatctctgaggaccgacaaggatactgctcatatggaatgtatattatttttattattattattattattgktattattaattttgagatggagtttcgctcttgtggctcaggctgaagtgcaatggcatggtcttggctcactgcaacctctgcctcccaggttcaagta

SEQ ID NO: 167699 - DNA, 201 bp, Homo sapiens
gtctgcagatattttcttgaatgaaatttgacatctctgaggaccgacaaggatactgctcatatggaatgtatattatttttattattattattattatwgttattattaattttgagatggagtttcgctcttgtggctcaggctgaagtgcaatggcatggtcttggctcactgcaacctctgcctcccaggttcaag

SEQ ID NO: 167700 - DNA, 201 bp, Homo sapiens
caacattagcaatcaggggtctgcagatattttcttgaatgaaatttgacatctctgaggaccgacaaggatactgctcatatggaatgtatattatttttattattattattattattgttattattaattttgagatggagtttcgctcttgtggctcaggctgaagtgcaatggcatggtcttggctcactgcaacct

SEQ ID NO: 167701 - DNA, 201 bp, Homo sapiens
ttgttgaagacagaattagtaccatgagttaatgaaacccaggtcttttcagaagattgtgactcatttttatcattgcccctgtctggtgtaatttcaaygtaaatccaatttgttctacatgcaatggtacatagttgcatttgggaaacatttctcaattttaattcttttaaacgcaataatgcgccatcttgtgga

SEQ ID NO: 167702 - DNA, 201 bp, Homo sapiens
aacaacattagcaatcaggggtctgcagatattttcttgaatgaaatttgacatctctgaggaccgacaaggatactgctcatatggaatgtatattattwttattattattattattattgttattattaattttgagatggagtttcgctcttgtggctcaggctgaagtgcaatggcatggtcttggctcactgcaac

SEQ ID NO: 167703 - DNA, 201 bp, Homo sapiens
atttacatttctaaccaccttttattaaataaaaggaaactaatttttgacataatattatgtatccatgtacttcaccgaatcttttaaaaaatagtttycaggccgggcgtggtggctcatgtctgtaatcccagcactttgggaggccgaggcaggcggatcacaaggtcgggagatggagaccagcctggctaacat

SEQ ID NO: 167704 - DNA, 201 bp, Homo sapiens
atggtgaattcaggtcaaatgatgaatttccttctagcttttctttttttatggagacttcactttggcacacttgtaactttactgacaatacccttttrtatatgcttttttttcccttatatcatgaccgtttcctgctaatattcaaattaggccgtttatttaagggttgtcaaatctcaaatagctcatcataga

SEQ ID NO: 167705 - DNA, 201 bp, Homo sapiens
ggtggtgatggttgcacaacagtgtgaatctacttaatgccactgaactgtacacttaaaaatggtaaattatatattatgtatgttttaccactttttttaaaaaaaaaaaaaaaaaaaagaagaaactgagaaggagcaaccagtgaggagggagaagaaccagaacagtgtatttcctggatgcctaaaaaatatttc

SEQ ID NO: 167706 - DNA, 201 bp, Homo sapiens
cttcctttcacttgtacacttagaggccattgtaaggttattaactggcctaatttcaatattgttgtgtctcagagaaaagggtggccccaggagagggmgaaagataagggaacagctggccaatggagcagtcagtacccacacaacatttattcattaaattcaacatcttatataggtgcagttcctgatgctcca

SEQ ID NO: 167707 - DNA, 201 bp, Homo sapiens
agcgtctctttctattctgtcttgatacattgcattgaaagaactgctatggtttaattctatcagtgaaaataacagggtttgtgatgtttttaatttakttttccctccccacattaactttcctcatttgtgtttggtaaatttgcttcaactgctcaatttgcatgaggattaaatttcattaacagatgcaattag

SEQ ID NO: 167708 - DNA, 201 bp, Homo sapiens
ttccacaaaatgtaagcatatcattttgagacaaattttaaaatcgttttagacttgacaaattacatgaaagagacacttagtcagaaatgattttttttaatgaagtgaaatttaataagtgactctgaatgtctgttgatgtgttgggaagcccatctttgcttgaccaaagatttatccagtaataatcaaaacatc

SEQ ID NO: 167709 - DNA, 201 bp, Homo sapiens
catttacttttctcattcttctcttacagtcatactacataccaggcagctctaaagatatattgtttaattttacatgttttggacttctttaaaaaaakaatcatactgaacaaaaatggaatcatattgcatgtattcttatgaaacttcatttttcatccaataatgctacttgaaatgtatttatgttgatgtagt

SEQ ID NO: 167710 - DNA, 201 bp, Homo sapiens
tccatctcaaaaacaacagcaaaactgctgtttaactccacaaaagtcattacaccactatacattcactaaaattgctaaaattaaggaaaaaaaaaaaacagtagtaaggccaggtgttggcaagattgtagaatagctgaaactctcatacaggggtgatataaaatggtacaactactttggaaaactctctggcag

SEQ ID NO: 167711 - DNA, 201 bp, Homo sapiens
aaatgctatgggcaccaactgtttgaatgattggtgtgcttgctatgtgaattattaaatattttaaatattatttatgtttaatgtggtgcccaccagamccagatgtaacgtacagcttttccttggacagtatagagaagaccttgaagttatgttcttttaactcagtctttagtatttctctgcatgaaatccttc

SEQ ID NO: 167712 - DNA, 201 bp, Homo sapiens
atataatactttctcagtttcctgttctccttgtaagtaagtatcatggttttggcctggacagggtgaaaattctcatactgtagaaattatcagtggayttttgtctatacttcttccatttgctttgtatatagtaagaccagccaaggatataaattctcatatccaaatttttcatctaatattttaatatttaac

SEQ ID NO: 167713 - DNA, 201 bp, Homo sapiens
gatgtgagcatctttactgcattcttgtgacatgtagttcaattcaactggtagagaccctgtgtggcccctgctctgcactgggtcttacttactggatrtatcattcagggcacatattctttacaacaagactgttttggttctcaattcgcattctgtggtggaataaacattgagtggaatagaaaacattagctt

SEQ ID NO: 167714 - DNA, 201 bp, Homo sapiens
gaatataaccaactttttctgtttctttagatcttgaaaaggaagttgtttgaagtcaattctttgttttgatgtttggtcaataatgaaataatcttcaytttatgttatatccggcaaagaaaaacagtaacagcaatatggagccaggatgtaaatagattgtattgcttgaaatccacttgggtaaaaaataagcat

SEQ ID NO: 167715 - DNA, 201 bp, Homo sapiens
atgtgtatcttttgtacagcttcacaaattagtatgtccctttacctatagcagtgcataaaaggatatttctttaaagatctatttgtataacattctayagtcccctctttattgaaagtactaatagcaatatttctaaaattatttaattttccagtgaatgccaaagagtcccaattatgggaaaatgtgttccat

SEQ ID NO: 167716 - DNA, 201 bp, Homo sapiens
aatttaattttctttctttctttctctttctttctccctctctttctttctttctttctttctttctttctttctttctttctttctttctttctttctttctttctttccttctttctttctgtgcttctttctttctttcgtattgctccttgtgtagcagggctatcccataggcagggtgcccagggtagtgaaagt

SEQ ID NO: 167717 - DNA, 201 bp, Homo sapiens
aaatttaattttctttctttctttctctttctttctccctctctttctttctttctttctttctttctttctttctttctttctttctttctttctttctttctttctttccttctttctttctgtgcttctttctttctttcgtattgctccttgtgtagcagggctatcccataggcagggtgcccagggtagtgaaag

SEQ ID NO: 167718 - DNA, 201 bp, Homo sapiens
ggagtagcaattttaatttccttcaaggacttttcctttgcattcacaactgggcggctgactgcttggcacaagtggtctagcttttggcctatcttggsttttgacacgccttcctcactcagcttaatcttttctagcttttgacttaaagtgaaaggtgcatgattcttcctttcacttgtacacttagaggccatt

SEQ ID NO: 167719 - DNA, 201 bp, Homo sapiens
gaaatttaattttctttctttctttctctttctttctccctctctttctttctttctttctttctttctttctttctttctttctttctttctttctttctttctttctttccttctttctttctgtgcttctttctttctttcgtattgctccttgtgtagcagggctatcccataggcagggtgcccagggtagtgaaa

SEQ ID NO: 167720 - DNA, 201 bp, Homo sapiens
gggtgagggctcccctctcccatgtggctctcaggtggaccaccacaccacactgctcttccttcctctccatggatcatgccagctgcctcgtcagttcygatgagagaacctggatatcttgattgctggtggaggattcacacactattatgattctttttgatggagcctctctgatggctgctgctcctagttggc

SEQ ID NO: 167721 - DNA, 201 bp, Homo sapiens
taacattcttgcttttagctcctatattacagccaaagccacactcttgtctcatttctcaaaatgaataaatgaataaataaataaataaataaataaaataaaaatcctttgatttctacgcagctaactttgacatttaatcttatgcagctttgtgtaactattccttgtgtgtatgtcctgtttaccccagtagat

SEQ ID NO: 167722 - DNA, 201 bp, Homo sapiens
cagggcatgtgcaagttttcctgatgtgcatgtgaaactgtgtctattacatatgctgaagttttcccccaaatgggaccagcacccacatgtctgatatrttccttaggtagagccattcttctcaataaaacacaaaatagtgaaatacagaaatgtctgatttgtaaagagagggtatctgtaacaaaattgaaagtc

SEQ ID NO: 167723 - DNA, 201 bp, Homo sapiens
atgagtcagggtcaggcctgaagaggcactctggctgcagtctgccacagctggtgtgttgggctgtgggggaacctcttgggaccaagctgcccagcctycctggccccaggagaggaaaagcatggcctggagctgtagagatggatgctgtccttccccacccagggagcttagcgtgacaggcagttacaagtccca

SEQ ID NO: 167724 - DNA, 201 bp, Homo sapiens
cacaccccaaacctcagcatcacgcagtatacctctgtaacaaacctgcagatgtacctcgggttctaaagtaaaagttgaaaatttaaaaaaaaggcagwtgagagaacagctgttgcaaagagtatcagttgaaaccaaatttctctctaagccagaagaatagtgggtatgtgagcatgtgcaagattttgcactgca

SEQ ID NO: 167725 - DNA, 201 bp, Homo sapiens
ttcaccatgttagccaggatggtctcgatctcctgacctcatgaccagcccacctcggcctcccaaagtgctgggattacaggcatgagccaccacacccyggccttgagtgagtttcttaatcctgagttctaatttgattgcactgtggtctgacagactgttatgatttcagtacttttgcatttgctgaggagtgtt

SEQ ID NO: 167726 - DNA, 201 bp, Homo sapiens
tttcaccatgttagccaggatggtctcgatctcctgacctcatgaccagcccacctcggcctcccaaagtgctgggattacaggcatgagccaccacaccytggccttgagtgagtttcttaatcctgagttctaatttgattgcactgtggtctgacagactgttatgatttcagtacttttgcatttgctgaggagtgt

SEQ ID NO: 167727 - DNA, 201 bp, Homo sapiens
tgctctgagtggggtggcaaaactggagaggattttgagacaaggcatggtgtaatgtgactaagtataaattctatgtagcacagccttaaatgttagasaggtagaaaacagatcagtggcggcctggcaacaggggataggccacaaaagggcacaagaaacttttaagggtaatagaaatattctgtaccttgatgg

SEQ ID NO: 167728 - DNA, 201 bp, Homo sapiens
cttccaatactaggttgaataggagtggtgagagaggccatccttgtcttgtattggttttcacagagaatgcttccagttttttcccattcaatataatrttggctatggctttgtcataaatagctcttattattttgagatatgctctatcaatgcctagtttattgagagtttttagcatgaagtgatgttgaattt

SEQ ID NO: 167729 - DNA, 201 bp, Homo sapiens
aaatgcagaatctcaggccccaccccagatctattggatcagaatatcctttaaacaacatcctcctggagtttcatatgcattttcaagttgagaagaartagataaaaaaataagtaaaataaggaaaataggaagagtttggggagcttaatgggagattatgtaagagagatatgtggaggtcaaatgcccagggct

SEQ ID NO: 167730 - DNA, 201 bp, Homo sapiens
acagattgtaaaactgatgttgaataagtttacataacctgaaacttcttacctccttcatcatgcaaaccaagtgaaccaaaaaaaaaaaaaaaaaaaaaggtcacactctagccaaggtaaggtactatgccaacaaaaaggattaaagacttgtgtcaagcttctttatgtgtggcttctcaaaagcattctaggatt

SEQ ID NO: 167731 - DNA, 201 bp, Homo sapiens
tccgtgaaccgatttccacgaccggttctttcctacgtgtgaaccgtgctctgctgcaatctactagtgcctcgggcattcctgcggcctttgtctaagcmgaaagggtagaacttcctgaacactaataaaggaaacataaaagcagaggtcagctggaagattggcaataggctaatgaaactgacagtcatttttgac

SEQ ID NO: 167732 - DNA, 201 bp, Homo sapiens
agaagatgcctgcctccccgtcgtcttccagcatgattgtaagtttcctgaggcctccccagccatgcaaaactgtgagtcagttaaacctctttgttttrtaaactaccatcttgggaagttctttatagcagtgtgagaacagactaataccgggtccttttccatcttcaggttccccttggatgctaccctctgcac

SEQ ID NO: 167733 - DNA, 201 bp, Homo sapiens
tacccagctgttagtaattttcctcccagtcggaggcagaattttgaatagactgaaaacatgtttgtgcagggttctaagatgctacatgaattcagatrttcattcatttaattcatataatagcctcagatgatatctttctttctcaccacaaggctatgctttgtctaaatggccaggtaaacatcccagaagtga

SEQ ID NO: 167734 - DNA, 201 bp, Homo sapiens
ttcagaaaagtcatccaaggactgttttcttttgtggttttctttctggcagcattctatggcttctctgttcttggagtgttcttctgccttgacaaggwaaagttcatgcctaagcatgtgcagaaactcaaggtcaagtgcaccactgagcaccttcagagtgaatttttaggggataatgttgtcacaactgtcttc

SEQ ID NO: 167735 - DNA, 201 bp, Homo sapiens
ccacagtgtgtccatgtgtactcatcattcagcttccactcataagacagaacatgtggtgtttggttttctgttcctgggttagtttacggaggataaargctccatctccatccatgtccctgtaaaggacatgatcttgttcctttttatggctgcatagtattccattgtgtatatgtgccacattttcttcatcta

SEQ ID NO: 167736 - DNA, 201 bp, Homo sapiens
actgaagccctacggcagactttgggactactgtttttttaaataaacaattatggcattttcagatatggatattatcaaaggaatgatctaattgtccrccacagatttggatcagatagttattcctcataatacctcaagctgagactcaggaaactagtcctgcgtggggacatatgtcaaatgcattacaaaagc

SEQ ID NO: 167737 - DNA, 201 bp, Homo sapiens
tgtcaaggagatgacagtctagaagaatggataagatgtgtctaaaagtaacttgaatgcaaagccatatgtggaaactataagacaaaaattaacgcaayggagttagatagggggaaaaataaacacttgtctctcggaaaccttcctgagaaaagtggtgtttgaagtgagcattaagaatagattaagtcatgtcat

SEQ ID NO: 167738 - DNA, 201 bp, Homo sapiens
ccagcacccacatgtctgatatattccttaggtagagccattcttctcaataaaacacaaaatagtgaaatacagaaatgtctgatttgtaaagagagggtatctgtaacaaaattgaaagtcacagatttgatatctacttttacattcttgtatccagtaacatttttttgagcatctgctactgagtgaagcatggaa

SEQ ID NO: 167739 - DNA, 201 bp, Homo sapiens
gaagtcctgtttctcagaagcctttggataaactcaaatttctatgatataaacattcaagctaccccaaatcaattaagaatgttataaaataaaaatayaaccaatgcctaatccaattgaatcctattaaatttttaaattaatatctagaaaataatttagtttttatactttacagccattttcagaacaagtaaa

SEQ ID NO: 167740 - DNA, 201 bp, Homo sapiens
aaggaagaaaagataatttttttttgtctttttaaggcacgagttcacataaatatttctacttctacctaccaatttaaattattattattattattatwcttgagacagggcctcactctgttgcccaggctggagcacagtggcatgatgatagctcactgtagtcccgatctcctgggctcaagcaatcctcccacc

SEQ ID NO: 167741 - DNA, 201 bp, Homo sapiens
tagtttctagttatatacagatatttcagataataagaaccaaatcttgcctcaaatgctaacatcgtggatgacaacatagagcctactgtaatccattrtgatatgagcaatgatggtaggtttgacagctgcatagggatcacaggagaaactgtacctgagctgtacctgtatcaaacaactacataattttttctg

SEQ ID NO: 167742 - DNA, 201 bp, Homo sapiens
ctggtcattcatttatctcttttggagaaatgtgtattcagattatttgcccattttttaatttttttttctttttaaaatttaattgtaaaatttgaatmacttttttgtgctcttctttgttttggtcttgttttgtttgatttggtcttgttttgttccttaaccttttggtgactagtgagtagctattggtagaaa

SEQ ID NO: 167743 - DNA, 201 bp, Homo sapiens
tctatgcctttgcttggccactggggcgagaaggtaagaagctcctggcccaccgagttcccagcacagtcctgtcacttcagcattactaaggatgcatrgctcactcttgcaccatctcagaattccaggcaaactctgctcctcctggcagagggtacagattggcaacttctgggccaaatgcagtctgaagatgtg

SEQ ID NO: 167744 - DNA, 201 bp, Homo sapiens
cccacatctcagtagcttaacactattgaagtttacattgttgtttacaaaatgctctttctggtggactgtttcccttcaagccatgattcacatggccrgcattcttccatcttgtaaacccatcatctacaaacagagacatccaacttaccctgctaggctgcatcaagccagaaggagaaagagtatggacggtca

SEQ ID NO: 167745 - DNA, 201 bp, Homo sapiens
gccaggtatgatggtgcatgcctgtagtccagctactggggaggctgaggtgggaggattacttgagcctaggagttcaaggccaacctgggcaacactgmaaaactttgtctcaaaaaaaaaaaagttatcttcgtcattgagatgttgcattgatcacccaagtatggtgaagaattgaagagtagccaattagagtgc

SEQ ID NO: 167746 - DNA, 201 bp, Homo sapiens
caagctccgcctcccgggttcacgccattctcctgcctcagcctcccgcgtagctgggactacaggcgcccgccaccacgcccggctaatttttttgtgtkttttagtagagacggggtttcactgtgttagccaggatggtctcgatctcctgacctcgtgatccgcccgcctcggcctcccaaagtgctgggattacag

SEQ ID NO: 167747 - DNA, 201 bp, Homo sapiens
aaggattttaatatattgttaaattctagtttttttttgtttttgtttttgtttttgagacggagtctcgctctgtcgcccaggctggagtgcagtggcgsgatctcggctcactgcaagctccgcctcccgggttcacgccattctcctgcctcagcctcccgcgtagctgggactacaggcgcccgccaccacgcccgg

SEQ ID NO: 167748 - DNA, 201 bp, Homo sapiens
ttttaataatatgtaatatattctcatacttccaaaaatataaagggcaggattttaacaatgagaggcatgttaattattcacggagttttgcacattcmtaaggaaagcttagaaagccctatttctctgtgggaatatattccgccagtggaacccagcattataattattttgttaacattaatgggaggaatgtct

SEQ ID NO: 167749 - DNA, 201 bp, Homo sapiens
ggaagcggaggcggacggatcacctgaggtcgggagtttgagaccagcatgaccaacataaagaaaccccatctctactaaaaatacaaaattggccgggygtggtggtgcatgcctgtaatcccagctacttgggaggctgaggcaggagaattgcttgaacccgggaggtggaggttgcgatgagccgcgatcgcgcca

SEQ ID NO: 167750 - DNA, 201 bp, Homo sapiens
gtagttcatttcactaactacaaatatatattatataatgtgtacatatgtatagttatatatatatatacacacacacaaattagtgttatatacatatrcagtaatacacatgcttatatacatatatgcacatatataaacacacacaaatcacacaaatgcaggttgagtattctttatctgaaatgcttggggcca

SEQ ID NO: 167751 - DNA, 201 bp, Homo sapiens
tttaagtaaatattttgctctctgttaagtgttcctacttggaagtgtaaatatctgcaaatgtgtttatgtgagtcctctaacttcagaaagagtcctawcctattttcttcaagctcttcatactaaatattaattctctgggaaattatatagtgatatattgacctctacagaatagattcttcatataaattaaac

SEQ ID NO: 167752 - DNA, 201 bp, Homo sapiens
ctccgggtttacttttccaaggaatcagtgatataactgccatgacaatgaaagagatcaaaatttgggagacagaaagacgaggggtgggaagttgaatwtttttcctcatttataacatgatctggttgggaggattcaaggcagaccagttagtacagatccccagtcccttttggggatcataggactcttgtttta

SEQ ID NO: 167753 - DNA, 201 bp, Homo sapiens
tatagcacttaccatctgccaaattatttatattcttttaaatattaaccaatttaatcttcatagggactttctgagtaaagaactatgaatgttcagcygggcgcagtggctcatgcctgtaatcccagcacttcgggaggccaaggtgagcggatcacctgaggtcaggagttcgagaccagcctggccaacatggtg

SEQ ID NO: 167754 - DNA, 201 bp, Homo sapiens
gtaggaggggcttatggactccttaagggcataggctgttggagtccctgctgagagatctctgccctaccttgtggaactggagtgaaacaacgggggcrttgcttccagccatctgggagagaggatccagagcttcccctcagagagctgggatgttgtcagcaggcatcagacagagcaaaaagccatttttcttta

SEQ ID NO: 167755 - DNA, 201 bp, Homo sapiens
ttagatatatttgatcttcagtgaacagttgttagtatgtcaagaaaagtaatgaaggttcttaaactaaacttaattttttatggaggaacacaaggcaatttgctaattcggggatctacttctctttcatgatagcatctgcagatgtcatgacagtttttcaagaccctggcaacttgataatgtggcccaaatagg

SEQ ID NO: 167756 - DNA, 201 bp, Homo sapiens
gagtattaattaggatatgggtctagctactctaacagacatccaagtgtcttatgattagagtttatttctactctgagataattaggcaagagctgacrtggttctccgtggtgttcaggactcctaacctggactccctccatattgttgctatgctgctgtcctccaacattgcttccacctcctgatctaagatgg

SEQ ID NO: 167757 - DNA, 201 bp, Homo sapiens
caatcacaccccaaacctcagcatcacgcagtatacctctgtaacaaacctgcagatgtacctcgggttctaaagtaaaagttgaaaatttaaaaaaaagrcagatgagagaacagctgttgcaaagagtatcagttgaaaccaaatttctctctaagccagaagaatagtgggtatgtgagcatgtgcaagattttgcac

SEQ ID NO: 167758 - DNA, 201 bp, Homo sapiens
gtcagttatatttttaaatgcctaaattggatgcagcattccctaacttcaagtctgtcttattttctaaagtaaatatttaagaccatttcttcttaagycttaactacatcttacaagctttgatacctaatatatttgctataatctacttgttaatacagtctgatttccattatttctcctttgatccatgaattg

SEQ ID NO: 167759 - DNA, 201 bp, Homo sapiens
ataattgaccaagaaacccagataatgaaaggaagaaagagaaagaaagaaagaaagaaagaaagaaagaaagaaagaaagaaataaagaaaggaaggaagatagtaatgaaatgtgggcatggttgactaatgtatgagagttcatcagatgtataacttacttttcttttgaataatttgtatttatttattgagcatt

SEQ ID NO: 167760 - DNA, 201 bp, Homo sapiens
attgaataattgaccaagaaacccagataatgaaaggaagaaagagaaagaaagaaagaaagaaagaaagaaagaaagaaagaaagaaataaagaaaggarggaagatagtaatgaaatgtgggcatggttgactaatgtatgagagttcatcagatgtataacttacttttcttttgaataatttgtatttatttattga

SEQ ID NO: 167761 - DNA, 201 bp, Homo sapiens
gtttgtatatttcatctctcatgatcaatcaatattttttgaatgagtacatgaatatttcatctcagtaagtgatcattccctcctcatccatcttaatsataaaattctaatgtcctaggttctttatctttcaacaaattatgtttccctttcttaatgggtagaaaaaggaagcttccccataggcctaaatgtgct

SEQ ID NO: 167762 - DNA, 201 bp, Homo sapiens
acttaaaggaacacagaaagataggaaacctttagagtgaaacaaagagcaggttccaggtacgctgtggcatgaggaagctggagttgagctaactagaygtgaacatctgatgtggttggtttgggaagcagatcttgcttcctccggttgattctgagttgaaaggagggagccaagaatagggaagctggcagtcat

SEQ ID NO: 167763 - DNA, 201 bp, Homo sapiens
gcagtgagccaagattgcaccacggcactccagcctgggcgacagagcaagactctgtctaaaaagaaaaaaaaaaagaaaaaaagaaaaagataagtatmagctaacatttatttcactgcattttttcatagcattcttaaaataagtaatcatgtcagactccacaaaaatgtattaattctttatgtacatgtgata

SEQ ID NO: 167764 - DNA, 201 bp, Homo sapiens
ttagtttgtttagtagcactggtttttgggaattttttttcttttttgtctttacacattgcagagtagcagtaaagaaataggttggtcttttaaagggwgtatttcctgcttttaataaacacaagttttatgagaaaaataaataaatttcaatataaaattaagatgtacagaatatagatttagcacatataaaaa

SEQ ID NO: 167765 - DNA, 201 bp, Homo sapiens
agggattgtgagtagagtgtgcaagatggaaagtacgttggcattataatgattcatcatcaacaacaccatgtttgcttgcctggttgaatgtccctgartacaccagctgacatggatgccagaattccagctatgagaatttctcctctatttattttaaacgtaggtacaaatcagttctctttgaaccctgcctga

SEQ ID NO: 167766 - DNA, 201 bp, Homo sapiens
aattctttcctatttttaaaatgaaaatagctgagagatttgtgaggaaaatttgaaacaatgttgattctgaatgtttttaaaaatttctaatatttatraaacaactgtatctcagatgagcttcaatttgcaaggcatcattccattttcatttttaattctctgttccaatgcctctgctaagaaataagcattttc

SEQ ID NO: 167767 - DNA, 201 bp, Homo sapiens
ctcaaactcttgacctcaagtgacccacccacctcggcctcccaaagtgctgggattacgggtgtgagccactgcacccggcccagattgccttcttcagrtaagtattttaaacctcttatgagctgtttccttccttcatcccttcgtttcctcctttttcctcccctcctaggactctctttctcttttcatttgcct

SEQ ID NO: 167768 - DNA, 201 bp, Homo sapiens
tttttagtaggtatggggtttcaccatgttggacaggctggtctcaaactcttgacctcaagtgacccacccacctcggcctcccaaagtgctgggattaygggtgtgagccactgcacccggcccagattgccttcttcaggtaagtattttaaacctcttatgagctgtttccttccttcatcccttcgtttcctcctt

SEQ ID NO: 167769 - DNA, 201 bp, Homo sapiens
caataatatatagattgtacatttgtttttcatggattataagacatttttcatttttcagccacacggtattgattcatcacttccatattcagctatgmctatatatgtccatgtcacaaagttattttcccattaaaaatttactctgtccttgcaataagaaacacaaaagagttagttcaaaggaaaaaataacaa

SEQ ID NO: 167770 - DNA, 201 bp, Homo sapiens
tggtagcacttatgggaacagaaatgatctagatttaactttaaaagtggaattcaattatagctgccaggattctgagttggtctggttaatttcagctrtggagatacatctaggatattctgcaggtatttacctacttgagtaggtaaatccttctctggaaacttcttaggaagttgagtctataagaaatactca

SEQ ID NO: 167771 - DNA, 201 bp, Homo sapiens
tccttttgggacagaaataacaatatctgttctttctgagaaaacttggagagaatgtcaatgtgatatctcagggataattcatttttgaaaaaggagartcctttctactgaatactttttataagggacatttttagctttggaactgcatttctcttccctgtctggatgttagctgtttgtatgagtggtgaggac

SEQ ID NO: 167772 - DNA, 201 bp, Homo sapiens
tagggaaaatataaaatagaatataattttttgtttagaagtatatagcagaagttcagttttggttacgttcagtttgagattattattaaatactcaaytgggtgattttgagtaggtagttggatatatgagcctggaggtgagtgccaaatataacacgtaaatttgggggtcattgggtatttgattgtattaaaa

SEQ ID NO: 167773 - DNA, 201 bp, Homo sapiens
gaatgctcttcttaacattattctcagtagcctcagaccagaaataacctaaattaaatatccaccagcagcaaaataaacacgactatacagtgttttttaaaaaaaaaaacaaaacagaaaatagcaagtgttggcaaggatgtagaaaaattagaacttttgtgcattgctggtgggaatgtaaaatggtccagctgc

SEQ ID NO: 167774 - DNA, 201 bp, Homo sapiens
tgtgtgaacaaagaaacaatcatatatataaatatattatataaatatatatttatataatatataaaaatatatatttatataatatataaaaatatatattatatttatataatgcatttatatattatatatttatattatgtatatatatatatttgaattagcctgtatggacatttttaaaacaactttgcagac

SEQ ID NO: 167775 - DNA, 201 bp, Homo sapiens
catcataattgtatttaattatgtatccatttatcattttccaaaagattaaaccatgcacaaaaatacccctctgtgttctttacggcagtattaatagytgcatatacctaggagaaaaaggcaatttaaattttctcccatgttattttagatgtattttactcctcctcctcaaagtgggtatgaacagcaacactt

SEQ ID NO: 167776 - DNA, 201 bp, Homo sapiens
ttttgtgtgaacaaagaaacaatcatatatataaatatattatataaatatatatttatataatatataaaaatatatatttatataatatataaaaatatatattatatttatataatgcatttatatattatatatttatattatgtatatatatatatttgaattagcctgtatggacatttttaaaacaactttgca

SEQ ID NO: 167777 - DNA, 201 bp, Homo sapiens
gccttatttgttcaatccattatagctggtaacattctgtaaaagaggacgcaaaaggcacccatgaccaatactagataatacgtattcaatcattagamccttttatgaaaacaaggggcgaaaagtgctgcgacaattcccagagaaattgaaatggatatttcctatataatgctaaaagagcatcagatatgaagt

SEQ ID NO: 167778 - DNA, 201 bp, Homo sapiens
gtttttttgtgtgaacaaagaaacaatcatatatataaatatattatataaatatatatttatataatatataaaaatatatatttatataatatataaaaatatatattatatttatataatgcatttatatattatatatttatattatgtatatatatatatttgaattagcctgtatggacatttttaaaacaactt

SEQ ID NO: 167779 - DNA, 201 bp, Homo sapiens
agccagagttgttttgtttgtatgaaaagtggcagtgctgtctaagatttactgatccctgtttagaagtcatctaaaaataatatctgagtaactcaaaycctctccattttccccagaaatagttttactgtaggggtgagatgtaggagagggagggagcgtctgtgtactgccacagctgggaacattactgcacct

SEQ ID NO: 167780 - DNA, 201 bp, Homo sapiens
tgtttttttgtgtgaacaaagaaacaatcatatatataaatatattatataaatatatatttatataatatataaaaatatatatttatataatatataaaaatatatattatatttatataatgcatttatatattatatatttatattatgtatatatatatatttgaattagcctgtatggacatttttaaaacaact

SEQ ID NO: 167781 - DNA, 201 bp, Homo sapiens
tctatcctttttcagagggctaattttagtgagctgtcacattgggaagaatctggttcattccccacatggttttagaaaccaacttggatataatgggraaggtcagatccccacggaatagggacatcttcctacctgctttctaaagcagctgagtttggtaaccatgggcaccctcttcagctgggaggccaggaa

SEQ ID NO: 167782 - DNA, 201 bp, Homo sapiens
actttttcaagaaaaggtaaaattgtgaattgcatttcaaccacacagaaaccaaacaaagttcgggagtgcaaactatattctccttctttcttaacatmagatttttccattgtagcaaatgtgattaggcagggccttgactaaatcactagaacagtgagtgctgacactaaagctggaagctaaaaatgcctccag

SEQ ID NO: 167783 - DNA, 201 bp, Homo sapiens
ctgtttttttgtgtgaacaaagaaacaatcatatatataaatatattatataaatatatatttatataatatataaaaatatatatttatataatatataaaaatatatattatatttatataatgcatttatatattatatatttatattatgtatatatatatatttgaattagcctgtatggacatttttaaaacaac

SEQ ID NO: 167784 - DNA, 201 bp, Homo sapiens
actgtttttttgtgtgaacaaagaaacaatcatatatataaatatattatataaatatatatttatataatatataaaaatatatatttatataatatataaaaatatatattatatttatataatgcatttatatattatatatttatattatgtatatatatatatttgaattagcctgtatggacatttttaaaacaa

SEQ ID NO: 167785 - DNA, 201 bp, Homo sapiens
acaaggtcattctaaggttatgcttaagttattgctgtcaggtatgtttatcctacaccaggttgataagacaatgatgtcatcagtcagagccacataarcttgacagccattaaaagtttatcttcctggctaggcgtggtggctcacacctgtaatcctagcactttgggaggctgaggcaggtggatcatgagatca

SEQ ID NO: 167786 - DNA, 201 bp, Homo sapiens
tgatactgtttttttgtgtgaacaaagaaacaatcatatatataaatatattatataaatatatatttatataatatataaaaatatatatttatataatatataaaaatatatattatatttatataatgcatttatatattatatatttatattatgtatatatatatatttgaattagcctgtatggacatttttaaa

SEQ ID NO: 167787 - DNA, 201 bp, Homo sapiens
tatgatactgtttttttgtgtgaacaaagaaacaatcatatatataaatatattatataaatatatatttatataatatataaaaatatatatttatataatatataaaaatatatattatatttatataatgcatttatatattatatatttatattatgtatatatatatatttgaattagcctgtatggacattttta

SEQ ID NO: 167788 - DNA, 201 bp, Homo sapiens
ggacaacacagtccctgtctcaaaaaaatcaaaaaagaagaagaagaaaaagtattttaaacctgtcattaagaagaaaaaagatgtaattacacacttarggaggccagagtgggcagattgcttgatcccaggagtttgaaaccagcctgggtgggccgggcatggtggctcacgcctgtaattctagcacttttggta

SEQ ID NO: 167789 - DNA, 201 bp, Homo sapiens
gtatgatactgtttttttgtgtgaacaaagaaacaatcatatatataaatatattatataaatatatatttatataatatataaaaatatatatttatataatatataaaaatatatattatatttatataatgcatttatatattatatatttatattatgtatatatatatatttgaattagcctgtatggacattttt

SEQ ID NO: 167790 - DNA, 201 bp, Homo sapiens
ggattaagctattcattcttttcgcattaaaacaatgatgtagttttattcgtaaatctataaagttaagtgcacagtcatcacttttagtacgttctgaktcattgaaatcctgtaaaattttatggaaaaatctgtgtaaacaagctttaaataaggcaatattccaataccaaaactcgggatttaggcataggtgct

SEQ ID NO: 167791 - DNA, 201 bp, Homo sapiens
gttccttatatattttggatattcactccttatcagatgtgtggtttgcaaatattttctctcgctctgggttgtctcttcagcacagaaatggacagtcrcacgttaccacctgtatgatcattattttaaacacaagcaggaaaagcttttgggttccaaagtttcagtcattatgattgaaaaactgccaaactggta

SEQ ID NO: 167792 - DNA, 201 bp, Homo sapiens
ggtgaattgccaaaaaagatagagttaaataatcagtccatctaactgaccttaactaatgtaaaattactttctgtaagcccaggttagttataaaaagwttgaccctttaccgcagtttatctgatataatctcagattaattaatcttgattagtttgttatttgcctcagatttttaattttaaaaggatattattg

SEQ ID NO: 167793 - DNA, 201 bp, Homo sapiens
aaaatgtgttgagcaggaaaagaaacttcacagtatttgtgtttttcttttggccctttctgctaggtatcctcactctaattgagcaggctctggaaacytgaaacgcacatcagtcttgtgcctttttctgtttcttccactagcagttgataattatagcttttcgtagatactcagcacattccatgtttttgatgg

SEQ ID NO: 167794 - DNA, 201 bp, Homo sapiens
aaaaaccacatgactatctcaatagatgcagaaaagccctttgacacaattcaacaaccctttgttttaaaaactctcaataaattaggtattgatgggaygtatctcaaaataataagagctatttatgacaaacccacagccaatatcatactgaatgggcaaaaactgaaagcattccctttgaaaactggcacaaga

SEQ ID NO: 167795 - DNA, 201 bp, Homo sapiens
caagtgggcttcatccctgggatgcaaggctggttcaacatatgcaaatcaataaacgtaatccagcatataaacagaaccaaagacaaaaaccacatgaytatctcaatagatgcagaaaagccctttgacacaattcaacaaccctttgttttaaaaactctcaataaattaggtattgatgggatgtatctcaaaata

SEQ ID NO: 167796 - DNA, 201 bp, Homo sapiens
tccagggatgcatttctggaaaaagcgtaagtcactctaattttattgctaagggcgttgcttcttctgagtcagtttcctttctcctttgtgagtcttcygtttatgccatactgacttctcacattgataaacacaaattttcctttgggatttattagagaactgatacctcccctgttcagaattggaagacttcca

SEQ ID NO: 167797 - DNA, 201 bp, Homo sapiens
  misc_feature (1)...(201): n = A,T,C or G
cttaatattagagattatttaatgcaatattttttaattgggtcagcaccataatcctaaaatattgattttatactagacaccttaattttaaaagcacncagttgatctttcagaagacagatgcaaatgcatggaggaatggttatcttttagttctttaaatatgaataataaatagatttgactgaatggaatatt

SEQ ID NO: 167798 - DNA, 201 bp, Homo sapiens
aatactatcacaatggccattaagtttcagcatctgaattttagaggggacatactgaggcaataacaaacattatgtttttgagaaggtcccattttttyttaatttaaagctcagtccaatgaatatctgtaacaaagggttagtgaaatcccagtccaaaattatcatcttttgaaggtaattcagatggacatttct

SEQ ID NO: 167799 - DNA, 201 bp, Homo sapiens
cttataactgttacatagttaattcaaagaagcattgtatcaagataaataaatatagaaaacaaggaatccattttcaagaaacatactttgttctagtyctgacttcagatttaaaacacacacacatacgcagaagacacactgaatatgattgaatctagaatatagaaataaaataattgaatatattccatttgt

SEQ ID NO: 167800 - DNA, 201 bp, Homo sapiens
tcatatggtatatagtatcagatagctagaaggaggatatttaatgttccccacacaaagaaatgataaatgtttttgattttatatatatatatatatgrtaattaccgtgatctgatcactatatgttatatggatcgaaacatcactatgtactccatgaatatatacaattattatgtgtcaatttaagaaattaaa

SEQ ID NO: 167801 - DNA, 201 bp, Homo sapiens
ttctaaacaagcatttatcgctctttgaagttgtgtcgtatttagaaatttagattcatagtaattagatatttagatagattatactggaatatttgggyggcatatggacagcaggtctgtaaataaaatttaaatcttcattactatattttctacattctgccttatgcttgatttaagcttttttcccttcttttc

SEQ ID NO: 167802 - DNA, 201 bp, Homo sapiens
tcagagggaaggagagtcagcgacgtgctctcgtaaggtcatcttagaagaccactctctccaattattttaagcagctctttagagctttctacattgtraagttctttatcctacctgtgtatccctagggctttacagagtggagattcagtaaatattttgacaagagtgagcaaatgatttaacagtcgatggagt

SEQ ID NO: 167803 - DNA, 201 bp, Homo sapiens
ggcaaaatcaaatgccagtccacaggatagataagtgagcttggtagcctcatcaaccccatagtctgctgagtcttgttaaaacttctttccttcatcayacctttcagaggtgccttgccatttcatgggagagctattgggacagagcagagaatggcttctttccccctagatgtgacctcccagcagaacacagca

SEQ ID NO: 167804 - DNA, 201 bp, Homo sapiens
tgtatgatactgtttttttgtgtgaacaaagaaacaatcatatatataaatatattatataaatatatatttatataatatataaaaatatatatttatawaatatataaaaatatatattatatttatataatgcatttatatattatatatttatattatgtatatatatatatttgaattagcctgtatggacatttt

SEQ ID NO: 167805 - DNA, 201 bp, Homo sapiens
tgtgtatgatactgtttttttgtgtgaacaaagaaacaatcatatatataaatatattatataaatatatatttatataatatataaaaatatatatttatataatatataaaaatatatattatatttatataatgcatttatatattatatatttatattatgtatatatatatatttgaattagcctgtatggacatt

SEQ ID NO: 167806 - DNA, 201 bp, Homo sapiens
aaatgtgtatgatactgtttttttgtgtgaacaaagaaacaatcatatatataaatatattatataaatatatatttatataatatataaaaatatatatttatataatatataaaaatatatattatatttatataatgcatttatatattatatatttatattatgtatatatatatatttgaattagcctgtatggac

SEQ ID NO: 167807 - DNA, 201 bp, Homo sapiens
gttttataagcacctcagtttttttctcagtgtgaaatcatctatatcaatctttttggtgctgtaccctatactgaacatggaaattccaccatttaacrtgctaaacagctagcaaagaactattccatagatattgaacttgaaaactatacattttaataagccaaagtacatcaggaaaaatcagagctttaatga

SEQ ID NO: 167808 - DNA, 201 bp, Homo sapiens
aaaatgtgtatgatactgtttttttgtgtgaacaaagaaacaatcatatatataaatatattatataaatatatatttatataatatataaaaatatatawttatataatatataaaaatatatattatatttatataatgcatttatatattatatatttatattatgtatatatatatatttgaattagcctgtatgga

SEQ ID NO: 167809 - DNA, 201 bp, Homo sapiens
caagagggggctgtgctctgtgtcacctccactctaaggcccagtgacggagcctgcaccgtttctaatgtttccggttactgtggcagaaggaaaaagcrtatgacgaatcacacactggctcttcaaatgtctgcccagaagtgacacagtccccttgagctataagttcctggtcaaaacaaacaacatggccacacc

SEQ ID NO: 167810 - DNA, 201 bp, Homo sapiens
aaaaatgtgtatgatactgtttttttgtgtgaacaaagaaacaatcatatatataaatatattatataaatatatatttatataatatataaaaatatatatttatataatatataaaaatatatattatatttatataatgcatttatatattatatatttatattatgtatatatatatatttgaattagcctgtatgg

SEQ ID NO: 167811 - DNA, 201 bp, Homo sapiens
tcctatatttaggaccacaaaactcaaaaatacttaaatatatgtccggttgaattttgggtattgtgtgtgattttgtttaagtggaagtcacaatataragtagattttttacgaataatcttttgagtccaaaataccttccaactgatatatttatattcattacattctattttatttgtcatataataaatgagt

SEQ ID NO: 167812 - DNA, 201 bp, Homo sapiens
agttgtcaaagggccctgtccccttggggatcacaatctcaaggcggcggggaacatccggaaataagatagttatagttggtgatgcattaccagagacrtgtgatgccataatagtgactaacccaaggacagtgagttagcttttgttgcataaattacccccaaaatttagtggcttaagacaactctttgtttagg

SEQ ID NO: 167813 - DNA, 201 bp, Homo sapiens
agaaaaatgtgtatgatactgtttttttgtgtgaacaaagaaacaatcatatatataaatatattatataaatatatatttatataatatataaaaatatatatttatataatatataaaaatatatattatatttatataatgcatttatatattatatatttatattatgtatatatatatatttgaattagcctgtat

SEQ ID NO: 167814 - DNA, 201 bp, Homo sapiens
tcttatcttgggtatatatgctgcctatatatatgcatatagtaagatgtttaagtttttaaaattaactgcattgttgaatatttgaaatacacatctgwtatttgttattgaactttaaaatgatatatgaggatttaggtaaatactgtctgtctaaaattaattttggaaagtaactcataagatgatattttcaat

SEQ ID NO: 167815 - DNA, 201 bp, Homo sapiens
gcagaaaaatgtgtatgatactgtttttttgtgtgaacaaagaaacaatcatatatataaatatattatataaatatatatttatataatatataaaaatatatatttatataatatataaaaatatatattatatttatataatgcatttatatattatatatttatattatgtatatatatatatttgaattagcctgt

SEQ ID NO: 167816 - DNA, 201 bp, Homo sapiens
tatgtggctttccttaataaacaatccaatacataaaaacccttgctggtcccagaaatcttttttcccctggagatttttaagcaatacttttttcactrctgtcattcagtaattgaactgtgtcagccaaatgaaaacttttataagcttctcagaggacagtgcagtggtactgtctccatttatataaatcgagta

SEQ ID NO: 167817 - DNA, 201 bp, Homo sapiens
tgcagaaaaatgtgtatgatactgtttttttgtgtgaacaaagaaacaatcatatatataaatatattatataaatatatatttatataatatataaaaatatatatttatataatatataaaaatatatattatatttatataatgcatttatatattatatatttatattatgtatatatatatatttgaattagcctg

SEQ ID NO: 167818 - DNA, 201 bp, Homo sapiens
cgatgccccttttcaaacattctctcttgtcttttaaagtattggtgacttcttgtctttctttatctgagaacagaatgcttctttttcacaggctttttggtttgagagctgaatatttcacgttctttctgattttcttgagaagggaggctgaagggaatactgatgtcatatatgttctttctagaatttcaggtc

SEQ ID NO: 167819 - DNA, 201 bp, Homo sapiens
tcgatgccccttttcaaacattctctcttgtcttttaaagtattggtgacttcttgtctttctttatctgagaacagaatgcttctttttcacaggctttttggtttgagagctgaatatttcacgttctttctgattttcttgagaagggaggctgaagggaatactgatgtcatatatgttctttctagaatttcaggt

SEQ ID NO: 167820 - DNA, 201 bp, Homo sapiens
tgttcagcatgataccaatacttcaaaatttgataagattagctttattactaaaatgtggttaggttttacgaatgcccacatgtacttcgacatgtatrttctccactcaatcaaaatagtacattgcacttttcaactattatatgtctttactgttggcctacaatcacaagagtctgatttgtccattattaatga

SEQ ID NO: 167821 - DNA, 201 bp, Homo sapiens
accagaggttccactgggttagacctttgatttattttaatgaagagcccttcttctttgttgatgtctgacagcacattcacagtgatccagtcattttkggggtaagatagaaggaatccaggtagaatacaatataaaaatgtctcaaactaggcaagagaagagtctagtcctgtggtaggtcatatttgtcaaaat

SEQ ID NO: 167822 - DNA, 201 bp, Homo sapiens
acaaaattcagaaggaggaaataagctagtctccctcacaccctccttctccagccatcctgtgcccttccccagatgtaatattttcaaatagtttaacgtacgtttctgtgctgattactttttttgctatttccaacaatgttgctatgaatattcttgtcattgcccccaagtgcacatgatttcaagagttctgta

SEQ ID NO: 167823 - DNA, 201 bp, Homo sapiens
tgaaaggggggttaggggcaagcacagacttgtaaataatctatgagtaaacgtctatacaccagatttgcctagaggatggtgtatttgcgtggcaggayattgggtacagctttagcagtgaaaagagcaaagtgcaaagagaacctagaagaatgcaccactgggagctgactattattattttcattaaaggtgagt

SEQ ID NO: 167824 - DNA, 201 bp, Homo sapiens
agtgaggccctccttctcatttgtacaaattagtaagatgtcaacctacatgtggagttctggagattcatcttaagacttataaaagggaaaaaaaaaaagaataagtaaaggtattgagggcctactacgtgctgatggccaaggtactttcacctacattaacaaatcaaatcatttcaataggccctgtagggtggc

SEQ ID NO: 167825 - DNA, 201 bp, Homo sapiens
ttgacctagccaccgtagccatggaattttatttatttatttatttattattttctgaaacagagtctcactctgttgcccaggctggagtgcaggggtaygatctttgctcactgcaacctccacctcccggtttcaagtgattctcctgcttcagcctcccaagtagctgagatcacaggcgtgtgccaccacacccag

SEQ ID NO: 167826 - DNA, 201 bp, Homo sapiens
taacctggaaggcagaggttgcactgagatcgcgccaccgaactccagtctgggtgacagagtgagaccctgtcaaaaaaaaaaaaaaaaagaatattgarcatatgtttacataaattaattattttgagcaatgactatttctgcttcagaaaatctggacttcttaagttgtgttcaagaaaaaaaaaacaagacaac

SEQ ID NO: 167827 - DNA, 201 bp, Homo sapiens
ccaggcatggttaattagccctgctacttgagaggctgaggcacaagaatcaagaatcactttaacctggaaggcagaggttgcactgagatcgcgccacygaactccagtctgggtgacagagtgagaccctgtcaaaaaaaaaaaaaaaaagaatattgaacatatgtttacataaattaattattttgagcaatgact

SEQ ID NO: 167828 - DNA, 201 bp, Homo sapiens
gagatctatgctgtataaaaagtaattcatccaattctattatgacttatatatagcaatctactcatttatgaaacaaagaattccaggcatatcttgtkttactagcctgtcctgagtattgtggttcgaattcatttgtggactcttgagtagggctgtctgtctataatgacaatgcatatacatgtagaaccagct

SEQ ID NO: 167829 - DNA, 201 bp, Homo sapiens
aaaaggaactgggcccttctggaggcaatagactgttcttgaagacttgctgaagttagtggctcttttggagaagcctacatatcaaggaaatatgacarcctccggaactgcaagcagcctctggtatccaaggccccaacaaaaagccagagccctcagtcacagagctcaagaaattgaattctaccgtcaacctga

SEQ ID NO: 167830 - DNA, 201 bp, Homo sapiens
gggcacatgcaagctgacactctcaggactccaaagtgtacacacttttcactataccacacagcctctcatgcacgtagacaatcacacacatacaaacwttctaacaaaagtttgtaggaattgtgctgggaccatgctgtatagctgtagtccatggtgtataacatgcctgcagtagaatatctattgaaatgaata

SEQ ID NO: 167831 - DNA, 201 bp, Homo sapiens
atgaaataggagttaacactgaagtctagagaggttatgcaatttgcttatggtcacacagctaataagagctagatagaggtctcctctagagctcatgmgcttaaccagtacctccatccatgacactgtcttaccctaatactggaggagttgaggaataggcttccccacatcgtggataataaagctaaaattttc

SEQ ID NO: 167832 - DNA, 201 bp, Homo sapiens
tacacatattagaaatatgagaactaatgtttattgagcaattcatatctgtataccaaacattctactggtatttcaacaccgtgaactagaaacaattmctaaggttatgaaataggagttaacactgaagtctagagaggttatgcaatttgcttatggtcacacagctaataagagctagatagaggtctcctctag

SEQ ID NO: 167833 - DNA, 201 bp, Homo sapiens
tgtagtaaactaaacacagcccaggccttggttaggggcccagtaggagcagagaagggaacagcagatgagcttggatgctccactgcaaacatgagtcytaagccaagcacacaagatcagaagtacacaatgtcagaggcaggacaaatggaaaagcaggggaaacaacacaggaagatctaggaaccccagtggccc

SEQ ID NO: 167834 - DNA, 201 bp, Homo sapiens
tggactccctacaagtctaagaggcccagagaaacactcacattttatcaaccaaaggaagatacgagagagatttgacctggagctaaatacccacttcytaaattagaggaggggaggaggggtcttacccaccttcagatttgactctccttggccgaaataccaatgaggtgagcctacaatccactttcattatta

SEQ ID NO: 167835 - DNA, 201 bp, Homo sapiens
atccacattagggagggcaggctgcttaactcggtctaccaattcaaatgttaatctcatccagaaacccctcacagagacacccagaagaatgtttaacsaaatatctgggcaccccatgacccagtcaagttgacacataaaattaatcatcacgagctacaaaggcagagttgaacagttgccatagaaatagaaact

SEQ ID NO: 167836 - DNA, 201 bp, Homo sapiens
agacagaggctgcaattaactatgaatgcactactataccctagcctgggccacagagaccatgtctcttaaaaataaaataaataaaataaaataaaattaaaataaaataaaataaaataaaataaaataaaataaaataaaaaaataaaattgtttgtaaatatttcctgattcagtgtatggccccgattcgatata

SEQ ID NO: 167837 - DNA, 201 bp, Homo sapiens
acctatatgacaaaccctcatgtgtacccctgaacctaaaataaaagctaaaaaaaaaagaaaacagaaatgtcctttttcaactggatgaattttattcygtaagaaatagaggttaaacaaaagcattttcaagtgaaattacatgtattttcagtatttagaggaaatactttttagattatcaactttaacccatta

SEQ ID NO: 167838 - DNA, 201 bp, Homo sapiens
accatccttgcatctctgggataaatcccacttgggagaatcatagctcagtaccttgcttgtggtgggcaacttctatgttgcaattcatgctccagagmaccctgtgggatcagtctgagactggagtttgcctgaggccacatttcgacttatcttcttccctgtcttaacctgcttgcctcacctccctgcagtttt

SEQ ID NO: 167839 - DNA, 201 bp, Homo sapiens
gataaaaaggcaaactctagtcaattgaatttctcatatatctttcattctaacccgttcagatgtactaatttgtcacatgccatggttacttttccctytttagactttcaagttggaaaaagcttttttcagattcagaaagataaaatatcagccatgtattaaatgcattaaatgtttttctctcagctgctttta

SEQ ID NO: 167840 - DNA, 201 bp, Homo sapiens
aagaatgagtggggggaaaagccccttataaaaccatcagacctcaatgaacttactatcatgagaacagcagcatggtggtaaccgcccccatgatccarttacctccacggggtccctcccatgacacatggggattatgggaactacaatctagatgagatttgggtggggacatagccaaaccatatcagagggata

SEQ ID NO: 167841 - DNA, 201 bp, Homo sapiens
ctaaaggcagaaaagataatgtatttaaatatgtcttcttattcttaggacagaagaaggtccctatacatggcagatgttcattaaggatcagggtttastgatgttaatgctattatataggttcattagtcatataaaagttcattatgtgccaggcactttcaaggcaagttctgagaaacaacattaatgactggg

SEQ ID NO: 167842 - DNA, 201 bp, Homo sapiens
cctcaagtgatctgcccaccttggcctcccaaagtgctgggattataggcatgagccactgcacccggccaccttctcagatcttttgctagctgctgctkcttcttcttctttttttttttttttaaatggagtctccctctgtcgtccaggctggaatgcagtggtgtgatcttggcttacagcaacctccacctcctg

SEQ ID NO: 167843 - DNA, 201 bp, Homo sapiens
gggtttctccatgttggtcaggctggtctcgaactcccaacctcaagtgatctgcccaccttggcctcccaaagtgctgggattataggcatgagccactrcacccggccaccttctcagatcttttgctagctgctgctgcttcttcttctttttttttttttttaaatggagtctccctctgtcgtccaggctggaatg

SEQ ID NO: 167844 - DNA, 201 bp, Homo sapiens
cccaggctagaccataatggcacgatcttggctcaccacaacctcagcctcacgggttcaaacaattcttctgcctcagcctcccgagtagctgggatcayaggcatgcgccaccatgcccagctaattttgtatttttagtagagacagggtttctccatgttggtcaggctggtctcgaactcccaacctcaagtgatc

SEQ ID NO: 167845 - DNA, 201 bp, Homo sapiens
tcagggcctttggacctgttgttccctattcttggacccgttgcttccttagatctttggttttgttttactttttgagaaggaattttgctcttgttgcycaggctagaccataatggcacgatcttggctcaccacaacctcagcctcacgggttcaaacaattcttctgcctcagcctcccgagtagctgggatcata

SEQ ID NO: 167846 - DNA, 201 bp, Homo sapiens
tgttaaaaccatttgatctttaaactggcttgcttcatttcataatggatcgaagacaatggacacaaagtatataggcagtaaaataatgataaaataartgttggtactctaaaatagaaataaattagaaaattaagaacaaggaaaacaaaacacaaatgcacacacatagcagctaagctggctcatacctcaggg

SEQ ID NO: 167847 - DNA, 201 bp, Homo sapiens
ccttctctgcctgaagccataagtacttgaacagacagttttttggggagatcttcctagttaaaaatattgagctaatatctaaacttatagataacttygggacatttgatttgagttaaggttagaacaatgctgcgtaattctggccacatatataattaatttaaattcttctagattaaaaaaaatgttgcagaa

SEQ ID NO: 167848 - DNA, 201 bp, Homo sapiens
agtgctacattagaggaaaataaacaattggctaggtacaaaggctcatgcctgtaatcctaacactttgggaggcagaggtggttggattgcttgagctsaagagttcaagaccagcttgggaagcatggtgagacccaatatcatttttcctattttaaatataatttttttccctttcctaaaatagaaaaaattagc

SEQ ID NO: 167849 - DNA, 201 bp, Homo sapiens
atggacgctgtcaaacaacaggctaagatttcattcatgcaaaagagtacgacattgtaaaagccccacttccttctaaattgttggaacagcagggaaakaactggcaattgtcttcttcctgtttgatgccccagtgactcgtatgtgccaacacggagagtagggccctgtacaaggtgctccatcatagccacatga

SEQ ID NO: 167850 - DNA, 201 bp, Homo sapiens
gtgcccttgaggtgaggctggtagcaggcttgatagaccatggacatggctttttgtctgcttttggttattttgttagacctatttcagggtctccaccrttgtcacattctttcctttttaagagtattttttttttctggttatacccatgaaaccttattttaagtccctaaccacaggctttagagatctatgctg

SEQ ID NO: 167851 - DNA, 201 bp, Homo sapiens
tccatggactgatattttctagccaaagggagctaaaaatcagccattttgacatttggatttttcattgatgtgtcttgtttatttaattcaatttaatrtgaaagagtagagagggtagaacaaactgttcagcaacgtatagatcattaggttttaaaaccaaataaaaagtactcagtgtaaaaatttgcctgactg

SEQ ID NO: 167852 - DNA, 201 bp, Homo sapiens
tgcactaagaatgattttgacattttgaacggattgaaaaataatcaaatgaagaagaatattttagagcacatgaaaatcatttgagattcaaattctartgtcctcaaaatttctattgagcacagccatgtgcattctgttatgcattgtctatgtgttcacactacaacagctgcattgagtagttgtgacagagac

SEQ ID NO: 167853 - DNA, 201 bp, Homo sapiens
aaacaagaacagggttcaaatccaggccagtgcctctgtttgcacagccagtgcactaagaatgattttgacattttgaacggattgaaaaataatcaaaygaagaagaatattttagagcacatgaaaatcatttgagattcaaattctagtgtcctcaaaatttctattgagcacagccatgtgcattctgttatgcat

SEQ ID NO: 167854 - DNA, 201 bp, Homo sapiens
tcgggaggccgaggtgggtggatgacttgagcccagaagttcgagaccagcctcggcaacatggcaagaccccatctctgcaaaaaaaaaaaaaaaaaaaatacaaaaattagccaggcaggggatgcgcctgtagtcccagctactcaggagactgaggtgggaggatcacttgagcctgggagatggaggctgcattaa

SEQ ID NO: 167855 - DNA, 201 bp, Homo sapiens
agtttctcagtcacactagcacatttcatgtgctcagtgttcccatgtagctagtggctgtggtattggacagtgccaatatgcaacttttccacaattayggacagttctattgaatagtgccaaacaagaacagggttcaaatccaggccagtgcctctgtttgcacagccagtgcactaagaatgattttgacatttt

SEQ ID NO: 167856 - DNA, 201 bp, Homo sapiens
catgtgcagtataggtatttgcatttgctatgtgtgtttccctgtgttcgcgatgtaatatataaaatcaagacatcaactgttgtctccccagagttatrgctatataacttaagcagcaaaggaaaggatttaggggtccattttaatgtaggcaagagataagaccattttttcaagttaataggaaagaaaattatg

SEQ ID NO: 167857 - DNA, 201 bp, Homo sapiens
  misc_feature (1)...(201): n = A,T,C or G
ttgaatgaggcaggaagatagttgacagttggttaattcatgtattcattctagttagttttgtgtctgcacttccttctggaatttaaacatttttgaanatacggtctctgttctattttttatttttcattcctataaagttttattgaatgcctatatgtgtccaacataccagatcctaaggtatgtttcacataa

SEQ ID NO: 167858 - DNA, 201 bp, Homo sapiens
atctcttaggtcagttttgcaagttcattatttcaagctgtctaaaggaggtataggattttgtaacaagtaattaaggaaaccaccataaaagtttaagwttatactatatgatagttttcattatccaatgctgcattttttgtaatagacattgaataggagggaactatccttactaagtggtaggcatttttcccc

SEQ ID NO: 167859 - DNA, 201 bp, Homo sapiens
tgtgtgaccccctctggctttgctatctgcaggtttcttgatcacacgtggtatccatttatcagtcctggctggagccagtttcccagagcaaacagatkcaggatgatccgcactatcagcagaggttcaccaaagttctaattagaccaggaaggtttattaatacaattagctttagggaggacagttacaacagga

SEQ ID NO: 167860 - DNA, 201 bp, Homo sapiens
tcagtggttggcttctctggccttgacctgtgagctcagcatgaagtgctgagatttgatttaagatgacctagagtttatgtactgtcatttacttggarattatcactttgcgtatttcagatgacatctcttaggtcagttttgcaagttcattatttcaagctgtctaaaggaggtataggattttgtaacaagtaa

SEQ ID NO: 167861 - DNA, 201 bp, Homo sapiens
attcccaataaggtttgccaccaaaggagtttgctctaaatttgtgactggatgtttggttttcagaggtttcaggatttcagaatcatggtaagggattrtagacatgtatttggtatgtgcaatattgggggacttgaatattaagtctgattgggaacatctctgggtttctgtatgtgtacacattctacacaatag

SEQ ID NO: 167862 - DNA, 201 bp, Homo sapiens
ttataaaaccatcagctctcatgagactaatgcattatcatgagaacaacacaggggaaccacgcccataattcaattacccccacttggtaacccccccktgacactgtgggtattacaattcaaggagattttgtgtggggacacacccaagccatatcatgtatctaatatgaaaatgaagccatgagactggaaaat

SEQ ID NO: 167863 - DNA, 201 bp, Homo sapiens
cgcatcattttataatgaataagacttcacaggtatgctaaatggttgttaccaaagtcatttaaataatagtgattttatgcgtctgtgtttcagtggtyggcttctctggccttgacctgtgagctcagcatgaagtgctgagatttgatttaagatgacctagagtttatgtactgtcatttacttggaaattatcac

SEQ ID NO: 167864 - DNA, 201 bp, Homo sapiens
tgtgttagtcagaattcagtgtgggtaacagaagggcaggccagattggagagagctggaaacatattccaggtagagacaatggtgcctgatgaagcctragggtctgaatgctggagtaaagccaggggttatttacactgtgactgggtgtgaatctacagatagatctgaaactagaagataagcccatgaaggaaa

SEQ ID NO: 167865 - DNA, 201 bp, Homo sapiens
ataaattaacttgaacctgcctagttgtctgtttcagagccagaattcgaacatggattcattttagccgcagtaagcacctgtgttagtcagaattcagkgtgggtaacagaagggcaggccagattggagagagctggaaacatattccaggtagagacaatggtgcctgatgaagcctaagggtctgaatgctggagt

SEQ ID NO: 167866 - DNA, 201 bp, Homo sapiens
  misc_feature (1)...(201): n = A,T,C or G
cactagaaaaaaaaattaaatattgaaattacattgaggattatttgccctcaacttcactgaatatttacccatttcttttataatgttataatttatancaatgaattgtatttctcaccttccccttttttgttttgttgttgcttaactcagaaagaaataaaagttttgaaatgtcttccttcgtggaaaccaaag

SEQ ID NO: 167867 - DNA, 201 bp, Homo sapiens
gtatgagtgttctgagtgataatataaaatgcattttttactgaggagcatgatcagaacaatatcaaaccattgaccaacatcaacatatttctattagraagatatttaaatgaagtttgtatagtaaaaggaagaaagaacactaaaatatttgcaaatctaccctgcacagtcactttaatcttttcagcttctaat

SEQ ID NO: 167868 - DNA, 201 bp, Homo sapiens
gtgtgattcaggtgccattggaggtttctggaagagaagggccttttaaaagcctctgagaggccagtattatccccagaaagaatgagaggaggtttatkgtatgcacgcaagcaatatctatgaatccctttacttgcttgtatcttaccctcttctgccctaggaacaggctcgtgggagaagtgacccaactacacc

SEQ ID NO: 167869 - DNA, 201 bp, Homo sapiens
ccatcccaagagaacgaccatttcactgcaaaggcattttaagagccatgtagaggaattgtggccgattgaataggaagttctacctggttcaaatgagytcacatctctcggggaagctggtgactgtggacccaggtagtccaggtcatctttgagaaatgatggagaacgtagtgtcagaggtgaggggattctgtg

SEQ ID NO: 167870 - DNA, 201 bp, Homo sapiens
ttatctgtgtttcctgcatttctacaatgactctcttccaagggaatacagtcacaaaagtggactgggatcaactttactttacaatcttactttcttaycccaagtatagataaactcacaataaggcttgtgtttttgatactcagacctggctatgcaaataaatatggggatgtatgaatacaacgggaagagtgg

SEQ ID NO: 167871 - DNA, 201 bp, Homo sapiens
ataccacgagcatcttatcttgtgataaaattaaactgcacacatcttgctatttcagatgaaactttctacatgattccatgctaattaaaggtgatgarcgcatttaaaaaggaagataatcatcaaatcatttagggtttccctttgtctttaatgtagcatgcaggattttcaaagtgcttttctgatttttatagt

SEQ ID NO: 167872 - DNA, 201 bp, Homo sapiens
  misc_feature (1)...(201): n = A,T,C or G
attacattgaggattatttgccctcaacttcactgaatatttacccatttcttttataatgttataatttataacaatgaattgtatttctcaccttcccnttttttgttttgttgttgcttaactcagaaagaaataaaagttttgaaatgtcttccttcgtggaaaccaaaggacttgaacaactcaccaagtctccag

SEQ ID NO: 167873 - DNA, 201 bp, Homo sapiens
tgcaatatgtgtgaacgttcatctgatgcactgagtctgaggaaaattttgaccagtaacctttgtccactggaaaagagtctatgtagaattagatgttmattgtaagtaatcacagaagtgcaaattataaaaaagaaattttttgtacaaattaaaaagcaggaaaaggaataatagaatcctcttttaatgaggcat

SEQ ID NO: 167874 - DNA, 201 bp, Homo sapiens
ttgtatcataatattctaatatatgctttatatattagaatgatatatttaatatatcattctaatatatctaatatatattagaatgatatatttaatayattagatattagatatattagaataatataaataatatatctaatatatgttagatattagatattttgtatatactatatttatatataattatatatt

SEQ ID NO: 167875 - DNA, 201 bp, Homo sapiens
gaaatttcttgagtgagaaggagccaataattggaaaacccctgattacctaatgcttgtagcatgtcccaggatctgaagaattttttatatatcaataktttgaataaaattcgtatttgtcctcagagagacaaaaacttctgcttttaagaatactcagaagctaaactaagacattcattataccatctaattgtg

SEQ ID NO: 167876 - DNA, 201 bp, Homo sapiens
ctatttataaatggcaatgataaaaatatttccttcacaggaacgtttggaagaccaaatgatttaatatttgtgaagaacttagtatagttctggcacasagcaaacactatatacatatttatcagataaacaaagtgactccaataagctagctgcaaccaccgcaactgtcatctacaacttaaccagttttatttt

SEQ ID NO: 167877 - DNA, 201 bp, Homo sapiens
ctgaaaaagaactaaaaaagcccagctgtccaacaaagtcatgtctctaggaagagacacactgagggaaggatgtaactgagagaaataagacataggcytcagatttcctagttgggccaatgagaagagtgaacagcatcattatgtggagaaagtgaattatagaacctgatcgttatttgtgagctcattgatgta

SEQ ID NO: 167878 - DNA, 201 bp, Homo sapiens
tcatggcagaaggcgaatagggagcaggtgtgtcacatagcaagagaggaagcaaaggagtggggaggatgtgccaggctcatttaaagaaccagctctcrcatgaactaattgtgcaagaactcactcatcaccagggcgatggcgccaagacagtcatgaaagatttgcacccataatccaagcagctcccactaggcc

SEQ ID NO: 167879 - DNA, 201 bp, Homo sapiens
ttgattttagtcctcaaatatctatagcagcagcagtttgtatctgaaattattacaaggggatttgcctattagaaatatgcctaagttccattattcawtaaggtcacagcagcaattctgattaatggagctgattcttgatagctgtgaggatacttccaatacatattataacttttacaacagagaaagccctta

SEQ ID NO: 167880 - DNA, 201 bp, Homo sapiens
acatggtgggtaggtggctcagcctctaccacttacaggataatttctgacaagtcacttaatccctctaagcatcaatttcctcatctcaaaatagcaaycatgattatggtaatgtaatacctatctcacagagttgctgtgttatgcacataaaattcctggcaaattatttttttcaagtgatacttgctctgcaaa

SEQ ID NO: 167881 - DNA, 201 bp, Homo sapiens
caaatattattaaagagtgataattaaatgtgcctgatgtataaaaagcatgtgaggtcatttaaactaacacttttattgtgattgttgtgaaggttatsaaaaacttgatcatgtatattatctaaagggattgttacaaacctcaagtgacttcaggtcattgaaaccattgcatgtggtgaccagctacagaggcca

SEQ ID NO: 167882 - DNA, 201 bp, Homo sapiens
aataaacagcatccaaaaatgttaatgattatatatggttccagaatttacaatggtttgtgttatgattttttttaattttacagtggctggaaagtgawacacattcaataaaaactgtatttcaaatacccatacaatgattctacttttcactttcagcacagtattcaataagttgcgagagatattcacatttca

SEQ ID NO: 167883 - DNA, 201 bp, Homo sapiens
tagccgaggacagaccaataaacagcatccaaaaatgttaatgattatatatggttccagaatttacaatggtttgtgttatgattttttttaattttacmgtggctggaaagtgaaacacattcaataaaaactgtatttcaaatacccatacaatgattctacttttcactttcagcacagtattcaataagttgcgag

SEQ ID NO: 167884 - DNA, 201 bp, Homo sapiens
ttgtttgcgtaatggagaccctctcttcctttctctcttccttcctttctccctgtcttccttgaccaaagttaagcaaggcaaaacagtcaaaagttttytgacataagttgcagtgacaagaactgacagagcacttgatgtaaattttcttataaaacagattttaaaagtgtttacaatattgataggataagaaat

SEQ ID NO: 167885 - DNA, 201 bp, Homo sapiens
gactctgcttatattttcagaaatgtgtctttagccactagccgaggacagaccaataaacagcatccaaaaatgttaatgattatatatggttccagaayttacaatggtttgtgttatgattttttttaattttacagtggctggaaagtgaaacacattcaataaaaactgtatttcaaatacccatacaatgattct

SEQ ID NO: 167886 - DNA, 201 bp, Homo sapiens; identical to SEQ ID NO: 30513

SEQ ID NO: 167887 - DNA, 201 bp, Homo sapiens
ggcagtctcctgggtcatctccagaatctggagtgcagagccacagtgacccataatggacattgtgtaagcaagaaataagtatttgttattcataaatyaccagtgttttgggcttgttactgcaacattgacccattggtagaaacaactcagcttctggttaatagggtattattttaaaatccgctatgaacattc

SEQ ID NO: 167888 - DNA, 201 bp, Homo sapiens; identical to SEQ ID NO: 30514

SEQ ID NO: 167889 - DNA, 201 bp, Homo sapiens
gtcccagctactcgagaggctgaggcaggagaatggcatgaacccgggaggcagagcttgcagtgagcaggagatcgcgccactgccctccagcctgggcracagagcgagactccgtctcaaaaaaaaaaaaaaaagaaaagaaaagaaggcctcagatggagccatggagagttttcaaggagcaactaggcctaggat

SEQ ID NO: 167890 - DNA, 201 bp, Homo sapiens
gtcaggagatcgagaccatcctggctaacatggtgaaaccccgtctctactaaaaatataaaaaattaggtgggcgtggtggcaggcgcctgtagtcccarctactcgagaggctgaggcaggagaatggcatgaacccgggaggcagagcttgcagtgagcaggagatcgcgccactgccctccagcctgggcgacagag

SEQ ID NO: 167891 - DNA, 201 bp, Homo sapiens
caggcagaacatcttggagcaagtgatatttgaactaagagccaaaggctgagtaggaattaactaggtaaatggtataaggtctggtagagtgagaaagwgtgtgtggatgaagagaaaccctttcagatacggagaataatacacgcaaagtccctgtgataggagggaccatggtgtgtgcaaggaactgaagagtca

SEQ ID NO: 167892 - DNA, 201 bp, Homo sapiens
tggggaaacagtaaagttcagacccattcactttaaatattcatccaaaagatatttattaagcatttagtatgtgtcaggcactgcgctgcatactaagratacagagtgaacaggaaggtagccaggaaccctgtgctgggaatggacaggcctccaggtgcctaagaagatcagagtaaaatcaggaaccaaatgatc

SEQ ID NO: 167893 - DNA, 201 bp, Homo sapiens
ccttttttttttcttttaatgtgtggcaccatcattctgaaaatatcttattcttgtgattacttgtttataacttgtttcgtccccacacaggggccgcrtctctgttatttctccaagcacctggcatagaggagatattcaacaactttatagaatgagttaatattttgcagactaaatagttgggcaatagaaggt

SEQ ID NO: 167894 - DNA, 201 bp, Homo sapiens
gtcagtagttttactggtatgcaggacctgaaagaatatcttaaaggaaaaactgaatgtttcataatgttcaagttgttatctgtacagcagttgagggraactatatcttgtgtaacagggtctatgtgattctagaacaatacacaaacatctatgaggaagcaggtcagaggaagctgacctaataatttgtgctga

SEQ ID NO: 167895 - DNA, 201 bp, Homo sapiens
acagcatatatcgcttgttttcagcagatcggaagcgagttgaaactgctttagaggcttgtagtcttccatcttcaagggtgagcatgtgtgttatgctrtagtttgaatgttcagcccctccaaaactcatgttgaaacttaatccccaatatgacagttttgagaggtagggcctttaagaggaaattaagagcttcc

SEQ ID NO: 167896 - DNA, 201 bp, Homo sapiens
ccgctctgtgggtttgtcagaaggtgtcaagtcctaccttctcagtaggcgtctacacagcctggcgctgtatccctctccacccgccccctcgcagtgtrcactatacttccactgttccagctctttgtctgtccccagatggaaccatgcttctcctgtttctgctgctaggccacaattcctccagatatctccaca

SEQ ID NO: 167897 - DNA, 201 bp, Homo sapiens
aatgaatgcatatgcattgctttgtataaagcctgacatacaggcaaccttcaataaaacatgtttttaaaagttattgtcggccgggcgcggtggctcamgcctgtaatcctagcactttgggaagccgaggcgggcagatcacaagaccaggagatcgagaccatcctggctaacacggtgaaaccccctctctactaa

SEQ ID NO: 167898 - DNA, 201 bp, Homo sapiens
ggacagaacataaagattcatcacatatcaaaaatcattctgaatatgtagtaattaagatattagtgggatactggcagctttaacattggcacaaatawgtgatctatgaataagcgcacactgatgtgagaacttgatttatgagagagatggcactggagacatgtggagaaactcaggcttttcaataaacattga

SEQ ID NO: 167899 - DNA, 201 bp, Homo sapiens
gtttcccattggccacttcgtgctcacctcatgtaactgaagcagtagcctgcaatcggtctgattggttgcagaaaacagccaaccagaggctgaagtgragttacaaaggtcacactcccgtgcaaacatctgattggttgctttttgcaaccaatgacctgcattctgaggtgttttttttttttttttaacttaaga

SEQ ID NO: 167900 - DNA, 201 bp, Homo sapiens
agtcataggacgggaatccagatgtttatttttaggggtctcagataacatatctttacatttgaaaggcaacagggtatttgtttggttacactataagyatgtattattttgttgagactaaattacttttttttatttctatgatgcagcactcttttagtatggagaggctcatttggcaattccctcaccttttta

SEQ ID NO: 167901 - DNA, 201 bp, Homo sapiens
cttgtttttatccaccacatctacagctgtttggttttttctgtttgtttgtttgtttttttgttctcatccctgcattcagacaatcaaaatgttttctyctttcaatttccagaaaattacaatgatccaggttcttcgctgaagctaccatatctttgtttcttgtgcaatgataatgtcactgatggcataatgtct

SEQ ID NO: 167902 - DNA, 201 bp, Homo sapiens
atttctcagtcacattattttttagtaattcttaaaaaaaaaaaaaaaaaacgccttggccaggtgcggtggctcacgccagcactttgggaggccgaggyaggtggatcacctcaggtcaggagtttgagaccaggctggccaacatggcaaaacccggtctctactaaaaatacaaaaattatctgggcgtggtggcac

SEQ ID NO: 167903 - DNA, 201 bp, Homo sapiens
aacagcttaggtgactgggatttaagcatatggctttctatgtcttagcaaccctcatgtggttggaggttgtcagtcttattccccatttgacctccagyattagcccagaggctggacaaaagaagtaatcaattaataattgatatcaaaataaatgattcagtgtcttttcaacataggacaacacagtcagtgagg

SEQ ID NO: 167904 - DNA, 201 bp, Homo sapiens
tagtctttttactgactctgcttatattttcagaaatgtgtctttagccactagccgaggacagaccaataaacagcatccaaaaatgttaatgattatakatggttccagaatttacaatggtttgtgttatgattttttttaattttacagtggctggaaagtgaaacacattcaataaaaactgtatttcaaataccc

SEQ ID NO: 167905 - DNA, 201 bp, Homo sapiens
tctctttgcattttgtatcatgtgcactactaatctcttacatttgttaatccattgctatggttttgacataagttggactgacaccttcatttagcagrtgtagaaagaggcccagagaggtccacttacaggcaggagtagggccaggccagaaatctagtctcccgtctttttgcttttcttagcaaacagattccc

SEQ ID NO: 167906 - DNA, 201 bp, Homo sapiens
actagctgcggggggtgcaaaggtatgctcactaacattaagtaatttactgtccctttggaaggtaatatatattcccctaaacaggaaaagtaagtttrcaagggagcatggtttatgtacagtcacaggagtagggcttgtaaaagattctgtagatattgaggaggaggtatgtgtgagacagagcatgggatttaa

SEQ ID NO: 167907 - DNA, 201 bp, Homo sapiens
gtaataccatctggcagaactcacattcgaccttttattaaaactacaattatgtcacacctgtgaggtttaaaattcaaggctccggaagttaaagcgaygtgtccaaggttacatggaaaattcttgagagctcacagtttcctgccctggcctttcacttcggatgtacaccatagtacgtgtgttttctgattagag

SEQ ID NO: 167908 - DNA, 201 bp, Homo sapiens
attgatctgttgattttcccattcatgaaacaaacagagtccttacatggcaggtggaagggcattaaggtttactcagcatctctagttgcagctggatrtgtaccttatttctctgtagtaaaagaagtcttgacacctgaattaaaaaattatcattaaaaagtttaaaggaaggaaacattataagtgttcgaacta

SEQ ID NO: 167909 - DNA, 201 bp, Homo sapiens
cgatcatggctcactgcagcctcaatttcccgaggtcagttcaatggatcctcccacatcagcttcccacgtagctgagaatacaggcttaccaccacacytggctgatttttttttatttttagttttgtagaggtggagttttgccatgttgcccaggctgatcttaaactcctgagctcaaagcgatcgtcccgcctc

SEQ ID NO: 167910 - DNA, 201 bp, Homo sapiens
ctgtgtgctggctgagtttggatccagatagccaggatccagttagccaaaaccagtcacatggtctaaccccaaatcagtgggcagagatgtacacaacyccctacttgaccccactgtggggttccagagggtgggactgaggatttgagaacaattatcacatccactacacaagaaaacatcattttcctcttctat

SEQ ID NO: 167911 - DNA, 201 bp, Homo sapiens
aaaaatacaggttttaagtccatgtcttaaaaattgcctccaagctaataaggaggtgtgggggaagcatttaaccttgcatggtgtttcaaggattattytccctgctcaccaattgataagcagagataattttctttaaaattcaaggttttctcttggactcagcacagcacagctccctaccagacaactctccct

SEQ ID NO: 167912 - DNA, 201 bp, Homo sapiens
aggagttagagtacacgttgggctttgcaacgggtctgctttcatttgttaagcaattgttttttatttggatttcatttattcatttaaatatttatgargccctactacttaccctcaggatgctaggcattctaaaggaatatcttgctagagaaacgtctccgtttagattgtaccttaagtttcagtcacagcaca

SEQ ID NO: 167913 - DNA, 201 bp, Homo sapiens
gggatcagaacaagccccagaggctgccctgaaagctgcagatggaggatgcacagccaggatcaagacaaaaagtagaactgggggctgagagtagaacycagacagggagctatcagagtggccaaagcagattaaccaccttggcatcccccaagagctattgagaaacgcaggagctcaggccccactcaggcctcc

SEQ ID NO: 167914 - DNA, 201 bp, Homo sapiens
acaaaacgttcttttataatagtgtatggaaaaaagatttttgtactaattttaatatttccccaaatgttttttgcattcttgttctttccttaaacatyttcattcatacactacagctgaaaacaaaatgatgaataaaaagtaatagtacataaggccgggcatggtggctcatgcctgtaatctcagcactttggg

SEQ ID NO: 167915 - DNA, 201 bp, Homo sapiens
aggttagagcaatgccaaggaatgcctggaaccaccagaggctgaaagaggcagggacctgaatctcccgtagcagcgtgacactgatgacactttaattktggacttttgatctccaaaactttgagagtcaatgtctgttcttttaaaccaccaagtatgtggcaatttgttatggcagcctcaggaatctaatacatt

SEQ ID NO: 167916 - DNA, 201 bp, Homo sapiens
gaatagcagtccccaaaaagatatgtccatgtcctaattctcagaacctatgaatgacaccttatttggaaaaaggctccttgcagatataattaagtatyttgagaggaaaagatcatcctgaattacccaggtgtgtcctaaatccagtgacaagtgtccttgtaagagacatactaggaagatttgacacagacagag

SEQ ID NO: 167917 - DNA, 201 bp, Homo sapiens
tttctttatccagtccaccattaatgggcacctaggttgattgaatgtctttgctattgtgaatagtgctatgataaacatacaagtgcatgtcacacacyttttgatgtgaaaaaaaaaaaaaaacaagtcatttaaactagatccataatctgttatctgagattcttggggcctgttgtttttcagaattttaacttt

SEQ ID NO: 167918 - DNA, 201 bp, Homo sapiens
tttagtagagacggggtttcaccacgttgggcaggatggtctagatctcttgatcttgtgatccactcacctcggcctcccaaagtggtgggattataggygtgagccaccgtgcccagccagaaattatttttaaaactgtggttttgtattcccaggataaaatgtgtatcttttgtacagcttcacaaattagtatgt

SEQ ID NO: 167919 - DNA, 201 bp, Homo sapiens
accaccgtccttccggccaggtaggactggatgggaggggtcgcttttgagagaagggtggtgtgtagccatccagttttcaggcatcacggacttgctcstttgtccttcatcctccctttctctacattcccatcttttttttctgctaaagttcccagccacacccatgatcatttcctcatcctttctgccttcctc

SEQ ID NO: 167920 - DNA, 201 bp, Homo sapiens
gaggaaagtttccctcaacactgcagtgaggagccttatagaatgtccgtcctcatttggcattgcacataaaaatgcaaaaagaaacttgagaaaattcygcatcccttatttgacaaaatctgattctaacaccagcttcaaccaactcccttccccatgtgatgccactgatgctggcccaattcaaagaaaaagcaa

SEQ ID NO: 167921 - DNA, 201 bp, Homo sapiens
tcaaggcttgcccccgactccctcccccactttattagtccccagtgtcaatcattgccatatttatgtccatgaatacccaatgtttagctcccacttayaagtgagactgtgtggtatttggttttctgttcctacattaatttgcttaggataatggcctccagctgcatccatgttgctgcaaaggacatgatttca

SEQ ID NO: 167922 - DNA, 201 bp, Homo sapiens
gttttttttaaagccctattttgatataaccaggatagtgaaaattatcaaacacacacatccaaaacactttaaagcaactaatgtaaaattttaattgwtttctagaaaccaatagctgatttaactatgaccttcaatattttaaagggaaaagatggccaacctcaaaccaagagaaatactctcatcccttggtat

SEQ ID NO: 167923 - DNA, 201 bp, Homo sapiens
gatcctgtcacaaaaataataaacatagtacccagcaattagtttttcaaggcttgcccccgactccctcccccactttattagtccccagtgtcaatcaytgccatatttatgtccatgaatacccaatgtttagctcccacttataagtgagactgtgtggtatttggttttctgttcctacattaatttgcttaggat

SEQ ID NO: 167924 - DNA, 201 bp, Homo sapiens
ctcattagatttttttaatcctcaatgtatctctgttttttttaaagccctattttgatataaccaggatagtgaaaattatcaaacacacacatccaaamcactttaaagcaactaatgtaaaattttaattgatttctagaaaccaatagctgatttaactatgaccttcaatattttaaagggaaaagatggccaacc

SEQ ID NO: 167925 - DNA, 201 bp, Homo sapiens
tacaaaatcacatttgtcttgaaaatctatctgtcctgtggtgattttttttccaagaatatgctttgaggccacagcaatgaaaggatggggccagctgwgttagcttatgagtattttatgggtccaggccacataatgagactactttctgttcccctcactcaaagttatagccataatactgctgcctaacaacca

SEQ ID NO: 167926 - DNA, 201 bp, Homo sapiens
gtttactattgaatatagacaaattttggccaggcgctgtggctcatgcccagcactttgggaggctgaggcgggctgatcacctgagctcaggagttggagacaagcctggccaatatggcgaaacctggtctttaccaaaaatacaaaaattagctgggcgtggtggtgcgtacctgtagtcccacgtactggggaggc

SEQ ID NO: 167927 - DNA, 201 bp, Homo sapiens
gagccaggggtccctgtccaatccccaagctgaacagagaataaaatccggattatgattaagctcatatccaccaccacaaaatggagagaaaaacaacmgatttggttaacacccagtgttcaaggaatgagaaaagggataggaagcaaacttgaagcattgaaaaaatatgtcaggtcctgaaactggggggaggag

SEQ ID NO: 167928 - DNA, 201 bp, Homo sapiens
ttaccataataaaaaaacaaattatagtatgttcatataaaatagtattatacagtgatggaaatgaatacactataaacgcactccacaggttgaatctytcaaatataatgttgagtgaagaaagtcatatacaaaataatacataaaattaattgtatgtaagttcacttacataaagggcacacaggcacaactaaa

SEQ ID NO: 167929 - DNA, 201 bp, Homo sapiens
atatttatcacaagcatgaaagtcctcaagccctttaattcaaaaattttatttttaatgtattattctaaggaaattataatgaaagtaggcagacattrcaaggaaattgcttgtagtactgatcaatagtataacaaattgaaacataaactgtaagtattcagccaaaggaataaattaaataatcataatatatgt

SEQ ID NO: 167930 - DNA, 201 bp, Homo sapiens
ccaagagttcattccttctgaattctttgtaaactgtatcaaaacacttctaataaattcaagttggtaggaacttttttatatacatatattaaagtttrtatatgtaacacatataaaagggtcagcagagctatgttcttttaccctttgatagcctgctgagtaacctgctgttattatgcattaaatacaaacttg

SEQ ID NO: 167931 - DNA, 201 bp, Homo sapiens
ataagacctttaccttaaatagtaacatcttttgattgaatttttagttgaatgtcaagaacttcccccctttaatcactggatgttgtcagaacttattyttcagaaagttaggtttatctttgtgggttctatttgattgatttgtgcattggctggccaaaatacatatccctcaacttggaagttacgaaagctgta

SEQ ID NO: 167932 - DNA, 201 bp, Homo sapiens
tgagagaaaccactcccataatccaatcaccctccccaaatatgtgaggattacaattcaacatgagatttgggtgaggacatagaaccaaaccatatcayaacccattaagtgaaagggaagtcatatttctactcttgcttctattccattttgcttataattcaacatttgctgaagagcatttgtggctctttaaag

SEQ ID NO: 167933 - DNA, 201 bp, Homo sapiens
tccctaggctgtttcaaagattgctattgtctattggccccataaggtaactgagtttgagatttaaacaaaaattaaaacttagattcgcatggatgccrttgattcctcccccttttctttaccatatcaactttctttccccctcctttgtccatatttttctttcttgaggatgagaaaatgtggacatatggtgat

SEQ ID NO: 167934 - DNA, 201 bp, Homo sapiens
ttgtttgtttgttttctgattgtaagctaaccttcaagagtaactttgcttgctccttggccttcacttattttttttatctaaaagctttccttaactakatcaaatctctgccttttttaaagacagaagaaaagaatgtcagagtcagaaaagcatcccaagtacaaaaatctttgacaacacaggaagaattgaata

SEQ ID NO: 167935 - DNA, 201 bp, Homo sapiens
agattctaagattataatagaaacatgcaaagaatttctaaagctaagaagaagctgtcccttagggctgcatggtactccctaggctgtttcaaagattkctattgtctattggccccataaggtaactgagtttgagatttaaacaaaaattaaaacttagattcgcatggatgccgttgattcctcccccttttcttt

SEQ ID NO: 167936 - DNA, 201 bp, Homo sapiens
gccctccaattctcagaagaatctccatggaacccacaatagctggaaacatacagaaagggaactctgggaaatatagtttggctgagacagttggcacrataagaagcatcacactgttaagtaaaaatcagaaaatgttttatttcaaaaatactctgtgtctcttgaaaaattagattctaagattataatagaaac

SEQ ID NO: 167937 - DNA, 201 bp, Homo sapiens
ggagagaaagtgtgtattatctaggctttacctgggtaaggaaagggcttttctgtgatggcatgcaactgcctatgacattctttctacaagtagggtcktgatggaattaaagaccataactcgaacttgctatgctacaagccttttctatgggggactatattcccattccacataaacaacattagcaatcagggg

SEQ ID NO: 167938 - DNA, 201 bp, Homo sapiens
ctactgagaaaacaaactgaaacaagtgatcctatgtctatatttaaggtaacataaccatacaaagaatataattactttcagtgaattttggcagagtratataattgtgcatccttagtaggatatatttgatgaataaaaagaacttcaaaaaagtctcaagcttcatttgcttattttattgacaggtcataatat

SEQ ID NO: 167939 - DNA, 201 bp, Homo sapiens
gattgactgtgacaaatatatcatactaatgtaagatattaacaacagcagaaacagtttcccctgttgtagaaggtatagataggagtattctgtctatwctctttgcaacttttctgtaaatctatttatagacatctaaaatagttgctgtagtagggcatggtggtgtgaacctatagtcccagctaatcatgaagc

SEQ ID NO: 167940 - DNA, 201 bp, Homo sapiens
aatgacattatctgctggtcttcttccccagaaccgaaaattccagtctaatcatgagaaaatcatcagacaaatccagattaagggatattttgcaaaayacctgagcaggattccttaaaacagtcaaggttttcaaaaacaaggaaagtctgagaaaactcgtggtataggggaacgtaagaaggcatgatgagtaaa

SEQ ID NO: 167941 - DNA, 201 bp, Homo sapiens
gcattcaggcaaaaattgtcttgtgttaagtgttttcaacacataataatttcaagatgaaattattgtgaattgaaaagcaacaaaaggaaagtgaggtycactatcttctatctccttgctaatggaggccagaacttatttagttttgtgagtcagatgagttgaaatttgccttccagtattccaaggcagcaaaag

SEQ ID NO: 167942 - DNA, 201 bp, Homo sapiens
taagcgattaaatttcaaatgttctcaccacaaaaaatggtaagtatttgaggtgataaatatgttaattggctttatttaattactccatgttgtatttrtaaatcatggcatcattctgtactacataaatacatacaattttaaattgtcaattttatttatatatatgtgtatgtacacacacacacacacacacac

SEQ ID NO: 167943 - DNA, 201 bp, Homo sapiens
aatgcctctgcactcttcctcttcccacactcttctctctcgctggctgcctgatgaaactcaatcaagagtgcagatttcccaacaattacaatcagccsatagagacagtccaagaggacaggcctctgctcactcccagggaacctcgtcacacctctttgagatgaatggattggcaaaacaggacactgcaggtgg

SEQ ID NO: 167944 - DNA, 201 bp, Homo sapiens
tggctatctgccccgttctcaatgctgtctctctaatgatggaccctagcaggcaggcaggaaaggaaaattacaagtaggcttggtgactagagtaaccwgcagaagctgagcctctttgtcacagagttgaacatacacacatacacacacacacacacacccctggcccaggagtcagacaattaaaggaagacccaa

SEQ ID NO: 167945 - DNA, 201 bp, Homo sapiens
ttatattatttgactacctcatagttctttaagtgagagccttatgatttttttacagaaacacttacgttttattcatgtttttgctgtttcttggcttktttgttagttttactattttccctgatctttagcagtaaattccaaaatattctgagcaagataattagagtaccatattattattgctgcctctcaaag

SEQ ID NO: 167946 - DNA, 201 bp, Homo sapiens
gtattttatagaaattatattagattttgttttcattttagaatgctatttttatgctaaaaatgaaataatcacattaccataaaagtgagaaatagaawaaataaagatactcataattctaacacagtttatattttagtgtttcttttcaaagtcgttttgtattctttaaaaaaatggtcatagttattatcacag

SEQ ID NO: 167947 - DNA, 201 bp, Homo sapiens
tccagcctgggcaacaagagcaaaactccatctcaaaaaaaaaaaaaaaaaaaaaaaggaatagcacataaaggtataaagctgtcatgtgtttgccaaargataatgttttctattatgatagaagattggccccaagagtagtcatcacataaatagttggaattttacattttttaatttgtgagtgcaaatcttcat

SEQ ID NO: 167948 - DNA, 201 bp, Homo sapiens
gcagtgagccgagatcgcgccactgcattcaagcctgggcgactgagtgagaccaccctgtctcaaaaaaaaaaaaaaaaaggaaaagaaaacacggttartcacaagttgccttgagtctgttgtgaatatgccaatgtttattgatcactttgctgctcctgactctctttataagaagaatcatcttttgaggggaat

SEQ ID NO: 167949 - DNA, 201 bp, Homo sapiens
acctcccatagtcatggctcaacactatgctgttttaaccctgctttccagggagtatcaaatttgatatttccaactccaaaagaattgtgaagatgctrtaaaatgtagccttgttggtttaggaaggcaagaaaagaataaaaagaaatgtggaaaatgaaaggatatttataattttaggctgatcctggagaaaca

SEQ ID NO: 167950 - DNA, 201 bp, Homo sapiens
caatagagcgacactgtatctcaaaaaaaaaaaaaggctgagatgagcagaggtggggctgtgtagtaaggcactgtgggggagatgaaggcaaactgagyacagtaggacatttacatattttacatattaaacagatatcctctgaaaacatatactccttgggattctagggaaacaccattttcatttaattgcatg

SEQ ID NO: 167951 - DNA, 201 bp, Homo sapiens
catggcttcagccggtccctccatatggggtccctgacttcccgcaacaagatgggatgaagttttttaactagaaagtgatcatagctaagtttttgcasacaccaaaagtatgtataggctacatgacatcatatttcttcctgttcttccatttctttcaccatgttgttgtatataataatttactttctcttcatc

SEQ ID NO: 167952 - DNA, 201 bp, Homo sapiens
gaagaaggaggtaaattcattggccaccgtatcttgccagtgcaagccattcggccaggtatgggtagtgtgctgagaaaccttttatcaaagttgcaaaraaaatcattactgcttaaaatattactagaaaatgacttaagaaactattttctgctttgtaattttgttatgtaacaagggcgatgagatttagttaca

SEQ ID NO: 167953 - DNA, 201 bp, Homo sapiens
attatatattaaaaaaatcaacagttcaaaagtttcatctcattatgtatttgctatcaattatataattaaagtatgatgtaggaatttttaaatcatcrcttttaaattttaaaaattagttctaagaccccaaactatgtgcaattttacaaagtatatttgactgccttacaacaggctactatctacttaggtatt

SEQ ID NO: 167954 - DNA, 201 bp, Homo sapiens
cccaagtcaagtcattcctgcattttatagcatgagttacagatttactttattgacttttatgtgttctatggctttgatggaagaaggaaaatatgtgsatagagtaattgaagaaacgaaattgcttaaagctacattttaaaatcagtaatgaccatagtgataaaagctgtttctctctttctttagtaaacttta

SEQ ID NO: 167955 - DNA, 201 bp, Homo sapiens
ctggggatatcctcacagtgaaagcagaacagtaagagacagagtggaaacacacaaggcctcttgaggcctagacttggaacaggcactccatcaattaygccacatgctttcgcccaaagcaagtctcaaggtcaagccagttttcccccgatttagcagtagggaaatagaaggagctacagtcatgttgcaaaagga

SEQ ID NO: 167956 - DNA, 201 bp, Homo sapiens
taagtaaaattgtgactgattttatagcaattaagatgaatttttctttgcagacaaattttattgaaggaatattgacaatcaactttcattgaaagcartgggttttgtgatttcatggaataaatgctctgttctaagagttaactgacctatgtttttgtttcagggttttggctaaatagctgcacatctgtagca

SEQ ID NO: 167957 - DNA, 201 bp, Homo sapiens
gcaagactgtgtctcaaaaaccaaccaaacaaaaaacaacagggagtgtccaaaggctgtaatacaaggtcaaatgtagtaaatgatgtaattgggaatcrtaagaagtgtttggaaatattagattttaatttgcccagtggtgccgtaggttggaatggagggaatgcaggaagatgggcaaggcttcacagagaagga

SEQ ID NO: 167958 - DNA, 201 bp, Homo sapiens
gggcgctggtagtcccggctacttgggaggctgaggcaggagaatcactggaacccgggaggcggaggttgcagtgagccgagatcgcgccactgcattcmagcctgggcgactgagtgagaccaccctgtctcaaaaaaaaaaaaaaaaaggaaaagaaaacacggttagtcacaagttgccttgagtctgttgtgaata

SEQ ID NO: 167959 - DNA, 201 bp, Homo sapiens
cttcattactatattttctacattctgccttatgcttgatttaagcttttttcccttcttttcactggttagatttttttttcatttattttttcttctargtcgttgacctttttataggcatagaaaatgccttgtaccgtgcaccaaagttcttaaaattttaaaagctttctttgactaagtcatcccttgccctct

SEQ ID NO: 167960 - DNA, 201 bp, Homo sapiens
cagtgttgtatatgatatcattttattagattctaaactctttgtgagttagaactatttaattaaataaaaatagttgacatctcttataggaaaatcamtgtgtgaagtcccaaatgatataaaaaaagaaataaaacatagttcttatgctcatgattcttacctttgaaaccctccctcctcagccccacaaagcca

SEQ ID NO: 167961 - DNA, 201 bp, Homo sapiens
tggggatttccatacctgggtttgccaaagccagtaggaaacatggggaaaccccatctctaccaaaatacaaaaattagccaggtgtggtggtgggcgcyggtagtcccggctacttgggaggctgaggcaggagaatcactggaacccgggaggcggaggttgcagtgagccgagatcgcgccactgcattcaagcctg

SEQ ID NO: 167962 - DNA, 201 bp, Homo sapiens
tcctgcccttggttgccgaggaacccgaacattctgaatttgctatgcctctgctgggactcagtgggctttatcagtttctgaacagtttttgctttaawttattgggactgggtactcaattcacaggggtaatatgaatttggaaactgcactcattcatgggtttctaattccctttgtggatgtttttcctcaatg

SEQ ID NO: 167963 - DNA, 201 bp, Homo sapiens
tagaattttcaagatggacgcagtaaacactggccagtcttctgactcagtgaaataattggtttcctggggatttccatacctgggtttgccaaagccartaggaaacatggggaaaccccatctctaccaaaatacaaaaattagccaggtgtggtggtgggcgctggtagtcccggctacttgggaggctgaggcagg

SEQ ID NO: 167964 - DNA, 201 bp, Homo sapiens
attaaataagctgagcaaggtcatatttcataaaatgcaagcattctaaaccctatgtggagaaagaatcttatctatcccaaagtgaattgtctactttrtgtagatctatggcatcagtttaacttatgttgccttcttagccctgtgtaacaggttctattgctagttggtatttgttcacaagataaaaattaattt

SEQ ID NO: 167965 - DNA, 201 bp, Homo sapiens
tttccggttttttgctgcctcaaacaatgctttgatgtgtatatatatgtatatataaaatatcatctttgggcacaatacaggtatattcgaatttcctrttggtgaaattgctaagtccaaatatatgtgcatttttaattatgaaatgcattgccaaatggctcagcgaagagattatataaattaatcaattacact

SEQ ID NO: 167966 - DNA, 201 bp, Homo sapiens
ttgtacattgctgcacataagtcccatggaaacttattatgttataaacaacaagagacactcttagaagggaatacttggctcctttccagtagagttcygaattctggagaaacattcgactgcatgttttctagcaatgagatattcgattcagtccttgagtgtatgtgggtttcagttttgtttgagttgtggctt

SEQ ID NO: 167967 - DNA, 201 bp, Homo sapiens
ctcaaattaactggaaagaacaaggactggttcataggcaggactttagattttttttgctgtaagtgattttttctctctttttaaaaatgaggttacayaatattaattaataagcaaatcagagtatgctaagcatttaatatgtatgatcttgtttaaaccttttaacagcccaggaaaattggttttattattcct

SEQ ID NO: 167968 - DNA, 201 bp, Homo sapiens
tgtttgttctataatttctgagctcattttatgtaaaaataactcctgtgcattattcatgttgacaggccctttaaatagccataaagcctgtgggaacrgattaatgctgcatctgccctgtgctttttaagtctatcatttttatggaatggaaatcttgcataatgtcagaagttttctgacattgtcaactgcttg

SEQ ID NO: 167969 - DNA, 201 bp, Homo sapiens
aatgtggccagtcacactggaaaagtttattttagattgtcccactttgtgacatgcactaggatcttttcatgtggagagttcattttttccctatgaaraaagagattcaattagtttattcattttgtaggtaattttgagggcattggggaaaacagaagtaggtggtccctcgaagcaacttgtacaataaaatat

SEQ ID NO: 167970 - DNA, 201 bp, Homo sapiens
cggattctaatttctccagtcaccacaacaccaaacagggccttgcatgggtcagagtgttcaaaataccatttattgacaaatgcatcaaaatcaacaamaaaccagaatatagtcccaaaagagaaatccaccaagtaccataactgaccaaataatgactcaaattaactggaaagaacaaggactggttcataggca

SEQ ID NO: 167971 - DNA, 201 bp, Homo sapiens
atgtcatctagagttcccaacatttttaccatcctgcaatagcagtcataggagaatatgcctcaatcaaaatcaggctaaaaatttgtttcaattctgcrtgtgagctgggaccttaagtctttctggtcgctatttggtaggggaccaaatgtggccagtcacactggaaaagtttattttagattgtcccactttgtg

SEQ ID NO: 167972 - DNA, 201 bp, Homo sapiens
gctgtgtctccccagtgaatgtcatctattgtatgtccaatggaggaagtgttgagagcttctgcccaaaataaggataatactaaaggtattggcagatkctacaaggctcaatttttaagtctcatgtccttcataaagtatttcccatattaccttaaggctacaatacagtcttcattttcagcatccacagtccat

SEQ ID NO: 167973 - DNA, 201 bp, Homo sapiens
aaactacacatgaaacctcattcaaagtgtgactttgctagcagtttactcaacaatgggcatgtcatctagagttcccaacatttttaccatcctgcaayagcagtcataggagaatatgcctcaatcaaaatcaggctaaaaatttgtttcaattctgcatgtgagctgggaccttaagtctttctggtcgctatttgg

SEQ ID NO: 167974 - DNA, 201 bp, Homo sapiens
ccatctgtgaaattagccgtagattatgaaaacagagtatgtgagaattgtaatccctctattgtaatctatggctaattcatgaaagtaaatgtgtgatmatttaatttttatatattagagcagattcaaagttgagattcatgttttctatcacatctacatacttacatatatacctgtagattgtgtagggaagag

SEQ ID NO: 167975 - DNA, 201 bp, Homo sapiens
ttctggctcaatttagagcaaactacacatgaaacctcattcaaagtgtgactttgctagcagtttactcaacaatgggcatgtcatctagagttcccaasatttttaccatcctgcaatagcagtcataggagaatatgcctcaatcaaaatcaggctaaaaatttgtttcaattctgcatgtgagctgggaccttaagt

SEQ ID NO: 167976 - DNA, 201 bp, Homo sapiens
gatcttctgaatcagaatttgcatcttaacaaaatccccagagattttgtatgtacattaccttgtcacttttaatgtgcatccatctgtgaaattagccrtagattatgaaaacagagtatgtgagaattgtaatccctctattgtaatctatggctaattcatgaaagtaaatgtgtgataatttaatttttatatatt

SEQ ID NO: 167977 - DNA, 201 bp, Homo sapiens
cacattatctttctcagggatgttccatgctgagaaaaagaattcagcgatatttctcccatttgcttttgaaagaagagaaatatggctctgttctgccyggctcaccagcggtcagagtttaaggttatctctcttgtttcctaaacattgctgttgtcttggtcttttttcaaggtgccccagatttcatattgttta

SEQ ID NO: 167978 - DNA, 201 bp, Homo sapiens
ttaaaaaggaaatgcatgttaggaactgtgcttggtaaatcacatggtctctagtttctgtctttcctcttttattgattcagtatttggatctacttagyattttgcctacctcgtccttgactcctccaaccttcctttctggcaacttagcaaccctcattctgcccttcacccaacagccttatcaacactttgaat

SEQ ID NO: 167979 - DNA, 201 bp, Homo sapiens
cagggcattggaacaattttaattccactggtccctcatcagtttatttttgaaatttaatctaatagacttttaaacacataagacattattctatgttwtgatcatggttcatttagatatgtctacatattcacatattctttgtgaaacgttttttcttgtatcttctgcccatttgggatcatcatcttgtacttc

SEQ ID NO: 167980 - DNA, 201 bp, Homo sapiens
tgggagcactatgggagactggagtctattgcatctctgcagcctcaacagtaagagacagctatgcccggggggccagtttagagacccacccgcaggcrcacattatctttctcagggatgttccatgctgagaaaaagaattcagcgatatttctcccatttgcttttgaaagaagagaaatatggctctgttctgcc

SEQ ID NO: 167981 - DNA, 201 bp, Homo sapiens
tatgtctttgttatttgcatatcaaaattccttatggattgattgatttattgattttctagattatttcaggtcagtttctttctgataagaaagttggracttacgtggaagtagatatgtttggtttgcctgtggatacaaggaggaaggcatttaagaccaaaacatcccaaggaaatgctgtgaatcctgtctggg

SEQ ID NO: 167982 - DNA, 201 bp, Homo sapiens
aacagaactttgtacaggagatactcttattgtggtccaaatctggagggttctattagatgaagttcatccaaacatagaacttagattaagggagtagmtgtatactccacagccaatccttcacaaaactcatttgtctccattgggttttttataagctctggaaaacaaacaaacaaaagagatatttaataagtt

SEQ ID NO: 167983 - DNA, 201 bp, Homo sapiens
gaaaagggtggccccaggagagggagaaagataagggaacagctggccaatggagcagtcagtacccacacaacatttattcattaaattcaacatcttayataggtgcagttcctgatgctccaaaacaattacaatggtaatatcaaagatcactgatcacagatcaccataacagatatattaattattcaaatgttg

SEQ ID NO: 167984 - DNA, 201 bp, Homo sapiens
ttcgcttatgaagcttagtttggctggatatgaaattctgggttgaaaagtgttttctttaagaatgttgaatattggcccccaatctcttctggcttatrgggtttctactgagaggtctgctgttggtctgatgcgcttccctttgtaggtgacctggcctttctctctggctgctcttaacattttttcctacatttt

SEQ ID NO: 167985 - DNA, 201 bp, Homo sapiens
ttcttcatagtgtcattcgtctttatattttggtgtgtttttgcaatggctggttttcctttccatatttagtgcttccttcaggagctcttgcaagtcargcctggactaaatccctcagcatttgcttgtctggaaaggcttttatttctccttcgcttatgaagcttagtttggctggatatgaaattctgggttgaa

SEQ ID NO: 167986 - DNA, 201 bp, Homo sapiens
ttatcatcaaagaaatagaggggaaatagcaactgggtagacaggttacatacagtgtacgttacagccatgtttataacaattttttgtttcttcctttytggccccttggaaagagatctgaagtgtttctatgaatttttagtagttctattgtctgcgttttttattgtaaataggtaccatgatgaattcctctgt

SEQ ID NO: 167987 - DNA, 201 bp, Homo sapiens
tcattttgagacagcatctcactctgtcacccaggctggagtgcagtggcaccatcttggctcacttcaacctccgcctcccaggttcaagtgattcttgygcctcagcctcccaggcagctggggctacaggcaccagccaccacacgcagccagtttttttttatttttagtagagatgggatttcaccatgttggcca

SEQ ID NO: 167988 - DNA, 201 bp, Homo sapiens
tcatgggtagcaccaagggataagctctttctctggaagaatagtacatttctttctattaaaaaaacatgaattagtcaacccattatgtgtttgtttttgcccttattaccagaaaactacaagatgattttcaatcacagtgaggattagtttctgtgactaacatgtttctttctttctcattcttatgagtttgat

SEQ ID NO: 167989 - DNA, 201 bp, Homo sapiens
gcatttgctgaggagtgttttacttccaattatgtagttgattttagagtaaatgccatgtgatactgagaagaatgtatattctgttgatttgggttggwgagttctgtagatatctgttaggtcccgttgatccagagctgagttcaagtcctgaatatacttgtaaattttctgtctcattgatctgtctaatattga

SEQ ID NO: 167990 - DNA, 201 bp, Homo sapiens
aatgttaactattttacttacagataaaatgtgaatgtaaaatcattaatgtgtttaaattatataactctcagtatcagtaacccatacaaagattttcwtgttactgctctaggtcatcatgattaaaatcaacctcagtaaatgtggaagcacccttaaacttcttccctggatataactggacatgaaaagaactaa

SEQ ID NO: 167991 - DNA, 201 bp, Homo sapiens
tacttatgtattcattttgagacagcatctcactctgtcacccaggctggagtgcagtggcaccatcttggctcacttcaacctccgcctcccaggttcawgtgattcttgcgcctcagcctcccaggcagctggggctacaggcaccagccaccacacgcagccagtttttttttatttttagtagagatgggatttcac

SEQ ID NO: 167992 - DNA, 201 bp, Homo sapiens
agacatttatttaatatttttaatttctaagtttttagggttggcaatatagattctcaagcaagaattaataattacttagatatggtgctaattcttaygtttctcctataaacatataatgtagatcttctcagccaccctctcaggttgattatgcactaataaagtggaataaattttaacataatttcagaaatt

SEQ ID NO: 167993 - DNA, 201 bp, Homo sapiens
tcttccaagtatgacagacacaaagaaaagcctgtgatgatttagaaatgtgctgggctaattgcagctggttgagggtcctcgttgttttccataaaacygtattgtattatgaagaggacagcaggtcaataaccctgggccatgggacccctcttcagcatcacttttcagtaaaagacaattcccgattattttgtg

SEQ ID NO: 167994 - DNA, 201 bp, Homo sapiens
tgtcacagactcacaaagtaaccatgtgagatgatagatatgttaatttgctttaaagtagcaatgattttactgtctgtgtatctcataacatcgtgtcrtaaacctcaaatatatacaataaaatatatttaaaaatacatataggctgagtttttcaggacatagaaaagaaatatgaactggatgagaatgagaaac

SEQ ID NO: 167995 - DNA, 201 bp, Homo sapiens
aataattattttatggttctatatttccttgtttattagcaatttactaggttggttataacccaagagatttttttctttttcttttaagctatgatttytccttattccagttttccatttgcttgttcttttttatggtatccgattctttacagaagtattctgattaaattagactgtacttaatggaaaacagaa

SEQ ID NO: 167996 - DNA, 201 bp, Homo sapiens
gcaacaacagcccccatgacttgagtctctctaataaaaaaagaaaagaaaaaatctgaggacaactgtaagggtagtcagggttttcattttttttttttctgtgacagagtctcactctgttgcccaggctggaatccagtggtgcaatctcggctcactgcaacctctgtctcccgggttcaagcgattcacctgcct

SEQ ID NO: 167997 - DNA, 201 bp, Homo sapiens
ccatcgctcttcactaagggccaactccttgagaaatgtgctactttaactctcagtagtttctggacaaggcctaaaatcaatcataatcctaaaagaaraaaaagttctatttcttttccagtggtatttcagagaataggaactctgttacaatttgatttgcactctgttcgcagaaaaccgaccacgcgcactggt

SEQ ID NO: 167998 - DNA, 201 bp, Homo sapiens
agtaacagttgattggggctctgctttaaaattatcttatgttcattgtttggttaaaattaattgtcttatgaatattaactttgaatgaactgagtatytgtagatcaaatactttgaggttaccaaatggcatctcagttttagaacattccttccattttgattcatcactgaatagttttctgtttgtggaaattg

SEQ ID NO: 167999 - DNA, 201 bp, Homo sapiens
cacttaattaattttaatgttactattattatagtaaataattattttatggttctatatttccttgtttattagcaatttactaggttggttataacccragagatttttttctttttcttttaagctatgatttctccttattccagttttccatttgcttgttcttttttatggtatccgattctttacagaagtatt

SEQ ID NO: 168000 - DNA, 201 bp, Homo sapiens
  misc_feature (1)...(201): n = A,T,C or G
cattttctttttccagcttattcaaaagttgacggatgtcgcagaagagtgtcagaacaatcagttaaagaagctcaaagaaatctgtgagaagtaagccntcattcccattacaattgacatgtgcatctgaatttattcaacacaaattcccatctgatttgcctcttttttctcttttacttccattgtgacttcaga

SEQ ID NO: 168001 - DNA, 201 bp, Homo sapiens
ttccactacttctcaattgccttataccagatctcattcacagatttgtgttgcttcttgagccccatagatatttgagttcagagattctgaaattaatrtacatgtattaagttaatacatgtaaggtcctaggaacagtgcctgccacacaataagcacttaattaattttaatgttactattattatagtaaataat

SEQ ID NO: 168002 - DNA, 201 bp, Homo sapiens
gactagtcaactcagcttgccttatatgtttttgggaaagagaatctccatctgtgggaaaagcagtgggggctttcagaggatgtccacactgtctattkggtgctccagtaagaagggttgagtccagttgctacagccacctgaaaaccttgcagaaggttctccaggttcctcatgaggaaaaaaggaaaagattac

SEQ ID NO: 168003 - DNA, 201 bp, Homo sapiens
tgatgagaggaaggggaggtgagtgaccctgggcctaacagagagctaggctattcctatgataccaggaacaactttgagcaatgattttgccagctacyggcactttatttcagtcatatttaattagagacacagagccactaatcaagattggttaccggatttgaccttatgcaattgtggaagctattaaacagt

SEQ ID NO: 168004 - DNA, 201 bp, Homo sapiens
aggacggctaaccactcttgaaatatacatttataaaaagaaaaagaaaaaccaaaactaattttaggtgatcgggagaaggatgttctccagggacatarctgagttcattctaggacatttgattcagcctgtcccttgttttgtaaatgccatgcacaggctttgagtcgagaaagtggttgtagctagggctcaagt

SEQ ID NO: 168005 - DNA, 201 bp, Homo sapiens
tggtattatgatttgtcttgtcactattacagctgccacttatagaagactagtcaactcagcttgccttatatgtttttgggaaagagaatctccatctrtgggaaaagcagtgggggctttcagaggatgtccacactgtctatttggtgctccagtaagaagggttgagtccagttgctacagccacctgaaaacctt

SEQ ID NO: 168006 - DNA, 201 bp, Homo sapiens
ctaggacggctaaccactcttgaaatatacatttataaaaagaaaaagaaaaaccaaaactaattttaggtgatcgggagaaggatgttctccagggacayaactgagttcattctaggacatttgattcagcctgtcccttgttttgtaaatgccatgcacaggctttgagtcgagaaagtggttgtagctagggctcaa

SEQ ID NO: 168007 - DNA, 201 bp, Homo sapiens
aggatggtccaaataacctaatcagccattaccagaaatagaaagtccccacattgcatttctgaaatatttgaattagttaacatctgtatcagtcaggkttcaactagaaaaacagagccagtaaaagattgtgtgtgtgtgtgacagtaattggcttatgcaattttggtggatggctatctgccccgttctcaatgc

SEQ ID NO: 168008 - DNA, 201 bp, Homo sapiens
tcctgacctcaagcgatccacctgcctcggcctcccaaagtgctggaattaaagtgtgagccactgtgcccagccacatgtgaatcttttaaaactaggcytgacatatagaaattatcagttaaagtgttgtaggaccctatccttagttcagctaaagacgggttccttgtcacatggccacaaaaagttaggcttgaa

SEQ ID NO: 168009 - DNA, 201 bp, Homo sapiens
tgtaaccacccagctcctgtcactcgtttgccttttgatctggccctgcctcagtttgctctccctgagaaatcccatcattgttttcagcttcaccttgrggggagaattcaagcacaacaagcaggcttctcaaaatgcctgtgaggccaagaaacaaatgtctagtttcctttcagataaaattgtaaatactcaccc

SEQ ID NO: 168010 - DNA, 201 bp, Homo sapiens
actaaaaatacaaaaaattagccgggcgtggtggcaggtgtctgtaatcccagctactcaggaggctgaggctgagatgagataggagaatcccttgaacmcggaaggtgatgttgcagtgagccaaggttgcaccattgcactccagcctgggcaacaagagcaaaactccatctcaaaaaaaaaaaaaaaaaaaaaaag

SEQ ID NO: 168011 - DNA, 201 bp, Homo sapiens
tagtgagaggacactttcagctaaatagagacgttgcaggagaccccaaggaaatggccagagtctttgcacactggaattttacatctagacagcttgayaaatggcatgactacaaagtaatgcctcatgatttctttaattgtgataatcatgattaggcaatcccttttgaatgatcaaataggctttctgctggcc

SEQ ID NO: 168012 - DNA, 201 bp, Homo sapiens
tttctggattcttttgaaaaatcaaaagaataatctagttagtagaactagttagtagaactagttagtagtaatctagttagaagaacgggtgtctgctstctgtaaccacccagctcctgtcactcgtttgccttttgatctggccctgcctcagtttgctctccctgagaaatcccatcattgttttcagcttcacct

SEQ ID NO: 168013 - DNA, 201 bp, Homo sapiens
aggataatgttttctattatgatagaagattggccccaagagtagtcatcacataaatagttggaattttacattttttaatttgtgagtgcaaatcttcwttggtgaaaaaatatattccttgttatcagctagaccttaataggtgaagctaagtaggtgagttatacttttaactgtggtaacccattttttaaatag

SEQ ID NO: 168014 - DNA, 201 bp, Homo sapiens
ttactacaaattaaattatataaactttcaatgaaataaatttattcaaaacaaatgtaacaaatactcataactcatcatttaccaattttttcctagarctttgttgaagcactttttaaattttttttaagacagggtctcactgtgtttcctggctggaatgcagtgaagcgatcatggctcactgcagcctcaatt

SEQ ID NO: 168015 - DNA, 201 bp, Homo sapiens
actgtgtttcctggctggaatgcagtgaagcgatcatggctcactgcagcctcaatttcccgaggtcagttcaatggatcctcccacatcagcttcccacrtagctgagaatacaggcttaccaccacacttggctgatttttttttatttttagttttgtagaggtggagttttgccatgttgcccaggctgatcttaaa

SEQ ID NO: 168016 - DNA, 201 bp, Homo sapiens
ctcacttacaaataatttaatacctctcactattgccggtgctctcactattgctggtgctctctaggtactttgcatctttacatctactacgcaccatsggtagtggtggctctgacagtctgctactgtacacctcctcccaacgccttattcaaggtcacgactttgttactttgagactggctctgggcaagtatt

SEQ ID NO: 168017 - DNA, 201 bp, Homo sapiens
cagcaatgtccacgctcattaaggctgtatttctggattttcctttgcaatgggcttccatgttagatcttcactacatccaatttcagaaaaaaaaaaaagttttgagaaaagttctccatgtgagagcacttctgtgctgtttttgaaacttccttctcatttttctggtatcttccagcaggcaatggggaaacctgc

SEQ ID NO: 168018 - DNA, 201 bp, Homo sapiens
caaaagcatactttgtttgtaacttaaatgtttatacatccaatcttcttataaagtttgaatttttttaagataactatactagacttaatgttgtggtrggtttgtgactgtccttgattttagtcctcaaatatctatagcagcagcagtttgtatctgaaattattacaaggggatttgcctattagaaatatgcct

SEQ ID NO: 168019 - DNA, 201 bp, Homo sapiens
tagtggcatactatttaatattaacaaaatcataatattaattattctgtctcctggaggttcagtagacaaaatttaaataaaaatagtaaatgccgtgygggcagaacttcagtaggagtgagggtcttctgaaaactagctgaggtcgggctcggtggctcacacctgtaatcccagcactttgggagactgagaagg

SEQ ID NO: 168020 - DNA, 201 bp, Homo sapiens
tgtaaatttctaatttaaggcaacactgacaaattagaaggtttaacacaaaatccagatttctggattcttttgaaaaatcaaaagaataatctagttartagaactagttagtagaactagttagtagtaatctagttagaagaacgggtgtctgctgtctgtaaccacccagctcctgtcactcgtttgccttttgat

SEQ ID NO: 168021 - DNA, 201 bp, Homo sapiens
gtagtggcatactatttaatattaacaaaatcataatattaattattctgtctcctggaggttcagtagacaaaatttaaataaaaatagtaaatgccgtrtgggcagaacttcagtaggagtgagggtcttctgaaaactagctgaggtcgggctcggtggctcacacctgtaatcccagcactttgggagactgagaag

SEQ ID NO: 168022 - DNA, 201 bp, Homo sapiens
ttattcaagaataggatcaaaaatttacctgggggtaaggaaagtgtcttcctcttcccagtgatagttgccttgttaaagactttagacaccagcgcaaygtggttaagtctccactagtgcaacaaagaaaaggatagaggccagtccctgaatagggaggccccagcagactttcagatggttaactatcaagtccaa

SEQ ID NO: 168023 - DNA, 201 bp, Homo sapiens
gtatatcacataagaaagggggctgtccaaactctgcccctgcttttctctgcatattagtgttattcttttccaaagtagcaagacaggcttccccttgrtagaaaatacaggcactgatcccttctgagttttatttctccattgacatgtaggaaaaatcttggggaaaaccttgtttgggtcccatgatgaccaagt

SEQ ID NO: 168024 - DNA, 201 bp, Homo sapiens
acgtgacgaagaaggaaatgggaaaagagggagatgtccaatattctctagcagatgccttttattcaagaataggatcaaaaatttacctgggggtaagraaagtgtcttcctcttcccagtgatagttgccttgttaaagactttagacaccagcgcaatgtggttaagtctccactagtgcaacaaagaaaaggatag

SEQ ID NO: 168025 - DNA, 201 bp, Homo sapiens
aaatgtctgcatttttctggaagaggatgagtagaaaggtcaataggtagccccacagaatgaaaagtattattcagctacagtagatgctgggggccctyaaatcccaacagtccaataaatcccatccacatggatatccaaggaatagttttatacaattggattataagtcaagtatttgagggagaagctgttcac

SEQ ID NO: 168026 - DNA, 201 bp, Homo sapiens
acttttcattggcaagaatttttcaaatggctatgcctggattaaaaagtggtagggaggacttgtaaacattgtccttggatttggcagctgcacccagrcacagcagacaccgtggacaggtgcctgcaaattttgaggataccgacttattttctgcaatgtagaccaaaatactggaatccaaacctgctaaatgta

SEQ ID NO: 168027 - DNA, 201 bp, Homo sapiens
cacatcacaaagcttctcttccccatgccttcactcacattacccctctctggttagtacttcctcatcaccaacatgaaatcaacaggtactactcattmcatgactttgctgctctcctgtacagccaaactccttagaaagtcttcattaacttctctaaaggaagactttgtagagagtcttcactgtgcttcccct

SEQ ID NO: 168028 - DNA, 201 bp, Homo sapiens
ccaagtctagctttgttgcccaggctggagggcagtggtacaaacttggtgcactgcagcctccatctcctgggctttagtggtcctcctacctcagcctyccaagtagctgggactacaggcacgcaccaccatgcccagctaattttctctattttttaagagacaggtctcactatgttgcccaggttggtctcaaac

SEQ ID NO: 168029 - DNA, 201 bp, Homo sapiens
tggctccatcatcccctaggatcttgctggaaaggggaaagaaatagtagagattccccatatgtccccaaaaagccctgccctaacttttcattggcaaraatttttcaaatggctatgcctggattaaaaagtggtagggaggacttgtaaacattgtccttggatttggcagctgcacccaggcacagcagacaccgt

SEQ ID NO: 168030 - DNA, 201 bp, Homo sapiens
ttgtttttgtttttttagagaccaagtctagctttgttgcccaggctggagggcagtggtacaaacttggtgcactgcagcctccatctcctgggctttaktggtcctcctacctcagcctcccaagtagctgggactacaggcacgcaccaccatgcccagctaattttctctattttttaagagacaggtctcactatg

SEQ ID NO: 168031 - DNA, 201 bp, Homo sapiens
gtgtttccagttgatgaacagtttatctcatcatggcaattcagagaaccaggttcctttcataatgtggctccatcatcccctaggatcttgctggaaargggaaagaaatagtagagattccccatatgtccccaaaaagccctgccctaacttttcattggcaagaatttttcaaatggctatgcctggattaaaaag

SEQ ID NO: 168032 - DNA, 201 bp, Homo sapiens
ttgaactcatagtttcacatggctggggaggcctcataatcatggcagaaagcaaggaggagcaagtcacgtctgacgtggatggcggcaggcaaagagarcttgtgcagggaaactccccaatataatactattagatcttgtgagacttattcgctatcacaagaacagcacaggaaagacccacccccataattcaat

SEQ ID NO: 168033 - DNA, 201 bp, Homo sapiens
gaaagtaaaagttcccctgggctttataacactagctctttctttctcatagttataaggtagttataaagtactcaagatttatagttaggattattctstaattctactttaacttcagaataaccaaaaaggcccccagaaatttaagaggccatccttatggcataaacattggctaataaagattaatcataaata

SEQ ID NO: 168034 - DNA, 201 bp, Homo sapiens
aacattgatggaaagtaaaagttcccctgggctttataacactagctctttctttctcatagttataaggtagttataaagtactcaagatttatagttargattattctctaattctactttaacttcagaataaccaaaaaggcccccagaaatttaagaggccatccttatggcataaacattggctaataaagatta

SEQ ID NO: 168035 - DNA, 201 bp, Homo sapiens
gataaacattgatggaaagtaaaagttcccctgggctttataacactagctctttctttctcatagttataaggtagttataaagtactcaagatttatarttaggattattctctaattctactttaacttcagaataaccaaaaaggcccccagaaatttaagaggccatccttatggcataaacattggctaataaag

SEQ ID NO: 168036 - DNA, 201 bp, Homo sapiens
cttctcaaagctctttctgctaaaatgctatagttatatgtggtcgtagaaataaaagagaagccaaacactcaagtgggcactgcttcccattttttgamtaatgagagattattcaaaatcttgatattgagttcttactacctacccaagcactgagctgtcttctgtaatcatccacaatatctatgatgtcagctc

SEQ ID NO: 168037 - DNA, 201 bp, Homo sapiens
tgttatgtaacaagggcgatgagatttagttacatgtttttgtgacatgttgtagtattaatgttagtcaactctttcaacaataattatgtgtaacaaayaatctgaaaacttatatgcaaatatttatcttcgtgctcataggtctgtgggttggccgggtttggctaatctagcctgggctccgcagcatagctgtgc

SEQ ID NO: 168038 - DNA, 201 bp, Homo sapiens
actcaagtgggcactgcttcccattttttgactaatgagagattattcaaaatcttgatattgagttcttactacctacccaagcactgagctgtcttctrtaatcatccacaatatctatgatgtcagctccatcattatcattttatgtaaggaaactgagatgcagactggccactggctcaagctcatacaactatt

SEQ ID NO: 168039 - DNA, 201 bp, Homo sapiens
attctattgtaagcaccttaagacaaaacctgagtcttctgttttgtcctaacaatggtgcaatgtgccctctagagaagacccttcctaagtgtgattgrctgggatgggcttagctgttctacctttttctaaaggtggcactcccacataccttataaatgcaggtctagtttcatcattccattaatcacatgctga

SEQ ID NO: 168040 - DNA, 201 bp, Homo sapiens
taacaggcattcattataaatattcttttccttccccggacttcataaatgtgacaaaaataacttgttaacaagatttgaaaccatacagtggaataaaytagaaataatttactgagtgccataatgtactgatccatatttttatatattcttagtttattggtcaagtaaataactggtttccagagaaaaataaaa

SEQ ID NO: 168041 - DNA, 201 bp, Homo sapiens
ttcagaccgcaagctctgggcagatacagatcagctatgaatggacgagcccaccaggacaagcaatcaggtgctgagtggggggtctagggtcatatgtsctcatttcaggccactgctcctccaccaagtcactgcatgaccacctgaatgtcaattttctcacctgttcaatggagataaaaatatctcttacctcat

SEQ ID NO: 168042 - DNA, 201 bp, Homo sapiens
gtctgttcttaagagactctagaatttctggtcgctgaactggcagaggaacacacaaagcatttgaccttgctcccatctttcataatgccttgtgctgyccttggtatttaaatgaacatgattctactgacttgctgtcagcgggacttgcactttgggctgctttccagcagtggggaaggatttgggatgattcat

SEQ ID NO: 168043 - DNA, 201 bp, Homo sapiens
cagccccagaaagctaaaaagttgtgtttcagaccgcaagctctgggcagatacagatcagctatgaatggacgagcccaccaggacaagcaatcaggtgytgagtggggggtctagggtcatatgtcctcatttcaggccactgctcctccaccaagtcactgcatgaccacctgaatgtcaattttctcacctgttcaa

SEQ ID NO: 168044 - DNA, 201 bp, Homo sapiens
aactggaagatgtgattgggtgccgggtgtctgttcttaagagactctagaatttctggtcgctgaactggcagaggaacacacaaagcatttgaccttgytcccatctttcataatgccttgtgctgcccttggtatttaaatgaacatgattctactgacttgctgtcagcgggacttgcactttgggctgctttccag

SEQ ID NO: 168045 - DNA, 201 bp, Homo sapiens
ctcgcgttcttcttacaatcctcatgtctgtcccaccagcaatcatttcaggaccccaaaccaacgttagtaccatcaaactgagttcagccccagaaagytaaaaagttgtgtttcagaccgcaagctctgggcagatacagatcagctatgaatggacgagcccaccaggacaagcaatcaggtgctgagtggggggtc

SEQ ID NO: 168046 - DNA, 201 bp, Homo sapiens
agcgtgtgcagcttcctgaagtagaattcccaatgtatgcatccatcaacagtgacctagagttctcattctgagaatgaatatataagcaaacaataagyaaaatatggttagttctcagaaacatgctattgagtgaaagaagccaaacacaagagtatgattccttcatgtaaggtgcaaaaacaggcaaaagtaatc

SEQ ID NO: 168047 - DNA, 201 bp, Homo sapiens
caatttctcattactagaagaaaaatcaaaatgactgtattaaaaaggagatgctgagcatatcatcaataaaagttttaattggttcaatattatttcarattgtgacattaaacatcactttcaaatgctgaggttatttcctcaaatatgacatcagttgactcaatcccattaggagaaatttgaacgccttcacta

SEQ ID NO: 168048 - DNA, 201 bp, Homo sapiens
cgtctataccattagggtgaggttttaattttaaaagtgactttggtgaggcgtggaaattcttagggatttacctgagggtccccaatcactctgggtaytcagctctaccatcacattctactaaacacccacagcccagtgagcagggatttcgttgtaatgttaaggagtttttgcttctcagccacagatgtgctc

SEQ ID NO: 168049 - DNA, 201 bp, Homo sapiens
tttcaccttatatgactagctcgtgttattatttaactttgccttggctcactaattttattttcagtttctaacctttaagaggtaacagttttatactrttcaagactccccaaaccaaataccacagagccatttgtttacattagtaggtccccaataaatattcattagttatttcactgattaattaaagtaatc

SEQ ID NO: 168050 - DNA, 201 bp, Homo sapiens
ttcgtcttcctctttttacaagggctctaactccatcatgagggtccccctctgatgacctaatctaaacctaattacctcacaaaggccccacctctaamtataatcacattggggattaagggcttcaacaaatgaatttgggggaacacataaacattcctaatgcaggacaggcaacatttcagctctgccactgac

SEQ ID NO: 168051 - DNA, 201 bp, Homo sapiens
attaactcagagacaagtcctaccacagtgattcacagttcctgaattcaaaacactgtgcatatcactgatttggcatttcaccttatatgactagctcrtgttattatttaactttgccttggctcactaattttattttcagtttctaacctttaagaggtaacagttttatactgttcaagactccccaaaccaaat

SEQ ID NO: 168052 - DNA, 201 bp, Homo sapiens
gaaacagggagacatagtttagagcatgccgctcagcagaatttagaattgccttcagtcactggaagagtctaggtgtacctggctatttgaaatatatraatacccagcttcattatctgaatgttttatgctccccaaaatttgagctctcttttcgtacaggctgctataacaaaatatcatagacggagtggctta

SEQ ID NO: 168053 - DNA, 201 bp, Homo sapiens
agaatagctcccaagggcctactgaagaaaagctttgtgcttaagacactggcaataagttcatttccatatggtgtaacttgaagctttggttttatagrttaactcagagacaagtcctaccacagtgattcacagttcctgaattcaaaacactgtgcatatcactgatttggcatttcaccttatatgactagctcg

SEQ ID NO: 168054 - DNA, 201 bp, Homo sapiens
tggggattaaataccaacgtgctttggttaaggattatgcatttcaaatgccacatccacagttcgagagttaagaaagaaagcatggcatccgtaaactycctgtcagatgtttactgaaaacttagtatttgcacaacattctgatagacactggagacgaaaatgaataaaacacgatcaccacacacactcagggga

SEQ ID NO: 168055 - DNA, 201 bp, Homo sapiens
ttatctatcccaaagtgaattgtctactttgtgtagatctatggcatcagtttaacttatgttgccttcttagccctgtgtaacaggttctattgctagtkggtatttgttcacaagataaaaattaattttaatattattttgaagcaaatataattatttaggaaaatctacccaaaatataggcatgcaccaaactcc

SEQ ID NO: 168056 - DNA, 201 bp, Homo sapiens
tagtagtcattgttatttgataactattacagaatagctcccaagggcctactgaagaaaagctttgtgcttaagacactggcaataagttcatttccatrtggtgtaacttgaagctttggttttatagattaactcagagacaagtcctaccacagtgattcacagttcctgaattcaaaacactgtgcatatcactga

SEQ ID NO: 168057 - DNA, 201 bp, Homo sapiens
acaggcctcccaggctaaattagacaaaccgaagtgtaattaaaaagtaagccccaggttaaaagaagtatttgggtgatgaggaaaattaagccgacagyatttcatctcccaaaattgctttggggattaaataccaacgtgctttggttaaggattatgcatttcaaatgccacatccacagttcgagagttaagaaa

SEQ ID NO: 168058 - DNA, 201 bp, Homo sapiens
ttgctagttggtatttgttcacaagataaaaattaattttaatattattttgaagcaaatataattatttaggaaaatctacccaaaatataggcatgcaycaaactccagcacccaataaaaagcagcagtaattgatttccattgtgaatggcctgtattcttctacattggcatggactatccagtttacttctgttt

SEQ ID NO: 168059 - DNA, 201 bp, Homo sapiens
agattattataagtaattggagactgtggagtcagaataactgagtttgaattctgacttcatcatttaccagctgtgttgcttaaccataaaatgctcayaatatttactccagcgaataatgggagaattcacagaggtaatccttgcagataatccctgctaatcatttaacctagtgccaggatatagtaaatgctc

SEQ ID NO: 168060 - DNA, 201 bp, Homo sapiens
tgaacaggcctcccaggctaaattagacaaaccgaagtgtaattaaaaagtaagccccaggttaaaagaagtatttgggtgatgaggaaaattaagccgayagtatttcatctcccaaaattgctttggggattaaataccaacgtgctttggttaaggattatgcatttcaaatgccacatccacagttcgagagttaag

SEQ ID NO: 168061 - DNA, 201 bp, Homo sapiens
ataatattgaaactatttctggatatattaatataaagcaaataaataaatatgctaatgctatctgaaagcaacctttttaggaaacgtatgcttcagtstttatgggtgaaatgtcatgatgcctgaaacattttcaaatgactcagcaaaaaatatagagatagacaatacataatgcatatgtggcaaaacattgaa

SEQ ID NO: 168062 - DNA, 201 bp, Homo sapiens
ggagtcattgagagaatataaatatgtgggctttttgttaaagcctgataggagaagagattattataagtaattggagactgtggagtcagaataactgmgtttgaattctgacttcatcatttaccagctgtgttgcttaaccataaaatgctcacaatatttactccagcgaataatgggagaattcacagaggtaat

SEQ ID NO: 168063 - DNA, 201 bp, Homo sapiens
ttaaccagatgaatacattggaggaaagatattctggtaggaacactgtgagtaaacaactgtaggactttgggagggattgtgagtagagtgtgcaagayggaaagtacgttggcattataatgattcatcatcaacaacaccatgtttgcttgcctggttgaatgtccctgagtacaccagctgacatggatgccagaa

SEQ ID NO: 168064 - DNA, 201 bp, Homo sapiens
ttaaaatgttaaaaagcattggtttaggtatttgacattttcttgtattttacttcttttgttaataattaaagaaatagtacttatcaagcactatgggrtcttgtccaccaatgagcattaacctgagagaaattatctgctaggtcaggtacaatatatccatagctgaaggtcccccagttcaacctataagagaac

SEQ ID NO: 168065 - DNA, 201 bp, Homo sapiens
tccatttctgcttctcactacactgttttcccgtggtcctattatcttacaatccagtgggatcaagttaactctcaaggagtctgtttcaatccactccyctcaacttaccacagccctccttttggaagtccagcaaaatttactttattcccacatggtatttagagtgaatggggacagcttgtgatttcctgattc

SEQ ID NO: 168066 - DNA, 201 bp, Homo sapiens
ttttgtacgtcagagtcacaggttcataaccagtcaaagactccttcgtgaagtttctcctctagtcagcctttcaaaagattcttttggtaaggtttttmacagggaaggctcaagcaaagactggttcaataaaggagtgaggcacacccagggccttttagataaagagtaagcaaagagcttccctcagggaaaggc

SEQ ID NO: 168067 - DNA, 201 bp, Homo sapiens
  misc_feature (1)...(201): n = A,T,C or G
gagaagataacagaagctaaatccaaagacaaaagtcagatggaagagtaagtcaaaagtgtcccctctcccaaacagttcatctgggaattattttattntgtacgtcagagtcacaggttcataaccagtcaaagactccttcgtgaagtttctcctctagtcagcctttcaaaagattcttttggtaaggtttttaac

SEQ ID NO: 168068 - DNA, 201 bp, Homo sapiens
agagtcatatgtgctcatctggctctacagataacttatgaaaccacaacaaaaaaaatcacccagatttccggtgtcctttttcagtgatgagttatgamccatctgctggcacagtttgagaagaattctccaagcagcttataaacaaccatgccttagaagtgcattcttagtcttgcttcattaattctgtgccaa

SEQ ID NO: 168069 - DNA, 201 bp, Homo sapiens
ggaaggcaagaaaagaataaaaagaaatgtggaaaatgaaaggatatttataattttaggctgatcctggagaaacaccatcagaggctccaagtgaagcragaacgactccagcagaaaatggggtgaatcacactacaaccctgacacccaagccaccctcccaggctctccacagccagccagctccaggtaagccat

SEQ ID NO: 168070 - DNA, 201 bp, Homo sapiens
taatgtcctttatgatgcagaatttatctgatactttgagttaaatcaggcttgctttttggctcataagtatttatgtatagacagaaattgtggcttttatctatttttattaagtaaaattgtgactgattttatagcaattaagatgaatttttctttgcagacaaattttattgaaggaatattgacaatcaactt

SEQ ID NO: 168071 - DNA, 201 bp, Homo sapiens
atataaaagcttccactaactttccattctagggagtcattgagagaatataaatatgtgggctttttgttaaagcctgataggagaagagattattatawgtaattggagactgtggagtcagaataactgagtttgaattctgacttcatcatttaccagctgtgttgcttaaccataaaatgctcacaatatttactc

SEQ ID NO: 168072 - DNA, 201 bp, Homo sapiens
tttttttgatctttgaaatgttatagatgaaaaattgggagctctttattacttaaatttgaatttcttctactgtgagtggagaggaaacttttcatattgtgttgtttgtatttctaaccatatcctttgcccattttccaatatatagttcttctcactgtttcgtaagatattttgatatattaagagctatcatat

SEQ ID NO: 168073 - DNA, 201 bp, Homo sapiens
cctgggaaacatagtgaaaccctgtctctactaaaaatacaaaaattagccaggcatggtggtgggtgcctgtaatcccagctactctggaggctgaggtrtgagaatcgcttgaacccaggaggtggaggttgcagtgagccgagatcatgccattacacttcagcctgggtgacagagcaagactccatctcaaaaaaa

SEQ ID NO: 168074 - DNA, 201 bp, Homo sapiens
ttgcaagggtcttttgtatcaagtttgctattctctgattaaccaaagcaaatcacatggtctggtccagagtcagtgtggaagggcaccaccaacgggcwtagacataggttggtgtaaaaattggagactttaatacaattaacctcccatagtcatggctcaacactatgctgttttaaccctgctttccagggagta

SEQ ID NO: 168075 - DNA, 201 bp, Homo sapiens
tcttgttaatatgcaaattctcattcagtagatctggagtgggcctgaagtgatactactggtcctaggaccacactttgagtagcaaggctttctaaagktctgctctcccgcacagctgaattgaataacttttccttctagagatggcatcatggttagcttttgaaaaccttttggttttttttttaacttcagtct

SEQ ID NO: 168076 - DNA, 201 bp, Homo sapiens
agaccataaacaaaataagttggtaaaacatgtagtatgttaggtagtaataagggcttaggagaaaaacaataacagaaatgggagaataaggaggggcrgtttggggaaggatgatgaggatgcttggcgattttaaatagagtaggcacggaaaggtttacgcagaaggcaacatctgagttaagaggtgaagaactg

SEQ ID NO: 168077 - DNA, 201 bp, Homo sapiens
tttttcccaactcttgttcttagggtagtgttctcaaactctggcaatttgagtgtgcaaaaaaaaaaaaaaaaaaaattagagtagtggaagtgggacaratagttcctctttagcctcctgacatacctcttgtttggagggataagataatctctcagattgccacctgggcaaggaaactgggcaacacacttccaa

SEQ ID NO: 168078 - DNA, 201 bp, Homo sapiens
cctggaaggagtccatggactgatattttctagccaaagggagctaaaaatcagccattttgacatttggatttttcattgatgtgtcttgtttatttaaytcaatttaatatgaaagagtagagagggtagaacaaactgttcagcaacgtatagatcattaggttttaaaaccaaataaaaagtactcagtgtaaaaat

SEQ ID NO: 168079 - DNA, 201 bp, Homo sapiens
taatgcttactgaaatactttaaattcaagttctataagggaaaagtggattcttattctagaataacaaaacaattagaaattggcattttttaccaacycattatatcaaatattactctcaatactattctctgctttccaacaaccacctcccaagaaaaaactatttttccctaagacaatttttgtttgtttcat

SEQ ID NO: 168080 - DNA, 201 bp, Homo sapiens
aattccccaaatacagactgatgcaataataagtttaagagacagcaataatgaacaacaaagattgttgaatacatgagaaaatttgtttcaaattctaycctttggagataatcatcattaaagctggatgaactaaattttaacaaggaagttggcgagtaaccaaatctatatttaaaggctttcagcctaccaaat

SEQ ID NO: 168081 - DNA, 201 bp, Homo sapiens
ataataaaaattaaaatagtggccgcatattaagcattcaccatggggctatattctgtgctgagtcatttacaggaaacagcctatttaattctcacaayaaccattagagtttggtactattgtcagccccattttgcagataaaaaatgtatatagcaaaatttagtgactttcccaaggatccacaactggaaggtg

SEQ ID NO: 168082 - DNA, 201 bp, Homo sapiens
ctgaacataccctaatgctaggctcttaaaataggatcttgttttaaaaaggggttcagtagacaaagaaggccattccctttttcccaactcttgttctyagggtagtgttctcaaactctggcaatttgagtgtgcaaaaaaaaaaaaaaaaaaaattagagtagtggaagtgggacagatagttcctctttagcctcc

SEQ ID NO: 168083 - DNA, 201 bp, Homo sapiens
tgtttcctgatctgtaacattcagacaacaatagttcatagaactaatgactcagaagatgcaaatgtatctccatatgttaatactattgaaagtaatargaagatataggagaaaaaatcatcatactgaaattagtagaagtgatgaatggaggcagaagaaactagctggatattttcagtggaaaaactcatttta

SEQ ID NO: 168084 - DNA, 201 bp, Homo sapiens
aatggctgggcaggggttggatcaggcatagggagggattgccttgacagacctgagcaagtcaaagtaaattttaacgggcaataatggctttgagatcyggctataaccactgccttctgactttctccagcaactcatccccagtagtccagaacataataaaaattaaaatagtggccgcatattaagcattcacca

SEQ ID NO: 168085 - DNA, 201 bp, Homo sapiens
ctcacacacacacaccacggcctgctcttgttacaagcagttttggtaatgtggctcctgtgttcattatgaaatatttaggtatggacttgtcctcagtmatagcatctaaatatcacaaactcaggaaatctaaattgttctgacaagttacaagaataatttcaaagaacattttcttttggcagtagaccctgatgt

SEQ ID NO: 168086 - DNA, 201 bp, Homo sapiens
caatagttcatagaactaatgactcagaagatgcaaatgtatctccatatgttaatactattgaaagtaataggaagatataggagaaaaaatcatcataytgaaattagtagaagtgatgaatggaggcagaagaaactagctggatattttcagtggaaaaactcattttaaatcatgaataaccactgttagcaactt

SEQ ID NO: 168087 - DNA, 201 bp, Homo sapiens
accctgttcccaatactctgtctttctttccactgtttcctacaggtgataatacagagtacaaaattggaaggactcacaccataagttaatgataattrctttaatttattttgacattcaccctaaccttctaaatatttgtataattctctaagaacaatgcagagaaagtcatactgctaagaggaagcattcgaa

SEQ ID NO: 168088 - DNA, 201 bp, Homo sapiens
attaaaggtttagcagtcaaaacataaactaaatactgtttcatttgcactcacacacacacaccacggcctgctcttgttacaagcagttttggtaatgyggctcctgtgttcattatgaaatatttaggtatggacttgtcctcagtcatagcatctaaatatcacaaactcaggaaatctaaattgttctgacaagtt

SEQ ID NO: 168089 - DNA, 201 bp, Homo sapiens
ctcaaaaaaagaaagaaaagaaaagaaaaaagataattcaatgttaactatgtcatgccaagaggaaagtttccctcaacactgcagtgaggagccttatrgaatgtccgtcctcatttggcattgcacataaaaatgcaaaaagaaacttgagaaaattccgcatcccttatttgacaaaatctgattctaacaccagct

SEQ ID NO: 168090 - DNA, 201 bp, Homo sapiens
tttgaataagtttcataattttaagtatttgaattaaatttttatttaatttttattgttagctttacttgaggcctatttagccaatccttaactacccyaggatctgaaatagattaaaggtttagcagtcaaaacataaactaaatactgtttcatttgcactcacacacacacaccacggcctgctcttgttacaag

SEQ ID NO: 168091 - DNA, 201 bp, Homo sapiens; identical to SEQ ID NO: 30526

SEQ ID NO: 168092 - DNA, 201 bp, Homo sapiens
aagtatctgtgatacatgtaactgatgaagagcttgccaagacataaatgtaacttctaaaactatataggaaaatgacagataatgcactgggaaaaaaktagacaaagatttttgaccagtctattcataaaagaggatatcaaacagccaataaatgtataaaagtgttcaacatcatgaataataatgcaaattaat

SEQ ID NO: 168093 - DNA, 201 bp, Homo sapiens
atctcaaaaaaagaaagaaaagaaaagaaaaaagataattcaatgttaactatgtcatgccaagaggaaagtttccctcaacactgcagtgaggagccttwtagaatgtccgtcctcatttggcattgcacataaaaatgcaaaaagaaacttgagaaaattccgcatcccttatttgacaaaatctgattctaacaccag

SEQ ID NO: 168094 - DNA, 201 bp, Homo sapiens
atgctaaattgtcttctgaagtaactataccactttacactttcttcagcaatatatgaaagactgtattaccctgacacttgccaatagttgatattaaygtcagacttcctaatatttcctactaagatgagtatgaaatgatatctcaatgtggtctagatctgcctttttctgatcagtgaagaaactgaccatccc

SEQ ID NO: 168095 - DNA, 201 bp, Homo sapiens; identical to SEQ ID NO: 30527

SEQ ID NO: 168096 - DNA, 201 bp, Homo sapiens
ccagctgctgtggaaaaaagtttatccattcctcaaaaagttaaacatagaatcatcatatgatccagtgttccatacctagatatatttgcaaaagaatygaaagcagggactctaacaaatacttgtatgccagtgttcctagcaaaactattcacaatcaacaaaaactggaaactcaaatgtccatcccagataaat

SEQ ID NO: 168097 - DNA, 201 bp, Homo sapiens
atagggaatatgaatcttccattttacatgatgatgctaaattgtcttctgaagtaactataccactttacactttcttcagcaatatatgaaagactgtrttaccctgacacttgccaatagttgatattaacgtcagacttcctaatatttcctactaagatgagtatgaaatgatatctcaatgtggtctagatctgc

SEQ ID NO: 168098 - DNA, 201 bp, Homo sapiens
ctagcaaaactattcacaatcaacaaaaactggaaactcaaatgtccatcccagataaatggataagcaaaactatttagccttaaaaaagccatgaaagwctgatatttcctagaagacagatgaagcttggaaacattacactgagtgaagtaagccagtcacaacggacaaatattgtaggattaaaataggcatatt

SEQ ID NO: 168099 - DNA, 201 bp, Homo sapiens
tagacctgctgcccaatacaggagccactagctacctaccagtggctcttgagtccttgaaatattgctcgtgagatgtgttataactacaaaatacacaycagatatctaagacttcacttttttaaaaaagaatgtaaaatagctacaacatatctgttgattttaattacatgttgaaatgatattttggatatatta

SEQ ID NO: 168100 - DNA, 201 bp, Homo sapiens
atgtccagttgattgctgttttaagcagatctgctgtgaacatgccatctcatatctcctagtatgcaaactctgtaccagaagttttcttggttgtataycaaactgtggaattactgggccatagggaatatgaatcttccattttacatgatgatgctaaattgtcttctgaagtaactataccactttacactttct

SEQ ID NO: 168101 - DNA, 201 bp, Homo sapiens
aagcagtagtgctcaagaagattaaacttccatgttgagaatctcactggttatctttggccttctggatagctagttcttttctggcctgtgtacctttytatggctacataaaaaaattaataacctttctaaaagtaaaaatcctatttggagtaagatggcattgcaaattaaataagtattggaataaacaacatt

SEQ ID NO: 168102 - DNA, 201 bp, Homo sapiens
tcataattcagcagcaaagatcagatttttttttaagttcatagaaattgaagctgtttgtttactagatccccttaaactttgagactcatttttaccartaaatctttacacactaaagaacaacgatctatataaatagttcaattaggtagcctttctctctgctccttaatctgtttccaaagagactttgtaact

SEQ ID NO: 168103 - DNA, 201 bp, Homo sapiens
attagggtaaatggggtatccatcacctcaagcatttatcctttccttgtgttagaaacaatccaattatactcttctaattatttttaaatgcacaataagttaattgactgtactcaccctgttgtgctatcaaacactagatcttattcattctgtctaactacatttttgctcgtattaatcatcctcactccctct

SEQ ID NO: 168104 - DNA, 201 bp, Homo sapiens
atctaaaaccatataactacagaagtggggagctgaaagttcagaagtatcatctgactgtgttgatggcatctttacctcaattaataaggtgtggcaaygttcactcaaggacagaaattcaatctgtggtggatccaaggggattcaaaatatttcttttaatccaaccaaaacatattgctttaatggcattagttg

SEQ ID NO: 168105 - DNA, 201 bp, Homo sapiens
tcaatagcaagagtagaggcacatgtggccctttgagaacaactcagcactgcaacagtatcacttttgtcatatcctattgacaaaacaagtcacaaaakaggagtgaagaatggtgggtttttgaaaactcaatctaccacacttctcttatgtgaacttctctctgtgtactaatgaaaaaaatttaaataaagtata

SEQ ID NO: 168106 - DNA, 201 bp, Homo sapiens
tttttatttggatttcatttattcatttaaatatttatgaggccctactacttaccctcaggatgctaggcattctaaaggaatatcttgctagagaaacrtctccgtttagattgtaccttaagtttcagtcacagcacagaaaagggcttctttggaacctgtgacaggtgaccgtcttctccttttcctctgcagtta

SEQ ID NO: 168107 - DNA, 201 bp, Homo sapiens
gtggtgatggttgcacaacagtgtgaatctacttaatgccactgaactgtacacttaaaaatggtaaattatatattatgtatgttttaccactttttttwaaaaaaaaaaaaaaaaaaagaagaaactgagaaggagcaaccagtgaggagggagaagaaccagaacagtgtatttcctggatgcctaaaaaatatttca

SEQ ID NO: 168108 - DNA, 201 bp, Homo sapiens
aaaagtgtatcgtttagaagacataactttcaaaagcaaaagtatcccttagttctatttctatatatatatatagcattttaatgaattgtagcatcaaragaagtgaaaaaaagccttttaagtttaaattattgctccacttaattttctatactatagtatataaattactcttatcagatagcctatttttcatat

SEQ ID NO: 168109 - DNA, 201 bp, Homo sapiens
atttaaaatttctctctgttgcagatggtagcaaaaacatatgattaatagggggatgtgatcaaaatgtagaactgacttggaaatctttctctttttgwtattcttgagcatatgattggaaggaagaaagattcagacatttcagaaatggggtaaggggtgcaggggagagcagattcttccccccccactcactcc

SEQ ID NO: 168110 - DNA, 201 bp, Homo sapiens
gaggttgccgtgtggatttcagagtgtcacccgctctcagaaccccacatgtggactgcgcatcatagcttatcatgggactttgtggacacagggtctgrcggaccacagggggcttcctctcttgaaccctgtcgagggctgttcccagttctggaatagcatttcattgagtgtcaacaaagtactgggcatatgtgt

SEQ ID NO: 168111 - DNA, 201 bp, Homo sapiens
ttctctgggctcagggcccttcttcaattgcaagactcttgtgtgaacaatgcagacgctgcctctaaactccaacaaagacctgcttccaaatgtgaggwtgccgtgtggatttcagagtgtcacccgctctcagaaccccacatgtggactgcgcatcatagcttatcatgggactttgtggacacagggtctggcgga

SEQ ID NO: 168112 - DNA, 201 bp, Homo sapiens
tctgcagtcaaaatgattaatcatgaggcaaaaacaagaagccagagggaaaaaaggaagagctcacaaaggcaaaataaacatccataaacttaaacttycctgggtagggaagatctgaaaaatgtcacccatgagccactttctaacactcgttccatctttctttttccagtgtgcaaaactcaattgcacagtcct

SEQ ID NO: 168113 - DNA, 201 bp, Homo sapiens
tagaaattgaagggtggctgaaaggctttctttggtctaatccctgcctcccttcccagctgccatctcccagcacttcatatgaaaacctgtactttctsccgagttcccaccatgatgagatagggcagttaggattctctgggctcagggcccttcttcaattgcaagactcttgtgtgaacaatgcagacgctgcct

SEQ ID NO: 168114 - DNA, 201 bp, Homo sapiens
agctggcaaagtgggtgaaacattgtaaaccatgagaggagtgaaacaggatgagatcagagaaacaggagggaatcccactgctaggttctttagagctrgagcaagcaacagttcaaaatgtatcgaacgtgcaataagattctactgaagaaagaaattgatatggcgaaatttgagagtctcagagcaatgactcta

SEQ ID NO: 168115 - DNA, 201 bp, Homo sapiens
attaaggtatcttccctcaagacactttactgctatatgcttttatgataaatgtaccagcttatgatgtttatactgtaaatgataccttttagaaatgrtgttgtagaacctgcacagttattttctaagcctccacaggcacagtgccagaaactgagttaaatactttccatgagttcttttatttcatcatcttaa

SEQ ID NO: 168116 - DNA, 201 bp, Homo sapiens
tcaccctgtcgcccaggctgcagagcaatgatgtgatcgcggctcattgaaacctccgtctcccgggttcaagtgattctcctgcctcagcctcccgagtrgctgggattacaggtgcctgccaccacacctggctaatttttgcatttttatttatttatttatttatttagagacaagagtctaactctgccacccagg

SEQ ID NO: 168117 - DNA, 201 bp, Homo sapiens
ttatacttaagagcatagtctaaggaacagcctctctcatctacagactttttaaaaataatagtttatgtggatttatttctaatcgtaggttagaacawctagagccttatttccaaactgcctatagctgatatgctgtaaaccacttttaaagaaatagaattgcatctgcctccaagaatgcagcaattccttggg

SEQ ID NO: 168118 - DNA, 201 bp, Homo sapiens
acattccacagtggcctcctcactgttctctccatccttcattcatgctcctctccagtgttttctccacctacattgagagcaatgtttccagattaacyagtatatcaagtgagtcctaggtttaaaaacctgcaatcactttcattgcttttagtataaatatcaaaatccttatgcaggaccttgaaggctctacat

SEQ ID NO: 168119 - DNA, 201 bp, Homo sapiens
taaatatgataacctcatagcccagtggcagtgggctgggcgggaaaacagcaactgctagcaatcagcatgcactttatatagcatttccacttaacacmctcccccagtgacctccacctggcaaccttcatattgtaacctaaaactctgggcctcaatcccctgtacggcctgtgttccacaggactgaataggatg

SEQ ID NO: 168120 - DNA, 201 bp, Homo sapiens
tacagggctatttaaatataaattattgaaaaattgaataaaatttaaaattcagtttctcagtcacactagcacatttcatgtgctcagtgttcccatgyagctagtggctgtggtattggacagtgccaatatgcaacttttccacaattatggacagttctattgaatagtgccaaacaagaacagggttcaaatcca

SEQ ID NO: 168121 - DNA, 201 bp, Homo sapiens
  misc_feature (1)...(201): n = A,T,C or G
actctgtctctacaaaaaaattttaagattagctgggtgtggtggtgcacacctatatttccagctactcagaaggctgaggctggaggatggcttcagcntgggaggtcaaggcttcagtgagccatgatggtgccactgcactctaccatgggcaacagagcgaaaccttgtctccaataaataaatagataaaaataa

SEQ ID NO: 168122 - DNA, 201 bp, Homo sapiens
tgtatttttagtagagacagggtttcaccatgttaagtattcttcctcttctaagtgtgctgcacccacctcttagtagactttggttgggattatctgaragtagtcttttttagttctgtggctgtgtgagcacatggttgggagaatgtgaggaggatgtggccatgaccaactttatccttttgtagccactcactc

SEQ ID NO: 168123 - DNA, 201 bp, Homo sapiens
taaaattgcagctgctactaatgttcaacaaaatgataccatgtgaatgctgttgactcatgtgagtgcttatatgatgacacacagccatgctgtgtcargattcacttgaacccatgctccagttaccgctggaagaacttgctggacattaactgtgcaaaacaccaaaagtactttacttggtgttaatgaagaagc

SEQ ID NO: 168124 - DNA, 201 bp, Homo sapiens
cattcctcctcttaagtctgtctcttgccccagccttagaacagaatccttgttaactaacccttcttctgtactatacaagagaggagttagagtacacrttgggctttgcaacgggtctgctttcatttgttaagcaattgttttttatttggatttcatttattcatttaaatatttatgaggccctactacttaccc

SEQ ID NO: 168125 - DNA, 201 bp, Homo sapiens
cacataacttgaagttgactttcagctacagacaaatgatgtgtccaactaaactttgttacatctcctctataggtgaccagtgaatgatattttaagtdaatgtattcatcagccccttttgtatatctctttcagagagtttctatgggagtgggtatagaaacataaacaacttcaagtcatctcccctcttgatgt

SEQ ID NO: 168126 - DNA, 201 bp, Homo sapiens
cttggagaaatggctgattctagagctggggaagggaatttacaagattaggctggagcatctaacaatgccaggaagcaagaaagtttctcaaaggaacrtatggaaccaactaaaagacttctcaatggtcaaagctggaacaatttaagcaacaaaataaagatgtgatattagattgcaactcaaagtataaaataa

SEQ ID NO: 168127 - DNA, 201 bp, Homo sapiens
ctcccaaagtgctgggattacacgtgtgagccaccacgcccagactctgacacctttttcaaaagacccgtgtgtgtgtgtgtgtgtgtgtgtgtgtgtgsatttgtagataccgctattcatcttattctgagtctttagccttattgtgccacacataacttgaagttgactttcagctacagacaaatgatgtgtcca

SEQ ID NO: 168128 - DNA, 201 bp, Homo sapiens
agcattcttgtgattataaataaagcaaactttattctaatgtaatgaaaataaaattctacagtgagacttgtactgtttttgtcttcaagtatttgttsatctgtgaaataatgcagtttaaaaacatgtcaaagaattactgaaaataactctttactgagaaagaggtatgagttattcctcttcctcgacatcagt

SEQ ID NO: 168129 - DNA, 201 bp, Homo sapiens
tttgtatttttagtagagacagggtttcaccatattgccaggctggtcttgaactcctgacctcaagtgatccgcctgcctcggcctcccaaagtgccggkattacaggaatgagccactgcacctggcctaatgttacatttaattaggtttgtctcaaagctgcaaatgaagactttttaagaataatttttataaaga

SEQ ID NO: 168130 - DNA, 201 bp, Homo sapiens
aacctcttcttcccctaaagttaacatctcacgggatcatggggcaatcatcaaaaccaggaaagtaacattggcatgatactctgacctaaactgcacamtttatttggactaacctgctttctacagtaatgtccttttactgttcaagattccaacgcaggatcccaaattgtattttattgtcatgattctttagtc

SEQ ID NO: 168131 - DNA, 201 bp, Homo sapiens
gtaaattagttcaaccattgtggaagacagtgtggtaattcctcaaggatctagaaccagaaataccatttgacccagcaatcccattactgggtatatasgcaaaggattataaatcattctactataaagacacatgcacatgtatgtttattacggcagtgttcacaatagcaaagacttggaaccaacccaaatgcc

SEQ ID NO: 168132 - DNA, 201 bp, Homo sapiens
ctttttcagtgatgagttatgacccatctgctggcacagtttgagaagaattctccaagcagcttataaacaaccatgccttagaagtgcattcttagtcytgcttcattaattctgtgccaagggctcctttccctctttctccaactttcttttcaacatctttgagtgtctgccctgtgctggacacattgctaagct

SEQ ID NO: 168133 - DNA, 201 bp, Homo sapiens
aattctgataaagagttacagagaatttagcatattgaaaagcaacattaaaagagtatgtaggcaattattttataaggatcagcatttattcaacaaayatttttaaactgtttactgtgtataaggtatgtggaattagctgctggagggtgtcgaatgaagattttacgtttcaatgcatttattattattattcat

SEQ ID NO: 168134 - DNA, 201 bp, Homo sapiens
tcctacctgctttctaaagcagctgagtttggtaaccatgggcaccctcttcagctgggaggccaggaaagcgttacccctgctgtatttaagccaaagarccacccactgtgggtgtataggtcccatgtagtcaaatctagtttttcaagggaagtaagaaacccattgtttcagtataagatcaccttaattaaaaga

SEQ ID NO: 168135 - DNA, 201 bp, Homo sapiens
caattgacatgtgcatctgaatttattcaacacaaattcccatctgatttgcctcttttttctcttttacttccattgtgacttcagagaaaagaaagaaytaaagaagaaaatggataaaaagaggcaggagaagataacagaagctaaatccaaagacaaaagtcagatggaagagtaagtcaaaagtgtcccctctcc

SEQ ID NO: 168136 - DNA, 201 bp, Homo sapiens
ggtcagatccccacggaatagggacatcttcctacctgctttctaaagcagctgagtttggtaaccatgggcaccctcttcagctgggaggccaggaaagygttacccctgctgtatttaagccaaagaaccacccactgtgggtgtataggtcccatgtagtcaaatctagtttttcaagggaagtaagaaacccattgt

SEQ ID NO: 168137 - DNA, 201 bp, Homo sapiens
ccttttggtgtggcacaactcaggtcgcccattgcattgatgatatctctgctttgggaaggaaagcagcagaaatatcctaaagtagcattttccttccygcacccttttgcccaatctccatgcatttgtaagtgagtttataccagtccctccgctcattgcaagccaagaatagaggactaacttaggcattctata

SEQ ID NO: 168138 - DNA, 201 bp, Homo sapiens
ggcgtgaacctgggaggcggagcttgcagtgagccgagatcgcgccactgcactccagcctgggcgacagagcaagactctgtctcaaaaaaaaaaaaaaagttattgtccctcaaaaataagatggacgtgaattttatcaaggtgattagcaggtgttctatggctcttttattctactagtggaaaaattcagacctt

SEQ ID NO: 168139 - DNA, 201 bp, Homo sapiens
gggcacctaggttgattgaatgtctttgctattgtgaatagtgctatgataaacatacaagtgcatgtcacacactttttgatgtgaaaaaaaaaaaaaaacaagtcatttaaactagatccataatctgttatctgagattcttggggcctgttgtttttcagaattttaacttttctgattttagaaaggcaatgtgat

SEQ ID NO: 168140 - DNA, 201 bp, Homo sapiens
aatcacttagcttctctgtatttttgctgcttcttgtgtaaaagcgtggtaatgttacaggacattcaaaaatgatgaatttggggctgtttaggatgtgwagaaattatctcttgttcctgaagtgattaaagcagtataatcactggtcttgttgtcttgaccaccatatggaatggaagatgtcacccagaggttgca

SEQ ID NO: 168141 - DNA, 201 bp, Homo sapiens
gggatgagctgcaaagtcacaccacaaaggttatgattacaaggaggggtgaagaattactgccatttgcacgaccaatctaccattcccacctaacaccytgtttcacttgcacagaatagaaattcaacacatattagagtacaaaacccagaatatggcaattagatagtatgatgctgaacctcagaacagaggcaa

SEQ ID NO: 168142 - DNA, 201 bp, Homo sapiens
tccctgcactatgctttcctgcttgtctaagacacatcaggagccaagaagggagggagggaagaatgttgatgaaggaaagcagttgtttacccaccccygcccatttccacaaagcaatctttttattattattatcaattttcccttcatttggtggtcacctacctaacaattttcttattgtacagtgaattctta

SEQ ID NO: 168143 - DNA, 201 bp, Homo sapiens
gattcaagaagatgagaaatacactccgttctttgctgggatgggatgagctgcaaagtcacaccacaaaggttatgattacaaggaggggtgaagaattwctgccatttgcacgaccaatctaccattcccacctaacaccttgtttcacttgcacagaatagaaattcaacacatattagagtacaaaacccagaatat

SEQ ID NO: 168144 - DNA, 201 bp, Homo sapiens
cacaggtttccatatgtttttgaaatatagaaaaaacttcactaatttaagcttatcagcattcaaagttatcttatttgcagccactgagataaaagttractctgtatcctaactagcttactatttgaataaccacaaatattggttaaaaaagaaccaaaaatagttatcttggtttgactgtaaactgcattcttc

SEQ ID NO: 168145 - DNA, 201 bp, Homo sapiens
tattaatttggggaactaataaatgtccataaaatcttcacaatccacgttcttctgccatggcttcagccggtccctccatatggggtccctgacttccygcaacaagatgggatgaagttttttaactagaaagtgatcatagctaagtttttgcacacaccaaaagtatgtataggctacatgacatcatatttcttc

SEQ ID NO: 168146 - DNA, 201 bp, Homo sapiens
atttaagcttatcagcattcaaagttatcttatttgcagccactgagataaaagttaactctgtatcctaactagcttactatttgaataaccacaaataytggttaaaaaagaaccaaaaatagttatcttggtttgactgtaaactgcattcttccatcttgaaaattttgaatttttctagattttcaatatgttttt

SEQ ID NO: 168147 - DNA, 201 bp, Homo sapiens
taaagacaggcataggaaatcacaagggtattgattggggaagtgataagtgttcatgaaatctttacaatttatgtttagagattgcagtaaagacaggygtaagaaattataaaagtattaatttggggaactaataaatgtccataaaatcttcacaatccacgttcttctgccatggcttcagccggtccctccata

SEQ ID NO: 168148 - DNA, 201 bp, Homo sapiens
cttatttgcagccactgagataaaagttaactctgtatcctaactagcttactatttgaataaccacaaatattggttaaaaaagaaccaaaaatagttaycttggtttgactgtaaactgcattcttccatcttgaaaattttgaatttttctagattttcaatatgtttttggggtaataatgatatgtaatattataa

SEQ ID NO: 168149 - DNA, 201 bp, Homo sapiens
gggaaggtcagatccccacggaatagggacatcttcctacctgctttctaaagcagctgagtttggtaaccatgggcaccctcttcagctgggaggccagsaaagcgttacccctgctgtatttaagccaaagaaccacccactgtgggtgtataggtcccatgtagtcaaatctagtttttcaagggaagtaagaaaccc

SEQ ID NO: 168150 - DNA, 201 bp, Homo sapiens
tattgtttaaacacatgtgctctacaatttgtgcagttaatgcaattatcacatggtcctgaggtgacatacatcctcctcggctgacaggattaagagawtaaaataaagacaggcataggaaatcacaagggtattgattggggaagtgataagtgttcatgaaatctttacaatttatgtttagagattgcagtaaag

SEQ ID NO: 168151 - DNA, 201 bp, Homo sapiens
aattttagtgagctgtcacattgggaagaatctggttcattccccacatggttttagaaaccaacttggatataatggggaaggtcagatccccacggaayagggacatcttcctacctgctttctaaagcagctgagtttggtaaccatgggcaccctcttcagctgggaggccaggaaagcgttacccctgctgtattt

SEQ ID NO: 168152 - DNA, 201 bp, Homo sapiens
gggcaggaacttacttctgtggttcattctgcactttttttttcactacccacctaagaaaaatctagtcaatgcgactgaagtactaccaccttctgaaycttctttccttgataattgcttaattggaatttaaatctttgaatcaaattaagaaactagacattcctagtttctgtttctatcacaatttccagtacc

SEQ ID NO: 168153 - DNA, 201 bp, Homo sapiens
cagcttaatcacagaaacctgggaagggctccaggagacacttttcctgggaattatccagaatttgtcccgcaagtgattgaccatagtccgtaccaaaygatttgacttaattaatctcaaagatatatttccacaaaattaacattaagagttgttggtctactttcctttaaaaagagaaatccatgatttctacct

SEQ ID NO: 168154 - DNA, 201 bp, Homo sapiens
caggtgcaggaaatggggaggtgcgggtcaaatgatacaaagcaggaaatgtgtaggatgaacaagtaaaaaaatctaatgtacagcatgaggactataaktaacaatcatgtatcatagtcagaattttttctaaatgagtagattatagctgttcttgccacagggggacaaagcgggtaactatgtgagatgatggat

SEQ ID NO: 168155 - DNA, 201 bp, Homo sapiens
tttaatgtgcatacaggtgcaggaaatggggaggtgcgggtcaaatgatacaaagcaggaaatgtgtaggatgaacaagtaaaaaaatctaatgtacagcrtgaggactataagtaacaatcatgtatcatagtcagaattttttctaaatgagtagattatagctgttcttgccacagggggacaaagcgggtaactatg

SEQ ID NO: 168156 - DNA, 201 bp, Homo sapiens
aaaatcatggctcccaattaatgatgaagtttttcactttgctttagagcagggcttctcaagttttaatgtgcatacaggtgcaggaaatggggaggtgygggtcaaatgatacaaagcaggaaatgtgtaggatgaacaagtaaaaaaatctaatgtacagcatgaggactataagtaacaatcatgtatcatagtcag

SEQ ID NO: 168157 - DNA, 201 bp, Homo sapiens
taaatatttcctaattcagtgtatggccccaatttgattattttaataatgatatgaattccaccaataaaataatgtgacatcaaaaaaatccaaggtastgcttttataaggttacaatgttttgcccaaggccttggataccatttaattattcaaaacagaaacttgatatttcattcacaatataagaacttgaca

SEQ ID NO: 168158 - DNA, 201 bp, Homo sapiens
agcatcagttcaataggcttgagttaaaatggtttctgtggtgccattatagctttgttttgccttacttatatctaggtgaccacatgttcaggtttttytgggacagtccctttttatgcctgttttctcagtagaaattcttaataatgcccattctcactctctgaagtattccagtttggattaacaataatatgg

SEQ ID NO: 168159 - DNA, 201 bp, Homo sapiens
ccccgcaaaagcctacaggactatcccattcccacagttaggaatgactccatggtacttttcatggtccagagctctctgtgggatcaggccaaaaactrcactttatttatcttcttcatgaagatggtgaagaatctcaacagaccttcaaagagatcaaggcttgcatctaagacaggatcaatgattgcctctaag

SEQ ID NO: 168160 - DNA, 201 bp, Homo sapiens
aacacatagcatactgctgacctcacagcaggtactccagccaaccaatccctgaattaaaaactgattacaggcagctgctcgatgccttgccacttccmctctcagtgagtccattttatttgtctgacagcaaagctccaattctgtcttcacccctaccaacccacacttttacaaattgctttttagcttaatgtt

SEQ ID NO: 168161 - DNA, 201 bp, Homo sapiens
tgatcacacaggctgtctttcatcactagtggagtgtttggcacaagctagtactcagcaagatttgttgagtgagtaatttacacccccccatccccccracacacacacacaacaccatgcaaatctatgcaatcagggcacttgcaaatccttagtattatcaaaagaaaaatgcaaattctaaggcattcttatgcc

SEQ ID NO: 168162 - DNA, 201 bp, Homo sapiens
ctatctcatacacccactcagtcaccaacctttatagagcacatctttttaattcccctcaaagctgcactttcctctctgttccttgccatccacctatycgtctggattgctggaatggcctcctgacaagtctccttgccttctctgtgcatccccacccccgcatttgtcctccaggtcagtgtttcaaactctggt

SEQ ID NO: 168163 - DNA, 201 bp, Homo sapiens
agccttagatcatcagacatcaagtagaaaaacacttatccaaatctacagaaagcatttctcagaaagtgaaagaatgcagaaatttacttccaaagttwtgaattaaacatgacagaagaaggcatcaatttggaaaactttctcagaactctcccttgcttggtagagtgggcagcttacttcatctgtcagaggaaa

SEQ ID NO: 168164 - DNA, 201 bp, Homo sapiens
ctgtgcatccccacccccgcatttgtcctccaggtcagtgtttcaaactctggtttctgttttgtttcgtttctgagactgggtccttcacccaggctggmgtgcagtggcatgatcatgatcacagctcactgcagccttgacctccctggcttaagtgattctctcacctcagcctcccacagaatactggaattacag

SEQ ID NO: 168165 - DNA, 201 bp, Homo sapiens
atttttctggaagaggatgagtagaaaggtcaataggtagccccacagaatgaaaagtattattcagctacagtagatgctgggggccctcaaatcccaasagtccaataaatcccatccacatggatatccaaggaatagttttatacaattggattataagtcaagtatttgagggagaagctgttcactaatcgccca

SEQ ID NO: 168166 - DNA, 201 bp, Homo sapiens
tagcttttgacccaataatttcttttctgggcatttatctttttatatatatctgcatgtgcacaaaaatgatgtgtttacaaggttagtcagctgagctrcttataacattctaacttacaaagaacctaagtgtccatcagtaagggactggttaaataaattatggaacattcatacagtgaaatatttttcagctaa

SEQ ID NO: 168167 - DNA, 201 bp, Homo sapiens
tattttttcttcttagctttaaaaatagacctgcagaatagatatggtataaagtgagactccatagtgtccagaattcttttctttgtatttgtactgawattctctctctcttttccagtgtatcaacttttagttatatattttgttcaaaaataacatctgatcatcataaacatcaattatttaaataggataaca

SEQ ID NO: 168168 - DNA, 201 bp, Homo sapiens
cattattttgctttctttgtagcacattccccttatatggtactcttttctgggaaacatggtcttgctctgttgcccaggctggagtgcagtgttgcaaycatggctcactgcaggctcaagctcctgggctcaaatgatcctcccacctcaaaagcttttctagtagctaggaccacaggttatgccacacctggctaa

SEQ ID NO: 168169 - DNA, 201 bp, Homo sapiens
caacctaataagttgacatctcgttaaaatgaaggcagttactagcatgttaaatctgacctgtttttcattcatcatttgaaagaaattacaaaaatatrtctcttaatataatgtttcctagaatccagaagcaagtgtggcagtttcttccctcagagtcatagatgcatgcaactataccataaatactgttacaat

SEQ ID NO: 168170 - DNA, 201 bp, Homo sapiens
gataacttcgggacatttgatttgagttaaggttagaacaatgctgcgtaattctggccacatatataattaatttaaattcttctagattaaaaaaaatsttgcagaatgctacagagctgcaaatgaagactagtatcctgttaaaaccatttgatctttaaactggcttgcttcatttcataatggatcgaagacaat

SEQ ID NO: 168171 - DNA, 201 bp, Homo sapiens
aaaccatcccatgctgcaaccctgccacaatttagattgtcccctttcatttcttaggtagaagcctatgtatgcatgtatcacatgcttttgctgttgayttattctctccatttagatcagcatttctcagcctcagcactattgacatttggggccagataagataactctttcttgggaaagtagacagctgtcttg

SEQ ID NO: 168172 - DNA, 201 bp, Homo sapiens
tctcacacaatttgtcatttctctgaaaagagatttagattcaaggcccaaatatgtttgtttgtttacaggaagaataaaatttaaaaagttgaagaggytatttattttatcttttatattacaggttctgtaaaggcacctgccaaaacagaagatcttattcagagtgtcttaacaggtaaatgccaccctttcccc

SEQ ID NO: 168173 - DNA, 201 bp, Homo sapiens
agagtcagacaaatcttcctggggtttaatcttggattctcttctctatgacttaaggtaagtcagttaatatctctgcaccttagttgaatcaagaatakataaccatcatgagctgagtcctttgccttctcttgctgcatcttcacaacagatctgtgaagtgaggtttattgcactttatagattagcaaaccaata

SEQ ID NO: 168174 - DNA, 201 bp, Homo sapiens
tataataattgtacatatttatgaggtacatagtgagttttgatacatgtctagtgatcaaatcagggtaattagcatatctatcacctcagaagctcacmatttgttttgttgggaacattcaaaatcctgtcttatatatatttgaaaatatatacaatttttgactgcagtcatcctacattgctgtcgaacactaga

SEQ ID NO: 168175 - DNA, 201 bp, Homo sapiens
catgtctagtgatcaaatcagggtaattagcatatctatcacctcagaagctcacaatttgttttgttgggaacattcaaaatcctgtcttatatatattkgaaaatatatacaatttttgactgcagtcatcctacattgctgtcgaacactagaactcattcctttcatctagctgtaattttgtgtcctttaacaaat

SEQ ID NO: 168176 - DNA, 201 bp, Homo sapiens
tcagaagctcacaatttgttttgttgggaacattcaaaatcctgtcttatatatatttgaaaatatatacaatttttgactgcagtcatcctacattgctrtcgaacactagaactcattcctttcatctagctgtaattttgtgtcctttaacaaatccccccatgcaccctccccgctactcttctcaccctctagtag

SEQ ID NO: 168177 - DNA, 201 bp, Homo sapiens
cgaacactagaactcattcctttcatctagctgtaattttgtgtcctttaacaaatccccccatgcaccctccccgctactcttctcaccctctagtagcyactgttctattctacttctaagagatcaatgtttgtagcttccgtatgtgaatgagcacaagcagtatttatctttctattcctggagaagagcaggctt

SEQ ID NO: 168178 - DNA, 201 bp, Homo sapiens
cgtggaaagaggcccaagaggtccacttacaggcagtggtagggccaggtcagaagtctaatcttcagcctccttgctttgtactcccgacctcaaacccraccactctcttctcccaaccataatgcatcttagtgagttacagtacaacacaagatctagaaatatctgactattaaaaaattatctgctgatcataaa

SEQ ID NO: 168179 - DNA, 201 bp, Homo sapiens
taacaaatccccccatgcaccctccccgctactcttctcaccctctagtagccactgttctattctacttctaagagatcaatgtttgtagcttccgtatrtgaatgagcacaagcagtatttatctttctattcctggagaagagcaggctttttcctgaatacattgctgtccaatattactataaaacataatacaca

SEQ ID NO: 168180 - DNA, 201 bp, Homo sapiens
acatttggagtccataggtcctggaatctgtatttttaagaagttcccccacatgattctgatgttgcagccaaggaaggtgatccctggataactctctrtaactccttcaagtggttggaagaggagaaaagccctctagggaagggaaggtgctagtgagaggacactttcagctaaatagagacgttgcaggagacc

SEQ ID NO: 168181 - DNA, 201 bp, Homo sapiens
tcattagcatcttaagataaagatagaattttgaagttccatcatttataaccaatcaaatgcaaaattataagacagtgatattcttgatttgaaagctstaaactctgatgtctgctgctctgctcttcactagtaagttccctggcactagagcaatgttataggatggtgacctagtttagctctaccgtatttctc

SEQ ID NO: 168182 - DNA, 201 bp, Homo sapiens
aaggtattctcaagttgggctgcacaatgaaatcacagggggagcctcaaaggacgctgctgcctgggcttcctgtctccagagaatctgacttaattggyctggggtgtggtcagaacattggactttttttttttttttgaaagctcctcatttgattctaatgtacagccaaggtgaacacagatagaaagcaagctg

SEQ ID NO: 168183 - DNA, 201 bp, Homo sapiens
gcagagaagtcttcagtcaagtctcaagataatttttttaagtgatgtcaatgacataaaacaaagaggaaaggtctgtgtcgttgcttaacgatttcacrtttttgccttccaggagacagagctactggatctcagccttgtcaaagatgccagatgtgggagacacgccaaagctcccaaggtaggaggttgagtgtt

SEQ ID NO: 168184 - DNA, 201 bp, Homo sapiens
ttttgttttctaaaatcagaaagcagaaatgaaataattataactatatcttaattcagagtttaaaggagaaatctccatttactggtttccccattacyacttaattggctaatctagtttttcatttaccctgatgtagacacaaatagaatctgcaatataatcaggcaccaaccatgggattaattagctaactaa

SEQ ID NO: 168185 - DNA, 201 bp, Homo sapiens
gtgtttggcctgtggtttcaaatgttatagacagacctgaggcaatgataactgagacaagccactgggcctaaaagtatatagaaatgggtaatcttagrgatggtggagtccattgagtaaatgggtggctggggggaagacatcagaccccgagaagcagaagctaaggcctggggaggaatggaagactatggactt

SEQ ID NO: 168186 - DNA, 201 bp, Homo sapiens
agacctgaggcaatgataactgagacaagccactgggcctaaaagtatatagaaatgggtaatcttagggatggtggagtccattgagtaaatgggtggckggggggaagacatcagaccccgagaagcagaagctaaggcctggggaggaatggaagactatggacttaagagtgtagcatcattggtcgaaagactttt

SEQ ID NO: 168187 - DNA, 201 bp, Homo sapiens
aaggaggtataggattttgtaacaagtaattaaggaaaccaccataaaagtttaagtttatactatatgatagttttcattatccaatgctgcattttttrtaatagacattgaataggagggaactatccttactaagtggtaggcatttttccccatgattatttgttcactgaatttggaagtgatggaattccaatg

SEQ ID NO: 168188 - DNA, 201 bp, Homo sapiens
ctctaggattatgtatggagggagcatgccgtgccacaggggcccacatagggaagcaccaggatcatcaggagacagagggagcaaggggaaaaatgtgrgcaaggtcttttattgttgtttccacaggaacaaataggcaaggtaatgtaaggcaggcttaggattggcttgtttgaataatttcagcaggctctgggg

SEQ ID NO: 168189 - DNA, 201 bp, Homo sapiens
tatttttgttaaatatgcttcaggttttccccatcaatatcaaaaattaagattggacttggaataaaagttctattttatattttaaatcttacaaatgraaataaataaacagcatggattcaataactatactgcgagtcaagactactcttattacactgaatgttttaccatattggaagacagtaagaatgttgg

SEQ ID NO: 168190 - DNA, 201 bp, Homo sapiens
ggcaatggcaggaaatggaaccagctgttcaaaagcatactttgtttgtaacttaaatgtttatacatccaatcttcttataaagtttgaatttttttaarataactatactagacttaatgttgtggtaggtttgtgactgtccttgattttagtcctcaaatatctatagcagcagcagtttgtatctgaaattattac

SEQ ID NO: 168191 - DNA, 201 bp, Homo sapiens
tggtggagtccattgagtaaatgggtggctggggggaagacatcagaccccgagaagcagaagctaaggcctggggaggaatggaagactatggacttaasagtgtagcatcattggtcgaaagacttttatttatatttagggagactagagcatgtctttaggtagagcaaaaggaagcaggagagaggggaacactga

SEQ ID NO: 168192 - DNA, 201 bp, Homo sapiens
taaccttcctatatagtaaggacagaaatgatgatttaagccatcttaggcaaggcagtgctaacaatatgcttttgtaaagtcaccatccggtgtaaggmataggcaccagcttagtgatgtttgcaaataagccagtggtgggtgtggataaattagagagagtaccaaatgcagtttgaaaagtgttaagttttgtct

SEQ ID NO: 168193 - DNA, 201 bp, Homo sapiens
aaaaaaaagtaaagtcagttcatgtagctgtgagataaatcttgagaaaaagagtattgaatagggtactgagtttattggttaacacttaggaaagataygatgcttgataggagatcctttttattaaacacaaagaatagcattttattctatgccttagaattttgtgatagaattggcaacaattcagttcacaaa

SEQ ID NO: 168194 - DNA, 201 bp, Homo sapiens
agcatttttttgcattttgctttttatacttagtgatgtatcttagagatttttgcatatcagtatgcctagagctacttcactatttttatttgatgcamaatatttcatcacatggatgcgccatcatttttttcactttctccttaaatggatatttggcttgttttaattttttttctgttaccaatgatgctggaa

SEQ ID NO: 168195 - DNA, 201 bp, Homo sapiens
acattcttactgtcctccaatatggtaaaatatttagcgtaagagtagtcttggctcacagtatagttgttgaatccatgctgtttttcagtcattggctrctctgttcattacattctatacaattttgtatactgatgtcttggggttttaattgaattttaatgaaaaaatggcccggattagcagtaatatggccag

SEQ ID NO: 168196 - DNA, 201 bp, Homo sapiens
attgtctggttgtgcatggctttgagggaggcacaatataaagaaaagttcatataagaaatgtgcacatttaacatcaatgcataacaaacaccccaaakcatagtggcttcagctaaaaactgtctatcattgcatttgggacagctgggagtgcttatctagatttggctcagctgggcaggttagttaaggtggctc

SEQ ID NO: 168197 - DNA, 201 bp, Homo sapiens
cattgccaacttatccttcaagatgatagtatagcagccttttaattttagaaattaagaaggttaagaaggtaaggcacagagattttatagcttgccaratagcataacaatttaggaactagaaatcaaatatcctatttcctttatagatttctagtgtctacatcaaattttttccaaatttataaaagaagaaaa

SEQ ID NO: 168198 - DNA, 201 bp, Homo sapiens
ggtaatttatgaagaaaagaggtttaattggctcacagttccacaggctgtacaggaagcatggtggcatctgctcctggggagtcctcagagagctttttactcacgggaagacagagtgggagcaggtgtcttacatggcaggaggagaactaagagagagtggggaggtgtcacacacttttaaacaaccagatctca

SEQ ID NO: 168199 - DNA, 201 bp, Homo sapiens
gcaatgattagtatttgaaccacaaggaacaggagaagtgaggggtcaatgtggtcagacttactaaggagtacttaaaggccactgcaaaaccaggcacytgatcctctaattgagaggggaagtttgcaagggaaaggtgtttgatatatggcaagttgaaagggtggagaggctgagcgccagaggtgagctgaaagg

SEQ ID NO: 168200 - DNA, 201 bp, Homo sapiens
acatgcatcagatagctatttttgtgcaaaagccatcccaaaatgtagtgatttgaaattacaactacatatttaggctctgattatgtgatcatctggtmagggcttagcagcagggttcttctgttgcatctgggctcattcaagcatctatgataagctgctgagtcagctaggttgctttgctctgaagattgactt

SEQ ID NO: 168201 - DNA, 201 bp, Homo sapiens
ctttcacttcctctctttcttggggctgaccagctgataaactagtcctctgtcctagattgtgttccccagaaacagaccttgaaatgaggattatgtgyaggggatttattagggaagcatctcaggagagactggcagaggagcaggccaaggaagggaaagaagacacatctgggttccatttcaggtgaagttcca

SEQ ID NO: 168202 - DNA, 201 bp, Homo sapiens
ttggaagtgaaaaatctacctcttatcttgggtatatatgctgcctatatatatgcatatagtaagatgtttaagtttttaaaattaactgcattgttgartatttgaaatacacatctgttatttgttattgaactttaaaatgatatatgaggatttaggtaaatactgtctgtctaaaattaattttggaaagtaact

SEQ ID NO: 168203 - DNA, 201 bp, Homo sapiens
ctgtcccttactcacccctgctgtatatagagcactgagtgtagaatttcgctagccagaccacttactatttgacagagatgtgtatgtagggaacagcmttaagctatgccatgacttcctgtcatggctataattagcatcagttcaataggcttgagttaaaatggtttctgtggtgccattatagctttgttttgc

SEQ ID NO: 168204 - DNA, 201 bp, Homo sapiens
tttaacctctttttctaaatgccctctgctgaagtgggatagttatttaggggtaaggaaatgatggtgggaaaaaatgtgggagacatttttctctccamgtgcctgaaatcttgacattgttctctcgatcgatggaaataatcaaaaaggagaaggccatagccctggttaattaaccagctcactatttaagagcac

SEQ ID NO: 168205 - DNA, 201 bp, Homo sapiens
cttatgagccatacagaatcgcaggcccctccagatctactgaagtacagcttgaaaagatccccaagcaattccaacgcatgttcaattttgagagatgytgctaactgggaggcaaagctgtagagttgccgcagcaacttaattgtaaggtattaaaagtctcctttcctatctaatcgtttggatgtctgccaggta

SEQ ID NO: 168206 - DNA, 201 bp, Homo sapiens
gttaactatagtcacctccttgtctatcaaacaccaggtcttaacgtcttctatctaagtgaagagtgggcatctttctcttcatcctgatcctaatatargtttcactgttgtgatatcatcaagtcagatattggctgtgactttgagtcagatattctttaacatactaaaggacacgggtcctatttgactaatgtt

SEQ ID NO: 168207 - DNA, 201 bp, Homo sapiens
tcactttgtatcttttccattaataaatttgtctgccttcctggatgcaataactcactgtttttactgtattttataatatggattaatacctggaagtkgtgattctcctttactactattaattttcaattccttttttgccattgccagtggaattcttatttcaaataaacttaatttaactgtattatgttttcc

SEQ ID NO: 168208 - DNA, 201 bp, Homo sapiens
aaaagtaagttttccctggagaaaaacccctcttgcagcatataatgattatattttaaatacggagtaatgggaccaaagaatgttacccttaatagagmgatttatgcttttgaagtcttaaatatatgtacattttgactgccttgttactttacacatataataaatatgcatgtattgtaatatataaaaataacc

SEQ ID NO: 168209 - DNA, 201 bp, Homo sapiens
gggaggagggagaggatcaggaaaaataactaatggatgccaggcttaatacccgggtgacaaaataatctgcacaacaaaccccagtgacataagtttayttatataaaaaaaaaaacctgcacgtgtagccctgaatttaaaataaatgttaaaaaaaattactaaccttagacaacacctatggacaccctgcaatgg

SEQ ID NO: 168210 - DNA, 201 bp, Homo sapiens
tgcgaattgttgggtcccatgaagtattttatagaaagctctgccaaacaattttttaattatttaattaaaagaatcccctctctgattttttttttttwaaaaaaaaaggtaataagaacttgggacaaaaatttcattataaaaatgcttaagtggcaataccctaaaagaatgtgtctctaatattgtagtaagata

SEQ ID NO: 168211 - DNA, 201 bp, Homo sapiens
ctgcgaattgttgggtcccatgaagtattttatagaaagctctgccaaacaattttttaattatttaattaaaagaatcccctctctgatttttttttttwaaaaaaaaaaggtaataagaacttgggacaaaaatttcattataaaaatgcttaagtggcaataccctaaaagaatgtgtctctaatattgtagtaagat

SEQ ID NO: 168212 - DNA, 201 bp, Homo sapiens
ctaatgtgggagaattgcttggacctgggaggtggaggctgcagtgagccgagatcatgccactgcactccagactgtgtgacagcgcaagactctatatygaaaaaaaaaaaaagctttagtatcaaacccagcttcttaatttttttcagtggaaaggatggtccaaataacctaatcagccattaccagaaatagaaa

SEQ ID NO: 168213 - DNA, 201 bp, Homo sapiens
aactttttcaagaactttaactaggaaatggaacagagaaatggtgctgtgtttgccgaaggatggggtatcaagggaatgatgtcaatatgtttggcagyaattattttcaatgctgcatactattccattctctgaacctattgtaaactatatattcatgagtgtttagtatatacacatacctctgttttgcaaagc

SEQ ID NO: 168214 - DNA, 201 bp, Homo sapiens
cagagatgtgtatgtagggaacagcattaagctatgccatgacttcctgtcatggctataattagcatcagttcaataggcttgagttaaaatggtttctrtggtgccattatagctttgttttgccttacttatatctaggtgaccacatgttcaggtttttctgggacagtccctttttatgcctgttttctcagtaga

SEQ ID NO: 168215 - DNA, 201 bp, Homo sapiens
gcagtatcagatccttcagcaagaaagctgttttatcatttactaagtacctaggcacagcatcaccttgcccattaaaagccctgtcaggtacacatttkggttgctaggcagctgctggggaagcaatctcttccacacatatggtttatgccacctggcctgcatttcacaccaacctccccaaacttcccagggagt

SEQ ID NO: 168216 - DNA, 201 bp, Homo sapiens
taggcaagtactttatcatcaaaacattttccgatgaccatgattcacagcagatgtaaactaactccagtgtttttcaaactagtggtcttgacccacgrgtaggttatgacatcagtttattggttggacatcagcattttacaaaaatgaacagtgcaatagaacataacagaatatactagaaaatagtaatatcag

SEQ ID NO: 168217 - DNA, 201 bp, Homo sapiens
acagtttaatttcttctatggggtgtaaatatttaataaattgtcgatattcaaaagaccaatacatattttaaaatattctgggggttatttttacatayatcatcatgatccccataatgacgtttcaatcagcgacgaaccacatatatgatggtggtcttataagattataatatcaaatttttcctgtacctttta

SEQ ID NO: 168218 - DNA, 201 bp, Homo sapiens
taacatgctgtatagtttgtagccaaggagcaatgggctataccatatagcctgggtgtgtagtaggctacaccatctaggtttgtgtaaatacactctgygatgtttgcacaatgaagtcaactaaggacacatttctcagaaattatccccctcattaagtgatgcatgactgtatttcctgtaatagagactgtatct

SEQ ID NO: 168219 - DNA, 201 bp, Homo sapiens
atctgttaactattgctatataacaaccatcccaaacatagtaacttcaacaacaaccatttacttagtgccaattctatgagttagcagtttaagctggyctatcctgagtggttcttcctggcttccttgtgtgtatggtcagccattctgctaagccactctggttctgagagtcttttggctgtttgcctggggcac

SEQ ID NO: 168220 - DNA, 201 bp, Homo sapiens
ctattgctatataacaaccatcccaaacatagtaacttcaacaacaaccatttacttagtgccaattctatgagttagcagtttaagctggtctatcctgrgtggttcttcctggcttccttgtgtgtatggtcagccattctgctaagccactctggttctgagagtcttttggctgtttgcctggggcacttcagttct

SEQ ID NO: 168221 - DNA, 201 bp, Homo sapiens
cttccttgtgtgtatggtcagccattctgctaagccactctggttctgagagtcttttggctgtttgcctggggcacttcagttctcctctaccctggtcstctctaatcctcaacagactaactagcccaggcctgttcaaagggcaaagacagggctccaagacaatggaagaattgaaggcatgttgaggcctaaact

SEQ ID NO: 168222 - DNA, 201 bp, Homo sapiens
atgtgttacctgtgtgttctacattatttaatctttttacgcctcccagtagaacagggataataatggttcctacgtcacagggtgattgtgagaattcmgaaagtcagtatgtgtggaatacacaggccagtgatcaatgcctggtaggcaataaatgttaactctcactgtcaacactacagttggtttctattccaa

SEQ ID NO: 168223 - DNA, 201 bp, Homo sapiens
aaagggataaagatacatgtgctgcagtgcgtttatagaggcaggtgatggtcaagtattctttgatggtcaagtactccttctgtctaacagcctcaaasaagctccttttctttatatatatatataaaatatatatatttttaattatactttaagttctagggtacatgtgcacaacgtgcaggtttgttacatacg

SEQ ID NO: 168224 - DNA, 201 bp, Homo sapiens
gtttctagtttttggtaattacaacaaaagccatttaattatgttcttacttgttttggaaaaaatccaataaaatggtaaaataatcactttgtgtgtayaggagtagggtgtggcagggaagtctgaatccaaaggtgttactctaagtctctgctggctgggcatggtgggtagtgcctctaattagagcactttggg

SEQ ID NO: 168225 - DNA, 201 bp, Homo sapiens
cttacttgttttggaaaaaatccaataaaatggtaaaataatcactttgtgtgtataggagtagggtgtggcagggaagtctgaatccaaaggtgttactstaagtctctgctggctgggcatggtgggtagtgcctctaattagagcactttgggaggctgaggtaggcggatcacttgatgtcaagacttagagaccag

SEQ ID NO: 168226 - DNA, 201 bp, Homo sapiens
gtcattcactcatgtattcatttggccacagactatgtattgcacagctattaatattatgtggcaggccatatcaaggcatggagaatacagtggtaaasagaacagatcaaacctctgcccttatgttggtgataaatgctctagcaccttggtaatcaaaatacctccgtattagcagtttatcggaaatgcagaatc

SEQ ID NO: 168227 - DNA, 201 bp, Homo sapiens
ctctagggaattattgtttctcacacacttcatataagaatatatttcaagccagaaaggaccttagaggtggtgctcagtgtccttcgttcagatcaggraaggaaactgaagccgagggacgttaattgaattgcctctgttgtggctgcaaagtcagccagtgaaaacaaaaattctctaggaagccagctttgtttc

SEQ ID NO: 168228 - DNA, 201 bp, Homo sapiens
caaataagtgatctatgaataagcgcacactgatgtgagaacttgatttatgagagagatggcactggagacatgtggagaaactcaggcttttcaataarcattgaaagaactattattattgatatggaaaaaaactaaattggattcctacctcacctcacacacaaaaatcctatctatgtggtttcaagaattaaa

SEQ ID NO: 168229 - DNA, 201 bp, Homo sapiens
gacactaaagaatgacctgattggctatttgaaatgactgcgaattgttgggtcccatgaagtattttatagaaagctctgccaaacaattttttaattayttaattaaaagaatcccctctctgattttttttttttaaaaaaaaaaggtaataagaacttgggacaaaaatttcattataaaaatgcttaagtggcaat

SEQ ID NO: 168230 - DNA, 201 bp, Homo sapiens
ccatccatttatccatccatccatccattctttcatccacctatccacctatggtatgtacttgcatgtgtgtgtgtgtgtgtgtgtgtgtgtgtgtgtgtaaacatatttaaaaggcaggtttactcattgcttttggtacagttctctaaactaaagaagcttatgttggtacttttattgtccatgaaattatattat

SEQ ID NO: 168231 - DNA, 201 bp, Homo sapiens
caacatccctccaaagatttacaggagaaaaatcaggtttctgctttttacagtaaagaaagacaaattctttctttcccacagacactaaagaatgaccygattggctatttgaaatgactgcgaattgttgggtcccatgaagtattttatagaaagctctgccaaacaattttttaattatttaattaaaagaatccc

SEQ ID NO: 168232 - DNA, 201 bp, Homo sapiens
ataatttctgtactcagtaaaaatgttctctttgaagtttggaagtgagtatcattaacaggcctttcattcacacctatttcctaacacaactctatccsttgaatgatagcaagcaaaccttgtcttcctttgcatgtgggtgcttgtgttttttaccatctgcctttcccactaccagttctctgcctcttattaaca

SEQ ID NO: 168233 - DNA, 201 bp, Homo sapiens
tcagagtgaccatatgactttaagcttcataatgggaaatattaactatagaactgagcactggatgcattgtcattgatgatatgctgaagagttctggrcatttcaattttttcatgttttaaagaactttttaaaatctgtgacatggcaaaattacttaaattatcttttgaagctcctagaggatgcctaatatca

SEQ ID NO: 168234 - DNA, 201 bp, Homo sapiens
agtaaaaaaaaaaacagcccatgatccaggcttaaacattcatggaaaagggaatgaaaataagaataagaatcacattttatgatcaatttgaattttcrtcaagaaggattttcatcgctgttacttattcttagtacagtcacagtcctgctaaaatgtattatcattgcagcatgtagagataactattggaaatca

SEQ ID NO: 168235 - DNA, 201 bp, Homo sapiens
gaggactttgcaaatcctttgaatctctccttagcctctccctgcagttccaagaaagcagtgactttggggtttcatattcaaatgccagagaactcacyttccacccaaagcacacacttggttttttaaaaagaaaaaaatgaatacaaaatagtgacttttcctgtggaccatttcaatatgatttgaaccgtcaat

SEQ ID NO: 168236 - DNA, 201 bp, Homo sapiens
cactccaggtgtttgatcaaagataattcggggctcccaatttccaacagtcaggaaaaatgtcatctactttggcacatgctgacttaccttaatcaatygcagtggttttcaagcttgaacacacaccagaatcaagagggcttgttatgatgcagactcctggactccactgtcccggagtctctgattcagaatctg

SEQ ID NO: 168237 - DNA, 201 bp, Homo sapiens
taactaaaacatgacagagatgggattccaatccagttagtgtggcttcaaaatgcacacttttaaccaacacatctcctacgcctaaacagaagcatcasgagccttcaaaacatcaaattcagacaacgagagcatccaccaggcaatggccagcaaatgtttgcctctgtggcttgtaacccttaaacacaagatgtg

SEQ ID NO: 168238 - DNA, 201 bp, Homo sapiens
ttgggggtggtgattagattatgggggcagttcccccatgctgttctcgtgatagtgagtgacttctcacaagatctgatggttttaataagggggctcaytctcattctcgctcctgctgcactgtgaagagggaccttccaccatgattgtaagtttcctgaggcctccccagccatacagaaatgtgagtcaattaaa

SEQ ID NO: 168239 - DNA, 201 bp, Homo sapiens
taagtcattctctatcagaataggagctattgagaatttctgcagaactaggattgtgtcttctctacctatgaaatgagtggtgtcatgacaaagcactytagggagccctgccaacctatttgataatgttgatggacaagattgtatggggagtggggagaaaaaacaccttttatattcttccctgatgtatgtata

SEQ ID NO: 168240 - DNA, 201 bp, Homo sapiens
tctcatctagaaagcagggtgggacttctcttttttttacttttctgacgtggtgaagcgtctatcagaacatctttcctctcattggcagctcactacgsagcttgcaaaggttcacaggtggctgaaacccaacccagttgtaaatcacaacatgggtacatcttgcatattttagaagacagaaaagaaaataccttg

SEQ ID NO: 168241 - DNA, 201 bp, Homo sapiens
gtagctaggaccacaggttatgccacacctggctaatctttaaaaaatgttttgtagaaatggagtctccctatgttgcccacccttgtcttgagctcctrggcttaagtgatcctcctgccttgggctactaaagtgttgggattacaggtatgagccactgtgcccagctgataaggtactcttttatgtcagacatat

SEQ ID NO: 168242 - DNA, 201 bp, Homo sapiens
aatgaccagggctgttatttgctctaggggattaatattctgtacattcagttaatcttgcttgtgattaatcagcaaatagtcaagacaattaaaatatwcacatatcttatgaaataaagagatatttgcaaatatcaacaaaaaaggacattatgtaaaaaattcacttattagaagcatgtcagtaggccacaaatt

SEQ ID NO: 168243 - DNA, 201 bp, Homo sapiens
tgtgcatttaagacttcaccttttccaattctcctttcgtttgagaaccatgtggattcgtaagtattcaacacattcaggaatgagtctttttcccgaayagggcatactgagtaattgtttatcagatttaagattatttgacatgattaatggtgttcttcaatcatgttgtatattaactggcatgttttcatttgt

SEQ ID NO: 168244 - DNA, 201 bp, Homo sapiens
cacctggaagaagcttgaagcaactgtcatggcattttaatgtattttaactttttgacccaatcacaagcctgggcctttgattttttttttttttttttctactgcctgtaacactagaaagagggacacagggaatgccatgtcagaacaaagtcacaacatggctatgaattctgttcatgtcctctcaacagtgat

SEQ ID NO: 168245 - DNA, 201 bp, Homo sapiens
gaatacataaagtgatgaatgattgcctgggactaggtgtgtggggtggggtgcaggaatgaggagtgactgctagtgggtacatggtttctttttgaggygataaaaatgttctaacttatattgggatggtgctcgcatgactctctgaatatactaaaaaccattgaactgtacactttcaatgggcagattatatct

SEQ ID NO: 168246 - DNA, 201 bp, Homo sapiens
gaactttgaaaccatgctaagtgaaaggtggtcggcacaaacaaccatatattgtatggttacatttatatgaaataattagaataggcaaatctatgaakacataaagtgatgaatgattgcctgggactaggtgtgtggggtggggtgcaggaatgaggagtgactgctagtgggtacatggtttctttttgaggcgat

SEQ ID NO: 168247 - DNA, 201 bp, Homo sapiens
tagatgaaacagagacttgggggcatatatttcccaatttttcaaaatccatttttatcgcatattcaatttggcctgcttaccttatttacattacctgyctgggatgaaagacatttgaggttgtcattctggactcttaagtaagttcttcctttaaagtaaagaagctgaccttccaagctaatttatcccacttaa

SEQ ID NO: 168248 - DNA, 201 bp, Homo sapiens
aatagctggaaacatacagaaagggaactctgggaaatatagtttggctgagacagttggcacaataagaagcatcacactgttaagtaaaaatcagaaaatgttttatttcaaaaatactctgtgtctcttgaaaaattagattctaagattataatagaaacatgcaaagaatttctaaagctaagaagaagctgtccc

SEQ ID NO: 168249 - DNA, 201 bp, Homo sapiens
gactctactcagcagcagcacatgtcattttcatacacaggcccttggccaaaataaaaccacggccaagcctatggtcaacagggtgtgtagacagaatyctcccaaaggaagggggaagcaaatacgtgggaatggtgataaaatctaccacagcagtcactgcagtggtttttgtatcaggatgatagcagtggaggt

SEQ ID NO: 168250 - DNA, 201 bp, Homo sapiens
aaaggaaaattacaagtaggcttggtgactagagtaacctgcagaagctgagcctctttgtcacagagttgaacatacacacatacacacacacacacacmcccctggcccaggagtcagacaattaaaggaagacccaatgggcaggggaagtgattgcaggctcagctgctgcttcccatcaaccagacacataaatca

SEQ ID NO: 168251 - DNA, 201 bp, Homo sapiens
acattgtttagaaggttcattaatattgtttcagataactctagatttgttggctttctttatcatgatgatagtattaattattactgttaattattatrtaagattccattctgtgatgctatcttttggaatgttgacgtctatcagtcaaagacccctaggaacatacctatggtcaagttgggtttgtttgctcat

SEQ ID NO: 168252 - DNA, 201 bp, Homo sapiens
aaaaactctaaactatcatgaaagcaaatatggcttctgtcattttttttctttccttctaagattccatatatatatttgcatataaaataaaatgaacmtttttactccatctcctctgtcaatgaattgtttttagtattttccatccttcgtctttctttactgctctgtgggcaattttttttcctacactttttg

SEQ ID NO: 168253 - DNA, 201 bp, Homo sapiens
tataaagtatgcatccatgtaactaccatctaaatcgagaaatagaaacttggggagtacctgaaacacttccatgtatccattcccatcagaatgtcccrtttaccctcagaggtgactaccatcctgactattacagtggtccctactttgcgcttctttagagcacaaagtacaaatttatatgcagccctaaatgat

SEQ ID NO: 168254 - DNA, 201 bp, Homo sapiens
attgctatttttgatcttctggttttttctatccctggatgccttgggtaatctgagacaaagctcaagggaatgtaaccagccacccaaaatgaatgcastcaagtgagaagttgcagagctgtgacttggggcagtattatgaattactctgagaaggagcttcagctcccaagttcaatcatggacttggaatgtatt

SEQ ID NO: 168255 - DNA, 201 bp, Homo sapiens
agtaaaaactgtatttatagaaacattatttcatataaagagtggtggaaaaaagaaagttttcctatttaaatgagtttaagaaatgctaggtgcaaagraaggttagcacctaccgtaatgtgttttgaatataaaataaaaggatcagagtctcacagtcatcaactcttcatcctccttgtcaccacccaacttatt

SEQ ID NO: 168256 - DNA, 201 bp, Homo sapiens
ataccaaggtttgcattagataaatctgtaaccactcaactgggttcttcttgcctgctgcctagaaaaagccaatacactgagaacagcaggtgttacarcagagaaagtttacttattgcaaggcagtggagcagaaggatgggacatatttctcaaatcagtctctctgataatccagaagctaggatttttcaagga

SEQ ID NO: 168257 - DNA, 201 bp, Homo sapiens
tttcaaatattcaattacattcaaaattttgctaaaacatttgttcatgcacatcttgccatagtgaagtccagcccaggaatttctgcctttgcatatgwaatgggatataaccagagactgacaaagaacattcaggataaagagaactattaacttgacacgtattttgtaggagatgctgtgggaaaataggcacat

SEQ ID NO: 168258 - DNA, 201 bp, Homo sapiens
gcctattacatgtggtgcttctatgaacacttgtactgggggaaaaaaaatgccagggttaagggtaactgcctctaaattgcaacttcagttcaagcaargaaaagagaacatttccctagaaagattctcttacttttgtgtgagtctcctaaatgatgacactcagaataagacgctttcttctccttccacagtccc

SEQ ID NO: 168259 - DNA, 201 bp, Homo sapiens
aagaataaatgaccagggctgttatttgctctaggggattaatattctgtacattcagttaatcttgcttgtgattaatcagcaaatagtcaagacaattraaatatacacatatcttatgaaataaagagatatttgcaaatatcaacaaaaaaggacattatgtaaaaaattcacttattagaagcatgtcagtaggcc

SEQ ID NO: 168260 - DNA, 201 bp, Homo sapiens
agactgcctttccctggtgctggctgtgaccaattattattttagagagacagttaacagccacctgcccagggtcacctgactttcttggtggggtgtgsggggagccctttcctgccccgctcatgcctgactagctacctactgtaacaccatgtgtaacaccatgaacacaaaatgaatatttctgacaatcagcta

SEQ ID NO: 168261 - DNA, 201 bp, Homo sapiens
gataactaaaaggagacaagggtgggtgtgactggcaccaacttgagagattgtttaggtgacacagtgtccatcacactattgtttttataagccccacwgtcttaacatctttaccaagcttctctgtcttctgccaataaggctgtattttatcatttttattttcactaacttatgttgagtttataattgcttttg

SEQ ID NO: 168262 - DNA, 201 bp, Homo sapiens
gtccaccaatgagcattaacctgagagaaattatctgctaggtcaggtacaatatatccatagctgaaggtcccccagttcaacctataagagaacaacartctgttgttttcttaaaacaggctcacttgcttttcttccttccctatcttccttggaaacacatgtgttactgaattaaaattgaggtgaattgatgat

SEQ ID NO: 168263 - DNA, 201 bp, Homo sapiens
tttttaggctatcatctgtgtcctcttgacatgacctattaatctttgaaagtgttctggcacatagagatcttccagactcaccttattcctttctgctycagagatggaaacagactattctccagtgagccctggttctttttgatgggaaagaaaaagtatgagtaacagcaatttggaccctgaacattgcctgga

SEQ ID NO: 168264 - DNA, 201 bp, Homo sapiens
ttgtaaactacatacttaactgaagagaatgttaaattttgtgtagaggttaaaattaaaactgtaaccattctttctcatccaagttcaaggaggttcayggaatatcactttaacagtctagatctttgacatgataaaattcaaagaagtataatttttaaaatctgagcacattatagaatcttacatttatcctat

SEQ ID NO: 168265 - DNA, 201 bp, Homo sapiens
aatgtttaaatcagtaaaaattagaattgttaaatgttgtcattttactgataggtttggcagtaggggagaagagaaggaaaacagatacttttatatamcattggtgaaagtcaattgctaggactttaacagaaagaaaattggttatgtgtattaaaatcctcaaaagtatgcgaagtctttgaatcagaaattcta

SEQ ID NO: 168266 - DNA, 201 bp, Homo sapiens
gtttttattttttaaagctaacctgcatattttttgcaaagcccacaaaacaatgtcacttcttgtgttcagcatttctcttgtcctcatgttggcatgayaagttttctgttatatttcatttttcttcctaaaattcagattcatgggttgagggataaaaatgctagaggacatctttaaattacttgcagagattag

SEQ ID NO: 168267 - DNA, 201 bp, Homo sapiens
tctaggattttattgatcgaaatctcatttaaattcctcctattgactctctaacctctgcggaaggttacagaaaaatggcattgtcgtccccgagtgcrttccaagttcttcttaacttcatgtttggtatgttcatagacttctctgaaatatttcagattgcctaagaatgaaaaaaaaatttttcaagatcgtcat

SEQ ID NO: 168268 - DNA, 201 bp, Homo sapiens
gtttttaaaaattgctataaagtatgtgaatacaccacacttcatttacccattccactgttgatggacatttaggttgtttccagcttttgcctattacrtgtggtgcttctatgaacacttgtactgggggaaaaaaaatgccagggttaagggtaactgcctctaaattgcaacttcagttcaagcaaagaaaagaga

SEQ ID NO: 168269 - DNA, 201 bp, Homo sapiens
gtcgggtttttaaaaattgctataaagtatgtgaatacaccacacttcatttacccattccactgttgatggacatttaggttgtttccagcttttgcctrttacatgtggtgcttctatgaacacttgtactgggggaaaaaaaatgccagggttaagggtaactgcctctaaattgcaacttcagttcaagcaaagaaa

SEQ ID NO: 168270 - DNA, 201 bp, Homo sapiens
ctttgcatctggcttctttttttgttgttgtagatagctgtagtcgggtttttaaaaattgctataaagtatgtgaatacaccacacttcatttacccatkccactgttgatggacatttaggttgtttccagcttttgcctattacatgtggtgcttctatgaacacttgtactgggggaaaaaaaatgccagggttaag

SEQ ID NO: 168271 - DNA, 201 bp, Homo sapiens
aaggaaataaatccaatagtatgctcatgacaattagttatataaataaaataaagtaggttattagtccatataagatagcctcaggaaaaaattaaatrcccagataaaaagtatgcagcttgacaaatttttacagaatttatgaaattaccacttgtgtcaagatacagaacattatcaacaccccagaaacttccc

SEQ ID NO: 168272 - DNA, 201 bp, Homo sapiens
cctggaaagtggaagcatctctaaaaacaacttccacagaatgcatgaatttacagatgatatgaaaacatgtgcatattgaattttctgaaaaatggcttatcacaaaatttaaaaaaagtatttatcaaaggaactttgggcacataaggaaataaatccaatagtatgctcatgacaattagttatataaataaaata

SEQ ID NO: 168273 - DNA, 201 bp, Homo sapiens
aacctgggaggcggaggttgtggcaagctgagatcacgcctctgcactccagcctgggcaacagagcaagattccgtctcaaaaaaaaaaaaaaaaaaatatgtatatatatatatatatatatatatatatatatttaaatgacacttttaaaaatggagggaggagagtagttatgatatatcagtttactgtaagaat

SEQ ID NO: 168274 - DNA, 201 bp, Homo sapiens
tgaacctgggaggcggaggttgtggcaagctgagatcacgcctctgcactccagcctgggcaacagagcaagattccgtctcaaaaaaaaaaaaaaaaaaatatgtatatatatatatatatatatatatatatatatttaaatgacacttttaaaaatggagggaggagagtagttatgatatatcagtttactgtaaga

SEQ ID NO: 168275 - DNA, 201 bp, Homo sapiens
atcacttgagcatgggaagtggagactgcagtaagctgggatcatgccactgcactccagcctgggcaacaatgtgagaccctgtctctaaaaaaaaaaaagaaagaaagaaagaaaagaaaagaaattaatttaaaagtaaacaaattaaaaattaaatttattaatgcaatgtacaccttggggcaatgggtagtagca

SEQ ID NO: 168276 - DNA, 201 bp, Homo sapiens
cccggccgccatcccatctaggaagtgaggagcgtctctgcccggccacccatcgtctgagatgtggggagcgcctctgccccgccgccccatctgggatktgaggagcgcctctgcccagccgcgaccccgtctgggaggtgaggagcgtctctgcccggccgccccgtctgagaagtgaggagaccctccgcccggcag

SEQ ID NO: 168277 - DNA, 201 bp, Homo sapiens
tcacacactgccacccccttatgagtagaggtaatcagaatgacaccattatcaatgacagcaataggagtttgccaataaataaaaaacaaatataaaayattaaaaaataggacctttacatgtctcaccaatattaaaatatcttgtttaaaattattatatgtcccagtaacttttaaatattaattcaatagagga

SEQ ID NO: 168278 - DNA, 201 bp, Homo sapiens
ttagaccaacgtggaatgtggaggaaataaaaaggaatccaaatttgcatgtatgtacacacacacacacacacacacacacacacacacacacacatatyataaagaaggaagtgatggcatgtgtttatggattttatgttgcatgtgaaagaaagatgcatggaatcaaagacgatgttaaagttctggcccaagagg

SEQ ID NO: 168279 - DNA, 201 bp, Homo sapiens
cactcgcccaactcctgagatctcatgaggaagctgcgcatcaccagtttcaggtatttcctatctatatagggagactgcctttccctggtgctggctgygaccaattattattttagagagacagttaacagccacctgcccagggtcacctgactttcttggtggggtgtggggggagccctttcctgccccgctcat

SEQ ID NO: 168280 - DNA, 201 bp, Homo sapiens
aagttagtgatcgatgtctatagcagtggtttccaagctggtcctagacatagcaccctttgtttgtttcttctaacaaagtctcgtgagaaaggccaatrtgtagggaaaagctttaaaggtgctgtcttggtggaatagaggggagcctggagtacaggtgatggtggctgttgccctatcactctttctcctcctgac

SEQ ID NO: 168281 - DNA, 201 bp, Homo sapiens
gacttagaccaacgtggaatgtggaggaaataaaaaggaatccaaatttgcatgtatgtacacacacacacacacacacacacacacacacacacacacayattataaagaaggaagtgatggcatgtgtttatggattttatgttgcatgtgaaagaaagatgcatggaatcaaagacgatgttaaagttctggcccaag

SEQ ID NO: 168282 - DNA, 201 bp, Homo sapiens
ttttagagtaggagtgaaagtttattaaaaagctttagagcagaaatgaaaagaaagtaaagtacacttggaagagggtcatgtggacatcttggaggtcmagtgcactgtttgatcccggacttacagtttttacatgctgtcctacttcctgcatcttttgtcccttttccggtggaatgccctccgaaggtcatatac

SEQ ID NO: 168283 - DNA, 201 bp, Homo sapiens
ctttgtcccgctactccagacatccacctaggcactccaacaggacttgcttagaaaaaagttgcaacacagaccatttagaagttagtgatcgatgtctrtagcagtggtttccaagctggtcctagacatagcaccctttgtttgtttcttctaacaaagtctcgtgagaaaggccaatatgtagggaaaagctttaaa

SEQ ID NO: 168284 - DNA, 201 bp, Homo sapiens
tatttaggtgagttgctaatgacttagaccaacgtggaatgtggaggaaataaaaaggaatccaaatttgcatgtatgtacacacacacacacacacacamacacacacacacacacacatattataaagaaggaagtgatggcatgtgtttatggattttatgttgcatgtgaaagaaagatgcatggaatcaaagacga

SEQ ID NO: 168285 - DNA, 201 bp, Homo sapiens
gaagaaagtgccagtcctcttaacaactagatcgagaactgagagagaatccattttaccatattcagtggttcaacacaatcccaagccagcacagattraaggggatgcaagggtagactcctttgctgcatgggggaatatcatacagtgcggcaaaggaagggcttgatggaagcctttgaacacaagctaccacag

SEQ ID NO: 168286 - DNA, 201 bp, Homo sapiens
agccaggctacaattcccagggactgcatgcctcaggagtagttgaagaataaataccttatcttccatgccccttgggttgcaaagttctgatgtgtgtyctctgctttctcccagagttcctcggtgagactgagccctaactgcccacagctgtaacctgcctgatacccttctccttcttagctgcctttccttctt

SEQ ID NO: 168287 - DNA, 201 bp, Homo sapiens
ttacaacactcaacccattaattcaacaaatgaaaaccaagcaaatgagaaattactcctggaggagacaaatatgggttttttttgttttttgttttttkttttttttttttttgcctgctgaaaaaggtaagactttgttgcaaataaaatatgttcccctgaaaggccataattttgactctttttgagaaggaacta

SEQ ID NO: 168288 - DNA, 201 bp, Homo sapiens
aatgtccttacaacactcaacccattaattcaacaaatgaaaaccaagcaaatgagaaattactcctggaggagacaaatatgggttttttttgttttttkttttttgttttttttttttttgcctgctgaaaaaggtaagactttgttgcaaataaaatatgttcccctgaaaggccataattttgactctttttgagaa

SEQ ID NO: 168289 - DNA, 201 bp, Homo sapiens
taaaatggaaggaaagtggagagaatatagcatgacaaagaaaagaaggcctcaccaggcgcagcagctcacatctgtaatcccagcactttgggaggccraggcgggtggatcacgaggtcaggagatcgagaccatcctggctaacatggtgaaaccccgtctctactaaaaatataaaaaattaggtgggcgtggtgg

SEQ ID NO: 168290 - DNA, 201 bp, Homo sapiens
atttattgattttctagattatttcaggtcagtttctttctgataagaaagttgggacttacgtggaagtagatatgtttggtttgcctgtggatacaagraggaaggcatttaagaccaaaacatcccaaggaaatgctgtgaatcctgtctgggaagaagaacctattgtgttcaaaaaggttggtcacatgttcttga

SEQ ID NO: 168291 - DNA, 201 bp, Homo sapiens
tatggcctgtctgttttgtgagtcaaactctgtgtctttgcagatcggaacccagcagccctgatcatggttcatcaacgattgagcaagacctcgctgcyctggatgctgaaatgacccaaaagttaatagacttgaaggacaaacaacagcagcagctgcttaatcttcggcaagaacagtattatagtgaaaaatacc

SEQ ID NO: 168292 - DNA, 201 bp, Homo sapiens
cactgtttttcccaaacggagattattattctcaccactgccatgcctagggcccccagcctctttgcttttctttctgcccctgcctctttctagagcamcatgaattccattcagtctctgggattggagacactctattgctaagcttgtccttggggtctcaccctctaccccaagtggcttatgaaaatatgtatt

SEQ ID NO: 168293 - DNA, 201 bp, Homo sapiens
ctcaaacagttgcagcaagatggtggttgaagctgaagtcatctgaaggctcactgggctagacatcccaggtgatcatcactcaccggccccatatctcmgtgctcctatctgtagcatctcctgacagcagagtagccaggtcttcctacatggccacttggtactacaaaaggcaagaagaaagtgccagtcctctta

SEQ ID NO: 168294 - DNA, 201 bp, Homo sapiens
aaaaagtaagctttgtgagcatttctcattattcattttattttcctcaaagatctgaatccatgccatggctctgttttgtttctccagcagcctaagtrggagtgtggaaatgcgtggtagccctgtcctccctcacacatgtctcatgtcagtgcagctgctttcctcatagacgtctccccggggcttccctttcct

SEQ ID NO: 168295 - DNA, 201 bp, Homo sapiens
taaaattaattgtcttatgaatattaactttgaatgaactgagtatctgtagatcaaatactttgaggttaccaaatggcatctcagttttagaacattcsttccattttgattcatcactgaatagttttctgtttgtggaaattgtgtttttcaattttcctgcgcttctattttcaatttaaaatatctactctaaaa

SEQ ID NO: 168296 - DNA, 201 bp, Homo sapiens
  misc_feature (1)...(201): n = A,T,C or G
aaataaatagataaaaataaggaaaaaagaaaaagaatgttgagagttctgtaaccttttatctagaagtctgagattaccatttgtcaattctggatganttggtataatgatgtattcatcatttgcttttagggagaagacagagatgatccggtcatatatccaggaagtggtgcagtatatcaagagggtatgtgg

SEQ ID NO: 168297 - DNA, 201 bp, Homo sapiens
agagcgaaaccttgtctccaataaataaatagataaaaataaggaaaaaagaaaaagaatgttgagagttctgtaaccttttatctagaagtctgagattmccatttgtcaattctggatgaattggtataatgatgtattcatcatttgcttttagggagaagacagagatgatccggtcatatatccaggaagtggtgc

SEQ ID NO: 168298 - DNA, 201 bp, Homo sapiens
aaagaatgagagtaatgtatacatgtgctacaggagtagagataagaaagagcaatattctcatctttcatggtggtaagtcaaaaatagcaatacatgcrtattattttgagatacagaagtaaataccaaaagcttctgctaaaagatttgaaggtgtttgcttctaagtaaggagacatgaggaagcgtgtttctatt

SEQ ID NO: 168299 - DNA, 201 bp, Homo sapiens
  misc_feature (1)...(201): n = A,T,C or G
tctattaaccatcctagtaaaagtggtgctggatggcagccatagaataattctaaatttagcagataacccttggcttctcgaccatgttgtttttcctnttcttgtctcctgaagtggtatctgcacatcaagagcaaatcacacaggtggcttcttagctccccttggtgactccacacactggagacattcagcccc

SEQ ID NO: 168300 - DNA, 201 bp, Homo sapiens
tttcgctttactaggtagacgttataaaaactaatgatggtgatgattataatctctattctccatccttgaaagttcaaacatgccctaattaaagaaayaggctggcatagtgtcatgatgaagccagtaaacctcaggcaagagacttgacttgtgtgagcttcaggttcttcatctgtaaaatgggatgagaccagc

SEQ ID NO: 168301 - DNA, 201 bp, Homo sapiens
ccacttggctcacttcaacctctgcctcctgggttcaagccattctcctgcctcagcctgccgaatagctgggactacaggcgcatgccaccatgcccagytaatttttgtgtttttagtagagacggggtttcaccatattgaccaggatggtcttgattgtcctggtttctgtgtcattagtgattattggcagggatt

SEQ ID NO: 168302 - DNA, 201 bp, Homo sapiens
ccatatcagattgcattagaatgttgactgcatgttaactggtgatccttcttcctctcaatacttattttaaaatcactctaaacgccctgctcttattrctaattagattatttggccttggtgtatagtgtcttggggtcatcagtatgaaggtcaagtcacgcaaaaagagtggagtctccaatgtggatacaccca

SEQ ID NO: 168303 - DNA, 201 bp, Homo sapiens
ttggcagcttacacttctttggcttcaacaaagctggtgttttgtttggaccccgggagttccttcttgatttctcacctttctgaatgtggtagatacartagctctccccaagggtctgtgctgctatgttctgagatcattcatggagagccaacctaaagcctgctcctccaacccttccagtttttctgtcaagtg

SEQ ID NO: 168304 - DNA, 201 bp, Homo sapiens
tttgaatcatatttttccagcaccatttcgctttactaggtagacgttataaaaactaatgatggtgatgattataatctctattctccatccttgaaagwtcaaacatgccctaattaaagaaacaggctggcatagtgtcatgatgaagccagtaaacctcaggcaagagacttgacttgtgtgagcttcaggttcttc

SEQ ID NO: 168305 - DNA, 201 bp, Homo sapiens
gaatcgcttgaacccaggaggtggaggttgcagtgagccaagatttgccactgcactccagcctgggtgacagagtgagactgtatctcaaaaaaaaaaaataaataaataaagagaataaggcatttgatatagtttctttgcataacaaaatacaaataaaaccacattctatttcatctaaacactttctcccaagtc

SEQ ID NO: 168306 - DNA, 201 bp, Homo sapiens
tttcattggcccccgcatctctctgccacatgatggacagccatatcagattgcattagaatgttgactgcatgttaactggtgatccttcttcctctcawtacttattttaaaatcactctaaacgccctgctcttattactaattagattatttggccttggtgtatagtgtcttggggtcatcagtatgaaggtcaag

SEQ ID NO: 168307 - DNA, 201 bp, Homo sapiens
gggagccgagataaatgatcacttaacagaggaactgtggccggaagagtggggtcaagaaaacattgaacaaagaagggttaattttgaaggaggggaargaataagctagaaatggaagtatctgaaacaaactaggcagcatagaacagtgttcctaaatataaattttgaaaagttttttttttttttttttgagac

SEQ ID NO: 168308 - DNA, 201 bp, Homo sapiens
tgtacacttgactcttactatttacttcattatcacttcaatttcctagtaaattttttgaatcatatttttccagcaccatttcgctttactaggtagamgttataaaaactaatgatggtgatgattataatctctattctccatccttgaaagttcaaacatgccctaattaaagaaacaggctggcatagtgtcatg

SEQ ID NO: 168309 - DNA, 201 bp, Homo sapiens
ggagaatcgcttgaacccaggaggtggaggttgcagtgagccaagatttgccactgcactccagcctgggtgacagagtgagactgtatctcaaaaaaaawaaataaataaataaagagaataaggcatttgatatagtttctttgcataacaaaatacaaataaaaccacattctatttcatctaaacactttctcccaa

SEQ ID NO: 168310 - DNA, 201 bp, Homo sapiens
aagggaagctcttgtttctgattgggggtagtcacacgctgggagttaggaacaccagtgatcgttaggttagtttcctctgtttacaaggcattcctttmggtctgaaatcacttggtggttcagtgcactaggtttttctttaaactttggtgtgtgatttttttgtcattgttgttatatgtatagatgcatgtaaca

SEQ ID NO: 168311 - DNA, 201 bp, Homo sapiens
aattcagctgccaagtataagtgcaattaaaatacttctaaataatggcatcaacttaagaattatggagatttttttcataaagaataagccatttggcygggcacggtggctcatgcctataatcccagcactttgggaggccgaggcggacagatcacttgaggtcaggagtttgagatgagcctggccaacatggtg

SEQ ID NO: 168312 - DNA, 201 bp, Homo sapiens
ccagaaaaggtcagtactttctttcacaccaaagggaagctcttgtttctgattgggggtagtcacacgctgggagttaggaacaccagtgatcgttaggytagtttcctctgtttacaaggcattcctttcggtctgaaatcacttggtggttcagtgcactaggtttttctttaaactttggtgtgtgatttttttgtc

SEQ ID NO: 168313 - DNA, 201 bp, Homo sapiens
gcttgaacccaggaggtggaggttgcagtgagctgagatcacaccactgcacaccagcctgagcaacaaagcaagactccatctcaaaaaaaaaaaaaaaagaaaagatatatgagcaacaattactggggaaacttttcaaacaaagatttcagagagttggtcatgtttcttataaattcttagtggaaatcccagaag

SEQ ID NO: 168314 - DNA, 201 bp, Homo sapiens
aggaattatactctcttgttgaagcctaactgtaacttttaaaaacactcaaacgggttgtttactttaagtaatgacaataaatacatctttaaatgatyacagatatatggagttggatgattaaatcaaaaatttactgtcataataaaaaaacctctgtgttcggtttagagtggtgcacccttatgcacatgatgc

SEQ ID NO: 168315 - DNA, 201 bp, Homo sapiens
ccattctttgatgaacatactttatttggctctcctggacaacattttgataaatataaaatgactttaacacaagaatcaaagggaaaaaaatttcagawttaaagaacaatgacctgaaatccatggaagaggagcacgtgtaacaaatttacttgacatcttgctctgcaagttgcttttgctgtatttgaacttctc

SEQ ID NO: 168316 - DNA, 201 bp, Homo sapiens
aaatttttaaactaagattattttaattttattttaatataatatttttctttttccctcctgaagttatacaagtttcaggcaccactaaacttgatttycctttgactatcattttaaggaaatgaaacttaatgcacatgatggaggaaaaagaatgtgatgagaaattaccaaatagctaactgaagtcatgtaagg

SEQ ID NO: 168317 - DNA, 201 bp, Homo sapiens
atttgtctttagatggtcaatacaattgaaatgggaagtttgaacaatatgttgaggaattatactctcttgttgaagcctaactgtaacttttaaaaacrctcaaacgggttgtttactttaagtaatgacaataaatacatctttaaatgattacagatatatggagttggatgattaaatcaaaaatttactgtcata

SEQ ID NO: 168318 - DNA, 201 bp, Homo sapiens
tgatttctcagtcacattattttttagtaattcttaaaaaaaaaaaaaaaaagccttggccaggtgcggtggctcacgccagcactttgggaggccgaggyaggtggatcacctcaggtcaggagtttgagaccaggctggccaacatggcaaagcccggtctctactaaaaatacaaaaattatctgggcgtggtggcac

SEQ ID NO: 168319 - DNA, 201 bp, Homo sapiens
tgaacaaaaatggcaagacataattattacaattggaatgtgatagtaatatatataatatgtatatcttagtgtgtgtgtatttatatatgtatgtatgyattccttgtgcctaaaacacttcctgctaggaaattaagccagccttctatatttgtactcacaatctatcctccaagatatgtagagttgataaaaatt

SEQ ID NO: 168320 - DNA, 201 bp, Homo sapiens
tagcaggagacaattcttaaacttaaattaaactgaaaaagccacagaaaaaagggtttgacaccctaaagccagtgtccaaatgaacgctacggttgacmtcataggtgtgttatgaatgtttaccctgacctcctagaagaaaaggaaaaagaaaggaaagagagagggagaaggtgagggaaggggggaagaaaagaa

SEQ ID NO: 168321 - DNA, 201 bp, Homo sapiens
atatcagtaagcagtcaagttacaaataaatatgtttactttgattctagttatgtaaaattctgtgtgtgtgtgtgtgtgtgtgtgtgtgtgtgtgtgtttatgtagagaaatgtctacaactgcaccattcaacttggtagacactggcctcatgttgctacttaaatctgaattaatttaatttcaaccaaattaaaa

SEQ ID NO: 168322 - DNA, 201 bp, Homo sapiens
acttgtcaagaaaaacaagtctatatgtggactttattcattagagtctgcttcagtgaattaatatattttaaaataacattttttctgatttttttccraaatttaagtacccatttctcatataattattttttaaatcaagaaatatataacgaagaaaatgcagaccaccgtcccaaaactaataggaatatttag

SEQ ID NO: 168323 - DNA, 201 bp, Homo sapiens
tatatcagtaagcagtcaagttacaaataaatatgtttactttgattctagttatgtaaaattctgtgtgtgtgtgtgtgtgtgtgtgtgtgtgtgtgtgtttatgtagagaaatgtctacaactgcaccattcaacttggtagacactggcctcatgttgctacttaaatctgaattaatttaatttcaaccaaattaaa

SEQ ID NO: 168324 - DNA, 201 bp, Homo sapiens
gtatatcagtaagcagtcaagttacaaataaatatgtttactttgattctagttatgtaaaattctgtgtgtgtgtgtgtgtgtgtgtgtgtgtgtgtgtgtttatgtagagaaatgtctacaactgcaccattcaacttggtagacactggcctcatgttgctacttaaatctgaattaatttaatttcaaccaaattaa

SEQ ID NO: 168325 - DNA, 201 bp, Homo sapiens
tctaacacaatgagttacgtaatttagttcctatgcaccatcaccctcattgttcctttaccttgaccactatttttccattcccttctttccattcaccyctccataatcttcaactaatctctgtgtcaaaatttacctcatggtcagctgctccagaaagcttttctagaaaccatcccatgctgcaaccctgccaca

SEQ ID NO: 168326 - DNA, 201 bp, Homo sapiens
acataaaagtcagaactgagtgggcagaaggtctgtgagttctccagcttagtctcaatattgactggaggccgatgctgctgaggataaaggcagtaggyggaagggaaacagcacatgtgagcagatgctggcataatcaagaaaatattctgaagtcaggtgaatgatagagatgaggacatggaaacaggaatataa

SEQ ID NO: 168327 - DNA, 201 bp, Homo sapiens
tctggggagtctggagggagtgtggcactgacagtggtgtggagcctgacaccaaaccaacataaaagtcagaactgagtgggcagaaggtctgtgagttmtccagcttagtctcaatattgactggaggccgatgctgctgaggataaaggcagtaggcggaagggaaacagcacatgtgagcagatgctggcataatca

SEQ ID NO: 168328 - DNA, 201 bp, Homo sapiens
tcaatttatcaatattttatcttattgcttttggcatttgagtcacagttagtaagtctttattcatgcctagtttataaagaaaattcacctatagcttytttttttttttctagtatgacttcgtgattttccatttagatcttggagcatcttggaggttttttttgtttgtttgtcatgaggtatgaacccaatttt

SEQ ID NO: 168329 - DNA, 201 bp, Homo sapiens
gtcctcattctttttctagaggttgtagagtattatttcattttatagatgtgccataatttatgtacttagtcatttgttaataggcattttattgtttycggttttttgctgcctcaaacaatgctttgatgtgtatatatatgtatatataaaatatcatctttgggcacaatacaggtatattcgaatttcctattg

SEQ ID NO: 168330 - DNA, 201 bp, Homo sapiens
aaactacaggtgtacctcacatcctctctttgtagcataaaaaagagataaattattgatgcccatataaaatcccattgccaatttaatgtgagttgggyggtagtggcatactatttaatattaacaaaatcataatattaattattctgtctcctggaggttcagtagacaaaatttaaataaaaatagtaaatgccg

SEQ ID NO: 168331 - DNA, 201 bp, Homo sapiens
acaagcgtgaagttttattccccagggcctttctgttaactccttaaaaggtttggaacattgagctgggagagttatcatgaatggcaaacaaaccagcmaaaagtaattgagatgtgtctgttcctttgggacagaaaagaaaatcataccaaaagtgaaaattaaatgttgtttactaccattcagtttaccacatac

SEQ ID NO: 168332 - DNA, 201 bp, Homo sapiens
gaggttgtagagtattatttcattttatagatgtgccataatttatgtacttagtcatttgttaataggcattttattgtttccggttttttgctgcctcraacaatgctttgatgtgtatatatatgtatatataaaatatcatctttgggcacaatacaggtatattcgaatttcctattggtgaaattgctaagtcca

SEQ ID NO: 168333 - DNA, 201 bp, Homo sapiens
tccattttcctgatagctaaaaaaaaattagaactaataaaaactgtaattttttataaataaattcacactgtgtatgctttttttctctctgggttggwtcactcaacattatatgcatatattgttgggtgttactgtagattgtccattttctttgctgtgtagagttttattgtatgaatataccaaatgtattta

SEQ ID NO: 168334 - DNA, 201 bp, Homo sapiens
ccttttattattaaattaaatttatataatttatttttattgaatttgatgtgcgtattatgcccagttataagtcctgatgcatgaaccacacttgacaygtgagcctctactcataggcccatgcaacctgcttttttttatttttaagttaatttgtaatttttaattgtaatgggttgaatagcagtccccaaaaag

SEQ ID NO: 168335 - DNA, 201 bp, Homo sapiens
caggtgtgtcctaaatccagtgacaagtgtccttgtaagagacatactaggaagatttgacacagacagaggaggaggaggcaatgtgaagatggaggcakaggttagagcaatgccaaggaatgcctggaaccaccagaggctgaaagaggcagggacctgaatctcccgtagcagcgtgacactgatgacactttaatt

SEQ ID NO: 168336 - DNA, 201 bp, Homo sapiens
attgaagtgtagccttttaaagtatattttaaaattaggctagtcattttgagatggtttcattgcagcttctttggaatcatttttagagtagaaatgcrttagtataatttttatgtcacaatcaccacacttcattatgggcataacaacagcaatgcttgttttaatatattgtaaccagagtttagaaacatgtaa

SEQ ID NO: 168337 - DNA, 201 bp, Homo sapiens
attcttttagtctttgttcacccaatgaaagagtagacttttattgggcttctgttttcaagttctgttgcacagattggggtataaatatagagatcctkcattccatttgtgtaaactattggggtctatacagagaccccaatagcagaagagcatgtggatctgctacctgacaaacagaggcattttcctgcataa

SEQ ID NO: 168338 - DNA, 201 bp, Homo sapiens
aggttattcattcctaaactagaacacctctgagcaagttttctttgcacttgagtaaagcagatggattaatgtttgctagaaagctaccagacattgayagagagccaagtttgcaatggaaaatttgtctaaacctgctagtgttaactggtatgatctccccttgttttgagaccaggcttgttctggaagtgttgc

SEQ ID NO: 168339 - DNA, 201 bp, Homo sapiens
tattgacatgtaacagattctgaagatggtgtctggacattttcatgccatttgttgctagttgagttgaaggaatgctgttggcacctacaacattagcrtctacatcctttgctgtgtcataaaggatagatgtaaaatacaatgaactatgaaggagggaggtaggaagtatgacatcatattctctcagggcataaa

SEQ ID NO: 168340 - DNA, 201 bp, Homo sapiens
gtgactgcccccactagcatggctgtgatgtgcaaagccaggactcacccaggttattcattcctaaactagaacacctctgagcaagttttctttgcacktgagtaaagcagatggattaatgtttgctagaaagctaccagacattgatagagagccaagtttgcaatggaaaatttgtctaaacctgctagtgttaac

SEQ ID NO: 168341 - DNA, 201 bp, Homo sapiens
agcatagaacagtgttcctaaatataaattttgaaaagttttttttttttttttttgagacggcgtctcgctctgtcacccaggctggagtgcagtggtgygatctcagctcactgcaagctctgcctcccgggttcatgccattctcctgcctcagcctcctttagaagttttattctgctcacttaaatatttgattgt

SEQ ID NO: 168342 - DNA, 201 bp, Homo sapiens
atacaagcctcagagtttccccactggaggtgcaagggagctgggatatttatccaccaactttcttgagtcattggttgatggttgtttccaggagacaycaactctcttgcacttccagcctgttaggccttaagcaggctctggccatggaaaaatcacttcaacagaaaagatacaaaggctgatagttagaagtcg

SEQ ID NO: 168343 - DNA, 201 bp, Homo sapiens
accacgaaaattcattactcctaatataatttaattacaaaattgttccttggtttcataagttgcatatatttagctcttcccactactttaggagaaawtaaattggatactttccatgctatgaagctattataatggaatatttgtactttttgatgccaaaaaatggttcgagccattggattggcagaatatgtg

SEQ ID NO: 168344 - DNA, 201 bp, Homo sapiens
tagtcttgccacagcactggcatacggagttgcattttaacgaagaagatcaggaataaacccatgtatttgtttcaaataataaagtttactgtagttgrtgggcacacatgtaatacaaagagaaattaattattttaaatttgaagaattgtataaattttactaaatactatgaataaaatgtataaaataacttct

SEQ ID NO: 168345 - DNA, 201 bp, Homo sapiens
agtatatcagtaagcagtcaagttacaaataaatatgtttactttgattctagttatgtaaaattctgtgtgtgtgtgtgtgtgtgtgtgtgtgtgtgtgtgtttatgtagagaaatgtctacaactgcaccattcaacttggtagacactggcctcatgttgctacttaaatctgaattaatttaatttcaaccaaatta

SEQ ID NO: 168346 - DNA, 201 bp, Homo sapiens
cagcatttgaggtgtggaaacttttaagactgaaaaatcaagtaaaggaaaattcaagcaaatgaatacagaaaaacattatcattaggagccttaataamactgctgtttagcttgtcacgctggcacattcctgtaatcctagcactttgggaggctgaggcgggtggatcacttgaaatcaggggttcaagaccatcc

SEQ ID NO: 168347 - DNA, 201 bp, Homo sapiens
taccactttacccacaaactttctgagaactgaaaatagtttatttgcaccaaattcccttgatttaaggcttattaacttgaaaagagctcagtgacatytggaattgtataatagtcttgccacagcactggcatacggagttgcattttaacgaagaagatcaggaataaacccatgtatttgtttcaaataataaag

SEQ ID NO: 168348 - DNA, 201 bp, Homo sapiens
agccatatcccagcctccttaagatgggcctgtggtcctgggaaatctgctcttctaacctttcctttgtccacagaagccacatcagtagagggtcagtyacagacaaggggcacacagtgaataaggaggcactcacttcttggattaattggcttagtgtgagaaggctcacttttacatcctaagattggaaagtgc

SEQ ID NO: 168349 - DNA, 201 bp, Homo sapiens
aaatgcaggtctagtttcatcattccattaatcacatgctgacatatcagcttcaattatttaaatcaaatatttacagttaacattagttatatgaagtyggtcctcagaaatcactgtatggaacacacttttatagttgacattgtttaacaatgtccttctaaatgttggccaagtaatttgcctgaagagcccttc

SEQ ID NO: 168350 - DNA, 201 bp, Homo sapiens
accagaaacacagtggatgtcctgttgagatttctttttaaaacatgatattactgcacattgttggggataaataaggcacttgaacttgtatcctggcygacgtgatccactagaataacatattcctttagaagatgctactctttagaaatcacagttgctagcctgaagttaccctaattgttaaaaggtagtact

SEQ ID NO: 168351 - DNA, 201 bp, Homo sapiens
cagtatatcagtaagcagtcaagttacaaataaatatgtttactttgattctagttatgtaaaattctgtgtgtgtgtgtgtgtgtgtgtgtgtgtgtgtgtgtttatgtagagaaatgtctacaactgcaccattcaacttggtagacactggcctcatgttgctacttaaatctgaattaatttaatttcaaccaaatt

SEQ ID NO: 168352 - DNA, 201 bp, Homo sapiens
tgcggaatatgattttagcaggaactcctgcaataagggctgaagtgggggagggcaaggacaggggaaaaggtcacaacatgacccttaatttccctttrcactctacaatttcagactctatgtgtgtgttggacagaatatcaggaaaatggctgccacctttgtttgcattcatgttgtcctctttcaaatcaggcc

SEQ ID NO: 168353 - DNA, 201 bp, Homo sapiens
gctagatttaattgtgctctgtaaatagatatattaccagaaacacagtggatgtcctgttgagatttctttttaaaacatgatattactgcacattgttrgggataaataaggcacttgaacttgtatcctggctgacgtgatccactagaataacatattcctttagaagatgctactctttagaaatcacagttgcta

SEQ ID NO: 168354 - DNA, 201 bp, Homo sapiens
atcagtatatcagtaagcagtcaagttacaaataaatatgtttactttgattctagttatgtaaaattctgtgtgtgtgtgtgtgtgtgtgtgtgtgtgtgtgtgtttatgtagagaaatgtctacaactgcaccattcaacttggtagacactggcctcatgttgctacttaaatctgaattaatttaatttcaaccaaa

SEQ ID NO: 168355 - DNA, 201 bp, Homo sapiens
aaatatccactaattagcaaaaaattttggccatattcacaagaggtattttaaacaagccacggaagaaaagggttatataaatcatagttggttctgcrtaaatgggagcatattttgtagccaagtcatttaagctagatttaattgtgctctgtaaatagatatattaccagaaacacagtggatgtcctgttgaga

SEQ ID NO: 168356 - DNA, 201 bp, Homo sapiens
aggtaatttttcaacgttcactctcctctcatcctccccacatgaggagtccccagtgtctattattgtcatctttctgtccatgtgtacccatggtttarctctcgcttgtaagtgagaacatgtggtatatgattttctgtttctgagttatttcttttaggataatggcctccagcttcatccatttcatccatttta

SEQ ID NO: 168357 - DNA, 201 bp, Homo sapiens
tccggtcatatatccaggaagtggtgcagtatatcaagagggtatgtgggctcatcacgctctctcctttgcaaaacatgtgtgaacatttggtgagctcrctgtgagcttctggaaggaaatgtcatgccttgccataactttttatcactagcacctagcagagctgtttcacagggtgggcactccttaatcaacatt

SEQ ID NO: 168358 - DNA, 201 bp, Homo sapiens
tgcaaagcttcatatggaatgaggttaattctgtcacagtgggcctattggagtgctgtggcataaagactagatttttacagtggaaaaatggctgaagrtcagcatatccaggtcttgctcgtaatggccataagcaaagcaattatgctccaatcccaattcttctctgtgatgtatggatctaaagtgtaggagccc

SEQ ID NO: 168359 - DNA, 201 bp, Homo sapiens
ttacttggatgacttatagaattagaatgctttttaaaaatctaaaaaccaaagactgtttcagagctaggaaataaatgtttctgtgaactgactatgaygtatcaaaactctgttttaaatctctgtgataatttcattcctacataacaatgactctagaaaatatccactaattagcaaaaaattttggccatattc

SEQ ID NO: 168360 - DNA, 201 bp, Homo sapiens
ggctgctttgtttacctaagcaagcctgggcaatggcgggcgcccctcccccagcctcgctgccgccttgcagtttgatctcagactgctgtgctagcaaycagcgagactccgtgggcgtaggaccctccgagccaggtaagggatgtaatctcctggtgcgccgttttttaagcccgttggaaaagcgcagtattcggg

SEQ ID NO: 168361 - DNA, 201 bp, Homo sapiens
attgtaattttctaaacaactggattctgagcagtcaataaatacacattgagtaatctactatgtttattatatgttcaaactttcagaccaatgtcaaytgcaggcaaatttaaaaggaaaatgagattcaaataacatgagttatgtttaaattagaaaaaattatctctaacaaattaaatgtaatgataattatct

SEQ ID NO: 168362 - DNA, 201 bp, Homo sapiens
gccctgcccccagaggtggagcctacagaggcaggcaggcctccttgagctgtggtgggctccacccagttcgcgcttcccggctgctttgtttacctaakcaagcctgggcaatggcgggcgcccctcccccagcctcgctgccgccttgcagtttgatctcagactgctgtgctagcaaccagcgagactccgtgggcg

SEQ ID NO: 168363 - DNA, 201 bp, Homo sapiens
aaacacctactttgctcatacggtggtaaagtaggtgagaggacaagcatgtaacatgctttcatttttatgcctgacacacacaaggtacatcatatacrttaaccacctcaaataaaataatttgctttcattttgattcatttctacatgactggctctaaaatgatttgttactattgtttctggaagtccattgca

SEQ ID NO: 168364 - DNA, 201 bp, Homo sapiens
gggctttgctttaattacctccagtgtccaggaatgacagttcttcagatttatcttctcttccttaatagaggattttcccactggacagacttctggcratatctggtgttcagactgtagtgccatgctctgctatttttattactcacacaaaagtgcgttgatgggccatgggcaagttaaatttatcatcttgca

SEQ ID NO: 168365 - DNA, 201 bp, Homo sapiens
actgaaaattggtaccaagaggtggggtttttgctgataacaaatatctgaaaatgtagaagcagctttggaactgggtaatgaacagaggctgaaaaaartttatagagctagctagaaacagccaagacttggtgaggcctcttttcactcctataaccccagtatttcaatctagaatgacccttgctttttgtagat

SEQ ID NO: 168366 - DNA, 201 bp, Homo sapiens
aagcccatgtggccaatctttgaccactatcatccctgtctctgaatttatatgttactgatgagcaatcatcttcttacacttattcacacctaagtacytagtaaaaaaattgacaaaccattaatacagtaaaaaaaataatgtgttcaggataactaagcagcaaagtagcatcaccagattacttgtattttatca

SEQ ID NO: 168367 - DNA, 201 bp, Homo sapiens
agatgtgccctctccaccttggacttcccagcctttgtaactgtaggaaatacattttgattcctatatattatacagtttcaagtattctgctatatgcrtcagaaaacagagtaagactgaaaattggtaccaagaggtggggtttttgctgataacaaatatctgaaaatgtagaagcagctttggaactgggtaatg

SEQ ID NO: 168368 - DNA, 201 bp, Homo sapiens
tgttttgtctttgggcttagttgtgcacttctctcattttatcagggtagacagaacgaagacatgaacaatgttttgaaactcactccttcattcattcaaccaataattgaacactgggcacagttctaggtgactgagttacatcggtgaccaaaacagactcatattctacctttggaatttacactctagtagcat

SEQ ID NO: 168369 - DNA, 201 bp, Homo sapiens
gctcacacatttcaatttcaaaacccagaaccatggtattaattctaaaatctgagctactaaagctggggccctcaagtaagtacaccatggaatctgcragatagaaattcctagcctcgcattttagtttaaaaagttttagtttgaaagtatgggggatgagctggtggcataagctgtataacaatgatattttta

SEQ ID NO: 168370 - DNA, 201 bp, Homo sapiens
ctgttttgtctttgggcttagttgtgcacttctctcattttatcagggtagacagaacgaagacatgaacaatgttttgaaactcactccttcattcattcaaccaataattgaacactgggcacagttctaggtgactgagttacatcggtgaccaaaacagactcatattctacctttggaatttacactctagtagca

SEQ ID NO: 168371 - DNA, 201 bp, Homo sapiens
tgcatagctgtggcacagatggctagctgatcactaaaaatacacgtgccttttcatggcatagggtaattgctggcaaaagtcttctcaacgagggactmcgtgaccatttctcaccaataaaatgtgaggagaagtgatgtgtgtcacttccaggatgacatggttacagagatgcgctttcctcaccatcctttcccc

SEQ ID NO: 168372 - DNA, 201 bp, Homo sapiens
caacccaagtcagaagaactatttgtgtgcaaactttaccatgtataagatgtgaaaatagcacatacatgattagaatcatacttgcttaacttttaggrtcttatttgactaaaatatttatgtagctgctttggaaggtgcatagctgtggcacagatggctagctgatcactaaaaatacacgtgccttttcatggc

SEQ ID NO: 168373 - DNA, 201 bp, Homo sapiens
gactctagtgacagtgcttataactgctacattgtccctctctttggctaatggtgctccctacctggcttttgaggcaggaactctcaactcatagccaragttatggagtctagccctaggatgtcaacccaagtcagaagaactatttgtgtgcaaactttaccatgtataagatgtgaaaatagcacatacatgatt

SEQ ID NO: 168374 - DNA, 201 bp, Homo sapiens
tgactgaatgtttctgataattattcaactcctctcctcatgtataagttcttggctgaagaaaagttctaaaaatgatttaagacctagctgtacccttsccagtcatctgctacaaacccagactttgagcacccctcctctctttcccatctctcccactcatttagcccttagcatatgcaacgttttatcatttgt

SEQ ID NO: 168375 - DNA, 201 bp, Homo sapiens
aggtagcctttctctctgctccttaatctgtttccaaagagactttgtaactttggcttagaacttgcatgaagatgttttctagtgttattttcttggtrtggttgcattgccttttacttttttttggttttaaagtaacacataattcctgacacacttatcattcaacacataagtgcttctatttagatgtctact

SEQ ID NO: 168376 - DNA, 201 bp, Homo sapiens
ttgggtagcttcttcgtcttcttcttttcttcttcttcttcttcttcttcttcttcttcttcttcttcttattattattattattattattattattattrttagagatggagtctcactctgttgccaggctggagtgcagtggcacgatctcggctcactgcagcctccacctcctgggttcaagtgactctcctgcct

SEQ ID NO: 168377 - DNA, 201 bp, Homo sapiens
ctcaggagcccagattacagaattttctggggttcaaatactctctagaggttgcctattggttacttggttacaccctatgtaaataaaggagtggcccrtgaccagtttgattggctctaggagaggaccaatcactggctgaagcagagttacaaagttacatatgaagacttggcccacaaccagtctgattggttg

SEQ ID NO: 168378 - DNA, 201 bp, Homo sapiens
ctaaggcattttcagctagtggaaaagataaatgactatatgagtcaataaaaaagtataattttcattgaaaggtagattggaagagcactatcaagacmaaaaaaaaagaatctgtttttaatgaaaatgaagagatctgttttctcaatcgtcatactaaaaaatgagtggtgtctgcacatatttttatttgggata

SEQ ID NO: 168379 - DNA, 201 bp, Homo sapiens
agctttcctcatcaatgtttatatatttctttcttttttctgaaacttgctctttcactctgtctctcccctagggaacactaaaaatagcctgtaggttraggaatctccaaaacacaggtgtgatttgtttgaaattctgtttgactcatgtgtgttgagttacttctaaattcaaggtattgtgactacttgaatgat

SEQ ID NO: 168380 - DNA, 201 bp, Homo sapiens
actgacagctgattctaagaaactttacctggcctatcggaccacaagtgaaaaatatggaggcagagtctgatgtgttgaatgtcttaggtagtctttcrggaagggattccatataaatgaaaagagcatacctactctttgtaccctgttcccaatactctgtctttctttccactgtttcctacaggtgataataca

SEQ ID NO: 168381 - DNA, 201 bp, Homo sapiens
aatttgagagtctcagagcaatgactctagctgctgtgtggaagagggaccctcaagctgtgcatctcaaatggacatgagtcactggggatcttgttagktgcaggttctgctccatgtctgaattggggcctgagcagcaccaggtgatgctgattctgcagttccatggacaacactctgagtagtgaagatcaagga

SEQ ID NO: 168382 - DNA, 201 bp, Homo sapiens
gggagccactgaggttaaaaaattcagcctactgccatctctttactttgggctgtatggaagttgttcatgacctccataattgttcttttgtaggatamcctgtatcagattatagactctgaaatccaactcccagggttcaaaacctgccttgaacactatgtatctctgaggaagacatttaactcattctgagct

SEQ ID NO: 168383 - DNA, 201 bp, Homo sapiens
accaataattcagggttttttttttttagttctaggtaaaaacagtgtcattgatttactatcagtgaattcatgcaaattcatatatttgcattggtcgrgtgccttgtactacaactacaatgttgaatagaacatgttctctcttttaggggagctcaagatacaggcaaacaaatgactacacttcagagccatgtc

SEQ ID NO: 168384 - DNA, 201 bp, Homo sapiens
gaagatcttattcagagtgtcttaacaggtaaatgccaccctttccccccatggaattaagcagctcagtgttacacagtggaagtatttagaggagaggmaatttccattcatatctgaaaaacaacatcattaatatttcttcttctaaaaaatctagagacatatacttttagtttagtctacatgatatgatataat

SEQ ID NO: 168385 - DNA, 201 bp, Homo sapiens
gaaacttaatccccaatatgacagttttgagaggtagggcctttaagaggaaattaagagcttccatgattaatgggttaatgaattaatggattatcatsggagaggaactggtggctttataagaagagaaaaacagacctgagctagcatgttcttccccctcaccatctgattccctgtgccacctctgccaaagtg

SEQ ID NO: 168386 - DNA, 201 bp, Homo sapiens
agtacaccatggaatctgcgagatagaaattcctagcctcgcattttagtttaaaaagttttagtttgaaagtatgggggatgagctggtggcataagctrtataacaatgatatttttattaaatttgaaggcctaaaaatatcctgtagtaggggaaagtacttttacccaccataaatgttattaggtttgtgtaatt

SEQ ID NO: 168387 - DNA, 201 bp, Homo sapiens
aaggggacagaattaataaggatgtttattttagtgcttaatattagagattatttaatgcaatattttttaattgggtcagcaccataatcctaaaataytgattttatactagacaccttaattttaaaagcacgcagttgatctttcagaagacagatgcaaatgcatggaggaatggttatcttttagttctttaaa

SEQ ID NO: 168388 - DNA, 201 bp, Homo sapiens
actgttttgtctttgggcttagttgtgcacttctctcattttatcagggtagacagaacgaagacatgaacaatgttttgaaactcactccttcattcattcaaccaataattgaacactgggcacagttctaggtgactgagttacatcggtgaccaaaacagactcatattctacctttggaatttacactctagtagc

SEQ ID NO: 168389 - DNA, 201 bp, Homo sapiens
tcctgaagtagaattcccaatgtatgcatccatcaacagtgacctagagttctcattctgagaatgaatatataagcaaacaataagcaaaatatggttarttctcagaaacatgctattgagtgaaagaagccaaacacaagagtatgattccttcatgtaaggtgcaaaaacaggcaaaagtaatctatgctatttgta

SEQ ID NO: 168390 - DNA, 201 bp, Homo sapiens
cactgttttgtctttgggcttagttgtgcacttctctcattttatcagggtagacagaacgaagacatgaacaatgttttgaaactcactccttcattcattcaaccaataattgaacactgggcacagttctaggtgactgagttacatcggtgaccaaaacagactcatattctacctttggaatttacactctagtag

SEQ ID NO: 168391 - DNA, 201 bp, Homo sapiens
gatgtctccctatgaatagctactatggacatgtcttttagtgaacatattgttaatatttttgttgcacacatctagctttgggattgctgggccttagygtgtgcagcttcctgaagtagaattcccaatgtatgcatccatcaacagtgacctagagttctcattctgagaatgaatatataagcaaacaataagcaa

SEQ ID NO: 168392 - DNA, 201 bp, Homo sapiens
tccatccatttatccatccatccatccattctttcatccacctatccacctatggtatgtacttgcatgtgtgtgtgtgtgtgtgtgtgtgtgtgtgtgtgtaaacatatttaaaaggcaggtttactcattgcttttggtacagttctctaaactaaagaagcttatgttggtacttttattgtccatgaaattatatta

SEQ ID NO: 168393 - DNA, 201 bp, Homo sapiens
ccacaagtagaaacattaataggtggtcctctattttgtttaacagagttctgtcttccctcttcttatgtaagacatacccatcattccagacctaatayctcagccacattcctttattttactcttctatgaattccttttgcttttagtcaatacctcaggtcttcatttaagggcttttttatgggatcgcctcct

SEQ ID NO: 168394 - DNA, 201 bp, Homo sapiens
atgaggacggtcatagaaggtttatcattaggtggcaaaatttgatcatattcaaaatgtaaagaaacagccactgataccaaggtatggtgcctcacacmaagtaggaattctgtacctatggggtgaactcatcaattacgtcaaactcaaacataggtttcaaaaccaggacttgtgcatacttcatctttagtttct

SEQ ID NO: 168395 - DNA, 201 bp, Homo sapiens
attctcccaattgttttttattttaaaccagaacattgccctgtagacttaatgtttccagcttctcttgcagctaggtgtggttgaggtcaatgaggtayagtaaatgctgtgtggtatatcttggtactttttaaatggatctgttaagctatgagggtctttctgccttgctttcttctttccaatatagatgtgatg

SEQ ID NO: 168396 - DNA, 201 bp, Homo sapiens
ccatgttagctcacctctagttcttttcccagttttctctgctcgggattccctcttttcttccccatcactctatgttccctgctcctccagttccatcytgaatgttactgtacacatgacagcgtattatcggtgccttaagtcaggaagcaaaaaaaagacaaatcaaacaaaagtagaaacaacaaaaaaacaggt

SEQ ID NO: 168397 - DNA, 201 bp, Homo sapiens
aacatttcacactgacatatttccatacaatcatttaaatttattatttccagtttttagtgtaaatatacatatacacatagtctctctttatatataaytaaaaatctaagctcatcctagaaatattttgggaatatgtattttataaagaaacagaatcagaatataatttgttactcatctctctttccaaaggca

SEQ ID NO: 168398 - DNA, 201 bp, Homo sapiens
ccccctccctcttttctaattcctattagactactttttgtttgctctaactcctgccatgttagctcacctctagttcttttcccagttttctctgctcrggattccctcttttcttccccatcactctatgttccctgctcctccagttccatcttgaatgttactgtacacatgacagcgtattatcggtgccttaag

SEQ ID NO: 168399 - DNA, 201 bp, Homo sapiens
aattagccaggcatggtggcgagcacctgtaatcccagctactctggaggctgtggcaggggaattgcttgaagacaagaggcagaggttgcactgagccragatcatgccactgcactccagcctgggtgacagagcgagactccttctcaaaacaaaacaaaaaaatgctgtgtttaagaagagggtatctgaggatca

SEQ ID NO: 168400 - DNA, 201 bp, Homo sapiens
cattgaaagcaaggaaatgtagtcctcatctccatctgttgaaggggacaataactattgaagaaggccactgaattaacaaatatatcacattctggaamcttcttaccctggaggttgaagggaagacaataatgataaatatgaaaacaggcaattaatcatcagccactgcaagatgaaaaattcttcagaagtttg

SEQ ID NO: 168401 - DNA, 201 bp, Homo sapiens
aggagtttgccaataaataaaaaacaaatataaaatattaaaaaataggacctttacatgtctcaccaatattaaaatatcttgtttaaaattattatatrtcccagtaacttttaaatattaattcaatagaggacgagataaatagtgaaacacagagaatttttagggcaatgaaactactctgtgtagttaaatctc

SEQ ID NO: 168402 - DNA, 201 bp, Homo sapiens
gctgaaatcccagtgaaggaagacaggcaataagcaaatgagttcatgatcaggaaaaatggtatgaagtaactaaagcaaggtgccagttggagtaaccrggtgtattttgttttcttttgagtggttagaggaggactctttgaggaggagacatttaagctgagatctgtatgaaaagaagagccatccaggcaaaga

SEQ ID NO: 168403 - DNA, 201 bp, Homo sapiens
gtccctgatctcacgcagctgacacctactttgttccagacactatcttagagaccccagaaacaacaataaataagacagttaaggtccctgatctcacrgagctgaaatcccagtgaaggaagacaggcaataagcaaatgagttcatgatcaggaaaaatggtatgaagtaactaaagcaaggtgccagttggagtaa

SEQ ID NO: 168404 - DNA, 201 bp, Homo sapiens
gatctagaaccagaaataccatttgacccagcaatcccattactgggtatatacgcaaaggattataaatcattctactataaagacacatgcacatgtakgtttattacggcagtgttcacaatagcaaagacttggaaccaacccaaatgcccatcaatgatagactggataaagaaaatgtggcacatatataccatg

SEQ ID NO: 168405 - DNA, 201 bp, Homo sapiens
accatatgtgacaactcttggtgaagttggtggccatggggaagaacccgtcagtaaggaaaagaaaaatgccctcaggaagagagcagagtaatagcaaycaagaaagcccttttgcattcagtctccaaattcctgatgatcatgtatttattataaatgcattttttggctgcagtttgtccagtttttccttcaatt

SEQ ID NO: 168406 - DNA, 201 bp, Homo sapiens
gtgaatcaaaaccacaatgagataccacttgacaccatttggatagctattattgataataaataaataaaataaataaataaataaataaataaataaaataaataaaaaaaataataaaaatggaaataaaacaagtgttggtgaagatgagggaaactgtaacccatgtatgttcctagtgatgataggaaatggtgc

SEQ ID NO: 168407 - DNA, 201 bp, Homo sapiens
cctttcctggcccctgaagatacttgcatttattgcctgtcttttaaggaattgttatagttagagattgggttgtgtgaaattgccttttgcataggtgraaaacagcaaatattacaaatttcatatcatttgacctaatcagaacataagaatcaaacaaaatgctgctgtctttggtgatcttccagtttcaaaaca

SEQ ID NO: 168408 - DNA, 201 bp, Homo sapiens
ctgagattacacgtagccactcagtggcaaagccaaggttagagtagtcagactctagtgacagtgcttataactgctacattgtccctctctttggctartggtgctccctacctggcttttgaggcaggaactctcaactcatagccagagttatggagtctagccctaggatgtcaacccaagtcagaagaactattt

SEQ ID NO: 168409 - DNA, 201 bp, Homo sapiens
atggacttttctggacttttgtctcctcatctgtaaaacaagtgattcaagaccgtgaactggaagatgtgattgggtgccgggtgtctgttcttaagagrctctagaatttctggtcgctgaactggcagaggaacacacaaagcatttgaccttgctcccatctttcataatgccttgtgctgcccttggtatttaaat

SEQ ID NO: 168410 - DNA, 201 bp, Homo sapiens
cctcttgtaattaaatgctgacatattttgcaattgaaaataggagaaaataggtaggtggcaagacggtgttcaagaataattctttcctcgggcaaaamccactaagatcaagattccatccccctgattcttctgcaaaaaaatgtaggacaaaaccatggggccttaaaatgaatgagaacaataacatcgaatcaa

SEQ ID NO: 168411 - DNA, 201 bp, Homo sapiens
ggttaaactctggagtagttaagaaatgaggcaatttctcattactagaagaaaaatcaaaatgactgtattaaaaaggagatgctgagcatatcatcaayaaaagttttaattggttcaatattatttcagattgtgacattaaacatcactttcaaatgctgaggttatttcctcaaatatgacatcagttgactcaat

SEQ ID NO: 168412 - DNA, 201 bp, Homo sapiens
gaataaccaacccacctaatttattgaaggtgacagtggggtagagtgcacgatatctcctgagtcttgcctatttggttacctgttatcctaaaacaatygaaaggacaaaaacataataaatgctgaatcctgacaaatgaagacagaaaacttacttttcttcttaaaccaagaggataagcattgtatttagtattg

SEQ ID NO: 168413 - DNA, 201 bp, Homo sapiens
actgccttttcagaaagaagcaaaaattagtacaaaacattgggactattttttttgttttgccttgtttaatttctttttttaagacagtcaaacccctkagggtgcacccttggaataacagaagtttaggataggaaagagtctctatggtcagcttgccctattgaaggagcacccaagaccatcagatggtctgca

SEQ ID NO: 168414 - DNA, 201 bp, Homo sapiens
ttgtgaattatgagtgatgaaattctagattacaaattgcagacaaagaagtctgtgccttttcccaggcatagcgtcagctggtgaagtttatagagccrgatgtatttagtagaaatcagagcgtgactaacacttcaagaagaagatttgcagatgcacaaaaaagagcagagaagtccagaattgcagcttggcttt

SEQ ID NO: 168415 - DNA, 201 bp, Homo sapiens
gggggctgtagcatagactctgaattattgattctgggttcaaatctgagcctagttcccagtgacccagcacatgtgatttgacctttctgtgccttagyttccctatttataaatggcaatgataaaaatatttccttcacaggaacgtttggaagaccaaatgatttaatatttgtgaagaacttagtatagttctgg

SEQ ID NO: 168416 - DNA, 201 bp, Homo sapiens
ctcacctcatgtaactgaagcagtagcctgcaatcggtctgattggttgcagaaaacagccaaccagaggctgaagtgaagttacaaaggtcacactcccrtgcaaacatctgattggttgctttttgcaaccaatgacctgcattctgaggtgttttttttttttttttaacttaagatacatgaatcctctgggctgcg

SEQ ID NO: 168417 - DNA, 201 bp, Homo sapiens
ctttaatctacctggagtcaatttctatgtttggtatgataggaactgaattatacctcttttgttatagaaaatgtgtaccatcagcaatatttatcaawgtaactaactttattaagtccttgaacttcccattttatttctatgtgctttcaaaattttattattacagagaatgaaattgttttattgcctttcaaa

SEQ ID NO: 168418 - DNA, 201 bp, Homo sapiens
caatcagtctgatttattgcagacagccaacttcccatctgccgcatagaaaaggtcaacttaggcgtggaaagttagggttttcctttcaatttagttcyaggaaattggcatgaaacagtcttaggttccctgcctccaggccctattctcctgcctcaatcatgttatctatggcagtgcttctaaaactataaagtg

SEQ ID NO: 168419 - DNA, 201 bp, Homo sapiens
caaagtgcaaagatggtgagatgaaagcatgcttgatgtattcaaggaaaagcaacaagatcaatggactgtatccaggtgacagagagggagaggaaaargagatgtatttaaagaaatggcaggtgccagatcaagttaggctgtgtagattatgataatgaatttggatttcattccatgtgaaatgggaggtcattg

SEQ ID NO: 168420 - DNA, 201 bp, Homo sapiens
agacagccaacttcccatctgccgcatagaaaaggtcaacttaggcgtggaaagttagggttttcctttcaatttagttctaggaaattggcatgaaacastcttaggttccctgcctccaggccctattctcctgcctcaatcatgttatctatggcagtgcttctaaaactataaagtgcatccacatccctgtatgtg

SEQ ID NO: 168421 - DNA, 201 bp, Homo sapiens
tgtgaatcaaaaccacaatgagataccacttgacaccatttggatagctattattgataataaataaataaaataaataaataaataaataaataaataaaataaataaaaaaaataataaaaatggaaataaaacaagtgttggtgaagatgagggaaactgtaacccatgtatgttcctagtgatgataggaaatggtg

SEQ ID NO: 168422 - DNA, 201 bp, Homo sapiens
atgtgaatcaaaaccacaatgagataccacttgacaccatttggatagctattattgataataaataaataaaataaataaataaataaataaataaataaaataaataaaaaaaataataaaaatggaaataaaacaagtgttggtgaagatgagggaaactgtaacccatgtatgttcctagtgatgataggaaatggt

SEQ ID NO: 168423 - DNA, 201 bp, Homo sapiens
aaatgtgaatcaaaaccacaatgagataccacttgacaccatttggatagctattattgataataaataaataaaataaataaataaataaataaataaataaaataaataaaaaaaataataaaaatggaaataaaacaagtgttggtgaagatgagggaaactgtaacccatgtatgttcctagtgatgataggaaatg

SEQ ID NO: 168424 - DNA, 201 bp, Homo sapiens
aaataacgtcaccaccacccacccagttatgcaagcaaggaacttagacagtatcctttttacctccctcttcctcattgcccatatctaacccgttctatgttctgaaatagtacttctggattcattctgtcctgttgtatttttggatccatccatttttctctttctcaactaccccacttgtcagtccaccttgac

SEQ ID NO: 168425 - DNA, 201 bp, Homo sapiens
taaataacgtcaccaccacccacccagttatgcaagcaaggaacttagacagtatcctttttacctccctcttcctcattgcccatatctaacccgttctatgttctgaaatagtacttctggattcattctgtcctgttgtatttttggatccatccatttttctctttctcaactaccccacttgtcagtccaccttga

SEQ ID NO: 168426 - DNA, 201 bp, Homo sapiens
caggctactaagcatcaagcaatttgttttctgtgttcagtctgtcatcttacggctcgctctaatgttcactgaagccctacggcagactttgggactaytgtttttttaaataaacaattatggcattttcagatatggatattatcaaaggaatgatctaattgtccaccacagatttggatcagatagttattcctc

SEQ ID NO: 168427 - DNA, 201 bp, Homo sapiens
tcttctctgaagaacccagagtggcagactatcacttcacaaaactttctcatttccccaaacttgtaataaagccagctcattgtttcttcaggctactaagcatcaagcaatttgttttctgtgttcagtctgtcatcttacggctcgctctaatgttcactgaagccctacggcagactttgggactactgttttttt

SEQ ID NO: 168428 - DNA, 201 bp, Homo sapiens
agcaggttccaggtacgctgtggcatgaggaagctggagttgagctaactagatgtgaacatctgatgtggttggtttgggaagcagatcttgcttcctcyggttgattctgagttgaaaggagggagccaagaatagggaagctggcagtcattgactgtatcgtgactgttggggccagttgctgtagaggttgtggtt

SEQ ID NO: 168429 - DNA, 201 bp, Homo sapiens
ttcttctctgaagaacccagagtggcagactatcacttcacaaaactttctcatttccccaaacttgtaataaagccagctcattgtttcttcaggctactaagcatcaagcaatttgttttctgtgttcagtctgtcatcttacggctcgctctaatgttcactgaagccctacggcagactttgggactactgtttttt

SEQ ID NO: 168430 - DNA, 201 bp, Homo sapiens
atcagttgcatttggcacagacttaaaggaacacagaaagataggaaacctttagagtgaaacaaagagcaggttccaggtacgctgtggcatgaggaagstggagttgagctaactagatgtgaacatctgatgtggttggtttgggaagcagatcttgcttcctccggttgattctgagttgaaaggagggagccaaga

SEQ ID NO: 168431 - DNA, 201 bp, Homo sapiens
attcttctctgaagaacccagagtggcagactatcacttcacaaaactttctcatttccccaaacttgtaataaagccagctcattgtttcttcaggctactaagcatcaagcaatttgttttctgtgttcagtctgtcatcttacggctcgctctaatgttcactgaagccctacggcagactttgggactactgttttt

SEQ ID NO: 168432 - DNA, 201 bp, Homo sapiens
taaagttatttttaaatatgcttgtgaaaataaatgaagatcacatgaacaagaacagaggtgatttatttagagtttgcaagagaatcaaccactatcarttgcatttggcacagacttaaaggaacacagaaagataggaaacctttagagtgaaacaaagagcaggttccaggtacgctgtggcatgaggaagctgga

SEQ ID NO: 168433 - DNA, 201 bp, Homo sapiens
gaagctgaggcaggagaattgcttgaacccaggaggcggaggttgcagtgagctgagatcgcgccactgactccagcctggatgacaagaacaagactctrtctcaaaaaaaaaaaaaaaaaaaaaaaaagaaagaaactgaaatttgtgatttcctggtccagtgatcatttctaattgataccaatgaatccctctgat

SEQ ID NO: 168434 - DNA, 201 bp, Homo sapiens
atttcctaaattgcccaccttccatccagcttccatcacactgctagagtaacacttcagaaaatccaagttcaatcctattaaaatcttattttaatcartcgtctatttaattatttttattattgcccattactaggatagagaattccaagtttgtcaagtaatgaactgcatgatattcctggtctctttattcaa

SEQ ID NO: 168435 - DNA, 201 bp, Homo sapiens
tgcactcagactattattcccactttggaaacatttttttttccatttctgcttctcactacactgttttcccgtggtcctattatcttacaatccagtgrgatcaagttaactctcaaggagtctgtttcaatccactcccctcaacttaccacagccctccttttggaagtccagcaaaatttactttattcccacatg

SEQ ID NO: 168436 - DNA, 201 bp, Homo sapiens
gtaagtgtaagagactcagctggaagcaagttcaagtgtgaagcactgtcccctctctacctgggacatggtgcatacaaatgggagtaacatgagctttrcaggggtcatcttggcctcctgtcccacctccaccacttaccagtcatcattcattattgttattccatgaacaatgccacccacaaacccagagtgact

SEQ ID NO: 168437 - DNA, 201 bp, Homo sapiens
tgggagaatgtgaggaggatgtggccatgaccaactttatccttttgtagccactcactccccagcgtcacacaaatggatgcttacgcagatttcctatwtcctccataggctcctatctttgtgctgagtattaattcccatctgtgttcaaggacggtaatcaggcaggggcagtaatcaaaatgatgtgtacagcaa

SEQ ID NO: 168438 - DNA, 201 bp, Homo sapiens
tgtgaccagatggaaagtgactcattaatggaagagtattaggatggagaaattgttttatttttaaaataatttccagtgtagtgatgaaaagaaaaagwtactgaattttattttgaacatactgagtttgaggagcctgcttaactatttaggtggaaatgtcactttacctaaggaaaatgagtttgggctctgaaa

SEQ ID NO: 168439 - DNA, 201 bp, Homo sapiens
tcttctaagtgtgctgcacccacctcttagtagactttggttgggattatctgagagtagtcttttttagttctgtggctgtgtgagcacatggttgggaraatgtgaggaggatgtggccatgaccaactttatccttttgtagccactcactccccagcgtcacacaaatggatgcttacgcagatttcctatatcctc

SEQ ID NO: 168440 - DNA, 201 bp, Homo sapiens
taaatgtttgcaaaggagctgtgtttcagttttccctcttgtaattaaatgctgacatattttgcaattgaaaataggagaaaataggtaggtggcaagamggtgttcaagaataattctttcctcgggcaaaaaccactaagatcaagattccatccccctgattcttctgcaaaaaaatgtaggacaaaaccatggggc

SEQ ID NO: 168441 - DNA, 201 bp, Homo sapiens
ttaaatgtttgcaaaggagctgtgtttcagttttccctcttgtaattaaatgctgacatattttgcaattgaaaataggagaaaataggtaggtggcaagmcggtgttcaagaataattctttcctcgggcaaaaaccactaagatcaagattccatccccctgattcttctgcaaaaaaatgtaggacaaaaccatgggg

SEQ ID NO: 168442 - DNA, 201 bp, Homo sapiens
aatcaattactgatgctaacaatatcttccagtgtcaaatgagaatacaagatgcacatgactttcctaactaattactatgactcaattggttagtttgrggaggtcttaaatgacaaaatttaattctgtattcctgtatatatagccagtattttataaaagagaaatttggtgaaatggttctgtatgtgttgctat

SEQ ID NO: 168443 - DNA, 201 bp, Homo sapiens
ggcagtagttggtccatgagaattcaaggcctgaaaaataccttaaacaccagtcttaggttttataatagtgatgttatatataggagcaattagggagkttacgaatcttgtgacttcagtcctaaaccataattccaaccttgtggttaatttgttagtcttacaaaagttgttttggtccccaggaaaggaggggat

SEQ ID NO: 168444 - DNA, 201 bp, Homo sapiens
atcaacttacctgggctctttctggctttttaaaatccgtttattgggggtattttaatgaattgttagaatgtggtattggacagtgggaacttataatraatatttgagatgtggtgtttcagagtaggaaaaatgagactgctaagtaagtaaagaatcaggattctatttataagcccctgacaatccaaagaagat

SEQ ID NO: 168445 - DNA, 201 bp, Homo sapiens
cttgctggactcaggaatgccacaaaccttcaatttgtaaaaacaaacaacaaaaaacccccacaatatctgcaaagcacaatgaagcaaagtgcaataaratgaggtgtgcttgtagctattgtagtcaaatccttagagatagaaagttgcgtggtggttgctgggcctgggggaggagaaaatggggagttattgttt

SEQ ID NO: 168446 - DNA, 201 bp, Homo sapiens
aaacagtcttaggttccctgcctccaggccctattctcctgcctcaatcatgttatctatggcagtgcttctaaaactataaagtgcatccacatccctgkatgtgccagtgtggattcaccaggtctagggggcacctgagattctgtatctcaaactgggccctgggtgttgctatagaccacactctgagtagcaaag

SEQ ID NO: 168447 - DNA, 201 bp, Homo sapiens
ttacataaaagaaaatagcacagggaaaaagtgtgcagtgtcaataaatgggacaggattattcactcctggtttgtattccccatcccaagagaacgacsatttcactgcaaaggcattttaagagccatgtagaggaattgtggccgattgaataggaagttctacctggttcaaatgagttcacatctctcggggaag

SEQ ID NO: 168448 - DNA, 201 bp, Homo sapiens
ctgaagcgtgaggagggccgggtttattgggtgaaagagggaaacagggacgctccgcaaggccagaatccctgctacagcgcttcctgcctgaagattgratcccaggttccacccaggaataggaggggccaggcttcccccgctgcaaacagcaccaactcccgtggctccatgccagtgcgcaatcctcccagtgtg

SEQ ID NO: 168449 - DNA, 201 bp, Homo sapiens
tataatttaactttctaataactgtagaacaagaaaggattctagaaaaatcttgggaaaaattattaatgaggggcctgagggcttaagtttggggagartgggcttcttttgatttgcaatgtggaagctgcttttgctcatgctttctgaaggtcttccataaagaggggaactgcgaattgcaaagtaaagcccctg

SEQ ID NO: 168450 - DNA, 201 bp, Homo sapiens
ctgtgatgattgaataattgaccaagaaacccagataatgaaaggaagaaagagaaagaaagaaagaaagaaagaaagaaagaaagaaagaaagaaataaagaaaggaaggaagatagtaatgaaatgtgggcatggttgactaatgtatgagagttcatcagatgtataacttacttttcttttgaataatttgtattta

SEQ ID NO: 168451 - DNA, 201 bp, Homo sapiens
actgtgatgattgaataattgaccaagaaacccagataatgaaaggaagaaagagaaagaaagaaagaaagaaagaaagaaagaaagaaagaaagaaataaagaaaggaaggaagatagtaatgaaatgtgggcatggttgactaatgtatgagagttcatcagatgtataacttacttttcttttgaataatttgtattt

SEQ ID NO: 168452 - DNA, 201 bp, Homo sapiens
gactgtgatgattgaataattgaccaagaaacccagataatgaaaggaagaaagagaaagaaagaaagaaagaaagaaagaaagaaagaaagaaagaaataaagaaaggaaggaagatagtaatgaaatgtgggcatggttgactaatgtatgagagttcatcagatgtataacttacttttcttttgaataatttgtatt

SEQ ID NO: 168453 - DNA, 201 bp, Homo sapiens
tgactgtgatgattgaataattgaccaagaaacccagataatgaaaggaagaaagagaaagaaagaaagaaagaaagaaagaaagaaagaaagaaagaaakaaagaaaggaaggaagatagtaatgaaatgtgggcatggttgactaatgtatgagagttcatcagatgtataacttacttttcttttgaataatttgtat

SEQ ID NO: 168454 - DNA, 201 bp, Homo sapiens
taggaagagattattccttttaactttttttcaattttaatttttattcagcctcttacctttttgctaaaaccaaaagttcaaaagaaaggtgatcaggrcactcccaggaattttttagccatgtgagaatatatggtgaaatgattcaagtagatgcaacatggtctactggaaaagcactgagattttgaggagaaa

SEQ ID NO: 168455 - DNA, 201 bp, Homo sapiens
tctttctttctttccttctttctttctttctttctttctttctttctttctttctttctttctttctttctttctttttctttttccttccttccttcctttcttttcctttcccttcctttcttctttctcttttttctgtcctctttccttccttctttccttccttccttccttcctttctctcttccatttgttgtt

SEQ ID NO: 168456 - DNA, 201 bp, Homo sapiens
acattaaatattttgcttttgactaataacgtctagattattagtctaataacttcaggctgttcatagtgatcttgctgggttgaggcaattgagactayattttgaaatcttttgttttgtgaagtatacaccacacataaaatgcataaaccataaatgttaatgaatttaatagtaatagacacctatgtaatcatc

SEQ ID NO: 168457 - DNA, 201 bp, Homo sapiens
ttctttctttctttccttctttctttctttctttctttctttctttctttctttctttctttctttctttctttctttttctttttccttccttccttcctttcttttcctttcccttcctttcttctttctcttttttctgtcctctttccttccttctttccttccttccttccttcctttctctcttccatttgttgt

SEQ ID NO: 168458 - DNA, 201 bp, Homo sapiens
tttctttctttctttccttctttctttctttctttctttctttctttctttctttctttctttctttctttctttctttttctttttccttccttccttcctttcttttcctttcccttcctttcttctttctcttttttctgtcctctttccttccttctttccttccttccttccttcctttctctcttccatttgttg

SEQ ID NO: 168459 - DNA, 201 bp, Homo sapiens
tatatttcgaaaacccaatcgtctcagaccaatacctgatttttaagcctaaggttaggaacacataggaaaaatcaaggtgagtattaaaaattagtagraggagaccgtttagtgtactactcagattagtagctctttgtacagtcatcctcaataaatgggtgcttctgatgacttacttttttttctttctttctg

SEQ ID NO: 168460 - DNA, 201 bp, Homo sapiens
ctttctttctttctttccttctttctttctttctttctttctttctttctttctttctttctttctttctttctttctttttctttttccttccttccttcctttcttttcctttcccttcctttcttctttctcttttttctgtcctctttccttccttctttccttccttccttccttcctttctctcttccatttgtt

SEQ ID NO: 168461 - DNA, 201 bp, Homo sapiens
ggattcagacgactgcagttcctggccaagtaccccctagctttgctgaatgacatgcctctttatggcttatggacagcaaccattgggttcaggtcttygccccatttcctgacccaaggggccacaaaatcctttgtcctcaccccaggccacaagaagagcatctcctcagaaagtggccactggttatttcacctg

SEQ ID NO: 168462 - DNA, 201 bp, Homo sapiens
tctttctttctttctttccttctttctttctttctttctttctttctttctttctttctttctttctttctttctttctttttctttttccttccttcctycctttcttttcctttcccttcctttcttctttctcttttttctgtcctctttccttccttctttccttccttccttccttcctttctctcttccatttgt

SEQ ID NO: 168463 - DNA, 201 bp, Homo sapiens
ttctttattttctttctttctttctttctttccttctttctttctttctttctttctttctttctttctttctttctttctttctttctttctttttctttttccttccttccttcctttcttttcctttcccttcctttcttctttctcttttttctgtcctctttccttccttctttccttccttccttccttcctttc

SEQ ID NO: 168464 - DNA, 201 bp, Homo sapiens
acagatgcccatgcttagctgcaagggaagttggaaaatgtagcttaatgcaagagttcaaccaacagactcagaagttgctcttgccaaaacgaagaaakgaaaacctgggtattggaaaacagcctctgccatagaaggcctctaccatagaaggcttgttagcggcctcttccatagaaggcctgttcatcatagctc

SEQ ID NO: 168465 - DNA, 201 bp, Homo sapiens
tccacctctggctgttcctgaggagttcctagttaagcgggaatgggggtgggcaagccagtgatgacagggttaggtggatactggaatattcaggaagygccagaaagtacagaggatgaaaggcttgacttcaccttggatatttaaaagctccagaggacaacaccttcatttgaattggaaaggacatagcccatt

SEQ ID NO: 168466 - DNA, 201 bp, Homo sapiens
actttcaaatcactcagcttttaagataactctagggtcgaatggggattggatgaatcaatcaaaaagcttctgcttgcctgcaaagttgattcctttckagttacacatcaagattctttaatctcaatgtctggtaataggcttatttgttaccttaaacatatttgttcaagcacagttgtgctttttagtgaaatg

SEQ ID NO: 168467 - DNA, 201 bp, Homo sapiens
aactttctaataactgtagaacaagaaaggattctagaaaaatcttgggaaaaattattaatgaggggcctgagggcttaagtttggggagagtgggcttsttttgatttgcaatgtggaagctgcttttgctcatgctttctgaaggtcttccataaagaggggaactgcgaattgcaaagtaaagcccctgctgtggag

SEQ ID NO: 168468 - DNA, 201 bp, Homo sapiens
agaaaaaaatccagaatttggttctggatatttaaatgttgagatgcctgctagacttttacctgataatgtcaggacagttagacacaagtctggggttyagggaagatgttggccctggagatacaaatgtgggcatttgaggctcaaatcctgggtgaggtctcttaaggaatgtaggtgtaaaagaaagaggtttga

SEQ ID NO: 168469 - DNA, 201 bp, Homo sapiens
ggaaaaattattaatgaggggcctgagggcttaagtttggggagagtgggcttcttttgatttgcaatgtggaagctgcttttgctcatgctttctgaagrtcttccataaagaggggaactgcgaattgcaaagtaaagcccctgctgtggagtgaatttgcttatgtcacactctatctgagtgacccttaggaagttc

SEQ ID NO: 168470 - DNA, 201 bp, Homo sapiens
tgtttgttgaatgattaccaataatgaagttttattatcatttttatccaagggcactgtatttcattctgtctatacccactcctgtgtttatttttttkgggttgtgtgacaatattatgttcctggaaaagcaactaagaaaaaattgaaaaaataaatgttttcagtgggccaataagatggttacttttgtgcata

SEQ ID NO: 168471 - DNA, 201 bp, Homo sapiens
tatttcttttcttttttttttttggaaatttatctaacatctcaacttctttattggaatacagagaccaacactgaacttggaattcataagtaaaatgrcagttacaaccagatattatttctcttaagccttatctctgtgatgcatcctagtattcataactaggtcttaatcaaaaaattattttgtaaattttta

SEQ ID NO: 168472 - DNA, 201 bp, Homo sapiens
gcttcttttgatttgcaatgtggaagctgcttttgctcatgctttctgaaggtcttccataaagaggggaactgcgaattgcaaagtaaagcccctgctgwggagtgaatttgcttatgtcacactctatctgagtgacccttaggaagttccctaatctcccatgcctgttttctgggttgtaaatgcaagtaataaaag

SEQ ID NO: 168473 - DNA, 201 bp, Homo sapiens
tgtggtagacctaattctgagatggccttcagaatcccatccgttggtgtccatgccctgcccattaagtgtgggcaaaacctaaggtttgcttctacccrgtagaatatgacaaaggtgaagggattttgcagctataattaaagtgtcatgtcagttgattttgagtaaatcaaaagggagattatcctgggtgagcct

SEQ ID NO: 168474 - DNA, 201 bp, Homo sapiens
ttgttttaatattgattgcctctctgtgaagcatgagaacgtttgtccccttgtgtgtccctccctctctgcctctgtttggatttttgttacttgtgtcrttttttttttacactgtgtatctctaaaacattcatggtgacttgaaccatgatttccatatttcattagtactagcactatatttaaataagatcaatg

SEQ ID NO: 168475 - DNA, 201 bp, Homo sapiens
tgtttacatatttataaaaaggtaagaacagtgcagtccattgatcaccacctcccacccttatgtttctgtcacctagcttcaacacttactacagtttyctatacttgtaagtgtagttcttgatcaggagatcaaataatcaaatgtaagccatagatctgaaaagctttcggtattttctgaaaacgtgcactttta

SEQ ID NO: 168476 - DNA, 201 bp, Homo sapiens
gcgtgaagttttattccccagggcctttctgttaactccttaaaaggtttggaacattgagctgggagagttatcatgaatggcaaacaaaccagcaaaaagtaattgagatgtgtctgttcctttgggacagaaaagaaaatcataccaaaagtgaaaattaaatgttgtttactaccattcagtttaccacataccttc

SEQ ID NO: 168477 - DNA, 201 bp, Homo sapiens
agcgtgaagttttattccccagggcctttctgttaactccttaaaaggtttggaacattgagctgggagagttatcatgaatggcaaacaaaccagcaaaaagtaattgagatgtgtctgttcctttgggacagaaaagaaaatcataccaaaagtgaaaattaaatgttgtttactaccattcagtttaccacatacctt

SEQ ID NO: 168478 - DNA, 201 bp, Homo sapiens
cagtgtaaaagtgttcctatttctccacatcctctccagcacctgttgtttcctgaccttttaatgatcgccattctaactagtgtgacatggtatctcaytgtggttttgatttgcatttttctgatggccagtgatgatgagcattttttcatgtgtctgttggctgcataaatgtcttcttttgagaagtgtctgttc

SEQ ID NO: 168479 - DNA, 201 bp, Homo sapiens
ttcaaagaatgttaaacaaaaggaatgagaagattcctgaataatatagttatgcatactcagagcttctttcataagggcatttgaaatgtatgctgatyacctcaaggtcgccatgaaatgggaagatttaaactagtggtgtttggacagaaacaacttttaccttgaaagccagcaatcaatgactgaaaaatgtat

SEQ ID NO: 168480 - DNA, 201 bp, Homo sapiens
gtatagtatagtaaacacataaaccagtaacatagttgtttattatcattatcaagtattatgtactatacataattttatgtactagagttttatacaastagcagcaatatagttttgcttgtaccagcaataccataaacgcatgagtgatgtgttgctctgcaacgttatggcagccatgacatcactaggttatag

SEQ ID NO: 168481 - DNA, 201 bp, Homo sapiens
cagagtcagcatcatcaatatcactatcttccacttccacatcttgtcccactggaaggtctgcaggggcgataatatgcatggaactgtcacctcatatratagcaatgccttcttctgaaattgccactgaaggacccacctgagactgttttacagttaatttttttctttaattattaggaagagtatactctaaaa

SEQ ID NO: 168482 - DNA, 201 bp, Homo sapiens
tttctttattttctttctttctttctttctttccttctttctttctttctttctttctttctttctttctttctttctttctttctttctttctttttctttttccttccttccttcctttcttttcctttcccttcctttcttctttctcttttttctgtcctctttccttccttctttccttccttccttccttccttt

SEQ ID NO: 168483 - DNA, 201 bp, Homo sapiens
taaatatttagtttttactttttaaacttgtttgttaaaaactaagatgcaaacacacacattaacctactcagacagagtcagcatcatcaatatcactrtcttccacttccacatcttgtcccactggaaggtctgcaggggcgataatatgcatggaactgtcacctcatatgatagcaatgccttcttctgaaattg

SEQ ID NO: 168484 - DNA, 201 bp, Homo sapiens
ttttctttattttctttctttctttctttctttccttctttctttctttctttctttctttctttctttctttctttctttctttctttctttctttttctttttccttccttccttcctttcttttcctttcccttcctttcttctttctcttttttctgtcctctttccttccttctttccttccttccttccttcctt

SEQ ID NO: 168485 - DNA, 201 bp, Homo sapiens
tttataaacactgtatacttaggctaaaataaatttattttaataaacttttcccctcaataataaattatccaccttagctactttaacttttttacttyataaacttttaaattatttaaacttttgactcttgtaagaacactcagcttgaaacacaaacacattgtacaactgtacaaaaatattttatttctttac

SEQ ID NO: 168486 - DNA, 201 bp, Homo sapiens
tcttttctttattttctttctttctttctttctttccttctttctttctttctttctttctttctttctttctttctttctttctttctttctttctttttctttttccttccttccttcctttcttttcctttcccttcctttcttctttctcttttttctgtcctctttccttccttctttccttccttccttccttcc

SEQ ID NO: 168487 - DNA, 201 bp, Homo sapiens
gctgggcatggtgggtagtgcctctaattagagcactttgggaggctgaggtaggcggatcacttgatgtcaagacttagagaccagcctgggcaacatgrcaaaccctatctctactaaaaatataagaagtagccaggcatggtgacacactcctgtggtcccagctactggggaggctgaggtgggaggatcgcttga

SEQ ID NO: 168488 - DNA, 201 bp, Homo sapiens
ctcttttctttattttctttctttctttctttctttccttctttctttctttctttctttctttctttctttctttctttctttctttctttctttctttttctttttccttccttccttcctttcttttcctttcccttcctttcttctttctcttttttctgtcctctttccttccttctttccttccttccttccttc

SEQ ID NO: 168489 - DNA, 201 bp, Homo sapiens
gttagtagtgaaataagaaataaaataattgttgacatttttgtcaattttcctgattattaccccagtgggattcaaacacacacacacacacacacacacacacacaaagatccaaatccatatagttttcaatttgcttcttttacttagcattatgccatggtgatttttcatgtcatgctttttaacgctttttca

SEQ ID NO: 168490 - DNA, 201 bp, Homo sapiens
cctcttttctttattttctttctttctttctttctttccttctttctttctttctttctttctttctttctttctttctttctttctttctttctttctttttctttttccttccttccttcctttcttttcctttcccttcctttcttctttctcttttttctgtcctctttccttccttctttccttccttccttcctt

SEQ ID NO: 168491 - DNA, 201 bp, Homo sapiens
gcctcttttctttattttctttctttctttctttctttccttctttctttctttctttctttctttctttctttctttctttctttctttctttctttctttttctttttccttccttccttcctttcttttcctttcccttcctttcttctttctcttttttctgtcctctttccttccttctttccttccttccttcct

SEQ ID NO: 168492 - DNA, 201 bp, Homo sapiens
tgcctcttttctttattttctttctttctttctttctttccttctttctttctttctttctttctttctttctttctttctttctttctttctttctttctttttctttttccttccttccttcctttcttttcctttcccttcctttcttctttctcttttttctgtcctctttccttccttctttccttccttccttcc

SEQ ID NO: 168493 - DNA, 201 bp, Homo sapiens
atggctcactgcaggctcaagctcctgggctcaaatgatcctcccacctcaaaagcttttctagtagctaggaccacaggttatgccacacctggctaatytttaaaaaatgttttgtagaaatggagtctccctatgttgcccacccttgtcttgagctcctaggcttaagtgatcctcctgccttgggctactaaagtg

SEQ ID NO: 168494 - DNA, 201 bp, Homo sapiens
tgcctcttaatgtacatgtgtgagctcactcgcccaactcctgagatctcatgaggaagctgcgcatcaccagtttcaggtatttcctatctatatagggwgactgcctttccctggtgctggctgtgaccaattattattttagagagacagttaacagccacctgcccagggtcacctgactttcttggtggggtgtgg

SEQ ID NO: 168495 - DNA, 201 bp, Homo sapiens
agagcagaaatgaaaagaaagtaaagtacacttggaagagggtcatgtggacatcttggaggtcaagtgcactgtttgatcccggacttacagtttttacrtgctgtcctacttcctgcatcttttgtcccttttccggtggaatgccctccgaaggtcatataccagttaaactttgccattttgcctcttaatgtacat

SEQ ID NO: 168496 - DNA, 201 bp, Homo sapiens
agagaagatcctggattactctgtcttggtttgggttcccccaggaggagattccgagacaaggactctgaatgcaagtagttttctggaaggtcgtgccrggaaacctgccaagaatgggaaagtgagacagggagaggaggaagccaaataggggatgcattgtcaaataagtcatattatgggcagctggtgttcaat

SEQ ID NO: 168497 - DNA, 201 bp, Homo sapiens
catagctagtattgatatgggtgatgggaaataaggatgtatttattttatttggactttagtcatgtttttattgtctgtaaaaatgacttgactgttayagctagaacattgaagaaagaagggaagcaggtcaaatgggtccccagtgattccctgtggcacctggactttctccaggaattgattgttacatattat

SEQ ID NO: 168498 - DNA, 201 bp, Homo sapiens
aataagtgtaataataataaaaaataataataatgtctgccattcatagcattgtacttcttctgcctttgtagtgtagttcattttgaatcccagatagrgactcatagatttttttctttttaatatttaaaaaatctcagatttgttgacttaaaatccatatagttttttttttaaatgtggacctagaactgagta

SEQ ID NO: 168499 - DNA, 201 bp, Homo sapiens
acgtggccacatttcttgacaatgttccaattattattgatatctacaattagaattaaatcgttgtttctaaccagtaatattccaagtaaagtagtaayattgtttattcattggcattaggcatctatggttagctctacagaattatagttgaaatctatgtgaaaatatcaatttttacacttaccgaccataata

SEQ ID NO: 168500 - DNA, 201 bp, Homo sapiens
aagcaaaagatgttagtagtgaaataagaaataaaataattgttgacatttttgtcaattttcctgattattaccccagtgggattcaaacacacacacacacacacacacacacacacaaagatccaaatccatatagttttcaatttgcttcttttacttagcattatgccatggtgatttttcatgtcatgcttttta

SEQ ID NO: 168501 - DNA, 201 bp, Homo sapiens
ataagcaaaagatgttagtagtgaaataagaaataaaataattgttgacatttttgtcaattttcctgattattaccccagtgggattcaaacacacacacacacacacacacacacacacaaagatccaaatccatatagttttcaatttgcttcttttacttagcattatgccatggtgatttttcatgtcatgctttt

SEQ ID NO: 168502 - DNA, 201 bp, Homo sapiens
gacaaataagcaaaagatgttagtagtgaaataagaaataaaataattgttgacatttttgtcaattttcctgattattaccccagtgggattcaaacacacacacacacacacacacacacacacaaagatccaaatccatatagttttcaatttgcttcttttacttagcattatgccatggtgatttttcatgtcatg

SEQ ID NO: 168503 - DNA, 201 bp, Homo sapiens
aaatgacaaataagcaaaagatgttagtagtgaaataagaaataaaataattgttgacatttttgtcaattttcctgattattaccccagtgggattcaaacacacacacacacacacacacacacacacaaagatccaaatccatatagttttcaatttgcttcttttacttagcattatgccatggtgatttttcatgt

SEQ ID NO: 168504 - DNA, 201 bp, Homo sapiens
gaaatgacaaataagcaaaagatgttagtagtgaaataagaaataaaataattgttgacatttttgtcaattttcctgattattaccccagtgggattcamacacacacacacacacacacacacacacacaaagatccaaatccatatagttttcaatttgcttcttttacttagcattatgccatggtgatttttcatg

SEQ ID NO: 168505 - DNA, 201 bp, Homo sapiens
agaaatgacaaataagcaaaagatgttagtagtgaaataagaaataaaataattgttgacatttttgtcaattttcctgattattaccccagtgggattcmaacacacacacacacacacacacacacacacaaagatccaaatccatatagttttcaatttgcttcttttacttagcattatgccatggtgatttttcat

SEQ ID NO: 168506 - DNA, 201 bp, Homo sapiens
tgtggttttgatttacatttctctgatggccagtgatggtgagcattttttcatgtgttttttggctgcataaatgtcttcttttgagaagtgtctgttcrtgtccttcacccactttttgatggggttgtttgtttttttcttgtaaatttgtttgagttcattgtagattctggatattagccctttgtcagatgagta

SEQ ID NO: 168507 - DNA, 201 bp, Homo sapiens
tatcccacggtgtacatataccacattttctttatcaaatccacccttgacaggcacctaaattaactccgggactttgctattcacacatatattgaaarcatttatactaaacaatatgtttgttatgaatagtgctatattgtacacatttcagagaaccttttccctgctaaatcttcacgtgactcttggacacat

SEQ ID NO: 168508 - DNA, 201 bp, Homo sapiens
acatttgggttggttccaagtctttgctattgtgaataatgccgcaataaacatacgtgtgcatgtgtctttatagcagcatgatttatattcctttgggyatatacccagtaatgggatggctgggtcaaatggtatttctagttctagatccctgagaaatcgccacactgacttccacaatggttgaactagtttaca

SEQ ID NO: 168509 - DNA, 201 bp, Homo sapiens
ctcagccacagatgtgctcgacccaccattttgtcttctttcttcttcctcctttttagcggctttacaaagagatttcctcatttctttcacagttaccrtatgtgttatcctctgcagagccttgctttgcttcactttgctttgcttcctgtcttttctcccctttcccatatctcccacatgttctaatcacatcca

SEQ ID NO: 168510 - DNA, 201 bp, Homo sapiens
tcattgttggacatttgggttggttccaagtctttgctattgtgaataatgccgcaataaacatacgtgtgcatgtgtctttatagcagcatgatttataktcctttgggtatatacccagtaatgggatggctgggtcaaatggtatttctagttctagatccctgagaaatcgccacactgacttccacaatggttgaa

SEQ ID NO: 168511 - DNA, 201 bp, Homo sapiens
ttaccagcaaagcaaaaccagttctgattggtcatttaaatcaatgagttgaatacaaacagaagtataattgccaaattatgggttttgggaaactatgrtgaacacgagattctttacttgtctgttgtaggttatttttccaggttatgtgatcctgtgatcacatatctgccaacattttcatgttttgggtatttc

SEQ ID NO: 168512 - DNA, 201 bp, Homo sapiens
atagcattccatggtgtatatgtgccacattttcttaatccagtctatcattgttggacatttgggttggttccaagtctttgctattgtgaataatgccrcaataaacatacgtgtgcatgtgtctttatagcagcatgatttatattcctttgggtatatacccagtaatgggatggctgggtcaaatggtatttctag

SEQ ID NO: 168513 - DNA, 201 bp, Homo sapiens
taatttcagcaataatcaaagaaatacatactataacaataattattttcacccataaaatttcccttattttcaaaactaaaagttccagtggttgacartggggaggttaaataccactccaaggtattttgcagataatttacattggttcagcttttctggtagcctttggcatatttatcacaagcatgaaagtcc

SEQ ID NO: 168514 - DNA, 201 bp, Homo sapiens
tgccatgttgcccaggctgatcttaaactcctgagctcaaagcgatcgtcccgcctcagcctcccaaagtgctcggattacaggcatgagccaccatgccyggctcacttacaaataatttaatacctctcactattgccggtgctctcactattgctggtgctctctaggtactttgcatctttacatctactacgcacc

SEQ ID NO: 168515 - DNA, 201 bp, Homo sapiens
agcctaggtcaattgtttttaataacttcgttttgctaatcggtcatggcacttgtttctctccttaaatgcaaattaggatgagaataaccttgtaaacrtgtctttgtcttctcaaggtcatgtttggccaacagtatcagtcagggtttctttttccttttttaagcaggcagccatgttctgattaaatatttataa

SEQ ID NO: 168516 - DNA, 201 bp, Homo sapiens
gtgtgtgtgtgtgtgtgtgtgtgtgtgtgtatggagagagacgacaacaaatatatatatatttggctctctctctctctctctctctctctctctctatmtatatatatatatatatatatggagagagacaacacctccaaagaaaagagaaaaaaaggaaagcacatgaccgtgaacgaatctagcagtatgagaatt

SEQ ID NO: 168517 - DNA, 201 bp, Homo sapiens
atgtgtgtgtgtgtgtgtgtgtgtgtgtgtgtatggagagagacgacaacaaatatatatatatttggctctctctctctctctctctctctctctctctmtatatatatatatatatatatatggagagagacaacacctccaaagaaaagagaaaaaaaggaaagcacatgaccgtgaacgaatctagcagtatgagaa

SEQ ID NO: 168518 - DNA, 201 bp, Homo sapiens
agatttcacaaggagtgagtttaaccactggacagcagagtgggtgctagagctgactcttgaaggatcagaaaaaattcaccacaatagaggggttgggygttccacatatagagatgacattgggctgcattcggggagcccacaagtaatggcatagaagtgtttgtgtctgatatccccttccagacatcccacaac

SEQ ID NO: 168519 - DNA, 201 bp, Homo sapiens
tacaaacattggaattgcatggtttcttttagaatctaaggtttttatagaaaatataacatcatatatatatatatatatatatatatatatatatatatgtattccattttgatgctatatactactagtcagtcacctgtaagagtttttgactaaagttttcggcaagatagatatagttgagtcatggtcaaggtg

SEQ ID NO: 168520 - DNA, 201 bp, Homo sapiens
aaaaaaaaaaaaaaaaaaggaaagaaaactgttttaagtatgatatcttcagtgtaatatatagttaacatatactattttgttgtaattagaatatgcarttattatatattaaacatatctacatctgtagtaaaatgtgttgtcctacatttcagaaaactataaggcttttgggaaagaaaatttaggagtatacat

SEQ ID NO: 168521 - DNA, 201 bp, Homo sapiens
gctagaacaaggatctgcaatatgaaagtcaggaagagccattaaataaactgatatcaatattttacttttaaattagaagacaagaaaaaaaaaaaaaactgtgtttaagagtcactattccaaggccttcacaggcagtgagaatggtcaaagatggaacaatcaaggccaaagacaaagaatcgttcttatagcaga

SEQ ID NO: 168522 - DNA, 201 bp, Homo sapiens
caggttcaggcacaaatgcaagttcccagttcccatctcctcagtgtgtgcccgctgacctccctgcaacagttctgcccattgaccagtaggggataatycagatgaacaccttcgtgcttggaatatgagcacttagacttctagattttaaaaggatttctgagcccgatctttacacacatgctttagtttgtactg

SEQ ID NO: 168523 - DNA, 201 bp, Homo sapiens
cataagaaaatgggcaagtcaaattatagatgaggatgatagtgattttttttcacatttcatgagattattgaatataatttcataaaaatgagaatacyctttcagataaaagtgtgcaaaatattttatttatgaatgtaaatttttccatccaaagccactgatcaattagttaagtaaaatagaaagcggaagaaa

SEQ ID NO: 168524 - DNA, 201 bp, Homo sapiens
gcctaccttctgatgcctggcagctaagtaagccctgattgcattaccggtgtgcctagcctggaagcaagaacatgagcaccacaaaaaaaaaaaaaaaatcaccgtgactttttggaaggaagaggagttctaagaaaatctggcttccttgtttaaatttctccctccacatataaaatattggtgttggcaggggaa

SEQ ID NO: 168525 - DNA, 201 bp, Homo sapiens
tttcttcatctagctaatattcattcattcgtaaatatacttccattcattcatctagcaaatatctattgaataactatgtgcgagggaagcttgaaggwaaaggaaagttttgtttattgacattgtggggagtttccggaattgctctaagctctttacctgcaaattgccatggtacatttttcagcttttctattt

SEQ ID NO: 168526 - DNA, 201 bp, Homo sapiens
tccttataagaggaaggacaccagtccctcatctaagaggaagaaacatctgagaagcatgtgcacagaaatgaggctgtgtgaggacacagcaagaaagsagctatctgcagaacaaggagagaggctgcaggagagaccaaacctgtccacaccttgatttttgacttccagcctccaaaactgaaagaaaatacaatt

SEQ ID NO: 168527 - DNA, 201 bp, Homo sapiens
tggccagaaactacccccttctaagagaagcctgtttcatctctgagcagctcagccagttttcattttttcttaaaattgagcaaaaacgaatcccctgytgcttaaatccattgagcctggtttatccctgagggccaaacacaatgaatcaaaaaccttcttctgcttgatagctctttaataaaaggggaaggcagg

SEQ ID NO: 168528 - DNA, 201 bp, Homo sapiens
tatatttcccaatttttcaaaatccatttttatcgcatattcaatttggcctgcttaccttatttacattacctgtctgggatgaaagacatttgaggttrtcattctggactcttaagtaagttcttcctttaaagtaaagaagctgaccttccaagctaatttatcccacttaacaagagtaataataacacaccaccc

SEQ ID NO: 168529 - DNA, 201 bp, Homo sapiens
taggaatggaaggctgaaggggagaagatagtttgtcatcaaaactaaggttctggacaaatttggagggctcagttgctgggctggccctggagaatgasactgaattctcgaccctttgaaaacaggtgccatgtttgatttctttttgtgtcagcaatgcatcttctattaaaagaatggcattagggtctcagtcaa

SEQ ID NO: 168530 - DNA, 201 bp, Homo sapiens
gcgaaaccccgtctccataaaaaatagaaaataattatccgggcatgttggtgcatgcttgtaatcccagctacttgggaggctgagacatgagaatcacytgaacccgcgaggtggaggttgcagtgagctgagatcacgccactgcactccagcctgcgcaacagagcaagactctgtctcaaaaaagaaaataataat

SEQ ID NO: 168531 - DNA, 201 bp, Homo sapiens
catcagtggatgcatctgaggtcctaagagtgtgatctccaagctttgcagggtgtcattaatggccttggaaataaagggttcttttagtacatgcctcstttaatgattccggtaggttcttttagtacatgcctcctttaatgattccggtaggttatgtgactttaggcacttcaattcctttctcattgttggatg

SEQ ID NO: 168532 - DNA, 201 bp, Homo sapiens
  misc_feature (1)...(201): n = A,T,C or G
ggtttgcccaggactgaggagtttcttgggatgcatgaaggactgtcaatgccaataccaagagagttccaggcaaaccaggatggttggtcatcctaagnctgctataccttaccacctgcaaagaatagctattgagtatttctactctgaattcagaagtttgtattcctccgaacctctgtatctcaactaccattc

SEQ ID NO: 168533 - DNA, 201 bp, Homo sapiens
ctaatagaggtggatgatggcagttataatttctcaaagatcatttgattcatcttttgtaatatttcaacatttaatataaaacagcaggcaactggagrtttataacttgattcattctaattgatttcttggcttccttgggtctaattaatttttactgtgtaccctaaaatggtgcaataggcttcctgaaagctg

SEQ ID NO: 168534 - DNA, 201 bp, Homo sapiens
agagggctctttggcagtgtcttataaaactaaacatacctcagccctatgactcagcaattccacttctgcatttctaccaatgtaaatgaagacatatraatccacacaatgacttttacatcaatgttcataacagctttattcataacagccaaaaactgaaagcaatctaaatgtctatcaataggacaatggatg

SEQ ID NO: 168535 - DNA, 201 bp, Homo sapiens
tattatgtatatgaaggtgttcaatgcagcatttcctattttagaaaagcgacactgaaaacaatataaaataaatgtctaataatgtggtaacaatgacrtaattgatgatgcatcaattccaaaattatgcagtcatcaagaataactacattatgtaaaatggtgcagccactttagagggctctttggcagtgtctt

SEQ ID NO: 168536 - DNA, 201 bp, Homo sapiens
aaaaagtcataacagtgctcagtaatcccacccctagtttctctattcaatattctgatagcagaactattccagtaacagataaaatattatgtatatgraggtgttcaatgcagcatttcctattttagaaaagcgacactgaaaacaatataaaataaatgtctaataatgtggtaacaatgacataattgatgatgc

SEQ ID NO: 168537 - DNA, 201 bp, Homo sapiens
tgggtaaacgatatgaatgggaaagtaaagccccccaaagaaagaaagaaatgcaaacacaaatagatatgagaaagttattaatttcagcaataatcaamgaaatacatactataacaataattattttcacccataaaatttcccttattttcaaaactaaaagttccagtggttgacagtggggaggttaaataccac

SEQ ID NO: 168538 - DNA, 201 bp, Homo sapiens
attctgtactagcctttataaattaaagaataatagaaatatgggtaaacgatatgaatgggaaagtaaagccccccaaagaaagaaagaaatgcaaacayaaatagatatgagaaagttattaatttcagcaataatcaaagaaatacatactataacaataattattttcacccataaaatttcccttattttcaaaac

SEQ ID NO: 168539 - DNA, 201 bp, Homo sapiens
ctagaggatatttttgatgtaattgttcatatcatgatacgagatgtaaaatgcacaccaagctctgtagactctacttttgtgcaaaaaaaaaaaaaaaaaaaaaaaaggatctgtgtccctagagctctacatctaaataactctacagtctggctactcaaagtgtgaagtgtgggccgtgaatcacctaggagtgtg

SEQ ID NO: 168540 - DNA, 201 bp, Homo sapiens
gtgcaccatcatggtgcccgtgaaaagctacagcactccagcctgtccaacatagcaagagcgcatctctttaaaaaagagagagagagagagagagagaraaaagatcatgctttcagattcctcatttttttctacatctggacactttccttaggtcctactccagccatcattagcatcttaagataaagatagaat

SEQ ID NO: 168541 - DNA, 201 bp, Homo sapiens
tctatctttaagggtggattagagggttaacagttcagcacccacagggtttttaataagtactttgaattttgagaatagacaagacctaaacattaaakattttgcttttgactaataacgtctagattattagtctaataacttcaggctgttcatagtgatcttgctgggttgaggcaattgagactacattttgaa

SEQ ID NO: 168542 - DNA, 201 bp, Homo sapiens
tgagcttctttcaatttttggaggcaatatattgctcatttgggtgtgttactcccactcatttatttagtgacccaagaagctgctagttttgagtggawcccagaacaagagaaggttttataacaggtccaggctgctatgcaagcagctctgtcacttgggccatatgattcagcagatccagtggtgtctagattt

SEQ ID NO: 168543 - DNA, 201 bp, Homo sapiens
ttacaaacattggaattgcatggtttcttttagaatctaaggtttttatagaaaatataacatcatatatatatatatatatatatatatatatatatatatgtattccattttgatgctatatactactagtcagtcacctgtaagagtttttgactaaagttttcggcaagatagatatagttgagtcatggtcaaggt

SEQ ID NO: 168544 - DNA, 201 bp, Homo sapiens
aaattgctgtgctgaatcatataaatgtatcccaagaaaatatttcaaaaaaagaaaacatgcacaaagatagtcattataaaggataacaaagtcagcaraaaaaaaaaagattgtcattatagtattttcaggactaaaacaattagacatgaatcaaatgataaaaagtttcaaaaagtaaatacataaatcatgata

SEQ ID NO: 168545 - DNA, 201 bp, Homo sapiens
attacaaacattggaattgcatggtttcttttagaatctaaggtttttatagaaaatataacatcatatatatatatatatatatatatatatatatatatatgtattccattttgatgctatatactactagtcagtcacctgtaagagtttttgactaaagttttcggcaagatagatatagttgagtcatggtcaagg

SEQ ID NO: 168546 - DNA, 201 bp, Homo sapiens
ctattttggtaagagtaccatgctgttttggttactgtagccttgtagtatagtttgaagtcaggtagtgtgatgcctccagctttgttcttttggcttargattgacttgacaatgcgggctcttttttcgttccatatgaactttaaagtagttttttccaattctgtgaagaaagtcattggtagcttgatggggatg

SEQ ID NO: 168547 - DNA, 201 bp, Homo sapiens
aattacaaacattggaattgcatggtttcttttagaatctaaggtttttatagaaaatataacatcatatatatatatatatatatatatatatatatatatatgtattccattttgatgctatatactactagtcagtcacctgtaagagtttttgactaaagttttcggcaagatagatatagttgagtcatggtcaag

SEQ ID NO: 168548 - DNA, 201 bp, Homo sapiens
ttagtttcattagatcccatttgtcaattttggcttttgttgccattgcttttggtgttttagacatgaagttcttgcccatgcctatgtcctgcatggtrttgcctaggttttcttctagggtttttatggttttaggtctaacatttaaatctttaatccatcttgaattaatttttgtttaaggtgtaaggaagggat

SEQ ID NO: 168549 - DNA, 201 bp, Homo sapiens
aaattacaaacattggaattgcatggtttcttttagaatctaaggtttttatagaaaatataacatcatatatatatatatatatatatatatatatatawatatgtattccattttgatgctatatactactagtcagtcacctgtaagagtttttgactaaagttttcggcaagatagatatagttgagtcatggtcaa

SEQ ID NO: 168550 - DNA, 201 bp, Homo sapiens
ctttgtcagatgagtagattgcaaaaattttctgccattctgtaggttgcctgttcactctgatagtagtttcttttgctgtgcagaaactctttagtttmattagatcccatttgtcaattttggcttttgttgccattgcttttggtgttttagacatgaagttcttgcccatgcctatgtcctgcatggtattgccta

SEQ ID NO: 168551 - DNA, 201 bp, Homo sapiens
ccctgattcagttacttcccatcaagcccctcccacaacacgtgggaattatgggagctacaattctagaaagacttggtctgggacacagccaaaccgtrtcatcatctcacatgtcccctctgagcccaggtcctcctggcagtgacccaagcacatgagaacacattcaaccatgacagcacatttcaagcctccgct

SEQ ID NO: 168552 - DNA, 201 bp, Homo sapiens
ataacaggtaggtagacagatgattgataaagagataggcagatcatagatagatagatagatagatagatagatagatagatagatagatagatagatagcatgaagatggttgaggtgactacaccctatgcttccttctgaagtttcgggaataattgttcattttccaagtgactgctcaatacaacattgctctgt

SEQ ID NO: 168553 - DNA, 201 bp, Homo sapiens
gataacaggtaggtagacagatgattgataaagagataggcagatcatagatagatagatagatagatagatagatagatagatagatagatagatagatagcatgaagatggttgaggtgactacaccctatgcttccttctgaagtttcgggaataattgttcattttccaagtgactgctcaatacaacattgctctg

SEQ ID NO: 168554 - DNA, 201 bp, Homo sapiens
ggataacaggtaggtagacagatgattgataaagagataggcagatcatagatagatagatagatagatagatagatagatagatagatagatagatagatagcatgaagatggttgaggtgactacaccctatgcttccttctgaagtttcgggaataattgttcattttccaagtgactgctcaatacaacattgctct

SEQ ID NO: 168555 - DNA, 201 bp, Homo sapiens
tggataacaggtaggtagacagatgattgataaagagataggcagatcatagatagatagatagatagatagatagatagatagatagatagatagatagatagcatgaagatggttgaggtgactacaccctatgcttccttctgaagtttcgggaataattgttcattttccaagtgactgctcaatacaacattgctc

SEQ ID NO: 168556 - DNA, 201 bp, Homo sapiens
tccatgaatgaagttttaggactttatgccaaataaaataagccaaacacaaaaggacaaatattatacaattttacttatataactacttagaatactcmaattatttaattacctggagtagtcaaattcatggatacagagagtaagactggtggttgccaggttataggggcaagagggaatgaggagttagtgttt

SEQ ID NO: 168557 - DNA, 201 bp, Homo sapiens
cagagagagctgcttcatggtggtaggcccagggggattggagagagtggtgccagaaagttggatagaaaagttaatgcaacaattataaagaagataadaacgtagtatttgaaaataaatattttaacaagataaatataatacaaaaaatggaataagaaaaatacattattatcgaatattctgtattgagttttg

SEQ ID NO: 168558 - DNA, 201 bp, Homo sapiens
aaagagagagtggatatttcagtggctaaacccaaagttttttagcatttagactatggcaccctctagaaaagcaatttaaaatgtgaaaaaagagaggwcagttaaaaaatagattagatagataggtagatagatggataacaggtaggtagacagatgattgataaagagataggcagatcatagatagatagatag

SEQ ID NO: 168559 - DNA, 201 bp, Homo sapiens
aacctgacctgtttgaagtagtagcaattcaacattaaacctcgactagtgttgaataatattttggggctttgtgttgtatgctacagagtgaccccccmcaagttccttgcccatgtgtggctagacaatggaaatagttccgtgcttcaacatgttccccaaacacattccacaggagagcgcatccgagcatcaatt

SEQ ID NO: 168560 - DNA, 201 bp, Homo sapiens
tccattctacccttggcacacatcacttcctaaactgtcttattgcttttaattgtatattttttcccttaatttcaattaaaatctataattcattagcygtcaaaacctgacctgtttgaagtagtagcaattcaacattaaacctcgactagtgttgaataatattttggggctttgtgttgtatgctacagagtgac

SEQ ID NO: 168561 - DNA, 201 bp, Homo sapiens
acaatttttttaattaattgaaaaaataaactagcacagacctttgggaaattaaaaagtcataacagtgctcagtaatcccacccctagtttctctattsaatattctgatagcagaactattccagtaacagataaaatattatgtatatgaaggtgttcaatgcagcatttcctattttagaaaagcgacactgaaaa

SEQ ID NO: 168562 - DNA, 201 bp, Homo sapiens
cttagaataatctaccttaccttttttgactaattgagatttctctaaacatgtttaattcacttctgcaatggttaagatttacattcctagactcattsgaatcatttaaaacttaattgctctgtaatcaacaaatgggcatttttagaattttcatgtttcttcatcataacatcatatcaaagtgtattgaactgc

SEQ ID NO: 168563 - DNA, 201 bp, Homo sapiens
aattattgctcttttggttttatcgtcctggcagttctaaggtactttttctctcctcttgaaattgccccccaaaattagctcaatataatatgagtgcrcattgataacatttcataacttcccctgggaatatcaagaattatattaaatagacagatctggaaatgtttccttccactttgcccttaattcttattt

SEQ ID NO: 168564 - DNA, 201 bp, Homo sapiens
gattttcttgagaagggaggctgaagggaatactgatgtcatatatgttctttctagaatttcaggtctattttctctcccgatactttgttaaatgtccrgtaccaggtttgctttgcatcagcgtgagtgtgtgtgtgtgtgtgtgtgtgtgtgtgtgtgtgtgtgtgtgaagcggcacatggtcaggcttcattagct

SEQ ID NO: 168565 - DNA, 201 bp, Homo sapiens
aatacagactgatgcaataataagtttaagagacagcaataatgaacaacaaagattgttgaatacatgagaaaatttgtttcaaattctaccctttggarataatcatcattaaagctggatgaactaaattttaacaaggaagttggcgagtaaccaaatctatatttaaaggctttcagcctaccaaatcttgcatgt

SEQ ID NO: 168566 - DNA, 201 bp, Homo sapiens
tgatttgcatttctctgatggccagtgatgatgagcattttttcatgtgtctgttggctgcataaatgtcttcttttgagaggtgtctgttcatatccttygcccacttgttgatggggttgttttttttcttgtaaatttgtttgagttcattgtagattctggatattagccctttgtcagatgagtagattgcaaaaa

SEQ ID NO: 168567 - DNA, 201 bp, Homo sapiens
taacttttcatttacattaggtatatctcctaatgctatccctaccccctcccccaaccccacaacaggccccagtgtgtgatgtcccccttcctgtgtcmaagtgttctcattgttcaattcccacctgtgagtgagaacatgcggtgtttggttttttgtccttgagatagtttgctgagaatgatggtttccagcttc

SEQ ID NO: 168568 - DNA, 201 bp, Homo sapiens
gagaattctgagcagcttcagcttgtaaggttggaagcctatagatgatttagccatcactgtataataggtgattcagtgtaattctgttgttctaggayaacagtccccagtgactgtatgcaatgagtagatcaaaatcacatgaattgcttattgaaaatcaaattctaacgaggcccgttattctcaacttgagca

SEQ ID NO: 168569 - DNA, 201 bp, Homo sapiens
gaatctttgaaatctcataagcaaatagaaaacacttatctttgtttaagaaattaagaacatgttgcaaacaaattttccctttttttttttttttttttggtagcactgggctttgtaagaatttttttaaaattatacagtacactgtcctatatttagaaaagtcagtacctaaatggccaacacggaatgttggct

SEQ ID NO: 168570 - DNA, 201 bp, Homo sapiens
agtttggcaatacctttattattattattattattattattattattattattattatactttaagttctgggatacatgtgcagaatgtgcaggtttgtyacataggtatatatgtcccatggtggtttgctgcacccatcaacccgtcatctgcattaggtatttctcctaatgctatccctcccctagccccccactc

SEQ ID NO: 168571 - DNA, 201 bp, Homo sapiens
tgagtttccatttcttacctatcagattgtcaacatttcgaaagtttggcaatacctttattattattattattattattattattattattattattatwctttaagttctgggatacatgtgcagaatgtgcaggtttgttacataggtatatatgtcccatggtggtttgctgcacccatcaacccgtcatctgcatt

SEQ ID NO: 168572 - DNA, 201 bp, Homo sapiens
atacacacatgttatagatgttgatggagaggtaaaggattaaaatatagaccatctgagagctgtcttcatcattctacagtcaaaggtcccaagagtcrcaacccatctgcagctcctttgtcaatgaaggatggtcatatatttcaagtttcaaacctgggcatatgttctgacaattaagaatatttgggatctggg

SEQ ID NO: 168573 - DNA, 201 bp, Homo sapiens
ctgtctaaggaatgaaaggaaccagcctctgacgctgcctgctgtctttgtctacatagaagtgaaagactatgtgccagacacatatgcaggtaaacaayttaactcaaataccactttactcaaaggggtatttctgtctgagtcaccatatatttttgggttagtgaaaggaaaactgaaccaaacaaagcaggagat

SEQ ID NO: 168574 - DNA, 201 bp, Homo sapiens
cttttgagtgtatgctgtataaaaattgaccaaattatccacaaatcttcctgtaccacttgtcaaggttgaaaacccaagaaaaaataagattctttctmtcactggagtgatattactgagcttttcagagtctattctcatgccaagatgtatgtttgttaaattttgagccggatgtggttttcattcagaaagtat

SEQ ID NO: 168575 - DNA, 201 bp, Homo sapiens
ctgagtttccatttcttacctatcagattgtcaacatttcgaaagtttggcaatacctttattattattattattattattattattattattattattatactttaagttctgggatacatgtgcagaatgtgcaggtttgttacataggtatatatgtcccatggtggtttgctgcacccatcaacccgtcatctgcat

SEQ ID NO: 168576 - DNA, 201 bp, Homo sapiens
caatattgaagtgtcatgggggatgattagaaaaataaaaacctaaaaagcctcccttgcagggcaataatggaaaaagttgagaagcactgttatagagygcgtacttgaaggtttaatttccagtgcttcccataccagcttaactggctttccttgaggaagtcacttagcccaagccttggtctaggtatctgtaaa

SEQ ID NO: 168577 - DNA, 201 bp, Homo sapiens
tttgtttttcatctaaagtaacctgaaatacatgctttcatcacatagatgcgcataattataactaacattggaaaggaaatatgtgctacacagcattmttctcaccttccaggctatcactatatctgtctaaggaatgaaaggaaccagcctctgacgctgcctgctgtctttgtctacatagaagtgaaagactat

SEQ ID NO: 168578 - DNA, 201 bp, Homo sapiens
gcctcagagtttccccactggaggtgcaagggagctgggatatttatccaccaactttcttgagtcattggttgatggttgtttccaggagacatcaactytcttgcacttccagcctgttaggccttaagcaggctctggccatggaaaaatcacttcaacagaaaagatacaaaggctgatagttagaagtcgagtcca

SEQ ID NO: 168579 - DNA, 201 bp, Homo sapiens
aacacaaatgatacttaccgtatttcacatggttgttatgttgaggactgagccgcattatgtgagaaggctaaacatcatgtccttaatactgaatataygttcttttccccttttccccttttctttcttctttgctgtcccactctgagactcctttcttccaactctgagatgtagttttaaatcttttatgaaaaa

SEQ ID NO: 168580 - DNA, 201 bp, Homo sapiens
cactgagtttccatttcttacctatcagattgtcaacatttcgaaagtttggcaatacctttattattattattattattattattattattattattattatactttaagttctgggatacatgtgcagaatgtgcaggtttgttacataggtatatatgtcccatggtggtttgctgcacccatcaacccgtcatctgc

SEQ ID NO: 168581 - DNA, 201 bp, Homo sapiens
atagtcagggctgtattgctcatgtttagtttgacaagcatcacatctgattttctgtgacccttagaactctttgcccgttgcatagctgttttcccccsagtgtctctatttgctgtatttggccctgctgcttcctgatgcaagtcttgggcaatccctgtggaacatcgcttgttacttttcctgttgactctgtgg

SEQ ID NO: 168582 - DNA, 201 bp, Homo sapiens
cctttccatatttagtgcttccttcaggagctcttgcaagtcaggcctggactaaatccctcagcatttgcttgtctggaaaggcttttatttctccttcscttatgaagcttagtttggctggatatgaaattctgggttgaaaagtgttttctttaagaatgttgaatattggcccccaatctcttctggcttataggg

SEQ ID NO: 168583 - DNA, 201 bp, Homo sapiens
ctgatttagttatgaactggtaaatttgttttcatgactcaatttctacaaagcaaactttattatatatatatatgtgtgtgtgtgtgtgtgtgtgtgtgcatttttaatgtatgttcatttttttctgttgattttttaaattatgttcattacataagttcctaactgatagcattctcatcgtaaacaggtcaaact

SEQ ID NO: 168584 - DNA, 201 bp, Homo sapiens
tttttttttttttttttttgagacggagtctcgctctgtcgcccaggctggagtgcagtggcgggatctcggctcactgcaagctccgcctcccgggttcrcaccattctcctgcctcagcctcccaagtagctgggactacaggtgcccgccactacgcccggctaattttttgtatttttagtggagatggggtttcac

SEQ ID NO: 168585 - DNA, 201 bp, Homo sapiens
agacactcctggaggaaaagtctcatcaatgctgatacacgtggatgttttactccaatgatcttaattcctcacctggcatccaagactacgtttataakgttttcatttcatagtcagggctgtattgctcatgtttagtttgacaagcatcacatctgattttctgtgacccttagaactctttgcccgttgcatagc

SEQ ID NO: 168586 - DNA, 201 bp, Homo sapiens
tcttgtgatgttgatgatggtcaagtctaaggagcagagctagaacaaagatgaacttaaaagtcatcaataaagaggtattttttacccagctgtcagarcaagaaaagttttttgtacaatttttaatcttgtatattaacggttcttctttaagatataatttatatagagtagaatgcacaaatctcaaatataaca

SEQ ID NO: 168587 - DNA, 201 bp, Homo sapiens
gctgatttagttatgaactggtaaatttgttttcatgactcaatttctacaaagcaaactttattatatatatatatgtgtgtgtgtgtgtgtgtgtgtgtgcatttttaatgtatgttcatttttttctgttgattttttaaattatgttcattacataagttcctaactgatagcattctcatcgtaaacaggtcaaac

SEQ ID NO: 168588 - DNA, 201 bp, Homo sapiens
atagatggctcttattattttgagatatgtgccttcaatgcctagtttgttgagggcttttttttttttttttttttttttttttttgagacggagtctckctctgtcgcccaggctggagtgcagtggcgggatctcggctcactgcaagctccgcctcccgggttcgcaccattctcctgcctcagcctcccaagtagc

SEQ ID NO: 168589 - DNA, 201 bp, Homo sapiens
ccctctactctggaccttcttcatctcttctgcttttctttattttgggaaatttcagagtagagacactcctggaggaaaagtctcatcaatgctgatayacgtggatgttttactccaatgatcttaattcctcacctggcatccaagactacgtttataatgttttcatttcatagtcagggctgtattgctcatgtt

SEQ ID NO: 168590 - DNA, 201 bp, Homo sapiens
ttatagagcctggatagttgttagaaggtgggatgctctctataagggaactactgctctccataaggaaagcatttgttaaatgggcaggaactgtaacmtgagggatttagcattgtcttagcttgccaagctctagtttgttgatgtaagatactgacagttctctttaaatctttgtaaacaaggtagaagctcatg

SEQ ID NO: 168591 - DNA, 201 bp, Homo sapiens
tttcagattttgagagttgttggctcatatatataggcatatatatatatatatgtacacatatctatatgtacacatatatatgtgtacatatatattarcatatatgtgtgtgtgtttttcttaatacaaatcctttctttagatatatgatttttcaaatattttctccaagtctgtggcatgtcttttcattcttat

SEQ ID NO: 168592 - DNA, 201 bp, Homo sapiens
ctggaaaattctatttatgacaagtgggatttaggccagcatgagtagaagaatgtgtcaggtggagggaacagcaggtgtgggtattccaaagagccaargaacacaagattttgaaggagagaagcagaattagcacaggagagtgtggctcagataatgtggttggatggcaagggcctgcatatatactgcgtaggt

SEQ ID NO: 168593 - DNA, 201 bp, Homo sapiens
taagcttgatagaaattaaggtagtgtatccagaagaaatgggttttaagagatatttgtataagctgtctatttctttgctgagggtctgtgcatataaragaattctgagcagcttcagcttgtaaggttggaagcctatagatgatttagccatcactgtataataggtgattcagtgtaattctgttgttctaggac

SEQ ID NO: 168594 - DNA, 201 bp, Homo sapiens
tatgctgattttaggagaatagtttcttttcttattttcagattttgagagttgttggctcatatatataggcatatatatatatatatgtacacatatctatatgtacacatatatatgtgtacatatatattagcatatatgtgtgtgtgtttttcttaatacaaatcctttctttagatatatgatttttcaaatatt

SEQ ID NO: 168595 - DNA, 201 bp, Homo sapiens
tcttctcagccttccaaagtctttttctgccctcaccactactttgaaatttctttatcatggctgtgggcaacatggctcccagcaaccccaactgatgyttttcagaatcttccttgtttttatttgctgcagtaccttccaccccttcatccattcattcaccagtcatactttaaaaatgtactgatgtctctttta

SEQ ID NO: 168596 - DNA, 201 bp, Homo sapiens
attataatccttatagcaatgctgttggtgccctgcccagattccttgtacagctggtgcacccgtctcctggctggtggtgagggttggctgttaacagytcataacttctccttctctgcaaaattgccctcaaccaaaaggaagccccctctccagatggttatgcctccctgcactgaatgttccaaatatgcaaga

SEQ ID NO: 168597 - DNA, 201 bp, Homo sapiens
ttatgctgattttaggagaatagtttcttttcttattttcagattttgagagttgttggctcatatatataggcatatatatatatatatgtacacatatctatatgtacacatatatatgtgtacatatatattagcatatatgtgtgtgtgtttttcttaatacaaatcctttctttagatatatgatttttcaaatat

SEQ ID NO: 168598 - DNA, 201 bp, Homo sapiens
ttctcatattctaaattttaccattagttcctattttctgaaaaatatgctcacccatacacccaaatattgcaatgaaaagcccttaaagaaattcagargcgttgggagtgacagaacaaaagatgcatggttgtgaaaacatcctatcacgataatgattcacaaagagaaaaaagaatacttgtgctttattgctaa

SEQ ID NO: 168599 - DNA, 201 bp, Homo sapiens
aaagcgtctgtttatgctgattttaggagaatagtttcttttcttattttcagattttgagagttgttggctcatatatataggcatatatatatatatawgtacacatatctatatgtacacatatatatgtgtacatatatattagcatatatgtgtgtgtgtttttcttaatacaaatcctttctttagatatatgat

SEQ ID NO: 168600 - DNA, 201 bp, Homo sapiens
ggaacaccttgctccttgtccttccattccatctgaaatctcctagggtcctaagggactctgtgaccttcttaaatgggatttctccatgtgtgtttgaraaggaaactatttattggcaatgcagagctcactgctgttacagtgctgatttcatttaaggtccaaatatgtcttaagattgagtgtatactacactgc

SEQ ID NO: 168601 - DNA, 201 bp, Homo sapiens
cccggaaggtgatgttgcagtgagccaaggttgcaccattgcactccagcctgggcaacaagagcaaaactccatctcaaaaaaaaaaaaaaaaaaaaaaaggaatagcacataaaggtataaagctgtcatgtgtttgccaaaggataatgttttctattatgatagaagattggccccaagagtagtcatcacataaat

SEQ ID NO: 168602 - DNA, 201 bp, Homo sapiens
cttcgtgacctttgaggtgttgtgttacattggttggaacaccttgctccttgtccttccattccatctgaaatctcctagggtcctaagggactctgtgrccttcttaaatgggatttctccatgtgtgtttgagaaggaaactatttattggcaatgcagagctcactgctgttacagtgctgatttcatttaaggtcc

SEQ ID NO: 168603 - DNA, 201 bp, Homo sapiens
acccggaaggtgatgttgcagtgagccaaggttgcaccattgcactccagcctgggcaacaagagcaaaactccatctcaaaaaaaaaaaaaaaaaaaaaaaggaatagcacataaaggtataaagctgtcatgtgtttgccaaaggataatgttttctattatgatagaagattggccccaagagtagtcatcacataaa

SEQ ID NO: 168604 - DNA, 201 bp, Homo sapiens
cagaatattaaatcccaaaccaaatatttgaaaatggaaactggtcaaataaaccctgccagccatagaatactatgcagctgtaaaagaaaaaatttttwaaaaaaaaggagaagaaaaagaggaggaggagaaagatgtgctctatgggttgatttggaaatatcccctagaaagaaggcaagaataatcacatttgca

SEQ ID NO: 168605 - DNA, 201 bp, Homo sapiens
  misc_feature (1)...(201): n = A,T,C or G
taggccacttttttgtgacttagattggatcctattcttaaccacagcatctctcatcccctataaaggaaagagagacagaataatataaaaagaaaatnttttggatgtctccaggttccatttttaaacatgtaacttgaaaattagagaataagggagacaaatcatgcctttgggccaaatttaaaagtcaagaag

SEQ ID NO: 168606 - DNA, 201 bp, Homo sapiens
aaaaaaattgtgatacattttggaataaataactggagaaaatgagactatccagatggatataaccaatcagctactaaggtaaagcaaggataaatgcygtctatctatacttcagaaaatatggaagtcaccagatatgccatactgtgtgatgagagagaaaagaaaatacgttggttgagaaaatacgttggttac

SEQ ID NO: 168607 - DNA, 201 bp, Homo sapiens
atttgatctttctaggaggcttgatgtacttgataaggtttcaacttgttagtgaaagtgagatttcagttatattaggcagagctttgaaatggggttttctttcttcataactttcctgaaaaggtgacttttcatgcagccaaacagagaaagttttattaactaaagagagaattaatggcaccaagtaaagtaact

SEQ ID NO: 168608 - DNA, 201 bp, Homo sapiens
aggaattttcttagagttgccctaaaataatagtattagctatttaaaagtgacctcaagagacatgaggttcttatatttatttttattctgggaacatrtgcattgaggtaagaattttgaaacacttgcgtatattctgtacaaaatgtgcgctttatctcgtttctattttgaatttcaaacaaatttatgatgagt

SEQ ID NO: 168609 - DNA, 201 bp, Homo sapiens
tcatagatggctcttattattttgagatatgtgccttcaatgcctagtttgttgagggcttttttttttttttttttttttttttttttgagacggagtcycgctctgtcgcccaggctggagtgcagtggcgggatctcggctcactgcaagctccgcctcccgggttcgcaccattctcctgcctcagcctcccaagta

SEQ ID NO: 168610 - DNA, 201 bp, Homo sapiens
tcaggctcttttttgattccatatgaattttagaatatttttttctaattctctgaagaatgtcattggcagtttgataagaatagcatcgagtttgtacrttgctttgggcagtatggccagtttatcaatattgactcttcctatccataagcgtggaatatatttctatttgtttgtatcatctctgatttctttgag

SEQ ID NO: 168611 - DNA, 201 bp, Homo sapiens
tcgttgcaattgcttttggcatcttcgacacaaaattgttgccagggcctatgtccagagtgatatttcctgggttttcttcaggggtatttacagttttyggttttacgtttaagtctttaatccatttggagtttatttttgtatatggtttaaagaaatggtcctgtttcaatcttctgcatagggctggccagttat

SEQ ID NO: 168612 - DNA, 201 bp, Homo sapiens
tttgttttcgttgcaattgcttttggcatcttcgacacaaaattgttgccagggcctatgtccagagtgatatttcctgggttttcttcaggggtatttayagttttcggttttacgtttaagtctttaatccatttggagtttatttttgtatatggtttaaagaaatggtcctgtttcaatcttctgcatagggctggc

SEQ ID NO: 168613 - DNA, 201 bp, Homo sapiens
catgtgggaaagaaggagagggaagagaatctgaaagaccgttcagcaggcaggtgcaactcagaattaagagagaataatatactctacctaaggacagscctcaaccagtggaatgatggggatggtttccgggtaaactccgaccctcattgtcccgaaggagaacacttccggggcacatactacaatcgtttctta

SEQ ID NO: 168614 - DNA, 201 bp, Homo sapiens
tttgtcaatttttgttttcgttgcaattgcttttggcatcttcgacacaaaattgttgccagggcctatgtccagagtgatatttcctgggttttcttcargggtatttacagttttcggttttacgtttaagtctttaatccatttggagtttatttttgtatatggtttaaagaaatggtcctgtttcaatcttctgca

SEQ ID NO: 168615 - DNA, 201 bp, Homo sapiens
taaatacggagtaatgggaccaaagaatgttacccttaatagagagatttatgcttttgaagtcttaaatatatgtacattttgactgccttgttactttwcacatataataaatatgcatgtattgtaatatataaaaataaccatatgagaaagtattctatggtgttctccaaaaatatttaatagggctacaggcca

SEQ ID NO: 168616 - DNA, 201 bp, Homo sapiens
tctgcaaatcacattattttctattctgattctcccacttacattttgaatgaaactgattactccagttatattttcgagtgcttcccccttcttacctytgattttagatagagtttatgacacatgctctgtaaatatcaagtgaagttattttagtatatggtgcaacattttataaataacaagaaagagtatgct

SEQ ID NO: 168617 - DNA, 201 bp, Homo sapiens
tagccgggcatggtggtgcatgcctgtaatcccagctacggaggctgaggtaggagaatcacttgaacctggaaggcggaagttgtggtgagctaagatcrtgccattgcactctagcctgggctacaagagcaaaactccatctcaaaaaaagaaagaaaagaaaagaaaaaagataattcaatgttaactatgtcatgc

SEQ ID NO: 168618 - DNA, 201 bp, Homo sapiens
agagttcaagaccagcctggccaatatgatgaaaccccgtctctattagaatacaaaaattagctgggtgtggtggcgcacacctgtaatcccgaccactmgagaggctgaggcagaagaatcacttaaacccaggaggcaggcagaggtttcagtgagccaagatcgcgccactgcattccagcctgggcgacagagcga

SEQ ID NO: 168619 - DNA, 201 bp, Homo sapiens
agcatgttcgagccctcatccccaggagccggtgaggggctggtgggctctccccgtcatgttttgtgttggtttaagaattgctgctctgggctgtgcgyggtggctcatgcctgtaatactactacttttggaggctgaggcaggtggattatgaggtcaggagttcgagaccatcctggccaacatggtgaaaccccg

SEQ ID NO: 168620 - DNA, 201 bp, Homo sapiens
catttttctgggatgaaaacacatgagtttgaccaaggaaaagtttggtagattttgtcaatgaagcatgaaaagggatcagtctttactctgagctcatyttttttttttagctgagtgtgctcttggaagatgcaggcatcagtgtatttatatctgggtcaacagggcatgcggtgaaggggaaggaaggccattacc

SEQ ID NO: 168621 - DNA, 201 bp, Homo sapiens
aggcaggtggatcacttgaggtcaagagttcaagaccagcctggccaatatgatgaaaccccgtctctattagaatacaaaaattagctgggtgtggtggygcacacctgtaatcccgaccactagagaggctgaggcagaagaatcacttaaacccaggaggcaggcagaggtttcagtgagccaagatcgcgccactgc

SEQ ID NO: 168622 - DNA, 201 bp, Homo sapiens
caatgccctatcttttcccaaagcactactacagattctatttgaaattgagccattaccttctggtatgttgaggcagaagaaaggcaaagaataactgstgcagctcttagactctttgttttcctgttattgaggagcctttctaagaaagcaccacggtcatccttgcttcatgggaatctggggtttgttttgttg

SEQ ID NO: 168623 - DNA, 201 bp, Homo sapiens
tgaagaaatgcctttatgccctggttacaatgatttcctgctatataagatcattcaggccgggcgcggtggctcatgcctgtaatcccagcactttgggrggccgaggtgggcggatcacctgaggttgggagtttgagaccagcctgaccaacatggagaaaccctgtctctactaaaaataaaaaaattagccgggca

SEQ ID NO: 168624 - DNA, 201 bp, Homo sapiens
acgcctgtaatcccagcatattgggaagccaaggcaggtggatcacttgaggtcaagagttcaagaccagcctggccaatatgatgaaaccccgtctctaytagaatacaaaaattagctgggtgtggtggcgcacacctgtaatcccgaccactagagaggctgaggcagaagaatcacttaaacccaggaggcaggcag

SEQ ID NO: 168625 - DNA, 201 bp, Homo sapiens
ctcagcctggaccttattgttcatatcattatcagcatttttgtcaaagccattcaacaagtctctaggaagttccaaacttttccacattttcctgtctycttctgagccttccaaactgttctaacctctgctttttacccagttccaaagttgcttccccatttttgggtatcttttcagcaacaccacactactggt

SEQ ID NO: 168626 - DNA, 201 bp, Homo sapiens
cattgctgctttgagacaaaaagggcaggccagccgcagtggctcacgcctgtaatcccagcatattgggaagccaaggcaggtggatcacttgaggtcargagttcaagaccagcctggccaatatgatgaaaccccgtctctattagaatacaaaaattagctgggtgtggtggcgcacacctgtaatcccgaccacta

SEQ ID NO: 168627 - DNA, 201 bp, Homo sapiens
ctcagcctcccaaagtgctgggattatagatgtgagccaccgaacgtggccaacaaaaagcttttaatagagtctaaatgaatacaagtttgaagagattsatagacttttccaaagaatctctgttatttttaggattcatacatatgaagcttagatccctgcaaactcagtttttgagctattgtcttcaaaatagct

SEQ ID NO: 168628 - DNA, 201 bp, Homo sapiens
tccacccgcctcagcctcccaaagtgctgggattatagatgtgagccaccgaacgtggccaacaaaaagcttttaatagagtctaaatgaatacaagtttraagagattgatagacttttccaaagaatctctgttatttttaggattcatacatatgaagcttagatccctgcaaactcagtttttgagctattgtcttc

SEQ ID NO: 168629 - DNA, 201 bp, Homo sapiens
gcgcaatctcggctcaccgcaacctctgcctccccggttcaagcgattttcctgcctcagcctcctgagtagctgagattacaggcttgtgccaccacgcmcagctaattttgtagttttagtagagatagggtttctccatgttggtcaggctggtctcaaactcctgatgtcatgatccacccgcctcagcctcccaaa

SEQ ID NO: 168630 - DNA, 201 bp, Homo sapiens
gaataggaatttaaaactacgtcttctggccaaattcagtgtcctttccagtctaccatgatgtccccgaacagggtccttttagtaacaacaacaacaamaaaaaactttttatttttttatttttttttttagacggagttttgctctttttgcccaggctggagtgcaatggcgcaatctcggctcaccgcaacctct

SEQ ID NO: 168631 - DNA, 201 bp, Homo sapiens
tggctgatatggccttttgcggttctaggatttcacagctttcagtcctaaatataataatcatctaagtatcctacatagttttctccttcagtactacygttgagtaaaatgaagttttgctgtaatatttcctctggaattcaaaatccagactaagtcctaatagcaggcattcatgcttatatagcagccctgctt

SEQ ID NO: 168632 - DNA, 201 bp, Homo sapiens
tggtagagctcctggaacattcatttgcatataggtgaatcaattattgtaggagaggtcgcttcagtaaatgttcagagttttcctgggattctatgacrtaaagatccacaagtcagctttgaagaaggcagctctcaagccctcatctttgccgtccattggatggaggaagggtggcatagcaacaatggttgtttc

SEQ ID NO: 168633 - DNA, 201 bp, Homo sapiens
ggaagggacggactgcagaagaggaacctgtcatcacccatggcttcaccatgacaactgaaatatctttcaaggtagagtatatgaatgttactaagagrggcagctggagacacctgattccttttggttaaagcctcctaaggtagaaagtcccagtggtcacaattaagtccaaaggctgttaatcatctttgcaat

SEQ ID NO: 168634 - DNA, 201 bp, Homo sapiens
ggtataagcttttgtgtggacatgttttcatttctcgtaggtatatacctaagaatgtaattgctgggtcatatgatggctgtgtttaacatcttaaggarttgcaaactgttttccaaattggctatgacattttaccttcccaccagcagtttatttgataaattcctttcagatagaattcataaatattttctccca

SEQ ID NO: 168635 - DNA, 201 bp, Homo sapiens
ttgatagacatttggattgtttttattttttggctattatgaaaaatgctgctatgaactttcaggtataagcttttgtgtggacatgttttcatttctcrtaggtatatacctaagaatgtaattgctgggtcatatgatggctgtgtttaacatcttaaggagttgcaaactgttttccaaattggctatgacatttta

SEQ ID NO: 168636 - DNA, 201 bp, Homo sapiens
atttgaaggaagaaaaggattcaaagaaattctgccctgcgttctgctgatggcagttttatttgagaactcttgcactgtcaaatgtttcttagttcatygcccaatttaatatttcagaaaagtcatccaaggactgttttcttttgtggttttctttctggcagcattctatggcttctctgttcttggagtgttctt

SEQ ID NO: 168637 - DNA, 201 bp, Homo sapiens
gtcaacgctgagacatagaaatgactgtgatttcagactgtgggttactgttagtacaagcccacctctcccctgaaagagaaaacagaaaactgcatcarcaatagcatctcttctttccttccatccactccattgcagagacaagctactcttctgcatacctccatctgcctaccttctgatgcctggcagctaagt

SEQ ID NO: 168638 - DNA, 201 bp, Homo sapiens
atttcagactgtgggttactgttagtacaagcccacctctcccctgaaagagaaaacagaaaactgcatcagcaatagcatctcttctttccttccatccrctccattgcagagacaagctactcttctgcatacctccatctgcctaccttctgatgcctggcagctaagtaagccctgattgcattaccggtgtgccta

SEQ ID NO: 168639 - DNA, 201 bp, Homo sapiens
aaagaaaccccctacccattaataagcattcttccctccttcctcttcccagaccctggtaaccatttacctttctgtctctatgtgtttaactattctagaaatttcatataaatggaatcatataaaattatgttggtgcaaaagtaattgatgtttttgcttgtgaaagtaatggccaaaactgcaatcacttttgca

SEQ ID NO: 168640 - DNA, 201 bp, Homo sapiens
ttcttccaccagataccctaaatcatctctctctagttcaaagttctctaaatctccagggcaggggaaaaatgctgccagtctctttgctaaaacataamaagagtgtcctttgctccagttcccaatgagttcctcatctccatctgagaccacctcagcctggaccttattgttcatatcattatcagcatttttgtc

SEQ ID NO: 168641 - DNA, 201 bp, Homo sapiens
tcctgaaaacacctcagataaatgaatggatgggcattatgtacattgaatttgtttccttccttccttcgttccttccttccttcgttccttccttccttccttcctttcgacagggtcttgctcttttgctcaggctggagtgcagtggcatgatcacaactcactgcagtctcgacctcctgggctcaatcaatcctc

SEQ ID NO: 168642 - DNA, 201 bp, Homo sapiens
aatcctgaaaacacctcagataaatgaatggatgggcattatgtacattgaatttgtttccttccttccttcgttccttccttccttcgttccttccttccttccttcctttcgacagggtcttgctcttttgctcaggctggagtgcagtggcatgatcacaactcactgcagtctcgacctcctgggctcaatcaatcc

SEQ ID NO: 168643 - DNA, 201 bp, Homo sapiens
aaatcctgaaaacacctcagataaatgaatggatgggcattatgtacattgaatttgtttccttccttccttcgttccttccttccttcgttccttccttccttccttcctttcgacagggtcttgctcttttgctcaggctggagtgcagtggcatgatcacaactcactgcagtctcgacctcctgggctcaatcaatc

SEQ ID NO: 168644 - DNA, 201 bp, Homo sapiens
aggatagagaattccaagtttgtcaagtaatgaactgcatgatattcctggtctctttattcaaagtcatctcctacttatacccctaatgtgtgcgcgcrcacacacacacacacacacacacacacacacgtacacaccatcttgccttccaggcaccctcagccacctttactactcctggcatgctgtctcctgcac

SEQ ID NO: 168645 - DNA, 201 bp, Homo sapiens
tgcaataaaatcctgaaaacacctcagataaatgaatggatgggcattatgtacattgaatttgtttccttccttccttcgttccttccttccttcgttccttccttccttccttcctttcgacagggtcttgctcttttgctcaggctggagtgcagtggcatgatcacaactcactgcagtctcgacctcctgggctca

SEQ ID NO: 168646 - DNA, 201 bp, Homo sapiens
tatgcaataaaatcctgaaaacacctcagataaatgaatggatgggcattatgtacattgaatttgtttccttccttccttcgttccttccttccttcgttccttccttccttccttcctttcgacagggtcttgctcttttgctcaggctggagtgcagtggcatgatcacaactcactgcagtctcgacctcctgggct

SEQ ID NO: 168647 - DNA, 201 bp, Homo sapiens
ctgtgtggagctggactgctggaagggacggactgcagaagaggaacctgtcatcacccatggcttcaccatgacaactgaaatatctttcaaggtagagyatatgaatgttactaagagaggcagctggagacacctgattccttttggttaaagcctcctaaggtagaaagtcccagtggtcacaattaagtccaaagg

SEQ ID NO: 168648 - DNA, 201 bp, Homo sapiens
atatgcaataaaatcctgaaaacacctcagataaatgaatggatgggcattatgtacattgaatttgtttccttccttccttcgttccttccttccttcgttccttccttccttccttcctttcgacagggtcttgctcttttgctcaggctggagtgcagtggcatgatcacaactcactgcagtctcgacctcctgggc

SEQ ID NO: 168649 - DNA, 201 bp, Homo sapiens
ttgctgaactgatcctcttgaacaacagcaacaaaagtgacttacagtcagtttagatggccattgattgggttcttgtctgtcccaagtctgggaagtayagcaggtatagtaaatgccctgaaggagcaaacagttcaacaaaaccctagtaatttacagaggaaatgtaatgccttcaggctgttattggcatggcaa

SEQ ID NO: 168650 - DNA, 201 bp, Homo sapiens
gatatgcaataaaatcctgaaaacacctcagataaatgaatggatgggcattatgtacattgaatttgtttccttccttccttcgttccttccttccttcgttccttccttccttccttcctttcgacagggtcttgctcttttgctcaggctggagtgcagtggcatgatcacaactcactgcagtctcgacctcctggg

SEQ ID NO: 168651 - DNA, 201 bp, Homo sapiens
tcttgacttctaactttatagtttggttttgcttgtttttaatctaataagctatttttactttgaatgaaaactttaaaaaaaacctcttcagcctaaarcatttttattattgctgaactgatcctcttgaacaacagcaacaaaagtgacttacagtcagtttagatggccattgattgggttcttgtctgtcccaag

SEQ ID NO: 168652 - DNA, 201 bp, Homo sapiens
ttgtattagtccattttcatgctgctgataagacatacctgagactgggcagtttacaaaagaaagaggtctcacccacaacatacgggaaatcaagctgrgatttgggtagggacacagccaaaccatatcattctgcccctggagcttcccaaatctcatgtcctaatatttcaaaacaaatcatgcctttccaacagt

SEQ ID NO: 168653 - DNA, 201 bp, Homo sapiens
tcgtccaacaatttttttaatgactagaatatacagggagctgggagtgtgtgctctatctctatgtacttgggtgtgattacaggatgtgtaaaatgtaragatcatcaagttgtgtacttaaaattaatgcattctgtgctctttaatgcatgcatgttatttctttaaaaaataaaaccataaatacatgtttaaaat

SEQ ID NO: 168654 - DNA, 201 bp, Homo sapiens
ctgttataaatgttgcaattacactcttcctgtctgtggtttgtctttgactttcttaacatctaatttatgggtaacaaaagatgacttgaagctttaarttttcatgtagttacattccaactacctccccactttttgcttcctttaagatatttctgattccttctcatcaccgttattaatctaggtttttaatcc

SEQ ID NO: 168655 - DNA, 201 bp, Homo sapiens
caattacttagctgagtgcgtctgtgtctatattttgtccagctggaagcgcaaacggaacttggagtatgaaccacagcttccttgaaagctcgtgccarttattaaatgctgtaggcaaggatgtaaacatacatctttttaccatgggcttcacacttttcttctttctgttccagtctaattgtactgaatgtttct

SEQ ID NO: 168656 - DNA, 201 bp, Homo sapiens
ttttccacctagtaaattatagcctgttatcctctagggtatttttctttaatcttcttaagccattttccagtgtctgaaaacaatttaaatattccagktagtgaatccaattacttagctgagtgcgtctgtgtctatattttgtccagctggaagcgcaaacggaacttggagtatgaaccacagcttccttgaaag

SEQ ID NO: 168657 - DNA, 201 bp, Homo sapiens
actgtataaccctgtaatcccacacacacacatctattatagacataatacattactatatagaatactggaaaatatcgtaaaatacattaaaaaaacartttcccttactctcagaactgagaagtaaaatctgttgtatcttgtgagagtatatatgtatgtgtgaacacatatcacacatatatagagtacagttaa

SEQ ID NO: 168658 - DNA, 201 bp, Homo sapiens
tgcattatatgaaggacaccgaaacacagaaaatgaaaggtctacggtgtatgacaaacaggacaaatgctctagcaaaaataaattctactttctctcaraattagcatacttgttatttaaagaaatgtgccagaagagaaatacaagattttcttttcttttttctcattgactttaactctctctgaatggcaccta

SEQ ID NO: 168659 - DNA, 201 bp, Homo sapiens
tgagctattgttcttgatgatttagaaaacctgtgtgctgcaagtttaactgctttaattacagtgatgtcaaatacataggcctttctatttaaagggaktttaatttctgtggcttatgaaagagaaactgaaagcatagttaaaagtgaatatgttagttgagaaagttcctgttcttaccaagcaataaaattttcc

SEQ ID NO: 168660 - DNA, 201 bp, Homo sapiens
tggcatcacatcatcactcaaaaagtttcagattttgaagcattcagattttggagttttggattcaggatgctcaatttgtatttctgtttttaatctarcagttacactgagggccaagactctatgttaaatgcccaccatatattatctgatttaaacatcacagtgatgctgcagggaaggccctgcagtggccat

SEQ ID NO: 168661 - DNA, 201 bp, Homo sapiens
aatttatttcttacagtactagaggctgggaagtctaagatcaaggtgccagcagatttggggtctgatgagagcccacttcctggttcgtagacagaagrccatcttcttattgtgtcctcacatggtggaaggggtgaaggctctctctggggtcaatctctctcttttttttttttttttttttttgagacagagtct

SEQ ID NO: 168662 - DNA, 201 bp, Homo sapiens
tctcttctccagactttggtgtagcccctttttcttttatctaatgttcctaccccaatccactcattattttaccttaccccattttattttcatcattracttcttctctgaaatgttcttgttcattacagttgtgtgtttattgctcttctacctgtaagcattatatgcattatttacatgtgcctgacacatgtt

SEQ ID NO: 168663 - DNA, 201 bp, Homo sapiens
gacttaagaaactattttctgctttgtaattttgttatgtaacaagggcgatgagatttagttacatgtttttgtgacatgttgtagtattaatgttagtyaactctttcaacaataattatgtgtaacaaacaatctgaaaacttatatgcaaatatttatcttcgtgctcataggtctgtgggttggccgggtttggct

SEQ ID NO: 168664 - DNA, 201 bp, Homo sapiens
ccgaataaactgtgtgttgtgcacctgcattttgacggtgactcgtcacatgtgatcaggagtggaattttccactgtggcatcacatcatcactcaaaaagtttcagattttgaagcattcagattttggagttttggattcaggatgctcaatttgtatttctgtttttaatctagcagttacactgagggccaagact

SEQ ID NO: 168665 - DNA, 201 bp, Homo sapiens
gtaaaagccccacttccttctaaattgttggaacagcagggaaataactggcaattgtcttcttcctgtttgatgccccagtgactcgtatgtgccaacayggagagtagggccctgtacaaggtgctccatcatagccacatgagtccagggccctgagcgccccctcacagcatgtttcctcctcggcttataagaatt

SEQ ID NO: 168666 - DNA, 201 bp, Homo sapiens
cttatctatcccaaagtgaattgtctactttgtgtagatctatggcatcagtttaacttatgttgccttcttagccctgtgtaacaggttctattgctagktggtatttgttcacaagataaaaattaattttaatattattttgaagcaaatataattatttaggaaaatctacccaaaatataggcatgcaccaaactc

SEQ ID NO: 168667 - DNA, 201 bp, Homo sapiens
ttggattaattggcttagtgtgagaaggctcacttttacatcctaagattggaaagtgccagaggcccccacaaatctccaaaagcatagtttgctctccrattttctcaactctttcccggtttgtaatgtttattgttttcttataatatttaccaaccatcttacctcaccaatgctagatcctacaggtaacagaag

SEQ ID NO: 168668 - DNA, 201 bp, Homo sapiens
caccaagattttgattagaattttgtcagatgctctgataagaaaagaaactgacctgaaaaagataagttacacctacagtttattctaaagtcctctaraagtgggaatgtgtgctgtgtgcagcctgtcaaaacttttattttggcaacttctagaagtaacaaaacaggactgaaaatattgctatgatttattgga

SEQ ID NO: 168669 - DNA, 201 bp, Homo sapiens
actttgatccatcttcctttttagaaacgagagaaaaggcatctgtgattgtgcctctgattgggtggcatccaaaatcttgtttctcagggtgagcttarggttcatctctattaaacgtatcatttgtcagacattggcatgtctagtgattcggaaagcccttggagtagcacagaaatgctatcataactccggagt

SEQ ID NO: 168670 - DNA, 201 bp, Homo sapiens
gggttcatgccattctcctgcctcagcctcctttagaagttttattctgctcacttaaatatttgattgtatgggatccttgcagggaatcgccaccaagattttgattagaattttgtcagatgctctgataagaaaagaaactgacctgaaaaagataagttacacctacagtttattctaaagtcctctagaagtggg

SEQ ID NO: 168671 - DNA, 201 bp, Homo sapiens
ggaataagctagaaatggaagtatctgaaacaaactaggcagcatagaacagtgttcctaaatataaattttgaaaagttttttttttttttttttgagayggcgtctcgctctgtcacccaggctggagtgcagtggtgcgatctcagctcactgcaagctctgcctcccgggttcatgccattctcctgcctcagcctc

SEQ ID NO: 168672 - DNA, 201 bp, Homo sapiens
tcaacatgtaatgagtcagtgtggaatattgattattcatctgaatatttaaatcttgttttgtttttggttttgtttgcatgtgggttttcttggctcaraaaaataaataattgcatgtaaaaaccatttattctttaatttcagaagtatttattcagcatttcttctattcaaatctctgatggtattacatagcac

SEQ ID NO: 168673 - DNA, 201 bp, Homo sapiens
ttagtcttatgtactatgaaccccaaaaatctgagacagttaatttagcaagtttatttagtaagttcatttttccaaggttcaggacgtgcgcctgtgayagcctcaggaggtccagatgacatgtgcccaaggtgttcagagcagtttgtttttatacattctagggagacatgagacatcactcaacctatgcaagat

SEQ ID NO: 168674 - DNA, 201 bp, Homo sapiens
taaaaaatgaatgaactactgctacatgcagcaacatcttgaaatcttagaaatataagccttaaagataaaagaaaaatgcaaaagactacgtgcagtaygatacattatgttcaaagcaaacataactttaaacatattatagtggataatacctgttggataaaactatacaatgaaacaggactacatttaacacag

SEQ ID NO: 168675 - DNA, 201 bp, Homo sapiens
tgaatttctgctttagtcttatgtactatgaaccccaaaaatctgagacagttaatttagcaagtttatttagtaagttcatttttccaaggttcaggacrtgcgcctgtgacagcctcaggaggtccagatgacatgtgcccaaggtgttcagagcagtttgtttttatacattctagggagacatgagacatcactcaa

SEQ ID NO: 168676 - DNA, 201 bp, Homo sapiens
tgagtgtgtagaatgaataatcaaatgatttctggtacactggaagtctggtgccattgtcttgatttgtatgaagacataagcagttttttttttagcaytgcttttgtataaagtgcagatttcatctcagtgaaaaaggcaataacctcttaatatcattatgaaattattttgacctcagggaccctcaaagggtct

SEQ ID NO: 168677 - DNA, 201 bp, Homo sapiens
taaacccaggaggcaggcagaggtttcagtgagccaagatcgcgccactgcattccagcctgggcgacagagcgatactccgaaaaaaaaaaaaaaaaaaaggagggggcaatgtatgctctatagtctttaaagatattctacatcagtcagtcagcgtggaaacatgcatgtggaaagacaggtattcaggtatggtgt

SEQ ID NO: 168678 - DNA, 201 bp, Homo sapiens
aagcacagttgtgctttttagtgaaatgtaaccaattgcttaagaaaagggtctcaagaagtagaaggcctgagtttgattcccagactcttcatagatayttagcaatgacaaattacataaagtatttgaccttcagtttgttcatgtttaaaatgggtgcataatctgtacctaaccttataggttcagtgtgaggac

SEQ ID NO: 168679 - DNA, 201 bp, Homo sapiens
ttaaacccaggaggcaggcagaggtttcagtgagccaagatcgcgccactgcattccagcctgggcgacagagcgatactccgaaaaaaaaaaaaaaaaaaaggagggggcaatgtatgctctatagtctttaaagatattctacatcagtcagtcagcgtggaaacatgcatgtggaaagacaggtattcaggtatggtg

SEQ ID NO: 168680 - DNA, 201 bp, Homo sapiens
gagtgcagtggtgcgatctcggctcactgcaagctccgcctcccgggttcatgccattctcctgcctcagcctcctgagtagctgggactataggcgcccrccaccacgcccagctaattttttgtatttttagtagagacggggtttcactgtgttagccaggatggcctcgatctcctgacctcgtgatccgcccacct

SEQ ID NO: 168681 - DNA, 201 bp, Homo sapiens
tatttctgttagtgacgttttacccttgcccctccacacctttgtgtttaggctcacacatttcaatttcaaaacccagaaccatggtattaattctaaartctgagctactaaagctggggccctcaagtaagtacaccatggaatctgcgagatagaaattcctagcctcgcattttagtttaaaaagttttagtttga

SEQ ID NO: 168682 - DNA, 201 bp, Homo sapiens
aaaagtaataaaatcatctcttttttttttgttttttgtttttgagatggagtctcactctgtcatccaggctggagtgcagtggtgcgatctcggctcactgcaagctccgcctcccgggttcatgccattctcctgcctcagcctcctgagtagctgggactataggcgcccgccaccacgcccagctaattttttgta

SEQ ID NO: 168683 - DNA, 201 bp, Homo sapiens
agcaaatcctggacctgtggcagagccaggcttgataattacgtcccttacattggccggcctgataaagcttggatattcacagtgacaagtagcaaccygctatagaccttagtggtcactcacaaataggaaaaaaatcttggaatgttaaattcgcagattagagaatccccttttcacattttctgcaaaatccat

SEQ ID NO: 168684 - DNA, 201 bp, Homo sapiens
tgcatgcagagctgagtggataagcaagcctccttgattaatcacatcaattaaactgggtcaaagatgttttgttatattggttccattatctgactttyggaaaagcaatgtgacctacagagttgacatgcccttgatatggcaaaagatgagtttcatcctcaaatatcccattagcattttattttccctgcttag

SEQ ID NO: 168685 - DNA, 201 bp, Homo sapiens
ttaagtgttatgttttgactaatttacacaaacacacacacatacacacacacagacacacacacacacacacacacacgtggagcccccatccatattgmaatagagaatttctagtgccccagcaaccctccttaattacctccccaccaagagaccactactatagatcttcctaaattttcacgcttccatggaaga

SEQ ID NO: 168686 - DNA, 201 bp, Homo sapiens
ttaatatgctttaataatgatttactgcacaactactgggtgctaggcactatgataggtgctgggggatttcagtcaaatgccatttatgctttcaaggractcatagtttaatgagcacaaattatatgaaaacaaatgattgagctatggtgagcagtcaactctgttggaattagtcagaaagcttcagggaggaga

SEQ ID NO: 168687 - DNA, 201 bp, Homo sapiens
gttttctgtgagtcatgattttttttttccccaagctggagttgaaatctacttgaatatctctctcctatgacaaaggcaaaattaagtatcatgataamtttcaggattcgaataaaataatcacttaatagtgatgtgaattttcatgaacattcgcagcttgaagaattattttagtatgccatgtatttatagttt

SEQ ID NO: 168688 - DNA, 201 bp, Homo sapiens
ctatactgtcctctttcgagggttttctttccaatgatcaacattgattgatgtaggaccttcttagcgttctgctaaatatgtgggaaaaatacatggcrtgtttcctgaatttgtggaatttttgcaggggaagcaataagagagaaatagaaggcaatgtgaacttaatatgctttaataatgatttactgcacaact

SEQ ID NO: 168689 - DNA, 201 bp, Homo sapiens
gtcatgattttttttttccccaagctggagttgaaatctacttgaatatctctctcctatgacaaaggcaaaattaagtatcatgataactttcaggattmgaataaaataatcacttaatagtgatgtgaattttcatgaacattcgcagcttgaagaattattttagtatgccatgtatttatagtttaataaaacata

SEQ ID NO: 168690 - DNA, 201 bp, Homo sapiens
ttaaacttttcccatttggcagaggaatgtcaagaggactgggacatactagaactggcagcctgaactcttccttagagtatcaggataccatttagaasaatattgcttcacttacctgaaaaaaagatacttgaacaacagttcttcagaatacagcccaaaacatcaaccaaagcataataagtatgtctacatagc

SEQ ID NO: 168691 - DNA, 201 bp, Homo sapiens
tcttgattggatttccgtttggattaacatcacgtaagagttgatatccactctaccatcagagattgtggtctatgctacttcttttgtccctttgtttwatataagtaacgagcttggagatgtaaatcagtcaccattttaaactgattgatcaaactcagtaagaaataaaaccttttcatggaactcactcagcct

SEQ ID NO: 168692 - DNA, 201 bp, Homo sapiens
ggggagttttaatttttcccgtggaagaattttctttaagttcattttcatttcatttcaccacgttaaacttttcccatttggcagaggaatgtcaagargactgggacatactagaactggcagcctgaactcttccttagagtatcaggataccatttagaagaatattgcttcacttacctgaaaaaaagatacttg

SEQ ID NO: 168693 - DNA, 201 bp, Homo sapiens
ggaatcaaggccaaagaacaatcttatttaaaatgctgtggttggcctggcatagtggcttatgcctgtgatcccagcactttgggaggctgaggcaggcrgatcacctgaagtcaggagttcaagaccaaccaatatgggtgaaaccccatctctattaaaaatacaaaaattagccaggcatggtggcgagcacctgta

SEQ ID NO: 168694 - DNA, 201 bp, Homo sapiens
atgtttgtaattttccccattccctctccagtcacaaaactagaacacaatcttgggaaaggacacttgttcccacctcccatccccagcacaaaaatctwcaaacacatatcggacaagacaacccacattgggccagtgtcttgtgaggggtgtccgacatcatggtaagtcagcaagggggagagactgcacttctaa

SEQ ID NO: 168695 - DNA, 201 bp, Homo sapiens
gagaggctgcaggagagaccaaacctgtccacaccttgatttttgacttccagcctccaaaactgaaagaaaatacaattctcctgtttcagctaccaagyatggtgttatggtgtggcagcccaagcaaactcatgtagctgatttcatgaactttcatgttttctgcactgtggcttttctgatgtttgtaattttccc

SEQ ID NO: 168696 - DNA, 201 bp, Homo sapiens
tggtcatgtttcttataaattcttagtggaaatcccagaagctcttttccagaattgttttctactctgagcacctactctgggtggtctttacttgcctygagttcctttatcttaaggatgattcaagagaatccctgacccccaaacctagtatctgcaattctgagaggtggcgatctttaaccaatcatctgttta

SEQ ID NO: 168697 - DNA, 201 bp, Homo sapiens
ataaattcttagtggaaatcccagaagctcttttccagaattgttttctactctgagcacctactctgggtggtctttacttgcctcgagttcctttatcytaaggatgattcaagagaatccctgacccccaaacctagtatctgcaattctgagaggtggcgatctttaaccaatcatctgtttatcaagttttgagca

SEQ ID NO: 168698 - DNA, 201 bp, Homo sapiens
tgtcacagacctaagtaactactaatattgagattttctctctaattcttctgacacttcttctttttcttttttatttatttattatggtttttttttttgcctaaaaagcgtcatctttctggatcacgtcaccgactctagcctttggctttctatccagggacatttttcacaaagaaacaaaactgtttagtgatg

SEQ ID NO: 168699 - DNA, 201 bp, Homo sapiens
agtaaatatattgatggactctgtaatcactgatttaaaacgtgtgatttataattacaagtttcaggtgatttctgagaatgctttttctcttctgagtrtaccaaaaagaaccccacaaaattacaagtactaatatgttttctctttgaaccttgtctcaatggtgttcaaaaactttgatgcaattaatcaattcat

SEQ ID NO: 168700 - DNA, 201 bp, Homo sapiens
cagaggcagactccattgccaagactccagttcactgacccttaattgtgcacagctcagaagaggtcacagtttggctcagacttcttgaatagcttctrgaagaattgtttgaaatgagaagatgttggaaagaactagaaactcttctttcatgatctactccacacacatttcactccaataatactaaacagcttc

SEQ ID NO: 168701 - DNA, 201 bp, Homo sapiens
aaagaaaaaaatgaatacaaaatagtgacttttcctgtggaccatttcaatatgatttgaaccgtcaataccaaccccctaaccccagtaaaaaaaaaaamagcccatgatccaggcttaaacattcatggaaaagggaatgaaaataagaataagaatcacattttatgatcaatttgaattttcatcaagaaggatttt

SEQ ID NO: 168702 - DNA, 201 bp, Homo sapiens
ttggctgggcgcaatggctcactcctgtaatcccagcactttgggaggctaaggtgggaggatcacttgagaccagcctgggcaacatggtgaaaccccayctctactaaaaatatgaaaattagccaggcatggtggcacacacctgtaatcccagctacttgggaggctgaggtaggaggattgcttgaaccaggagat

SEQ ID NO: 168703 - DNA, 201 bp, Homo sapiens
acccgagcattgcaaattcaatatgtgagcagggcagcaaagaacaatggacatgtatcttgcacatatctcctctgcttatgtgcattctccattgttcsatcagacttcagttacaaaacacaagctcaaagataaaatgatggagaatttcaggacaatgactgcagaacattaaactaagcatgggtccttctgagt

SEQ ID NO: 168704 - DNA, 201 bp, Homo sapiens
gtggacgaatcatctcagtttctatcgggttttcagcatgtgaacctagtgtttaccttgtcaaaaagttgattgtttctaataagcaggataacagataytctagcaccttcaaagtcgaacagagctgagaaatgaagtgtgacttatcctgtggaatgtaaaaaacaacattttttaggaagcatgtgaatatgaatg

SEQ ID NO: 168705 - DNA, 201 bp, Homo sapiens
agcaccttaaaaattgtaatgacaagaccccactgtaggattctaatatacttgggctgagatgcagtccacactatgtgagtgtgaaaagctgctcagcrgtcctaatgtttggtcgtggttaagagctgctgctttacagtaagcagtactttgcctgtggccaggtaaggcaaaaatgtgcctggggactttgggaaa

SEQ ID NO: 168706 - DNA, 201 bp, Homo sapiens
aactcccctggcatgaggttgaacaaagtctagttaagcttgctatttttttccttttagtagaccctcccttgagtaaaaaaagatagagaagagcaaasggtcttcgctaagtgaactcatagcttagccaaagtctttcagagctgagtacggaggggctgcctcagtgggaagcagaaattaagacctgctcctcca

SEQ ID NO: 168707 - DNA, 201 bp, Homo sapiens
gagccccagcactagtattgttgaaaaacgtctagtgttgttcaactaatttgaaagtttaaccagagctgaactccatctaagcaaaggtaacatacaawgagtgaaggagagaggtaattttaaatgtcatctttttttgtttgtccttttaaattatcaagaagcagacaggaacataaatggaaaaccaagtctccc

SEQ ID NO: 168708 - DNA, 201 bp, Homo sapiens
taattgtatactcttgaagttaagttggtgttaaatcaagccagattataagtttaagatgttagttgtaatccccaggataactactaaaatattaactrtaaaatatacagaaaaagaaatgaaaagtatacttcaaaaatcaaacacaaaagaaggcagtaatgggggaattgagaaacaggaaagataagacatata

SEQ ID NO: 168709 - DNA, 201 bp, Homo sapiens
catatgatttaaaagacagatatatcaaatgatgaataaaaatctatgttagtttagtttacatacaatgtataaagatatagtctgtgacaaaaacaatwtaaagaaagagatatggagaatataagagcaaagtaattgtatactcttgaagttaagttggtgttaaatcaagccagattataagtttaagatgttagt

SEQ ID NO: 168710 - DNA, 201 bp, Homo sapiens
agacacaagtgttctgtgtttattataatcattagttgaggttaatctttgatttgtcaaggaggtgtttgaatttcctcaaataatattttcagattttraagagtcacacacacacacacatatacacaataacacatttatacagacacacgaacaactttatacaattggagagaagcttagcagattaaccatttt

SEQ ID NO: 168711 - DNA, 201 bp, Homo sapiens
aaaaaatagtttccaggccgggcgtggtggctcatgtctgtaatcccagcactttgggaggccgaggcaggcggatcacaaggtcgggagatggagaccakcctggctaacatggtgaaatcccgtccctactaaaaatacaaaaaaaaaaaaaaaaattagccaggcgtggtggtgggcgcctgtagtcctagctactcg

SEQ ID NO: 168712 - DNA, 201 bp, Homo sapiens
aaatggtgcagccactgtagaaaatggtattgtattttttcaaaaataaacatagagttaccatataattcagcaagttcacttccgggtatatatctcaracaattaaaatcagggactgaaacaggcatttgtacactcatattcatagcagcattattcacaatagacaaaaggtgaaaacaacccaaatatccatca

SEQ ID NO: 168713 - DNA, 201 bp, Homo sapiens
catgttagcaaggtagaaaaggagatgtctaactaagctatttagggaaacataccttaaggctattaaactctttccttcctataagattccagctttgmggttgatcttgagccttatgaagagaagctttaacgtgaaatgaacgtgatctttccatgagccattaatggttgaccaggggatctgggagagtataac

SEQ ID NO: 168714 - DNA, 201 bp, Homo sapiens
gcctggagaacaggctgtatcagtgctatagaatctttactactaacttcttagatactcttgatttggtctcattcgtgggtttacatttgctctggaastggtgagcttagatgatagaaaaacgtttggtatgtgaatttcatacacttgaagaaatagatcttgagttcagtttttccctgcaaagtgctagacctt

SEQ ID NO: 168715 - DNA, 201 bp, Homo sapiens
caaaagggaatgcctttggatttctgtaaaagggtctgcttcaaggagaaatgcaacctgagagagaaggtcatggttttcacaaaaggctgtggttacartgagatttgaggcttaaatccaggcttgtgtaagactgttatgtgttactagttgttaaaatattgagtgcttttatgcttgtttgcaaatagctacttc

SEQ ID NO: 168716 - DNA, 201 bp, Homo sapiens
ctcctagcaacaactcctaaagagtttggagacttcttctggtggcatctctcttgctcttgtaccctctctctctttttctctattcctctccccaagtstctgaataataaaatttctatcaggagtggattaaaagatacatctatcagttcaccaatttagattctataacaggaatgacaggcattaagacattgt

SEQ ID NO: 168717 - DNA, 201 bp, Homo sapiens
gagctcaaagcaatctgcctgcatggacctcccaaagtgctgagattacaggcatgagccaccacacccgcggagatctgatggttttataaggtgcatcsccctacctttggcactcattctttctcctgctgccctgtgaagaggtgacttctgccatgattgtaagtttcctgaggcctttggctggattttggactt

SEQ ID NO: 168718 - DNA, 201 bp, Homo sapiens
ggttttgccatgttgcccaggctggtgtcaaactcctgagctcaaagcaatctgcctgcatggacctcccaaagtgctgagattacaggcatgagccaccrcacccgcggagatctgatggttttataaggtgcatccccctacctttggcactcattctttctcctgctgccctgtgaagaggtgacttctgccatgatt

SEQ ID NO: 168719 - DNA, 201 bp, Homo sapiens
atgtatcctagaacttaaagtaaaattttaaagaagaataaccagaaaataaataaataaatatatatttttttaaaacctgctttgtcaggtactgttayagttgatatagatgaagtgaaatctaagaagaatgtctaggcccaagatgcctagtgcttgcttttaactattttcattttttagccaattactaattaa

SEQ ID NO: 168720 - DNA, 201 bp, Homo sapiens
tcatggttttctgtcaatgacttgaatttagtaacagtgaaaattccatacacataggaatatagcagaattttttcagtaaggctgtaacgtttaagtgracttagctgatcctacatatattagagaacgcttgctataaattcatgggattctgtctaccaagtcagagaagtggtttaaatgtgttgatgtatctgg

SEQ ID NO: 168721 - DNA, 201 bp, Homo sapiens
aaagacatgtattcagttttgatattttccgtaagagtcaggcaaaagttcccaacaaacttctaaatctataatcaatccaaaggaaattataaacaatrggctttgtatagagagagtaggtggatcatattaggcaataatcacatagttgatttcttactataaattatgatttatgtatcataaatagcatacaaa

SEQ ID NO: 168722 - DNA, 201 bp, Homo sapiens
atttacacaccattatagaagtcacactaattaaatctaatgaaagacatgtattcagttttgatattttccgtaagagtcaggcaaaagttcccaacaamcttctaaatctataatcaatccaaaggaaattataaacaataggctttgtatagagagagtaggtggatcatattaggcaataatcacatagttgatttc

SEQ ID NO: 168723 - DNA, 201 bp, Homo sapiens
gccagctcattgtttcttcaggctactaagcatcaagcaatttgttttctgtgttcagtctgtcatcttacggctcgctctaatgttcactgaagccctayggcagactttgggactactgtttttttaaataaacaattatggcattttcagatatggatattatcaaaggaatgatctaattgtccaccacagatttgg

SEQ ID NO: 168724 - DNA, 201 bp, Homo sapiens
tccccaaacttgtaataaagccagctcattgtttcttcaggctactaagcatcaagcaatttgttttctgtgttcagtctgtcatcttacggctcgctctmatgttcactgaagccctacggcagactttgggactactgtttttttaaataaacaattatggcattttcagatatggatattatcaaaggaatgatctaa

SEQ ID NO: 168725 - DNA, 201 bp, Homo sapiens
ttacaaaacaaataactgactctttatatctcctgaatctcctttgaacattaaactgagtagcaaagcatcacacatagcaagaaaattgattttgacartccagccttgttagttatcatttcaacaggtgccattagtatcaagaccgaggtgcctgccacagctctagtgcaataatgtgaagtaaatatccatcca

SEQ ID NO: 168726 - DNA, 201 bp, Homo sapiens
atagattaagtcatgtcatagaatcaggaaaatacaaggcatttctggaatgatgtggtggcctgtttggctgggagacagcttatgtttggggcactagygtgatatggaagaggaggctaaagaaggttaattgaagacaggaccatggaaggttttccatgctagcctttctaggctggaaatggaaaaccactggag

SEQ ID NO: 168727 - DNA, 201 bp, Homo sapiens
aaccaaccttcacctaacttggtgataggaactagtcagtcatgttttaaagacatagcatggtccaacaactacaagattcttaggatagaaaactgatratgataggaaccaaaatattaagcaagatcagaaacttccatggtacattgaccttgctatcaattataaagagtaccacagtcttggcaaatagcattc

SEQ ID NO: 168728 - DNA, 201 bp, Homo sapiens
gggcaatctaaagtgaaaagtaatttgaaatacatgagggactgtaagagtattcatattcttaaatcaagaattccccttctgagaattcattcccagawaatcaatcaagatattagggaaaaaatgaagctgttctctgtagaattatttgaatgacagctctgaaaatgtagctgtccaacagttggggaatggtta

SEQ ID NO: 168729 - DNA, 201 bp, Homo sapiens
gagatcacaggaccacaggaccacaggactgaggcaaaattaaaattgctaatgaagttttgggcaccattgtcattgataacatcttatcagtagacagsgttttgagatcaactggtctgaccaaaatttattaggtgggaatttcctcttcctaataagcctgggagcactatgggagactggagtctattgcatctc

SEQ ID NO: 168730 - DNA, 201 bp, Homo sapiens
gagcctggatagttgttagaaggtgggatgctctctataagggaactactgctctccataaggaaagcatttgttaaatgggcaggaactgtaacctgagsgatttagcattgtcttagcttgccaagctctagtttgttgatgtaagatactgacagttctctttaaatctttgtaaacaaggtagaagctcatgtcttt

SEQ ID NO: 168731 - DNA, 201 bp, Homo sapiens
ggagggttatctgcacacggcatctacacgtgctctctgtttataatcatcacccctgatgctaaacaaggcacatctttagcttcctctaacaaagtctrctcaatgcagtgtcctctgaagttttcatacgggaaaggtaactgggaatgccattacacttgtcacattttaaaataacaaaaaagattaaaacctgaa

SEQ ID NO: 168732 - DNA, 201 bp, Homo sapiens
tttatacttaagagcatagtctaaggaacagcctctctcatctacagactttttaaaaataatagtttatgtggatttatttctaatcgtaggttagaacwtctagagccttatttccaaactgcctatagctgatatgctgtaaaccacttttaaagaaatagaattgcatctgcctccaagaatgcagcaattccttgg

SEQ ID NO: 168733 - DNA, 201 bp, Homo sapiens
ccccatgtgtcttttttccctgcagtccaagattatttagccccatcctacaaggtcaagtattttatacaccagctaaggagtaaagtgtaaaatttttwaaaaaaatcagtaggtagaatattacactggaatcttaatagttcttgctgatagtgcccttaaggttaaaaaaaaaaaactcattaaattccaagagag

SEQ ID NO: 168734 - DNA, 201 bp, Homo sapiens
agggaaaatagaaaaggaaggaaagaagaaagggaagtaaaacagggagggagatagagaaagaaagaaagagagagaggagaaaaaagtataatggattscaatatttttctgtcatcctcaatgttcggctcatactctgtacttctgtgttagcaaacataattgaaataaaccgtttaggtagtaagctaattctgc

SEQ ID NO: 168735 - DNA, 201 bp, Homo sapiens
ccagaactattctctaataaatgcctatatacaaacccctatctccgggtttacttttccaaggaatcagtgatataactgccatgacaatgaaagagatmaaaatttgggagacagaaagacgaggggtgggaagttgaatttttttcctcatttataacatgatctggttgggaggattcaaggcagaccagttagtac

SEQ ID NO: 168736 - DNA, 201 bp, Homo sapiens
tcaccacctggaaagtggaagcatctctaaaaacaacttccacagaatgcatgaatttacagatgatatgaaaacatgtgcatattgaattttctgaaaartggcttatcacaaaatttaaaaaaagtatttatcaaaggaactttgggcacataaggaaataaatccaatagtatgctcatgacaattagttatataaat

SEQ ID NO: 168737 - DNA, 201 bp, Homo sapiens
tcccaagaagtggaggaaggcagaactcccactagccatatcccagcctccttaagatgggcctgtggtcctgggaaatctgctcttctaacctttccttygtccacagaagccacatcagtagagggtcagttacagacaaggggcacacagtgaataaggaggcactcacttcttggattaattggcttagtgtgagaa

SEQ ID NO: 168738 - DNA, 201 bp, Homo sapiens
acattaattatacattagtcttaggctaataattaatatatccacatgttaagtaatttctttaataagttctcttcaaattagttcaaagatgtctttgrcattcctagaaggcacattttattgatctgttctcaatttacaaaacaaataactgactctttatatctcctgaatctcctttgaacattaaactgagta

SEQ ID NO: 168739 - DNA, 201 bp, Homo sapiens
ctaatgacagaaactactctgagttaccttattcctgatattccaggactgacatcagggcctctgtcccaagaagtggaggaaggcagaactcccactarccatatcccagcctccttaagatgggcctgtggtcctgggaaatctgctcttctaacctttcctttgtccacagaagccacatcagtagagggtcagtta

SEQ ID NO: 168740 - DNA, 201 bp, Homo sapiens
atctacaacaacaaaaaaagaagccagatgcaaagaactatagactgtatgactgtttatataaagttgcaaaataggctgctgtctcagttcattcctgytgccaggttttatctctgcctcctaattattctgtcatttcagccacatctggggttactaagtgtcatttctaaattgtacctactgacattagcgaat

SEQ ID NO: 168741 - DNA, 201 bp, Homo sapiens
attcctgagaaagcagaccaggctccctttactgggttaggaaaagataaaaggctaaacttcccaaggcagttgactggtgatttttcattctaacatcygaaaaaataggaataaagttgctatggtttgaatatatgtgtcccttcaaaattcatgctgaaatttaatccctagtaaaacagtattaagtgaggactt

SEQ ID NO: 168742 - DNA, 201 bp, Homo sapiens
aagcagcccggccctagaactcatgtgctctaaaccactactctaaaccagctctttaaaacacgtaagtgtaaatgtgcacagatttcaatttagagctrtgtgactcccagcagatttcttttttcttgagcaaaggagatgccactgtgaatattaatgtctgtcatagccagagcagacactcttcagcttttgggc

SEQ ID NO: 168743 - DNA, 201 bp, Homo sapiens
ctcagaaaatccactttacttacatttagatttacagtttatcaagaaggatacagatcaacagccagatgaagaggtatatagggtatcgtagtctgctytgtgctgctataacaaaatgcctgagactggcaatttatacgaacagaaatctattttctcacagttctggaggtttgaaagtccaaaatcaaggcgcca

SEQ ID NO: 168744 - DNA, 201 bp, Homo sapiens
agcactttgaaaggcctaggtgggaggattgcttgaggccaggagttcaataggggcctgggcaacacagggagactctgtctctacaaaaaaattttaarattagctgggtgtggtggtgcacacctatatttccagctactcagaaggctgaggctggaggatggcttcagcatgggaggtcaaggcttcagtgagcca

SEQ ID NO: 168745 - DNA, 201 bp, Homo sapiens
aaaccttcttctgcttgatagctctttaataaaaggggaaggcaggtctcacactccccctgaggggcctcttctgtggacaaacatctctgagcttttcmtatcttctttgagagtgctttgtgtgtgtgtgtgtgggtgtgtccacttgctcttatgtaaattctaattactattgtaataataaatagccaatacata

SEQ ID NO: 168746 - DNA, 201 bp, Homo sapiens
taaaggtcatgattttatctcctcagtcatttgttgctgggcacaatttgcctttatggcaagtgttgttgctagttcttaaaactaccagaagagatacwtaccctcctgagcagacagaagctcaggagtgccacaaagatgaatatagattttaaaagaaatttaggtaagaaactagggaagtgataaatcatggcc

SEQ ID NO: 168747 - DNA, 201 bp, Homo sapiens
atatcctcactatagccccaggctagagtgctgcttacacctgcaggtaaagataaggacttcagctaataaattggccctcctactacaaggcctctggyttcattgagccttttgggaaatgtaccagttcccgaggctgtgattgtgatgtacttctcaccctggaccagagtcagggcaggagtcagttctacaatg

SEQ ID NO: 168748 - DNA, 201 bp, Homo sapiens
tcaataatttactagaacagctcacagaactcagaaaatccactttacttacatttagatttacagtttatcaagaaggatacagatcaacagccagatgragaggtatatagggtatcgtagtctgctttgtgctgctataacaaaatgcctgagactggcaatttatacgaacagaaatctattttctcacagttctgg

SEQ ID NO: 168749 - DNA, 201 bp, Homo sapiens
agcacaacactggtacaacctactactcagggatcctcaaactttaatatgcatgctaatcaacttgaggttctattaaaatgcagattttaatagagtargtctaggtgcactttgtaacaagtacactttgttactgactttaaaacgagctcccaggtcatgctaatgttactggtccgtggaccacactttgagtag

SEQ ID NO: 168750 - DNA, 201 bp, Homo sapiens
cagatcatgagttcttttggtgactagggtgttgtggcattttggaggcaggaaagatacaggaagttcccatgctataagccttgtctctttgaacatayctaagcatattagatctgttaatttttgcttcatatagtttgaaggtataattattgggtgtatacatttttagtattgtttctcaaatacattgatctc

SEQ ID NO: 168751 - DNA, 201 bp, Homo sapiens
acagatcatgagttcttttggtgactagggtgttgtggcattttggaggcaggaaagatacaggaagttcccatgctataagccttgtctctttgaacatrtctaagcatattagatctgttaatttttgcttcatatagtttgaaggtataattattgggtgtatacatttttagtattgtttctcaaatacattgatct

SEQ ID NO: 168752 - DNA, 201 bp, Homo sapiens
cagtgagccgagatcacgccactgcactccaacctgggcaatagagcaagactctgtctcaaaaaaataaataaataaaataaaataaagtactagattaygtttttcttcccaattaaacagatcatgagttcttttggtgactagggtgttgtggcattttggaggcaggaaagatacaggaagttcccatgctataag

SEQ ID NO: 168753 - DNA, 201 bp, Homo sapiens
tgttagtttgctcaacttgattctctgtattctcatatgcaaaatggtaataataattactattgcaagggattttgttgagaattaagttaaatgagatratgcatgtcaaaggagtttcaagggctacagatatgctatttttacttgtagactgtattttcttataactcagagctttagaaacccgatgcaactacc

SEQ ID NO: 168754 - DNA, 201 bp, Homo sapiens
ggagcttgcagtgagccgagatcacgccactgcactccaacctgggcaatagagcaagactctgtctcaaaaaaataaataaataaaataaaataaagtaytagattatgtttttcttcccaattaaacagatcatgagttcttttggtgactagggtgttgtggcattttggaggcaggaaagatacaggaagttcccat

SEQ ID NO: 168755 - DNA, 201 bp, Homo sapiens
attaaccttaaacaaaggcatttgaaaaactatgtaaaaagctttctataacagcttcactaatttctttctaccctaagcagttgagcacatttttaccwtaaaactttcgtcactttatatcaagggtttaaagaataaaatttcagtgaagtgtctcataattatatcttttgaaattacttcaagccacatgtataa

SEQ ID NO: 168756 - DNA, 201 bp, Homo sapiens
tgaagttattttagtatatggtgcaacattttataaataacaagaaagagtatgctactttcaacaatatcatgtttaatatacataaaatatataagcaygtaaaatatatgtaacatatatacttaaaatgcatatacattatatacatttaactaagtacaaatataaatgttgcctaagaggtaagcttcaaattgg

SEQ ID NO: 168757 - DNA, 201 bp, Homo sapiens
gtcttcatcattctacagtcaaaggtcccaagagtcgcaacccatctgcagctcctttgtcaatgaaggatggtcatatatttcaagtttcaaacctgggyatatgttctgacaattaagaatatttgggatctgggttgagtggctactttggtatggggagaatatagatactagcagctatgtgggaggtgggaaaac

SEQ ID NO: 168758 - DNA, 201 bp, Homo sapiens
tggtaacctttagcaaggatgggcccttcattcatctttctgacctccatagcaggttacctgaatgagtgagcacaggatataagacctttaccttaaayagtaacatcttttgattgaatttttagttgaatgtcaagaacttcccccctttaatcactggatgttgtcagaacttattcttcagaaagttaggtttat

SEQ ID NO: 168759 - DNA, 201 bp, Homo sapiens
tctttccttttatcctctgaacatatgcatgcatcttaaaagactacggatttaaagtactagattaggccaggcacggtggcacacacctgtaatcccarcactttgggaggccgaggcgggcggatcacgagatcaggagattgagaccatcctggctaacatggtgaaaccccatctctactgaaaaaaaatacaaaa

SEQ ID NO: 168760 - DNA, 201 bp, Homo sapiens
actggatctggggtagggcctgggactcagcatctctaataagcccccaagtgatgggatactgctggtccttggagcacagtttaacaagcatctccacmacacacacgcactacctctgtaacaaagctgtaattttctggtaacctttagcaaggatgggcccttcattcatctttctgacctccatagcaggttacc

SEQ ID NO: 168761 - DNA, 201 bp, Homo sapiens
ttgccctgtgccacacaattagtaaagaaaggagttaggatgaaaacccaggcaatctggttctgcaactcatgttccacatcagcacttctgcatgttamgtgtgaagaccagggcatcatgataaattgctgatcctggttcactggatctggggtagggcctgggactcagcatctctaataagcccccaagtgatgg

SEQ ID NO: 168762 - DNA, 201 bp, Homo sapiens
gatcatttctgtaatgactaggggaaaatgtcactctaaagaatgagagacataaggcctttgaggttgtagggctcttttcacaaattgatgtcctttgraaaccttatctttgcaccatcaaaaagttattttaggaggataaaatgtacaaaaatacagaagtagagttttaggtcaatcttatttttgtttttcttt

SEQ ID NO: 168763 - DNA, 201 bp, Homo sapiens
agatgggacatctctgtggtataatccatgctccagaactcccttgggtccacgctcagggtggactccagctgaggccacagccttactcagctctgccycattcactttctgcttccctccttctcctgttcctgagagtcactctcaagaaatcacgggcatcccaatccctgtctcagactctggttttagaaaact

SEQ ID NO: 168764 - DNA, 201 bp, Homo sapiens
ccagttttcctcaagatgggacatctctgtggtataatccatgctccagaactcccttgggtccacgctcagggtggactccagctgaggccacagccttrctcagctctgcctcattcactttctgcttccctccttctcctgttcctgagagtcactctcaagaaatcacgggcatcccaatccctgtctcagactctg

SEQ ID NO: 168765 - DNA, 201 bp, Homo sapiens
attgattgatttgcatatgttgaaccatccttgcatctctgggataaatcccacttgggagaatcatagctcagtaccttgcttgtggtgggcaacttctrtgttgcaattcatgctccagagaaccctgtgggatcagtctgagactggagtttgcctgaggccacatttcgacttatcttcttccctgtcttaacctgc

SEQ ID NO: 168766 - DNA, 201 bp, Homo sapiens
aatgtctgaaatctatagataacacaagcagttagctcaggggttgatttttaactaccaggcccagggcgcggtgctgggctatctgcctgtggattccrtttctgccttttagtttttacttcttctttctttggaggcagaaattgggtataagacaatatgatgggtggttgcctcccttaatagttaaatgatttg

SEQ ID NO: 168767 - DNA, 201 bp, Homo sapiens
tgttgatatgatgtatcacattgattgatttgcatatgttgaaccatccttgcatctctgggataaatcccacttgggagaatcatagctcagtaccttgyttgtggtgggcaacttctatgttgcaattcatgctccagagaaccctgtgggatcagtctgagactggagtttgcctgaggccacatttcgacttatctt

SEQ ID NO: 168768 - DNA, 201 bp, Homo sapiens
gacgggattttcacgatacttttccatacaatgtctgaaatctatagataacacaagcagttagctcaggggttgatttttaactaccaggcccagggcgyggtgctgggctatctgcctgtggattccgtttctgccttttagtttttacttcttctttctttggaggcagaaattgggtataagacaatatgatgggtg

SEQ ID NO: 168769 - DNA, 201 bp, Homo sapiens
ttctccagctgctgctagtgttggcttttattagcccccaactgagtcctatggagaactgctcctagcccacggttcacatcccacccactgccttctgsggggtagcctgtctgacacagtgcaaacatcccaaccagttttcctcaagatgggacatctctgtggtataatccatgctccagaactcccttgggtcca

SEQ ID NO: 168770 - DNA, 201 bp, Homo sapiens
gggtgacactaatattaaaaatagtgataaaaatttgctattttcatattttattcagaggaaaaactcgagaaaaaagatagaaaatggagaactgtcartattgggggaaaaaaccttgaaaattgttttaataagtataactaatagttatccattaaatagtccatttaaatagtctattaaagttgacattgttaa

SEQ ID NO: 168771 - DNA, 201 bp, Homo sapiens
gttttaaacacataaagtgcttcatggcaatgcaaaatcttctactgaagtgttttgtattatttcgatttgaacttaagagattatgtggattctgtacrtaataggttttattcatagacttgatagtgtagcaggacgagccgcagacaagaacccctcagacaccgagttgtagaaggaaagggctttattcagctg

SEQ ID NO: 168772 - DNA, 201 bp, Homo sapiens
ctatttcagatgaaactttctacatgattccatgctaattaaaggtgatgagcgcatttaaaaaggaagataatcatcaaatcatttagggtttccctttrtctttaatgtagcatgcaggattttcaaagtgcttttctgatttttatagtacataaaatatttaacacaatacctggaaaatagtatgagtcataaaga

SEQ ID NO: 168773 - DNA, 201 bp, Homo sapiens
ttagaacttcttgctaatgattactgattttgactgtttgtaagtctagccttacaatttattcagaagtgtggttttaaacacataaagtgcttcatggyaatgcaaaatcttctactgaagtgttttgtattatttcgatttgaacttaagagattatgtggattctgtacataataggttttattcatagacttgata

SEQ ID NO: 168774 - DNA, 201 bp, Homo sapiens
gggcccagcacttaccaactcatgttatccattacaacaaatgtctaggtctgtacactgaatttgtcttccaccaattttagaatgctgattcttttcaygggtgacatcctaaatttaaggaattaaccaagaatcataagtgtaaatgcttatagtgccaagtagcttgggtgtaagacactggggagtagtggagac

SEQ ID NO: 168775 - DNA, 201 bp, Homo sapiens
gcccagggataagcaaacaatcagtaaaaaatgcttacatagaaagcgcatgatattttaatatgaatttttaatatttaattaattttagtggctattgyctaccttttatcaaataaacagctatttattattagaacttcttgctaatgattactgattttgactgtttgtaagtctagccttacaatttattcagaa

SEQ ID NO: 168776 - DNA, 201 bp, Homo sapiens
aggggaaaaacaattcatttaaatgagtgtatattggctacatatgaagctgaattatttctgatggagttagatttccaatcatgctgatatttaaggasttacccatgttatcctgccctcttaaaaataatatcagcattttctacgatatgcacttcgttgtgatgacaatacatccatcaaataagcttgcagaca

SEQ ID NO: 168777 - DNA, 201 bp, Homo sapiens
ctggataactctctgtaactccttcaagtggttggaagaggagaaaagccctctagggaagggaaggtgctagtgagaggacactttcagctaaatagagrcgttgcaggagaccccaaggaaatggccagagtctttgcacactggaattttacatctagacagcttgacaaatggcatgactacaaagtaatgcctcat

SEQ ID NO: 168778 - DNA, 201 bp, Homo sapiens
tgatggttgtttccaggagacatcaactctcttgcacttccagcctgttaggccttaagcaggctctggccatggaaaaatcacttcaacagaaaagatayaaaggctgatagttagaagtcgagtccaaattcaataagatggtaaagagagacacagctggggaatcaacagaggcctgtaatcggtatggaagggaca

SEQ ID NO: 168779 - DNA, 201 bp, Homo sapiens
gaactgagacagatgcccatgcttagctgcaagggaagttggaaaatgtagcttaatgcaagagttcaaccaacagactcagaagttgctcttgccaaaasgaagaaaggaaaacctgggtattggaaaacagcctctgccatagaaggcctctaccatagaaggcttgttagcggcctcttccatagaaggcctgttcat

SEQ ID NO: 168780 - DNA, 201 bp, Homo sapiens
ccgcagcatagctgtgcttcaggttctgggttgggtctatgtctgtcccacatgcgctcactctggggtccaggctgaagtggcagttgcttctacaatakggacttctcttggcagaacactggaatgtctaactctgcatgtgcattttaagcctctacctacaccaaattactaatatactgttgactaaagcagagc

SEQ ID NO: 168781 - DNA, 201 bp, Homo sapiens
cattaacattgcccaacccctattatagttggtgttaataatctttgcctataggtttggaagtaccttggcttatataaccactattcagataaaacaargaaatgatgacatcagtgtaagattgaatgagatttgaccactgcacatgccatgctttgcaatagtctaaaaacctggacagaatgatcagaaccatct

SEQ ID NO: 168782 - DNA, 201 bp, Homo sapiens
tagtcccagctacttggaaggctgagacaggagaatggcttgaacccagaggcggaggttgcagtgagccaagatcacgccactgcacttcagcctgggtracacagcaagactctatctcaaaaaaagaaagagaaaagaaaagctagtcctgattgaataatacctttctaattatttcttggaattgttcattcttat

SEQ ID NO: 168783 - DNA, 201 bp, Homo sapiens
aaagtccaggatgccaatgaaggaaataagctctgaaccacgcaggtcacagtttctgttggttgtatttgtgtcagggagctgtcagactctgcagtttsaaatttaagttctcaatggactctgagcgcatatccttgatgtgtgattcacacctgtggtatcatcatggggtcattttattgaaatgttgaacttgtt

SEQ ID NO: 168784 - DNA, 201 bp, Homo sapiens
cttctagttggatctgaaaagctggtcctggccaggcgcagtggctcatgcctctaatccgagcactttgggaggccaaggtggtggatcacctgaggtckggagttcgagaccagcctgaccaatatggtgaaatgctgtctctactaaaaaagtacaaaaattagtcaggtgtgggggcatgcacctgtagtcccagct

SEQ ID NO: 168785 - DNA, 201 bp, Homo sapiens
aacctatatagagaaatagcctggtgttatcctacaagacaatttccttaaaatgtgtgagtaatggctattaaatcattttatggagccatttctaaaayaatactctttgtcactgttaccataattacttttagttgtggccatattttaaagaacagaatgctttatcgtgactgttataaatacaaattatttttc

SEQ ID NO: 168786 - DNA, 201 bp, Homo sapiens
ttcaccaggtttgctctgtcagcacttgcttcctgctttccccttcctggtatacagcagaagcacatcttgtttgcctccgctaacctttatgacagctrgtggatagttcagattttgaaaatttgcatagaaacagaggcagacatggaagacatttataaatacgtaatattaaaaatctcttttaagtctataata

SEQ ID NO: 168787 - DNA, 201 bp, Homo sapiens
aagtgctgggattatagctgtgagccactgcacccagccatcagcttttatttcatatgcatgcatagcatcctacaacaataactttaaaaaaaataagwcatcaccattttctatgattgcaacctatatagagaaatagcctggtgttatcctacaagacaatttccttaaaatgtgtgagtaatggctattaaatca

SEQ ID NO: 168788 - DNA, 201 bp, Homo sapiens
tttccgtaagagtcaggcaaaagttcccaacaaacttctaaatctataatcaatccaaaggaaattataaacaataggctttgtatagagagagtaggtgkatcatattaggcaataatcacatagttgatttcttactataaattatgatttatgtatcataaatagcatacaaatgtttgttaaatgaatgagatctta

SEQ ID NO: 168789 - DNA, 201 bp, Homo sapiens
tgttcatatcacatagaatcactgagaattcttctctgacattcacagggcccctaagtactgcttcacagactgaactgaagcaatattaatgggtctcytcctagataagcccaagcctcaagcatagccctgcgcctcagtcagccaatctagaaatagggcaagcttctaaagatgaaagggcacagtctctgcttt

SEQ ID NO: 168790 - DNA, 201 bp, Homo sapiens
ggagagattttccggtctttttttccccgtttggttcttagaaaattagagacagaacattccctcaataaattatcaaatgttaaacaaaagctttcaarttactttaaatggtttttgaaaatcttccagagtattcagagattttaaaacacatattaatgatcattaaataaaagagttgctttattaaatatatat

SEQ ID NO: 168791 - DNA, 201 bp, Homo sapiens
cattggttctactgatctgagcatatcccatcagggctcattcacatgcctacactcagctctgtattagcttgttggtttcatttgacttggaggggcartgatgtggctgggctctcagcagagaagaatgggctctgctccacatggtacctcatcctccaagaggctagcactgggtttttctcaggctagtccagt

SEQ ID NO: 168792 - DNA, 201 bp, Homo sapiens
gagagagttcagttttcctcagttccatggtcatcaggtacctgaacaaaactgatattttatcatcaaagaaatagaggggaaatagcaactgggtagamaggttacatacagtgtacgttacagccatgtttataacaattttttgtttcttcctttttggccccttggaaagagatctgaagtgtttctatgaatttt

SEQ ID NO: 168793 - DNA, 201 bp, Homo sapiens
ttatgtactagagttttatacaactagcagcaatatagttttgcttgtaccagcaataccataaacgcatgagtgatgtgttgctctgcaacgttatggcrgccatgacatcactaggttataggaattttttcagctctgttataatcttatgggaccactatcatataggcagtctctcatggactgaaatgtcattat

SEQ ID NO: 168794 - DNA, 201 bp, Homo sapiens
taagattcactcacaaggctagagagagttcagttttcctcagttccatggtcatcaggtacctgaacaaaactgatattttatcatcaaagaaatagagsggaaatagcaactgggtagacaggttacatacagtgtacgttacagccatgtttataacaattttttgtttcttcctttttggccccttggaaagagatc

SEQ ID NO: 168795 - DNA, 201 bp, Homo sapiens
acaggcaattaatcatcagccactgcaagatgaaaaattcttcagaagtttgtgttaatggaggaattgctatttttgatcttctggttttttctatcccyggatgccttgggtaatctgagacaaagctcaagggaatgtaaccagccacccaaaatgaatgcactcaagtgagaagttgcagagctgtgacttggggca

SEQ ID NO: 168796 - DNA, 201 bp, Homo sapiens
cttcccttggtttaatgtagagggagggattaaatgacttagagacattgggatgttagagtgggtttgtcattcaagaatgactcactcacattgggagrgtcctggagacatacctttcaccataactgtgggaagtaagtttgtgagggagtcccagcatccttgaagagctctgtgacactctactctgtaggccag

SEQ ID NO: 168797 - DNA, 201 bp, Homo sapiens
gaccgtgaactcagtcatgagatggctgccctagctccacacatcataaccttacatgaaaccactcaaaggacgtgcagcaaatgtcttcattttgtaamcctttctaggattgagaaaaaccttcctacatcccccctagctggtgtttcctcattgggtacaatggcctcatattcccattcttaaaccaatcatggg

SEQ ID NO: 168798 - DNA, 201 bp, Homo sapiens
caggcaattaatcatcagccactgcaagatgaaaaattcttcagaagtttgtgttaatggaggaattgctatttttgatcttctggttttttctatccctrgatgccttgggtaatctgagacaaagctcaagggaatgtaaccagccacccaaaatgaatgcactcaagtgagaagttgcagagctgtgacttggggcag

SEQ ID NO: 168799 - DNA, 201 bp, Homo sapiens
  misc_feature (1)...(201): n = A,T,C or G
agagggtatgtgggctcatcacgctctctcctttgcaaaacatgtgtgaacatttggtgagctcgctgtgagcttctggaaggaaatgtcatgccttgccntaactttttatcactagcacctagcagagctgtttcacagggtgggcactccttaatcaacatttctgcaagttgaattgcaaaccactttgtaaaagga

SEQ ID NO: 168800 - DNA, 201 bp, Homo sapiens
gaactcaatgccaattccattgcatgtgtgggaggccaggtgccttgtcacactgggggtgttggagcagataaaggcaaacagaggagttaaaactgtaytctagaaggcactccaagagacgtcccagacaaataattggaaacaccagatgacttagaaatcaatttcattgccacaaaaatgacagcctcccttttt

SEQ ID NO: 168801 - DNA, 201 bp, Homo sapiens
gagtaaagtgtaaaatttttaaaaaaaatcagtaggtagaatattacactggaatcttaatagttcttgctgatagtgcccttaaggttaaaaaaaaaaaactcattaaattccaagagagaagatggttataaaaactgaatgaaaagatagaagttattccacaagcatttcttaaattagtttgttaagagccttaga

SEQ ID NO: 168802 - DNA, 201 bp, Homo sapiens
ggcaacaatgtgagaccctgtctctaaaaaaaaaaaagaaagaaagaaagaaaagaaaagaaattaatttaaaagtaaacaaattaaaaattaaatttatwaatgcaatgtacaccttggggcaatgggtagtagcagcaaggggacagaattaataaggatgtttattttagtgcttaatattagagattatttaatgca

SEQ ID NO: 168803 - DNA, 201 bp, Homo sapiens
tgttcaattcccatctatgaatgcacacgggaaggggaacatcacactctggggactgttgtggggtggggggagcggggagggatagcattaggagatayacctaatgctaaatgacgagttaatgggtgcagcacaccagcatggcacatgtatacatatgtaactaacctgcacattgtgcgcatgtacactaaaact

SEQ ID NO: 168804 - DNA, 201 bp, Homo sapiens
aatgctgaacttcccttggtttaatgtagagggagggattaaatgacttagagacattgggatgttagagtgggtttgtcattcaagaatgactcactcayattgggagagtcctggagacatacctttcaccataactgtgggaagtaagtttgtgagggagtcccagcatccttgaagagctctgtgacactctactct

SEQ ID NO: 168805 - DNA, 201 bp, Homo sapiens
aaggtgacgtacaaagtgcaactcatgaggatttatgctatactccaaataagtattaagtatttaaattttctaatttataatagaaaagtttggaaaaytgtgagggaatgcatattaagaacataggataatggtaggagaaacacaaattagatcaaaatgaatttattgatatggataaaggaagcagacagcatg

SEQ ID NO: 168806 - DNA, 201 bp, Homo sapiens
tccccatgtgtcttttttccctgcagtccaagattatttagccccatcctacaaggtcaagtattttatacaccagctaaggagtaaagtgtaaaattttwaaaaaaaatcagtaggtagaatattacactggaatcttaatagttcttgctgatagtgcccttaaggttaaaaaaaaaaaactcattaaattccaagaga

SEQ ID NO: 168807 - DNA, 201 bp, Homo sapiens
  misc_feature (1)...(201): n = A,T,C or G
gtgtttcctgcatttctacaatgactctcttccaagggaatacagtcacaaaagtggactgggatcaactttactttacaatcttactttcttaccccaantatagataaactcacaataaggcttgtgtttttgatactcagacctggctatgcaaataaatatggggatgtatgaatacaacgggaagagtggctacag

SEQ ID NO: 168808 - DNA, 201 bp, Homo sapiens
gcaggatctcatcctgtgactggctgaaccaacacaatttgaaccctcagcctcacaaggtgtctactgttaaagtcagtgtattaactaggaaggaatgygttgctcaaagttggaatggagatcagcttcagccccgatgaagctgaggacattgagcccctaaattatgatgagggttctttgccagcagaagagccc

SEQ ID NO: 168809 - DNA, 201 bp, Homo sapiens
tcaggtcaggctgattaatgtttaattaaaagttcttggtttacttgtatgattacagcctcctcaccccaggatgaaagccttgtgctcccatttttctsatggtttcttttttatttaaccttttcaaccatcaaaatttaattttggtccatagtctcagtgagatcaatccttttttttcatcctaaacaatcatcc

SEQ ID NO: 168810 - DNA, 201 bp, Homo sapiens
atgtttcttggtttttgtatttctgcttttatgaattacatattcaggactatcgtcaattttcttgttgatttataacagcactttttatttaaagggtrtattgtcttttgtgaaacagagacaattcagtggatcaggtcaggctgattaatgtttaattaaaagttcttggtttacttgtatgattacagcctcctc

SEQ ID NO: 168811 - DNA, 201 bp, Homo sapiens
tattttgtaagtgtttcagaggaaaatattgctataaagcaactgatttagaaattgaaatgagaaatgtcccaagaggtgaatagttgtaatatttattyaaaagtaatgttgcctatcctgctcctgataaccactatttcattctctatctctgtacatttgactgtttccttctaggattccgcatataagtgaatc

SEQ ID NO: 168812 - DNA, 201 bp, Homo sapiens
ggctgaaaaaagtttatagagctagctagaaacagccaagacttggtgaggcctcttttcactcctataaccccagtatttcaatctagaatgacccttgmtttttgtagataaaaaagtcacctaatcaggtaatatttttaaaatagtcaaaaaaggctaacattatcaagatgacaatttgaaatgtggtttcaaact

SEQ ID NO: 168813 - DNA, 201 bp, Homo sapiens
gtcactgcatgaccacctgaatgtcaattttctcacctgttcaatggagataaaaatatctcttacctcatgaaactgtaaggaggaacaacaagataatrcacctaaaatattgtttttaatgaaagcctttttctgtacaatacctgaattgactaggaaatctatatgcacttcaaatataaacaagtattacagttt

SEQ ID NO: 168814 - DNA, 201 bp, Homo sapiens
cagaatgaacacagctgaagtcttgtgctatttgttcatttggttttttaataaggagaaagatgcataaaatggcttaagtatatagcctggggcggatraatagtttcaggtatcatatacaatgctgggcggggtagtctggcctatagaacaaaaaactggtcttggaataaaggaagcgtagatttcaaggttgcc

SEQ ID NO: 168815 - DNA, 201 bp, Homo sapiens
gaaaatgtggcacatatataccatgaaatactatgcagccataaaaaaggatgagttcatgtcctttgcagggacatggatgaagctggaagccgtcattytcagcaaactaacacaagaacagaaaaccaaacaccacatgttctcactcataagtgggagttgaacaatgagaacacacggacacaggaaggggaacat

SEQ ID NO: 168816 - DNA, 201 bp, Homo sapiens
acgtattagattcttctgagctattgagcagtatcagatccttcagcaagaaagctgttttatcatttactaagtacctaggcacagcatcaccttgcccrttaaaagccctgtcaggtacacatttgggttgctaggcagctgctggggaagcaatctcttccacacatatggtttatgccacctggcctgcatttcaca

SEQ ID NO: 168817 - DNA, 201 bp, Homo sapiens
agtttttgactaaagttttcggcaagatagatatagttgagtcatggtcaaggtgaaaagggtattcactcaacaagaaaaccatccatcaaagatttccyatgtgccctttgttacggctgtgcagctaagtacaacacagttccaggctttacagttcttagagtgtttacagacaaataagtaagatgctcaatatga

SEQ ID NO: 168818 - DNA, 201 bp, Homo sapiens
gttttatcccctcacggcatttatcaccttctctcataaaaaatttatttatttattatgttttatgttgtttgcctactttctgtctatacccaccccckgcccagataccctcaaacaagaaagtaaaacccaccaagatgaagttctttggtttgttcaccagtggatttcaaacacataatagatggcaataaatgc

SEQ ID NO: 168819 - DNA, 201 bp, Homo sapiens
tataatagtccttaattaccattttgggggggaattcttttgtatagtaattgttctcccccaactagagtttatgtgccttctctgtccttctctgtccytcacctgaataatataatgctgaccatcatggagtaagcactgaacttataaatcatttgaattggttttttgatctgaaattcacagctgatgaaagca

SEQ ID NO: 168820 - DNA, 201 bp, Homo sapiens
ttcaccatggtgtaggtactgtctttattcccattttacagatggggaagttgaagcactgagaaattgtcatggtggtattatcatgaaaataacattaagattgatgaaatgtatatattaactaattttgactcacaggttaatccttctgcccttccctgatcctatcccagatggcttttggaatgctttccaata

SEQ ID NO: 168821 - DNA, 201 bp, Homo sapiens
tgtacaatcatgatttatgtataggttgaactaggggcatcgccatttaagaacgattaagacaaatcaaggcatttctgaaagagaacagattgattttstttcttaaagtatttatagcttgtaaggcagctgtctgcttttgtatattcttaaacaagcatcatagaccttattcaataatttaagtgttttctttag

SEQ ID NO: 168822 - DNA, 201 bp, Homo sapiens
tgtaaaaaatcttcaatggatgaggtgggtacttagggcttctggtccctaaggcattccaccaccctgtactctcctgggtctgtctcatggtcactttstgccatctagtggcaaaaagtagatttgtgccttccaattgccagcttcaatttttgaggcaattaaatggcttatgaaatgttccacaatccggagaag

SEQ ID NO: 168823 - DNA, 201 bp, Homo sapiens
caaatgcccgggactggagaaagggcaaggtggaggcaatgggaggcaaaattgcccccagttgagaatgattgatctctagggatcctgaagatgtgctrggtgaaagccaattctcttcctaagctgatccaggcacaaaggagagcagaggcatctgcaaaatgaaaactacattcttttaatgatatcactctttcc

SEQ ID NO: 168824 - DNA, 201 bp, Homo sapiens
agtgttgagttaggaggcgagactcaactctggtggtggggtatgaacaccggaccaaattaaggaccagctaaaacagggggagcggaagcagctttccmtaagatatgtccatgtcagtttaccattgccagggcaacaccgaggaattaccaccgctttccacggtaatgatccaatgacccaaaaattgccactcct

SEQ ID NO: 168825 - DNA, 201 bp, Homo sapiens
caaggttattttgcaaatcaccgctttgcatggtacaaccttcggagtttctagaaattgcctggagtgataaaccagagtatattcaacaataggatttmctagaattagtgggagaggtgtaattaagttactgtgtaatatatttcccccaaatgataaatatcaatatgtgaacactgaatatgtgctcctatgaag

SEQ ID NO: 168826 - DNA, 201 bp, Homo sapiens
catagaaatttctgtattaaccaccccttaatctacatgtgattaaaagtaagtataaatacaacctcaaaactgcctgagctgctactctgagcacactrcctatggagtagccctgctctgcgggaacaggcatggagctgtaacactgctgcctcagtaaagttattttcttctaccctaccactggctcgtccttga

SEQ ID NO: 168827 - DNA, 201 bp, Homo sapiens
ataatcaggcataccagtagatctcagactgtgttcccatttgattaccattgttttgctgcttaaatccaaaatatgccaattttaaaaataattttcasaattagtacattgcatttcatcaatcttaagttttcctctaataaatcatttgaaatacttgggtatctcacagaggatcccgtgttacctggtttggca

SEQ ID NO: 168828 - DNA, 201 bp, Homo sapiens
cccgtgttacctggtttggcacacaatcattacattgattttcctgaagttgaatctagtaatttttgggtgtctcacataagcatgtaactttcagactytctctccctaaaaaaggagtgtcacaagaacatattctaaatcagtctatctggatgtgaaaataggactcttcttgtgttcacagtggccaaggaataa

SEQ ID NO: 168829 - DNA, 201 bp, Homo sapiens
caaggtagaaaaggagatgtctaactaagctatttagggaaacataccttaaggctattaaactctttccttcctataagattccagctttgcggttgatsttgagccttatgaagagaagctttaacgtgaaatgaacgtgatctttccatgagccattaatggttgaccaggggatctgggagagtataactagaaaat

SEQ ID NO: 168830 - DNA, 201 bp, Homo sapiens
aggtagaaaaggagatgtctaactaagctatttagggaaacataccttaaggctattaaactctttccttcctataagattccagctttgcggttgatctygagccttatgaagagaagctttaacgtgaaatgaacgtgatctttccatgagccattaatggttgaccaggggatctgggagagtataactagaaaattt

SEQ ID NO: 168831 - DNA, 201 bp, Homo sapiens
tgggagagtataactagaaaatttatggagacttttatctaggagcccaagaataaccaacccacctaatttattgaaggtgacagtggggtagagtgcaygatatctcctgagtcttgcctatttggttacctgttatcctaaaacaattgaaaggacaaaaacataataaatgctgaatcctgacaaatgaagacagaa

SEQ ID NO: 168832 - DNA, 201 bp, Homo sapiens
tagagacggggtttcaccatgttggtcaggctggtctcgaactcctgacctcaggtgatccacctgccttggcctcccaaagtgctaggattacaggtgtragccattgcacccggcctttcttcccttcttaacacaaggaaatacccaaatattagagggatgcagcagtggggaatgtataatccatggtgtctttgt

SEQ ID NO: 168833 - DNA, 201 bp, Homo sapiens
gacctaatctaaacctaattacctcacaaaggccccacctctaaatataatcacattggggattaagggcttcaacaaatgaatttgggggaacacataarcattcctaatgcaggacaggcaacatttcagctctgccactgactgcccaaataatcctggacaacttacttaacctctctaagcctcagttttgtcatc

SEQ ID NO: 168834 - DNA, 201 bp, Homo sapiens
ggcatagcttattgctcctaggtacaaacttgtacagcatattactgtgctgaatactgtaagcaattgtaacataatggtaagtattcatgtatctaaaygtatgtaaacatagaaaaggtacattgaaaatacgatataaaagataaaagaacaatggacctgtataaaacacttaccatgaatggagctcctaggcct

SEQ ID NO: 168835 - DNA, 201 bp, Homo sapiens
ttctctatcttgcgtttctatccagatgccaatatgaactaaaatagagcttcttgttagtcagcttcttgtccttgaggggcctggaggctacaaaaaaatgagaagtagccattcatcttgatatctggaactcttgccctgggaggctgtcaaagaaagaaaattctggaaagaagaggagaagttactattttttgt

SEQ ID NO: 168836 - DNA, 201 bp, Homo sapiens
cttcacgaagccttagtaggaaaaaggaaagagctgggctgtttgctctgggtccttttatgtgctgacatggatgcatttgaaggatttgaaatgtgctkcagtttgaaacttgggttccttttactgtttattcttttttgtgttttcacccattggtacccttgattgatagtgtttaagtcaggggacaagccgggg

SEQ ID NO: 168837 - DNA, 201 bp, Homo sapiens
ttgattttaatcttaaccccactcttgggtagcttcttcgtcttcttcttttcttcttcttcttcttcttcttcttcttcttcttcttcttcttattattmttattattattattattattattgttagagatggagtctcactctgttgccaggctggagtgcagtggcacgatctcggctcactgcagcctccacctcc

SEQ ID NO: 168838 - DNA, 201 bp, Homo sapiens
tttgcttgtaccagcaataccataaacgcatgagtgatgtgttgctctgcaacgttatggcagccatgacatcactaggttataggaattttttcagctcygttataatcttatgggaccactatcatataggcagtctctcatggactgaaatgtcattatggggcacatgactgtgtgtgtgtatgtaggtacacacac

SEQ ID NO: 168839 - DNA, 201 bp, Homo sapiens
ccacaagcgaatggcgaagtaccatttaagacttgccaatgggtgggggaggcatttactatccaaataattatatcactgatcatgtctaactgaacacrtttttggctagaagggaacttggataaaatataaaaacagagctttcacaggcatttttgttatttcatttatgctttgaaaaaaatattttggggcacc

SEQ ID NO: 168840 - DNA, 201 bp, Homo sapiens
catttttggctagaagggaacttggataaaatataaaaacagagctttcacaggcatttttgttatttcatttatgctttgaaaaaaatattttggggcayctactattatgggtagctaactgcatctcaaatttatatcttaatgtgttcttgtcctttaatttttattctgcaacatatgaacttcagtaatttctaa

SEQ ID NO: 168841 - DNA, 201 bp, Homo sapiens
catggaggctattaattggggtgctaatgaaaccaatctaccacagatggcatggatccactgcatatggaagccaccacctttcaggaagacctccccamctggacttttaaaatagcctttctctccagatgccctacctatcatctcatctgcctgttaagaatgggtacatctgggccgggtgcagtggctcacgcc

SEQ ID NO: 168842 - DNA, 201 bp, Homo sapiens
tgctcaacttgattctctgtattctcatatgcaaaatggtaataataattactattgcaagggattttgttgagaattaagttaaatgagataatgcatgycaaaggagtttcaagggctacagatatgctatttttacttgtagactgtattttcttataactcagagctttagaaacccgatgcaactacctaatgcca

SEQ ID NO: 168843 - DNA, 201 bp, Homo sapiens
aattaagttaaatgagataatgcatgtcaaaggagtttcaagggctacagatatgctatttttacttgtagactgtattttcttataactcagagctttaraaacccgatgcaactacctaatgccagtaaaatggagtcgtaaagtaataaagaaaactgattgtcttgtttcctattttttttgaaaactgattttgtt

SEQ ID NO: 168844 - DNA, 201 bp, Homo sapiens
aaaatggagtcgtaaagtaataaagaaaactgattgtcttgtttcctattttttttgaaaactgattttgttgcttactgtttttatcatttggtcaaaaytgaaacgtaagttttgtatctctatccagatacaaagacagatttttggctttcgttacaacagcacagtaagatacaaaaatgttcacttcattttaat

SEQ ID NO: 168845 - DNA, 201 bp, Homo sapiens
ataaatgggaatgcaaatctccaagactgttgatactggacaaggtttggggaattttggacagagattttcatatatgttacagcatcttcagttaatgmggagaaactatatgtgcttagattgatagataagtagattgattaatcagtcaatatactgattaatctgaaaaaaataggaatcacattcttcaaagaa

SEQ ID NO: 168846 - DNA, 201 bp, Homo sapiens
ttagtcctttcatatagtagtccattggtcattttataaggaatccaagaagcatagcataagagaaaaggataaattttcatcctggcacagtggctcaygcctgtgatcccagcactttgggaggccaaggcaggcagatcacctgaggtcaggagttcgagaccagcctggccagcatggctaaaccccgtctctaca

SEQ ID NO: 168847 - DNA, 201 bp, Homo sapiens
tcacccaggctggagtgcagtgtcgtgatctcagctcactgcagcctcctgagctcaagggattctctgacctcagcctctcaagtaactgggattacagrcacctgctaccacatctgggtaatcttgtatttttggtagagatggggtttcaccatgttggacgggctggtctcgaactgctgacctcaggtgatctgc

SEQ ID NO: 168848 - DNA, 201 bp, Homo sapiens
  misc_feature (1)...(201): n = A,T,C or G
cgcaaagtaaacggcaagaaaaactcgtagagaaacacaaggaaatacgtcagcagatcctggatgaaaagcccaaggtaaacggaactgaattaaaatgnacaattattttatttgatttccatttagtaagagtaaaaccttcctggtttacataagtaccttgtacacagtctcagatcagttcttgcatatgaaact

SEQ ID NO: 168849 - DNA, 201 bp, Homo sapiens
cacctcctgagtttaaggatttgcctgtttctcctgcctcagactcacaaatatctgggacaacaggcacatgccaccacgccaggctactttttttttttattgtattttcagtagagacggggtttcaccatgttggtcaggctggtctcgaactcctgacctcaggtgatccacctgccttggcctcccaaagtgcta

SEQ ID NO: 168850 - DNA, 201 bp, Homo sapiens
atatttatcagataaacaaagtgactccaataagctagctgcaaccaccgcaactgtcatctacaacttaaccagttttatttttttacagcacttatccytctttaagatgatcttattttgaataatttatttgcatgtcattgtcagttgcccacccacctacttcataagccccaagacataagggactgatctgtt

SEQ ID NO: 168851 - DNA, 201 bp, Homo sapiens
ccctcaaactcctagactcaagcaatcttatagcctcagcctccttatcagctgggactacaggcacacaccgtagcacccagcattttttttttttttttctgttagagacaaggtctttccatagtgcccagactggtctcaaactcctgggctcaagcaattctcccctcctgagcctcccgaaatgctgggattaca

SEQ ID NO: 168852 - DNA, 201 bp, Homo sapiens
catatccaaatttttcatctaatattttaatatttaactttttaatccaacaggattttatgttgaattttttgtgataagagagatttaaaggaatgtaytttcctcagaaaacaagacaaattctacagtggtgtctattaaatatttcctacctattcatgtgtgactctttactctatatcccaaaacaatctcacc

SEQ ID NO: 168853 - DNA, 201 bp, Homo sapiens
tgctaaaccaaagaacttctctatctgaggtgtaactgtctattatatttcttccactgacttaggctagttgcagaggaccctccaatcggtacattggraattcttggctgaacttgaaggctgtgttttaggtctgcccttctctatcttgcgtttctatccagatgccaatatgaactaaaatagagcttcttgtta

SEQ ID NO: 168854 - DNA, 201 bp, Homo sapiens
ggaatcttgaacgagcatgactcaatgggagactgttccactgtcagtttctcttccagcctcccatgactccaaaccattaggctgcagttttgacagtrtttcccaatggcttgaaagtaactaatgagtgagtgccagtgcctaatagaggtggatgatggcagttataatttctcaaagatcatttgattcatcttt

SEQ ID NO: 168855 - DNA, 201 bp, Homo sapiens
cttgaacgagcatgactcaatgggagactgttccactgtcagtttctcttccagcctcccatgactccaaaccattaggctgcagttttgacagtgtttcycaatggcttgaaagtaactaatgagtgagtgccagtgcctaatagaggtggatgatggcagttataatttctcaaagatcatttgattcatcttttgtaa

SEQ ID NO: 168856 - DNA, 201 bp, Homo sapiens
tcatttttatccaagggcactgtatttcattctgtctatacccactcctgtgtttattttttttgggttgtgtgacaatattatgttcctggaaaagcaamtaagaaaaaattgaaaaaataaatgttttcagtgggccaataagatggttacttttgtgcatatttttgtggtctgatgttcaaataatacaatagtcag

SEQ ID NO: 168857 - DNA, 201 bp, Homo sapiens
aactgcacgttgtacacatgcaccctaaaacttaaagtataataataataaaattttttaaaaaaagaaagaaagtgtttagcacgaggttttgggtgaakaagatgagacatgtgaggtccgggggcatggcattttggctgcctagatatcccaggatttaggggaatgcataactttctcactaagtatatgatgaat

SEQ ID NO: 168858 - DNA, 201 bp, Homo sapiens
gattattgaatctagtgttacaagtctctgaaaaacaattttggcttgataaagagcaatggagcattaccgtactttcacatccaatgtccaccaattayagcaagtatgaaagaatgtaacttaaaagctataactggttttctcatcctaactgatcacgcacaccatacaaaatatttcaaaggcacaaaagcatga

SEQ ID NO: 168859 - DNA, 201 bp, Homo sapiens
ggcagcttacttcatctgtcagaggaaaggaagtagctgttactgaccagacgacatgtgttgaattgtttgaggctgtaccgcatgtcaagctttgacasaactgacataaaaaatatacctcacattgtgttagaattgaagagaacagctcttgttcattagaaggtgaggctcttcaaagaagcttcctgatgcagc

SEQ ID NO: 168860 - DNA, 201 bp, Homo sapiens
atgaggttttcagtttggcaacaaacctgctggcccaaaacatgtccagggatgcatttctggaaaaagcgtaagtcactctaattttattgctaagggckttgcttcttctgagtcagtttcctttctcctttgtgagtcttccgtttatgccatactgacttctcacattgataaacacaaattttcctttgggattta

SEQ ID NO: 168861 - DNA, 201 bp, Homo sapiens
ccaatcaccctccccaaatatgtgaggattacaattcaacatgagatttgggtgaggacatagaaccaaaccatatcacaacccattaagtgaaagggaartcatatttctactcttgcttctattccattttgcttataattcaacatttgctgaagagcatttgtggctctttaaagtattctcttatgtctttgttat

SEQ ID NO: 168862 - DNA, 201 bp, Homo sapiens
caacagggtgggactagatcaggcagacagatctcagagggcatttttttttagcactgcctagagccttggttattaggaagccgagaatcttgcagagstcccaggcctcaggggctctgaacaagcaacagagagttctgtgatttcttcttcattctaagtaatatttcttccaataacaccatggtgtttactaaa

SEQ ID NO: 168863 - DNA, 201 bp, Homo sapiens
tttaaaaggatttctgagcccgatctttacacacatgctttagtttgtactgtctttctgtacatcctcagttaagagatgctttctggagtgttttgtaratggatttgaagacttctcactgcttcagtacagaatgccctggcaatgcacgcctggaaggagtccatggactgatattttctagccaaagggagctaa

SEQ ID NO: 168864 - DNA, 201 bp, Homo sapiens
atcttacctcaccaatgctagatcctacaggtaacagaagcacagtataccagaatgatcacatccaatagcccctggctggctccaggtgtcatgaagtracctctgattttgttactgcccctgagtggtggccagaagttacattatgtcagtttacagtgtggcagcccccatatccattggggacatgagtgtcag

SEQ ID NO: 168865 - DNA, 201 bp, Homo sapiens
ttccttagtaatgttttaaggtctttatcatatagatcttacagttaaagttaagcttccgctgagtgttacatcactttgatgttttaagtggagctttyatttacatttctaaccaccttttattaaataaaaggaaactaatttttgacataatattatgtatccatgtacttcaccgaatcttttaaaaaatagttt

SEQ ID NO: 168866 - DNA, 201 bp, Homo sapiens
caaatgtaagccatagatctgaaaagctttcggtattttctgaaaacgtgcacttttaaatgtttagatgaaagtaatgtttcttgtaactttcttatagytagaagaagcgcaaagtaaacggcaagaaaaactcgtagagaaacacaaggaaatacgtcagcagatcctggatgaaaagcccaaggtaaacggaactga

SEQ ID NO: 168867 - DNA, 201 bp, Homo sapiens
gatttatatatttatagttacgttcagttttagagattaaaatgctctattgcttttatcaattttacatttggaaagtataaaatattcctttgcctcarcattcaaaattatataaagaagaatgctcagggaagtcactctcatccatatccttccaccctattcctacccaccttctggttttccttaccatgtttc

SEQ ID NO: 168868 - DNA, 201 bp, Homo sapiens
atatgatttgctggaacttggattcaaacctgtctgtccttagagtccatgcttttgtgagactccacctctggctgttcctgaggagttcctagttaagygggaatgggggtgggcaagccagtgatgacagggttaggtggatactggaatattcaggaagtgccagaaagtacagaggatgaaaggcttgacttcacc

SEQ ID NO: 168869 - DNA, 201 bp, Homo sapiens
ttcaaccaacagactcagaagttgctcttgccaaaacgaagaaaggaaaacctgggtattggaaaacagcctctgccatagaaggcctctaccatagaagscttgttagcggcctcttccatagaaggcctgttcatcatagctcagttcagaatatcagggtcttcctaaatttatgtcatgataattctaatttctaat

SEQ ID NO: 168870 - DNA, 201 bp, Homo sapiens
tttaacccaggcagtcagattgcatataaacactcaagaagctgcattttatagccgtagaagagccatgctgcattgataaaatgtgctccttagcaggygctcaaatgttacaccagctcactggcttgagtaatcagtcctcctttcactggttcagttgcatcagacgagtgttcatttttcacacccagcaaccac

SEQ ID NO: 168871 - DNA, 201 bp, Homo sapiens
attctgtggattttttgtgtttgcttcatatggcttaatatcacttcactctgcagaattatggaatgtaaggtaatacacatcaaagcagcataggtaaracaattggatcgagaattagcaaatgtaggatttaggcttatgtgtcccatttaaccatggacttttctggacttttgtctcctcatctgtaaaacaagt

SEQ ID NO: 168872 - DNA, 201 bp, Homo sapiens
tagtttattggtcaagtaaataactggtttccagagaaaaataaaacactcaagttaatattcaactctaattcatgccattccagttttaattccagtcrcttcttgacaaagaattggtgaaccttttgacagccgtgacttagagaaatgttgctatcctgaaacaggtccaaattctttcttctgtggtcattctgg

SEQ ID NO: 168873 - DNA, 201 bp, Homo sapiens
gctcctgcaatgtcttccttcaagcatgatgcacattataattattctgttctgcttcaggaatgcatatcaagttctatgcaattaatgccattacaagrcaaatacagagctcttcttggcatctccaggacatctgtaacgctgcagaagcaaagcattgtagtaatttatgtgacttaggaacttcttttttctatg

SEQ ID NO: 168874 - DNA, 201 bp, Homo sapiens
gtccatactatactataggaagtaggaaaatcttcaggacaatcaatctggtttagtcaacaaataaattccaagaaaaaaataagacagaaggggaaacratagtttagaacacatacagctcatcttaaacaattccaatgtatggctttcatttagattgggatttttaaaattatggcacttgtgagataatttgaa

SEQ ID NO: 168875 - DNA, 201 bp, Homo sapiens
cacctatatacgtacatgtttttaattatgcgtatatatttaagaatagttttacaaaaatgggattatggcccatgtattttccttaaactgggaatcamatttggatttcatataataaagacattctatgaattgggagtatctaggattctcagtgggatagtattaccagtggaacagactgcctcatgagtagca

SEQ ID NO: 168876 - DNA, 201 bp, Homo sapiens
ccatttttatagtttataaaatactagtgatagtccttctccttcatataacttccttcaagagttgagaatatgaatctaagaaaactttgagttctgcrtataatatatgtgccttacagagcttctcatgtcatgcatcacaactacagggtcacttcatgtcagtgtgcattgtctaagtattgtgatctacaattt

SEQ ID NO: 168877 - DNA, 201 bp, Homo sapiens
aatggacaaatgaggttttcagtttggcaacaaacctgctggcccaaaacatgtccagggatgcatttctggaaaaagcgtaagtcactctaattttattrctaagggcgttgcttcttctgagtcagtttcctttctcctttgtgagtcttccgtttatgccatactgacttctcacattgataaacacaaattttcctt

SEQ ID NO: 168878 - DNA, 201 bp, Homo sapiens
accagtaggggataattcagatgaacaccttcgtgcttggaatatgagcacttagacttctagattttaaaaggatttctgagcccgatctttacacacakgctttagtttgtactgtctttctgtacatcctcagttaagagatgctttctggagtgttttgtagatggatttgaagacttctcactgcttcagtacaga

SEQ ID NO: 168879 - DNA, 201 bp, Homo sapiens
ctgcccattgaccagtaggggataattcagatgaacaccttcgtgcttggaatatgagcacttagacttctagattttaaaaggatttctgagcccgatcyttacacacatgctttagtttgtactgtctttctgtacatcctcagttaagagatgctttctggagtgttttgtagatggatttgaagacttctcactgct

SEQ ID NO: 168880 - DNA, 201 bp, Homo sapiens
taaaacacatattaatgatcattaaataaaagagttgctttattaaatatatatgtatatatacaagtatgtcataaatatataaaaatcatagatatatwcacatacatatgtatatctgaccctaaacaattctaaatttttttagtctttgaaattgattttatatcagatataattttttagctaccagaaaatatt

SEQ ID NO: 168881 - DNA, 201 bp, Homo sapiens
ggtttttgaaaatcttccagagtattcagagattttaaaacacatattaatgatcattaaataaaagagttgctttattaaatatatatgtatatatacawgtatgtcataaatatataaaaatcatagatatatacacatacatatgtatatctgaccctaaacaattctaaatttttttagtctttgaaattgatttta

SEQ ID NO: 168882 - DNA, 201 bp, Homo sapiens
cattagggtaaatggggtatccatcacctcaagcatttatcctttccttgtgttagaaacaatccaattatactcttctaattatttttaaatgcacaataagttaattgactgtactcaccctgttgtgctatcaaacactagatcttattcattctgtctaactacatttttgctcgtattaatcatcctcactccctc

SEQ ID NO: 168883 - DNA, 201 bp, Homo sapiens
actgccatcagtctattactgctgcttaaattcacagcaccgtggacaagaggagaaggtagcctagctgtttcattggcccccgcatctctctgccacaygatggacagccatatcagattgcattagaatgttgactgcatgttaactggtgatccttcttcctctcaatacttattttaaaatcactctaaacgccct

SEQ ID NO: 168884 - DNA, 201 bp, Homo sapiens
cccttgattttcagacatagccattagaagcacactgatcttcacaggtggaggcctccactgccatcagtctattactgctgcttaaattcacagcaccstggacaagaggagaaggtagcctagctgtttcattggcccccgcatctctctgccacatgatggacagccatatcagattgcattagaatgttgactgca

SEQ ID NO: 168885 - DNA, 201 bp, Homo sapiens
aattgtagtaaaatctctctgaaggctggcatcagtatgtctgggcaggatgtatattctagcccagattttgcatagatgtcacaaggagtccagaatcycttgattttcagacatagccattagaagcacactgatcttcacaggtggaggcctccactgccatcagtctattactgctgcttaaattcacagcaccgt

SEQ ID NO: 168886 - DNA, 201 bp, Homo sapiens
acagatctacctagaattgaacttaattgcacaatattgtatttcctttgccaattaacccaatggaggtttgaagtaatatatttgaaaaatgctttgtmatctgaaaagcaccaggcacttgttaatcgttgtcattactatattggaaaaactacctgtggccacttgcaatggagaaaaaagtcttaacactgagca

SEQ ID NO: 168887 - DNA, 201 bp, Homo sapiens
taagaaggcaatgattagtatttgaaccacaaggaacaggagaagtgaggggtcaatgtggtcagacttactaaggagtacttaaaggccactgcaaaacyaggcacctgatcctctaattgagaggggaagtttgcaagggaaaggtgtttgatatatggcaagttgaaagggtggagaggctgagcgccagaggtgagc

SEQ ID NO: 168888 - DNA, 201 bp, Homo sapiens
aagtgattctctcacctcagcctcccacagaatactggaattacagatgtgcaccaccacgccccactaatttttttttgtatttatttatttatctattwgtagagacaaggttcatgttgctcaggctgaactctccacttgtttttcagtttttaattttttaattggcatataataattgtacatatttatgaggta

SEQ ID NO: 168889 - DNA, 201 bp, Homo sapiens
ggcttaagtgattctctcacctcagcctcccacagaatactggaattacagatgtgcaccaccacgccccactaatttttttttgtatttatttatttatytatttgtagagacaaggttcatgttgctcaggctgaactctccacttgtttttcagtttttaattttttaattggcatataataattgtacatatttatg

SEQ ID NO: 168890 - DNA, 201 bp, Homo sapiens
tgtacttcctacatatgattggttttccaactctctaattccccttaattgataattctagtgaaataccctcctgggaacggacctaggaattcctgccyaggcctctgcctttccaaggctcatcctcaaaccgttactctgagacaattgtaatgaaacaagcaccatttatacggcaaactttaaagctcctgctag

SEQ ID NO: 168891 - DNA, 201 bp, Homo sapiens
tgtcacctgtacttcattgtttcactgtcaccagaattatcctttaaaattctaaaaataattactttgtacatgttttaaaaactgctaacgattctcartggatcatttagtatacttccaggcttcttggcatgctgtaacacacagttaggtataagcagccctaagaagtttttcagaggcctgcccctctggtta

SEQ ID NO: 168892 - DNA, 201 bp, Homo sapiens
attttcccatttcatgcgcaagttctaggcttctcatggtgttccaccctttgtggcttcagccttcctttccagcttcacctcccagtactgcagcccayctgctccagcgattccctgaaaaagtcacgtcccctgtagtatatctgctcccggtgctcaccccaacaggattaagcccacacttgtaggcctaaccag

SEQ ID NO: 168893 - DNA, 201 bp, Homo sapiens
acacacttataaagcaattaccttttgaaagccattctgaaaacccttcaagaattctgttaatcactggtttggattttcagaattgtattgtaaatcarttcattctagtatgcctcaaatggacggccataaaaacatatacatttaactcatatcatctgatagtacaaatgataaatgatacattttaattataac

SEQ ID NO: 168894 - DNA, 201 bp, Homo sapiens
ggtgttccaccctttgtggcttcagccttcctttccagcttcacctcccagtactgcagcccacctgctccagcgattccctgaaaaagtcacgtcccctstagtatatctgctcccggtgctcaccccaacaggattaagcccacacttgtaggcctaaccagatcctaaactcaatcttgttgagcccaatgaaaatca

SEQ ID NO: 168895 - DNA, 201 bp, Homo sapiens
caggattaagcccacacttgtaggcctaaccagatcctaaactcaatcttgttgagcccaatgaaaatcaggtggtgtaactcacaaaggcaattgacttkaactcctctaggttttgcttttgtctggttttcaaaggaaagtgcatgagggagcagggaagtgtttgctgcaagcaaatgtttgaacgttcaggacagt

SEQ ID NO: 168896 - DNA, 201 bp, Homo sapiens
ggtggtgtaactcacaaaggcaattgactttaactcctctaggttttgcttttgtctggttttcaaaggaaagtgcatgagggagcagggaagtgtttgcygcaagcaaatgtttgaacgttcaggacagttaaaagaagaaaagatataagcattggtgaaagtgagcacaatagatgcaaatttggcacgctgaaagga

SEQ ID NO: 168897 - DNA, 201 bp, Homo sapiens
gcatgagggagcagggaagtgtttgctgcaagcaaatgtttgaacgttcaggacagttaaaagaagaaaagatataagcattggtgaaagtgagcacaatwgatgcaaatttggcacgctgaaaggaatttttgccccttaatgatctgtgttttctttatgcagcataacccgaggcaattaaaggcaggaaactactct

SEQ ID NO: 168898 - DNA, 201 bp, Homo sapiens
ggagcagggaagtgtttgctgcaagcaaatgtttgaacgttcaggacagttaaaagaagaaaagatataagcattggtgaaagtgagcacaatagatgcaratttggcacgctgaaaggaatttttgccccttaatgatctgtgttttctttatgcagcataacccgaggcaattaaaggcaggaaactactctaaccaac

SEQ ID NO: 168899 - DNA, 201 bp, Homo sapiens
tgctgcagtttgaaacttgggttccttttactgtttattcttttttgtgttttcacccattggtacccttgattgatagtgtttaagtcaggggacaagcygggggtttagaacattgatgtcctcagcgaatgaccctaagcttaaaagggagcccaaactcatcaggcctcgtgtttaaaaatagtttatttttgatga

SEQ ID NO: 168900 - DNA, 201 bp, Homo sapiens
ggcacaaatgcaagttcccagttcccatctcctcagtgtgtgcccgctgacctccctgcaacagttctgcccattgaccagtaggggataattcagatgarcaccttcgtgcttggaatatgagcacttagacttctagattttaaaaggatttctgagcccgatctttacacacatgctttagtttgtactgtctttctg

SEQ ID NO: 168901 - DNA, 201 bp, Homo sapiens
tggcacatgtatacatatgtaactaacctgcacattgtgcgcatgtacactaaaacttaaagtataataataataataataataataataataataataataataaaagttttggtagggtcgggcgcagtgactcacgcctgtaatcccagcactttgggaggccgaggcaggtggatcacgaggtcaggagatcgagac

SEQ ID NO: 168902 - DNA, 201 bp, Homo sapiens
actacttccaaagagttccaaaaaaaaaaaaaaacctgttggacacatctgatacggtttggctgtgccgtcacccaaatcatcttgaattgtagctcccrtaatccctgtgtgtcatgggagggaccttgggggtggtgattagattatgggggcagttcccccatgctgttctcgtgatagtgagtgacttctcacaag

SEQ ID NO: 168903 - DNA, 201 bp, Homo sapiens
aaggggtccgtgtgttctcattgttcaattcccatctatgaatgcacacgggaaggggaacatcacactctggggactgttgtggggtggggggagcgggragggatagcattaggagatacacctaatgctaaatgacgagttaatgggtgcagcacaccagcatggcacatgtatacatatgtaactaacctgcacatt

SEQ ID NO: 168904 - DNA, 201 bp, Homo sapiens
cctaggctttgagaaatccctcagacatagatgcagctggaagctgtccgttggcatacatgaaaacacatgggcaccaccagcagcaaccactctggtgrctttaatttctggtaagtcagacttttaaaatctatatcgcagtgtgcaaactggagcctgcacccattcacgaacagttcttgcttggcctgtgcaaat

SEQ ID NO: 168905 - DNA, 201 bp, Homo sapiens
ctttttatttatattatatttttaacagattgtttctggatatttatatttgtatatttgtttattttataaatgattgtattttacaaatgatcatcttyctaaactcttataatagcctattttttgcagtacattccgttggaatttttagacacacaaagacagtaatttaatcatatctcatttctccacctgcct

SEQ ID NO: 168906 - DNA, 201 bp, Homo sapiens; identical to SEQ ID NO: 30515

SEQ ID NO: 168907 - DNA, 201 bp, Homo sapiens; identical to SEQ ID NO: 30517

SEQ ID NO: 168908 - DNA, 201 bp, Homo sapiens; identical to SEQ ID NO: 30518

SEQ ID NO: 168909 - DNA, 201 bp, Homo sapiens; identical to SEQ ID NO: 30519

SEQ ID NO: 168910 - DNA, 201 bp, Homo sapiens
tgggcacctaggttgattgaatgtctttgctattgtgaatagtgctatgataaacatacaagtgcatgtcacacactttttgatgtgaaaaaaaaaaaaaaacaagtcatttaaactagatccataatctgttatctgagattcttggggcctgttgtttttcagaattttaacttttctgattttagaaaggcaatgtga

SEQ ID NO: 168911 - DNA, 201 bp, Homo sapiens
accccctattacctcttttgcccgatttcaagaaggaaggacctgaagttcaaaacactttagtgattgcgaaccctcttggcgcttttgtgggagccaasgcggcggaggacacaacggtccagccaacaggtggtcgttgatgccaaacttcagcgcctggctccggagtgagggtccctgaaaagggctgcggggaca

SEQ ID NO: 168912 - DNA, 201 bp, Homo sapiens
atgggcacctaggttgattgaatgtctttgctattgtgaatagtgctatgataaacatacaagtgcatgtcacacactttttgatgtgaaaaaaaaaaaaaaacaagtcatttaaactagatccataatctgttatctgagattcttggggcctgttgtttttcagaattttaacttttctgattttagaaaggcaatgtg

SEQ ID NO: 168913 - DNA, 201 bp, Homo sapiens
aggggcatcagcttgtgttaccagaccttatttaaagttacattcagctgggcacggtggctcacgtctgtaatcccagcactttgggaggttgaggtggrtggataacttgagatcaggagttcaagatcagcctggccaacatggtgaagccctatctctactaaaaatataaaaattagcctagcatggtgatgcgcg

SEQ ID NO: 168914 - DNA, 201 bp, Homo sapiens
gcaccccctattacctcttttgcccgatttcaagaaggaaggacctgaagttcaaaacactttagtgattgcgaaccctcttggcgcttttgtgggagccmaggcggcggaggacacaacggtccagccaacaggtggtcgttgatgccaaacttcagcgcctggctccggagtgagggtccctgaaaagggctgcgggga

SEQ ID NO: 168915 - DNA, 201 bp, Homo sapiens
ggcacattctcctagacagaagcaaataacaagcaaataacaatcctaagattgttattggcttcatattttatattacaaagtggtatatatactatacrtagtatatataatatacataatataaatattaatatatgtaatacattatattaatttattatgtttatattataaaatatttatataacatataaaata

SEQ ID NO: 168916 - DNA, 201 bp, Homo sapiens
ccagagcacaggatcttcaaagacttagaacatcttttggtatttcaaatacaatagtaactttctgtttgacaaacgtctttgggttattatcttgattwtttttttttattatactttaagttttagggtacatgtgcacaacatgcaggttatttatcatttttgtacaatcaaaatttgtttcctaattcacaatca

SEQ ID NO: 168917 - DNA, 201 bp, Homo sapiens
gctcacagaactcagaaaatccactttacttacatttagatttacagtttatcaagaaggatacagatcaacagccagatgaagaggtatatagggtatcrtagtctgctttgtgctgctataacaaaatgcctgagactggcaatttatacgaacagaaatctattttctcacagttctggaggtttgaaagtccaaaat

SEQ ID NO: 168918 - DNA, 201 bp, Homo sapiens
agtctttataattgaaagcacccatcatactttgtgcatggacttctattcacagaatgaatttagcaaagctattgggcaatataaaattttaggataggaaaacatagctcaaatgctatggtcattgtggatctcagactgagtacaaggctgcaatattcactcctgaagctagaaacaaacctcaatctgaaacca

SEQ ID NO: 168919 - DNA, 201 bp, Homo sapiens
gaacagctcacagaactcagaaaatccactttacttacatttagatttacagtttatcaagaaggatacagatcaacagccagatgaagaggtatataggktatcgtagtctgctttgtgctgctataacaaaatgcctgagactggcaatttatacgaacagaaatctattttctcacagttctggaggtttgaaagtcc

SEQ ID NO: 168920 - DNA, 201 bp, Homo sapiens
ctgggcatggtggcgcgcgcctgtagtcccagctactcgggcggctgaggcaggagaatcgcttgaacccgggaggcggagcttgcagtgaggtgagatcrtgccactgcactccagcctggtgacagagtgagactctacctcaaaaaaaaaaaaaaaaaaaagagatcaacttgggcaatgtagcaaaaccccatcttt

SEQ ID NO: 168921 - DNA, 201 bp, Homo sapiens
catgagaagtcactcactattatgagaacagcaagggagaaatctgcccgcatgataaaatcacctcccagcaggcccctcctccaacactggggattacwattcaacatgagatttgagggaggacacaaatccaaaccatatcacctatggtttgggttttggtagcacaacactggtacaacctactactcagggatc

SEQ ID NO: 168922 - DNA, 201 bp, Homo sapiens
tccctgccccaaggagtttgtatatgctttttggtgcacatacacaaacataagaaaatgggcaagtcaaattatagatgaggatgatagtgattttttttcacatttcatgagattattgaatataatttcataaaaatgagaataccctttcagataaaagtgtgcaaaatattttatttatgaatgtaaatttttcca

SEQ ID NO: 168923 - DNA, 201 bp, Homo sapiens
ttcttgtttcaataactgcctcctttctcctcctgcagcttttaaattgtagataaatattttcaggtgctaacctagagtcttactcttccatgttcatrtggggtatctgcatgctgggggaaggaagaggttgaggagggaattggccttttgctgggggtttagtgcactggaaggcatttttagaacatctggaga

SEQ ID NO: 168924 - DNA, 201 bp, Homo sapiens
ctgctttgaagggtccagtgaggtttggtatggtcctcacataaagtaaagaggccaaggatatttgtgttttacgttaggtcttggcaaggtaaaaattwtaagagaagttttatagtgtaccagatttctatcgtgtttttaaaaagaaaataacttattgaatataattgccagacaaggtgaagatagtaaaagtat

SEQ ID NO: 168925 - DNA, 201 bp, Homo sapiens
ttgcaggggagctgagtaagatagagcaatgtgacaagcaggtcttataagactaggtagaagatcaatactctgagaaggagatatggaggggtcagaayggtctgtggaaaaagtactgaatgtggtccagttgaagaggaagagaatcaatatattaaaaaagacccaaatgaaaaaaagaaataaagctgtctttat

SEQ ID NO: 168926 - DNA, 201 bp, Homo sapiens
tataagactaggtagaagatcaatactctgagaaggagatatggaggggtcagaatggtctgtggaaaaagtactgaatgtggtccagttgaagaggaagrgaatcaatatattaaaaaagacccaaatgaaaaaaagaaataaagctgtctttatttgcagatagcataattttctatggagggacaccaaagagtctat

SEQ ID NO: 168927 - DNA, 201 bp, Homo sapiens
gagaactcatatgatttaagacttactataaagctacaataatcaagaaagcatggtgttggcaaattagatacatagatcaatggaaaataatagcaagyccccatatagacccagataagtatagtaaactgacttttttatgaaagtgcaagaataattcaataaagaaaggatagtcttttcaaaaaatagtgctgg

SEQ ID NO: 168928 - DNA, 201 bp, Homo sapiens
acttttttatgaaagtgcaagaataattcaataaagaaaggatagtcttttcaaaaaatagtgctggagcaattgggtgtccatatgcaaaaatatgaacwtagagttcatactttacaaaaaaaattaactcaaaatgagtcatagacatatatgtaaaatgcaaaccaattaaacttctagtagaaaaatagaataaat

SEQ ID NO: 168929 - DNA, 201 bp, Homo sapiens
tcatggaagcttgatgcaaaattgtcagcaatatgagaaataatagaagaaaagaaatcatctgcttcattcaaaaaatattaaaatctttcatcatgttsctgttctttaactcccggtttaattaccatggagcaaggagtccttgataatcccattttccatgctcttgtccaatagcttgatcccagtcagcctttc

SEQ ID NO: 168930 - DNA, 201 bp, Homo sapiens
tctggtacagggtattaaatgaccatatcctgtgactttaatatgctatccataaaactgagatgatccaaaaatctgtccattttttttttaaataatcytccctcaactcttttatctaaaattttgggggcaagttctcaagtcacagatgactttaaataaagcaaaaagatgtggaaatttggcatcatgagattc

SEQ ID NO: 168931 - DNA, 201 bp, Homo sapiens
aatatataatgaacacagagcaaattaaagaatcagaacatgaactatcaattttgtcatacgttcatggaagcttgatgcaaaattgtcagcaatatgakaaataatagaagaaaagaaatcatctgcttcattcaaaaaatattaaaatctttcatcatgttcctgttctttaactcccggtttaattaccatggagca

SEQ ID NO: 168932 - DNA, 201 bp, Homo sapiens
tgtaaccaggtttttttttttttctggagggctcattattaagatatttatgtagccatggtatacgactggcatctcagctcaagaaattcaaaactgarttcaatattcctaccctctaccatttcaattctttcacccaccattcccaaacttttaaaaatacacaatgccctagtttacagccattactaagatatc

SEQ ID NO: 168933 - DNA, 201 bp, Homo sapiens
aaataatacagctttaagaaaataaatatttctctgctggtattgcatagttattctaaacagtaaagtattaaagactaaaacgtttaatacagtagatycctatttatatatcccctttgcatctctacaagtatctaaagattgaaaacatctcatggaagtaaaaatgtatttcctttgaaattctcattgtcactg

SEQ ID NO: 168934 - DNA, 201 bp, Homo sapiens
cattaaaccttcctcaagttgtttgaatggtgcattttctgtttagaccctgttacagtggaggaagcagctattgttgttgttgttttgctataattaayataggaatgattaaaagtgaatatttaatcattggcatgaaccatgcacaaaagcatagttagaagttttatattaacttcaagagaatatgtatgtcaa

SEQ ID NO: 168935 - DNA, 201 bp, Homo sapiens
tcaaatttttatctacaattggtttccctcttggtacttggaatgctctcctcagccagaacatttaaaagagtttgttttacaaaattttatttacaggttttttttttttcagacacttttcaactatgtaaagcaaagtagacctgaatcaagaaccaatgtaagacaagatttacctgacaaggatcttgattaaca

SEQ ID NO: 168936 - DNA, 201 bp, Homo sapiens
atatatcctattaacacacagatacacgcacttcatgtcaggtgccccttcaagataaaggtaatttttcacggtaatggaaaagcaaatattatttgttytgaatatgttacgagggagtattctgaaaatgttatgtttgtttggatatgttttcataactacctggatttgttaattaaaaatatgtaaaaatattac

SEQ ID NO: 168937 - DNA, 201 bp, Homo sapiens
tttatcactatatttctaatgctatacactgataacaatgtgtgtgaataaatagattataaggactgaattgaccttgcatagtttctggtataaaaagytgccttaagaactgaagatgacagaaaattctcatagtcttcatgacacatatattgacaatccattgtcatactagactattgtcatcttaactagatg

SEQ ID NO: 168938 - DNA, 201 bp, Homo sapiens
cctcctgggcctttagtagtcttatcagtagtatgaagtctcacctgaacaactccaatcttgagaatttccaactctgctgaaatcctgtatcatatttkgtctttatcaattgtttggtatttatgtttttagtcttacatgtatgtctgcatcttacgaattctcacacttagcctaatatatttagtaaatacttat

SEQ ID NO: 168939 - DNA, 201 bp, Homo sapiens
aaataaataaggggcataaaatattctctcatgagaaatcaaaacaaggacctatgttgggaggaggcagtgcaattttagataaagcacctggggaggawctatttgaaaagcactggagtaaagatatttgagggaatcagccatgaagatattgggtgaggtgctttctctgctgagaaaacagtgagttcaaaggta

SEQ ID NO: 168940 - DNA, 201 bp, Homo sapiens
tattggtgttaggtattagagttctattttactgtatatttagctttacaatatgtcattagtagctgtttatttagtaaatatttataggttttgctttytttgtccatcatttcttcttgcattttagtcttttcatctagaatcactttctttctacctgaaaaggcttcttagtggaagggtgttgttgcaaactct

SEQ ID NO: 168941 - DNA, 201 bp, Homo sapiens
aagtgaggagatacttgggaattggttgagcagatgaagagagacttgggaatttcagaatatccttccactcagagccctctcagtaaccaggtcagccrccatagttacagacttcctttccacctcactaaaaatacagatggtttagctcattagacattgacacatcctgtcttggcacaatctctatctcccatg

SEQ ID NO: 168942 - DNA, 201 bp, Homo sapiens
atacttattctagtctctgattttccagttaatttaggaaatacctttcagttcatatattgtatttattttctattgctgctgtaacaaattatcacaamctttgttgcttaaagcaatacatttattacgtttcagttctgtaagtcagaagtccaacatgggtcccactgtactaagatcaagatttcatcagggctg

SEQ ID NO: 168943 - DNA, 201 bp, Homo sapiens
agtgaaatcccaaagaaagaccttgtgctaaataaagtttgtttattatgattaaaagctacttgtaaaaatgacagcatatttcagccccaagttttttaaaagctgaattgcacaagcatcattaactaataaacttggtcaaaggaatctcgaagctgttgcaagagtgttccaagaagacatggcaaattacatgtg

SEQ ID NO: 168944 - DNA, 201 bp, Homo sapiens
tgttacagatttctcagtatagctttctctgtattccaaaatttcaaatattcaaccattgatattttaaaattcctctgggaataggcaatattggggcrtattgttcctccttttactttgaaaaaaaatcattcaatattgtatatttgaggtatcaaaaaatgacactaggaaacctctctagtgaaccaatgaaaa

SEQ ID NO: 168945 - DNA, 201 bp, Homo sapiens
cctactgacataaaatgttttaaatctgctatctcccttaacacacatgagaaaacctgggcaacagccaaatactattaggagagaagggagaagtgtcwtgatactatggatattcccaggacctgtctctgggatgtgaaatttccttctgatccacaaatgtagatgcccaatgatcataacaggactatcagatat

SEQ ID NO: 168946 - DNA, 201 bp, Homo sapiens
ttttagagtctgcctttttacaggattatatatagtatgtgccaaactccaattggcaataaatcaaacattactggctcaaagccagggagccttcagtrcaaaacctaagagaatataattcagtaaatgaagtgatatgattgcttttaagtggcagataaagttgaatgtgaggaaagttttattttggtctagata

SEQ ID NO: 168947 - DNA, 201 bp, Homo sapiens
gtttgtctttacaagtaaactgtatgtccagatagatttttctttcttctcctcctttttcttcctcctctcgtcctctctccctccctcccttcttcctsctcctcctcattctcttctttttcttcatttttttcatgttgggtaaatgcttcatttttaaaatatcacaatacacatatattttctggttatgtatat

SEQ ID NO: 168948 - DNA, 201 bp, Homo sapiens
cacctcatgcctaaaagccctagttttaggattgaacctattcttgtctcttcaaaagtcataaagtttgacttttcctattggtagctcacttgaagacaaaataacaataaactcaagaagcactggtttagtgaaacaacgtatcactgacctttatctatgctgagtcagctccaaataccactttgagcacaaaat

SEQ ID NO: 168949 - DNA, 201 bp, Homo sapiens
tatactaaatgaatttttttgtttgcttattcaattcataaaatatttgcttaattttttgagttatgttaccagccagataccattctacagcaagtcarctgtattgatgctaagaaccttgatttttattgttattattattattattattctaagattagagatatcattaaggatattatttcccgaaaccacagt

SEQ ID NO: 168950 - DNA, 201 bp, Homo sapiens
tccagcttagttactgaattttcttaaagaaataccttcagaagctgtcagcaatcctggttttcaatatttacaaaatcaaatagaaatcgtttattttytatacatgagtttaatatttcacaatacacctctgtgactacttcttacatgtaagaataaagaacattttagcttaattcaaattatataaaacaagcg

SEQ ID NO: 168951 - DNA, 201 bp, Homo sapiens
atgttccagtaccacaatctgaatgtgaggaatgctcattgtactgaaatgaacattacttctaggccttccaaggaatgaagttataagaaatgacactcacacacacacacacacccccatccatagacacacacaaacacacacacacagagatagagagagagagagagtgagaaagagagagatgctggggatgct

SEQ ID NO: 168952 - DNA, 201 bp, Homo sapiens
tgttccagtaccacaatctgaatgtgaggaatgctcattgtactgaaatgaacattacttctaggccttccaaggaatgaagttataagaaatgacactcacacacacacacacacccccatccatagacacacacaaacacacacacacagagatagagagagagagagagtgagaaagagagagatgctggggatgcta

SEQ ID NO: 168953 - DNA, 201 bp, Homo sapiens
acttctaggccttccaaggaatgaagttataagaaatgacactcacacacacacacacacccccatccatagacacacacaaacacacacacacagagatagagagagagagagagtgagaaagagagagatgctggggatgctagaattactcattttttaaaatccagcattacacacaaaatattatgaggatgaaaa

SEQ ID NO: 168954 - DNA, 201 bp, Homo sapiens
taccatttcatcagagccttgagctaattatttcattcatgtctactggtagatttttcttagtgtacacttttagtgtcttgaatctcgtgccactagcytgtagacggcatccccatgatggctcccagaggaaattcttgttaaatggaaggtggaatttcttaacatatgggatccaaactagaagcaactcctgct

SEQ ID NO: 168955 - DNA, 201 bp, Homo sapiens
cttaaaaaagcactaattaagcataactatatgaactgggaagatactttacttaaatgaagggagcagagattcctctccatgatatctgccaggcaaayccaagtatagatgaggcaaaggagaacaacacacacagagggctgtaatgcaacttttctctctacactttgctcttctggattctgggagctgtggatt

SEQ ID NO: 168956 - DNA, 201 bp, Homo sapiens
cttctaggccttccaaggaatgaagttataagaaatgacactcacacacacacacacacccccatccatagacacacacaaacacacacacacagagatagagagagagagagagtgagaaagagagagatgctggggatgctagaattactcattttttaaaatccagcattacacacaaaatattatgaggatgaaaat

SEQ ID NO: 168957 - DNA, 201 bp, Homo sapiens
ttgactgatcactctacaaatgatgtgagattactattacttccattataaatgtggctatatcagtttctccttgtagcagtataaactgttgccatttraatttcaaatgaattatttttaagtataaatctgtgatatgcacctggtgaattgactctttaccttataaagtgttattctttacctcctgaattactt

SEQ ID NO: 168958 - DNA, 201 bp, Homo sapiens
acctatttgtgaattttccagatttctttctgctattgactttgaatttcattctcctgtggtcagaaaagctacttgatattatttgagttttcttaaawttgttgagatttgttttgtgacctaacatgtcatctagcctggagggtgtttcctgtttgcttcagaagaatatgtattctgctcctgctgagtggaatg

SEQ ID NO: 168959 - DNA, 201 bp, Homo sapiens
ctatcgcaaggacaaaaaaccaaacaccgcatgttctcacttataggtgggaattgaacaatgagaacacatggacacaggaaggggaacatcacaccccrgggactgttgtggggtgggggcaggggggagggatagcattaggagatacacctaatgctaaatgatgagttaatgggtgcagcacaccaacatggcaca

SEQ ID NO: 168960 - DNA, 201 bp, Homo sapiens
attgcctctcttgcttcattttgcatgtctctgtgtgtgtgtctgtgtaggtgtgtatgtttgagtaatatatttggtaatacttttaactttgctttaawttttttatgtgtttctgttacaaaaactatgcaataggctgggcgtggtggctcaagcctgtaatcccagcactttgggaggctgaggtgggcagatcac

SEQ ID NO: 168961 - DNA, 201 bp, Homo sapiens
caaaaaaccaaacaccgcatgttctcacttataggtgggaattgaacaatgagaacacatggacacaggaaggggaacatcacaccccagggactgttgtrgggtgggggcaggggggagggatagcattaggagatacacctaatgctaaatgatgagttaatgggtgcagcacaccaacatggcacatgtatccatatg

SEQ ID NO: 168962 - DNA, 201 bp, Homo sapiens
gaaccaagtatcaatagagaatattttaccagtgatacatctttagtcccttgaggtattttgtgtgtgtgtgtgtgtgtgtgtgtgtgtgtgtgtgtgtktaaatgctttccagaagtaaataagagccattatttcacacaaaatttgtatttcctttgagaaaataaaagaggtactagaagacaagttggcttctaa

SEQ ID NO: 168963 - DNA, 201 bp, Homo sapiens
tctgcatggaagttgggcttttggactttgaagataagtgtttttcattaacattctaaagttctgaaaatttctcaacttttattgcttgggatactgtstctttcattatttccctgttctgcttctggaatcccatatattagatctactcgctctattttacctgtcttttttattgttattctacatacttctttt

SEQ ID NO: 168964 - DNA, 201 bp, Homo sapiens
cttaattttcagctttaattgctatttttattgagttcacttttggaatttaccattttttagaagaataaattctaaataactttactattgtcattcayagtgtattaggcttgaaacgctcaatgataggaagccatgcacaaataatttgatactgttaatggaacagcctcattaattcaatcaaacaagttagaa

SEQ ID NO: 168965 - DNA, 201 bp, Homo sapiens
atacggtcaacaaatgagcatctactatgagtgaagcaatggactaggcactgagttttaagtaagaaaaaccaataacaaatatggtctgatgatctaayggaaaagggaaatagtacatatgtaattacaggtgtaattattagtcccaataagaagtgtaaacagtagaaaatatacagtagttttacctttcccggg

SEQ ID NO: 168966 - DNA, 201 bp, Homo sapiens
cctacacttaggcaagagttttacacaaagacatgaacaccagtaggtgggatcattgggagctacatcagaagatgcctcccacctaaggtatgccaggrggttgggaaggggaggggggtggcggttggtggagaagagtcaagaatgactctcatgtaaataacatacataggattattttacttgataaagcctctt

SEQ ID NO: 168967 - DNA, 201 bp, Homo sapiens
tctggtttctggtttgagcagctgcgtgaataattgggtcatttttttgccccatagaacactggaataagagcagattcttgggtgaattatgattggtyttggactttcacttggagacttaaaaaatatccaaatggagctattgattaagtaataagaagagtggccaaggttaaagtcattgacaaatggatggga

SEQ ID NO: 168968 - DNA, 201 bp, Homo sapiens
acattcatccagcctgtctttgccagactttgaatctgagaaatcacacgtggataataaattgaaaattattatcaaggaacaacattccaagcagcacmtctaatttgatggttgaagcttctgtaattatttaaaaggaagttctcatttaaaaattttttttatcagaaacacaaggtaattttagtgctaacaaaa

SEQ ID NO: 168969 - DNA, 201 bp, Homo sapiens
tgtaacatgataacagactttactccaagagtgaaaattaatgtaaaggttttaaacaagggaatcatgtgaccagaaaaatcttgagtgatacctttgaygacaagttgaagaatggattggagtggacgtgacagtagaagcaagcagtgcagcaaggaggtgaatgtaacagtttaggcaagaggccatgatggctag

SEQ ID NO: 168970 - DNA, 201 bp, Homo sapiens
ttcaatactatttttagttttagctgttctttagttctatgatccatttcaagttatagttgtagttctagaccccctgttctgtttcataaatctatgtytatcctaataccagtcaacattaccttaattaccatacgttcatggaaagtcttggtatcaggcaatataagttctccaaaatcattcttgtttaaaaaa

SEQ ID NO: 168971 - DNA, 201 bp, Homo sapiens
tgctttgtcatgtcacctcaagagttagtggtcccacaatgctgtacttttcatgaaggggaaaaaagaaaacacaaaatcttatcttggcaggattttcygtgtataatttagaaagtgttttcaaaacgaaatttcttatttgtttaaaaggatagaactatccttcccctttggacatatgcaatctccttaaccaat

SEQ ID NO: 168972 - DNA, 201 bp, Homo sapiens
aacttaatatgtgtgtgtgtgggtgggtgtgggtgtgtgtctgtgtgtgtaccaccaaatttaataggctttgtgagggtagatgtagtgtttcttttttyagcatataatgtgcatactagttgttgaatacatatttttgacaatcactcaaatatataccgcacatgaaaaccaagatgtgaaacaataaaagcagaa

SEQ ID NO: 168973 - DNA, 201 bp, Homo sapiens
cgaccctatatctcccaattcagcagtagcaggaaaatgaaccatttctttaccattttttcaggctgggatatttattctcctccagatacaaagcaagkgccagccagtacgtgtggattttttccttccatttctgtttaatctgttttgacttacatatgataaaaatttagttgactgaatggatgtgagtctttg

SEQ ID NO: 168974 - DNA, 201 bp, Homo sapiens
ctttaaggatttacttccaggaactgggataagtactttatacagtatatacaatctagtaacaattgattaatttaacaaataaaacttgttacatgccrttcatagtacttgccttttctaaaatgtagagttcacatcctagttgagagacagacaataaacaaatatatataatgaagtcctatggagatatgtact

SEQ ID NO: 168975 - DNA, 201 bp, Homo sapiens
gattttttccttccatttctgtttaatctgttttgacttacatatgataaaaatttagttgactgaatggatgtgagtctttgtggctggtaatgctataytaaatgaatttttttgtttgcttattcaattcataaaatatttgcttaattttttgagttatgttaccagccagataccattctacagcaagtcaactgt

SEQ ID NO: 168976 - DNA, 201 bp, Homo sapiens
atcaaaattaactggaactgaaatgacataagttaatttaacattaaattcttgcctgctagcacttgttcattttagtaatttgagttttttttaataaraaagtaaatatgggtcatttcagtcttcatcattaatcccactggaaaaacagagaaaaggtagtaacaggtttataagcacgtaggaaagagggaacag

SEQ ID NO: 168977 - DNA, 201 bp, Homo sapiens
ctaatacaattaagtcacccatttcatcaagttaaatgagttagaaaataaatccctctaggatgggaaagaacatgacaataataaaatgtaggcaaatsagtgtttggtttccttccaactaaaaatacacagtaagcagtagggtacaggcctgaaggacagggaaaagatctgggatggtgacagaaaattgaatgt

SEQ ID NO: 168978 - DNA, 201 bp, Homo sapiens
tgaggcacaagaatcgcttgaacccgggaggtggaggttgtagtgagccgagatcacaccatggcactccagcctgagcgacagagcaagactctgtctcaaaaaaaaataaataaataataaaaagcaggttgatgatctttagaaatcatccaaggtttcaaaattttaaagctgctaccttgattagctatgaataac

SEQ ID NO: 168979 - DNA, 201 bp, Homo sapiens
aacttttaaactcgtaatgtctaaatatttatcctatattttgataagactaaaatgattttcatgcatagaaattaaaaaaggagttgaaaataaggagtttatttaatatatgtcaatagacaaaatagttcaatattctgtaaaaactgggtcccacttattttgagcagactgctgaaagctcatttattctacatc

SEQ ID NO: 168980 - DNA, 201 bp, Homo sapiens
ctgggtaattaataaaggaaagaggttaaatggctcacagttccacatggctggggaggcctcaggaaacttatattcatggcggaaggtgaagcggaagsaagggcctttttcacaaggtggcaggaaaaaaagggggagaatggggtacctgctaaacattaataaaaccatcaaatcttgtgagaactcactcactat

SEQ ID NO: 168981 - DNA, 201 bp, Homo sapiens
gataattaatatgcatttaccatgaaagttagggatactctttcaagtactgtgaatacagacacataaatgattattataaaatgttataagggcagagrtagagaaatgtacagaccatgagaatgtcatagaggagggatacctagcttatgagggacaaatgtcaattaacatacttgagtgtatataaaatttatt

SEQ ID NO: 168982 - DNA, 201 bp, Homo sapiens
agttctattgttattttatttaggtaagtaaatgaagtatttacagagtgatgaagtatgagtgaagaaagaaagtcagtgtttctatgaaaatgaagttraaatttttaaaagataattaataaaggagagccattaaaatctattgttgctgaattcaatgtagaggaaacaacttagactagaaaaataattataaaa

SEQ ID NO: 168983 - DNA, 201 bp, Homo sapiens
ttatcactatatttctaatgctatacactgataacaatgtgtgtgaataaatagattataaggactgaattgaccttgcatagtttctggtataaaaagtygccttaagaactgaagatgacagaaaattctcatagtcttcatgacacatatattgacaatccattgtcatactagactattgtcatcttaactagatga

SEQ ID NO: 168984 - DNA, 201 bp, Homo sapiens
cactgtataaacaaaccagtttatgggcctgttaagaaaagtttctgaaacatgctaagtgtcagaacaagttggaaatatgtgtgtcatttagtgtcagwgaaatttaacatacagagaaatctaacaaaagtcacagatcgccagttgatacatgtttttgcatttcaatagccaacacatatttcactcacatccctc

SEQ ID NO: 168985 - DNA, 201 bp, Homo sapiens
aattgggatcaaaattaactggaactgaaatgacataagttaatttaacattaaattcttgcctgctagcacttgttcattttagtaatttgagttttttktaataaaaaagtaaatatgggtcatttcagtcttcatcattaatcccactggaaaaacagagaaaaggtagtaacaggtttataagcacgtaggaaagag

SEQ ID NO: 168986 - DNA, 201 bp, Homo sapiens
tcagtggtgatatcccctttatcattttttattgtgcctatttgattcttctatcttctttattaatctggctagctgtcttttttattaatctttttttaaaaaaaaacagcttctagattcattgatttttttggagggtttcttgtgtctctatctccttcagttctgatctaatcttagttaattcttgtcttctgc

SEQ ID NO: 168987 - DNA, 201 bp, Homo sapiens
ataacctgtcttcaagttcactgattatctcctctgctttatcaattctgcttcagaatctctgtagtaaatttctcaactcagttattgtatcctttagctccataatttctatttggttatttttataatattttctatatctttcttgatattctcattttattcatccataatttttcattgagtatctttatgatg

SEQ ID NO: 168988 - DNA, 201 bp, Homo sapiens
aattttaaaaataatgccttcagtcatactaggcattaggatctttcaaaaatgccttatatatactatctcatttatatatcatgacaacctaatagtgyagaccaggcaagaattttccctggctgtccattccaaactccacctttgatcacttgccaatttcccacattaagaaactgagagtcaaaagtggaaagt

SEQ ID NO: 168989 - DNA, 201 bp, Homo sapiens
gtttggtttttatttttagttgaatttgaggtcctttagaaagggcatgcatgccttagtttcccatttctccaacatgccctattgtctttagcccactstcttctcatgcctgaatacatcacctgcctgaccccaaagtcatccaagtgtgtaaccctgaattcaagaattcatttaatcaatagaagaaaattataa

SEQ ID NO: 168990 - DNA, 201 bp, Homo sapiens
taatttttaaatgggagctatatagactccagtacacagaggatccttaaggcatataataggataagcaatgcaaaaaaaagttctatgattttttaaaygttactacaagttcattaattattttgtaatggtagacaaaaagttgatggcaagttaaataaattgatttaaaatttacagaagtttgtgtgacggttt

SEQ ID NO: 168991 - DNA, 201 bp, Homo sapiens
cttcatttagtagaagtgccagaaactatgctacttcaccttcctgggagaaaatggaaaataaaaaagcaaaagtttggaattaatttttaaatgggagmtatatagactccagtacacagaggatccttaaggcatataataggataagcaatgcaaaaaaaagttctatgattttttaaatgttactacaagttcatt

SEQ ID NO: 168992 - DNA, 201 bp, Homo sapiens
gtatctgaatgagaatggaatccattagcaggatcactttgcctgctgttttgagaatagaattaaggagacaaaggcaaaagcagaaaagtcacacattcctaagagttattgcaataatcagctgagaaattttattgcattagctgaaggtggtaccagatgtagtcagattctattctacttctgaattttagaatt

SEQ ID NO: 168993 - DNA, 201 bp, Homo sapiens; identical to SEQ ID NO: 30598

SEQ ID NO: 168994 - DNA, 201 bp, Homo sapiens
atgcaaagacagccacatatagacattttatactcaaacatctgaaaattaaaagagaaaattagggaagggggcaaaaatgtaagaaaagatttcacacrgtggaacaacaatctgaatgaaagaaaacttgtcactcaaaacaatggaagccagagacaatagaatgacatttttaaattctttaaaagaaaataaaac

SEQ ID NO: 168995 - DNA, 201 bp, Homo sapiens
ccaatgtcatggagatttccccttatgtcttcttctagcagttttatagtttcaagtcttatatttaagtaatttctccattttgagctattttttgtggktgatgtaagctaagttcctaattttattcttcatgtgaatatccagtttatcaaacacaatttattgaaagactgtcttctttccatcatgtgttcttgg

SEQ ID NO: 168996 - DNA, 201 bp, Homo sapiens
aatagaatgacatttttaaattctttaaaagaaaataaaacatacttctatatccactgagtataagtttcaaaaccaaaaacaaaataaagacattaccrtaaacagatgctgaaagaaattagtcagctagcaggcacatgagaaatgccaaattaaatacttctggtacaaggaaaatgacaccagatggaatctagg

SEQ ID NO: 168997 - DNA, 201 bp, Homo sapiens
tgacatttttaaattctttaaaagaaaataaaacatacttctatatccactgagtataagtttcaaaaccaaaaacaaaataaagacattaccgtaaacaratgctgaaagaaattagtcagctagcaggcacatgagaaatgccaaattaaatacttctggtacaaggaaaatgacaccagatggaatctaggaaagagt

SEQ ID NO: 168998 - DNA, 201 bp, Homo sapiens
agaataaacattccaaacaaaaggcaggaattgacaaatgagataaaaaaggaaggactcaattgttgtctacaagggacacaagaaacaaaggcagagakagattgaaagtaaaataaacaaaaagacaacattcaatcagaaaaaaatgcttgtatgattattaatatcagaaaaagtatatttcagggctgagtacta

SEQ ID NO: 168999 - DNA, 201 bp, Homo sapiens
aactccaggagtgtgggatgtaagtcagccatccccggtgaccctgcaggtaagtgccaggctaaaagattaaagtacacatggcaagtattggttgatamgtagtttgttgtcaattatagaaacaatttcttccaggatcacacattttaatagccttctctgcctccagccttctgggatttgtgaaacctctactgc

SEQ ID NO: 169000 - DNA, 201 bp, Homo sapiens
tgtgttaatgcattgagaaatgaatttgatcactggcagatattccaaaaaaatcactgatattttgttaatctaaaaatgaatttatgatataaacataratgccttctttaaggcaaatttcatattagcaattaaaatttatatagttctacctcttctgttgctagggtttctgaaagttttgaaaaactaatgcat

SEQ ID NO: 169001 - DNA, 201 bp, Homo sapiens
agctactgtttttctctgaagtgaaataagaagaaaacatcagggatccatttgttaatacttaagggaggaaagcaaaactattttcttcaagaagtatyttcacatagctcacccgacaatattttatcttcctgctataaaatgcttaatagcaagtatagcaagtttttaatatattaaaaaatgaatttcaaaaga

SEQ ID NO: 169002 - DNA, 201 bp, Homo sapiens
taaggtgtcgattttagatctttcccactttctgatgtgggcattcagtgctacaaatttccctctaaacactgctttagctgtgtctcagagattctggyacattgtgcctttttctcattggtttcaaagaactttgttatttctactttaatttcgttatttacccaggagtcattcaggagcaggttgttcagtttc

SEQ ID NO: 169003 - DNA, 201 bp, Homo sapiens
aattaaatgtcatgaaaggtggttgcactgcaagaggcatgcaaaaactaagtccaagtgttaaagtatcaggatcactttctcatcattgggcattttcyctttgagtgaaaaggcaggcagaattgcttactctgttttaagatttttcttacttttttaaaaaaaatctaataggtacagttaagctcatgtaagtta

SEQ ID NO: 169004 - DNA, 201 bp, Homo sapiens
caccacagaaaagttccattggttagtacagaacaaatgttgactttgttgcaaggaagatttgatttggattcttgttttaactttcaaacaacatattmaccttacttctctccactttgccttgaaagataagtatctctaaaaatattataaacatgtccttcatatgcaaagatattggtttcttcttgtgtaaag

SEQ ID NO: 169005 - DNA, 201 bp, Homo sapiens
tatatcttgataggagtgtggttgttatctggtacatgcatttgtaaaaatttattgaactgaagctgcggaatgtccttgaatgtgaatttgctttaacaaaaagagctaaaaaaaagaaagaaagcattgttcagtattggggaaaaaaatttaatctgagcaaatatgttttagtaattttactatggattttttttc

SEQ ID NO: 169006 - DNA, 201 bp, Homo sapiens
taattaggtgaaaaattagaccattattactgtgaatgtaaaatgttttgctaaaaacttgataccatcatctttatcactttgccacaagtaagactccytgaaaattttttgatatgcttcataaatatattttgaaacataacaaaataaggcttcaaattccttaaactgagatatgtctgtctgggctgaaatcca

SEQ ID NO: 169007 - DNA, 201 bp, Homo sapiens
acgatgtttattttaaccctgattgaaaatgtaaggctgcatctagttatctggcaaaaaagtgttttctggggaggccttgttaagcaaccacttaccaycttttaaaatacaattttctgcattgagattctctatgagcattggggaattactaaacagtttctgattttttctggcttctctattctccacttctat

SEQ ID NO: 169008 - DNA, 201 bp, Homo sapiens
ggggaaaactgtccacatgatctgatcacctcccaccaggtccctccttccacacgtggggattatggggattataaattgagatgagatttgactggggacacagctaaaccatacaacagagttatttgttgcattaaaatttgagaaatattgcattaaaggactataagagtgaaaccacacatattactctatgta

SEQ ID NO: 169009 - DNA, 201 bp, Homo sapiens
agtgaaataagaagaaaacatcagggatccatttgttaatacttaagggaggaaagcaaaactattttcttcaagaagtatcttcacatagctcacccgayaatattttatcttcctgctataaaatgcttaatagcaagtatagcaagtttttaatatattaaaaaatgaatttcaaaagattctagataaggatggtat

SEQ ID NO: 169010 - DNA, 201 bp, Homo sapiens
agtttttatcatgaaggtatgttacattttgtcacgtgatttttctgcatccagtgagatgatgatgttatttttatccttcattttgtaaatttagtgtwtcacatttattaatcggggtatgttgaaccatccttggatcccagggtaaatccctctggaccatggtgaatgattcttttaatgtgttctggaattcag

SEQ ID NO: 169011 - DNA, 201 bp, Homo sapiens
gtatgttacattttgtcacgtgatttttctgcatccagtgagatgatgatgttatttttatccttcattttgtaaatttagtgtatcacatttattaatckgggtatgttgaaccatccttggatcccagggtaaatccctctggaccatggtgaatgattcttttaatgtgttctggaattcagctttctaataatattt

SEQ ID NO: 169012 - DNA, 201 bp, Homo sapiens
ttatatattttgtgactgttattaggatcacttacatggagaattgttatatttttcccattatattgaaattttcactaacgttcacgtgtctctcctayctctaacgatgccttttgtctgaaaaatctttcttctgtattactaatatagccaagccagctttattttggctagtgtctgcatgatacaactttttcc

SEQ ID NO: 169013 - DNA, 201 bp, Homo sapiens
agaaaattatgaatatgttagatttaaaagtgaagaggttaagctatcatgcatggacaataaatgttacctaactgaagtcataagacagtcaagaaaamaaacccaataattaggtgaaaaattagaccattattactgtgaatgtaaaatgttttgctaaaaacttgataccatcatctttatcactttgccacaagt

SEQ ID NO: 169014 - DNA, 201 bp, Homo sapiens
ttcagttgccatctttcaagctgacctaccctgagtctgcccggcagagaaaccaaaaagatcaaatccgaagagagatatctaaggaacagcaactgttscagtccccagctgggactccatccccaaccaccaaatgatcacagtttcatcagagatcccaagcagaacacccagctgagccctctcgaacacctgaac

SEQ ID NO: 169015 - DNA, 201 bp, Homo sapiens
aacattacatacaattgtgattcttctctaactctcatctcacacaaagtcaaagttcttatgcaattgtgccctttaggtctttgattcccttctttctytactgactttgtgtcagccacactgctgctcattaaacactctagtcattcatctgcctctgagcttgtggactagctgttgcttctgcctaaaatgcat

SEQ ID NO: 169016 - DNA, 201 bp, Homo sapiens
ttattttttcaagtgaataatacaataattaatacgatcccagagaattgacacacacacacacaaacaaatcaaaataacaagaatttagtaaaataagwggttacaaagtaaacatttaagactcagtactttaaaaattaaaaagaaaatatatgatcacctaaatagatacagaaagtgtagttaataaaatgtaga

SEQ ID NO: 169017 - DNA, 201 bp, Homo sapiens
ttaaagaaaccatattattttttctgtacagatttccacctgatttagtttaatgtgtacctctgtcctccatatttcctgggccttggtaattaaatctrgaggcttaatcaaatatattcaagttagaatttttggcaagacttcttcatggtagttttgaattctttatcaggaagcacaaaacacctggctgcttct

SEQ ID NO: 169018 - DNA, 201 bp, Homo sapiens
cgctcttcccaggacacaactatgccaaatcatgtggaaaaaagttctgcatatggaactcttaatgtcctgactgtcagataaatataaatgttctttamctttagtgtcttcagattagttgaaagaccatcataagaaaaacatctacatgcttatagctgtgtttctcaaattggcataccacgctatcaaagcccc

SEQ ID NO: 169019 - DNA, 201 bp, Homo sapiens
tttcttgagatcatgggtagacctagtgagtacagattagaacaaggtttatttcttgcataatgagcgctcttcccaggacacaactatgccaaatcatrtggaaaaaagttctgcatatggaactcttaatgtcctgactgtcagataaatataaatgttctttaactttagtgtcttcagattagttgaaagaccatc

SEQ ID NO: 169020 - DNA, 201 bp, Homo sapiens
tgttacattgatcccgttcatagtgtgagttgttttgtactgatttaaaaacgatgtttattttaaccctgattgaaaatgtaaggctgcatctagttatytggcaaaaaagtgttttctggggaggccttgttaagcaaccacttaccatcttttaaaatacaattttctgcattgagattctctatgagcattggggaa

SEQ ID NO: 169021 - DNA, 201 bp, Homo sapiens
cattccccccaactcctcactccctaagactctgataatcaccattctactcctacaaattaaactttattagatttcacatgtatgtgagatcatgtgattttttctgtggttggcttatttcacttagcataatgctccctggattcattcatgttgtcataaatgacagaatttcccctcttttaaaactaaatagta

SEQ ID NO: 169022 - DNA, 201 bp, Homo sapiens
gacattcttgcaacatattgatttccattcttttgaagaaatacccaggagcgagattattcggtcatacggtagttctatttttagtttctagaggaaastggatgctgttttccataattgctgtactaatttatgttcccacaaacattgcataatttccctttttttaaaccctccccaacacttaatctttcatgt

SEQ ID NO: 169023 - DNA, 201 bp, Homo sapiens
tgttctgatctttgttgtttctttccttccactaatttggggcttagtttgttcctgtttttctagttccatgaggtataactttaggttgttttttaaayatctttctattttgttgatgtatgcatttattaatataaatttccctcatagaactgcttttgctatatcccacagattctagtaggttgtgtttccatt

SEQ ID NO: 169024 - DNA, 201 bp, Homo sapiens
atactaaatatataaatggcttgcacatcataattatagtattacgttattctgactttgtctgtgtactcacttttaccagtgattttaatacattcagrtgttttcttattacatgttagcattcttttcattgagaataaacaactccttttagcatttcatgtaagacagatccggtgtaaatgaattccttcagtt

SEQ ID NO: 169025 - DNA, 201 bp, Homo sapiens
accacctgcccttatttcttatccatatacaaggaaaggaagcaaaactatacaaatccaaatggtgtaatgtatatgtgttttgttattagtcatatacygactcataaaatcatcgaatgtgttattagcattttgttaaaatatgcatgctgttttctctagtcttttctcaagcctctgaagtccctctgtattctg

SEQ ID NO: 169026 - DNA, 201 bp, Homo sapiens
ctcctgggttcaagcaattctcctgcctcagcctcccatgtagctgggattataggcgtgagccaccacgcccggctaatttttgtatttttagtaaagasagggtttcaccacgttcgtcaggctagtcttgaactcccgacctcaggtgatccacccacctcagcctcccaaagtgctgggattacaggcgtgagccac

SEQ ID NO: 169027 - DNA, 201 bp, Homo sapiens
ctgggtgctcctgtactgggtgcatatataagaatagttagctcttcttgttgaattgatccatttaccattatgtaatgcccttctttgtcttttttgawctttgttggtttaaagtccgttttgtcagagactaggattacaacccctgctttcttttgctttccatttacttgggaagtttacctccagccctttatt

SEQ ID NO: 169028 - DNA, 201 bp, Homo sapiens
aaattagggaagggggcaaaaatgtaagaaaagatttcacacagtggaacaacaatctgaatgaaagaaaacttgtcactcaaaacaatggaagccagagwcaatagaatgacatttttaaattctttaaaagaaaataaaacatacttctatatccactgagtataagtttcaaaaccaaaaacaaaataaagacattac

SEQ ID NO: 169029 - DNA, 201 bp, Homo sapiens
tgggtgggtgtgggtgtgtgtctgtgtgtgtaccaccaaatttaataggctttgtgagggtagatgtagtgtttctttttttagcatataatgtgcatactagttgttgaatacatatttttgacaatcactcaaatatataccgcacatgaaaaccaagatgtgaaacaataaaagcagaatgtctctgggtggtagtta

SEQ ID NO: 169030 - DNA, 201 bp, Homo sapiens
gtatctatttttatgccaggaccatgctgttttgattacaatcactttataatatgtcttgaagttgggtagtgtgattcctctagctttgttctttttgstcaagattgttttggctgcttgggatcttttgtggttccatgataaggattgtttgtccatttgtgtgaaaaaaaaatgacatctggtttttataggaat

SEQ ID NO: 169031 - DNA, 201 bp, Homo sapiens
gtaaaagactttctccttttttttcctaaaagttgtataactttacattttatatttaagtctgtgaaccattgtaagttaatttttgtattaggtatgargtttgggtcgtttatatttttacatatgggtgtctaattgttccagtatcatcggttcaagaggctaacctgtcttcactgaattacttttacaactttg

SEQ ID NO: 169032 - DNA, 201 bp, Homo sapiens
ccacaaacattgcataatttccctttttttaaaccctccccaacacttaatctttcatgtttttgataaatccattctaacagatgtgaggtggtttctcrgtgtggctctaatcgcatttccttgataattagtgatgcctaacagtttatgtacttattggccatttatatgtcttcttttgagaaatgtctatttagg

SEQ ID NO: 169033 - DNA, 201 bp, Homo sapiens
tattctaatgactatacaaggagattatatatacagtatggctagaaggaaaacatgtgaaagtaataaacagcaaactattaattgtcctgctatttcttttttttttttttttttttttttctgagacagagccttgctctgtctcccaggctggagtgcagtggcacaatcttggctcactgcaacctccccctccag

SEQ ID NO: 169034 - DNA, 201 bp, Homo sapiens
gagatcttagctcactgcaacctccacctcctgggttcaagcaattctcctgcctcagcctcccatgtagctgggattataggcgtgagccaccacgcccrgctaatttttgtatttttagtaaagagagggtttcaccacgttcgtcaggctagtcttgaactcccgacctcaggtgatccacccacctcagcctcccaa

SEQ ID NO: 169035 - DNA, 201 bp, Homo sapiens
gattcaggggtacatgtgaaggttggttacataggtaaacttctgtcacagggatttgatgtacagattatttcatcgcccaggtattaagcccagtaccmaatagttatcttttctgcttctcaccctcctcctaccctcgcccctcaagtagatcccagtgcctgttgtttctgtctttgtgttcatgagttctcacca

SEQ ID NO: 169036 - DNA, 201 bp, Homo sapiens
aatgcaaaacaaatgtttttgtatgatttattgataaacaaaaggattcaatctttagcagatggaaaagctaaatatatatagtataaatgtaaagttamtattagttaataaattgagctggttataaaattccagaagcctccattaattcatcttaaaacacacacttttacctgattcataaatgcctatatctat

SEQ ID NO: 169037 - DNA, 201 bp, Homo sapiens
ctggttgtttggaagtgtgtggcacctcctcccacctgttatcaccatgtgagacacctgctcctcctttgccttctgccatgattgtaagcttcttgagrcctccccagaagcccagcagatgccagcaccatgcttcctgtaaagcctggaaaactgtgagccaattaaactcttctcttttaaattgcccagtctcag

SEQ ID NO: 169038 - DNA, 201 bp, Homo sapiens
gatgtttgtgttgatgttcattatcaggacattaatctgtagtgttattttttgtggtggctttgtctggttttagtatcagggtaatgctggttttgtakaatgaattaggaaaataatcctccctcttcaaattttgtgactagtttgaaaataatttgtgttagttcttctttataagtttggtagaattcagcaata

SEQ ID NO: 169039 - DNA, 201 bp, Homo sapiens
gtgtctggtccctctagtcctgggtttttccagtactcaatattggaaattatatgatatgattatggaactccaggaagagttgttgcaaaaacaaaacmaaacaaaacaaaacaaaacaaaaaaaaccctgccttcttgctatctagttcattagagatcccttaagggagtccagcaggttgtcttagtcttgaaaaa

SEQ ID NO: 169040 - DNA, 201 bp, Homo sapiens
tttatctgatataagtatagctacttctgcttacttttggtttctgtttatgcagaatatctttacatcccttcactttcagtctatatgtgtctttatargtgacatttcttgtagacagcatataattgggtcattttttaaaatccattcaaccaatctgtatcttttaagtgggtaatttaatttctttatattcaa

SEQ ID NO: 169041 - DNA, 201 bp, Homo sapiens
aaacatatcactactgttcactgaggaaaaaacgtggttgaagatctgtaatctgtcaaaaagctggcttcttggtttcaaagtaaaggctccagttgatrgactaaattttttaaaatttgtatgtttctgtgttccaaagtataaaaattattcatatgtgttacatttgttcatacaacaaagtctgcaaggggctat

SEQ ID NO: 169042 - DNA, 201 bp, Homo sapiens
gcatctgttggaggggcaagagtgatactggggcttgtctagggtatttctaggagggggcaagctggagagaggacggggagaacccggaggagcagggmtgaagggagctggctcccctgtgggaggtgtctctggggtttgtttctttaattccctgagactgccccttgcagcctctcctgagatggccaataggag

SEQ ID NO: 169043 - DNA, 201 bp, Homo sapiens
caatgaaaagagagatttctcactatagttaatggaaaaacatggaaaagaataaggtcaaaacagagaagattttttaaaataaatgcttatttaagaasatgtgtaaatctgagatacagaacggctaatgaaaagttcttagaatggtgaccataaaatcgctgtctagcttaaggccagcctgcgttgttgatttta

SEQ ID NO: 169044 - DNA, 201 bp, Homo sapiens
cttatttaagaacatgtgtaaatctgagatacagaacggctaatgaaaagttcttagaatggtgaccataaaatcgctgtctagcttaaggccagcctgcrttgttgattttaagaatttgtcattgctgtaggtgtattgggccatttttgtgttgctataaagaaatacctgagtctgagtaatttataaagaaaagag

SEQ ID NO: 169045 - DNA, 201 bp, Homo sapiens
agggcctcaagaagcttgcaatcatagcagaaggtgaagggaaatcaggtgtctcacgtggcgagagctggagcagagggaggcgggatgtgctgcacaaktttaaacaaccagattttgtgagaactcactgactactgcaaagacagcaccaagccattcaagagggatccgccctgtgacccaatgcctcccaccagg

SEQ ID NO: 169046 - DNA, 201 bp, Homo sapiens
gatcccacatcatgatttggtgggcttaaaaaatgggcattatgtgattttcttttgaattctcagaaatctgatgtagacctgtaagtgattattttccragaaaaatattacgacatctggttacaataaattcatttatcttattattagtttagcaaatgataaagcagaaagatatgatgataataactagcattt

SEQ ID NO: 169047 - DNA, 201 bp, Homo sapiens
atggaggtataccacaaaaatattttaaggataaacattgctgaaaagctaaaatgcaaagcactaaagaaatcaaaatttaaataatgtaaacaataaakccagaaattaaatatcaaagacagatttgtgtttatttccctaaatttttcttaataaggaaacaccttctcttttactttccaattatagaaggaaatg

SEQ ID NO: 169048 - DNA, 201 bp, Homo sapiens
tcggcccaaaatgctggaattataggcatgtgccacagtgcccgacctatcttcattttttaattttctttcaccgatacaaattaaagtggccaacaaaytgtgcatccacaattttgcactcaattccactgtaacaatgatttctacagagtgatttttcattacataaaagatttcactgtagtaataaactcaaaa

SEQ ID NO: 169049 - DNA, 201 bp, Homo sapiens
tcattgtttgttcttattgttttttaggtacacaaaagtccttttacaagtcttataggtcctataagtaggacctttgtattcccctaggataaatgaamgtgcttatttgtcccacatttattatgttatggaccccctttgtagagagaaacctagcccacacctagtttctgtacacatactcagatgtattaaccc

SEQ ID NO: 169050 - DNA, 201 bp, Homo sapiens
ttattaaccaccagctaaggaggccaactgcagctccatgagccatatggattattgtttctaagattttatgtccgctggtggctcccataaggctcatyggcagtgtctccttggattactttctcaatgctgatacatttgctctaagtttgtttaatggtaaaactgaaccatacctattacactatcttttgaatt

SEQ ID NO: 169051 - DNA, 201 bp, Homo sapiens
cccagcatacagccacactcataatcggttcttaatattttctgctgaattaagcagccaataaaccaatcatcaaccattcaataattattgataggatraatgaaaatgaagttgccactgtcttcctttgagaatattagttattaaccaccagctaaggaggccaactgcagctccatgagccatatggattattgt

SEQ ID NO: 169052 - DNA, 201 bp, Homo sapiens
atggtaaatgtgggggatttcactgccaatgaaagttgctctcagtgggatggagagctggaaaggagatggagtgggaaggtggtcttttcctggagttyggccatcgctggccgaaatcttctgaaagatcctgctgtcaagccgcccctctgaagtcaagctgcttcttgctgacctcaagctgctttttctcttctt

SEQ ID NO: 169053 - DNA, 201 bp, Homo sapiens
acataaaatgttacagatttctcagtatagctttctctgtattccaaaatttcaaatattcaaccattgatattttaaaattcctctgggaataggcaatrttggggcgtattgttcctccttttactttgaaaaaaaatcattcaatattgtatatttgaggtatcaaaaaatgacactaggaaacctctctagtgaacc

SEQ ID NO: 169054 - DNA, 201 bp, Homo sapiens
tctctatcatattaccttttatgttataacacttaacacaagctattatcctgcccactcatgtgtttagctcttgtccccctcattaatttgcaagaackggaaaaagtaaggaacctatctttcttgtttatcactatatttctaatgctatacactgataacaatgtgtgtgaataaatagattataaggactgaatt

SEQ ID NO: 169055 - DNA, 201 bp, Homo sapiens
ttgaatgaagtcttcaatgccatcatgaactctctaatagcctaaagacatacagcttttcaatgcttaattgtaagaaaataagaggaaaacaggcaacwaggaaagtagagtgaaaagtagtcaacatcacaaagctgaaaatgcaaatggaaggtgtaattactggaaatgagaagacaaaatatatgttgtactgct

SEQ ID NO: 169056 - DNA, 201 bp, Homo sapiens
atcatattaccttttatgttataacacttaacacaagctattatcctgcccactcatgtgtttagctcttgtccccctcattaatttgcaagaactggaaraagtaaggaacctatctttcttgtttatcactatatttctaatgctatacactgataacaatgtgtgtgaataaatagattataaggactgaattgacct

SEQ ID NO: 169057 - DNA, 201 bp, Homo sapiens
aaaatctgtaaaattgttatgctaaattctagccggtttttgctgaagttagacttgggctattagcacaattattattttgtcattcttgagttgattawctaatagagaattcattcaaaatgtgacagtcacaactgacagaataagagaaaataaatatctgacaaggaaattttattcaaaacatataaagactct

SEQ ID NO: 169058 - DNA, 201 bp, Homo sapiens
atctcttaaagatcactctggtttctgagtgaagcatagatttggtgaggaaagcaaaaataaatgagcttccattaagtctttgcccatgactatgttcygaatggtattgcctaggttttcttctagggtttttatggttttaggtcttatgtttaagtctttaatctatgttgagtcaatttttgtataaggtgtaaa

SEQ ID NO: 169059 - DNA, 201 bp, Homo sapiens
agttggacagttgctagtggagactaacgaatgctaaaggtgaagtagaagaagttcaaggacctggattagcttgtgaatttccagtcatcagcccaggytgggtatatgactggagcagctgtaccacattctctacaacaccacgatatatggaagggtattatacctaccatttcctgtactttaaatatctttaat

SEQ ID NO: 169060 - DNA, 201 bp, Homo sapiens
cagagtcttaaaaagcatttcaccagtatgttttgaaaacaactattttgatgagcttataaacttggcaattatatgatgctgaaaaagggctttctaaytggtgatgttaagtcagtataacaaggtagtgagaattaactttgaacaagcagttattactcttaaattgtcacattttagaaacattacaagctccaa

SEQ ID NO: 169061 - DNA, 201 bp, Homo sapiens
actgataacaatgtgtgtgaataaatagattataaggactgaattgaccttgcatagtttctggtataaaaagttgccttaagaactgaagatgacagaarattctcatagtcttcatgacacatatattgacaatccattgtcatactagactattgtcatcttaactagatgaagcatctttttctgtcttacttgaaa

SEQ ID NO: 169062 - DNA, 201 bp, Homo sapiens
taggaaagccataaacaattataatactcaagaaaaactcatcttcacatttcactttccttatgtactagtataaacacaaaattttgtgtgatatttcyttgaaacttttaaactcgtaatgtctaaatatttatcctatattttgataagactaaaatgattttcatgcatagaaattaaaaaaggagttgaaaataa

SEQ ID NO: 169063 - DNA, 201 bp, Homo sapiens
aatcttctggaaaattttgctgttctttctctgctataaagaaaggaatactaaggtttaaggttaaacagtagactccagtgtggctctgactgagagastgttgctaagaattctaatcatctaacttttctgctttgactactccttcttgtcttgacaagattgtcttatggtacacgtagtatagttaatgctaga

SEQ ID NO: 169064 - DNA, 201 bp, Homo sapiens
gcagactgctgaaagctcatttattctacatcagttgcatttatacttttgttcatctctttttccatcccattttaaatgtgagcccacctatgtaagartactggcacacatagtaagtacattttacagaatttgtgcagtaaccagctacagttaacaatgccaaagcagtctatccacccaccatgaacttaagat

SEQ ID NO: 169065 - DNA, 201 bp, Homo sapiens
cagactgctgaaagctcatttattctacatcagttgcatttatacttttgttcatctctttttccatcccattttaaatgtgagcccacctatgtaagagyactggcacacatagtaagtacattttacagaatttgtgcagtaaccagctacagttaacaatgccaaagcagtctatccacccaccatgaacttaagatt

SEQ ID NO: 169066 - DNA, 201 bp, Homo sapiens
tttccattaaatgcttacataataggcgaaccacgaagtgaaaatatggtcttgcacatcatggtgtaggtggatgtcacggtgattttctaatacaagtytatatttctaaataaattgaattttagttaaatcagtctaacatttttaatagtctcacccacatagatagagtggggatcttatatgtagttgttaaga

SEQ ID NO: 169067 - DNA, 201 bp, Homo sapiens
tgatgcttttaattaaaaagttgcatataaatgtaatgacattttaaacatgatcaaaatgttctctctctaaaggaatactgtaacaatttttttgttayggaaaaacaattattctctaatttatttgtttgagaaacctggcttttaactaattgtatttccttaaatgcaagacttgaaattttatttttttatttt

SEQ ID NO: 169068 - DNA, 201 bp, Homo sapiens
cacttctaaggtgatattgatgtggttattgaaagacctcagttccccatggtgtataggtgtgggagcctcaattccttgccacagagttttcaacaaaygtcctcaggccatagagttggcttttcccagagcagatgatccaaggaatgagagagagtccatgagcaagggaacaccacagacagaagagacaatctt

SEQ ID NO: 169069 - DNA, 201 bp, Homo sapiens
atggggccaatatgatagtgggggataccagtattcctctctcaggaattaatacattactgagaaattaggaaggatataggagtgagcatataattaakgagcttgatccaataaatatatattgtacttacagaagataatttggaaatacaaattcttctcaagcacatatagaatatttattttaagtgaccaaat

SEQ ID NO: 169070 - DNA, 201 bp, Homo sapiens
ttattatcttccttctcaaaagcccaagagtacaaagacactaacagagaaaattatgaatatgttagatttaaaagtgaagaggttaagctatcatgcayggacaataaatgttacctaactgaagtcataagacagtcaagaaaacaaacccaataattaggtgaaaaattagaccattattactgtgaatgtaaaatg

SEQ ID NO: 169071 - DNA, 201 bp, Homo sapiens
tcaagaagtatgttagtagtaataaaataacaatagaattttagcagtggcacagaatatacatgtccaagtaagctggatcaaatcatttttggaatatmttttgggactttttatgatccacgaaaaaagacatgttaattacttttatagttttttttatctgaaatattatactcaaattgactattcatctaattc

SEQ ID NO: 169072 - DNA, 201 bp, Homo sapiens
aaagtaacactcaatatgctaatacagatgcttcctcatccaaagccattggccccttttcagccacttcagtcctcaaatattaccattagggtagagcygaagtttttagttcctaagaacagccacatgtaccatctccttcactgccctcagccatcagaccctttgtttagccctgtgttatgtaaaccctaaaaa

SEQ ID NO: 169073 - DNA, 201 bp, Homo sapiens
ttcaataaaagttgctaacacctctggttcacccttgagttttttatttttttatttttttattttttatttttttgagacggagtctcactctgtctccrggctggagtgcagtggcgcaatctcggctcactgcaacctctgcttcccaggctcaagcaattctcctgcctcagcctcctgagtagcttggactacagg

SEQ ID NO: 169074 - DNA, 201 bp, Homo sapiens
gtgcgtgtgctctcctgctctctcccactgctcataaggacgccagccctatgggattaagtccccagtcttatgacctcatttaaccttaattaccttcytaaaggccctgtctctacattcagtcaccttgggagttagggctttggcatatgagttttgggagaggacacaattcaaaacaaaaacgtagattaaacg

SEQ ID NO: 169075 - DNA, 201 bp, Homo sapiens
ccaaggataacagcctcatttttagttagggtgatggaagtctagccatcctattcatggagataagtaattcaggtgaagaagcaggtattggggagaaygatgatgaaatcagacatgttaaggttaaaatgccttaggaaaatttaagtgtgctatcttataaatagatgaacatggtctggattgaaaaaaaaaaag

SEQ ID NO: 169076 - DNA, 201 bp, Homo sapiens
ctatgaccttttcaaagacatgctgaatatgctcaaattatcctatacttgtaatcatttttcaaattgtagttgaagtttatttaaactattaaatataytactctgacttttgtcctacggatgcttatcttagcccctctgaatattttcttacaactaatttccccaaatttcttccactcctcaaattattctttc

SEQ ID NO: 169077 - DNA, 201 bp, Homo sapiens
agtggaccctggggtttttctgggtataggatggtgggtgggacaggctaaaaagcaacattcaagtaggaaaacaggaatgcatgttctcactttgggcygcaggtccaagcttgagggttttcagcctggtattttcctgcctcctgtccatatcacttccctgctctgaagaggcacatcttactgccattaaaatat

SEQ ID NO: 169078 - DNA, 201 bp, Homo sapiens
atgtcacaattgctcttaaactacatgtgtagttctgtttcaaagtcgaagtgtatgacttttaattattttatacattacttcataatgcaaaatgcaarcatttattggctggaactaaataatatttttatttgtttataaactaagaaatactgtagcttctagaatatgatggtaaaaagactgaaaattcctaga

SEQ ID NO: 169079 - DNA, 201 bp, Homo sapiens
actatcctgtgaattattttcaacttaatatgtgtgtgtgtgggtgggtgtgggtgtgtgtctgtgtgtgtaccaccaaatttaataggctttgtgagggkagatgtagtgtttctttttttagcatataatgtgcatactagttgttgaatacatatttttgacaatcactcaaatatataccgcacatgaaaaccaaga

SEQ ID NO: 169080 - DNA, 201 bp, Homo sapiens
ccctgctggggggaaaatgttttcttggaaatacttttataaacttggtaattaatggcagtaaaattgcttatttaaaactatgaccttttcaaagacakgctgaatatgctcaaattatcctatacttgtaatcatttttcaaattgtagttgaagtttatttaaactattaaatatactactctgacttttgtcctac

SEQ ID NO: 169081 - DNA, 201 bp, Homo sapiens
cacaaagacatgaacaccagtaggtgggatcattgggagctacatcagaagatgcctcccacctaaggtatgccagggggttgggaaggggaggggggtgscggttggtggagaagagtcaagaatgactctcatgtaaataacatacataggattattttacttgataaagcctcttttggtgtttaaaattttattttc

SEQ ID NO: 169082 - DNA, 201 bp, Homo sapiens
taatgaatttagcgtactttatgtgtgtttccatcttagtgacatttagtacaacccaaacaacttgtttcctactttatatgttattggtgttaggtatyagagttctattttactgtatatttagctttacaatatgtcattagtagctgtttatttagtaaatatttataggttttgctttctttgtccatcatttct

SEQ ID NO: 169083 - DNA, 201 bp, Homo sapiens
ttattgcaataatcagctgagaaattttattgcattagctgaaggtggtaccagatgtagtcagattctattctacttctgaattttagaattcagaaaaytttagaaatttctcttcttaatttgaagatagaactgacagaatttactgatgaattggatgtgagatatattcatcatctagtgctgcataactaagtt

SEQ ID NO: 169084 - DNA, 201 bp, Homo sapiens
ctttattggatacacttaaaaatagagtttttctataaatcatgggataattcagtaattaataaggatatatttgattttatctccattgttaatagtcmctatcatcagcattaattactgtgatctgattctgacttctgttattgtttcagagtcatcagatttgctttagttattcattgtcatggtatatcctac

SEQ ID NO: 169085 - DNA, 201 bp, Homo sapiens
attttggaggaacacaaacattcagttgatagcattcacgcattcattatatcctttaaagaaaaaaatagactgtctgcctccactcataatctgtcaakgacattcgccttatgccagttctacttgttttctttaccattctggagttcccagaagttattcagtcccagcaatgtttgttaagcattcaaatgtgcc

SEQ ID NO: 169086 - DNA, 201 bp, Homo sapiens
ataataagcaagataaataaataaggggcataaaatattctctcatgagaaatcaaaacaaggacctatgttgggaggaggcagtgcaattttagataaakcacctggggaggaactatttgaaaagcactggagtaaagatatttgagggaatcagccatgaagatattgggtgaggtgctttctctgctgagaaaacag

SEQ ID NO: 169087 - DNA, 201 bp, Homo sapiens
aatgaggtttatcaaaataggtgaataaaatgacagcaggaagttacggacctatttttatctggtactcattcctattcactcaataaatattaatataktctgctgtctacagcatgaagaggaccacagtcagttttatctgaatcaacttctagaatttatgcatatttggaaagtatccaggtaagatattttata

SEQ ID NO: 169088 - DNA, 201 bp, Homo sapiens
ttttcaagatctgttaataattgtgacaaaaaaagtttccaatacatgtatcttacaaagttatttttcctccagcctatgaaggtatttaaattaaaaawtttttctagcaaaaggtactatgactaataccgaaaatatttctggaaaccaaataaattggtttttaaatgaatatgattatgcttcatagaaagatgt

SEQ ID NO: 169089 - DNA, 201 bp, Homo sapiens
ctcaataccccagtcaacagttgagattttagatgctaagtatgaaaacacctccaaattcactcgccacttaataccttacaatgactgcattacagtcrtactagccaattgatttgattctgataacagggctcctacttccatgccaagtgtcccactctaaatactttctaaatctctagttcctacaacagtcat

SEQ ID NO: 169090 - DNA, 201 bp, Homo sapiens
gctcttgttgcctaggctggaatgcagtggcccagtctcggctcactgcaacctccacctcccagatccaagcaattctcctgcctcagcctcacaagtarctgggattacaggcatctgccaccatgcctggctaattttttgtatttttagtagagatggggtttcactggtctcaaactcctgacctcaggtgatcca

SEQ ID NO: 169091 - DNA, 201 bp, Homo sapiens
gagagtagggtggaaaaactattagaaaactgttacatataaaattaagatatttttctgattatgaaaatctatgatattgctaaaactctactaaaatrttggcaatagtgatgagtgagtgagcaatatataaaaaatgctatcagctatcgcaaggacaaaaaaccaaacaccgcatgttctcactcacaggtggga

SEQ ID NO: 169092 - DNA, 201 bp, Homo sapiens
agtacattcaaaatccttacctattggttttgtgtgtgggtgaacttgataagctaattctaaaatatatttaggaggccaaagggcctagaatagtgaaragccccctaaagaaaatgaggtaaaataatcattcttctggatttcaagatgtactataaagttccagctatttaggatagtataatactgacacagaga

SEQ ID NO: 169093 - DNA, 201 bp, Homo sapiens
tggaatttaaaatcctgtacaattaatggtatttagagggaaaatggaaagtaaaattggtttgctggccacaaatgcttttcacatcatcatcaactacyctctgtttcccttactctctttcactccccttacagctgagtgctgttgaatagaatcaagaaagtatcatgacacagtccactgcaaattgatactctc

SEQ ID NO: 169094 - DNA, 201 bp, Homo sapiens
tcattcaggagctggttgttcaatttctatgtaattgtgtggttttgagtgagtttcttaatactgagttctaatttgattgcactgtggtctgagagatygtgttatgatttcaattcttttgcatttgctgaggagtgttttacttccaattatatggtcaattttataagtaagtgccatgtggcactgagaatgtgt

SEQ ID NO: 169095 - DNA, 201 bp, Homo sapiens
tagtttaaaatgaggcaccctcatggcccagcaatggcacatgtctgtggccatcccactatttcactctctacaacaattggcaccctaacctctcaagsataaacctcagatcactcctaccaactccctgctttaagcagatgaccatacttactttcttgagaaaaataaaatcatcagaacagagtctacttttct

SEQ ID NO: 169096 - DNA, 201 bp, Homo sapiens
aagcctggtggtgatgaaatccctcaccttctctccactattatcctatgaccctgccacatccccctctccaagaaacacccaagaatgatcaataaatmctaaaaaaaaaaaaaaaaaaaaaaaagaatgttgaatatcggccacccctctcttctgtcttgtagggtttctgctgagaggcctgctgttagtctgatg

SEQ ID NO: 169097 - DNA, 201 bp, Homo sapiens
agtgattctcctgcctcagcctcctgagtagctgggattacaggtgcccaccaccacgcctggctaatttttttgtatttttagtagagataggattttgccatgttggccaggctggtctcaaactcctgacctcaggtgatccacctgccttggcctcccaaagtgctaggattacaggcatgagccacccacccggcc

SEQ ID NO: 169098 - DNA, 201 bp, Homo sapiens
ctcacgcctgtaatcccagcactttgggacgccgaggtgggcggatcatgaggtcaggagatcgagaccatcctggctaacacggtgaaaccccgtctctrctaaaaatacaaaacattagccgggcgtggtggcgggcgcctgtagtcccagctactccggatgctgaggcaggagaatgacgtgaaccccggggggcgg

SEQ ID NO: 169099 - DNA, 201 bp, Homo sapiens
agatatcaaaggaaaagtctgggggtcttggctgacaccttgatagacacttggggaacaggtccagtcttgtggccttccggcaatactgaggagtggcsttggcaagaggccttcagtttccccaggactttattccagtcccacatgacaactagacctccaggaagggaaacagagccaacattccttttacccaaa

SEQ ID NO: 169100 - DNA, 201 bp, Homo sapiens
atgaatatcaaacatgtagctcttctcaaattgctctggatttggtgcagcttgtcactggcctggcacaatcaagtgccctgtagcatggtgctgcatcrtcaagtgaagaagatcagattataaaggaaatggtcaaaaataccctttaaagtctcatatgtacttgctatgcactagctgcattaattcttacagaaa

SEQ ID NO: 169101 - DNA, 201 bp, Homo sapiens
ctattcacaaaaattccctgtgtttataatcattttgatattattttcaatagttaattaccactgatttttttaaaagttaatttaatttctaatttgartattacagtacttatattctaaatcttcccaatttaaaactatcttttaacaaaaaaactcccttaacagattaaaggagtaattgtgtcttactccaat

SEQ ID NO: 169102 - DNA, 201 bp, Homo sapiens
ctgccctgcagggtttctgccgtgaaacccactgaaagctggattgagtctcggctaaaaatacgtttctcttctcttgctgctttcagcattctttcttkgtctttaatttttgataatttgattataatgtgtcttggggaatttctccttagtttaaaatttgattggtgacctctgggcttcctctacctgaacaat

SEQ ID NO: 169103 - DNA, 201 bp, Homo sapiens
gaagaaaaaaagccctgacaaggataagatggaaaatgcataataggcaaaaaaaaaaaaaaaaaaagccagtgtttgagaaagagcaaacacagaaagayagaaattccagtgtcacggaaagccaaagtgagaaagcaagaaattttaagtatggtgaacggtatcaaatcctgtgaagagataaattcaaaaaggatg

SEQ ID NO: 169104 - DNA, 201 bp, Homo sapiens
tgcctaccttgcccttggctggtgtaggggagaagtggtgtcacagtgtcttccctgatatttaactggagtagagtggttacaatctaaaagtttgctgttttttttttttttttttcagctgcccctttaaagcaggcttttctttggggctttttgaattgcctgctttagcagcatgtatttcatgcctagaatata

SEQ ID NO: 169105 - DNA, 201 bp, Homo sapiens
taaccatattaaggtgattagttgtggtgggtagaaaagagttaaaactgtgtctatggatggggtaattgctggtcaagaagagactgtttagctaataygaaagagactttagcatgccaacatgcttatagatttccctctgtagtcaaatgataagtggatattcaatagaaaaagagaatattgactttgaataga

SEQ ID NO: 169106 - DNA, 201 bp, Homo sapiens
ctaaatgtaaatagaataaacattccaaacaaaaggcaggaattgacaaatgagataaaaaaggaaggactcaattgttgtctacaagggacacaagaaayaaaggcagagatagattgaaagtaaaataaacaaaaagacaacattcaatcagaaaaaaatgcttgtatgattattaatatcagaaaaagtatatttcag

SEQ ID NO: 169107 - DNA, 201 bp, Homo sapiens
ttacattgtgggcaatatgttttaaactgtgtcttgcaggtcttgtcctaagtatttttcttaacatatgtttttcagaatcagagaaagatatcatgcasctgatgttaatttcaattctgggaagatctggagcactactacagcatttccgtatcagctcttttctaagaccaagtttaatatacatatttttattga

SEQ ID NO: 169108 - DNA, 201 bp, Homo sapiens
gaattgcttgaaccagggaggtggaggttgcagtgagccgagatcgcaccattgcactccagcctgggcaacaagagcaaaactccatctcaaaaaaaaawaaaaaaaatatatatatatatatatatatatatatggatttattatagaattcaagtatatgaatttcagcaaacaattaggaatatatgaaaaacacaa

SEQ ID NO: 169109 - DNA, 201 bp, Homo sapiens
aaccagggaggtggaggttgcagtgagccgagatcgcaccattgcactccagcctgggcaacaagagcaaaactccatctcaaaaaaaaaaaaaaaaaatatatatatatatatatatatatatatggatttattatagaattcaagtatatgaatttcagcaaacaattaggaatatatgaaaaacacaaataatcaagc

SEQ ID NO: 169110 - DNA, 201 bp, Homo sapiens
accagggaggtggaggttgcagtgagccgagatcgcaccattgcactccagcctgggcaacaagagcaaaactccatctcaaaaaaaaaaaaaaaaaatawatatatatatatatatatatatatggatttattatagaattcaagtatatgaatttcagcaaacaattaggaatatatgaaaaacacaaataatcaagca

SEQ ID NO: 169111 - DNA, 201 bp, Homo sapiens
gggaggtggaggttgcagtgagccgagatcgcaccattgcactccagcctgggcaacaagagcaaaactccatctcaaaaaaaaaaaaaaaaaatatatawatatatatatatatatatatggatttattatagaattcaagtatatgaatttcagcaaacaattaggaatatatgaaaaacacaaataatcaagcagccc

SEQ ID NO: 169112 - DNA, 201 bp, Homo sapiens
gaggtggaggttgcagtgagccgagatcgcaccattgcactccagcctgggcaacaagagcaaaactccatctcaaaaaaaaaaaaaaaaaatatatatawatatatatatatatatatggatttattatagaattcaagtatatgaatttcagcaaacaattaggaatatatgaaaaacacaaataatcaagcagcccag

SEQ ID NO: 169113 - DNA, 201 bp, Homo sapiens
tgctgtgcgcctctacctggctgctgcacccactcccatctgctgcagtgactgctaacaaaatacggccccttctctggagaattagcctctgattccayagccccctggcctacgaagtgggaaaatctctaagatataatttacattccagagcctccccataaatcagatcaaggttagacttgacccgagatctca

SEQ ID NO: 169114 - DNA, 201 bp, Homo sapiens
tacaaattattgtaataataattgaataaatgaatataatgcggtatacaacctacaatttgccatatattgtgttatagaatagcagttccattttgtgmaaaaggaaaagtaagacttagaaaggttaaatgcattacttagaaaggttaaatgcatcttagtcaatagggtcattttttgagcataaatagatccaaa

SEQ ID NO: 169115 - DNA, 201 bp, Homo sapiens
cttgcagagcaatacagcacacatgatacagaatccatagggggctttaaagcctcagccctttacctttgagaatcattattttgcaactaatttatttktttacctttacaatgtaataaatgatgaattattgcttcatcttttgttagggaaagatatgtctcactgacttttaatattgatctgctgtaatcatct

SEQ ID NO: 169116 - DNA, 201 bp, Homo sapiens
ccaccttctggggtccaatgatcctgtcatcttagcctcccaagtagctggaaccacaagtgcatgccaccttgccctgttatttttattattattattattttttttttttttgtagagatgggagtctcactatgttgctcatgctggtcttgaactcctgacctcaagcaatcctcctgccccagcatcccaacgagc

SEQ ID NO: 169117 - DNA, 201 bp, Homo sapiens
cgtactctggtgtgtgagtgcatgtgtgtgtgcatgcatttgtatatgtatgtgtatttggggagaaactctgtaggtcagtatagaaaagtgtttatacrattgtgcatttacttctgcctgggtccaaaaagtcacaatagcctagtgcaatttttaacataaattcctactatgagtagtataaattaataccccaga

SEQ ID NO: 169118 - DNA, 201 bp, Homo sapiens
gatattgattctttctatccatgaggatgggatgtttttccatttgtttgcgtcttcttttatttccttgagcagtagtttgtagttttccttgaagaggkccttcacatcccttgttaactgtattcctaggtattttattctctttgtagcagttgtgaatgggagttcattcatgatttgagtctctgtttgtctatt

SEQ ID NO: 169119 - DNA, 201 bp, Homo sapiens
aatgataggaatttattcctatcagttctgaaggctacagagtccaagatcaaggtaccagcagattcagtgtctggtgaagacttgcttcctgcttcacsgacagctgtcttctcactgttttctcacatggccaaagggatacagaagctctctgggatctcttttataagggcacaaatcccagtcatgagatctcca

SEQ ID NO: 169120 - DNA, 201 bp, Homo sapiens
tattgtacttttaacaggcaaattctgttaataattatccattcttcaaagttattcagacatatttgaagagctgctaacactttccagaacattctaayattcatttaaaaaaatctctgctgctggttattacattttcaaggacttgttttcccgattcattttgtgattttgggtttgcatatgtcacttaagctc

SEQ ID NO: 169121 - DNA, 201 bp, Homo sapiens
ggtggaggttgcagtgagccgagatcgcaccattgcactccagcctgggcaacaagagcaaaactccatctcaaaaaaaaaaaaaaaaaatatatatatawatatatatatatatatggatttattatagaattcaagtatatgaatttcagcaaacaattaggaatatatgaaaaacacaaataatcaagcagcccagaa

SEQ ID NO: 169122 - DNA, 201 bp, Homo sapiens
tttagcagtagaaaatgccatccagaaagcaattgtattaaagagacagaaattcggaaaagtataatgtggagaaaatttacacaccttgatttaatcaytgttttaaataggtaaattattcataagtagatggctcaatatttaactaataaatgtacatgttaatgttttcatagtcatttaatcatattaaaattt

SEQ ID NO: 169123 - DNA, 201 bp, Homo sapiens
aaaagcagtattatagtgtttaattatttattgtttctcaatcagactgactttgctctagccaacaaaaaatatggttggcaaaaaggcattctgtttaraaattattcttgtcttctaataatatttgaatttggcatccaaaaggaatacactaacagatattcatagagttacagtattttgaagccaaatgggact

SEQ ID NO: 169124 - DNA, 201 bp, Homo sapiens
tgcctatgctgccggtctacagcccacatttcaagtagtgagatattagaagccaagaatggtaatgacttaagaacttagactctccaaaaattatcctmttttccagaacagtacgtggtataaaaactagctctaatcaacaaagtaataaagacatttttaccttgtactattgcaaaattaaaaagatgattttcc

SEQ ID NO: 169125 - DNA, 201 bp, Homo sapiens
gctctagccaacaaaaaatatggttggcaaaaaggcattctgtttagaaattattcttgtcttctaataatatttgaatttggcatccaaaaggaatacaytaacagatattcatagagttacagtattttgaagccaaatgggacttgaaggatcatctgctatcccagaaagggatctcaacatgttaagtgatttttc

SEQ ID NO: 169126 - DNA, 201 bp, Homo sapiens
tacagcccacatttcaagtagtgagatattagaagccaagaatggtaatgacttaagaacttagactctccaaaaattatcctcttttccagaacagtacrtggtataaaaactagctctaatcaacaaagtaataaagacatttttaccttgtactattgcaaaattaaaaagatgattttcctagcaaatcaaaatttc

SEQ ID NO: 169127 - DNA, 201 bp, Homo sapiens
taattcaacatctactttcaaaaaagggtaatttgaagaattcaggaaatgtttgttttttctatcaattaggaactcattcaagtactgaagatgtgactttttttttttaacttaagagcaaaactgaaatgaaaaccatattgaaaattgagatatttaaaagctcaaaattgttgcccctagttgttggcatgactc

SEQ ID NO: 169128 - DNA, 201 bp, Homo sapiens
gccatttctatgtcttcttttgagaaaggtctattcagattgcttgcccactttttgatgggattatttgtttgttcatttttagtttgtgtgttttttctttttttttttttgctgttgagtttcttttatattctgcataatagtccttgttagattaacagtttgcaaatactttctcccattcaacagattgtctct

SEQ ID NO: 169129 - DNA, 201 bp, Homo sapiens
tagtgtctaattgatatttaaaacattaaatgtgtcccggcgtggtggctcatgcctatgatcccagtactttgggaggccgaggagggtaggtcatgagrtcaggagtttcagaccagcctgcccaacatggtgaaaccccatttctactaaaaatacaaaaattagctgggcgtggtggcaggtgcctgtaatcctagc

SEQ ID NO: 169130 - DNA, 201 bp, Homo sapiens
aggtgaactgatgcttgggctcccaggtgacttccttgggtgccagcagtggcagcagagggccgagtggataggcaggttttggggcccctggcagtgcrcctacaatcaatgatgaaagtagcagagaagaagcaacactcaggctcccaggaggctcacactggtgctagcagtggcagtgacaaggtgggcaagcca

SEQ ID NO: 169131 - DNA, 201 bp, Homo sapiens
aacttaaaaataattcttattagcttctatgtaaaacaataaaatttactgtacttaaaagcttttgctgaataatcattgcattgtcagtagtaaaccakaaatgcctcctgagtaaatactagtcttttttaaaaattctgtttcggccaattgcttacaggatggtcaaattttatatgtttgatttaaatgaaacaa

SEQ ID NO: 169132 - DNA, 201 bp, Homo sapiens
aaatccttttaattaaaattctaaaataatccttttcaaaaaacttctatattttaaaaaagttctaactaatctcatgacaatttatattaatttgttcrttttttttgagatggagtcttcactctgtcacccaggctggagtgcagtggcacaatctcgtctcactgcaacctctgcctcctggattcaagcaattct

SEQ ID NO: 169133 - DNA, 201 bp, Homo sapiens
agcaattctcctgcctcagcctcccaagtagctgggattacaggtgtgcgccaccatgcccagctaatttttgtatcttagtagatacggtttcaccatgrtggccaagttggtttcgaactcctgacctcaggtaatccacctatctcggacccccaaagtgctgggatctatgtttctctacttcctcacctccccgtt

SEQ ID NO: 169134 - DNA, 201 bp, Homo sapiens
ggggcatttcatttaaatggaatcatacaatgtgtgatcttatttgtggccagcttctgtcacttagcataatattttcaaagtgcatccaggtggtagcsccgattgggattcattcctttttctatattacagatacatttttatacaataatattacattattgtaatatgcacatatgaatataccctattttattt

SEQ ID NO: 169135 - DNA, 201 bp, Homo sapiens
acagaaggcaaaattaaagtttcaactatgtcatgattaaaaaggaaagttataaaatgtcctgagatggaaagaaatagataatgtgactagaaaaattwaaaaaaaaaacactggaagaatttcaaaacactcattgtccttagacttctatactctaccttgaatttcaaacattccaacacataaaaaaatcctaac

SEQ ID NO: 169136 - DNA, 201 bp, Homo sapiens
taatgatacaccagttgatgatgatttctgttaaggctttgaatgtgcattaatttcatctccaaataggaaaaaatatctgtggcttaataatattgtayttaataatccaggactttttgtgtcagtattctcccctggtacatggttgaactccaccaaccacctgcccttatttcttatccatatacaaggaaagga

SEQ ID NO: 169137 - DNA, 201 bp, Homo sapiens
ctttaatgaaacagactcaatattaaccaagtctgtgatgtacagagaatcactgttattatactacatcaaatgctatactaaagccctctgaaactaaractagagtctagctgtgtcatccaaactggagtgcagtggcccaatctcggctcactgcaacctctgcctcacggggttcaagtgattctcctgcctcag

SEQ ID NO: 169138 - DNA, 201 bp, Homo sapiens
atttggatgctgctaaaataataacttatcggtagtaattaacaaatcactaacatttcagactcatgtaaattaaggtctgtttaaaaactcttgtaackctattattctgatatagggcatacatacatgtctgagactttaacatttctatcacatttaatcttttcaataattctataaggtaaacactattaaaaa

SEQ ID NO: 169139 - DNA, 201 bp, Homo sapiens
atctgacaagggataaagaagtaaattctacctacaggaaggtactggaagtcacatgacaaagagtctagaggtataatcttctacaaaggagaaaacayggagctgggaacaataatgaaatctaccacacagtgtgggaacagtgggaacatcatgaatatataacattccaaagagattactttggaaattatcaga

SEQ ID NO: 169140 - DNA, 201 bp, Homo sapiens
taattaccttcctaaaggccctgtctctacattcagtcaccttgggagttagggctttggcatatgagttttgggagaggacacaattcaaaacaaaaacrtagattaaacgacaggacagacatgattatcatcattttacaaatggaaaggctgaggttggaactgttaaactgcttgtacagttacagagagagcatt

SEQ ID NO: 169141 - DNA, 201 bp, Homo sapiens
gcagccattcagtacttgttgagaaactaagaaaaatgctcagctatctttgatgttagtaagagtaatgttgcagtagagtgcctgctgaattgattctrttactgttcttacagcggtgacttgacttcaattactgctattgttgttatgattattatatatttattctaatttttattacagtagttgtttcactga

SEQ ID NO: 169142 - DNA, 201 bp, Homo sapiens
tattaaacatcattaagtaggtatctgttcatattttttatattttgcataattaattcacctataattttttttttggtgaagaacatccacatgtttcyagccactagaacagcaatagatacattggggtatatgtagtttctctcccctctcctgcatctgggcagagggcagtaatgaaacattatctcccctagg

SEQ ID NO: 169143 - DNA, 201 bp, Homo sapiens
acagtattaaggtattatatctatgtatctatctatatctatatatctctatctatatagatagacacacacatatatacacctatatggtataaaggggkgtgtgtgtgtgtgtgtgtgcatgaaaatacacaaagaaacaggtgaaaataaattttaatactacagtatatgtgtacatacatgtatacacacacgttt

SEQ ID NO: 169144 - DNA, 201 bp, Homo sapiens
tatcgcaaggacaaaaaaccaaacaccgcatgttctcacttataggtgggaattgaacaatgagaacacatggacacaggaaggggaacatcacaccccarggactgttgtggggtgggggcaggggggagggatagcattaggagatacacctaatgctaaatgatgagttaatgggtgcagcacaccaacatggcacat

SEQ ID NO: 169145 - DNA, 201 bp, Homo sapiens
tataaactttgcagcctatagaacgaagagaaataaatgtatgttgtttaagccacccggtctctggtattttgttatagcagcccaggctgactaatacrctgagtataacaaatctgttggtttctttcaaaaatcatctgtgagacacttattaaggttatcgtatttatacttttcacatatcttcttagaagtaaa

SEQ ID NO: 169146 - DNA, 201 bp, Homo sapiens
tcagaatttgcagtatattctcaaaggttttggatgtgtgtttcaaggtaattggtcaaaaattctagcttcatgcatccacgtgtgtgtgtgtgtgtgtrtgtgtgtgtgtaatttttttccacagcaatatccatgtagctcaaagtctggggcatgatcggtgattaataactaaccatattatatatggttatatat

SEQ ID NO: 169147 - DNA, 201 bp, Homo sapiens
ttccagggatcaaaacatgggaatatttgaggggacacagttttgtctacaaaatacattttctatagttctgcagtcttagttaaatcagggactcttakacatgccttctcaaatatgtcacaattgctcttaaactacatgtgtagttctgtttcaaagtcgaagtgtatgacttttaattattttatacattacttc

SEQ ID NO: 169148 - DNA, 201 bp, Homo sapiens
ttttttccacagcaatatccatgtagctcaaagtctggggcatgatcggtgattaataactaaccatattatatatggttatatattatattatgatggtrtatattaggtgccaagtgatgttcttagtcctttaaatgaattaattgacagtaacccaagagcaaagaagtaataaatacaactatttttctatcctat

SEQ ID NO: 169149 - DNA, 201 bp, Homo sapiens
aaaaaaggtgagataatcatattgctgtcatcaccgttgttgtcatgtccagggacaagcatattgttatctctgggtgtataatgtgtagttctcatcasaaatgccagttttttaatatgccatttgaatcacagtgggaattaagttacatagttctttttgatgcttcatggttcaacttacaagcttatccatcct

SEQ ID NO: 169150 - DNA, 201 bp, Homo sapiens
aacacatggacacagggaggggaacaacacacactggggcccatcagagttggggagggagagcatcaggataaatagctaatgcatgcagggctcaatacctaggtgatgggttgataggtgcagcaaaccaccattgcgcacgtttacctatgtaacaaacctgcacatcctgcacacgtttcccagaacttaaaataa

SEQ ID NO: 169151 - DNA, 201 bp, Homo sapiens
aagtctggggcatgatcggtgattaataactaaccatattatatatggttatatattatattatgatggtatatattaggtgccaagtgatgttcttagtsctttaaatgaattaattgacagtaacccaagagcaaagaagtaataaatacaactatttttctatcctataaaaataaaagaactgaaaagttaagagat

SEQ ID NO: 169152 - DNA, 201 bp, Homo sapiens
tttacatattctatgcattttgtctttgaactgacagagggactccaactaaagtgataatgtagaaaaatgagaatgcagctactgtaaaaataatggtktttgttttaatgttgcgtttctgagttgtgtgacttatgattcaatttaagtcaggagttttcaagacaaataagaaggtaaagtcaataatgtttggga

SEQ ID NO: 169153 - DNA, 201 bp, Homo sapiens
attctagcttcatgcatccacgtgtgtgtgtgtgtgtgtgtgtgtgtgtgtaatttttttccacagcaatatccatgtagctcaaagtctggggcatgatmggtgattaataactaaccatattatatatggttatatattatattatgatggtatatattaggtgccaagtgatgttcttagtcctttaaatgaattaat

SEQ ID NO: 169154 - DNA, 201 bp, Homo sapiens
catattctatgcattttgtctttgaactgacagagggactccaactaaagtgataatgtagaaaaatgagaatgcagctactgtaaaaataatggtgtttgttttaatgttgcgtttctgagttgtgtgacttatgattcaatttaagtcaggagttttcaagacaaataagaaggtaaagtcaataatgtttgggaaaat

SEQ ID NO: 169155 - DNA, 201 bp, Homo sapiens
tttggggagccacaaaatgtttcaaaaagataaatctgttattcagctccacctgcagaaaagtagggaagctccaggaaagctatctcgaaaggtaagaytttcttagcattggtttcaattggcaaactgacagttttaaggacaatatttctaatttttgaactattgccaacttggaattatatagcttaattaata

SEQ ID NO: 169156 - DNA, 201 bp, Homo sapiens
aatcaagttgacactcaatattaaccaacacactagacatcaagtatattatctggcaattctaggaagaagtatacacgcaggtggataaaataaagaargtcagtttaagtaagcacgcagtagccatgtatgaggctgaagtcattgcactggtgtccagagtgcagtatcaagacttcaacatacagagaaaaggaa

SEQ ID NO: 169157 - DNA, 201 bp, Homo sapiens
atgctttgcatcctccgatccaatcaagttgacactcaatattaaccaacacactagacatcaagtatattatctggcaattctaggaagaagtatacacrcaggtggataaaataaagaaggtcagtttaagtaagcacgcagtagccatgtatgaggctgaagtcattgcactggtgtccagagtgcagtatcaagact

SEQ ID NO: 169158 - DNA, 201 bp, Homo sapiens
tggatgaaaaaagttctttcaggccctggccaaaagagaaatgtaaataggctttattcatctgccagaattccatctctccctatccctctacttcatgsaacacactgagatctgtaaagagcataatcttggatatcagtgatcttgcctacggtgacctatctccccttcccattcaagaggacatgaactaacgtg

SEQ ID NO: 169159 - DNA, 201 bp, Homo sapiens
agatttttcctcactcttggacatatccattctaggtcaagagctgatcctaagagtttcaggcgatgctgcatactgtgtggaatttaaaatcctgtacrattaatggtatttagagggaaaatggaaagtaaaattggtttgctggccacaaatgcttttcacatcatcatcaactactctctgtttcccttactctct

SEQ ID NO: 169160 - DNA, 201 bp, Homo sapiens
gcaggttatataaaaattcctaggcattattagaatattagctttaatccaaatgattagagggctctgagaagatgaaaggcacaatttggcttatattrtcaagagatcagttttgatctattgaagtgtgaagtaactattgaacattttcatctgggctagaactaaaaatgagaaaattatcaacatatacgtaag

SEQ ID NO: 169161 - DNA, 201 bp, Homo sapiens
atatcaaataaaatatttgataggccctgttgagagaggcagtagtattgcctagggattaggcatgcagatcctggacaccgtattagggtaaaatcccrgatctctcactcattatttacatcaccttacactttctggggtctgctttcctcagctgtaaaatgaatgctaatattaatacttacttttctagtttac

SEQ ID NO: 169162 - DNA, 201 bp, Homo sapiens
ccctctttctttgtgtgccttattaccttgtgttgagatatgtgcatttgcaaaaacagctaactctctcagtctttatggtctgtctggcttcccactgaaaaaaaaaaaccttcaaaaataagccttgctagagattctgggtgccttccaaacctttcatatgagcacatcttcactctgcttgtacttgtaaattcc

SEQ ID NO: 169163 - DNA, 201 bp, Homo sapiens
gccttattaaaaaggtgacatttgaaaaagacctcagtgaagtaagagagtgaaccgcctatgtatctgaaggaagaggatgccaggaagaagtaatagcrtgtgcaaaggcattaaggtgtctatttggggtgttgggaggacaacaatggggctaaggtggctgggttaacttgaatgaggggaagactagtagtagat

SEQ ID NO: 169164 - DNA, 201 bp, Homo sapiens
tgactcctgactcctaccattgcattgctcttcttgtcttatcctaattgcaaatttaaaatttaagtttaataacagagtttgaaatgagtaaaaggagkagtagaaaaatcactgtataaacaaaccagtttatgggcctgttaagaaaagtttctgaaacatgctaagtgtcagaacaagttggaaatatgtgtgtca

SEQ ID NO: 169165 - DNA, 201 bp, Homo sapiens
ataatgtaatagagggagaacaagatttggagaaaaacatacttgaagaaaaatttcaactcaggcctctcctaagctgggtagcccttgaaaaattattygacctccctgatcatcaattttattacctatacaagaaatacaattgggcttaacacagtttttattaaacatatatattgcataatatatataatacgt

SEQ ID NO: 169166 - DNA, 201 bp, Homo sapiens
cttaaagagctttcttgtttttttgtactttaggatagagtacaaaatccttaatgttgccagaatgtcttatcctacttgcctttcatccccatctcttsctgctcacccatgtaatactcggttccagaaagccagcctgggtttctttctgcagacatattaaagacatcttgctttcctttgtatgtcttgctttcc

SEQ ID NO: 169167 - DNA, 201 bp, Homo sapiens
tgagtgaaggtatgtggctggcaaagaagcagttaagattataactgatctagatctagaccagcatttgggttgagttagtcaaggccaaccagaatatktttcaaggctgcccgttagcagaaaaagtcttcaagccaggataccagttcaaggtaggaagacgcagggtccagggtctctaatacttggtcagagagc

SEQ ID NO: 169168 - DNA, 201 bp, Homo sapiens
tgagagttaaacttcagtatactttatttctttatcacattttgctattatatctcctcttttactccacacatccttctgcttctgaccacagtgggtgrtagactgccaatttaaggcataatatagtaaacaatttgggagatattatttataataatagtatcatgagtgaaggtatgtggctggcaaagaagcagt

SEQ ID NO: 169169 - DNA, 201 bp, Homo sapiens
ttattctggaaagaaacccaacacacaaaatgttaacctccaaaaccacaaagcaagcatgcaaagggtaatatttcttttttcaaatttttatctacaaytggtttccctcttggtacttggaatgctctcctcagccagaacatttaaaagagtttgttttacaaaattttatttacaggttttttttttttcagacac

SEQ ID NO: 169170 - DNA, 201 bp, Homo sapiens
actatctacacacatatttgtttagaatccataaaataatatttttattctttttccttttataattttatgaaaaattttaaagggccgatgtatagtawaataaattattactctaattaatgttttcttttaattttctaaccatcaataaatactccttagtttgaattcccatggaaaatccctatagccggataa

SEQ ID NO: 169171 - DNA, 201 bp, Homo sapiens
atctggcttaaggtttcccatgagttgcagtcaaactgttgactgagaccacagtcatctcaagctcactggggctgaagaatccacttctaaggtgataytgatgtggttattgaaagacctcagttccccatggtgtataggtgtgggagcctcaattccttgccacagagttttcaacaaatgtcctcaggccataga

SEQ ID NO: 169172 - DNA, 201 bp, Homo sapiens
gggggctatcttggaggcaagacacctgggaagaaaccaggccagaggtatctccagaagcataggtactgacaaactgagggggtaaaataacaaagtgwcaactttctagatggctttagtcaaaaggaccataattaatgtcagcaagtgaaactaatttgttaaggtacaggactctacaataaaaaagagtgaaac

SEQ ID NO: 169173 - DNA, 201 bp, Homo sapiens
gagactcaaaaatggctcaaataaacccaacaaatgaaaggaaataattctaaaagaaacaatatagttaatataaaccaaaaataatatagcagaaggcrttactataacttggatagctgagacttctctgattaaaagtcaaagactcaaaaatgaattaaaaggaatttataggctagagacatgactaaaataaga

SEQ ID NO: 169174 - DNA, 201 bp, Homo sapiens
ggcagtgtaagagtggttgactagacaattcttaaaatgattgttagtaataattagtaagagttcagcagaatcatattgttatatgaggagattataartaagtcagtaaacattatttttaaaaaatcccttaagtcactcataaagtatggtatcattgtttgataaatagaatgcaaaaataattatgcaaaaatg

SEQ ID NO: 169175 - DNA, 201 bp, Homo sapiens
ctttaacttttttaatcaactaatctactactttttatatttcatcaagtaagtgataaaagaatctggagctaatatttgaagtgatctctacttgagcrgttgtaaggttctaagagagaactgaattgaagtcatataaagctctaaattttatttgagtgtctgtcacatagtaattaaattgagattgcaatagaa

SEQ ID NO: 169176 - DNA, 201 bp, Homo sapiens
agtcactcataaagtatggtatcattgtttgataaatagaatgcaaaaataattatgcaaaaatgcataatatgtacagtaatacatattatgtaataaartatatctgtgcaaaaaatgatttgacagtactttcaattatgggatactgtgtgcacaggggcaagttgaaattctttctcatcaagacgatgccctttt

SEQ ID NO: 169177 - DNA, 201 bp, Homo sapiens
tgaattgcagaaaatggaaaaggagtcccagagtcaatacaatatttcaagtgaaaatatgaaagctttaaatgacaattatggtagtgatagacagagaggggaagatagatttaagatatatttatgtagtacatcctacaaggactggtggattattggatatagaagaagaaagatgaggaagggttcaaaggtgaa

SEQ ID NO: 169178 - DNA, 201 bp, Homo sapiens
cttgaaattatcttttgggaagtttgataaatttgatgacattcttattagtaaatccagttctttactgtgcagtgttaacagtgaatggccttaagacwattttcctttttgtgggaaaaataatatttcattattatttattattttaataacaaaatatattgtattaaaataatatttcaatagcatttttataat

SEQ ID NO: 169179 - DNA, 201 bp, Homo sapiens
tgaagacaacttctatattatagtatgcagaagtgctttaactgtttttcctatatgttcatatagaaaattaaagacacatgtatttaaggatttagatytaacaaaattaataatttttaccattttatcaaggatatttttaagtgacactgatttttatttcctacaagtgcatgtacaccctggaagtgtctcttg

SEQ ID NO: 169180 - DNA, 201 bp, Homo sapiens
aatctgtggatgcataacctagggatacagaggaccaactctgttttatttaatcctcacaccagtgacacaagagcactatcatacccattttgcagatkaagaaattacagttctagaactaatctatgacaactccagatgttgtctttctaaagtcccttctgtttaccacagcagaagtgagtatacttcagtgta

SEQ ID NO: 169181 - DNA, 201 bp, Homo sapiens
tcattttctctacatagcaccatttaacaaatttatcacgtaggccacagaagagttttaaattttctactagccacactaagaaaatatgcaaagaaacmcatggaaataaattctaatactacagtttctttaactcaatatacctcaaatattatcattttaacatgtaatcaaaataaagaaaatcattgagatgtt

SEQ ID NO: 169182 - DNA, 201 bp, Homo sapiens
cccagaaggcatctgttacagtgctctctttgccatccgcagatgacttaagtgtttaacagctcagtgtgacagccctctgcatcgcgagctgttgttcrgcatccaggaagaatcaggtcacatgaacaaattgaagatggtaaatgcaggagattttattgctgatgaaggtggctctcagcaggatggagagctaga

SEQ ID NO: 169183 - DNA, 201 bp, Homo sapiens
caggcatcgcccctttctcttctgtcttcttattctcaagtcctggtgaccttacacagatgccacccacaggtgccattgcagcctgcacccatgaagcagggaggtcttagagaataggaattgtccacattcacttatgccatgcctccattccccctactgtcagcaacctttgggtttcccaggccttatctgtgc

SEQ ID NO: 169184 - DNA, 201 bp, Homo sapiens
tccacggacagcttaagtgtctaacagctcagtgtgacagccctctgtatcctgagctcttgtttgatgtccaggaagaattaggtcacatgaacaaattraagatggtaaatgtgggggatttcactgccaatgaaagttgctctcagtgggatggagagctggaaaggagatggagtgggaaggtggtcttttcctgga

SEQ ID NO: 169185 - DNA, 201 bp, Homo sapiens
aagccctagttttaggattgaacctattcttgtctcttcaaaagtcataaagtttgacttttcctattggtagctcacttgaagacaaaataacaataaaytcaagaagcactggtttagtgaaacaacgtatcactgacctttatctatgctgagtcagctccaaataccactttgagcacaaaatccagggctatttta

SEQ ID NO: 169186 - DNA, 201 bp, Homo sapiens
cagttgaatatcctaaaattgttcaacaattactttcttgagatcatgggtagacctagtgagtacagattagaacaaggtttatttcttgcataatgagygctcttcccaggacacaactatgccaaatcatgtggaaaaaagttctgcatatggaactcttaatgtcctgactgtcagataaatataaatgttctttaa

SEQ ID NO: 169187 - DNA, 201 bp, Homo sapiens
tgactctcctctactaaccacctcatgcctaaaagccctagttttaggattgaacctattcttgtctcttcaaaagtcataaagtttgacttttcctattsgtagctcacttgaagacaaaataacaataaactcaagaagcactggtttagtgaaacaacgtatcactgacctttatctatgctgagtcagctccaaata

SEQ ID NO: 169188 - DNA, 201 bp, Homo sapiens
cattaaattttcttattttttttactgtgatgcgaactgtggttacaattccacaaataagagccaatgttttcctttgtcttagcttaacaattgatacytacagaaataaacactaccaaggggagatagggacacagaaccaagagaaaataacaatcaagaagtccagcttttcctaaataagaaagcagattcaaa

SEQ ID NO: 169189 - DNA, 201 bp, Homo sapiens
ggatgtttctcctctggagattttgtgggaaaaaacaataataaaaccttaggatagaatgaagtctgcatatttgatctcctggtataattactaaattytataaatttcacataccataccccccacaaaaagagctccttggggctcagtatatattttttgtgaaagaaagaaagttacagtttcaccattgttatc

SEQ ID NO: 169190 - DNA, 201 bp, Homo sapiens
ataactgttaaaaataatgtagacttgtttactttgtgtaaataatattgctattttgtgctgtgttccctgatatcacatggattttaaaacttagggaractaaatgcagacctcgttgcacataattcaccaaaaaaaaaatggtttgtcatagatccatcattggtgtcttcgtgcttcaatgagtggcattaattc

SEQ ID NO: 169191 - DNA, 201 bp, Homo sapiens
attactcatttattgttttttatttgtaaagtctgtagtaggatgtttctcctctggagattttgtgggaaaaaacaataataaaaccttaggatagaatraagtctgcatatttgatctcctggtataattactaaattttataaatttcacataccataccccccacaaaaagagctccttggggctcagtatatattt

SEQ ID NO: 169192 - DNA, 201 bp, Homo sapiens
ttaatgcagtgcttcttgtgtgtcaagccctgttctaagtgcttttcttacagtaatgtatttaactgtcataacaatcctatgaggtattaatatctttwtctacatttttatactagtgaattgagaccccaaggaagttaaataatttaccagagaacgttctctatgctcaaaatcacctcttccatatgtgggctc

SEQ ID NO: 169193 - DNA, 201 bp, Homo sapiens
caactacccgccccctgtctccattattccacatgaatccttttctggataggccattctctccatgtatattcattcctgcattgtctgtttaactcgcwttgctagctcactagaaacactccaatggaatcataaaatttctggaatacaggaagattctgatctaacttttaatcccacccatcccttgatattctg

SEQ ID NO: 169194 - DNA, 201 bp, Homo sapiens
gtggggctgggtgggaagacaaaggaggagcatggagaaagctagggaaggtagaaaaaaggaatgcaaagttggactgcaaggcctgtgttcgagatgtrtcattgtgtgggcagaacaattatagtgctgtagcttactattagtccctcctgaaaaaggaaatgccatatatgtatttggatgaaaaaagttctttca

SEQ ID NO: 169195 - DNA, 201 bp, Homo sapiens
cagggaaagcctcaggaagaacagaagggcagcgtcacagagtctggaaggtccttcagaattgaaggcagctccagggaccacatcagcaggaacttackccttcccctctgactgtttaacccgagtacaaaactccatcccatgcaggtgggtttacgtggtagcaaaaatagccccctgagggtatcccttcaggag

SEQ ID NO: 169196 - DNA, 201 bp, Homo sapiens
tttttatagctttgggttttatatttaagtctttaatccatcttgagttgatttttatatatggtgtaaggaaggagtccagcttcaatcttctgcatatrgctagccagttatcccaacagcatttgttgaatagggagtcctttccacactgcttgtttttgtcagcttagtaaaagatcagatgatcataattgtgcg

SEQ ID NO: 169197 - DNA, 201 bp, Homo sapiens
gtgtgataaagaagaaatctgcctcaatgagcacacggaagtctccaaacctcttagtacagaactagtaagataaaacctaatctagattctagtggctwtcgggaatgtgtcttcctatggttgattttgttaagtttactagtcagcattaaatttgctaattgtaggttttcattgcctaatagcatcaagtatttt

SEQ ID NO: 169198 - DNA, 201 bp, Homo sapiens
atgaacctttcaactcctctaaattaaaaagctgacttttctgagaacaaacagtatgtgcttattaagtgagttgtcagagtgagtacttgagagatctrtatttttcctcctttgaacaatctatttttttaaatggtttaacctcttgacaactggtgtgctccatttccagcttggggagtttttaatattgctatt

SEQ ID NO: 169199 - DNA, 201 bp, Homo sapiens
taaaaacccatgagacacatagaagaagatgcctggtatgcagttgtgtatacaggtctgaattttagcagataaatcaaaacttgaaaaacaatgtgggrgttgttggctttcaggcagtagttgaagctacggaagtagaggatgtgtgacaagtactgtgtgtagctatagagaggaagtatagaaagaggccagaga

SEQ ID NO: 169200 - DNA, 201 bp, Homo sapiens
aataattccaagagatttaacctatgggtacattttgtaaccaggtttttttttttttctggagggctcattattaagatatttatgtagccatggtataygactggcatctcagctcaagaaattcaaaactgaattcaatattcctaccctctaccatttcaattctttcacccaccattcccaaacttttaaaaatac

SEQ ID NO: 169201 - DNA, 201 bp, Homo sapiens
cttatcatgaacccatcatatgaccagatggcaatctgatgactcagcttacatgattggtttagcatattcagaatttatctctaaactggtcatcttcytctaaggtttttgatatctgaataaaagcagattctttttgcagacattaaggggagagtagatttggtatagacaaaccctatgtttctcttctgcact

SEQ ID NO: 169202 - DNA, 201 bp, Homo sapiens
taaggggagagtagatttggtatagacaaaccctatgtttctcttctgcactgtgaggacaaaacttaaccatctatccttaacatagaacattgcacacwgtatacaattcattcaatacctattgaatgaataaaaataatcacaccacatacatgtgtattgcctacaggttaatttaccttgactactatccttaga

SEQ ID NO: 169203 - DNA, 201 bp, Homo sapiens
ccaccataagctaggttagttttatagacagaaaggaatgaagaaatgatagggataggccagttaggtcttccaattgcttttcatttccaaaagtggawtaaacattttaatatattatgcattctaagggaagaaagaaatgttagtgtgaagcaataattttctgggcatactgtgttatttagagcaaaagatatt

SEQ ID NO: 169204 - DNA, 201 bp, Homo sapiens
tcacgcattcattatatcctttaaagaaaaaaatagactgtctgcctccactcataatctgtcaatgacattcgccttatgccagttctacttgttttctktaccattctggagttcccagaagttattcagtcccagcaatgtttgttaagcattcaaatgtgccccttgttgccttacagaacaaagacacaagtcctt

SEQ ID NO: 169205 - DNA, 201 bp, Homo sapiens
gattgcaccactgcactccagcctgggcaacagagtgagattctgtctcaaaaaaataaataaataaataattaaaagtgtagctttcaaaatctctcatytttcactctcagaagcttactctggtcttagcaaaactatttcatatacaataaaacaattttaagaaaaattgtagtgattattcattcttaaatagta

SEQ ID NO: 169206 - DNA, 201 bp, Homo sapiens
gtcacttaccactggtaagcacgttacaggcgagtggtcacagaagatgagcatttgtgagagatggcatctgggactgatcctaggtgttattttttaaggggatgcgtcaaaattgtagacaatgagacatcaaaaaacacaactcacttcaacaattacacaataaggatttctaaacatttttcaaaaaaaacctgt

SEQ ID NO: 169207 - DNA, 201 bp, Homo sapiens
agtttaatggccatgccacaagcagtgcagaacctctcaagaggtgatttccttccaggatctgaaacggggagtgagaagaggagcgcctctgccttcarcattatgttttgctcactgatctcacacttctccccatctgcttgccaaagcagaggagaggcaaactgggacgcctatgtccgccgtgcttactcaggt

SEQ ID NO: 169208 - DNA, 201 bp, Homo sapiens
tgatacttggcaaaatgcatgtcacagctgatcatgctcattaataacaagccaagggcatcaaactgagaaagtgtctctctctctctatctctttgtgygtgtatgtgtgtgtgtgtgagagagagagagagagattaagatatgtaacatgataacagactttactccaagagtgaaaattaatgtaaaggttttaaa

SEQ ID NO: 169209 - DNA, 201 bp, Homo sapiens
caaactcatctataaataaaatataatcccaatgaaaatcccagcaggtttttgtagaaattaaaaagctgactccaatatttatgtggaatgcaaaagarcctagaatagtcaaagcaatcatgaaaaaagaacaaagtctcacttcataacttgtatggattcatgtactataaatttacagcaattaagataatgtga

SEQ ID NO: 169210 - DNA, 201 bp, Homo sapiens
acatcagaagcttaaataaaaatttgacaaggtatgagaacttgccatcccacatgatgtaaaattattgttttgcaagaagaaaagcaatatttaacagaacagtgccttagcttccaaaattaggttccttggaaaaatatttccaaaatattttttttctccaaaccattgtattctttattgtacatttaatttata

SEQ ID NO: 169211 - DNA, 201 bp, Homo sapiens
taatttaatattattgtagatgtataataccaaaatgcagctgtcacattatttttgttacccaaaagcactgtctatttttcaaagctaagaattattawatcttcctaattttcaattgataaaagtttaaatgacccaatgctccatttttcttaaataaagtgattagagaatttttgaattacatatttcttcaaa

SEQ ID NO: 169212 - DNA, 201 bp, Homo sapiens
ccaacaccatttattaaatagggaatcctttcccattgcttgtttgtgtcaggtttgtcaaagatcagatggttgtagatgtctggcattatttctgaggyctctgttctgttccattggtctttatatctgttttggtaccagtaccatgctgtttttattatggaagccttgtagtatagtttgaagtcaggtagcatg

SEQ ID NO: 169213 - DNA, 201 bp, Homo sapiens
gttgcaagagtgttccaagaagacatggcaaattacatgtgaaagtaggtacataatttaatattattgtagatgtataataccaaaatgcagctgtcacrttatttttgttacccaaaagcactgtctatttttcaaagctaagaattattatatcttcctaattttcaattgataaaagtttaaatgacccaatgctcc

SEQ ID NO: 169214 - DNA, 201 bp, Homo sapiens
agatggttgtagatgtctggcattatttctgaggcctctgttctgttccattggtctttatatctgttttggtaccagtaccatgctgtttttattatggwagccttgtagtatagtttgaagtcaggtagcatgatgcttccagctttgttctttttgcttaggattgtctttaacaaaagccaaaacagacaaatggga

SEQ ID NO: 169215 - DNA, 201 bp, Homo sapiens
ataaaaaccataatgagataccatctcaggacagttagaatggcgatcattaaaaagtcaggaaacaacagatgctggagaggatgtggggaaataggaaygcttttatactgttggtgggagtgtaaattagttcaacctttgtggaagacaatgtggcaattcctcaaggatctagaactagaaataccatttgaccca

SEQ ID NO: 169216 - DNA, 201 bp, Homo sapiens
tctcactctgtcacccaggctgaagtgcagtggcatgatcttggctcaccgcaaccccagcctcccaagttataatcaattctcctgcctcagcctccagmgtagctgggattacaggcacgcaccaccacgcctatctaatttcgaatttttagtggagacaggtcttcaccatgttggtcaggttcactcctcatctcc

SEQ ID NO: 169217 - DNA, 201 bp, Homo sapiens
tttactcctgagaaaagcggggtaaaaagtaatccatgaaattcccatcttgcttaaaagtaacatctgtaggagacccaagagtattgccggctgagttsccgaaaataaaagcctgtgtttcatcagcttttctctcattaaaaaatcaatatcagctattatggaaggctcccagagaacacagagaccatttgccca

SEQ ID NO: 169218 - DNA, 201 bp, Homo sapiens
gacatggatgaagctggaaaccatcattctcagcaaactaacatgagaacagaaaactaaaccccaactgttctcgcttgtaagtgggggttgaataatgmgaacacatggacacagggaggggaacatcacacaccaggacctgttggggagtgtggggctaggggagggatagcattaggagaaatacctaatgtagat

SEQ ID NO: 169219 - DNA, 201 bp, Homo sapiens
ctgggtgaattaaacctcagcttccagtgtggtagtggtggaccaaccatggctgtctttgggctcctgggtagcctatgtgggcactggatttagcaggytcaggtgaactgatgcttgggctcccaggtgacttccttgggtgccagcagtggcagcagagggccgagtggataggcaggttttggggcccctggcagt

SEQ ID NO: 169220 - DNA, 201 bp, Homo sapiens
ataatgccttcagtcatactaggcattaggatctttcaaaaatgccttatatatactatctcatttatatatcatgacaacctaatagtgtagaccaggcragaattttccctggctgtccattccaaactccacctttgatcacttgccaatttcccacattaagaaactgagagtcaaaagtggaaagtgagttgctag

SEQ ID NO: 169221 - DNA, 201 bp, Homo sapiens
tgtgctgtttgcttgtgttctcttgtatctcactgagtttttttcatatcattattttaaaaagttatctcatatattttcttttctttggaatgaaattsgtggctggagagttttgtgttctcttgaagattcatatttctttgctttttatatttcttatgtctttacacaaaatatatatgctattagtgtaatagt

SEQ ID NO: 169222 - DNA, 201 bp, Homo sapiens
ctcagccctatccgtatcttaaatgacatgataaaaaaactgacaaaggtgggggacgtgggaccatcttctctctggtcttttgttttcttatttttccrtccttagactacagtggtcagtattacttacataatgatatggtctactcatatcttcctttctgaccagcgtttttactgggtccagtgtgaaataaaa

SEQ ID NO: 169223 - DNA, 201 bp, Homo sapiens
aaaatattgttttactttttttttgtctgactgggttatttcaaaagacctattatgaagttctgaaattctctctgcttgagctagtctattgttaaagstctttgttatatttcttatttcattcactgaattcttttgttccagaatttttgtttgttccttttttattatttttgtctctttttttactctcttatt

SEQ ID NO: 169224 - DNA, 201 bp, Homo sapiens
aatttttgtattaggtatgaagtttgggtcgtttatatttttacatatgggtgtctaattgttccagtatcatcggttcaagaggctaacctgtcttcacygaattacttttacaactttgtacaaaatcagttgggcatgtatttgtgtgggtctgtttctatattatttattctgttccattagcctatgtgtattctg

SEQ ID NO: 169225 - DNA, 201 bp, Homo sapiens
gcaaggagaaatacctctgctgctgctctacattgctgcttcaataaaagttgctaacacctctggttcacccttgagttttttatttttttatttttttrttttttatttttttgagacggagtctcactctgtctccgggctggagtgcagtggcgcaatctcggctcactgcaacctctgcttcccaggctcaagcaa

SEQ ID NO: 169226 - DNA, 201 bp, Homo sapiens
tttgcatagccctaaatgtaaaagactttctccttttttttcctaaaagttgtataactttacattttatatttaagtctgtgaaccattgtaagttaatwtttgtattaggtatgaagtttgggtcgtttatatttttacatatgggtgtctaattgttccagtatcatcggttcaagaggctaacctgtcttcactgaa

SEQ ID NO: 169227 - DNA, 201 bp, Homo sapiens
ttggtatattcagggatttgacttcctcttggttcaatattgggagggtgtatgtgtccaggaatttatgtgtttcttctagattttctagtttatttgcrtagaggtgtttatagtattctctgatggtagtttgtatttctgtggggtcagtgttgataccccctttatcactttttattgtgtctatttgatccttct

SEQ ID NO: 169228 - DNA, 201 bp, Homo sapiens
ggatgttggcctgaagttttctttttttgttgtgcctctgccaggttttggcatcaggatgatgctgacctcagaaaatgagttagggagaagtcccaccytctaaattgtttggaatagtttcagaaggaatggtatcagctcctctttgtaccactgtagaattcggctatgaatctgtctggtcctggactatttttg

SEQ ID NO: 169229 - DNA, 201 bp, Homo sapiens
tatattatcaagagatcagttttgatctattgaagtgtgaagtaactattgaacattttcatctgggctagaactaaaaatgagaaaattatcaacatatrcgtaaggttcaaagccacattaacagagaaggtcataggagaatgaatacaaatagaaaggaaaagaagtccaaatatttagtggtaacgccaacatttt

SEQ ID NO: 169230 - DNA, 201 bp, Homo sapiens
tgggtgcatgtggtggtagttgcctgtagagtgaaggaagcaaagtcatcttctcatgactgtgtctgggcctctttgttttctgtatgcaacaaactcaraatcacttatagtaatagagaagtctaagatttcccaatgagacaacaaaggacaaaccagcaaagcagatgacaaaaacaagataaaagtaggggtaca

SEQ ID NO: 169231 - DNA, 201 bp, Homo sapiens
aggaacacaaacattcagttgatagcattcacgcattcattatatcctttaaagaaaaaaatagactgtctgcctccactcataatctgtcaatgacattygccttatgccagttctacttgttttctttaccattctggagttcccagaagttattcagtcccagcaatgtttgttaagcattcaaatgtgccccttgtt

SEQ ID NO: 169232 - DNA, 201 bp, Homo sapiens
tggtggtagttgcctgtagagtgaaggaagcaaagtcatcttctcatgactgtgtctgggcctctttgttttctgtatgcaacaaactcagaatcacttayagtaatagagaagtctaagatttcccaatgagacaacaaaggacaaaccagcaaagcagatgacaaaaacaagataaaagtaggggtacaatgtgctata

SEQ ID NO: 169233 - DNA, 201 bp, Homo sapiens
tttcccaatgagacaacaaaggacaaaccagcaaagcagatgacaaaaacaagataaaagtaggggtacaatgtgctatagacagaagtgcatcctggagwctcaagtgtcaaatgcagcattgtgaatcattctatttaaacttctgatttaactgttcttgaagctttgttttcttttaatttcctacgtctatctgtg

SEQ ID NO: 169234 - DNA, 201 bp, Homo sapiens
agcaaagcagatgacaaaaacaagataaaagtaggggtacaatgtgctatagacagaagtgcatcctggagtctcaagtgtcaaatgcagcattgtgaatyattctatttaaacttctgatttaactgttcttgaagctttgttttcttttaatttcctacgtctatctgtgtatttttcttattcaaatgaagatataaa

SEQ ID NO: 169235 - DNA, 201 bp, Homo sapiens
taaagcattatataactatgcaaatactccaggcctgactcatgctctcgtgtattgagtgtattttatctggcaagaaacaaatattggctttcttcttktcaatcagagagtgccaaggcactattctattacaaaataaatatgtaaacaaatcaatgaatattaaagttcccattccagtaaaatctatacacccat

SEQ ID NO: 169236 - DNA, 201 bp, Homo sapiens
tgactcatgctctcgtgtattgagtgtattttatctggcaagaaacaaatattggctttcttcttgtcaatcagagagtgccaaggcactattctattacraaataaatatgtaaacaaatcaatgaatattaaagttcccattccagtaaaatctatacacccattctcctccaaacacactataagccatcttccctct

SEQ ID NO: 169237 - DNA, 201 bp, Homo sapiens
ataatgttatgtttggcattcagtgccctttcctggaacggccacccctgtctttacctcctgggcctttagtagtcttatcagtagtatgaagtctcacytgaacaactccaatcttgagaatttccaactctgctgaaatcctgtatcatattttgtctttatcaattgtttggtatttatgtttttagtcttacatgt

SEQ ID NO: 169238 - DNA, 201 bp, Homo sapiens
acagtgagttcaaaggtattagagtgtgcttagcaatgtagggaagtgtgaaaagccagtgtagtcacgtgaggtatacacagggaaaggaaaaagatcaygcagggtcttgtggtttttgtaaggtggctgagtatctgaatgagaatggaatccattagcaggatcactttgcctgctgttttgagaatagaattaagg

SEQ ID NO: 169239 - DNA, 201 bp, Homo sapiens
tccctgaagttcagtttccatactgtagaatgcggataatagtaattatatcctgaatataacaattagtcaataaatggtggtggtgctgttgctgctgmtgatgatgacaaataacaacaatatcaacaatgactatttttttctttcattcttttccttcagtgggattgaactgatttgacgttttatctaacataa

SEQ ID NO: 169240 - DNA, 201 bp, Homo sapiens
gtaattatatcctgaatataacaattagtcaataaatggtggtggtgctgttgctgctgatgatgatgacaaataacaacaatatcaacaatgactatttytttctttcattcttttccttcagtgggattgaactgatttgacgttttatctaacataaactggatacttttaattattctttgtattaaaaatatttct

SEQ ID NO: 169241 - DNA, 201 bp, Homo sapiens
attttatttcatgactccaccggccctattgacatttgcctaaatcctctggatattcctacagtgctctgagatgagagggactgtaaatgtttgagaamagagaagagtaatgacgattcccaagtctgaatgttggtcagatgacttcacagataatttgagcccagagaaaacacaggctgagaaacagtccacaag

SEQ ID NO: 169242 - DNA, 201 bp, Homo sapiens
ctcctatccaaaagaccctcagttagtccaaatacgtcatttatagatgaagaactctatgatgaaggaagattgaaaaaccggcagttggttaccaggcyacttagaatagaacaagaactagaatgcaggtctgagctttaactaccttacgccacctcccttcctgctcttaggtgccatgccttactccatgcacac

SEQ ID NO: 169243 - DNA, 201 bp, Homo sapiens
aatatcacagaaaagaaatgccaggatttgtggaacatatttgtccatcgatctatacctgagttcaggagccctttttgaaaaggtatcaagttaagcayaaattctccagaggtattctatgttagaagaaaattttaaggcaactaaaaagtagaatgcttgctctttcacgcaacaatgtatactcttaaaagggca

SEQ ID NO: 169244 - DNA, 201 bp, Homo sapiens
aaagaatgaaataggatttcaaggtctataagaaacagtttatccctaaaagcaatacctactgctgttagcagacatttcaaagatatgatttgtatgcyaagaactttattttctttctcactaggagcagctatacaagtgtctttccttctcatgagtgagtttccttaaagttttacctgcagtatttgtaagatc

SEQ ID NO: 169245 - DNA, 201 bp, Homo sapiens
aatgcaaaggaaaagttcttggaggaaattagaagtgctattccagtgaagacagactgataagaaagtgaaacagtcttattgctgcaagggacaaagtyggagtgatttggatataagatcaaatctcacaacattctctgaagccaaagcctaatccagagcaaggccctaactctcttcaatttcatgaaagttaag

SEQ ID NO: 169246 - DNA, 201 bp, Homo sapiens
attcctgtcattttcttaattgttttctagttatgtatatcttttgttcctttctttctctctcattatttagcactgccacttggtggttttctgcaggygtaatattttagttctttttctttctcatttttgtgactgctctaacagtaagttttatactttcatgtgctttcatgatgatagatattgttttttcac

SEQ ID NO: 169247 - DNA, 201 bp, Homo sapiens
actttgttgtcctcagaaatgtatacacaggatagaatccctaccttcagcaacttgcttaaaccaaaagcaactgttctctatcccaaccaacctgaagraaaagaggcagatagtggtaacaaggtttcctttgtacacaataatctgtaaaatccattagcatagttttccagtgaaggcataatacaggaacagttg

SEQ ID NO: 169248 - DNA, 201 bp, Homo sapiens
tacattcattagcagtaaaactgcattgtatatattgctggggaagaagagtcttttttcttctcagtgaagttaaggatttcacttagcaaacctgaacraattgattacttccagcaaatttgttacagcctaagacttcaaatattaaaattccttccaacttttaagacttactttgagcaaagaaatagataaagt

SEQ ID NO: 169249 - DNA, 201 bp, Homo sapiens
ttggtggaatcttcaggtttttctgaatatgagatcctgtcatctgcaaagagggacaacttgactttctcttttccaatctggctgctttttatttatayattttgcccaattgttgtgtgtaggacttccattattatgctgaataagagtgctaaaggtaggcaaccttgtcttgttctagttcttaaagaaaagact

SEQ ID NO: 169250 - DNA, 201 bp, Homo sapiens
ataggaaagccccagaccgtaaaaaatcctctactccttcctgaaagttcaggaatactcattttatataaaaatgaacaagaaaagtgaccatggttgaragtcatatagaattataacaagaaaaagataaataagaagcaaaataatatccttaaaaaaagtgggccagaaagacatgcccaccaaaaagataaactg

SEQ ID NO: 169251 - DNA, 201 bp, Homo sapiens
ggctgagattgcaccactgcactctagcctgggcaatggagcaagactccatctcaaaaagaaaaagaaaagaaaagaaaagaaggaaggaagaaagcaarcaagccgtatttgtaacctaaaggtgaaccagaaagtgctgatgtagaagctgcagcaagttatccataagatccagctaaggtcattgaagactgtggc

SEQ ID NO: 169252 - DNA, 201 bp, Homo sapiens
acttcagcacagagattctcaaccctcattaaataatagaattttctgaggagatttaaaaataatcccaaagcccaagcatgcccaaagattctaatttrattggtctgtgacctggcctgagcaccagtattttcaaagctcccaaggtgagtttaaaaccttgaaaaatcaggatgtttttcataatttcaaaaaagg

SEQ ID NO: 169253 - DNA, 201 bp, Homo sapiens
cctgtgcatgacgttatgctgagatcttctgacctttgcaatacttcaccaaatgtgtctggaccgcagttctcagtaggtctcgttgctagaatgttcarcaggagaaaaatactggaaatgtacttgcaggtcagaaataagagttttgactgactaaccttataggtaaaattcttgttgcaattaaaatgctcagtt

SEQ ID NO: 169254 - DNA, 201 bp, Homo sapiens
aaggttaagtcaatagagagtccaaatcaactgggcagatggtagtcattttctggaggaggaattagtttgggccctcccatactagggcactgagtgcratcaggagttttcttttgagtaatcttgctactttcctactctctaatttcaatatttattactgtttttctcattcacttcaagccagtaacatcaaac

SEQ ID NO: 169255 - DNA, 201 bp, Homo sapiens
cctgcatctctctttttgacagggagtaacaattgtaccttcacctatacttgtaaccgtctcacatgagtatttttcttcataaatatattgataatatrtgaagtataatgcttcttcataattttttctcttattactctctagccaaatatttactaggagcgcaggtttttctgtttctcaatcctaaccaaaaaa

SEQ ID NO: 169256 - DNA, 201 bp, Homo sapiens
aacaaaacagaagatgcagttcatagctaagagtcaaataagacccagacccaggggttactgcaaaccacttcagataatgtggtgttcaccagaaaaaytgtctacattctagatggtcaggcgggatttagggggaaattgtaacagtggacagagtaaagcaggaagcttggaagcgaggggtaacacatagatact

SEQ ID NO: 169257 - DNA, 201 bp, Homo sapiens
tttcctattgaatgtagcacagatatgagatcctagaaaatgaaactatttcctagaccgtccctgcatctctctttttgacagggagtaacaattgtacsttcacctatacttgtaaccgtctcacatgagtatttttcttcataaatatattgataatatatgaagtataatgcttcttcataattttttctcttatta

SEQ ID NO: 169258 - DNA, 201 bp, Homo sapiens
gtttgatttgatgcttattttcattttaaatgcctaatttaaaaagcagaacaattcctctagcatgttattataataaaacataagatacattgactggmatgaggcccttccatgaatagactcttattaaagctctgaatgaagtcttattttcttcagtttttcagaaagctactttggggcaaaggaaagttaagt

SEQ ID NO: 169259 - DNA, 201 bp, Homo sapiens
ttttcaaattgatgtcttatctttcctagtgcctcaagctaagtcctgttcagacatgttgtaacaatctactttgagtttattttagtaccaaaaatatwtgaaatttatacatagttttttcataatacatatttttcatggactttctgaagaccctcatctaatcaaactttttttgtttattgaatttttatatcc

SEQ ID NO: 169260 - DNA, 201 bp, Homo sapiens
tatatggcacaatttatctaaatgtcagtttccttatttgtaaaatgaaattattcataccagagtctcaaattagatgtttcgtgctttataaatgatcrtgttctacaactaaatggagcttctttgactaacctcttgtttcaggccacatgtgaccaacgtggctgttgctggaatccccagggagctgtaagtgtt

SEQ ID NO: 169261 - DNA, 201 bp, Homo sapiens
ttattgcagaataccttcaagaaagctcacctccttattttaggatacaataaaaataccttttctaatttactgatttttaaatctgaattcaaagttcwctagcccttaggtaagtcctagctgtcagtttttagagtggtggcctccctttacatcttttgtcatataggactttgtatttacagaagaatggcattg

SEQ ID NO: 169262 - DNA, 201 bp, Homo sapiens
gaactttccagtccaggctgcttctccggaggtgagtgtcttccagagggggttcctttctgtgaagtagacagtaggagagcatcatgatgggagggccrgggcttggctgcctcctagaacaaggatacctagagcctgaagactggacagtgggagttgcatagaggatgagctctacagcaaagcctgtctccagag

SEQ ID NO: 169263 - DNA, 201 bp, Homo sapiens
atagtggtttattactgtacgttgagccaagttcaaacactgtcttctatcatctaagaccctacctctgtgcctctataggttcacttaggctatacttytatgcagattttaaagacaactgtctacacttattccaaacctttgaattctaaaatcctttccactttcttgatgaagtcttttatccccaattccaga

SEQ ID NO: 169264 - DNA, 201 bp, Homo sapiens
caaatggtatttctagttctagatccttgaggaatcgccacactgagccttttaaggatgtttgctctttccagaagcacattggaaaaccatcacagggrgctgaagaagagtgacagaatctgtttaatgttttaacaagatcatcctggttgctggatgaacaatacacgaaaggacaataaagggagaaggatgaag

SEQ ID NO: 169265 - DNA, 201 bp, Homo sapiens
ttggcttggtttgcaatcatccatagcatgatgatggcttggtagctgtggttcagtggttcactcaacttctggaagtgggtaagctggatagcactcakgaacagcagtccatgcaggaaaagccggctgatgctgagacacagcagcacacaatcactgttgctcagtgcctgcctcttcactacatcccaaaaattc

SEQ ID NO: 169266 - DNA, 201 bp, Homo sapiens
tgctgtactttggtgactattatttccatcagttttatacatggtcttccttatggtttaattattcttactcaaaacacaaaaggcatctcttttctctytcttatgcaccaagcagagtatatagctgatgtcttgtgagtgtggagaacagccagggtactccaagacttgtcttcctctttcttgcctttcttccag

SEQ ID NO: 169267 - DNA, 201 bp, Homo sapiens
ggcagggaggtggtttgagagacaaggctggagcaaaggcagaggcggcactgtgcaaggcctgatatgatgtaaggtacatggatgtgctttggtcaagraataggctgaggtggacatccaggccaaagtgactcagcgagtttagggagcaggcatatatatatatatatatatatatatatatatacttgttatata

SEQ ID NO: 169268 - DNA, 201 bp, Homo sapiens
ttttgtgatcagaagcagtctcatttttttttttttttggctctttccatttcacaaggagcaaatcctcaggactaaatatgtgggagtcacagtggtgytactgaattttgtctcttaggcttccctggctcccagtaagtatgccatttgttaccttcttcctttgtcagtgattgtaataagaaattatgtaatcat

SEQ ID NO: 169269 - DNA, 201 bp, Homo sapiens
actgcactccagcctaggtgacaaagagagactccatctcagaaaaaaaaaaaaagtgatgaataggtttattaccttaattgtggtgatgggttcatagrtgtacacttatttccaagttcatcaaattgtttactttaaatgtgtgcagttttctctatatcaaccattcctcaataaagctgttaaaaatttaaaaat

SEQ ID NO: 169270 - DNA, 201 bp, Homo sapiens
ttggttacaaaaatggggaaatatctgaatagatcactaaagaacatgtatagatgacaaataagcatgtgaaaagatgttccacatcatatatcatcagkgaattggaaattaaaacaacaatgaggccaggcatggtggctcatgcccataatcctagcactttgggaagccaaggcaggttgatcacctgaggtcagg

SEQ ID NO: 169271 - DNA, 201 bp, Homo sapiens
tttccattttagaatttatgcaacttgatagtttatttttttttgttgttttgttttggttttctttattagtgactctcaagagaggtgtttatgttgcmgccattagtggctcaggcaaattaacctgtgtccatgcttgtatgacagtgcagcttcaggaaaggaagacctggaaaattcccttgggttgccagattc

SEQ ID NO: 169272 - DNA, 201 bp, Homo sapiens
attatgatgattataaagtacttgcccacaccctatgtttgatgtgccaaatttacagaaagttgatgcacatgcatttactttccctgtcatattgtgcragttactcaatagctcaattgagctgtactcaatagctcactcaagctgtactcaatagctcactcattacttggaagctcacctagattatcacattct

SEQ ID NO: 169273 - DNA, 201 bp, Homo sapiens
acaatggatggcacagaaattcaaagaatcattagtgactgctatgagcaactatatgccaataaattggaaaatctagaagaaatgggcaaattcctagrcacatacaacctaccaagattaaaccacaaagaaatccaaaacctgaacagatcaataacaagtaatgagatgaaaaccatgataaaaactctcccaata

SEQ ID NO: 169274 - DNA, 201 bp, Homo sapiens
ttttcttagggcaagcttctccatttgtctactgaattacaaactatccaaacttagtggtttgcagcaacaattgttttattatatgtagtgattttgtragtcagagattctgccagggtttggctgaatggttctgttccacatagcatttactgggattacatgatatggtggtatttagttggtggctgatcttgt

SEQ ID NO: 169275 - DNA, 201 bp, Homo sapiens
catcaaaaaatgaaactacacgcaaatataccaatcaatattgatgcaaaacacctcaacaaaatactagcaagctgaattcaacaacatattaaaaagaycattcatcacgaccaagtgagatttatcccaggaatgcaaggatggttcaacatatgcaacttaatcaatgtaatacattatatcaacagaatgaagaac

SEQ ID NO: 169276 - DNA, 201 bp, Homo sapiens
aacttaatcaatgtaatacattatatcaacagaatgaagaacaaaaaccatacgatcatttcaattgatgctgataaattatttgataaaagtcaacatcscttcatgattaaaactctcaaaaaacagggtattgaaggaacatccctcaacaaaataaaagccatatatgacagacctacagccagcatatattgaatg

SEQ ID NO: 169277 - DNA, 201 bp, Homo sapiens
aaataaagggcatccaaattggaaaggatgaagtcaatttatccttgttttcagatgatatgaccttatatttgtaaaaacctaaagattccaccaaaaarctattagaactgataaacaaattcagtaaagctccaggatacaaaatcaacagacaaaaattagtagcatttctatatgccaacagtgaacactctgaaa

SEQ ID NO: 169278 - DNA, 201 bp, Homo sapiens
tttaccagtgagtcttttaatgatgcctctcttgagccaatgtgcccatgattatatctgatcctgggaataaggaaggccggtagagaactctgggaccrgctatagctgggactcacaactaaccctaaagaagtcattgtcaagattcagagggaatttggaaagcctgaggtcttgttaaaacacagactgctgggc

SEQ ID NO: 169279 - DNA, 201 bp, Homo sapiens
tgaaaggagacccttatctcttgacatatacaaaaaccaaatcaaaatggattaaagactgaaatctaaaatctcaagctatgaaaatacaagaaaacttyggggaaactctgtaggacattgaagtgagcaaagatttcttgagtaatatcccacaagcacaggcaaccaaaggaaaaatagataaatgagatcatatca

SEQ ID NO: 169280 - DNA, 201 bp, Homo sapiens
ccatttctttatctataaataggagtaattatagtaaataccacataggattgttccgagaaatgagcaagataatgcttgtaatttcaatagcgtgataytcagcatcttaaacataaatccttagtattctaactattttctaaaactcttctaactatcttcccaatgcacagtgaacagctaagtgcatgcatcctt

SEQ ID NO: 169281 - DNA, 201 bp, Homo sapiens
tctattcatgccatcattttctgtagtttctttctaaatctattttcctaggttttacatagtttgctttgtcttattatgtgggtcttgcaccatgtctyttcccacttcttgcaatggctcagctctactgtagaagctggcatttttgagttggccaacaaagactgtttgcattccttgctcttttggccactctga

SEQ ID NO: 169282 - DNA, 201 bp, Homo sapiens
atgcccacaattgtaggtaatttggaagggacacagtgtatggctaaacaagacttctgggttatcgtgtgtgttttgtgggggaaaatggcagtgtgcagtgtgtgtgtgtgtgtgtgtgtgtgtgtgtgtgtgtgtattgacatggatagtcattaaaagctttcctatcctaacgagcaaaaaaagaggatctataac

SEQ ID NO: 169283 - DNA, 201 bp, Homo sapiens
tggtgaccagaacctttaccttctaaagtatacatttttttctggctttctttctctttcctctgtttgcacaatcatttttttctctttatttttccctktatttccctccgtctataatatataaccagctgtccaccagtaaatatttactgaacatctcctatcgtaagtatagtgttctggtcatgtagtaggctg

SEQ ID NO: 169284 - DNA, 201 bp, Homo sapiens
tgcccacaattgtaggtaatttggaagggacacagtgtatggctaaacaagacttctgggttatcgtgtgtgttttgtgggggaaaatggcagtgtgcagtgtgtgtgtgtgtgtgtgtgtgtgtgtgtgtgtgtgtattgacatggatagtcattaaaagctttcctatcctaacgagcaaaaaaagaggatctataacg

SEQ ID NO: 169285 - DNA, 201 bp, Homo sapiens
gcccacaattgtaggtaatttggaagggacacagtgtatggctaaacaagacttctgggttatcgtgtgtgttttgtgggggaaaatggcagtgtgcagtgtgtgtgtgtgtgtgtgtgtgtgtgtgtgtgtgtgtattgacatggatagtcattaaaagctttcctatcctaacgagcaaaaaaagaggatctataacgt

SEQ ID NO: 169286 - DNA, 201 bp, Homo sapiens
tcttttgaagcaaaccaagatccccaggaaactgtggcatgttcacgtacttgccattgaacacagagttgttgatccaacgccaccttttctcttcacgrtggtaaattaagccaataaaatacttctcagcatcagttatgtcctgaagaaacttctggaaataaaaaaaaaattttaccagtgagtcttttaatgatg

SEQ ID NO: 169287 - DNA, 201 bp, Homo sapiens
cccacaattgtaggtaatttggaagggacacagtgtatggctaaacaagacttctgggttatcgtgtgtgttttgtgggggaaaatggcagtgtgcagtgtgtgtgtgtgtgtgtgtgtgtgtgtgtgtgtgtgtattgacatggatagtcattaaaagctttcctatcctaacgagcaaaaaaagaggatctataacgtt

SEQ ID NO: 169288 - DNA, 201 bp, Homo sapiens
ctgggatgcagacaatatatttgtctgcctgtgttgtccagctcttcttgtaccttgctgtggggacaacagagttcgcattacttggagcaatggctgtrgaccgttatgtggctgtctgtaaccctctgaggtacaacatcattatgaacagacacacctgcaactttgtggttcttgtgtcatgggtgtttgggtttc

SEQ ID NO: 169289 - DNA, 201 bp, Homo sapiens
atctaagaccctacctctgtgcctctataggttcacttaggctatacttctatgcagattttaaagacaactgtctacacttattccaaacctttgaattstaaaatcctttccactttcttgatgaagtcttttatccccaattccagaacgcagagttgaaagatcccattgatggcagggagcaggaatatttcatca

SEQ ID NO: 169290 - DNA, 201 bp, Homo sapiens
acttttgttgtatgttttctgaatcctgagagcggtatgctgatccagattgttgttgagagctgaggctatggataatgatgtgtttgtatggtgttcayattaaagggaatgtagctgaaagaggatggtgggaagaagttatgaacacaacagataggctaggcagaatgttctggtgtcgaaaccattgctatataa

SEQ ID NO: 169291 - DNA, 201 bp, Homo sapiens
tcagccagaagtgtttcctatacttgtcacatacgtcccataatcagtgggtatccaagtcttattctttccatccccatggctatttccttagtttctcrcttttcaatgttctccttttctgaaatatcttatttcattactttttaattaattactgaatgttctcattcaccaaacatctctcgagtgtctattata

SEQ ID NO: 169292 - DNA, 201 bp, Homo sapiens
gtttcacttcttcattttcaaaggtctgctggtgttttctaagtggaaaacatgatgtctacccagttgtaatacactccaagttttactatttcttccarattcaaaccaacttcctctctcaacttctttaatttttcttaagtgattacatcatattagaatcccacaatgaaatcctccctgattcttccttcccta

SEQ ID NO: 169293 - DNA, 201 bp, Homo sapiens
tgtttggtgctctgaaagcaatgcttcgaaaaatttttattaaaaacagagtatttgctaattttcacttcacatatttctttcagctcattgggcggccmgcccttccctcctactgggcgcttggatttcacctcagtcgttacgaatatggaaccttagacaacatgagggaagtcgtggagagaaatcgcgcagcac

SEQ ID NO: 169294 - DNA, 201 bp, Homo sapiens
acacgtctccatctgcgtagcctcctttttagctcagatccttttcctaatccagctccgcaaatgcagctctaaacccaccctttcctgtcagctctccygtgagcgtgtatggattcacagtcttggactaactaactcactctggcatttggttagaagcatctcatgggctgtctcttcttccaaaagtactgttta

SEQ ID NO: 169295 - DNA, 201 bp, Homo sapiens
tagtactaggaaattatatactggatctggaagaggcagaaaggaggaagcgatcattctacatagatctgaagtttttctagaatgatagatgaggtgayacctgagatgaattttaggagatagctaagtttgtcagacaaactgtcagggagagtatggacttcctggaagagagcatggattataggcaggtgggga

SEQ ID NO: 169296 - DNA, 201 bp, Homo sapiens
ctgataaagggaatctaaaaatgatctacagttaactatacccagggatgaaatagtgaatattttcttcctaaaaacaggaacaaggccggaatgtgtamtcacattaaatctaatcagcactacactggagatcctagccagtgaaataaattttaaaaaaataaataaagggcatacatatggagaaagaagaaataa

SEQ ID NO: 169297 - DNA, 201 bp, Homo sapiens
caatcatggtggaaggcaaaggagaagcaaggaccttcttcacagggtggcaggacagagtgagtgcaagcagagggaatgccagatgcttttaaaaccaygagatgtcataagactcactcactatcatgagaacagcatgggagaaacctgccctcatgatccaattacctgcacctagtcctgcccttgatacatggg

SEQ ID NO: 169298 - DNA, 201 bp, Homo sapiens
aaatacttttgtataactgttgagatgcagtaggtttttgtatgacacggacataataggtagagaagacagtttagttccattcaggatggaagacatamatgagcaggttgtgatcaaggaagtacttagggtatctggtcagagcagagttggagctgagatgtccagtgaattgagagacaacagtgcgtgctgggg

SEQ ID NO: 169299 - DNA, 201 bp, Homo sapiens
agaacaaattctgtttattaaaaaatacataacagatataaaccaattacaagagataaatcttacttgcatcctcaggagagcagaacaaattataaaartttatcagacaatgaaagaaattttaaaattcactagatatttgatgacagtaaattattataaacatatattaggtatgataatattttgccttttgca

SEQ ID NO: 169300 - DNA, 201 bp, Homo sapiens
tggatagtcctctgtgtttttgaaaaatctcattgaacctgatttatctggtcacaaggtaattacttctagaccctagattgctgtccagaaggatccayatatttattggacaataaatatggccaattatgccagctatgttaggaagtatgggaatcaggagacttggttattattatttagaaagtttttaacaga

SEQ ID NO: 169301 - DNA, 201 bp, Homo sapiens
ttttgcacagaaaagcttggggttaacgcctgtgtcgtcatttcatctcccaaccttatttaaaagcacgacacctgctcaggcagtatttaagtgaatarcaccattaaataaatcaacctttatttaaatttaatcataaacctgtcaagttaaatataccttgcaaacaaagtggatcaagtagaataaaacaaacta

SEQ ID NO: 169302 - DNA, 201 bp, Homo sapiens
gcttcataatacttggaaatgaagagaaaatttttgataaaattccatttggtggcctctagaattttgctctgtgcctaggagtcactagtggggccatsatggcgagcggggagcttaggctccacagggccacgtggaatcagggagaggcatggagcagttcagggggctaaccattcacagcctgggttgcatggt

SEQ ID NO: 169303 - DNA, 201 bp, Homo sapiens
accaccatacccggctaatttttgtatttttagtagagatggggtttcaccacgttggtcaggctggtctcgaattcctgaccttgtgatccacctgcctyggcctcccaaagtgctgggattacaggtgtgaaccactgcacccagccccgtgtatcataatttttatgtagctattatttgagaatttgcagagtcaac

SEQ ID NO: 169304 - DNA, 201 bp, Homo sapiens
gaggtggaggttaccgtgagccaagatcacactactgcactccagtctgggcgacagagtgagaccctgtctggaaaaaaaaaaaaaaaaatctgcatttractaaaatgcccatgtagtttgcagatacaccaaattttgagaaacacttttccagagcaatagttatcaaatgtgactacatgttgaagttacctgggg

SEQ ID NO: 169305 - DNA, 201 bp, Homo sapiens
tggaagtgggtaagctggatagcactcaggaacagcagtccatgcaggaaaagccggctgatgctgagacacagcagcacacaatcactgttgctcagtgsctgcctcttcactacatcccaaaaattcaccaagaaaacgaaggcattggtcagaaaccccactgcaaactccaggactgaaatgaacagaaatgtactc

SEQ ID NO: 169306 - DNA, 201 bp, Homo sapiens
tttcacggggagaggggaggcccgcgtggctggcttgtagccacaggtgaggctggagggcgacttcttccactaccgtgtgattacaatataaagtaacyagtgattggctatctcccattcttcccccgtgattggctatctcctgttctccccctgccggaattcctaggacagcgagacaggtgggaaacaacagac

SEQ ID NO: 169307 - DNA, 201 bp, Homo sapiens
atccaggctggagtgcagtggcgcaatcttggctcactgcaacctctgcgtcctgggttcaagtgattctctgcctcagccatctgagtagctgggattayaggcatgcactaccacatccagctaatttttgtatttttagtagaggcagggttttaccatgttggccaggctggtctcaaactcctgaccttgggtgat

SEQ ID NO: 169308 - DNA, 201 bp, Homo sapiens
tagaacttaacaaaattgacttgagaaatagaagttttgaagtgccctagctaaaagatggccctatgattttggaataattgtaaagcataagctgccaraaaatatcatttgaaagcagcaatttctgtgataagattaaatttgaaatcacttttgaggatcaatagtctttgaattcaggaaatattttgaattaca

SEQ ID NO: 169309 - DNA, 201 bp, Homo sapiens
tatagaccccatcttttaaaaatgtgtctttatgaccctgaatgtcctgtcaattagttgcatgattaagactgatttcctaaaccaaccccacagtgtgrtgctgagacttcttagttgtaaattttggtttttaattctctttctgcagaacggaactaatttgtatggtgcgcagacattcttcttgtgccttgaaga

SEQ ID NO: 169310 - DNA, 201 bp, Homo sapiens
ggggaatcgctagaacccgggaggcagaggtggcagtgagcagagatcgcgccatagtactccagcctgggtgacagagcaaggcaaaactccctcaaaamaacaacaacaacaaaaaaccccacatacccaagattgggtaatttataaaggaaagatgtttaatggaatcagtttcacagttccacatggctagggaag

SEQ ID NO: 169311 - DNA, 201 bp, Homo sapiens
ctactcaggaggctgaggcaggaaatcgcttgtagtgagctgagatcgcaccactgcactccaacctgggcgaaagagcaaaactccatctcaaaaaattaaaaaaaaatatatatatataacgtaatatttcaggtatacataaaagtataaatgataatataataataataaacacctatctcctaacctaagagctga

SEQ ID NO: 169312 - DNA, 201 bp, Homo sapiens
aggctgaggcaggaaatcgcttgtagtgagctgagatcgcaccactgcactccaacctgggcgaaagagcaaaactccatctcaaaaaattaaaaaaaaawatatatatataacgtaatatttcaggtatacataaaagtataaatgataatataataataataaacacctatctcctaacctaagagctgaaccattaca

SEQ ID NO: 169313 - DNA, 201 bp, Homo sapiens
gtgttttcaccacaaaaatatggtatgtatgtgaggtaatgcttatgttaattagctcgatttagccattccacaacatgtgcctatttcaaaacaacatrttgtatatgataaatatatacaatttttatttttcaatcaaaaaataaagcaaaaatgattacattgcattgtgggatttacaatagatgtgtatgtaaa

SEQ ID NO: 169314 - DNA, 201 bp, Homo sapiens
aataaaaatgaaaatgtaacatatcaaaatttgtgtgatgcagcaaagaagtgttgagcaggaaacttaaagcttaaatgtttatattagaacaaaaaaakgttaaaatattgatcaaattctctgccttaagaagctaaaacaggaagagaaattaaaccaaagaaagaagaaaagaaataataaataataaaacataaa

SEQ ID NO: 169315 - DNA, 201 bp, Homo sapiens
cctcccctctcctcacaccccacgacaggccctggtgtgtgatgttccctgcctggtgtccaagtgctctcattattcaattcccacctatgagtgagaayatgtggtgtttggttttctgtctttgcgatagcttgctcagaatgatggtttccagcttcatccatgtccctacaaaggacatgaactctcatccttttt

SEQ ID NO: 169316 - DNA, 201 bp, Homo sapiens
actttattcagaatccatgttggggtgtttttttagcagtaggagttaattgccattcacttgaatgctccactgtaagtgatattcagactcttgttagaaaagaaggcctttgatggtttagatggtatagtgccaagagtcccaggaattcccaaatccagctctgccatttattcctgttacctgagaagaacagtg

SEQ ID NO: 169317 - DNA, 201 bp, Homo sapiens
ccaatatgaaacttacaccttgggaccagaatgcgcaagagtggagagagggagagaagaaatgggagcgggagagacacacacacacatacacacacacagagagagagagagagagagagagagagagagagagagattacttacccacttatttggagaaagagagaaagaggagataacttgcctgcatgaaggatc

SEQ ID NO: 169318 - DNA, 201 bp, Homo sapiens
catgctaagtgaaataaacagaaggacaatatcccacaaatgtaaggtacctaaaatagtccaactcataagagcagaaaatagaatggtttttccagggraaaatggggagttgctgttcaatgggtataaagttttaataatacaagagagtagcttctagagatctgatgtataacattgtgcctatagttaacaata

SEQ ID NO: 169319 - DNA, 201 bp, Homo sapiens
tgcaaaagtccctgctttcattccaagatgattcagaagtggataagaaaaaacatcttgcttgataaaattcccagtctttggggcagactgaagaggtscaagaaaggagagtacgagtttactggtttgggttatgaatcctgcaactaagtcatgaaacagtgatacatatttttgctttgttttaacaattatatt

SEQ ID NO: 169320 - DNA, 201 bp, Homo sapiens
cccagcaatctcaggtttggtcttttgaagcaaaccaagatccccaggaaactgtggcatgttcacgtacttgccattgaacacagagttgttgatccaaygccaccttttctcttcacgatggtaaattaagccaataaaatacttctcagcatcagttatgtcctgaagaaacttctggaaataaaaaaaaaattttac

SEQ ID NO: 169321 - DNA, 201 bp, Homo sapiens
attttgtctcttaggcttccctggctcccagtaagtatgccatttgttaccttcttcctttgtcagtgattgtaataagaaattatgtaatcatcatagtrtgtgttgagaaatgcctgctgttcctcctatatttattctatggtgacctctctgtcatggaaatccttatcacatatactgctgttcccttgatgctca

SEQ ID NO: 169322 - DNA, 201 bp, Homo sapiens
gtggtctaatgggatgcctggtaagaggaaagggtctatcctctctagtctagacgtttgactttcttcagaagaattccacagaaaaatgacaccagaayacaataatctatcactatattctgggttactcaacctaaatagcattgtttttatttattcatttagttttttgagacagtctcactctgtcatccaggc

SEQ ID NO: 169323 - DNA, 201 bp, Homo sapiens
gaatctgccttgtggtcggctcttaccttcaggctgctctgagcccagagcagaatggtcatcacagctctcctcaacttggcattgcctgagatcaggayggctgcatgcccagagggacaagctgccattatcccaacacaaaccatcacccctattttgtcgcgccacagaatcagtaggggcacagagatgaaggca

SEQ ID NO: 169324 - DNA, 201 bp, Homo sapiens
ggctgcatgcccagagggacaagctgccattatcccaacacaaaccatcacccctattttgtcgcgccacagaatcagtaggggcacagagatgaaggcarcacaggatgatatcacaaagaagcagaaaaaggagacaagagacttgagggctttaatgtgggcctccaggctggggtcacgagagtttctggtatagac

SEQ ID NO: 169325 - DNA, 201 bp, Homo sapiens
gagaaatgcctgctgttcctcctatatttattctatggtgacctctctgtcatggaaatccttatcacatatactgctgttcccttgatgctcaggggttsttactttccatgattcaaacaatacctttaatgacatgtgctgtccaactctatatgaacttttttgggggtacacaaaatttgcattactgggagtgat

SEQ ID NO: 169326 - DNA, 201 bp, Homo sapiens
gagaggaaagggggcatagctggtttggattattattatgtttattttttaattagtataagttctggggtacatgtgcagaacatgcaggcttgttacayaggcatacacctgccatggtggttcgctgcacccatcaacccgttatctatattaggtatttctcctaatggtctccttccccttgccccctaccccctg

SEQ ID NO: 169327 - DNA, 201 bp, Homo sapiens
ctgagctgggctttgagccagtggaattagggggcacctactgagataccagccagggtggccaagggaatgcttgtgccattgctctcccaaccccaagmagcacaacttgcagctccaaaagagaccctttctttctgcttgaggagaggagagggaagagtaaagagtactttgtcttgcatcttggatgcaagccac

SEQ ID NO: 169328 - DNA, 201 bp, Homo sapiens
attattttatgaaaatatcagcttgcagtgaaatggaaattaaacaaaataaagatctgattctccaccacagatatccgagaagcactctaaatgatctaacatgattctaggacatctaagagatgaatctaagacgattctaatagaatcttagatggtcctaaggtacttaaaataccaaataacctaagaatagac

SEQ ID NO: 169329 - DNA, 201 bp, Homo sapiens
agaagtaaaggtcagctcttggggtccaagattctaggccttgactcttggatagcatttctggacctgccctgagccagataggagcccacagacataargggtaggttctaggcctggcagcattcgtgacaagctgaccaaacagcccctgtgccttaaacaaaaatcagtggtagtctggcagtgaccctgtgggcc

SEQ ID NO: 169330 - DNA, 201 bp, Homo sapiens
ctagaggtactccttggagcagatttatgacaattgctttttattgagttcttttgggaggctctgattttagcacatcagggatttcagtaacttaaatkcctttggtccaaaataatttttttatgtcacagtggcttattctggaccccttcataagcctggctgctttttccccagaacctggggcctggcacaaga

SEQ ID NO: 169331 - DNA, 201 bp, Homo sapiens
gacactaagacactccagtcagtattattaaaatctgtcacagaaaaaatgccttggctgccatgtgctgtgagggtggacttggatggtcagggttttcmcttggtattcaaaatgtgaggcactagggtcaccttgttaatgttcacatggttagtgatcctgtgttattttaaaacttgtagttactattcaagaatc

SEQ ID NO: 169332 - DNA, 201 bp, Homo sapiens
cctaatatatatatatatatattttttttttttttttgagaaggagcctcactctgtcatgcaggctggagctgtggtgcgatctcagctcactgcaaccyccacctctggggttgaagcaattctcctgcctacaaagtagctgggattacaggcatgcaccaccatacccggctaatttttgtatttttagtagagatg

SEQ ID NO: 169333 - DNA, 201 bp, Homo sapiens
tgcaagtgtgacccacaaaatctgctgttacaaatttgagatattaaagaacagatttcatatatgcaatggaaacttgctgtatagcatttttatgttayaagaaggtgagagaatataaaggtgccccaaacatggccctaccctcaaacatttatgaaggggctggaaaaatagactaacattctaacattaatgaat

SEQ ID NO: 169334 - DNA, 201 bp, Homo sapiens
cccttccctcctactgggcgcttggatttcacctcagtcgttacgaatatggaaccttagacaacatgagggaagtcgtggagagaaatcgcgcagcacakctcccttatgtaagcaaggttttcaacagttctccaaaagtaaagaaattcccttgaagaaaaagaaaaactgtttatattttctctccctgagtttaat

SEQ ID NO: 169335 - DNA, 201 bp, Homo sapiens
gatccccaggctccctacctatgttttaacagatattttaaagaggaattgaggaagtggagtagttctagaccccatgaatttagttcaaactaattatrttgctagaacaaccatgagccatctgggttagcatcattttttttcacagatagtaaattgaggctgtcaggggaaatactatgaccaagaccacatagg

SEQ ID NO: 169336 - DNA, 201 bp, Homo sapiens
taatggaattgagattcaaaaagcctaggaacactgaggagatgggggaagcagaaagtcagggcagataaagacgtttgggtggatgaattcactctcartttggctgcgagtcccactactcattctccagcatgacgtgtctttatgcatgtgggggtgggttgggggagggataacagaaaaagtggtaaaagcagg

SEQ ID NO: 169337 - DNA, 201 bp, Homo sapiens
taaacaactgactacactactttcaattggagtctctctgaaacttcatatcctagaaacaaaaagtagtggaaaaacctctgttcatgatattcaaactygttgctcaaagatctaaatggaaaataaaagacacaaaatagtgcagtaggaatccccaggtttataccaaactaaaccgtgtgtaaaatcaattactta

SEQ ID NO: 169338 - DNA, 201 bp, Homo sapiens
gggattttctccaacttatgattttcctgaatctggtggcctctgttggaatattttctattatcaagttaaggagctcacccttccctataatttactctgagatagtttccaccaatgtgttcttctccgtcttcagccctgtagtcagtagatcccagtggcaatgaattgccataggggaagagaagatgtatcaga

SEQ ID NO: 169339 - DNA, 201 bp, Homo sapiens
tcacccttccctataatttactctgagatagtttccaccaatgtgttcttctccgtcttcagccctgtagtcagtagatcccagtggcaatgaattgccayaggggaagagaagatgtatcagaatctcccaggattgatggtgggcatagggtattgatccataccttttcttaattgagagtcatcgattcaatcagtg

SEQ ID NO: 169340 - DNA, 201 bp, Homo sapiens
aacctgggcgaaagagcaaaactccatctcaaaaaattaaaaaaaaatatatatatataacgtaatatttcaggtatacataaaagtataaatgataatayaataataataaacacctatctcctaacctaagagctgaaccattacaaaataatggaatctctttttatactactcttccatcagcagtaaccacgttcc

SEQ ID NO: 169341 - DNA, 201 bp, Homo sapiens
caatatgaaacttacaccttgggaccagaatgcgcaagagtggagagagggagagaagaaatgggagcgggagagacacacacacacatacacacacacagagagagagagagagagagagagagagagagagagagattacttacccacttatttggagaaagagagaaagaggagataacttgcctgcatgaaggatct

SEQ ID NO: 169342 - DNA, 201 bp, Homo sapiens
accaaagagtacattgcaatatttcttgaggcattttattcctagatacgaatcaaggtaatgacacaacttttaagaatggtgattggcacatagaaggkttttgaatttatgatacaatttctgactttttttttttagtttggcttttgtttgaggtgagattcactgaggttagttacctccatgtctagttgaatt

SEQ ID NO: 169343 - DNA, 201 bp, Homo sapiens
aatatgaaacttacaccttgggaccagaatgcgcaagagtggagagagggagagaagaaatgggagcgggagagacacacacacacatacacacacacagrgagagagagagagagagagagagagagagagagagattacttacccacttatttggagaaagagagaaagaggagataacttgcctgcatgaaggatctt

SEQ ID NO: 169344 - DNA, 201 bp, Homo sapiens
tttgattactattaaattgggaataagcaaaatttgcctttctctttagagtggtcattttgccattgaagctgagcttcagtagacattttgtaatttgrcggaaagatagtccataaatatgatgtgtaaaagaaagtgcttaatggaattgagattcaaaaagcctaggaacactgaggagatgggggaagcagaaag

SEQ ID NO: 169345 - DNA, 201 bp, Homo sapiens
agatgtagatttggtcttttcacatagtcccatatttcttggaggctttgctcatttctctttattcttttttctctaaacttcccttctcacttcatttsattcatttcatcttccatcgctgataccctttcttccagttgatcacatcagctcctgaggcttctgcattcttcacgtagttcttgagccttggttttc

SEQ ID NO: 169346 - DNA, 201 bp, Homo sapiens
gggtggggacacagccaaaccataaatggtgaattggtataaatggtgaattgactattatacaggtgcatcgagcaaaaggttcattattttgtttggtsatggatagtgcatataattctgccaaagcaagatctctttatctgtttttatagtgttgtggcctataaaccaatggtttataaactcaaatacctataa

SEQ ID NO: 169347 - DNA, 201 bp, Homo sapiens
ttctcacttcatttcattcatttcatcttccatcgctgataccctttcttccagttgatcacatcagctcctgaggcttctgcattcttcacgtagttctkgagccttggttttcaggtccatcagctcctttaagcacttctctgtattggttattctagttatacattcttctaaaattttttcaaagttttcaacttc

SEQ ID NO: 169348 - DNA, 201 bp, Homo sapiens
atcttagtttttcttcaattgcatttctaattgagataggaagcttcaccatcaagagttctataatgcaggaagtaaggtcaatcagataatgctggagttttttttaaggtttaaggaaatctttctcttgtatagctagaaaatagatattattgttccatagagcaagtaaccatatttgaaaatatggagcaaaag

SEQ ID NO: 169349 - DNA, 201 bp, Homo sapiens
acttttaaaaactaatatagaagccaacatcaccctgataccaaagacaaagacacaacaaaagaataaaactacagaccaatatcccttattaacatagrttcaaaaattcttgacaaaatactaacaaactgaatccaacagcatgtggaaaagataataacaccatgattagtgagttttattacagatatgcaagga

SEQ ID NO: 169350 - DNA, 201 bp, Homo sapiens
aacacagagttgttgatccaacgccaccttttctcttcacgatggtaaattaagccaataaaatacttctcagcatcagttatgtcctgaagaaacttctrgaaataaaaaaaaaattttaccagtgagtcttttaatgatgcctctcttgagccaatgtgcccatgattatatctgatcctgggaataaggaaggccggt

SEQ ID NO: 169351 - DNA, 201 bp, Homo sapiens
tctaaacccttcaaaagactcctagatttaataaatgacttcagtaaagtttcaggacacaaaattaatgtacaaaaattagtagcatttccatacaccartaacaatcaggctgagaaccaaatcaagaactcaatcccatttacaataaaataaaataaaataaaatacctagtaatacatttgaccaaggaggtcaag

SEQ ID NO: 169352 - DNA, 201 bp, Homo sapiens
aagaatttatgaccaagtcctcaaaagaaaccacaacagaaacaaaatcagacaaaaggggacttaattaaactaaaaagcttctgcacagtaaaaaaatraaatagagtaaacagacaaccaacagaatgggttaaaatatttgcaaacagtgtatctgacaaagggctaagatccagaatctataaggaactcaacagg

SEQ ID NO: 169353 - DNA, 201 bp, Homo sapiens
cactaagtccagctcatcctcagagggtgaggtggtggggactcgccctacctcttgaagagaggagtatcaaataatttgttaaattaaaaacacctgcygtgtgatgattttaaataacattgaattatattttacttcacgtatttactgattgctgtctctatggatatttacacttttttgctattacgtgtaata

SEQ ID NO: 169354 - DNA, 201 bp, Homo sapiens
agataaaaataaaaaaaactttatttctcagtgtaaactccatcaagttcaagacacttttgtaaaagatgataccagccatttagtccatccataagaamtgagggtcctgggaatttaacctttgtaatgcagtcttttttacattattaactgaaaaaaatgaatgccctttatagatttttttttaagattaggaaa

SEQ ID NO: 169355 - DNA, 201 bp, Homo sapiens
aaggaagttgcttttcattccaagtttgctaaaaattttattatgatagctgatgaattcaaatgattatatggtatactttttaaaatgagttttttttwatgaatcacacaagtagattttctattattaaaggatctccttatttctggaggaaacaccacttggttattattcgtttaatatgtactgatttctgtt

SEQ ID NO: 169356 - DNA, 201 bp, Homo sapiens
cagttctccaaaagtaaagaaattcccttgaagaaaaagaaaaactgtttatattttctctccctgagtttaattgatttatttatttggtaatgaaaggmgttttagatattcagaatactagacatttttttttttgttggaccagtaattttttcaaggaaccattgttctttatagtatgaaatagattgggagacc

SEQ ID NO: 169357 - DNA, 201 bp, Homo sapiens
ggatcaagtagaataaaacaaactatgtaagaggctctagcaataacccattctttagatcttctctgacagttcatcttttttttttttttttcggtactgaaatttaatcttctatttaaatttcccattgagtctgagccaggccattctaagaatgatgcttttttttttcctggtccacaactaacttatgtgttt

SEQ ID NO: 169358 - DNA, 201 bp, Homo sapiens
agaacagagtcaagtgtcagcgtttgagctattccagggtgaacccagcaatctcaggtttggtcttttgaagcaaaccaagatccccaggaaactgtggbatgttcacgtacttgccattgaacacagagttgttgatccaacgccaccttttctcttcacgatggtaaattaagccaataaaatacttctcagcatcag

SEQ ID NO: 169359 - DNA, 201 bp, Homo sapiens
gggaagtcgtggagagaaatcgcgcagcacagctcccttatgtaagcaaggttttcaacagttctccaaaagtaaagaaattcccttgaagaaaaagaaamactgtttatattttctctccctgagtttaattgatttatttatttggtaatgaaaggagttttagatattcagaatactagacatttttttttttgttgg

SEQ ID NO: 169360 - DNA, 201 bp, Homo sapiens
gactgctgacctatggaataaaaacctctgaaggtgttcatgactgtgttctaacaagtcattcaggtgattctgacgcacactcatgtttgacaactacyggggcataagagagaaagattttccaggacttcagcaatgagccatacttcacagagattaaacatcacttgggtgctgaaactttattcagaatccatg

SEQ ID NO: 169361 - DNA, 201 bp, Homo sapiens
agagatctgatgtataacattgtgcctatagttaacaatactgtattgtgcacttaaaaatttgttaagaggggtagatttcatggtaagtcttcttaccrcaataaacaacaacaacaacagtaacaataaaggggcaggaataactccttaaaaatgattaatagggccgggttcagtggctcacgcctgtaatcccag

SEQ ID NO: 169362 - DNA, 201 bp, Homo sapiens
acttatttccaagttcatcaaattgtttactttaaatgtgtgcagttttctctatatcaaccattcctcaataaagctgttaaaaatttaaaaatctaccrtaagcaagacagtatgttttgggcaaaagaatagagaattagatcaatgaagcataacagagagcccagaaatagacccacacaaatatagtcaacgaat

SEQ ID NO: 169363 - DNA, 201 bp, Homo sapiens
gcacagtggctcacacttgtaatcccagcacttgggaagccaaggcaggcagatcacgaggtcaggagttcgagaccagcctggccaacacagtgaaaccmcgtctctactaaaaatacaacaacaacaaaaaaattagctgggcatggtggcaggtgcctgtaatcccagctattcgggaagctgagacatgagaatcac

SEQ ID NO: 169364 - DNA, 201 bp, Homo sapiens
aaaaaaaaaggactccatttaagattagaaatcccatttaatattagaaaactaggggaactagttttcaagcccagatctctaacatcatagaggtcatytctttttttatgccattttccttacttatagatagacatttcctttttaagtgatccaggaaatgaaagaattggactgttactgctgcctagtggtgtg

SEQ ID NO: 169365 - DNA, 201 bp, Homo sapiens
gaatgtcctgtcaattagttgcatgattaagactgatttcctaaaccaaccccacagtgtgatgctgagacttcttagttgtaaattttggtttttaattmtctttctgcagaacggaactaatttgtatggtgcgcagacattcttcttgtgccttgaagatgctagtggattgtcctttggggtgtttctgatgaacag

SEQ ID NO: 169366 - DNA, 201 bp, Homo sapiens
tatattaataacagaatcagaggggtcacagaagtcagaggatacaaaagaaaaaagaataagaaacaatgaagcacacttgtaaggtctaaaaaatagcytcaaaagggcaaatgtaagagttactggccttaaagaggaagtagagaaatagataggggtagaaagtttattccaagggataataacagagaacttccc

SEQ ID NO: 169367 - DNA, 201 bp, Homo sapiens
tggatactattgggagtgaaatttaacaagagatgcaaagggaaaagctcagtagtcttctagaataatcctcttctctcccccactctattccattggaracaaacctaggttgtagagaagggtacattttattctgggcttcactgtttatacaggtaaaattgggatagcataaacaacaaagatgtggggtagaag

SEQ ID NO: 169368 - DNA, 201 bp, Homo sapiens
taaagaggaagtagagaaatagataggggtagaaagtttattccaagggataataacagagaacttcccaaacctagggaaagatatcaatatccaagtayaagaaggttatagaacaccaagtagatttaagccaaagaagactaccttaaggcacttaataatcaaacccccaaagttcaaggataatgaaaggatcct

SEQ ID NO: 169369 - DNA, 201 bp, Homo sapiens
gaagggtacattttattctgggcttcactgtttatacaggtaaaattgggatagcataaacaacaaagatgtggggtagaagcgaagtaacaaaataaaaygtggggtagtaaaatgagggagatgtgggagagagacagtctcttcccttctttatcttgtgaatagggtgaaatttaggtcatttcttaggtggatatg

SEQ ID NO: 169370 - DNA, 201 bp, Homo sapiens
tttgcttacttgtttgttaatgcaagcagagttaagttgttatcagcttacaataatgggctataagatagtatttgcaagcctcatagtaaccttgaatmaaaaaatatacagtagatatatgaaaaacaaaaagcaggaaattaaatcataccaccagagaaaatcaccttcactaaaaggaagacaggaaggaaagaa

SEQ ID NO: 169371 - DNA, 201 bp, Homo sapiens
tctaagagaactgtagaaaattcaaacaatacagagagttaaaaagataaaagcaaaaatcctcttaaattatagcaactaaagacatttattatcgataygttggaatgcatctttctagacctttatgtgctctctctctccttttctctccacatatatgtttatatgtatttatatgtatatgtatttacagttata

SEQ ID NO: 169372 - DNA, 201 bp, Homo sapiens
gatagagctgtaagccattggatgacagccctttcgtgcttcttcgtagcagatttcacataagagaacactgtgtagctctggcacttggagggttcttyctctgtctgcagacacgggagctcaagccatacccagagacagtgtggacatggcaattcccggagagcagaccaggaggagagggaggtacctggagga

SEQ ID NO: 169373 - DNA, 201 bp, Homo sapiens
tgtgcagcttctagggaggcctcaggaagcttacagtcatggaggaaggtgaagaggagcagcgatgtcatatagcaaaagcaggaacaagacggggtggrgggagttgccacacacttttttttttttttttttttgagatggagtctcactctgtcacccaggctggagtgcagtggcacaatcccagctcactgcaac

SEQ ID NO: 169374 - DNA, 201 bp, Homo sapiens
actcttctccaataatcttgaactaaaatggtatttccaagaaaatgcattatgaccctctcaatatgccaccacatacctcctagggtatgtgtaccctsatctaaaaaaatagaactcaatggggatgccaaacaattgggagggactttgtggagatttggaggtcctacacttgcaggtggtggtaaaagccagaaa

SEQ ID NO: 169375 - DNA, 201 bp, Homo sapiens
agtgtcttcagtatctggcttgtctctatctctgaattctattcactactcctcttcgtgttggcgaaagagcctgtatagctattatataaaaagtaacrtatctttccatcctttatgtacattatccatcaattactctgggtgttcttaaaatattctgttatgtactatctcccttaattttaccttgtgattctt

SEQ ID NO: 169376 - DNA, 201 bp, Homo sapiens
aacgccaccttttctcttcacgatggtaaattaagccaataaaatacttctcagcatcagttatgtcctgaagaaacttctggaaataaaaaaaaaatttyaccagtgagtcttttaatgatgcctctcttgagccaatgtgcccatgattatatctgatcctgggaataaggaaggccggtagagaactctgggaccagc

SEQ ID NO: 169377 - DNA, 201 bp, Homo sapiens
acgtttgggacttgataaaagatagggagttgagaaaataggcagttctatattattttctattatttattttcacaatggttttgattttttctatatarcgttaacttctttgaaataattattcataaatatttaagatatacaaaaatatataaccattatccagcttaagaaataaaatattatcagcagagatga

SEQ ID NO: 169378 - DNA, 201 bp, Homo sapiens
aatgtgtttgacacaatgtgcaaagttgtacatttttcagcagttctgtaggtcgttatgttggaagggactttggcaaaatatggaatgttttcagtctstgtttttatattgttaggcatgattattatagtcttcttggtaatccagtatatgaaagcttgaaaaataatgacacgtttgggacttgataaaagatag

SEQ ID NO: 169379 - DNA, 201 bp, Homo sapiens
tctgggatcatgtccttttaaccagcttgcatttgtccttgcaactttgccctctttctttcctgaatgctgtagttgctgaagttttgattttctttttktttaaatcttagatctgctgtttcctaatgccctaatggtttatgcatttcaaggcgcctgtaatcttatcagtaaattattttcaccccatattgtgga

SEQ ID NO: 169380 - DNA, 201 bp, Homo sapiens
gttcttttgtgctgctataacataatgcccaagactgagtaatttatcaaacacagaaatttacttatcatagttatggatggagactagaaagaacaagrccaaggtgctggcatcttgtgaggaccttcttgctgcatcctcacatggcagcacgtagacagcaagagacagcccactgtctcctttataagggcacct

SEQ ID NO: 169381 - DNA, 201 bp, Homo sapiens
tgcgtatgatggggtatatatctgtcttttcccttcttttgagaaataaagatttttcatcaatccctttgacatgtatcctaatatatatatatatatattttttttttttttttgagaaggagcctcactctgtcatgcaggctggagctgtggtgcgatctcagctcactgcaacctccacctctggggttgaagcaa

SEQ ID NO: 169382 - DNA, 201 bp, Homo sapiens
aattattataaacatatattaggtatgataatattttgccttttgcaaaatttcttatcttttaaagaaacatactatttttagattaaaagacatgagayctgagatttgtttcaaagtaattcaggggtagggagaaaagtggaccagaataaggacagaatgaattggccatgagctgataattttttaatttagata

SEQ ID NO: 169383 - DNA, 201 bp, Homo sapiens
gcgtatgatggggtatatatctgtcttttcccttcttttgagaaataaagatttttcatcaatccctttgacatgtatcctaatatatatatatatatatwttttttttttttttgagaaggagcctcactctgtcatgcaggctggagctgtggtgcgatctcagctcactgcaacctccacctctggggttgaagcaat

SEQ ID NO: 169384 - DNA, 201 bp, Homo sapiens
cgtatgatggggtatatatctgtcttttcccttcttttgagaaataaagatttttcatcaatccctttgacatgtatcctaatatatatatatatatattwtttttttttttttgagaaggagcctcactctgtcatgcaggctggagctgtggtgcgatctcagctcactgcaacctccacctctggggttgaagcaatt

SEQ ID NO: 169385 - DNA, 201 bp, Homo sapiens
aaaagtaaatgatgttagaatccacagcttatagtggactagctgaaatttacacaatgctcttcccccatttactattcccagaattaagaacaaagaartgtagagagttaaagatgactaagttagacaatgcctttatccacgaatttattcattaaggacttaaacatttttttaaatgcatatttcttcgagtga

SEQ ID NO: 169386 - DNA, 201 bp, Homo sapiens
gctcctcaaagtgtggtccctgaatgggtcacagactgtttcaggtctatagtaagatgagtatagaaatggcgagtaagcaatgctgtagcctccacacrcacacatgaacctttttctagtaattaattttcatattattttatgaaaatatcagcttgcagtgaaatggaaattaaacaaaataaagatctgattctc

SEQ ID NO: 169387 - DNA, 201 bp, Homo sapiens
cctgttccatagctcctggtggtggtgaaaccatcgttacttttgttaaaaatctgtgggactgaaaagaaaatcagctgttggctcagccccaaatgtgmctgcatgatgaatatgacaaacaagtatcagcacaggggctgctagggtactgtgactattagtgggaaatactgaactctctgactcagtgaagatgca

SEQ ID NO: 169388 - DNA, 201 bp, Homo sapiens
aaaagaaagtgcttaatggaattgagattcaaaaagcctaggaacactgaggagatgggggaagcagaaagtcagggcagataaagacgtttgggtggatkaattcactctcaatttggctgcgagtcccactactcattctccagcatgacgtgtctttatgcatgtgggggtgggttgggggagggataacagaaaaag

SEQ ID NO: 169389 - DNA, 201 bp, Homo sapiens
catgagaatcacttgaaccctggaggtggaggttgcagtgagctgagatcgtgccactgtattccagcctgggcaacagagctagactcagtcttgagggaaaaaaaaaggactccatttaagattagaaatcccatttaatattagaaaactaggggaactagttttcaagcccagatctctaacatcatagaggtcatc

SEQ ID NO: 169390 - DNA, 201 bp, Homo sapiens
gaaagggtaagaaaactgtactgattcacacagcatattagaaacaaagtgaaaactcaaattcagtggcttgctaaattttcattgcctttttttttttwaaagcatgccactgctatctaataaagatcacatttatctaagcttgcaaggatccaggaactctcccaatgatgaacttaaaccaaatcccacatattc

SEQ ID NO: 169391 - DNA, 201 bp, Homo sapiens
ttgagggaaaaaaaaaggactccatttaagattagaaatcccatttaatattagaaaactaggggaactagttttcaagcccagatctctaacatcatagwggtcatctctttttttatgccattttccttacttatagatagacatttcctttttaagtgatccaggaaatgaaagaattggactgttactgctgcctag

SEQ ID NO: 169392 - DNA, 201 bp, Homo sapiens
aatgcctttatccacgaatttattcattaaggacttaaacatttttttaaatgcatatttcttcgagtgaccctggcatttattttaagtattgtgagcaycgcaccttcttaactaaaaaggatatgttcctgggtacctcggttgctgtgatcatattaggaatttctttgcaaagtactttcctttagtctatatttg

SEQ ID NO: 169393 - DNA, 201 bp, Homo sapiens
tggcttgctaaattttcattgccttttttttttttaaagcatgccactgctatctaataaagatcacatttatctaagcttgcaaggatccaggaactctyccaatgatgaacttaaaccaaatcccacatattccctatctactccccactcccaccccaggccattgggctccttttagaacctgcacagaagtgtctc

SEQ ID NO: 169394 - DNA, 201 bp, Homo sapiens
aatttcctcctctctgtagggaagcccagttacaggctgggggactgacttgacctctgtctgaatcactatttttgtataaacactgggaagattattgrtgttctcaccaatcctcatctccatggaacaattcacaggagacagctcttgggggtcagaagttcatagctttaagacatagacaagttgcttataata

SEQ ID NO: 169395 - DNA, 201 bp, Homo sapiens
gaataaggaaggccggtagagaactctgggaccagctatagctgggactcacaactaaccctaaagaagtcattgtcaagattcagagggaatttggaaarcctgaggtcttgttaaaacacagactgctgggctcctggttaagtaggtctagtgaagggaaccaataatttacttttctacaaaatgcccaggtgatac

SEQ ID NO: 169396 - DNA, 201 bp, Homo sapiens
taagccattataatttaaaacttataaaaaatagataaatagctatataaatagaacttaacaaaattgacttgagaaatagaagttttgaagtgccctarctaaaagatggccctatgattttggaataattgtaaagcataagctgccagaaaatatcatttgaaagcagcaatttctgtgataagattaaatttgaaa

SEQ ID NO: 169397 - DNA, 201 bp, Homo sapiens
aatctttgtcaataacccaatgacattattcacagaaacagaaaaaattatcgtaaaatgtacatggaaccacagaagacccagactgtccaaagctatcytaagcaaaaaaataacaaaactggaggaatcacattacctgatttcaaattatactacagagctttagttaccaaaatgccatggtactgtcataacaac

SEQ ID NO: 169398 - DNA, 201 bp, Homo sapiens
aaaaaatgtttgaaaaccacccatttgacaaggtattaataaccagaatatataaggagcccaaacaactgtataggaaaaaaaatctaataatctagttwaaaatgggcaaaagatctgaatagacatttctccaaagaagttgtacaaatggcaaatagaaatataaaaaggtgctcaacaccattcctcattatagaa

SEQ ID NO: 169399 - DNA, 201 bp, Homo sapiens
aactactccaagtggatagcattctaatagtaagggagcagtgtgactgtttacaggatgcccacaaaagtgcctgcccagggggctgtcatttcggattktgatagtcaaggagcagaaaatgtgcaacttaggctctcactgattgatcctgcttttgtttcaggaatcctggatgggtacctgttctgcaagactctc

SEQ ID NO: 169400 - DNA, 201 bp, Homo sapiens
catcagttaatagccattatatggtgctaggaagagcagtgagcccagataaaaacttaaagtcttaaaagacttaagtttatgtttggcaccttgaaatrataatgtagccattggtcaagtgaaaggatgtaaggggagccaggttattgagttactcagtcctggctttgcttctggaaagctctttgacttgatcag

SEQ ID NO: 169401 - DNA, 201 bp, Homo sapiens
atacttttaaatcctttgatttttcagggctataaagcactgtgtaaacatgggagggcaggttacgtgcttaaagataaacccgcatgccctaagtaaaygttgcagagtaattaagctgagagaaattcacagttgatttccaaggataacaataacataagtggtaatctcaataatttgagaggttaccatatttct

SEQ ID NO: 169402 - DNA, 201 bp, Homo sapiens
ccagatatccagcttaggaaagaaatgatagttaatacttttaaatcctttgatttttcagggctataaagcactgtgtaaacatgggagggcaggttacrtgcttaaagataaacccgcatgccctaagtaaacgttgcagagtaattaagctgagagaaattcacagttgatttccaaggataacaataacataagtgg

SEQ ID NO: 169403 - DNA, 201 bp, Homo sapiens
accacttaacttagctcagtttggagaattcagattgaacctcaggcctgaatgaatcttcttacttccaagtgtctgcctctaatcacgtgagagctccrgtgggaggatgtgtgtgggtcagcagaattcatttatatatcagagaaactactccaagtggatagcattctaatagtaagggagcagtgtgactgttta

SEQ ID NO: 169404 - DNA, 201 bp, Homo sapiens
tggcggtcgccacagcagagtaaggccactatggctatgacctgctaattattgaatataaagaatatatatatgtttttaattcttggagattatggggmtaatgcataaaatttcttaagacaaaacaaagcaaaacaaaacatttaatgatacagaatgctcccaacagggactctaattgtaccgaaagagagttgg

SEQ ID NO: 169405 - DNA, 201 bp, Homo sapiens
taccgtaagcaagacagtatgttttgggcaaaagaatagagaattagatcaatgaagcataacagagagcccagaaatagacccacacaaatatagtcaaygaatctttaataaaagaagaaaggcaatccaatgagaaaggataatcttttcgacaaatgttgctggaatgactggaaatccaaaccaaacagacaaaca

SEQ ID NO: 169406 - DNA, 201 bp, Homo sapiens
tgcctttatccacgaatttattcattaaggacttaaacatttttttaaatgcatatttcttcgagtgaccctggcatttattttaagtattgtgagcaccrcaccttcttaactaaaaaggatatgttcctgggtacctcggttgctgtgatcatattaggaatttctttgcaaagtactttcctttagtctatatttgtt

SEQ ID NO: 169407 - DNA, 201 bp, Homo sapiens
atccttgccaagagatctgctgaaccaacctcttacctggtcttcacttactctaatttgcactatcatgtgcaattaaccagaatctgtgctgtatcatygaaatgcccaacggcctcagcctgttatttactgttgcattcaaggaaatggtgtgtctgtaaaggtctttcatcaaacttctgtacgctttatctacat

SEQ ID NO: 169408 - DNA, 201 bp, Homo sapiens
actctattgccctacctatacaccctcttcttccgtgctcacagccgaggggacacggtggccaggccccttttgcatgagtaagttcacctaacctcctyaaattttattaatgcatctggaatgacattgactatatcatcaaatatcagagtgaaaactgaaacaattcaggcagttattcatatctatctgtatcta

SEQ ID NO: 169409 - DNA, 201 bp, Homo sapiens
ccagtttcttgatagtcagctgaagttatgaaatgtattgattatttaagtttttaattttaaatttttgttggtacatagtagttgcatatatttatggkgtatatgagatgttttgatataagtgtgcgatgtgaaataagaacattatgggaatgaggtatccatcccctcgagcatttatcctttgagttataaaga

SEQ ID NO: 169410 - DNA, 201 bp, Homo sapiens
actatagtcaccctattttgctatcaaaaggtaggttttattcattctttctaactatttttttttgtatctgttaaccatcttgacctccctcccagccyctcactacccttcccagcctctggtaaccgtccttctactctctgtgtccataagttcttggcttttagatcccacaaataggtgaaaacatgtgatgtt

SEQ ID NO: 169411 - DNA, 201 bp, Homo sapiens
gttctggatgaagtaagtgttcccacagagatacactagagatctctgcatctgtatctgctgccctgcaaactcctctctgcttcttattccaaactcayttctgacatctgtgactgagtcagccttgaagagagtgtgctaggttttgagaagctagacatctggtaactacacatttttctttctagaatttctttt

SEQ ID NO: 169412 - DNA, 201 bp, Homo sapiens
gcttgatccagaggtggggtcacaatggttagggtaagggtggtggctggggatggagaaaaggatttttttttttttttgagacagaatctcactctgtygcccaggctggagtagtacaatggcacaatctcggctcactgcaccctccgcctcccaggttcaagcaattctcctgcctcagcctcctgagtagctggg

SEQ ID NO: 169413 - DNA, 201 bp, Homo sapiens
taatatatattatgtatacatacaatatgtaatatatattatatatacatacaatatgtaatatatattatatatacatacaatatgtaatatatattatrtatacatataatatgtaatataatattatattacatataatatataatataatatataatatagaaatttatatgtgtaattatatatttatttttatat

SEQ ID NO: 169414 - DNA, 201 bp, Homo sapiens
aatactgttagtatttcaagaacagttgtatactctgtgcttgaaaattttattatctgaaatgtttaggggagtctaagtctattgttagttaactttgytgactttctttcatgttgacttattaccttgtgtgcttggtgatcttattttttttaagctgtgataatcttataactgtgggtctcattcctccagaga

SEQ ID NO: 169415 - DNA, 201 bp, Homo sapiens
gagaaaatggaatttttgtagactgttggtgagaatgtaaattgttacaaccgttatggaaaatagtatgcatgttcctcaaaaaattaacagaacttccwtacaatcccatgaaatcccacttctgggtgtatatccagaggacatgaaaccagtatctttaagagatacagtcactcccacgttcattacagcattatg

SEQ ID NO: 169416 - DNA, 201 bp, Homo sapiens
tatcttaagacattttcccttgctacctgggtacttagccctagagggtttgtagcatccagatcccttggtcatctattaccaagattcagaaaggagawgttcttacaaattcttctaaatcacaggaggactttctagaggaggaataaagggatagaagcgagagaagcaagagtatagtgtatgtagcacagatta

SEQ ID NO: 169417 - DNA, 201 bp, Homo sapiens
ttggggaagtgagagggctggggaaaaaaatgaggtggccagagctagaatgagttgggtatttttcttcttattcccttctctgcctatcagtgttcccrtctttctagctggtttcacttgcttttcccaaaaatagaataattatgatgagacccaggaacagcaaagttggaaagtggggaatagcctgacattatt

SEQ ID NO: 169418 - DNA, 201 bp, Homo sapiens
agctgaaagaggcactgcagagggtaggaaagatagtcttgaattgctgacaccacccccaccctatccctgctgcagtgacagcatggcatggtaaagtstatgtgcatgggagagggagtgtgcagggattgtgagactttacattggactcagtgctgccctgtcacagtggagggcaaaacggaccaaactcagctg

SEQ ID NO: 169419 - DNA, 201 bp, Homo sapiens
tttacatcttcttttaaaaagtaacattgttttgaaatatgtcgattaaaattaagttacgttatgtttgtggcatttctttttgtacaggtgaagtagahtacgtgtctttaaactattaatacaaaatttactaacatttattgaatgcctaccaagtgctagttattcttctttgcaatggagaaaagaagatatagt

SEQ ID NO: 169420 - DNA, 201 bp, Homo sapiens
tatccaagaccaaccaggtgggtacctctacgagtctgcaagacccacagcattactgggcttgggatgtcccccatgcagatagagcttaggtcacagcrcccaagtccttttgaatacctggaaagccttcccaagaaggatgggtataaacccagaccatgaagactacaataaatacctaaatcttctatgcccaga

SEQ ID NO: 169421 - DNA, 201 bp, Homo sapiens
atatgtatacaaagagaaatttctttctcagttaaatcctgttacattatacttcagctcttaccatggccttgtcattgggttgaactggagctgtattytagattttgccaacaataacaagcgctgccaagtacttcagctgagatcacccaaataatactctactagcaaaagctttgcgtggcgttctaaccatca

SEQ ID NO: 169422 - DNA, 201 bp, Homo sapiens
cagaataattttaggggatagtctgaggatgtgtgtaaaatattgggatgcatttatgagttggtgtgcattggtgggtaggagaggtttcctgtggaatstgggaggaggtcataaagagaaaggtagggtatctgtcctggcagtcatgtgtggagtagaatgggagtgctcgtgggaagaggagaaggtgataaattg

SEQ ID NO: 169423 - DNA, 201 bp, Homo sapiens
tgccacgctgtcttccacaatgcttgaactaatttacactcccaacagtgtaaaagcgttcatatgtatatagtaataattcttatatttcagtaagattwttttctgaccaacctaattaaaattgccacccttaccccaacattcctcatttaccccccactttttctccatatacttatacagtataacccagtgtat

SEQ ID NO: 169424 - DNA, 201 bp, Homo sapiens
tcactcattccctactccaggcctcagccttgccctatttgtggcctcctaaattctgtctaataattaaaccctctcctgtattttgagaacccttatcyttgaaatgacccttgttcccaaggaccttagtctgtagccttcaccatactgacttaagttgtcagaagcctcagtcttccaaataccaggggtaggtga

SEQ ID NO: 169425 - DNA, 201 bp, Homo sapiens
ccatgagccatctgggttagcatcattttttttcacagatagtaaattgaggctgtcaggggaaatactatgaccaagaccacataggtaattgatgacaraacaaatactgcatgtgactacatggatgtgaaaaataatacaagtttcaggtccatgtgtttttacattgatattttgattactattaaattgggaata

SEQ ID NO: 169426 - DNA, 201 bp, Homo sapiens
aggctggagtagtacaatggcacaatctcggctcactgcaccctccgcctcccaggttcaagcaattctcctgcctcagcctcctgagtagctgggattayaggcacgcgctaccatgcccagctaatttttgtatttttagtagagacggggtttcactatgttggtcaggctgatctcaaactcctgacctcatgatcc

SEQ ID NO: 169427 - DNA, 201 bp, Homo sapiens
ccatgcatgccagttttcctttctttcctcttttagctgtaaattctttgattctatgatgccaaagaaacacggtaagtcagtgttaccacggtggttgktgttcactgatggttcatgaaatcagaaaagtaaggataaggaagtaaactttcaaagagataaattgattcaattttgattatctgtctatgtctactg

SEQ ID NO: 169428 - DNA, 201 bp, Homo sapiens
ggtttgtaaagggtactttggtgggcatggggctggggaacttgtataattgattggcagggaatgaaatcacaggagcacctaaaactgtctttgtgcarctgagtcagttcccaggaggggtgtgtgtgttggcctcaagactaggtggtgtctgttggtctactgaaatgctaacaaatatctaaaagaccagttatt

SEQ ID NO: 169429 - DNA, 201 bp, Homo sapiens
acccagtctcaggcatgtctttatagaagtgtgaaaacagaccaatacagtgatgttatctttggtagttggggaagttatgaattttgtgacactggttrtgtgactggggcagtaagcaacttatagaaaaacaaactaagccatggcaggacattgtttatgcctattctttagcaaagtctaagcccctaccataat

SEQ ID NO: 169430 - DNA, 201 bp, Homo sapiens
attttgtatgactagcacaaataagaattggtatttgaaaaaggccagtttggataggaaacttgtggtcaggttttggaggtcttagttaccaacttgawttaattctcaagcagtctcatattgatccttgaatgaaggctgtgctactgtgtgtgagcattgttgggagtgggagtgggggctggggactagtagaac

SEQ ID NO: 169431 - DNA, 201 bp, Homo sapiens
tgaaaattaatctccacacaaaaactactacgtgaatatttatagcagctctattcataatcgtcccaagtcagaggcaatcaagatgtccattatggtcrgatttttgtgcctctaaattcatcccttgtagacttaacccacagtaccttagaatgtgaacttatttggaaataaggttgttgcaggtgttattaggta

SEQ ID NO: 169432 - DNA, 201 bp, Homo sapiens
aaaatgtgtctttatgaccctgaatgtcctgtcaattagttgcatgattaagactgatttcctaaaccaaccccacagtgtgatgctgagacttcttagtkgtaaattttggtttttaattctctttctgcagaacggaactaatttgtatggtgcgcagacattcttcttgtgccttgaagatgctagtggattgtcctt

SEQ ID NO: 169433 - DNA, 201 bp, Homo sapiens
agtccctttttgctattttgtcaacgacctatactctgtcagtgatgttcagtataattcccatggggccacagctgacatctccttaaagtcttccgttyatgccaatgccttcccctccacacccgtgaacccccttcgcctggatgtcacttaccataagaatgaaatgctgcagttcaaggtaaacacagtacatgt

SEQ ID NO: 169434 - DNA, 201 bp, Homo sapiens
gggaggaggtcataaagagaaaggtagggtatctgtcctggcagtcatgtgtggagtagaatgggagtgctcgtgggaagaggagaaggtgataaattgtwgttggcccttaaacttaaaaacttaaaataaaatacttaaaataaacttaaaataaaacttaaaataaaacttaaaaaaagttggatccttactagttgc

SEQ ID NO: 169435 - DNA, 201 bp, Homo sapiens
tttgtgcctctaaattcatcccttgtagacttaacccacagtaccttagaatgtgaacttatttggaaataaggttgttgcaggtgttattaggtagtatraggtcataatggagtagggtgggctcctaagcatatgactgatattcttatgaaaagaatgccacttgaagacatacacaggaaaaaatgacttgtgaac

SEQ ID NO: 169436 - DNA, 201 bp, Homo sapiens
ctgacatctccttaaagtcttccgtttatgccaatgccttcccctccacacccgtgaacccccttcgcctggatgtcacttaccataagaatgaaatgctrcagttcaaggtaaacacagtacatgtatcaggtagtgattagacccttttcagttccattaccttttattggtctggatcacagaaccctaaaataagtt

SEQ ID NO: 169437 - DNA, 201 bp, Homo sapiens
tagctagaaaatagatattattgttccatagagcaagtaaccatatttgaaaatatggagcaaaaggactattaataaacagcaaacatgtttttaaaaawatgctaatgatattttattaaaaagtcatatttacctatgcatattggttatctattgcagggtaacaaattaccttacaattttgtagtttaaaacaac

SEQ ID NO: 169438 - DNA, 201 bp, Homo sapiens
ttagttgcatgattaagactgatttcctaaaccaaccccacagtgtgatgctgagacttcttagttgtaaattttggtttttaattctctttctgcagaayggaactaatttgtatggtgcgcagacattcttcttgtgccttgaagatgctagtggattgtcctttggggtgtttctgatgaacagcaatgccatgggta

SEQ ID NO: 169439 - DNA, 201 bp, Homo sapiens
gtcagtggagggattaggtttggactagacagtggaatgcaggtggagaacagtggacccgtctgaggttgagaaagttgggttacaggatctagtgctcrattgcaagcaggtgacaatggagatggaacatcaagaatgatgaccgtgttggtatcttgcatcttaatatggatggtgctgacattaactcaaatagga

SEQ ID NO: 169440 - DNA, 201 bp, Homo sapiens
aacacactccacctataaagacacatgcagactaaaaatgaagggataaaaagagatattccatcccaatggaaaccgaaaaggagcaacagtagctatayttatttcagacaaaatagatcttgagacaaaaactgtaagaagacacaaagaaggtcactgtataatgataaaggggtcaattcagcaagagaatataac

SEQ ID NO: 169441 - DNA, 201 bp, Homo sapiens
cttatatttcagtaagatttttttctgaccaacctaattaaaattgccacccttaccccaacattcctcatttaccccccactttttctccatatacttayacagtataacccagtgtatatttatttattttgtttattgtctcttttttctattcatgggaacataagtctcatgacggcagggatttttatctgtttt

SEQ ID NO: 169442 - DNA, 201 bp, Homo sapiens
tcattccctactccaggcctcagccttgccctatttgtggcctcctaaattctgtctaataattaaaccctctcctgtattttgagaacccttatccttgraatgacccttgttcccaaggaccttagtctgtagccttcaccatactgacttaagttgtcagaagcctcagtcttccaaataccaggggtaggtgacaga

SEQ ID NO: 169443 - DNA, 201 bp, Homo sapiens
aaattagggagtcatgaattaagacctcacaggagaagaagggtgatgttctttttgagtaaagagagtatgatttacaaggcagcctgggaaagcaagcrttggtgggttggtggagaaagtaggccttgtataggcaagactgtagctatggctcctcttcctggctttctgcacctatgtcccaggcaatgcatgagt

SEQ ID NO: 169444 - DNA, 201 bp, Homo sapiens
ttattcattttacatcttcttttaaaaagtaacattgttttgaaatatgtcgattaaaattaagttacgttatgtttgtggcatttctttttgtacaggtraagtagattacgtgtctttaaactattaatacaaaatttactaacatttattgaatgcctaccaagtgctagttattcttctttgcaatggagaaaagaa

SEQ ID NO: 169445 - DNA, 201 bp, Homo sapiens
aaatacctcaacacagattcacccttcctctgtgtctaaatctccttgaaatacagtgggaagagaaatgtagtaaaattttaacaaacattgaatctggrtaaaaggtagctggaagttatttgtactttccttacaacatttctgcaagtctgaaattatgtcaagttaaaaatgttaagaaatccagttgaagacact

SEQ ID NO: 169446 - DNA, 201 bp, Homo sapiens
cttttaaatcctttgatttttcagggctataaagcactgtgtaaacatgggagggcaggttacgtgcttaaagataaacccgcatgccctaagtaaacgtwgcagagtaattaagctgagagaaattcacagttgatttccaaggataacaataacataagtggtaatctcaataatttgagaggttaccatatttcttaa

SEQ ID NO: 169447 - DNA, 201 bp, Homo sapiens
gtattagtctgttcttacactgctatgaagaaatacccaagacttggtaatttattaagggaagaggtttaatcaactcagggttctgcattgctggggcgggggggggtctcaggaaacttacaatcatggtggaaggcaaaggagaagcaaggaccttcttcacagggtggcaggacagagtgagtgcaagcagaggga

SEQ ID NO: 169448 - DNA, 201 bp, Homo sapiens
tattagtctgttcttacactgctatgaagaaatacccaagacttggtaatttattaagggaagaggtttaatcaactcagggttctgcattgctggggcgggggggggtctcaggaaacttacaatcatggtggaaggcaaaggagaagcaaggaccttcttcacagggtggcaggacagagtgagtgcaagcagagggaa

SEQ ID NO: 169449 - DNA, 201 bp, Homo sapiens
aaccttgtatagagtcatggtgtggagcctagaagccggaggggaatattttctcaatctggaaatgtctttagtccttttgtgatcagaagcagtctcatttttttttttttttggctctttccatttcacaaggagcaaatcctcaggactaaatatgtgggagtcacagtggtgttactgaattttgtctcttaggct

SEQ ID NO: 169450 - DNA, 201 bp, Homo sapiens
gtatatggcacaatttatctaaatgtcagtttccttatttgtaaaatgaaattattcataccagagtctcaaattagatgtttcgtgctttataaatgatyatgttctacaactaaatggagcttctttgactaacctcttgtttcaggccacatgtgaccaacgtggctgttgctggaatccccagggagctgtaagtgt

SEQ ID NO: 169451 - DNA, 201 bp, Homo sapiens
aaaattagccaggcatggtggcgtgcgcctataatcccagctattccagaggctgaggcacgagaatcacttgaacctgggaggcagaggttgcagtgagyggagatcatgccactgcactccagcctaggtgacaaagagagactccatctcagaaaaaaaaaaaaagtgatgaataggtttattaccttaattgtggtg

SEQ ID NO: 169452 - DNA, 201 bp, Homo sapiens
gaggcaggagaatcgctagaatcctgggggtggaggtggaggttgcagggagccgagataatgccactgcactacagcctgggtaacagggtgagacgccrtctaaaataaaataaaataaaataaaataaaataaaataaaataaaataaaataaaataaaataaaataagataagataaaaataaaataaaataaaata

SEQ ID NO: 169453 - DNA, 201 bp, Homo sapiens
tggctgccatgtgctgtgagggtggacttggatggtcagggttttcacttggtattcaaaatgtgaggcactagggtcaccttgttaatgttcacatggtkagtgatcctgtgttattttaaaacttgtagttactattcaagaatcaattctgatttttattttcttcatttttaacctttcaagaggttgtccttcagc

SEQ ID NO: 169454 - DNA, 201 bp, Homo sapiens
gggaagctctgacaagtttttattttggctttccttctatttctatctctgcacagttgactgaccaaaccaataacaggtttgaagtgccccacgaacaygtgcagtccttcagtggaaatgctgctgcttctttgacctaccaagttgaaatctccagacagccatttagcatcaaagtgaccagaagaagcaacaatc

SEQ ID NO: 169455 - DNA, 201 bp, Homo sapiens
gcctgggtaacagggtgagacgccgtctaaaataaaataaaataaaataaaataaaataaaataaaataaaataaaataaaataaaataaaataagataarataaaaataaaataaaataaaataaaataaaataaaataaaataaaataacaacaagacaccactgcacacctagtaagtggctaaaatccaaaacacca

SEQ ID NO: 169456 - DNA, 201 bp, Homo sapiens
cagtcagagtggtaactggaatgcagaccatgtagagccttgtgagcctttttttttttccaggtatgcaaaaagataatattattttactatttttttcytttttttttttccttttttttttttttttttttattatactctaagttttagggtacatgtgcacattgtgcaggttagttacatatgtatacatgtgcc

SEQ ID NO: 169457 - DNA, 201 bp, Homo sapiens
taagttttggaaacctatctaaggatcagagtaggaaggttacagggaggtctgtaagcatgaagaagggggtgtttcaacaatattcctgaaggttgtgrgcccattattggtgaccagaacctttaccttctaaagtatacatttttttctggctttctttctctttcctctgtttgcacaatcatttttttctcttta

SEQ ID NO: 169458 - DNA, 201 bp, Homo sapiens
cacacagcatattagaaacaaagtgaaaactcaaattcagtggcttgctaaattttcattgccttttttttttttaaagcatgccactgctatctaataargatcacatttatctaagcttgcaaggatccaggaactctcccaatgatgaacttaaaccaaatcccacatattccctatctactccccactcccacccca

SEQ ID NO: 169459 - DNA, 201 bp, Homo sapiens
gacattcttcttgtgccttgaagatgctagtggattgtcctttggggtgtttctgatgaacagcaatgccatgggtaaaggaatattcatggaaaaaacargcacaagagtgattttcagtccctttcttacagcactatgataaaaggaatggatccctttaagagtgactgagccatagtgtagggagggccttataga

SEQ ID NO: 169460 - DNA, 201 bp, Homo sapiens
cttcctggctttctgcacctatgtcccaggcaatgcatgagtcatccaacacacggggccataaagcacttaatgaaggtcataccagagcaagccaaccrggacagcaatcagcattgttcatcagctgctccaccagaacaccaagtcgggtgtggtgacacactcagggaaagtgggactgacatattttgtaggaac

SEQ ID NO: 169461 - DNA, 201 bp, Homo sapiens
taaaattgttttctcttacattttagagatggcaagaaagaagctgaaaaaatttactactttggagattgtgctcagtgttcttctgcttgtgttgtttrtcatcagtattgttctaattgtgcttttagccaaagagtcactgaaatcaacaggtaagaagtaactctggggctctctccatatgttgtttttattaga

SEQ ID NO: 169462 - DNA, 201 bp, Homo sapiens
atacttggaaatgaagagaaaatttttgataaaattccatttggtggcctctagaattttgctctgtgcctaggagtcactagtggggccatcatggcgarcggggagcttaggctccacagggccacgtggaatcagggagaggcatggagcagttcagggggctaaccattcacagcctgggttgcatggtgataactc

SEQ ID NO: 169463 - DNA, 201 bp, Homo sapiens
caccttctcttctgagaagaacttggggatagaataaaaaaataagacactaatgaaatgtttagcacatgtgtcttttgtgaaagggagaaatagagtaktgtgagatttctgtgactcacttgaaaatgacttttaaaaactaatatagaagccaacatcaccctgataccaaagacaaagacacaacaaaagaataaa

SEQ ID NO: 169464 - DNA, 201 bp, Homo sapiens
tgtgtctctgaacttgtacaaattgttcctcagtgaatactcatccttggagacagataagggagtgagagaaggaagcaaagagaaggagagagatagakacagttggactctctcctcagcactcgtatttctggacttttgcataagcttctgtatgaggacagtatccttcactctgaatggagacagaagcagctg

SEQ ID NO: 169465 - DNA, 201 bp, Homo sapiens
cctcagcactcgtatttctggacttttgcataagcttctgtatgaggacagtatccttcactctgaatggagacagaagcagctgttcctgtctcctgagyatagctcagcactaggtgagcgagagatagcctgggctggtccctggggagcagtagaactttccagtccaggctgcttctccggaggtgagtgtcttcc

SEQ ID NO: 169466 - DNA, 201 bp, Homo sapiens
actactcatccataaaaaacaatgaaatcatattttttagcaacatggatagacctggaggctattttttctgcgtgaaatgacccagaaacagaaagtaraaaactgcatgttctcacttatacacgagagataaacagtgagtatatatggacatacagagtcatagacactagagactccaaaaggagaaagggttag

SEQ ID NO: 169467 - DNA, 201 bp, Homo sapiens
acataacagatataaaccaattacaagagataaatcttacttgcatcctcaggagagcagaacaaattataaaagtttatcagacaatgaaagaaattttraaattcactagatatttgatgacagtaaattattataaacatatattaggtatgataatattttgccttttgcaaaatttcttatcttttaaagaaacat

SEQ ID NO: 169468 - DNA, 201 bp, Homo sapiens
gttctaattgtgcttttagccaaagagtcactgaaatcaacaggtaagaagtaactctggggctctctccatatgttgtttttattagagcaaaccttcawcaatgtcaggaaagtaatgctttcctgctcatgtgtgtatgtgtttgttgcgggggctgttatatgtgtgtgttctatgtgttttggacagctcagtaga

SEQ ID NO: 169469 - DNA, 201 bp, Homo sapiens
tggggttagttatgtcttataaagtcgctgggatcactgaattagcaagtagtgaatcattgctgaatagtatttcctcatatgaatatcaaattatcttkttgatgggcatttattttctgtcattagtagctataataaatatacaatgaacatgataacagaaatatttgtgaggacatgttttcatttgtattaggc

SEQ ID NO: 169470 - DNA, 201 bp, Homo sapiens
aataacaaacactataataatccaaaaaggtatgtctaatgtgtcaataaaggaattaaaataaaaacttaaaagtatttagtttatctagaaggtgatargaaagggaaatagaagaaaaactatagatgggacaaatttaaagagacaggaaaatggtacacctaaataaaaaaatcaatagttaatattctatgtaaa

SEQ ID NO: 169471 - DNA, 201 bp, Homo sapiens
ccatcatgataggagggctgaggcttggctgccttctagaacaaggatacctagagcctgaagagtagacaggggagttgcatagaggatgagctctgaawcaaatcctccctccagggcagagggcagattcatctcttctctgccccatgatgaagagaggcacagtgctctgccactacctaagtctctgccctctct

SEQ ID NO: 169472 - DNA, 201 bp, Homo sapiens
agtcactgaaatcaacaggtaagaagtaactctggggctctctccatatgttgtttttattagagcaaaccttcatcaatgtcaggaaagtaatgctttcmtgctcatgtgtgtatgtgtttgttgcgggggctgttatatgtgtgtgttctatgtgttttggacagctcagtagatattcattgtaggtttaagttctga

SEQ ID NO: 169473 - DNA, 201 bp, Homo sapiens
atctggtcaggatgactactctgtttattcattcatttatttattcatcgcataaatatttaaagtgtactcactggctcagtgtcttattctgttcttgraactgaagatgtgacaataaaaaaaaaagaggcgatcttttctcaaggtattttattctaatgtaagattcagatttcaaatgaataaacaaggaaaagt

SEQ ID NO: 169474 - DNA, 201 bp, Homo sapiens
agaccaaatgaacataatagatatttatagaacattctattcatcagctacagaatacacattcttttcttcagcatatggatcattctcaaggatagacyatattttaggtaacaaaacaagccttaaaacattcaaaaaattgaaataatattaaacatcttctctgaccacaatggaattaaatagaagtcagtaaca

SEQ ID NO: 169475 - DNA, 201 bp, Homo sapiens
aaaacttcttttaacaaatgataatgaaaacacaacatactgaaacctgtaggatattaagacggaagtttatacctataagtgcctgcatcaaaaaaaamcaagaaaaaataaaaacttcaaaccaaaaacctgatgacaaatcttaaagaactaaaaaagcaagcacaaattaaacccaaaattagtagaacaaaagaa

SEQ ID NO: 169476 - DNA, 201 bp, Homo sapiens
catggggatgaggaccgctgggttgtgtccttacctcacaatgtgattactgactcctcatccattagtgtcatttctgaacctgcactgggttaacactrggaaataaaaacttcccacccacttcttgcaggaggctgtgtgggtaagctcaacataatcttatttcaagagatcataaattgattggtacaacttttt

SEQ ID NO: 169477 - DNA, 201 bp, Homo sapiens
gagttgttgatccaacgccaccttttctcttcacgatggtaaattaagccaataaaatacttctcagcatcagttatgtcctgaagaaacttctggaaataaaaaaaaaattttaccagtgagtcttttaatgatgcctctcttgagccaatgtgcccatgattatatctgatcctgggaataaggaaggccggtagagaa

SEQ ID NO: 169478 - DNA, 201 bp, Homo sapiens
actcagctgatacccacccatggaggaagcatttagatgagcgctagccggaggggaataacccatcccagtggttgaaacctgagttctggcaagcctcrccactgtgagctgaattgctttggggccctaaataaacttgaaaggtagtctaggccacaaggactgcaactcctaggcaagtccttgtgctgagctggg

SEQ ID NO: 169479 - DNA, 201 bp, Homo sapiens
tagccggaggggaataacccatcccagtggttgaaacctgagttctggcaagcctcgccactgtgagctgaattgctttggggccctaaataaacttgaarggtagtctaggccacaaggactgcaactcctaggcaagtccttgtgctgagctgggctttgagccagtggaattagggggcacctactgagataccagcc

SEQ ID NO: 169480 - DNA, 201 bp, Homo sapiens
tctgatgaaaatatccttcaaacatgaaggggaaataaagactttcccagacaaataaaagctgagggatttaatcaacagcacatcagtcctataagaaktgctaaaaacagctctttaatctgaaagtaaaggacattaatgagcaataagaaatcatctgaatatacaaaattcactgattatagtaggtacatggaa

SEQ ID NO: 169481 - DNA, 201 bp, Homo sapiens
tagctttgacttttcttctactccttaagactgtagctgcagctgcatagacaagctacctttctggagagagaaacatccatctacatgctgaggagtaktttttagtgttttctgtaatttcatagcagaacctgggtaaagttaacctaaaccgttaacatcagtcatgatgaaatgtgaaaaaataccttcatatac

SEQ ID NO: 169482 - DNA, 201 bp, Homo sapiens
gtaagtgcttacttattaataataatattgaatgtaaatggattaaactttccaatcaaagtacatagagtggctgaatggatgaaaaaacaagacctaaygatctatttcccacaagaaacacactccacctataaagacacatgcagactaaaaatgaagggataaaaagagatattccatcccaatggaaaccgaaaa

SEQ ID NO: 169483 - DNA, 201 bp, Homo sapiens
gaatggatgaaaaaacaagacctaacgatctatttcccacaagaaacacactccacctataaagacacatgcagactaaaaatgaagggataaaaagagayattccatcccaatggaaaccgaaaaggagcaacagtagctatatttatttcagacaaaatagatcttgagacaaaaactgtaagaagacacaaagaaggt

SEQ ID NO: 169484 - DNA, 201 bp, Homo sapiens
gagatattccatcccaatggaaaccgaaaaggagcaacagtagctatatttatttcagacaaaatagatcttgagacaaaaactgtaagaagacacaaagraggtcactgtataatgataaaggggtcaattcagcaagagaatataacaatataaatatatatgcatccaatactggcacacccagatatgtaaggaaaa

SEQ ID NO: 169485 - DNA, 201 bp, Homo sapiens
atgaccaccatggttccacagggagttctgccaggcctccactgatgttcacttaaagattaagagctcttcagtcagcttgtgatgaatgctgccagacstagaactcattcttcaaggcagtggatttccctccagcccaggacaggctcagaaatactgaccaagagcctaggcctggattcagggactccaagatcc

SEQ ID NO: 169486 - DNA, 201 bp, Homo sapiens
aacattcaaaaaattgaaataatattaaacatcttctctgaccacaatggaattaaatagaagtcagtaacaagaggaagtttggaaactgcacaaatacrtggaaattaaacaatatgctcctggatgaccaatcagtcaataaagaaattaagaaaggaattgaaaaacttcttttaacaaatgataatgaaaacacaa

SEQ ID NO: 169487 - DNA, 201 bp, Homo sapiens
cagaaataaattgaaatgaagaaaacaatacaaaacatcaatgcaacaaaagtcggctttttgaaaagataaacaaaatcaataaacctttagccagaccaaaaaaaaaaagagaaagagatgacccaaattaataaaatcagagatgaaataggagacattacaatggatggcacagaaattcaaagaatcattagtgac

SEQ ID NO: 169488 - DNA, 201 bp, Homo sapiens
tgtttatattttctctccctgagtttaattgatttatttatttggtaatgaaaggagttttagatattcagaatactagacatttttttttttgttggacyagtaattttttcaaggaaccattgttctttatagtatgaaatagattgggagaccataattatgtgttgggaggcaatctgtttttgtctctatttttct

SEQ ID NO: 169489 - DNA, 201 bp, Homo sapiens
aaaatcagacaaaaggggacttaattaaactaaaaagcttctgcacagtaaaaaaataaaatagagtaaacagacaaccaacagaatgggttaaaatattygcaaacagtgtatctgacaaagggctaagatccagaatctataaggaactcaacaggaaaaaaaacacataaccccattaaaaagtgggcaaaggacatg

SEQ ID NO: 169490 - DNA, 201 bp, Homo sapiens
gatattcagaatactagacatttttttttttgttggaccagtaattttttcaaggaaccattgttctttatagtatgaaatagattgggagaccataattrtgtgttgggaggcaatctgtttttgtctctatttttcttattatgtattttattagtaaactttttttgtgcttactgtattgactacattttacaggtg

SEQ ID NO: 169491 - DNA, 201 bp, Homo sapiens
aattttttcaaggaaccattgttctttatagtatgaaatagattgggagaccataattatgtgttgggaggcaatctgtttttgtctctatttttcttatyatgtattttattagtaaactttttttgtgcttactgtattgactacattttacaggtgtttttatttgagttttcaaggcatttgtctctttagcttgaa

SEQ ID NO: 169492 - DNA, 201 bp, Homo sapiens
gctctggtgcccagagaaagagagagagaaccaaggctgtccatcttgcagactgatagagggcagccaggacatggctcagcatgcattcatgcccagarggagaaagagttaagctgctgaccctgaacgctaagggagagccggctgcgcagctgtgaatgggagcggctggagcaagcagctgagacagacagacag

SEQ ID NO: 169493 - DNA, 201 bp, Homo sapiens
tctcttcttaaaatgggaagactgttacctctctaattccctcacaggcttggttgctaggaagatcaagttaactagtcagtgggctttggagaccagcmaacaagttacacacacacacgtatatatgtgtatgtgtatatattgcatggttctccatttatttaatcatgtatttctcttgaatgctcttgaaatata

SEQ ID NO: 169494 - DNA, 201 bp, Homo sapiens
aaaatatggaagcaactttggaactgggtaacagatagagggtggaacagtttggaaggctcagaaaaatacaggaaaatgtgggaaagtttggaacttcytagagacttggagggctttgaagacaggaagatgtgggaaagtttggaactttctagagacttgctgaatgtctttgaccaaaatgctgatagtgatatg

SEQ ID NO: 169495 - DNA, 201 bp, Homo sapiens
cctcaacgcgtattgaggacagattagctaaacacactggtctgggaatcaagagacctggttatcatcttgtcactacttactagccagatggccttcascaaatcactttagacttcagttttctcttcttaaaatgggaagactgttacctctctaattccctcacaggcttggttgctaggaagatcaagttaacta

SEQ ID NO: 169496 - DNA, 201 bp, Homo sapiens
tatgcaggcttcttccttccacttctctaaggcagggcaatcaaccatgggtttttgctgttattaatgtgataaaataatatgtttggtatggtgtctgrcaaataataaatgttcagtaagtagaatgaattcttagtattttaattatatttttaaacaaaggtcatctaggggaaaacagaagtatgaggattgaga

SEQ ID NO: 169497 - DNA, 201 bp, Homo sapiens
ggacgctttagatgatgaaccagcccattgtttctaagcaattcacttgcattcagaggctctacccaagcgtactatagagcaatcaaaatcaaactatygtttgtaccaatcatattgatctgaaaagattgtggtgggatgaccccattgtagatgcaaatagttgttctgagcagctgtatgctggccaatatgtac

SEQ ID NO: 169498 - DNA, 201 bp, Homo sapiens
gtcagtgccccaacctctaccttgttcaaaggtcagctatacactttatatattatgaatatagtatattatattaatattatattcaaatatactatatracttatactacgtttaatactatattattatgtttatatataaatactatatttaatatataaatatatagtatgtataaatataatgcttatgtaatat

SEQ ID NO: 169499 - DNA, 201 bp, Homo sapiens
gcagagatacatcggagagcagctcataattaatataaacctctcagaggaactttggagtttaacttgatttatacacacacacacacacacacacacacgcacatgcacatacacacacacaatttatttaacagaaagttggacaagacatttcattatgaaaatatattccaaaatatgtagacctgtttgtaagta

SEQ ID NO: 169500 - DNA, 201 bp, Homo sapiens
ggcagagatacatcggagagcagctcataattaatataaacctctcagaggaactttggagtttaacttgatttatacacacacacacacacacacacacacgcacatgcacatacacacacacaatttatttaacagaaagttggacaagacatttcattatgaaaatatattccaaaatatgtagacctgtttgtaagt

SEQ ID NO: 169501 - DNA, 201 bp, Homo sapiens
tttttataaactaaccttggaagtgacataccatcacttctgccttacaatagttgtcacacaaatccatccttgttcaacatggaagaaaactgcacagkgtgtgaatatcaggaggtgaagctctgtaggggccatctcaggggtcctttggctggctgctgcaaaaggagcacacctgtcttttcaacttcctccccc

SEQ ID NO: 169502 - DNA, 201 bp, Homo sapiens
cagaggagagggccaggctggagatacgagctgacgtgtctccagtattccgtggtatcaagagctgttgcaactagcctggacagcacgctctagagcaygtgcagagaggagcagatgtttgaaaactgagttctgaggcttttcagtgttcagagatactggaaaggtggggaacacagacagaggaactgagaagca

SEQ ID NO: 169503 - DNA, 201 bp, Homo sapiens
tttatacacactactgaatactcacaaccacccagcaacgtaaacagtattattatctctgctttgcagaaaagggagctgtcttagttcattcaggctaytataacagcataccatagactgggtgacttataagccacaaatttatttctcttagttctggaggctgggaagtccaagatcaaggcagcaccagatttg

SEQ ID NO: 169504 - DNA, 201 bp, Homo sapiens
aaacactacttggatttggaaaatattttgaaggtagaacaaagtgatttgctgatgttatacgtgggttgtgagagaaagaagtcaaggttcaatcaagktttttggcctgagctactgggtgtagtggactgccatttgttgagttgtagaacactgaaagaagcattcttgatagaaaaatgaagcattcattttgga

SEQ ID NO: 169505 - DNA, 201 bp, Homo sapiens
gtaagctctactctccattgttgataataacgcaactcattacttttgtcgtctattgattatcggcatgatggctcagagcgagagccaacctcatctckcacacataactggtactggaaggtaaaacagatttgtcacttactatctgaccgctaagccacactttgcgctccattattgtgattaacttctacataa

SEQ ID NO: 169506 - DNA, 201 bp, Homo sapiens
cattcgtactggggctggtggaaaagctgctcgcttttgtgtctggatgttattctgcagagccacgtaagctctactctccattgttgataataacgcarctcattacttttgtcgtctattgattatcggcatgatggctcagagcgagagccaacctcatctcgcacacataactggtactggaaggtaaaacagatt

SEQ ID NO: 169507 - DNA, 201 bp, Homo sapiens
tcaatattggtctgttctttaagggttgcctcccttctgatatctgccttcttttgcctattcttcagcaagtataaattggttgattgttttttttttttgtttcgtattttgttttctgtggaaatgctaggttggttcaagcaactttgccatttctggaatccaaattctatgtaagacatttaccagtggttatat

SEQ ID NO: 169508 - DNA, 201 bp, Homo sapiens
tagtttcttggcttcaaagaaggctgtaaataagagtatctctatccaccccttcctccaaaaaaaatacacaacatctgggtttgctcattactttttgkttgtttgtttgtggagacagggtctcactgtatcgcccaagctggagtgcagtggtgcgatcacagctttctgcagcctcaacctcccagggtcaatcga

SEQ ID NO: 169509 - DNA, 201 bp, Homo sapiens
tgtataatgttgaagtaataccttagccattggtaggactcccctcactgtcattgttaaaccacctcctccccgagccctgggaagcctacctcgggagytgtttcatcccagagcgttatagaacagaattgctcatcaaaccaggaggaggaatggagtggtgaattttgcacagttacacatgtgcagtcccttcgt

SEQ ID NO: 169510 - DNA, 201 bp, Homo sapiens
tctcaaaaaagacatgagtaagtgataatatccatttgttaatttgcagttaggagtgaaccctttcagagacataaatgcttaaatgggctagtcagggwatccccttattgacatggaggtaacattgatgttacgttggtcttccagaggctgcttcatgagaatagaatcagagcaatcgacagtggatagtattgt

SEQ ID NO: 169511 - DNA, 201 bp, Homo sapiens
gagccctgtcttgtctctcttggtcaggatttaaaaaatgaaaactgaagagcacaaactggttttgtttttggtttgtttggtttgtattgactctgaaragtccgtggtgatagctcttgtctgcttttctgacatttctatcagtggttgagatctcatgtatttttcatccatagtgtggaatgtagagcacagttt

SEQ ID NO: 169512 - DNA, 201 bp, Homo sapiens
acttacacaaatgtgcacacacatcccaagtgcttgacactcagttgtctcccaatagccatggccagacctgcacaatttctgcatgacagtactctgtmatgcagatcatgtctgaacgacatactctggctaggctctgcaagtgaagataatgggacttcctttggagaacagtgattgcaaatgagaccacaaggt

SEQ ID NO: 169513 - DNA, 201 bp, Homo sapiens
agatggtctcatcacatacctgggtgggctgcctttccacacggtctttcatcctcaagaaaagtttcttacatggcagttagtgtctcaagggagtgagrgaaaaagcttcaaggtctcttgaggcctaggctcagatattgcaaaaccttacttccaccacatcctattagttagaccaagtcacagtgcagtccagaa

SEQ ID NO: 169514 - DNA, 201 bp, Homo sapiens
gaggcgggcggatcatgaggtcaggagatcgagaccatcctggctaacatggtgaaaccccgtctctactaaaaatacaaaagattagctgggcatggtgrcatgcacctgtagtcccagctacttgggaggctgaggcaggagaatcacttgaacccaggaggcggaggttgcagtgagctgagattgtgccactgcact

SEQ ID NO: 169515 - DNA, 201 bp, Homo sapiens
gcccctaatttcttagagctgatgaaacactggaatactgtacagataaaagcctgagctggtgcttctcctctaagtgagccttgggctttatggtaccraaactatattgttcacttaaaaagagtcattcttactttaaataattaacactggtgtttctaatgaatagatagaacaagtgattgaaatgttcagttt

SEQ ID NO: 169516 - DNA, 201 bp, Homo sapiens
caaagctgagtagaaatttccaagtaccttccaaaaatgccaagcctgtgtcagccttcacacaaaggctggctttctaggtgtgacttcgcaagcagtastagcgtatggtagagaagagctgtcctgtgcatgtggaactgattggcgatcaaattcttctttgtaaatactgctcactactgctgggcagttgtgagg

SEQ ID NO: 169517 - DNA, 201 bp, Homo sapiens
cttagtcacccctctcaacaggaaaacccaagtgctgttggggaggttggccaacgactgctcttaactgcttcctgctgaactggggcgtagtaggggtygtacagttgagatttcctcgggagggatgccttcaatgtcattaacattggagcatgggctagcaggctggtccaggggtctgcggtagatcttactcat

SEQ ID NO: 169518 - DNA, 201 bp, Homo sapiens
tatttctgcctcaagtatctggaatttgtatcactggcagctgtcaccacctttattttctgtgtttaattttcgaagggcccatgcagtggtttttttttgtgaattcttagaagttgtagacacttttattttctaaatgaaacaatgcctcagtgccacaggacacagaaggtctgatttcatgtttttcatctaaat

SEQ ID NO: 169519 - DNA, 201 bp, Homo sapiens
tgtgggaaagtttggaacttcttagagacttggagggctttgaagacaggaagatgtgggaaagtttggaactttctagagacttgctgaatgtctttgaycaaaatgctgatagtgatatgaacaataaagtccaggctgatgtggtctcagatggagatgaggaacttgttgggaactggagtaaaggtcatgcttgct

SEQ ID NO: 169520 - DNA, 201 bp, Homo sapiens
ggtgctaattataacaggtcattcaggtttcagatgtgccagcatttttcctggttgactcttctatcaatgactaagtaataactgtaaatatcatctcscatattgaatatgttgtccttttcatataattattttgtgtctgtattcactcaagaaacagctgttaaaagttgagtgggatgcaaaatggcacagcct

SEQ ID NO: 169521 - DNA, 201 bp, Homo sapiens
tggcagagatacatcggagagcagctcataattaatataaacctctcagaggaactttggagtttaacttgatttatacacacacacacacacacacacacacgcacatgcacatacacacacacaatttatttaacagaaagttggacaagacatttcattatgaaaatatattccaaaatatgtagacctgtttgtaag

SEQ ID NO: 169522 - DNA, 201 bp, Homo sapiens
gtggcagagatacatcggagagcagctcataattaatataaacctctcagaggaactttggagtttaacttgatttatacacacacacacacacacacacacacgcacatgcacatacacacacacaatttatttaacagaaagttggacaagacatttcattatgaaaatatattccaaaatatgtagacctgtttgtaa

SEQ ID NO: 169523 - DNA, 201 bp, Homo sapiens
catggcaaagttcagactactgtcaaggcctttgtagctgcacctccatccccaggatcctaatggtcaaactcaccttgccttcttcccatggcctagccttgctcaagggcttgaatcccctaactccaggcctccctccctccctactgcttgcctgcattgtctctctgctcacctttgttggacttacttcctcta

SEQ ID NO: 169524 - DNA, 201 bp, Homo sapiens
cacagttcagcataaatggtcatgtttatggctctgcaccatcttgcaagtcaaggactgccttcgtgtgtgtctgaatgtgtctctgtaagattgtgtgygcatgaatgtgtgtatgtgtgcatgtgtgaatatgtttgtgtatgttctgatcaagtaatgaaggatagaaagtcctagattaatacttttcactttgtt

SEQ ID NO: 169525 - DNA, 201 bp, Homo sapiens
ggcttataaagaatgaggggattataacacaagttttctttactgttacaatcactgtgctagcatatttatttagaatctactgttgaaatgaaggaccyagtagaaggactaggttaggaggaatgaattacattcaaagtgaatttacaccttttgcacagttaagaacttgtacttgaaatgaatgtaggtaactga

SEQ ID NO: 169526 - DNA, 201 bp, Homo sapiens
gctgtgtctgggctttctgggaaagaacatctcattcagccagtgacatttgttacaggagcgaggagaggagacagcactccagccatttatttttcctycataaaggggcagtggactctctactgcccctttattctctgcaagccttttgttctaggtaaccataggaataggtggtatcttagcctgcattcccct

SEQ ID NO: 169527 - DNA, 201 bp, Homo sapiens
ggcttcttcctagttttccttagtccttctagcacgcaagttagcaaatgtctgtggcaccaatctccatgttctgattctgcgtcccagtgagggtctayactgggaactgcttggtggcctgtggggaattgttctttttcctcttttgtcatcctatcattgacctgactgagataccagaaatcgccaaactctcag

SEQ ID NO: 169528 - DNA, 201 bp, Homo sapiens
ccagcctttccctgttccagagcctccaaagtccacttgcctgaaggccatgactaaagcagtggcctttttttttttttaatcccgtttgtcccgttccrcctgctcctcctgatctctattataaaaaaccaaggttgccaagttcattagggtttctaagttttgctctgggcctaaggcagacttttgaagtttttt

SEQ ID NO: 169529 - DNA, 201 bp, Homo sapiens
tttttgatagatataggcctattcaaaagatatattcctccttttatgagttttggtagttcatgtcttttaaggaattggcccgtttcaactaagttgtsaaatttgtgggcatagagtttttcataatattcctatatgaatcttttaacattcattggatctatagtgattacccctctttcatttctaatattggca

SEQ ID NO: 169530 - DNA, 201 bp, Homo sapiens
aatggtgtgcagtagacagggtagaagccagacacctgtaagtaggttccagagaaacagaaccaacaggatgtgtgtgtgcgtgtgcgcctgtgtgtgcrtaagaaaactgtaagaaattggctcacatgattactgaggctggcaagtccaaaatctgcagggtgaggcagagcactggagactcagagaagagttagt

SEQ ID NO: 169531 - DNA, 201 bp, Homo sapiens
atatataccttctaagttcattgttaatccattccattttatggtcctttctcaccctatgcctagtccacccataactttaagcacatggttatttttgyacttcttttgaaaggtaaaagataaacttaaatatacacaatacagtttattattagaaatgttagaggaaaggatcatttaagtataatctacaaggtt

SEQ ID NO: 169532 - DNA, 201 bp, Homo sapiens
agagctccaactttagcagaattcccctgttcttccttatctagagcaaggccagacttggaaggttttgcttcagtactgaacatagagtggaggtaaayagaaaaagccatatttaaaattacaaagcagagttggtggcagtgttggtttaatgaaaataaggtttcaaatgtttgaccctgagcatgtaattaaaag

SEQ ID NO: 169533 - DNA, 201 bp, Homo sapiens
tttttattttagaatagttttagatttatagaaaagttacaaagataatagagagcattcctatatatcccccacacagtttcccttatgaacgttttacrttagtgtgatatgtttgtaaagattatgggtgttattttgaaaaagctcgttcaaatattataaaataattgtgtattcaaaagcttaaaagattacata

SEQ ID NO: 169534 - DNA, 201 bp, Homo sapiens
cctgaaaacattttgcacatcaaaaaatttttcttttcttttaaaagcagccagattacaaaatagccctttttttgttaaccaacctgagaatttacatrtattactttgaccactagagggagtctgcattgtcaggaatgccaagcccaagagaacatgaaacaggctgttttcgggtgctgatgacacatccattgt

SEQ ID NO: 169535 - DNA, 201 bp, Homo sapiens
tttggaacttcttagagacttggagggctttgaagacaggaagatgtgggaaagtttggaactttctagagacttgctgaatgtctttgaccaaaatgctsatagtgatatgaacaataaagtccaggctgatgtggtctcagatggagatgaggaacttgttgggaactggagtaaaggtcatgcttgctatgcagagag

SEQ ID NO: 169536 - DNA, 201 bp, Homo sapiens
tgagcttcctggttctcagggtttcatttttcatctgcaaaagatggtctgaggattaggtggtaaaaataataatttatatctgattttttgctttgcastttatagtttccacatatattatcccctttaaccagaactttgtttcaatattttaggaatctgtagtttcattataaaggctaaatgtttgatttccaa

SEQ ID NO: 169537 - DNA, 201 bp, Homo sapiens
gcagcctgtaatttcatctgttataaaataaagagaatggttggtctttttatttttgtttgttagctacagtgctttattagaaactggaataacctctrtgatataataatttatctagtcaagataactggagttatttccttaagcctgtgatcagcttgagtttgtgtgttgggaggtttatactgccgttgctta

SEQ ID NO: 169538 - DNA, 201 bp, Homo sapiens
tgctggttctcctcattgtgttaaagcaccggtcgtgttccaaaatgaacattgcatggtgcattttttagagtaaaaataaattcaatgccattgtgtcsatcccatgcagcctgtaatttcatctgttataaaataaagagaatggttggtctttttatttttgtttgttagctacagtgctttattagaaactggaat

SEQ ID NO: 169539 - DNA, 201 bp, Homo sapiens
ttcataactactatagagttaatgtttttaccctctagaagtgtttttctttgttcatttcttgtgcagtgcagaggttattttcatgcttagtatagttmtataatgggctaagtccatttggtttgacttaaaaccagtcatgtttatttgttagatatgtgccattaaagcctccccttcccataaaaaatattatca

SEQ ID NO: 169540 - DNA, 201 bp, Homo sapiens
gtgacaaaatgtctaaaagtgtcagaagaactatgtggcctgcaatcatctctaatactataaagcaagcttccatttaagtactgtgttgcagcattgtwtgatggctgaaatttaaaattctgtcagaacctatgattagagggcatctggcttatttacaagtgtttgcaatattaagaaccttagggtcactagaaa

SEQ ID NO: 169541 - DNA, 201 bp, Homo sapiens
gaattaaatggggaacccactgagatgattaagatatatctgtggaatttatagacattattcatctaccagatattgcctctttagaaagagtatcctgraatgccaggtttgattgaatgacttgaaattgggtaaaaatcttttctgtactgggctagccatacaatgaagtcagctgacacatgggtaaaatagaca

SEQ ID NO: 169542 - DNA, 201 bp, Homo sapiens
cttgacataagatagatgtttacaattattaaattctgtcactgattcttaatatatttaaaatgcagtcactatgagatagcataatgtaaaaagagaaracccatgagtgtataattttgatcaaatttgggaaaatttgggctcttatctcttgaagatttttttttgactccctgtctcttcccttctgggattcca

SEQ ID NO: 169543 - DNA, 201 bp, Homo sapiens
tgattgacagtgttgctgtgttagggccggttatggtgactgtggaagttgctcatgtttgattgctcttttaagtgtgtgtgactctgcacatgtgtgcwtgatgtgtgtgcatggtgaattctatgcgtcgtccccactgtctgctcagtatatatgcacacagcacattctacagttttgtcctcacaaggtcactta

SEQ ID NO: 169544 - DNA, 201 bp, Homo sapiens
cactgcacatcaccaagcacatagcagataacataaatattagtcaaaactaagtttaggtctcattgatgaaactgatcaagcagcatttataacatgayttgtgaaagaccaataaaatcaggcagctgatcatttgttttttatcgatattataactaacaatttcatagagtaaattatatcaaacagttgatttag

SEQ ID NO: 169545 - DNA, 201 bp, Homo sapiens
cttaccatgatgcagtctcactattcctctgtcctgccacttcttttcttctttctctttctctttaacgtcccaacccccacattcttgttcacttcttstatagaacaatctcattatctcttaaagcaggtcatgcccagtggaccacatcgaaattatcaaacatccaatgaaactttgcttctaaacaaagatagt

SEQ ID NO: 169546 - DNA, 201 bp, Homo sapiens
tatgtggttcacaaatattttcttccattctgtaggttttcttttgactctgtcagttgtttcttttgctatgcagaagtttttccatttgatttagtctygccagtttattttcggttctgttgcccatgcttttggtgtcatatccatgaaatcattaccaagaccaacattaaggagctctttcctcatattttcttc

SEQ ID NO: 169547 - DNA, 201 bp, Homo sapiens
attaatacctcaatctaaccatgaaaaatatcagacaacccaacccaaatggagggccattctacaaaataaatgacaactactcttcaaaagcagtatgyttatgtcatgtgcaaatcaaaagatatcaaagatcaaacctttgtaatctcaccacctgagattaatgactactaacatcttaaagtaacatataccaga

SEQ ID NO: 169548 - DNA, 201 bp, Homo sapiens
agattacatcagtctgattcttgcagtaaacaaatattaagcagataactttactcaacaaggggaaaattgacctaattcctaactgtacccgtgagatrctcttgagtttggcaaggaagtagacactgtgtgctgtgtgtcacatgtttcttgcttcgagtagaaccttgaagagaccatcaggaccttcagttgtca

SEQ ID NO: 169549 - DNA, 201 bp, Homo sapiens
tttcatcatattcatgttgattttgctctgaattcacctgagaaattccatggagaaatatgtgactattcagcattacttgcttttacattgccattatwtgtaaagctttgattaaaagtgcttgaacagtgaatatctttgcaggaaaattaaatcaagttttaagtcaaatgctatcctgatagagtcaaaacgttt

SEQ ID NO: 169550 - DNA, 201 bp, Homo sapiens
accttgacattatttccatggtgcaaacctaagcacccctcccagattagaaacaacaacaacaacaaagttctagacttctctggttgaaatcttacatmgatacaaagaagcacttacaaatcactcacttgatcaaggcattagtattaatataattctgctaatagaatcgagtttacaaggcacattctacagaca

SEQ ID NO: 169551 - DNA, 201 bp, Homo sapiens
gttgcatggttttctattttaattaaggggctgaaataacttcagttatgaatcgacttccccctttcagattgtctaggccgttgaaacatttttgactsgctttctcctaagatccagtgcacttcagagccacttctgttcccctgagtttgtttgcttagagaatacaaagcctagaatgttagagtttctttcaga

SEQ ID NO: 169552 - DNA, 201 bp, Homo sapiens
tatgaaaattacaggaccatatgtctgaccatattgagaatttagagagcactgaaggaaattgataagaattagtgatgagtacatagaaatgaggcacrtgcaaaaacaaagcaattgaacgctatctaaataatgaaaatggtgtaaacattgaaagtttatttcacaaaacatgtgggagggtacagacaagatggg

SEQ ID NO: 169553 - DNA, 201 bp, Homo sapiens
ccacttgcaagttggaaggaaatgggaactactgagaatttttctaagctcaaatacttatcaaaataagtattctacataaatgaggacaaacctaatasttttaaaggaaatggttcactgtcattaacaacactggctttgagtgagaaaagtaaatcatttgtgatgaattcagaatctatccacatattgcaaggt

SEQ ID NO: 169554 - DNA, 201 bp, Homo sapiens
tccagcccataccaaataaatcatcatctgtgaaggtttgggagcaaaattttaaaaatcttccctggggatcctacagtaaattcggggtcaagtgctgytacattaaaatttgggagaaaaaataaaacaggaagacacacttagggaatagtccaacgaggtggaccctgggtagaaagtgggacaatagattgtgac

SEQ ID NO: 169555 - DNA, 201 bp, Homo sapiens
gggaggctgaggcaggagaatcatttgaacccaggaggcagaggttgcagtgagccgagatcacaccactgcactccaggctgggcgacagagtgagactrcatctgaaaataagaaaaaagagtgcgaagtacaaaaagctaccctatacagtaagtcctcacttaacatcatctggattcttgggtggaaactgcaact

SEQ ID NO: 169556 - DNA, 201 bp, Homo sapiens
cttctatctattggatgcttgttgcacaccctccccttccatgaaaataatgaatgtcctcagatattgtcaaatatcctctgggtgagggtagagaaccrctgcattgaagaagtggagggcatgcccacagtcatcttctgagtgcaaaggcttgcttgtagttagagggaaattcccagtttggagtaggtatgaatt

SEQ ID NO: 169557 - DNA, 201 bp, Homo sapiens
tatttagcagcattccttgcttctatctattggatgcttgttgcacaccctccccttccatgaaaataatgaatgtcctcagatattgtcaaatatcctcwgggtgagggtagagaaccgctgcattgaagaagtggagggcatgcccacagtcatcttctgagtgcaaaggcttgcttgtagttagagggaaattcccag

SEQ ID NO: 169558 - DNA, 201 bp, Homo sapiens
ggaaaagaaagatggcctgtactggatgaaatttttaattaatctttcactgttaaattgttcaaaattaatcaagtatattgcctataagaaggcaactrcactttacatacttcagtattatcatcaccaagccatatattaaaagttaatttctgatttaaaagtgtaccttaactgcaaaaccgtcaattctaagta

SEQ ID NO: 169559 - DNA, 201 bp, Homo sapiens
attgaatttttaaactgctgtagtctgattgtgtttgtgaagtctctgttcactcaaaagaaaggaagtgcctactataacctcttcaatgccaaataaamccccctagataagcttggcccatactatgactatgaaagaacttctacctggagatgatgtcacaaattagagagctggttgcctggccacttatcaggg

SEQ ID NO: 169560 - DNA, 201 bp, Homo sapiens
gcttttcaattcaaactccaattttactgctggtatgtatgagagtaatttcctgttatatattaaccttgtatcctataaccttgctataattgattatktgtttaagaatttttgggggctgggcacgatggctcatgcctgtaatcccagcgctatgggaggccaaggtgggggatcacctgaggtcaggagttcgag

SEQ ID NO: 169561 - DNA, 201 bp, Homo sapiens
catatcattaaagtttttatgcagtggggagaattaaatgcataacactcttttcttctccctctacactttatattcagaaatagctcataaataagatmcaagaaagaaagatagaaatcaaaagatcaaatttattgttgatcaagctttttggaaaatgaagcttggcatttgcagctaaacaggcttgattatatt

SEQ ID NO: 169562 - DNA, 201 bp, Homo sapiens
tactacaaagtaggtatctccttttaaaattgggctgcttgaatattttatgtattttcaaatatgaagcttagtttgaaaggtatttatttttataaggkgctttatgtttatatattatatataagaatataaataaaatatatttatatgtactttttatacaatttatattttacaaggtgttttgtattcatctgt

SEQ ID NO: 169563 - DNA, 201 bp, Homo sapiens
aacactaggaaagaaatggaaggatatttaaacttaatggcagacgcctcagaatttatttttaaattaacattttttatttttgttttttatttatttayatttttgagatggggtctcgctccatcacccaggctggagtgcagtggcacaatcataactcattgcagcctccatctcccaggttgagcaatcctccca

SEQ ID NO: 169564 - DNA, 201 bp, Homo sapiens
aaaagtcatagaaaaatagacaaacctataattgtggttggatagtgtagcactcctccctcagtaattgtttgaagtataaaagacaaacaatagtaagyatgttgatttggaccatactatcaaccaccttagtctaactgacattaagagaacactgcaaccaacacctgagccatacactggttcataaaacaaagt

SEQ ID NO: 169565 - DNA, 201 bp, Homo sapiens
gagtctttgctccactcagaaaagctgggcgacattgagcatgccaacacctaatctttctgggagtcagtgccctgatctataaaacagagatacaagaratcttatcaccttgtgttttgggattatatgagttactacctgcaaagcatttaaagcagcacttgacataagatagatgtttacaattattaaattctg

SEQ ID NO: 169566 - DNA, 201 bp, Homo sapiens
ttactgcaaatgttttcatagatatgaaatatatatctgtaaatattttcatctatacaaagtattattttgtatatattagatagaatccaggatggctrtaagtcatacacatttttaagacggtaaatttcaagaggagagcttgctgttgcgaaaaagtcctatcgctaatactgtgcatcacaaatattaatcttt

SEQ ID NO: 169567 - DNA, 201 bp, Homo sapiens
aaggtacagaggccatatagcatggttaagagcatgaatgctgaagccagaaacacaggtttgagtctttgctccactcagaaaagctgggcgacattgascatgccaacacctaatctttctgggagtcagtgccctgatctataaaacagagatacaagagatcttatcaccttgtgttttgggattatatgagttact

SEQ ID NO: 169568 - DNA, 201 bp, Homo sapiens
atgggttatcttatttgaaagcttagaggacagtcagcttgcacattgggtttccttggcactaaccagaaactctttcctcttagttgctatttggaccaaaaaaaaaaaaaaagtagtatggaattttttctctctttcagccctctcacccgacatacatatcattatactcccctctccaatgctgtaattggtaag

SEQ ID NO: 169569 - DNA, 201 bp, Homo sapiens
aataatacagattcttttgacttatttgaataattcaataaatgaaacatttacagtagataatgttatctatatcatatgtgtcataattatataggctrtgtatcttgctatctatcataaagatatagtgttatttactgcaaatgttttcatagatatgaaatatatatctgtaaatattttcatctatacaaagta

SEQ ID NO: 169570 - DNA, 201 bp, Homo sapiens
gcctctgaaggctcagtgtcaagccccattgctgcctccttgccaaaacacacacaaagacacatgcctgtatgcacatatgtgcacacatatacataccygcacacacacacggacgcacacatatagaaatgtatacatgtgcatgcacacatgcacacttacacaaatgtgcacacacatcccaagtgcttgacactc

SEQ ID NO: 169571 - DNA, 201 bp, Homo sapiens; identical to SEQ ID NO: 30628

SEQ ID NO: 169572 - DNA, 201 bp, Homo sapiens
gtcaacattgagctctttcagggaagatcctcttattcttccatgtgcccttgtcacctattatagtgcttgacacaaattgagtatagagtaattgcttkaattaatgaattgattaatccattgattaatggatctgtcagctaattgtagccataaagctaagagtagccatccttcttttgaaatcattggcatcta

SEQ ID NO: 169573 - DNA, 201 bp, Homo sapiens
actgaatcactgtattatcttgatactttctagcattttcagtgcaattattaaaacagttatggccgctctaaaggaatgtaattggaaaagaaagatgrcctgtactggatgaaatttttaattaatctttcactgttaaattgttcaaaattaatcaagtatattgcctataagaaggcaactacactttacatactt

SEQ ID NO: 169574 - DNA, 201 bp, Homo sapiens
ccagatgtccaccagcagatgaatggataaagaaaacatggtacatacatacaaaagaatgttatatagccttaaaacggaagaaaattccgcaatatgtracaacatagatgaaacttgaggattttatattaacaaaaataagccagttacaaaaagacaaatactgtataatttcacacatatgatgtatctacagta

SEQ ID NO: 169575 - DNA, 201 bp, Homo sapiens
atgattattagttataagaattgaatgtgttattatttgtaaagcacttactacaatacctgagtaaaaagtaagcacataaatacatatacactataaarcaaaagtactgaatatgaacagaatgtatagtgggatggtgttcacctagccttagtttccctgaggaagtgacttttatttttatttttttaattttaa

SEQ ID NO: 169576 - DNA, 201 bp, Homo sapiens
agagctttgctgaacactgagaaacggggctctgtgtgtgtgtgtctgtgtgatttctaaattgcaagtcataaacacgaccatttgttatcatgtgaagsgggagaaaactccatttggggcttttttttcatattgctgattagagagaatcaagctttatattctaggacccattcacgctggtggaaacatagtcag

SEQ ID NO: 169577 - DNA, 201 bp, Homo sapiens
ggaggtaacccagatgtccaccagcagatgaatggataaagaaaacatggtacatacatacaaaagaatgttatatagccttaaaacggaagaaaattccrcaatatgtaacaacatagatgaaacttgaggattttatattaacaaaaataagccagttacaaaaagacaaatactgtataatttcacacatatgatgta

SEQ ID NO: 169578 - DNA, 201 bp, Homo sapiens
atttgctatctctagttgcatatctcccagagccctcctaactataaccagacttcagccttgctgaagttattccctggtccacctacctagacctctctacctggtttgacaatgctgatctcttgttccttcctgaaatactctgctactcctttactctctatactcccccttctagttctttatctaaatcatcta

SEQ ID NO: 169579 - DNA, 201 bp, Homo sapiens
aaggaattcaaagcaggatcttgaagagacacaggcccacctaatgttcactgcagcattattcacaatagccaagaggtggaggtaacccagatgtccamcagcagatgaatggataaagaaaacatggtacatacatacaaaagaatgttatatagccttaaaacggaagaaaattccgcaatatgtaacaacatagat

SEQ ID NO: 169580 - DNA, 201 bp, Homo sapiens
aaatctcaataggaaaaaaattgctgatagaatggaagtttgagaaactctgagagaaaagtaagaatttttcagttatctcagaaaaaaatctggggtgkaggtaggatttagaactgcgggtttagatataggaaaaagaaaagtataaaagataattcagaaagacaaagataagaaaaaaagataatgcaagcagta

SEQ ID NO: 169581 - DNA, 201 bp, Homo sapiens
cattttaaaactttcattgcacttcagactttaataaagtaccaaaacaccaagaaaaatgaagaaaaaaacagcagaattgctacacaccccaaacattctaggactgggaggagaagctagactgttactagttcacaacattttttaagacccaaactatgtagctgtatcagctattgattgctgagtaacaaatcc

SEQ ID NO: 169582 - DNA, 201 bp, Homo sapiens
ctgcctcagcctcctaagtagctgggactacaggtgcatgccaccatgcccagctaatttttgtatttttggtagagacggggtctcatcattttggccasgctggtctcgaactcctgacctcaggtgatccgcccacctcagcctcccaaagtgctgggattacagacatgagccaccacgcccagccaagaattaagt

SEQ ID NO: 169583 - DNA, 201 bp, Homo sapiens
agccccaggtcattgcattatgaaaccacgttttcaaatgcattatgaaaacttagtgaagtaacctattttttttacctatttgcattttagtttctcamactgattcaacccaagtattgataactcattgtcttaatttccttgcatataaattatcagcactacagaaattttaaaatgggtgctagttgttaatat

SEQ ID NO: 169584 - DNA, 201 bp, Homo sapiens
gaaataaaaagacaaaatggcgaccttgaaaattttttatgctctttctaattggctaatgataaaatgttttactctgatataaccctctataattgatwttttttttttttttgctgaggtggtaaaacaagatacttaatggtgataatgagaaagagtataactaagctgcatttactcctcttatctcatccccca

SEQ ID NO: 169585 - DNA, 201 bp, Homo sapiens
taaaccccaccccttgctaaagcacatctgagtaatgcctctcctcatttcatgtttattagtttcttataaaaaggaacacgattgaattgtctcaagtrctgtgtttatatgatagggcaagagggtttaaaagtattttaggataatcaaatttgtgggacatctcatgccctgtgtgtgacaaattgataataatgc

SEQ ID NO: 169586 - DNA, 201 bp, Homo sapiens
acaaatctgtacttacatatatatacattttaaaaatattattaatccctttgaggaaatgagtgttcattttaagacattcccctccccccaagctttaytgacacataattggtaaataaaaattatatatatttaaagtgtttaacatggtgttttatatgagtatatcttatgtaattattctcacaaccaagctaa

SEQ ID NO: 169587 - DNA, 201 bp, Homo sapiens
gaactgtccccatgggaggatcaaaggggcaagaagcatgcatgcacagattcccatcccatattggatgaaggcagttctgtgggtgttaactcctccaygctctccagagtcacatgtgtgagtattcagggttttattggaatgtcccacactgtagtatcaaagaagcccagaggcagaaagcaagaagccagcaat

SEQ ID NO: 169588 - DNA, 201 bp, Homo sapiens
atcacaatgtgtaatgcatttatttggttttactcaattgtttgcaactaatgattgtgataatttaacaataatctgtctcagaaaaacatttttaagartgtgatgtcatgagcattaaaaacaatattttaaaatttagtatgtataatatttgttgcaaaaatgtatgatggggtgggtgatccataaaaaaactga

SEQ ID NO: 169589 - DNA, 201 bp, Homo sapiens
tgctcgtgtgccaaggagtctttcctacttcatctttcacaatattccaactctcattgaatcttactattgtctcaaggtataaaaatctcttggctggrgagaaaaaagtagagattcaaatatttgtgtttgttatgatgttttcatcaaggcatggtgccatcccgttccatagatcttattatgagattaaattac

SEQ ID NO: 169590 - DNA, 201 bp, Homo sapiens
gctgctcccaagatggtggcatcccttttgttctctgacctggggttcttggcctcatggattccaaggaatggaaccttaggccatgaggtgagtgttayagctctattagaagctgtgggtcacagaagagaaccgtggaacccagcaactagtgttcagctcgattaggacgaacccaggcacttagctgtacaggaa

SEQ ID NO: 169591 - DNA, 201 bp, Homo sapiens
ggagagagggaaggtataaggatgaactaggcttctgatatgaaggaccgtactaggtgctatggtttgaatgtatcccccaaaggtcatgtgttagaaayttaatcccacttcccttacgtatgacttaatgttgcatctgtcctcatgaatggactgatggattaatgagggctctggcctcgtgaatggataaatgtc

SEQ ID NO: 169592 - DNA, 201 bp, Homo sapiens
cttaagtccggcagccatgctaattgtttttaaccggccaacaggtgcccagtattttcctccaattctaaggaaggacaggacagaatagcaagcgaaartggtcggatattactcaccgctttagagaatccctgtatgaggccaccaaatgttaccagtgggtctttgttgttagagttcccaagacggtggcgggct

SEQ ID NO: 169593 - DNA, 201 bp, Homo sapiens
agattctttcacttacatgcatgtatatgtgtgtatatgtagtatatgtatatacatacactacatatacacacacatgtataaatatatgtgtgtatacatatatatatatatatatatatatatatttcaaactagttctaccctttttgcttctcagtgtgttgtaccatatggtgtagagcatcatgccaaaagata

SEQ ID NO: 169594 - DNA, 201 bp, Homo sapiens
attgctgagtaacaaatccccaaaaagtttaatggtttaaaataacaactggtctggcctgagtcacttgtgtggcttttctggactctggatgggaactrgatgatccgagatggtctcatcacatacctgggtgggctgcctttccacacggtctttcatcctcaagaaaagtttcttacatggcagttagtgtctcaa

SEQ ID NO: 169595 - DNA, 201 bp, Homo sapiens
acagttcttatgcaaattcatttcatagagggtgtaagcaaccttttgagccaggattgagatagagatttttaaagatgataaccatttttttccaatgygaacttcctttatgtctgtggactagactgtctaaggccgcaagattaggataatgcaggttacactgttaacttttagcaaactttacttttgttgaaa

SEQ ID NO: 169596 - DNA, 201 bp, Homo sapiens
gattctttcacttacatgcatgtatatgtgtgtatatgtagtatatgtatatacatacactacatatacacacacatgtataaatatatgtgtgtatacatatatatatatatatatatatatatatttcaaactagttctaccctttttgcttctcagtgtgttgtaccatatggtgtagagcatcatgccaaaagataa

SEQ ID NO: 169597 - DNA, 201 bp, Homo sapiens
attctttcacttacatgcatgtatatgtgtgtatatgtagtatatgtatatacatacactacatatacacacacatgtataaatatatgtgtgtatacatatatatatatatatatatatatatatttcaaactagttctaccctttttgcttctcagtgtgttgtaccatatggtgtagagcatcatgccaaaagataaa

SEQ ID NO: 169598 - DNA, 201 bp, Homo sapiens
ttctttcacttacatgcatgtatatgtgtgtatatgtagtatatgtatatacatacactacatatacacacacatgtataaatatatgtgtgtatacatatatatatatatatatatatatatatttcaaactagttctaccctttttgcttctcagtgtgttgtaccatatggtgtagagcatcatgccaaaagataaaa

SEQ ID NO: 169599 - DNA, 201 bp, Homo sapiens
agctgagttacaagccccgtgtttaaaggtagatgcggtcaccttccccagctaggcttaggaattcttagtcgacttaggaaatccagctagtcccatcwcttagtcacccctctcaacaggaaaacccaagtgctgttggggaggttggccaacgactgctcttaactgcttcctgctgaactggggcgtagtaggggt

SEQ ID NO: 169600 - DNA, 201 bp, Homo sapiens
atcaaacattggaaattagaaatgacaggatttggggtcttctagccttaatgttattcagagaagatttggttattgcttgtttgtgtaaataggacctyacacttttcaaaatgtgttcacatttctcacgtgctttgattcttacatctatctagtaactgtcatttccattttgtagttgacaaatgtgactcagct

SEQ ID NO: 169601 - DNA, 201 bp, Homo sapiens
tgcatgtcttattttaacagatatctttagattgcctaagcagtttctagaacatgattatactttataacaaaaatccatcagacataactatggacatrtgttcccaactaaaatccgacttttacaaatcttgactgtcttagtcaaatgtgttaataaagatttcaaccctggattaggtacagactggaatggtag

SEQ ID NO: 169602 - DNA, 201 bp, Homo sapiens
cagcatttttgaagctttacgactgtcctcatattcaaccaccattcgttttgttgaggaggatttgactctcagttcagagaccggggactactgtgtgygaaagggagacttggtagccatctttcctccagtcctacatggtgaccctgaaatctttgaagctccagaggtaagtaaacatcaagcctatgattgcta

SEQ ID NO: 169603 - DNA, 201 bp, Homo sapiens
cataggccctcaggcacttcccactttctgcccttgtcacaaagtggctccatcagcctgagagttgtcctccaaagagctacaggaattgggggtgggggactgaaagcaccagaccacaaaatcggggtggggtgcatgcaaaagtggcaagaaggaatgggaaggagattcaacattgtctgctatacagatgatcct

SEQ ID NO: 169604 - DNA, 201 bp, Homo sapiens
gatcataggtaattactgagtaggccacagagataatgtctaaacacatctaacgcaaggtccttatgatcctaatagagtcagtggaactaagtaagtgyagttgattttttcccccaataagtcaactggttgttgatttaattgattaagtagatattttcatgccacacagacatactctagatgtcagcataaaat

SEQ ID NO: 169605 - DNA, 201 bp, Homo sapiens
attatgagacaataaacaacttaaattctaatcacggctgtagataaatatccttggggatatttgagaaaattatgaaaaggtggtgattccccccccccacctttttgaattatgcagattatattctccactggttcttgctttttaccgccctaacatatcagagtgataagatacaacccacctgatacacttggc

SEQ ID NO: 169606 - DNA, 201 bp, Homo sapiens
accaagccatatattaaaagttaatttctgatttaaaagtgtaccttaactgcaaaaccgtcaattctaagtaattctattactcccctcacccccaaaaatcttataaaaaccaaaggacatgataaagagagtgctttgtgcttaatgttttgagattttttttttttggcatggactttgcaacatcaaattaggata

SEQ ID NO: 169607 - DNA, 201 bp, Homo sapiens
gtggcactctcacagttgtctgcagcctcaacttcccaggctcaagtgatccttagacctcagcctccctgatagctgggactacaggagtacaccaccaygcccagctaacttttctatttttttatagagatggggttttgccatgttcctcaggctgttcttgaactcctggactcaaaagattcacctgccatggcc

SEQ ID NO: 169608 - DNA, 201 bp, Homo sapiens
ttatagaactctcttcatggtacttagggaacccttctttccagccatcacctgtcattttggtttggtttagtttggttttaagaatggtagaaaaaaawatatatatatataactatacaaaagctagaatgtattttttaaattaatgctctttatttgtagaggagttttaggtttacagaaaatttagtagttcag

SEQ ID NO: 169609 - DNA, 201 bp, Homo sapiens
aggtcccaatttaaaatacatatacatgttcatgcacacacacaggcacacacacacacacacatacacaaaagtagcatatttctttgccctaggttctytctgccagttattcctaatcctcccagcccctgaaacaaattagtatcacttacgcgagtgttggagtagttttgggaacaacacagtgaaataataaaa

SEQ ID NO: 169610 - DNA, 201 bp, Homo sapiens
ggagaacatttaatcacatgatattttaacttccctgtctgcaaattccattctctctcattttgggagcctgcttttattgatagattgattttttttttcctctatgttttcctgcttctttgcttgcctgataactttttattgcatcctggacattgagaattttatggtttgggatgatggattttgtcatattct

SEQ ID NO: 169611 - DNA, 201 bp, Homo sapiens
ctcaggaatctagaactagaaataccatttgacccagccatcccattactgggtatatacccaaaggactataaatcatgctgctataaagacacatgcayatgtatgtttattgtggcactattcacaatagcaaagacttggaaccaacccaaatgtccaacaatgatagactggattaagaaaatgtggcacatatac

SEQ ID NO: 169612 - DNA, 201 bp, Homo sapiens
ttataagacatcctgtctctctgcaacattagattaaatatttgcttaaaaaaataaatgttgagtttatcctgttgattttctttacctttaaaaaaaaatctcaccatcattgtgtgcagtcatttatcctgagagtagatgatggggacatcagttttcatacgttacatgacacagaaccagaaatgggatgttgtc

SEQ ID NO: 169613 - DNA, 201 bp, Homo sapiens
atcaaaggaaacaatcaacagtgaaaaagcaacctacagaatgggagaaaataattgcaaattatatgtctgatgatgtgttaatatctaggatataaaarcttctacaattcaacaaaaacaatatataaataacccaattaaaaatgatcaaagaactttgaatatacatatctccaaagaataaatacaaatgaccaa

SEQ ID NO: 169614 - DNA, 201 bp, Homo sapiens
gacctaatcaccttccaaaggcctcacccccaaataccatcacactggagattaagtttcaatgtaggaattttgagaggacaaaaacattcagctcatakcaggagccaagatacagaaaaagatcttattccaagattacacattgagtagatggtgaaaccaggagtcagactcagataatctggctccagacgctac

SEQ ID NO: 169615 - DNA, 201 bp, Homo sapiens
gtttctttaaacaggaggtcatggattcatacaaatgtctgccatgttacatggaatttttaccctgtatgccacatataatagaaatgtgaaagaatgtygggagaacatcaaagagaaagcccgaacacctcctggggatgttgaagagggcttctggctttttatttttagactccaatattaaagcttttttttccc

SEQ ID NO: 169616 - DNA, 201 bp, Homo sapiens
ctctacccatgtccctgcaaaagacatgatttcattcttttttatggttgcatgctattccatggtatatatgtatcacatttttttatctgtttcattgrtgagcatttaggttgatttcatgtctttgctattgtgaatagtgctgcaatgaacatctgtgtgcatgtgtctttatggtagaaatagtttatattcctc

SEQ ID NO: 169617 - DNA, 201 bp, Homo sapiens
gtagttttgtgtatatgtatgtgtgtaaatatatatggtgtggcctgaaaaatgctgagctcctgttggctggattattcaaattgcaaatagacaggtcygatctcaaatactgccttccatctcccccagcacacacgtgtgtgtgtgtgcacacccatgcacccttacatcccccaggtgacttcaggcatgggcagt

SEQ ID NO: 169618 - DNA, 201 bp, Homo sapiens
aatcataatgtatatatgaaaaccctgcctgcaccatgttttagttaagtagccatgggcaagttatttaacttttgtgaacctcagttttctaatctgtmacaaagcaacagtaatagtgctttcctcataaagacggttatttggagattaattgaaataatgtgtgctaagtgcttgacagactacctggctcataaa

SEQ ID NO: 169619 - DNA, 201 bp, Homo sapiens
ccatagtgccaatacttagaaacaatcacagttaatttaacattgtggtgtatatcattcaaatatcttttctctcagtgcatgcatttataaagtaaatmattttaaatggagcatttagagagtgtattaacttttcaaagacaatatacttaaagacaagcttttctgtgtttgtgagacctaagttgccagtcgtaa

SEQ ID NO: 169620 - DNA, 201 bp, Homo sapiens
tctcaggttaaataatcacactaccttaacacaactttatttttaaatagccagcagcatttgttgtttgggtgctgtatgtaatttggtaaggaaggtaacgactatagcaaaccaaataatcatgatgttaaataacagtgacaatactgttgaagaggaaaaatccaaaataattgaataccagactatttttcactt

SEQ ID NO: 169621 - DNA, 201 bp, Homo sapiens
accttcattaaatcagttataagttagtgtcatttgtcctgcccactgtggcaagctgttttctgccccaggggtcagacacacttgtccaccccacctggacactcttcctagcctgacccctactcatccttaggatccaacccaaatgccaactgctctgagcaattctctctaaactctcctaccaatttgtttgtt

SEQ ID NO: 169622 - DNA, 201 bp, Homo sapiens
cctttgtttctttcccatcctgcttcaaggaagacaatggtttttcccatcacagatattttgcaagtgtggataaaaaacatagtgacctaaattcattmcataatggcaaggtacccaactgatacctaattagaggtgagtctcatcttttgtcatttggtgagcagactaataaattatcacattatgctttaatat

SEQ ID NO: 169623 - DNA, 201 bp, Homo sapiens
catgaaggtggttttaaagagctggaggggaaccgattaaaaggtttagtgggcatagagttttggtggtggaagatgaaaaccgttctagagatctgttytacaatagtgggaatatacttaacattactaaactgtacacttaaaatggttgagatgataaatttaatattatttgttaccatgattttttaaaaatgc

SEQ ID NO: 169624 - DNA, 201 bp, Homo sapiens
cctaccagtaatgaatgagacttcctaaaattggtctaaaactttctaaatgtttactctcaggctttgcatttgtctctttgtgacttatactagttagycctgcactttgagtaacactgatctttttaactattgtcaagtccccatttctctgagcaaagctttgtctggaagcaggaatgatcttgtcatttgtaa

SEQ ID NO: 169625 - DNA, 201 bp, Homo sapiens
tcttgggctaatgatgaacgaagaggtagttaataactctcactttgaatattcaatagggatgcaactacctgaagtcagtgatttatactttatttagrcctttgaaatgccatatactagatataccaacatatattacataaatagcttgagttgttcctttaatgctcttatacaaccatgatcattaagggtgga

SEQ ID NO: 169626 - DNA, 201 bp, Homo sapiens
tctttcctcttagttgctatttggaccaaaaaaaaaaaaaaagtagtatggaattttttctctctttcagccctctcacccgacatacatatcattatacycccctctccaatgctgtaattggtaagaaataagattaaaatgctgttaagataagttttagtcaaagtaaaaatttaatgatttttttgagttctgaga

SEQ ID NO: 169627 - DNA, 201 bp, Homo sapiens
cttgcttcactgttacacattgtctttaaaaaatggtcctaagatagagaacattctcattgtgtaataaaaacatgatgaccctaaaataaaacattttrttgtttattttgtatttcattcaaaataaccatttaatgattcatgggacctgcaggagtgctaattggatcaacattggagattgctcaattctgtaat

SEQ ID NO: 169628 - DNA, 201 bp, Homo sapiens
tgtgatgcagttcaaactcacaatgtttgacttcaaacttaacttcttaagttttttccttttttgtattctttttaaatctctcttaaaacaatgttctkacatttgcactccccctttactaaaaatgaaaatattaagagctagtacattttaagcattgctagaagaaatgtaagtatgatatgaatacacacattt

SEQ ID NO: 169629 - DNA, 201 bp, Homo sapiens
cacacatttggactttttaaaaagaatatattaagcttaagaacaaagcaggcaaaaatggtctgctgtctccttcttgcactagattgtgtgaaagccamacttgacggtcaacattggcaaatgccttttttgctctatcccatttactggctattgcatccacttgcttactggcttagtagaggtttggggtctact

SEQ ID NO: 169630 - DNA, 201 bp, Homo sapiens
ccaaatttcaaattacttaggggaaacttacttcaaaagcccttttgtgattgtttctttcaaatctataattccagaagtacaacttagtacataatttsgacagggtggggtttctttcctccttctattttccccattgggttcttttttctttttgagaataaatagttctgtttaattaaggaaaatgtcttccaa

SEQ ID NO: 169631 - DNA, 201 bp, Homo sapiens
gggaagacacatcatctacaaggaaataattaagccacagcactgaccaatgtatcattcagagctaaaataagtgatactaacaccagggtttaaaaaamaaagactaggaattcagagcagggaagagccttgtgaaaggaagggatgagcaaagacctacaggagggtcaggcatctacatcaggttgctatttcact

SEQ ID NO: 169632 - DNA, 201 bp, Homo sapiens
cccaattattccagttcagggtctcaggtggccagaccctctcctggcaactgtgggtgcatggcaggagccagcccttgacaggacagcacccatcacasgggccactcacagaaacccacagtcccctagatggagaccatttaggcacagcaacgaacctcaggtgcacagctctgggatgtgagaaaaatatcagag

SEQ ID NO: 169633 - DNA, 201 bp, Homo sapiens
ggactaggttaggaggaatgaattacattcaaagtgaatttacaccttttgcacagttaagaacttgtacttgaaatgaatgtaggtaactgagcctaggtatatcaggagggccaagtgtatacctggttctccaaatttaacttccatgaagaacaccatgttcatgtaaagaaacgtaagaaaaatattctaacttac

SEQ ID NO: 169634 - DNA, 201 bp, Homo sapiens
atatttctgcctcaagtatctggaatttgtatcactggcagctgtcaccacctttattttctgtgtttaattttcgaagggcccatgcagtggtttttttttgtgaattcttagaagttgtagacacttttattttctaaatgaaacaatgcctcagtgccacaggacacagaaggtctgatttcatgtttttcatctaaa

SEQ ID NO: 169635 - DNA, 201 bp, Homo sapiens
aaaccatatttctgcctcaagtatctggaatttgtatcactggcagctgtcaccacctttattttctgtgtttaattttcgaagggcccatgcagtggttwttttttgtgaattcttagaagttgtagacacttttattttctaaatgaaacaatgcctcagtgccacaggacacagaaggtctgatttcatgtttttcat

SEQ ID NO: 169636 - DNA, 201 bp, Homo sapiens
atgtatttacttttaaaggaatttgtatacttttaaagaaaataattgtctgtttcttcaataatttatttttctattgggttctttttctatataatcakcaaagactcttatgtaatgggaattttcatactctttcataccagctgcaattatttttactattgtaatttgcatttgtttaagagtttctggatatat

SEQ ID NO: 169637 - DNA, 201 bp, Homo sapiens
ttgcaccttatattttccactttgcaatacattttagatcccttcctatgtcagtttatagaagtcattatttgtaatgattatataaatatacaccatagatacacaaaaacacacacacaaaacatagatatctttgagcttttgtggaaatatttatgtaagatggtggagttgttatcaaaatgtatgtgtgcttta

SEQ ID NO: 169638 - DNA, 201 bp, Homo sapiens
ccctctgcagttaaaaaatagaatgtaacaaacctgcacgttgtgcacatgtaccctagaacttaaaagtataaaaaaaagagtaaaagaatggaaaaaaagatgtaccatgtaaacattaatcataaaaagctggaaaaggctatattaatatcagacatagtatcccacttcagaacaaggcatattaccagcactaaa

SEQ ID NO: 169639 - DNA, 201 bp, Homo sapiens
tgttcaaccaaaatgattggaaaattagcagtgacaacatggaatctctttgatactgttttatctcccttccctctgcagttaaaaaatagaatgtaacwaacctgcacgttgtgcacatgtaccctagaacttaaaagtataaaaaaaagagtaaaagaatggaaaaaaagatgtaccatgtaaacattaatcataaaa

SEQ ID NO: 169640 - DNA, 201 bp, Homo sapiens
ctcctgagtagctagaggcatgcactaccacgccctgctaatttttgtattttttgtagagacagagttacgccatgttgctgaggttgatctcaaactcytgggctcaagcaatcctcctgcgctggcctcccaaagtgctgggattacaggtgtgagccaccacactaggccaaaaaaataactcttagagatgtgcat

SEQ ID NO: 169641 - DNA, 201 bp, Homo sapiens
ttgtcacttactatctgaccgctaagccacactttgcgctccattattgtgattaacttctacataagatatgcttgcccaattgtcatttgtgatactgyggtgggcgcaagctgccatgcttcccgagagcacatcagccaatcagatttgaccatgttattcggactgttatatgcctgccctgtcacagcagccatc

SEQ ID NO: 169642 - DNA, 201 bp, Homo sapiens
ataattataatgatttgctagatataatagtcttatattacaatattacaatgatttgctagaaaaatgttatttacattttttttccaaaaaaaaaaaaacttattttttggaggcagggtctggttctgttgcccaggctggagtgcagtggtgcaatctcaccttatcgtaccctccactttctgggctcaagtgatc

SEQ ID NO: 169643 - DNA, 201 bp, Homo sapiens
acccagaagctatggcagcagtgcgtgacgaaattgaccgtttgctgcagtcaacaggtcaaaagaaagggtctggatttcccatccacctcaccagagamcaattggacagcctaatctgcctaggtaatttatttttatctgttatgaagaaaagaaggtacctctctgcaaactcggtttatcactcatagctgttta

SEQ ID NO: 169644 - DNA, 201 bp, Homo sapiens
ggaaagcaaaaagactaacaaaccagtatctctgttgtctctcatctgaaaaagggtaattcctgtctctacacaaaagagatcaccaaataagtagaacrtaaaaccaaattcccagttactgctgccaccaatcgggaataacctgttggctatgcacaagcaagaataagaacaacattggccaagaacaaaaaccaa

SEQ ID NO: 169645 - DNA, 201 bp, Homo sapiens
aaactttttgctacctctgataaagaatagactaaattctccaagaccaatctgactggtgtcataataaaaggaggtacacacggaagcacaagggatgygtgcctctggaggaaaggtcaggtgaggactcagtgagaagacaagccaaggagccaggtcttggaagaagtcaaccctgttgacaccttgatcttggac

SEQ ID NO: 169646 - DNA, 201 bp, Homo sapiens
gtaaataaacatagaagaaggaaatgaaattataatgaaccctagcatttagaaatgaaaaactttttataacaatcaaatacatgataaagtatgcaaaragtaggaaattattctgatgacatatggagggttacaaaggaaaaaactttttgctacctctgataaagaatagactaaattctccaagaccaatctgac

SEQ ID NO: 169647 - DNA, 201 bp, Homo sapiens
aaagtagcaatacaaaatttgtaaataaacatagaagaaggaaatgaaattataatgaaccctagcatttagaaatgaaaaactttttataacaatcaaakacatgataaagtatgcaaagagtaggaaattattctgatgacatatggagggttacaaaggaaaaaactttttgctacctctgataaagaatagactaaa

SEQ ID NO: 169648 - DNA, 201 bp, Homo sapiens
ctttcctgtttctaataatttgtttttgaaattaaaatatttctctgggctaacaggtaacaattgtcttgctgtcagtgcttactataaaaatgcaaagyaaaatagtattgggatcatagacacatataacagttactacttcttttaaatcaccaaaatacaaatgcatttggatcaatacttgagtcttcacagtca

SEQ ID NO: 169649 - DNA, 201 bp, Homo sapiens
acaataaatatatttaaaattaatttgtaattcacaatgaatttataatttatgttaatttatcaattcaaattcatattgacatagcttatattactccrtaatagtaacttacaataaagtcaataacatagaatttatttttataatcatactttgtatttagattttaggaataaaatattctataaagtgagggta

SEQ ID NO: 169650 - DNA, 201 bp, Homo sapiens
gttatcactgtttgggttttgtctgtagttttgagagttttaaaattaaattgtaatgtgtttatggtgacttaaaatctgttgatttccccaatcacatygcaggtgtaacatcacgttattataaaactgacagcatcaaggagggacacttcttaacatcaataaatagaattcagaaatgaaaactgtaccaactga

SEQ ID NO: 169651 - DNA, 201 bp, Homo sapiens
gccatgttacatggaatttttaccctgtatgccacatataatagaaatgtgaaagaatgtcgggagaacatcaaagagaaagcccgaacacctcctggggrtgttgaagagggcttctggctttttatttttagactccaatattaaagcttttttttcccaagggaaaaatggatcctcattgcctagaacatttattct

SEQ ID NO: 169652 - DNA, 201 bp, Homo sapiens
tggtggcttgttatggctccaaatatgttattttatactactgagtgaccctggaatgtgttgttaataccattgactcttgggctaatgatgaacgaagrggtagttaataactctcactttgaatattcaatagggatgcaactacctgaagtcagtgatttatactttatttaggcctttgaaatgccatatactaga

SEQ ID NO: 169653 - DNA, 201 bp, Homo sapiens
tctgctctatgttgtctttatactttctctagaaacaatatgacaatggtgatgataataataataataatgaatagccaggtgctgggttaagtgctttyatgtgataatctaatttattccagccaagagcccaatgaaatacataaaattatccccattttacgtatcggtaaagttagttgaatattatatttatat

SEQ ID NO: 169654 - DNA, 201 bp, Homo sapiens
ctcctgccatgggaggatacaggtagaaggagccacttttgaaccagaaagtaggcccttacacgatgccttgatctgccagtgtcttgatcttgaacttyccagcctccagaactatgagaagtaaatttctgttgtttgtaaatcaccatttttgtatttcattatagcagactgaatggactaagacagatcactttg

SEQ ID NO: 169655 - DNA, 201 bp, Homo sapiens
ctggagaaattgggagaacctaaagagaacaaaacacaagaattaagattggtgctgggaagtggtttaaacccagggtagagggagaagcaagttcaacwcagtattaagttactgatcagcagtcccagggactcttcacatttccccttgataacactccagaaaagcttggttccctctcctgctaccacactaagg

SEQ ID NO: 169656 - DNA, 201 bp, Homo sapiens
gaaaaaaacttttagaggtcacagaacaattataatattcttcattgattattaagataatactatggtccaaatgtttgtgttccccctaaattcgtatyttgaaattcgaatctataaggtaatgatgttaggaggtggggtctttgagaggtgactaggtcatgaaggcagagctctcttgaatgggaatagtgtcct

SEQ ID NO: 169657 - DNA, 201 bp, Homo sapiens
ttttatttaaaaaaactttacttctcagtgtttctaatgttttaaattacagtgtactgaataaatattagttttactatttttttcatttccctgtatargtatagccaacagtaacagagatttcaatgctttgaaaaaaacttttagaggtcacagaacaattataatattcttcattgattattaagataatactat

SEQ ID NO: 169658 - DNA, 201 bp, Homo sapiens
tttttgcaattgtaaacatgcacattggaaagctgaagagtaggcgtgtgacctaaaaatattttactttggattttttcaaactgcaattgatagggaakatcccatttatctgcgatcctgaagctgtaaagatatgagcctgggaatagtttgcagctatttgccctatctaaagagaaacaagtgtacattagaaga

SEQ ID NO: 169659 - DNA, 201 bp, Homo sapiens
tcttagacctttccttccaacccagactggctggagctcctatattctcctatttaacagaagttatgatctaagaactttgctttgagtatgaataaccrtgattatgctaatgttttatatcaaaaattacaagtatacagtgatctttgtacaaggaaacttattataatgttgtgctaaaacttaggaaccatctaa

SEQ ID NO: 169660 - DNA, 201 bp, Homo sapiens
tttattagaactttcaactcgaagaaacctatgacatttgttctaatccctcaagttcagaaaggccatccccacactactcagactcatgagaatatgtrcaaattacagtgacctcctattcttttcttagcaattcccatcaaaaccttatccttctgtaaaatcctgtatgttgcagtttaaggccaccatgatttg

SEQ ID NO: 169661 - DNA, 201 bp, Homo sapiens
ttccagaagtacaacttagtacataatttcgacagggtggggtttctttcctccttctattttccccattgggttcttttttctttttgagaataaatagktctgtttaattaaggaaaatgtcttccaaatcaaccagaaatgactctggtgaatagcccctgattatgtgaaagccctggcttctttctataatatcct

SEQ ID NO: 169662 - DNA, 201 bp, Homo sapiens
ttggggaagaggaattctgtttattctgactcaccttaagagagagccagggaagagaaacaggagggcaggagggcagagagatcttcgttctgaggctrcttctgagccctacatcttttagttcaaagtactcagcacaccaaagcatcatactttggagtatcattttcagagccccaatacaagcaaatgaagaaa

SEQ ID NO: 169663 - DNA, 201 bp, Homo sapiens
cattttaaatttttcttaattgagatataattcacacatcataaaatccacacatcataaaatccactatttccaagtgtacaattcatcaggtttttttwagaacattttcattttagaacattttcatcaccccagaaaaaactctgttggcagccactcctcattccttcctcccctcatccctaggttaccactaat

SEQ ID NO: 169664 - DNA, 201 bp, Homo sapiens
ttgacttagcttggacagaatctcccagagtgtgacttcattcagtctaaccctatagcactctggagtatgaattagacctatttgtgttgcaggttcaygctccttcatcccatactcattggatgatagtctcagggtgtgcaaaggatcataggccctcaggcacttcccactttctgcccttgtcacaaagtggct

SEQ ID NO: 169665 - DNA, 201 bp, Homo sapiens
ttggagttctgtgttagaattgtccaagcacattgccctggctgtgaaccttgagtattggttttaagtctgtcagtctaaaaaaactttagattgttctygttgggctttctagactgactttccctgactctgtgggcatgtgtattagcataatctttgcctaaagatttctacttggtcaactgttccctatagtcc

SEQ ID NO: 169666 - DNA, 201 bp, Homo sapiens
tggagcggttgggcctcccgggcctggccctcgccgcggccctgctgctcctggccctctgcttgcttgtccggcgcaccaggtaagcgcctcggccgccwggccacgcatgcgccctgggccccgcgggccgcgcgcgacccagatggcgaggggagtccccctccatgatttccagtgcagacagtcagaacttgctgc

SEQ ID NO: 169667 - DNA, 201 bp, Homo sapiens
attatactgcatttcagtgtatagaagatagcttcatttgtcccagtacagagtcatgttccttatttctaatgtttggatagtttaccctaatgctctaygaaaatgatttttcagatatcatctctaagaacagaaacatggttaagagtccctgatatattcttacagattttttaaagcttatgctaatatgcatga

SEQ ID NO: 169668 - DNA, 201 bp, Homo sapiens
gaagatagcttcatttgtcccagtacagagtcatgttccttatttctaatgtttggatagtttaccctaatgctctacgaaaatgatttttcagatatcayctctaagaacagaaacatggttaagagtccctgatatattcttacagattttttaaagcttatgctaatatgcatgaatatatgttaataaaaatcgtgg

SEQ ID NO: 169669 - DNA, 201 bp, Homo sapiens
agcaagtcattaataacatgtttttgtccaataatgagatatatttttaaatcactgtgtatcataatagacttaggtacagatacccacttcccaaattrttgttgaagataacatataaaaataatctacattgcaaaagacaaacatgaaaacaaagatgtctccattctttccttacttgctcaatccctacaaaaa

SEQ ID NO: 169670 - DNA, 201 bp, Homo sapiens
gttattcaacaagacagagacagtataagaagatgaggtttggggctaacagaataagcctactttgttgaacattttgaatgtacagtgtctatgggatmccctgttgtactgttattttttgcaattgtaaacatgcacattggaaagctgaagagtaggcgtgtgacctaaaaatattttactttggattttttcaaa

SEQ ID NO: 169671 - DNA, 201 bp, Homo sapiens
cacttaaaccagaattaaaagatttataatgaagaggggaaagtatttacagaaaatatgatggagagggggtgataacagattttatttttaacttacarttctggatgtgagacccaaaatagaccttagtgagctaaatgcagggtgctgtcaaggctgtattccttctggaccgtctaggagagaatacatttcctt

SEQ ID NO: 169672 - DNA, 201 bp, Homo sapiens
tgaactgggtttctgattcttcccaccgctagcaaaagttgtccagctatgcccttagctgtctatgcagagcactgtttcctcgcagtaatattagtgcytttaatattagtaatctcctaatattagtgccttctgcaatctggataggtggacgatttcccaaatcatcaattcctggttcctttttgcctaacagtt

SEQ ID NO: 169673 - DNA, 201 bp, Homo sapiens
ggttgtgactgtggggttgatggaaggtggttagaatcaggatacatttttgacagcagagtcaacataatttactaatggactgaacatgatgtgtgagrgagatgggaatcaacaatgaagcttagaagttttgtttcccttttttttggttttgggttttttgtctgattatttagtgaacggtaatatcatttcctt

SEQ ID NO: 169674 - DNA, 201 bp, Homo sapiens
tgtaggtcatcaacaagtaatacattagtaactaaggaaagaactatccttaaataaaatcaatgcccaatcataacatggaaaacaaagcctgtggactrttttctttatagtcattattagttcccaaaatgccgagaaacctgagaatacacagtttactataaggaatataactcattggctccactttagttggag

SEQ ID NO: 169675 - DNA, 201 bp, Homo sapiens
aaatctcctcagctaaatatctaagttcatcatttacaagttttgttttccacataactctaggacacaatagagctatgagttctgcaactttatataargatcccttttactccattttccaataacacattccttagttcttcatttcatgtgagccttcaccagcagtgcctttaacatttcctatttctactgttt

SEQ ID NO: 169676 - DNA, 201 bp, Homo sapiens
aagaaatggcagaaatttcttgaacattttgaaactgaatttcagttgttttcctgattttttctagaagtgtttgataattctcttgagtttttcttaaygataataatcattctaataaacacaataatagcaaccaacatttactgaacatttagtatgtgtcagcttctttgcagaacatttaatatatattatgag

SEQ ID NO: 169677 - DNA, 201 bp, Homo sapiens
ccatgttcagctgcatgggcaaagtatggagcaggcagaggattgtgctaatggagttatagttttgtctataagcttcatgtagaatgagaaggagaacrcagttgagagagagagccagggaatgattatgatgattggccatggaatttaagctgggaaacaagcaagagactacagcacatgggagagggactcaga

SEQ ID NO: 169678 - DNA, 201 bp, Homo sapiens
gcttttctagaacaaacatattcataagaatataaataacaaaattgagtggcaatgataatttacatgttggctggtgtatgacataagaaaggaaaaawaataaacttttattgtgaattattgggtgcctatgtggtgctatgttctttcacatgctattagagagattaaaaggtcagagaggttaggaaccatgcc

SEQ ID NO: 169679 - DNA, 201 bp, Homo sapiens
acaggaaaatcttcatatttgacctttaatttttgcacactctttaaactttttcagattgttaattgtgtgtgtgtgtgtatgctatctgtgtgttctcycaactttcttctgatctctttaatatgtagcagaagtagtatatgaatagtaaattaccaaagctttcatcatctctaagtggaaaacctaagccagggt

SEQ ID NO: 169680 - DNA, 201 bp, Homo sapiens
taaatttcatcaatgagaaatatgtggaaattttgtccccctcttgttgtataaatacctacataatatgattgattttgcctcttggtccacaagtttaraacatttactatccagctttgtacagaaaaaaatttgccggtctccagcctgaccaacatggtgaaaccccgtctctactaaaaatataaaaattagctg

SEQ ID NO: 169681 - DNA, 201 bp, Homo sapiens
agaagggatacttaatcaaaataattttgtatcctgaaaagagaaagaagtcttccctagccaggtgaagaatgtagtgcatgctctgaattgtgagatcrtagagggaattttggaatccaatttcctagcatatactggtcagtaaagctcagttcttaacaactcacaggcagccttatcttaatcacagttgcagtt

SEQ ID NO: 169682 - DNA, 201 bp, Homo sapiens
tggtgaccctgaaatctttgaagctccagaggtaagtaaacatcaagcctatgattgctacttcttagatcctgtgggcacattcctcttccatccctatytcttcctcttgccactttggtccagaaggggtttgaggcagcttgatggcttctattattcctcctaataagaaagctttcctctttactgaagtgttcc

SEQ ID NO: 169683 - DNA, 201 bp, Homo sapiens
acacaggaaaatcttcatatttgacctttaatttttgcacactctttaaactttttcagattgttaattgtgtgtgtgtgtgtatgctatctgtgtgttcyctcaactttcttctgatctctttaatatgtagcagaagtagtatatgaatagtaaattaccaaagctttcatcatctctaagtggaaaacctaagccagg

SEQ ID NO: 169684 - DNA, 201 bp, Homo sapiens
tgcgaaagggagacttggtagccatctttcctccagtcctacatggtgaccctgaaatctttgaagctccagaggtaagtaaacatcaagcctatgattgstacttcttagatcctgtgggcacattcctcttccatccctatctcttcctcttgccactttggtccagaaggggtttgaggcagcttgatggcttctatt

SEQ ID NO: 169685 - DNA, 201 bp, Homo sapiens
tgggcctctgtggcaaacactattccaactatgttctgggcaatgtattatcttctgcggcacccagaagctatggcagcagtgcgtgacgaaattgaccrtttgctgcagtcaacaggtcaaaagaaagggtctggatttcccatccacctcaccagagaacaattggacagcctaatctgcctaggtaatttattttta

SEQ ID NO: 169686 - DNA, 201 bp, Homo sapiens
tccttggtgtgacaaggttacatgcttggacttcgaagaacgtctacatatacttgcttagtatatagaagaaaccaagttggattgcaaagcaaggagarctgatgtgatgctaaatgttaacataaagcttcagatctcaacaaagaagacagacattttagatgctatcaataaattggaaatcaagaacaaacccag

SEQ ID NO: 169687 - DNA, 201 bp, Homo sapiens
tcccagtggtctgactcattctctgcagagtggtttgcttttcctcaaactggacattagtccttggtgtgacaaggttacatgcttggacttcgaagaamgtctacatatacttgcttagtatatagaagaaaccaagttggattgcaaagcaaggagagctgatgtgatgctaaatgttaacataaagcttcagatctc

SEQ ID NO: 169688 - DNA, 201 bp, Homo sapiens
catttctattgcacggggattgatatggtggatgagccccccgagggaatgtgtcattctgccaaatttcaaattacttaggggaaacttacttcaaaagyccttttgtgattgtttctttcaaatctataattccagaagtacaacttagtacataatttcgacagggtggggtttctttcctccttctattttccccat

SEQ ID NO: 169689 - DNA, 201 bp, Homo sapiens
ctgacttgacccctacttgttaaattatcttaaacatttaaagattgttttaaatgtaatagattatctttgtgagcacttcaacttactgttagggcaarcacagttccaatgataaaacattcccaagccctgagacctcctgcagatcttaaaaattaaatttattaatgtaatgcaccaagttggcctcaaatattt

SEQ ID NO: 169690 - DNA, 201 bp, Homo sapiens
aggaaagaattaatctccagtgctggcctggccctctgcaccagcatgctccgagtaatggtgcatttctattgcacggggattgatatggtggatgagcmccccgagggaatgtgtcattctgccaaatttcaaattacttaggggaaacttacttcaaaagcccttttgtgattgtttctttcaaatctataattccag

SEQ ID NO: 169691 - DNA, 201 bp, Homo sapiens
aagccccaaacatctcaaacactgctgttgataggaaggctggtattgcttggaaaaaagaaaagaaaaggaattaccctctgaaactattcctacgctgyaagaattctttggaagattaagcagttgtctgtagcatttaagttcagagttgtacagagaatttgataggactatttcaacagaggatgaagccactgc

SEQ ID NO: 169692 - DNA, 201 bp, Homo sapiens
ggaacccaagtgttacagagaggccatgtggtacagggcaacagggcacggcacagacaacagacagtgttctctgagttctgccactagggtgtggcatyaagccaattgtgtccttgcagggacaaattggagttggaatagcccttaagcatttttaagtcctgaaacactgcttacacacaatcttacatttaattc

SEQ ID NO: 169693 - DNA, 201 bp, Homo sapiens
tctctgtgtgcattatagatatagtcagtactcagctgttaaatccagcaaaaattccattgctttaattaatttctttgtgccgattcttcctagtaagmcttaattttaacaaagttaattaggttgaagattaaaaatcccattagtgtcgatcattcacttcttggctctgtcaacaaggtactaaaaccttgctca

SEQ ID NO: 169694 - DNA, 201 bp, Homo sapiens
gatggagggaggaagatcaaacaaaggttcataagaaaaggcttgttagaactaaacctgaaatgatatgtagaagcttgctaagtaaacaagaaataaargtaaatatggtgtatagggaagagaatctttgtgaaatggcctgtgttccagaattacttgagtataggagtagaacaaagggagaaaaaggaatgaggg

SEQ ID NO: 169695 - DNA, 201 bp, Homo sapiens
tttttttattaagaacactttaggtatatacatgaattttcattggtagcagatgtgcttagagctaggtgcccctgaaagactctcctgtgcactacggkgtattgtaaagatcaacttgcttagtttctgcaagaaagaaaatatcccattctttttgtctttgccttttttcatgtaataaccacaaggtgaaaaaaa

SEQ ID NO: 169696 - DNA, 201 bp, Homo sapiens
aagtcttacccaatgaagacgcaagacagattgtccaagcttgcggctattgttagaggttgatgaagtgtatgggcccttatggttgataacagaagtaratggtcaaagccaataaataaaaccttaactctgattgttggatgctttatgctgaaaaggtttccattagcatggatttttggttttgaaggacttgtg

SEQ ID NO: 169697 - DNA, 201 bp, Homo sapiens
attccacatttcaaccacgtttgtttcagtgttgtacctgatgtacttgatccccagagtggatttttaatacttcttctatatgacagaatcatttagtkatagttaagtaataattagtaatatgtattttcttaatattttggtttttaaaattaataaagaagaaatttcaatgtatagacattactcaaaatcagt

SEQ ID NO: 169698 - DNA, 201 bp, Homo sapiens
tgtgtcttttaaagtatgcacatggtatatacatttaggtctcaaacaaagatgtatgaattaaagttatataataacatatagccaaccttaaagagctwaatttcctcttaatggcatgcatatacagccattagtggatgtttttgcattgctttgagtattaacaatatctctgaatagtctgtgtatctaagtaac

SEQ ID NO: 169699 - DNA, 201 bp, Homo sapiens
atagggaagtctcaaagtagagactgtatttggtcagctctttattctccaagctattgaatgaatgaatgaatgaatgaatatatgaaatgtggaaaaayagtttgattatcaagctagcatgctgtctgaccatcttgatgaagtggaattttaacaaaaagattatgaaagtttcacaggtttatgaatcgccaactc

SEQ ID NO: 169700 - DNA, 201 bp, Homo sapiens
gcataaagaaaaaaagcctttgttagtaatttacaaatagattaaatcaaaaagataattgagaagcttttggcaacccctgctgagaaagtatatagcaytttcattacccagagaccattatgctagttattaattttgataaaatttaaaatgcatctacatatagtttcacaattacataatttaagggaacatttt

SEQ ID NO: 169701 - DNA, 201 bp, Homo sapiens
tttaccagaaaaggaaaaacaacagaaaacaaagcaagcaataaaaggaggcagaaggaaacttttggagatactggataaatttattgcattaattgttwtgatggtttcagaagtagatacttatcttcaaacacaccaagttctatacattaaatatatacagctatttatatgtcaatcatatttcaataaagcagt

SEQ ID NO: 169702 - DNA, 201 bp, Homo sapiens
atgtgtaattatttcatataaatgtaactggcaaactgttttccaaagcgattgtatgatgttagattcccaccagcaatgcatgaatgtttcattttctytacatccttgccaatacttggcattgtcagtctttttgatgataaccatcgaagcagttgtatagtgctatgtcattatggttttaatttgtgtttcctc

SEQ ID NO: 169703 - DNA, 201 bp, Homo sapiens
ttaagaagatagattgaacttccttccactttctctgtcactgctagacttggcagaagattttgactacagcatctttaccttgtagagaactgcacttmgaagcaaagttgaagtgatttatggacctcacagaagggatttatagctcccgtaggaaataattggctcatgacctttaaaattagaggaaatttgcct

SEQ ID NO: 169704 - DNA, 201 bp, Homo sapiens
gtgccttcatccctcaggactttttgtagtatgaagctgtaaggccaaaatgaaggatttgagagttctttctctggagaaatggttgagaaatattttgrtcttgtgaataaagagtttttgtcccagagacaggttatgaaggattgatttaatatttattagccatgcacagtatattaagcactgtatacaacacag

SEQ ID NO: 169705 - DNA, 201 bp, Homo sapiens
tatatttagttgttttattttctaatggctcttttatgtagtgtgttttgagaaaacccaagggtttaacattataacacaactcattgatgataagtatrtggaagctaagattatatggaagagtcaggtagctgacagtctgtatggttagtatggagaatagatctctgaattttcagagaaggaaatggactgaac

SEQ ID NO: 169706 - DNA, 201 bp, Homo sapiens
ggctcacctctgtaatcccagcactttgggagggtgatgcaggaggattgcttgagcacaggagtttgagaccagcctaagcaacatagtgagaccctacytttccaaaaaattaaaatattgtctgggggtggtggcacatgcctgtaatcccagccacttgggaagttgaggtgggaggatcacttgagcaaaggagtt

SEQ ID NO: 169707 - DNA, 201 bp, Homo sapiens
gtttcaccatgctaaccaggctggtcttgaactcctgagctcgtgattcacccacctcaacctctcaaagtgttgggattataggcgggagccactgtgcyggttttgttttgttttgttttgttttttaatagagatgggggtctcactatgttgcctaggcttgtcttgaactcctcggctcaagcagccctcctgcct

SEQ ID NO: 169708 - DNA, 201 bp, Homo sapiens
ttgccaaagacttttgaggctttctttcagataccacgtaagtcattgactcctgacttggtctgaaagtacttcattaggttgctactgatagccacttmgccaagaaagctaacctctgagcaccctctagtgtattgccgatggatttccagaccttacttgtaaaatgttaaagtgtcttttaatccccaagaaaaa

SEQ ID NO: 169709 - DNA, 201 bp, Homo sapiens
cccggtctctactaaaaatacaaaaaattagccgggcgtggtggcgggcgcctatagtcccagctactctggaggctgaggcaggagaatagcatgaaccsgggaggcagagcttacagtgagctgagatcgcgccactgcactccagcctgggcgacagggtgagactccgtctcaaaacaaacaaacaaaataataatt

SEQ ID NO: 169710 - DNA, 201 bp, Homo sapiens
ggtggctcacgcctgtaatcccagcactttgggggaggccagggcgggcagatcacgaggtcaggagatcaagatcatcccggctaacacagtgaaacccsgtctctactaaaaatacaaaaaattagccgggcgtggtggcgggcgcctatagtcccagctactctggaggctgaggcaggagaatagcatgaacccggg

SEQ ID NO: 169711 - DNA, 201 bp, Homo sapiens
ctctttagtgttgtgtcttggttggtaaaaaataaataaaaaaatttgcagccgggtgcggtggctcacgcctgtaatcccagcactttgggggaggccarggcgggcagatcacgaggtcaggagatcaagatcatcccggctaacacagtgaaacccggtctctactaaaaatacaaaaaattagccgggcgtggtggc

SEQ ID NO: 169712 - DNA, 201 bp, Homo sapiens
gcttcccagcttttagaaaacactctttatttaataaaacacagctctttagtgttgtgtcttggttggtaaaaaataaataaaaaaatttgcagccgggygcggtggctcacgcctgtaatcccagcactttgggggaggccagggcgggcagatcacgaggtcaggagatcaagatcatcccggctaacacagtgaaac

SEQ ID NO: 169713 - DNA, 201 bp, Homo sapiens
ccggctaattttttgtattttagtagagacagggtttcaccatgttgcccaggctggtctcaaactcctgagctcaggcaatccacccccctcagcctccygaagtgttaggattacagtcatgagccactgcgcctggctggaattgccaaactttttaaaagtgactgcaccattttacaatccatcaacaatacatgt

SEQ ID NO: 169714 - DNA, 201 bp, Homo sapiens
gagttggtgtgaccactgcataagggatatgatctagggcttcccagcttttagaaaacactctttatttaataaaacacagctctttagtgttgtgtctyggttggtaaaaaataaataaaaaaatttgcagccgggtgcggtggctcacgcctgtaatcccagcactttgggggaggccagggcgggcagatcacgagg

SEQ ID NO: 169715 - DNA, 201 bp, Homo sapiens
gttcaacagtccctgttttcacctgcctttctctccagtcaaacctctggccattcatttgaattctgccctctctggcatcttacagtacctcttccatmgatattaccttcctctcctccattccaaatccaaaggaccattctcttaagtaatgaaggccttacagggtgatgaactgtgaaccccaaacatctgaga

SEQ ID NO: 169716 - DNA, 201 bp, Homo sapiens
ttataacctcagagtgccttaattattggttctaatgttggaagcatttatattcattagaaacattaaagcactgcccaggattcacatgtggctggttraaaaacaatagtaatgagtttccatcccctgctactgcctacttcccaccccttacaacaaccaaaaaacccaaacaaaccaccccagaactctggagat

SEQ ID NO: 169717 - DNA, 201 bp, Homo sapiens
atactatagcctgaccctcttcaccaatccctgcttctgcacttgctactttttaccctgcagtactttttctttcttctgtctctcttaaccactttctracatataatttaatatgtttgatatttattgtctctctcctagaatctaagctgtacaagggcagggatttttgttctgctacaaccacccaaaacagtc

SEQ ID NO: 169718 - DNA, 201 bp, Homo sapiens
caacttccacatcttccttctgtttcttacgggtctccaggtcctttcgaatgttctcaaactcttcaatgtcatcaagctttagctctaggcgtgttggwttccgtctcagcatactgaagtcaacactaagggccaaacccagtgaactattagcaattcacaggattatcctcagcgtccaaacagatcttaaatgtg

SEQ ID NO: 169719 - DNA, 201 bp, Homo sapiens
gatccactgccctgctgtcatgtttaggtggtagacacaattagaggagctgaaattccattcacccaacaagaggtttagtaaacttgatcagatttctrtggaatttgtaggagctttttatagtctgaatgacctatggcctgcgatttggtgagagcagagcagaaagcggcagtggattgacgtttcttctgtaac

SEQ ID NO: 169720 - DNA, 201 bp, Homo sapiens
aatcatggctcacgtctgtaatcccagcactttgggaaaccacggctggtggattgctcgagtccaggagtttgagaacagtccgggcaacatggtgaaamcctctctctccaaaaaaaaaaaaaaaaaaagagccgggcatggtggtgtgtgcctatagtcccagctactcaggaggccggggtgggaggatcacctgag

SEQ ID NO: 169721 - DNA, 201 bp, Homo sapiens
tctgtaaatataatcccagagttataaggttgtaattaagaaattattttttatttttgagacaggatctcactctgttgccctggttggggtgcagtggwtcagacacagctcactacagcttcgaccttctgggcccaagtgattcttctgcctcagccttccaaagtgctgggattacaggcataagctgctctacct

SEQ ID NO: 169722 - DNA, 201 bp, Homo sapiens
gaaccagccaccatcactgcttcaatacattatcatctttttgaatgtacaaaactgaggtcaggagttcaagaccagcctggccaacgtggtgaaacccygtctctactaaaaatacaaaaattagctgagtgtggtggcgggcgcctataatcccagctactcaggagtctgaagcacaaaaatcgcttgaaccctgga

SEQ ID NO: 169723 - DNA, 201 bp, Homo sapiens
tatttctggaaaggattcatgtagcacctctggataatgtctccataaagccagagctttgtcacctcgtaaattaaaattacattatttttattttctcytttgtatcttttctatttctaaatattatattttcaaaatattatctaataaatgtatgttgcttttatgtttaaaagttactgtgttatctacatcttc

SEQ ID NO: 169724 - DNA, 201 bp, Homo sapiens
aggaacttacatttcaactcattgttacaactattttttattgttttgggggaggttattgctgttcttcttaatgtcgtttcagaacattgtgttcaggttttttttttttttttttttgaaatggagtctggctctgttgtccaggctggagtgcagtggcgtgatctcagctcactgcaacctccgcttcctgggttc

SEQ ID NO: 169725 - DNA, 201 bp, Homo sapiens
tttttcccctagacttaaaaggacaacagacatgatgtttggtggaaagcaagtggtagtctgtggctatggagaggtgaagtttaaccttttgtttattrggtgttttaaatggattttgttgaaatattctggaattttttatttgtatggacatatgagtacaccctttaccactttagatgagaaaaagaatttcag

SEQ ID NO: 169726 - DNA, 201 bp, Homo sapiens
ttattatatatggtttcccttttaaattctgtgctctattcttccattattaaaaatagctggcagaacaacctaccaaagcccctttctaccctggggtrtctgagtggtatggccttattactctctcttaccatgatattttgcttacaatgaacaatttagttggtagttggttctttagttttcttttgcttaagt

SEQ ID NO: 169727 - DNA, 201 bp, Homo sapiens
ctgaaagtacttcattaggttgctactgatagccacttagccaagaaagctaacctctgagcaccctctagtgtattgccgatggatttccagaccttacttgtaaaatgttaaagtgtcttttaatccccaagaaaaaaaccgttgctccagctcccatgttgggccaaagtttcaatttaaagttttaacgagtgtctt

SEQ ID NO: 169728 - DNA, 201 bp, Homo sapiens
gggcggatcacgaggtcaggagatcgagaccagcctggctaacacgaagtaagtgatggaactttttaagtttttttttagtagaaaccctgtctctactaaaaaaaacaaaacaaaacaaaaaagcaaaaaaactagccaggcgtggtggcatgcgcctgtagtcccagctactcgggagactgaggcaggagaatcact

SEQ ID NO: 169729 - DNA, 201 bp, Homo sapiens
ataacaccatccacattgagacattgaacgttctcatctctctagaacattcttgtatactctttccctgtcagaagctccctgcctctcacccccacccrtatgtaaccactattcagacttacatcaccccataaattaggttttctgtttctaaacttgagccctacttatttaatactgttaggtgtaatactatag

SEQ ID NO: 169730 - DNA, 201 bp, Homo sapiens
gaggtaggacaatcacttgaacccggagggtggaggttgcagtgagccgagatcgcatcattgcactccagcctgggcaaaaagagcaaaactccatctcaaaaaaaaaaaaaaaaaatctgccattttatgtcctttcttgtgctcaacaagcagtcttttttttttttttaattaaggaagaattgacatcactttccc

SEQ ID NO: 169731 - DNA, 201 bp, Homo sapiens
gaggtcagaggatccatgtaattaggtgtttaggaaaaaaacaagtaaaagcaaaacagccactagaattaggaatggctgttgagccactaacagaaatrccttattaaattggggctgtactgctgaaggggttgttggagctgcttcagggattccaaggaagagtagtcccccactccccagcccaaaaagctggct

SEQ ID NO: 169732 - DNA, 201 bp, Homo sapiens
aggcaagactgaaggaatttctgtaatgctttagacaatgtctttgtcgtttgtagtatgaaactcctctgggaagaattagagtagaaagaggcagcatcctgcagaaatgggtttaaagaaaaaaagtaaagtaaaaaagagaggcagcagcagcaccagtgctgggagtacctagatctgagtctggaaatccaaagc

SEQ ID NO: 169733 - DNA, 201 bp, Homo sapiens
tgcaccctcaacctcctgagctcaatagaacctcccttctcagcctcccgagtagctgggactataggtgcatgccaccatacctggctaatttttttatractttcttgtagagatggggtctcttttttccccctagatggagccttactctgtcacccaggctggactgcagtggcactatctcggctcactgcaacc

SEQ ID NO: 169734 - DNA, 201 bp, Homo sapiens
gtcattttttttagttcatgaagaacttcttatccgatgagttttcctattgctgaaaacaatttgcaagccctaaagcactctgtaggctttatttgttgttatagctatgaaaatgctatgaatccccctaaaaggcaatgtgaagctatttcaatttggcattggtcccttgtcgcaatactcaagtgactcattagt

SEQ ID NO: 169735 - DNA, 201 bp, Homo sapiens
gctgaggcaggagaattgcttgaacccaggaggtggaggttgcagtgagccgagatcaagccactgcactccagcctggctacagagtgagactccatctaaaaaaaaaaaaataaatttacttactagtactggaaagctaactaatatattttaaaaagctttaacaaattagagtggctacctgcaagagttacgaga

SEQ ID NO: 169736 - DNA, 201 bp, Homo sapiens
cactgtaaacttgaactcctgggctcaagagaggcttccacctctgaacctaaaggactaggattacagacatgtgccacctcatccagcctccttctcattcttcttcttcttctttctcttgagacagggtctcactgtgtcacccaggctggagtgcagtggtaccatcatggctcactgcagcctcaacttcccagg

SEQ ID NO: 169737 - DNA, 201 bp, Homo sapiens
actgtaaacttgaactcctgggctcaagagaggcttccacctctgaacctaaaggactaggattacagacatgtgccacctcatccagcctccttctcattcttcttcttcttctttctcttgagacagggtctcactgtgtcacccaggctggagtgcagtggtaccatcatggctcactgcagcctcaacttcccaggc

SEQ ID NO: 169738 - DNA, 201 bp, Homo sapiens
ctgtaaacttgaactcctgggctcaagagaggcttccacctctgaacctaaaggactaggattacagacatgtgccacctcatccagcctccttctcattcttcttcttcttctttctcttgagacagggtctcactgtgtcacccaggctggagtgcagtggtaccatcatggctcactgcagcctcaacttcccaggct

SEQ ID NO: 169739 - DNA, 201 bp, Homo sapiens
gaaacccacccaggaatagaataaagaaactttttacatcctgaggctttaaaaaacaaaatcaaaatccagctatttaaaaaattttaatatctttaaayctttctacaatggagtcatttttttaaaagaaagcactgtcctttgcctggttaatgaataatgtgagtactattttattataaataattgatttccagg

SEQ ID NO: 169740 - DNA, 201 bp, Homo sapiens
gaagggttttaagctggggatgtgatcaaaaccaagcctgtctagtcagtccttccttatgacatactatataattaagtttagtctgttatgttgtggtwacaaacagtccccatattttagtggcttacaataacaaggatttattttttgctcatactgcatgtccattgtgtagctttgttccaagacttaggctag

SEQ ID NO: 169741 - DNA, 201 bp, Homo sapiens
gtcttaaatgatattcttactaatgcttttattattatgaataattgattttattttattcctcccatcatggcttaagtgcaagcccccatgaccacctytgaaagttacacacagttcaatatattctatataaagaaattaaaaaatcatggctcacgtctgtaatcccagcactttgggaaaccacggctggtggat

SEQ ID NO: 169742 - DNA, 201 bp, Homo sapiens
tctgattgtttctttaacttgtctttcttaactatttttctttcttaactcttagtttacatgtagaagaaacttgtgattgaagactgtgcctatttatyaacgcaaatatgacactaaaaattagcatcctgatactactgatttagtgtttacggtgaattattcatagaaatacttgctattttagcgatttttttt

SEQ ID NO: 169743 - DNA, 201 bp, Homo sapiens
agtgcaatggcacggtctcagctcactgcaacctccacttcctgggctcaagcaatcctcccatctcagcctcctgagttagctgggactacaggtacackctgccacgcccagctaatttttaattttaattttaattttttttttttgagacagtcttgctctgttgtccaggctggagtacagtggtgtgatctcagc

SEQ ID NO: 169744 - DNA, 201 bp, Homo sapiens
cctcagctttccaaagtgagttttataataacttgtacataaataaaagcatactctctatacattgttttgcaggttccttttttattcagtagcacatsttagagctctttctgtatcagtacctatagatctgtctcatattttttaactgctcaattaatttcctaagtctatattgttgtttcttaaaccattctt

SEQ ID NO: 169745 - DNA, 201 bp, Homo sapiens
ttaaccaagtttctcttcaaacccctttttaaacttactgtcaggctttcacctacagcatagccattccagtgctttagtaaactgcctctactaagcaytggttattttcttatgtttataagaagtgtcctttccttgattctgccatacctttcttcccaaggaatacttccaaagatgggttttagctcttagctc

SEQ ID NO: 169746 - DNA, 201 bp, Homo sapiens
taacttctcaaaatggtctgtttgcttaaattctttttttttttttttttttgagacaagatctcactgttaccacccagactggagtgcagtggcacaawctcagctcactgcagactcgacttcctgggctcaagcattcctcccacctcagcctcctgagtagctgaaactacaggcgcacgccaacatgcccagcta

SEQ ID NO: 169747 - DNA, 201 bp, Homo sapiens
tttcactattacaaataagcctggattgaacattcttgggcacttatatttctgaacttgagcaagtgtttttattggatagagccctaaaaaagtgaaaytgattggtcaaagattaggtacatataaaattttgctagctgctgccaaattgtcctccagaaaggttgaaccaatttatgaaacttgacatttcaagaa

SEQ ID NO: 169748 - DNA, 201 bp, Homo sapiens
taggacttaatttctagcagaacccaggttgaaaaacgctgcattaatccacgaaactattttataagaagcaaacttctaaaaaactcttcccctaaggraaaaaacctcataaaaacaaatgaacagaagagacttcttttttaatcagaccgttctcagtgatatatttctgaataagctgtctttgcaatgagttac

SEQ ID NO: 169749 - DNA, 201 bp, Homo sapiens
gtcctaaccaacacaggacaggtattctccatctggcatgttggttgctcctttcaacctgctatttgaaatggctcccttcaacatctttctgttcccayagtggggcttgctatggctaatgctgtacttgctgtatgtgttccaggcgagtctgcggacaccagaactgacctgggagcgagtgagatctcaagttga

SEQ ID NO: 169750 - DNA, 201 bp, Homo sapiens
atagcctgcaggtacttaacagaggtaaaaaaatttatatggtgctaggtggctagagaagcttcagtttgctccatggtttggaattttagaggaagcatttttttttttccgagtgttttttattctgtcattccagcggcttcatatacagatagctctgatgatgagacatcgcccagggacaagcagcaaaagaac

SEQ ID NO: 169751 - DNA, 201 bp, Homo sapiens
gataccaaaatatcaaggaggataataatacttttctcaattttgattttcagttggttttttttctttttttatattaaagaacctgaatatgaaaatgyaaaatatacattgtctttatctaggggcccataagttaggagtttttagtgtccttactgttttcttcacattttcctcactttatctcatcttctcaga

SEQ ID NO: 169752 - DNA, 201 bp, Homo sapiens
gcttgtgaaatttctatgtgataagaatacttataacaaaagaaatgtgagttcaagaaacactggggaaatctggcaagtctagaaggaaccctgtattaaaaaaaaaaaaaaaaaagggagagagactggataaggactggaatatagagaatcagaaccctggagcatttgcctccaaaagccctttataaaggaaaa

SEQ ID NO: 169753 - DNA, 201 bp, Homo sapiens
acacaagactttcttactacaccttccaacaccaatcccagtgcttcaggccaaaggagagatgtggaataggagctatttagttatgtgggtgttttgtrtaagagaaacattaacctgtcttaaatttttaaagagcctgcctcaagcacctgaactgatacagtgtgtttataaactcctcaggcaaagatcaggtaa

SEQ ID NO: 169754 - DNA, 201 bp, Homo sapiens
cctagctccttttagtggatctgggcactaatgtgctctttgcttttgaaatgtcattgttcccagatcctcttttttccctctccatacatgtaactggwgttccagaaggcaaagagggaaagaatccatagactcccatagaccccatagattttgagcactccgttgtgatttttttctgccagtcttcttcttttt

SEQ ID NO: 169755 - DNA, 201 bp, Homo sapiens
aggtaataaataagcttctggttttgttttgccttagcactaggtatataacaactgttaaaagttgatacattttccctttagtagacactttagaaggmtataaaagcaacagcacagtccatattctgacagaatgtataatgaagttgggagaccaaacaaatacataggaaatgacataagattatgaataagtac

SEQ ID NO: 169756 - DNA, 201 bp, Homo sapiens
ggatcacttgagcccaggaggtggaggttgcagtgagccgagatcacaccactgcagtccagcctgggtgagagagtgaaaccatgcccccatcccagtgcccccccccaaaaaagctacacaaagtataaggtgctcctattttgcaaataattctgccctctcccctagggggagggggcagaaattagggaatgtact

SEQ ID NO: 169757 - DNA, 201 bp, Homo sapiens
atcgcttgaacccgggaggtggaggttgcggtgagccgagatcgcgccattgcactccagcctgggcaacatgagcaaaaaaaatccgcctcaaaaaaaaraaagaatcccatggccatctccacagagagtcttctccatggttacagagacaccccacacaaaccacacacaccctgagacccacccacacacaaaaac

SEQ ID NO: 169758 - DNA, 201 bp, Homo sapiens
ataaaagcaacagcacagtccatattctgacagaatgtataatgaagttgggagaccaaacaaatacataggaaatgacataagattatgaataagtactrtgtagtcagataatagaatgtgaacagaaacccataagaattaagagtactaaaagcaaagcaaacagttcatttatcccatttagtatccttcttagtt

SEQ ID NO: 169759 - DNA, 201 bp, Homo sapiens
tgggagagtgcctatactttgggagaagaaaaggattaaggaatacagttttataaaccattgttctgacagggagacttaattatctgaccatttattgatttatttttcttttttttctcaagaggctgtgtaaactgaggctgtttatttaaactaagtcttgactgaatatatttaaagtccctttaggctttctga

SEQ ID NO: 169760 - DNA, 201 bp, Homo sapiens
aggtgggaggatcagttgaggccagaagttcaagaccagcctgggcaacatagtgagaccctatctctattttttttaaaaaagggagacagaaaaaaaaraaaaagaactctgtgtattccttctctattcattctcctttatcccttctctccttcccataaggcccacaaaggtaactttgtgtttataactcccctt

SEQ ID NO: 169761 - DNA, 201 bp, Homo sapiens
tactaaaagcaaagcaaacagttcatttatcccatttagtatccttcttagtttttccattcaagtttccccaggcattagttgttttaaatgacccaaastatggagtccaaggcaaaactcaagttggagcttcccattatttagttcccacattatcctattccttcttttaaatcttaatgcctgttgtttctttca

SEQ ID NO: 169762 - DNA, 201 bp, Homo sapiens
gggagagtgcctatactttgggagaagaaaaggattaaggaatacagttttataaaccattgttctgacagggagacttaattatctgaccatttattgatttatttttcttttttttctcaagaggctgtgtaaactgaggctgtttatttaaactaagtcttgactgaatatatttaaagtccctttaggctttctgaa

SEQ ID NO: 169763 - DNA, 201 bp, Homo sapiens
catacccattaaacagtaactctccattccttcctcccccagcccctggaaatcaccattctattttgtcttttatgaatttgacttctctaggtaccttwtataagtagactcatacagtatttttccttatgtctggcttatttcacttagcataatatcttcaaggttcatccatgttgtatcacatgccagaatttc

SEQ ID NO: 169764 - DNA, 201 bp, Homo sapiens
ggagagtgcctatactttgggagaagaaaaggattaaggaatacagttttataaaccattgttctgacagggagacttaattatctgaccatttattgatttatttttcttttttttctcaagaggctgtgtaaactgaggctgtttatttaaactaagtcttgactgaatatatttaaagtccctttaggctttctgaat

SEQ ID NO: 169765 - DNA, 201 bp, Homo sapiens
ttaaatatttttgatctgaggttggttgaatctgtggatgcagaacccatggatatgagggctgactgttggaattgggtagtataaatcctggatactatttttttttttttttcaaaattattttgggtatccaagtcctttgaatttccacatagattttaggataagcttgtcaatgtctacagaaaaagcttgcta

SEQ ID NO: 169766 - DNA, 201 bp, Homo sapiens
tataaatcctggatactatttttttttttttttcaaaattattttgggtatccaagtcctttgaatttccacatagattttaggataagcttgtcaatgtytacagaaaaagcttgctaggattttgatagggatttcattgaatctgtaggtcaattcgggagaattcccatcttaatgatactgagacttctgatacat

SEQ ID NO: 169767 - DNA, 201 bp, Homo sapiens
gagagtgcctatactttgggagaagaaaaggattaaggaatacagttttataaaccattgttctgacagggagacttaattatctgaccatttattgatttatttttcttttttttctcaagaggctgtgtaaactgaggctgtttatttaaactaagtcttgactgaatatatttaaagtccctttaggctttctgaata

SEQ ID NO: 169768 - DNA, 201 bp, Homo sapiens
attgttttcttgattttactttcagattgtttattgctagcataaacaattgtaaaaatacaattttttaaaattgtggtaaagtttactaacaataaactttttttttttttttttttggagacatagtctcacttcctcacccaggctggagtgcagtggcgcgatcttggctcactgcagcctcaacctcctgggctc

SEQ ID NO: 169769 - DNA, 201 bp, Homo sapiens
gaaaatatgtattttatttaaccttcctgtctggtcattagtttctctaggatagaaaccagactttcagtgttacaggtcttttagaatttgtctagcargttttctggtctttaccagaaaacccctttaaaaaaataaagaaaccagactttctttcaaaatgaaaaaccaaccaaaaaaccccatgaaaacaaagag

SEQ ID NO: 169770 - DNA, 201 bp, Homo sapiens
tatgaattaattcttacggtagcactgtgataagcaattgtagtttactaatggcaagaccaaataaagtgaaattcaattaatgtttgttaaatgacgtygagcactatacttagtgcttgtccaaggcttcagagctgtaaatgcaaatggcaaacactgtattttgctaagacagcacctcagtttctctgtctgtaa

SEQ ID NO: 169771 - DNA, 201 bp, Homo sapiens
gatgttttaagtgccttatcccttaaattgtaaactctacaggacttagaccatgtgtgtcttgttcactgtattgttaacagctggcagatagtaaagattttttttttttttttttttttaaataagagtgattaaatcagtttgttttgtgatgcttgtgtgaagagaagtgattagtgtaaactggctttgctttag

SEQ ID NO: 169772 - DNA, 201 bp, Homo sapiens
tggtaacgaattaccattggaatattttttgttgttaatttaactgaaagtaaatcagattcacagttctcaatttttttttttttttgcctttaaaaggaaaaaaaaaaagaatcccccatccttcactttttctgttactgtgtattctgttggattgttgcttaaatacaaaatactaaccttatgcctaatttaggt

SEQ ID NO: 169773 - DNA, 201 bp, Homo sapiens
ccatttatttagattttctctagctgctctttagcagtattttgtactttacactgtataggctattgtaaatgaaattgttttcttgattttactttcarattgtttattgctagcataaacaattgtaaaaatacaattttttaaaattgtggtaaagtttactaacaataaactttttttttttttttttttggagac

SEQ ID NO: 169774 - DNA, 201 bp, Homo sapiens
tgttgttgcaaatgacaggatctcattcttttttatggctgaatagtactccattgcttatatgtaccacatttaaaaaaatctattcgtctgttgatggrcacttaggttgcttccaaatactggctgttgtgaacagtgctacaacaaacatgggagtgcagatatctcttcaatatactgacttcctttcttttgaat

SEQ ID NO: 169775 - DNA, 201 bp, Homo sapiens
ataaggctgcaagcccaagaacctcaactagattgtgcttacatcagtatcagtaatgaccgtgttcaaacagaccctttattgcttttggcaaacatatycaccttccactggctttgttgctgtcaggagagaatgagttgagccatgttagcacttcttgtcctgaattgtttaagctcttgatttggttaattatag

SEQ ID NO: 169776 - DNA, 201 bp, Homo sapiens
ttggaattcaccaagtaagccttctgggccaggttttgtgtgtgtgtgtgtgtgtgtataggaaggtaaggttttttgtttgtttgtttgtttgtttgccstgttacccaggctggagtccagtggcgtgatcttggctcactgcaacctcttcctcctgggttcaagcgattctcctgtctcagcctcctgagtagctgg

SEQ ID NO: 169777 - DNA, 201 bp, Homo sapiens; identical to SEQ ID NO: 30635

SEQ ID NO: 169778 - DNA, 201 bp, Homo sapiens; identical to SEQ ID NO: 30636

SEQ ID NO: 169779 - DNA, 201 bp, Homo sapiens; identical to SEQ ID NO: 30637

SEQ ID NO: 169780 - DNA, 201 bp, Homo sapiens
ttagtgaaatgaatgaatgagaggtctggtgaatggatataaatttgtaggcaatccagatgggaggattcagaaattgaagaaaatctcatgttgtattkttgtttttagagaataagggataaaattgtcttttgggagtacagaggaggtgataggattggggttttgaagacagtgaaggaagtttgaaatgttaga

SEQ ID NO: 169781 - DNA, 201 bp, Homo sapiens
tgggagggagccaggagtaggcagggagagctttttgaatatggtgcaagtctaatacctgtgaaggaagaccgggaagaaaaggctgggtaggaaatctygcagaccacagcatagttgagaaaatcccaggcatgcagatgtagagtccccaggcaaaagttgcttgttagcagaatcccgtatggggcaggtgggcag

SEQ ID NO: 169782 - DNA, 201 bp, Homo sapiens
ctaactgccatctttatatgttctctcaggtgtctgtaaacatttcaaaacttagcatgtcaaaactgaattcctctgaaacttacttcttctacactctkgtcttaaccccaccccccaccgcgccagcaacttgggcagaaagtcctattgtcattgttgactaccctctctaatactaatctgtcagcaaatcctttt

SEQ ID NO: 169783 - DNA, 201 bp, Homo sapiens
caggccaggcacggtggctcacacctgtaatcccagcactttgggaggctgaggcaggtggatcacctgaggtcgggagttcaaaactccatctcaaaaaraaaaaaaagaaaaagaatatgatgtttgagaccatgtgtggtggctcacacctgtaatcccagcactttgggaggccaaggcgggatgattacttgagcc

SEQ ID NO: 169784 - DNA, 201 bp, Homo sapiens
ccctccagcctgggcaacgtgagtgaaactccatctcaaaaaaaaaaaaaaaaagctgatataagacaaattctgatttttaaggtaatgtgccttagttwtgcctgcttagcttgtgccagttaaggctttttactttgattttaagtttccttcctcctacttcatccttttgttgagttgtcattcagatcacaacag

SEQ ID NO: 169785 - DNA, 201 bp, Homo sapiens
ttctgtaactagggtgaaccaccatcattgaaaaggtggaacctgggaccttcggatatgagggcagaaccttgggccccagcatgctatgtttaggacatttggcctcttactaaacccactcagctatgttcctcctttttttctttgtttcttcagcacttatatattcagtttgcactgtattaatttgcacttgtt

SEQ ID NO: 169786 - DNA, 201 bp, Homo sapiens
gcctctggcctcaaaaggtgaagcagaggacatgaaaagcctcactgcgcatcctctgtagactggccagaaccactccgtggttggtggtctcctattargaaggaatgctggttggtggttgtgaggaaaccacaagagggaggggcaatgtcaggaggttggtttatattagcagtggagcaagtaaaaaggctggtt

SEQ ID NO: 169787 - DNA, 201 bp, Homo sapiens
aaagaagtcagagaacaggatacccaaattagccattatggagatggaacagtttctagtggtgataaggtctggagtaaccttggttgtgcttagctgarttagaatggagcagaacgtcattgaagatgacatcaaggaactcgaaggctaaggtctttatgggccacccacgtggattgttgcttgttcagtgtgaca

SEQ ID NO: 169788 - DNA, 201 bp, Homo sapiens
agggatttcattgaatctgtaggtcaattcgggagaattcccatcttaatgatactgagacttctgatacatgaacatggaacttctctccatttatttarattttctctagctgctctttagcagtattttgtactttacactgtataggctattgtaaatgaaattgttttcttgattttactttcagattgtttattg

SEQ ID NO: 169789 - DNA, 201 bp, Homo sapiens
ttaacatgagtggggtgtgtggtgtatgtatgagagagagtagtacaccctccaagttattgagttcactcaaggggtgtgtgtgtgtgtatgtgtgtgtrtgtgtgtgtgtgtgtgtgtgtgtgtacaccctccaacttattgagttcaatcaagccttattaggtatttttttttgagacagagtttcactcttgtcgc

SEQ ID NO: 169790 - DNA, 201 bp, Homo sapiens
taggtatttttttttgagacagagtttcactcttgtcgcccaggctggagtgcagtggcgtgatctcatctcactgcaaactccacctcccaggttcaagygagtctcctgcctcagcctccctagtagctgggattgtaggtgcctgccaccatgcctggctaatttttgtatttttagtagagacagggtttctccatg

SEQ ID NO: 169791 - DNA, 201 bp, Homo sapiens
aaaaaatccaaagtcaagtagttcaggccttgagccagggactttcttggaaattcatatcaattcagttctgtaaacgccacactccccaccccccacamccagccccccgccccgagacatttttggttgtcgcactagcgggaggatactactggcatctagtgaagagaggccaggtattctgctaagcatcctacg

SEQ ID NO: 169792 - DNA, 201 bp, Homo sapiens
tgaaaatgtggcatatgatctgttttaagaaaaaagaggatgaggggaaatagagagagaggaaagtgaggaatttcttttgacgactttttggacaaacttgctattttagttcactccctttttactcctagttctactaggagtaaacgtagtagtttaaactagtaattagtaatttagtaaatttaaactaataat

SEQ ID NO: 169793 - DNA, 201 bp, Homo sapiens
ttagaggaaatatttctaacccaggaatggttgtgttattatagaaaataaaactttttctcatctctagttgcttcaaatggccaatgacttttattttwttattattattattattttgagatagtttttctgtcacttaggctggagtgcagtggtgctcactgcaacctctgcctcccgggatcaagtgattctcct

SEQ ID NO: 169794 - DNA, 201 bp, Homo sapiens
aaaggttacaacttggaaagttttgacacatgtctaaaaccatgaaactattgttacaatgaagataaagaacatatttattacctctaaagtctctctcktttttttttttttttttgagatagagtcttgctctgtcgcccaggctagatggagtggtgccaccttagctcactgcaacctccgcctcctgggttcaag

SEQ ID NO: 169795 - DNA, 201 bp, Homo sapiens
cattccatgccctactcttggaaccagccatttctcccagaatgcctagctccttttagtggatctgggcactaatgtgctctttgcttttgaaatgtcaktgttcccagatcctcttttttccctctccatacatgtaactggagttccagaaggcaaagagggaaagaatccatagactcccatagaccccatagattt

SEQ ID NO: 169796 - DNA, 201 bp, Homo sapiens
ccaggattttcctctgtaaaagtttttttcccagtttataattaatatgttttttgggctgggtgtgatggctcacgcctgtaatcccagcactttgggasgtcaaggttggcagatcacttgaacccaggagttgaagactagcctaggcaacatggtaaaaccccatctctacaaaaaaatacaaaagttagccaggtg

SEQ ID NO: 169797 - DNA, 201 bp, Homo sapiens
cctcctgggttcaagcgattctcctgtctcagcctcctgagtagctgggattacaggtgcctgccaccatgtctggctaatttttgtatttttagtagagrcgtggttttgccatgttggccaggctggtcttgaactcctgacctcaggtgatctgcccgccttggtctcccaaagtgctgggattacaggcgcactgcg

SEQ ID NO: 169798 - DNA, 201 bp, Homo sapiens
aggtaaggttttataaaccacaaatttaatatctttaataaatatttctatatattctatatttatagagctatttagatttactcttgaatgacctttgkgcctttcaaagtatttgttgaatgtcttagcaaaaagctgttcataatttttcttttttctttttcttttttttgagacagggtctcactctgttgccca

SEQ ID NO: 169799 - DNA, 201 bp, Homo sapiens
aactcggctcactgtggtcttgatctcctacgctcaatcgatcttctcatctcaccttccaagtagctggggctatagttgcgtgccaccgtggctggctratttttgtattttttgtagagatgggatatcatcttgttgcccaggcaagtctcaaactcctgggctcaagtgatccacctgcctcagcttcccaaagtg

SEQ ID NO: 169800 - DNA, 201 bp, Homo sapiens
aagcataataaaagatggtagagataaatccaaatgcatcagtaatcatactgaacataaatgaattacacttattgaaacaaagacagattgttgtagcrtgttttcaagatggctgatgttagttccttccctccacatgtgcaccacccccatctagtggtggagtttattcctctgttcataccaaatctgggctgg

SEQ ID NO: 169801 - DNA, 201 bp, Homo sapiens
gtagagcccaatttgaaaatcactggcttaagtcattcccgttgtattttctgattgtaaaatatataaactttatctccttgactagttgtttggcccasgcttgctcataccctgctttgtctttaatacaggtgcttatggaaactctgggtgctctgggggcccagtgccgatgggctgcctgcaacatctattcca

SEQ ID NO: 169802 - DNA, 201 bp, Homo sapiens
aacttagcaagaatccatctcttccaaaaaaaaaagttagctgggcatggtggtgtgcaattgtagtcctagttacctgggaggctgagttcgaggccacrgtcagctattattgcaccactgcactccagctgggatgacagagtgagaccctgtctcaaaaacaaacaaaccaaaaagttggtatgcaaatatctgttt

SEQ ID NO: 169803 - DNA, 201 bp, Homo sapiens
taagcatcatctgtttttctcaaactgcttgatataatggtaactcatatagtttgataatgaggatatctaaaaatgattatttccagttcaaatacgtycattaatctgcatgcttaatcctaatttttttcttgtcacactgccttctgagttattatagtggcttatacattttatggtttctagaatctttttgag

SEQ ID NO: 169804 - DNA, 201 bp, Homo sapiens
tctttatatatgtagcagaggctgcacgtgatggctcacctctgtaatcccagcactttgggagggtgatgcaggaggattgcttgagcacaggagtttgmgaccagcctaagcaacatagtgagaccctacttttccaaaaaattaaaatattgtctgggggtggtggcacatgcctgtaatcccagccacttgggaagt

SEQ ID NO: 169805 - DNA, 201 bp, Homo sapiens
agggtttttatcatgaagtgatgttgaattttatcaaatgctttttcagcatcagttgaaatgatcatatggttcttgtccttcactctgatgataggctrtatcacattgattgattggtgtatgttgatccatccttatatccttgggatacatctcacttgatcatgatgaatgatctttttaatgtgttgttgaatt

SEQ ID NO: 169806 - DNA, 201 bp, Homo sapiens
agaaatagcaattttgttgaactagagccaggtctcaattttctctctggctttctttgtggcaccatactcctgtaaaaccatcaatgctcattaagctrtggatcactttggcttttcttaacctggctaaagcagtgttatccacaagtttcatttcagagaagatagaactttgtaaataacctgaaggcaccttta

SEQ ID NO: 169807 - DNA, 201 bp, Homo sapiens
gcctggttttattgttgaacaagggaaggagaaaatcactttgtcttatctagttaactaaatatttcaaggtaaggatatgaagatagtttaaatttccrttacaactggtatcaaattttgcttctctgctttgattagaaactgtctccacctgctggccgcaattcacttggcatttcatgaggacacctggttttt

SEQ ID NO: 169808 - DNA, 201 bp, Homo sapiens
gaggaagtcctaccttcatatttctgacatggtgacaactgatatgaagagcaaaaggggcaaagactagcagaagagaatgaggggtggaggggcaaaarggtctcaagtacctacccagtgcccggtgcatggtggctgctcagtaatggtagttccttactggtggaagtatggactggtctgaccattttgaaggat

SEQ ID NO: 169809 - DNA, 201 bp, Homo sapiens
ctagagggtaactatagacaagaaagcctgtggtttaatttgataggaaagactctaacctcattgagagaaaacgatcagaaaatattccttttctaatkgcaagagaggaaaaacttataaattaggttcatattatatagggagtggggtattcaccagccagcctatttctgattccttagtgaaatctgatttagg

SEQ ID NO: 169810 - DNA, 201 bp, Homo sapiens
tggctgtaccgtagctcccttgagcattagggggaagaatgaaatcagttacagagctgctaatctctgctccgacagctggaggatgaagctctgggctrgtttctttttaacaggaaggaaattctgaaagccggaatgtgaagaaaaaacttaagaatctcttgtgtcttgtgagctctgtggaaatggcagtgctca

SEQ ID NO: 169811 - DNA, 201 bp, Homo sapiens
gggtcattgaaatcagaagggttagactctctagaggctgttggtctgtttaagaactattccagagaaggaaattaacacttacatgcctgttagtattaggaatttgatgtattaactcatttaattcttagaattctgtgaggtagatggtatatcaatttttctgatacagcaattgaagccagttatcaatttacc

SEQ ID NO: 169812 - DNA, 201 bp, Homo sapiens
cccatctctacaaaaaatacaaaaaaattagctgggcatggtggcacatgcctatagtcccagttactaggggggtgggaggactgcttgaatccagcctsagcaacagagtgaacccttgcctcaaacccctccccctaaaaaaaaaaccccaaaaacttatttgaggaaacccaatacacacataacattttttcaaac

SEQ ID NO: 169813 - DNA, 201 bp, Homo sapiens
tttgaaggatggtacttaatcagattatgcattatgtataccttgtaacccagcaacttttttcctgtatatatacgtgaaagaagttctcacacaggttyataaggggtcattcatttcagtgtatttgttcttgtggaaagtaatttgttgtccataccctttccccagtgatgggtaaaatgtgatcatagatttata

SEQ ID NO: 169814 - DNA, 201 bp, Homo sapiens
tctgacaatatggttgctttttgctaatatacagaaatatcaattgacttttataaattgatcttatagtctttaagtttgctaaatacttttttttttttttttttttttgagagagtctcgctctgttgcccaggctggagtacagtggcacgatctcggctcactgcaacctctgcctcctttgttcaagcagttctt

SEQ ID NO: 169815 - DNA, 201 bp, Homo sapiens
ggaattcagggaagtgatatatcctatcaggtgacacatgatttcagtttgtcccagaactgatgatattcactttaatcccttgattgaggtggtgtctmccaggattttcctctgtaaaagtttttttcccagtttataattaatatgttttttgggctgggtgtgatggctcacgcctgtaatcccagcactttggga

SEQ ID NO: 169816 - DNA, 201 bp, Homo sapiens
tccatatggacaaccaattgttgactgagtatgtcttttctctgtgatacgtgtcatagtccactcaggttgctgtaacaaaaataccatagatagggagkcttataaacaatggaacttgctttctcatggttctggaggctgggagtctgagatcagactggtgatcagattcaatgtctggtgtggcctagctaactg

SEQ ID NO: 169817 - DNA, 201 bp, Homo sapiens
tatctttaaacctttctacaatggagtcatttttttaaaagaaagcactgtcctttgcctggttaatgaataatgtgagtactattttattataaataatwgatttccaggacttcctggggtaggaagaatgtgtcctagctgaataaattaagggaagtgataaggactgaattctgttagtggaagtaataaacgaaa

SEQ ID NO: 169818 - DNA, 201 bp, Homo sapiens
ctcaccacaacctccacctcctgggatcaagcgattctcctgcctcagcctcccgaataactgggattaaaggcatgtggcaccaagcagctaattttgtrtttttagtagagatggggtttctccatgttggtcaggctggtctcaaactcccgaccccaggtgatctgcccaccttggcctcccagagtgctggccttt

SEQ ID NO: 169819 - DNA, 201 bp, Homo sapiens
tcctcattatgagattcaggctatacatctatggtgggaattcagggaagtgatatatcctatcaggtgacacatgatttcagtttgtcccagaactgatkatattcactttaatcccttgattgaggtggtgtctcccaggattttcctctgtaaaagtttttttcccagtttataattaatatgttttttgggctgggt

SEQ ID NO: 169820 - DNA, 201 bp, Homo sapiens
gtattaaaactacaaaactactttttgctaatttgtaaagtggaattaggttctaaactcagataattgtagataggtttttcacccatgggaacttttaytgggacatttgaaaattgtaccagctgcaacacagttttttgttgagacactttcaaaatgtccagattcctggtcctgcccactaaatgccaatagcac

SEQ ID NO: 169821 - DNA, 201 bp, Homo sapiens
tttattcatttattctacaaacccccccaaaattttgcagggaagtaaaacaaaactaagtacccacaatatgtgaggcaccgctctgaacatttttgcatggattatacatatcatttattcttaccacaactctataaagttggtaggattattatcatcgtctcctttttatagattaagtaattgaagcacagacat

SEQ ID NO: 169822 - DNA, 201 bp, Homo sapiens
atgacattttaaatggggtggcacttgggaatgtttttatggagcaggtgcaagatgattggaaatattctgaaaaaccaaactctaaaagctagagagakatagtagcccgcaaagccagccagtctttcacattcttcctaattctttagagctccgaccaaaggtatacgattaggttattcctatgtaaaaatgttt

SEQ ID NO: 169823 - DNA, 201 bp, Homo sapiens
ctattgttttgtattaaaactacaaaactactttttgctaatttgtaaagtggaattaggttctaaactcagataattgtagataggtttttcacccatgkgaacttttattgggacatttgaaaattgtaccagctgcaacacagttttttgttgagacactttcaaaatgtccagattcctggtcctgcccactaaatg

SEQ ID NO: 169824 - DNA, 201 bp, Homo sapiens
gggcatacaactagtgaatattagtgctaggattcaaatcatgcattcttttaccggagcctctgctgttaaattactttcagtgactttacccgagaccttttttttttttttttgcaggatggggtggtattcataaaagaattttataatcatgtgaataataaaatttattgccacaaagtcttttttttttctttt

SEQ ID NO: 169825 - DNA, 201 bp, Homo sapiens
gagcatttgcctccaaaagccctttataaaggaaaatacaggtttaatgtcttgatccctggagaaacctaatctaacctgatcaggggaaggatcttaayttaagaaaacaagtttttctgtttgttcttttatctcttattccttcttctttaatattgctgtatttattgggccttttcagaaatgcctgcattgatg

SEQ ID NO: 169826 - DNA, 201 bp, Homo sapiens
tttgcaggatggggtggtattcataaaagaattttataatcatgtgaataataaaatttattgccacaaagtcttttttttttctttttttttgagacagrgtcttgctctgtcacccaggctggagtgcagtggcgtgatctcagttcactggaagccccacctcccaggttcacgccgttcttccgcctcagcctcccg

SEQ ID NO: 169827 - DNA, 201 bp, Homo sapiens
tggggtggtattcataaaagaattttataatcatgtgaataataaaatttattgccacaaagtcttttttttttctttttttttgagacagagtcttgctstgtcacccaggctggagtgcagtggcgtgatctcagttcactggaagccccacctcccaggttcacgccgttcttccgcctcagcctcccgagtagctgg

SEQ ID NO: 169828 - DNA, 201 bp, Homo sapiens
cacccgccaccatgcctggaaaattttgtttttgtatttttagtagagacggggtttcaccgtgttagccaggatggtctcaatctcctgacctcatgatccgcccgcctcagcctcccaaagtgctaggattacaggtgtgagccactgcgcccggcccaaagtctgtcattttatgatgacaaatatggctaagttttt

SEQ ID NO: 169829 - DNA, 201 bp, Homo sapiens
gaatttactttaacttattcattagaaaggaacttaaatattaggaacaagttatttgggacacagttttatagcttctagactgagaaacgttactcttraaagcatattgctttgggaatgatagtaagaggagtaaagaataaaagcatattgcttacccacttttaaaattatttatttatttattagagatggggt

SEQ ID NO: 169830 - DNA, 201 bp, Homo sapiens
ccaagcactactcccacctctgcctcctgagtagctgtgattataggcgcttgccactgtgcctggctttctcaagttgatcagtgaagacagagtttttgggttttttttttggtatctttcaaagtatggcattgagaaactcatttgtaatggttgcggaaaaggaatttttaaaaaaggaagctaagaaataataaa

SEQ ID NO: 169831 - DNA, 201 bp, Homo sapiens
cacaaatttaatatctttaataaatatttctatatattctatatttatagagctatttagatttactcttgaatgacctttgtgcctttcaaagtatttgktgaatgtcttagcaaaaagctgttcataatttttcttttttctttttcttttttttgagacagggtctcactctgttgcccaggctggcatgcagtggca

SEQ ID NO: 169832 - DNA, 201 bp, Homo sapiens
caaacataggttgatacaatcagatcaactgttagggaaggtgaaagcctgtaatacaagccttgaattgctgtctcaaaatggaggttctttttctttayataactaggtttctttttcttagcagatccagtttgctgaccagaagcaagaattcaacaaacgtcccaccaaaattggacgtcgctctttgtctcgttc

SEQ ID NO: 169833 - DNA, 201 bp, Homo sapiens
gggaggttgaagcaggcagatcatctgaggtcaggagttcgagaccagcctggccaacatggtgaaaccctgtctttgctaaaaatacaaaactagctggkcatggtggcatgtgcctgtaatcccagctacttgggagactgaggcaggagaatcgcttgaacccaggaggcgaaggttgcagtgagccgagatcatgcc

SEQ ID NO: 169834 - DNA, 201 bp, Homo sapiens
tcttcccatggcttcccccaatacttgccttcttagaatactgaagaggttctgtagagcccaatttgaaaatcactggcttaagtcattcccgttgtatyttctgattgtaaaatatataaactttatctccttgactagttgtttggcccaggcttgctcataccctgctttgtctttaatacaggtgcttatggaaac

SEQ ID NO: 169835 - DNA, 201 bp, Homo sapiens
catatgatgtagtcggccaggccattactaccatcctggctatcagcatcacttgtaagaggtcatgtttcaaattataattctcagggtgttgcttgacmtgtttcatatttcaaattataattctcagggtgttgcttgacctgtttcaattttcttccttgttcaggtcactgtactgttattttattacctatgaat

SEQ ID NO: 169836 - DNA, 201 bp, Homo sapiens
tttagtgattataattagtacttgtgatacacaggctaagttctttatgtagagctccttctccccacgtcattttgatgtttactgtttcttttgaatgytttttataatggaaaatgtcgatcatgtactccattactcaccttcaacaattgtgaattcatggccacttgtttcacatatagccctgtccacaccatc

SEQ ID NO: 169837 - DNA, 201 bp, Homo sapiens
gtgctttctttttttgtttttgtttttgttttttgagacggagtcttactctgttgcccaggctggagtgcagtggcatgatctcagctcaccacaacctscatctcccggattcaagtgattctcctgcctcagcctcctgagtagctgggactacaggcacgggccaccatacccggctaatttttgtatttttatagt

SEQ ID NO: 169838 - DNA, 201 bp, Homo sapiens
atttgcctattctggacatttcatataaatgggatcataaccatatgtgtagaccttttggctttcaaagtttcttttttttcttttctttttttcctaartgattcctgtttttttttttttcacttactctgttgcccagtctgaagtgtggtgtggcacgatgatggcccagtgcagcctcaacctcccaggctcaag

SEQ ID NO: 169839 - DNA, 201 bp, Homo sapiens
tctgcattttctaggcttttaagtggaatcaagtagtatgtactctttggggagaggggagtggggtaattctggcttcttccacttagcatcattatttygagatttatttatgttgttgattgatcaaaggtctttttcattgcatagtagtaccatcgtatggttagaccacatttgatttattcgttcacctgttga

SEQ ID NO: 169840 - DNA, 201 bp, Homo sapiens
tcctcgttgttaaatatctggaagtgtgatggttggattatataagtgtacggtttaatttttaagaaaccgccaaactgttttccaaagaggttttgccrttttacattcccaccaggtttgaattcctccacatcctcatcaacatttggtatggtcagtctttatttttagccattctgattagcataaaatagtatt

SEQ ID NO: 169841 - DNA, 201 bp, Homo sapiens
cttaacaacttgactctgacaagtcatgttctcctattatatagtcttatgacatcctgatttctgctttatagcacacattacagatgtattttttaaarctctaaataattaattttgtaactagttatttcttttttgactcactgactagactgaaaactccatgaagataaggaccatctatatctgtcctgtatt

SEQ ID NO: 169842 - DNA, 201 bp, Homo sapiens
taggtgttttagagcagtagttctcaaacttttttgtctcggggccctttacactctttattttttatttttttgtgtgagatggagtcttgctctgttgyccaggctggagtgcagtggcgcaatctcagctcactgcaacctctgcctcccggtttcaagcttctctccatgagacttgccttggccttttgctttttt

SEQ ID NO: 169843 - DNA, 201 bp, Homo sapiens
tgcctgacataaaatagtctaataggactaattcagtcagggttctgactgctgcttctcctagcagtaactcacagtatcacagctgctgagaggtaaakcttaatcaggcttgaatcataaaatgtgtatacatgttctgtgagatagattgtggattcttgattcatcatgctgtcttttgattttggaaaataatga

SEQ ID NO: 169844 - DNA, 201 bp, Homo sapiens
agcactactcccacctctgcctcctgagtagctgtgattataggcgcttgccactgtgcctggctttctcaagttgatcagtgaagacagagtttttgggttttttttttggtatctttcaaagtatggcattgagaaactcatttgtaatggttgcggaaaaggaatttttaaaaaaggaagctaagaaataataaatgc

SEQ ID NO: 169845 - DNA, 201 bp, Homo sapiens
atgatagggatatgagataatgcatatgttaattatctctgttgagccattccacaatgtgtacatatctcaaaacatcatgttatacacataaatatatmcaatttttgtcaattaaaaattaattcattaaaagtaaatatgatacagaactccacccaacattctctgtcaaattttcctcctttatttttcttcata

SEQ ID NO: 169846 - DNA, 201 bp, Homo sapiens
aaattgcttttagagcatgaagtttacagtcaggcagacctggatttgaagcctagtacccccattactaccttttgggtaatttccaaattacacaaatsagtttcctcttctataaaatgaaagtactaattatgattgaggattagaaatatttgtaaaaggtttagcattgagcttggcacataaagtcttaaatga

SEQ ID NO: 169847 - DNA, 201 bp, Homo sapiens
tacaatgatagaaaaagagtttcatgtgcatcgaatgaaaagccaaaagtaatggaactgactcacaactctctaaatatgacaagacatatatgcaaatrtgtgtcaataaaaacttggggcccattttcagcatatgttataatttaaatgactaggctgggcacagtggctcatgcctgtaattccagcaatttggga

SEQ ID NO: 169848 - DNA, 201 bp, Homo sapiens
actgcaatctccacctcctgggtaagggattctcctgccttggcctgccaagtagttgggattacaaatctgaataatttttgtatttttagtgaagatgkggtttcaccatgttggccaggctgatctcaaactcctgacctcaactgatctgcccaccttggcctccctaagtgctaggattataggtgtgagccactg

SEQ ID NO: 169849 - DNA, 201 bp, Homo sapiens
ctcaaatgattctcctcagcctaccaaagttctgggattacaggcgtgagccactgcgccaggccaggaaacctatcttattctgctgaaataagcagtgytgaaaattcacaaactggttaatgtaactctggaaaccacaataattgtgaaaaatgtgaattgtaaaatagtttgtaacatttcaagctgtgggtttgt

SEQ ID NO: 169850 - DNA, 201 bp, Homo sapiens
aatgtcttgcatcagtgttttatagttttcattgtagatatatttcacttatttggttaattcctaggtatttaattttatctgtagttattataaatggsgttacttccttgatttctttttcggattacttgctgttggtatatagaaatgctagtgacttttgtgtgttgattttactgaatttgcttatcagttcta

SEQ ID NO: 169851 - DNA, 201 bp, Homo sapiens
tttcatcctttgaaaataaaaaagaaattcttcatccctccatctggtacttgcaaattaacagggaaacctcaattgccccaagaagtaatgacacactstagctagttcaagcaagtgagccctttgccttctctcctaagctgtgacattggacttcttgttattcctcccatcctttgcactggcattaactcagat

SEQ ID NO: 169852 - DNA, 201 bp, Homo sapiens
taataggtttttggtggcgtctttaggtttttccaaatataaggtcatatcatctacaaacaaggataatgtgacttcttcctttccagtttgagtgcccttatatctttctcttgactcattgctctagctaggacttccagtactatattggatcatagtggtgaaagtgggcattgttgtcatgttctaaatcttaga

SEQ ID NO: 169853 - DNA, 201 bp, Homo sapiens
gcaggtcattgtggtgtgtgcctgtaatcccagctaccaggaggctgaggcatgagaatcacttgaacccagaaggtggaggttgcagtgagccgagatcktgccaccgcactgcagcctgggtgacagagtaaaagtccatctcaaaaaaaaaaaaaaaaagtgtatcaaagatttaaatttgattagaaacatagtagg

SEQ ID NO: 169854 - DNA, 201 bp, Homo sapiens
tttggtcttctctttcttcttttcttccttcctattttccttttagtggatgtgattttctctggtggtatgttttaatttctccctttttattttttgcrtatccactatatgtttttagatttgtggttaccatgaagtttgcaaataatatcttataacccattattttaaactgatgacaacaccgattgtataaac

SEQ ID NO: 169855 - DNA, 201 bp, Homo sapiens; identical to SEQ ID NO: 30633

SEQ ID NO: 169856 - DNA, 201 bp, Homo sapiens
ttgaatccgggaggcagaggttgcagtgaactgaaatcgtgccactggactccagtctgggtgacagagcaataatccatctcaaaaacaaacaaacaaamaaaaaaaaacactttatactttaacttcataccccccactttctaattttttgttgtttctatttatatcttattgtactgtgtcttgaaaagttgtagt

SEQ ID NO: 169857 - DNA, 201 bp, Homo sapiens
agggcttctgtggtctgttccagatgagtatgtggccagcctacacctgcctacctttgatgcccacttgacagagctgacagatgaacaggccaagtatytgggactcaacaagaatgggcccttcaagcctaattactacaggtgccttgggctccccagaaatcagggacacctgggcagtgatgagcttcctgcact

SEQ ID NO: 169858 - DNA, 201 bp, Homo sapiens
aaagtctttatttctccttcatgtttgaagcatattttcactggatatactgttctaggataaaagatttttccttcaacactttaaatatgtcatgccactctctcctggcctgtaaggtttccactgagaggtctgctggcagatgtatttggagctccattgtatgttgtttcttttctcttcctgcttttaggatcc

SEQ ID NO: 169859 - DNA, 201 bp, Homo sapiens
tgattgaaccaaagggactgtggagagtttacaacctatttattttacttaaaacagttactcgaaggaggagataggtttgagtgtaggtttaacagggaaaaaatcttaggtgggaatccagtagagaggggagaaaatggtcagttatgaaaattagccgtcagccattttagtactaatgtcaggctgaaatatgaa

SEQ ID NO: 169860 - DNA, 201 bp, Homo sapiens
atagtttagaagaaatgaaatacaaatgtcacttaaactcatgaaaataaacacaggctgggcacagtggctcacacctgtaatcccagcactttgggagkccaaggcaggtggatcacttgaggtcaggagttcaagaccaacctgggcaacatggtgacacctgtctctactaaaaatataaaaattagccaggcctgg

SEQ ID NO: 169861 - DNA, 201 bp, Homo sapiens
attttctactaactttgggtttggttgggtcttgcttttctacttatttaagatgcattgttaggctatttatttgatgcgtttctacttttttgatatargaacttatagctataaacttccctctttggctgggtgtggtggctcacacctgtaatcatagcactttgggaggctgaggcgggtgaattgcctgagctc

SEQ ID NO: 169862 - DNA, 201 bp, Homo sapiens
gctgggattacaggggtgagccaccacttccagctcctttacactcttaaaaattaaggatcccaaagagtttttgtctctgtgggttatatctatatcartacttacaatgttaggaattaaacctgataatttaaaaatattgattgattgattgatttaaaatagctataaacccgccatgtgttatttattttaaat

SEQ ID NO: 169863 - DNA, 201 bp, Homo sapiens
tctttgatggccaaattcataaaaaactgttggattctcgtatctgcttttgccttatctgatgtgttgccacacatcttgtatcctctggaaaactccamtgtacacttataaaataataagagtaaaaagaacaaatataatcttagggttatcatgaaaatacttttaacctcaagcaccccctccagggatacctca

SEQ ID NO: 169864 - DNA, 201 bp, Homo sapiens
tttgatggccaaattcataaaaaactgttggattctcgtatctgcttttgccttatctgatgtgttgccacacatcttgtatcctctggaaaactccactktacacttataaaataataagagtaaaaagaacaaatataatcttagggttatcatgaaaatacttttaacctcaagcaccccctccagggatacctcaag

SEQ ID NO: 169865 - DNA, 201 bp, Homo sapiens
ctgaaaactccaagcactgtaccgggagtaagtctcagtttaatgtgctttttaaaagtagttgttgttcagtgtttttgtaggctattgctaaccagtgrgagaggaaagttaaggcagctctctgggaaagaaaaaccaaggaattttagagattaaaaatgacctttaaagataatctggtcatcgaattttagacta

SEQ ID NO: 169866 - DNA, 201 bp, Homo sapiens
tcttccctctatttggaatactcttctcaattcccctccaacacacaccaggtaactccccgcttatcctttacctttctgcttaaatggagcttctctcwtgccacggccccaatacacataattggtgcccttgccatatactcccatgtacttatattatcatttctcacacttttatatacttatttaattgcctct

SEQ ID NO: 169867 - DNA, 201 bp, Homo sapiens
aaatgaactaaaaaatgaactactaagttttaaaacagaacttagaggaaatatttctaacccaggaatggttgtgttattatagaaaataaaactttttytcatctctagttgcttcaaatggccaatgacttttattttattattattattattattttgagatagtttttctgtcacttaggctggagtgcagtggtg

SEQ ID NO: 169868 - DNA, 201 bp, Homo sapiens
ttttggtatatgggtaatgcaagccttgtaggatgggttagaaagtatttctccttcagttttctgggagcgtttgtatggaatttgtattctttctttgtttttttttttttttttttttgttcttgtttttgtttttgttttttttttcagacggagtctcactctgttgcccaggctggagtgcagtggcacgatctc

SEQ ID NO: 169869 - DNA, 201 bp, Homo sapiens
ttgaagctttctcttcttcagagaaagataccaaaatatcaaggaggataataatacttttctcaattttgattttcagttggttttttttctttttttawattaaagaacctgaatatgaaaatgtaaaatatacattgtctttatctaggggcccataagttaggagtttttagtgtccttactgttttcttcacattt

SEQ ID NO: 169870 - DNA, 201 bp, Homo sapiens
caggtgatccacctgccttggccccccaaagtgctgggattacaggctagttcttctttaaatatttggaattcaccaagtaagccttctgggccaggttttgtgtgtgtgtgtgtgtgtgtataggaaggtaaggttttttgtttgtttgtttgtttgtttgccctgttacccaggctggagtccagtggcgtgatcttg

SEQ ID NO: 169871 - DNA, 201 bp, Homo sapiens
agtgaactattagcaattcacaggattatcctcagcgtccaaacagatcttaaatgtgtacgtcattcattaaacaaacacttcttgtgttccagctacaragttaaaaggtacagtcataatctcttttcaagccgacctagccccttccccgggaagccagatcttaaatgtacacttgattttttattttacctccaa

SEQ ID NO: 169872 - DNA, 201 bp, Homo sapiens
ttgcttttagagcatgaagtttacagtcaggcagacctggatttgaagcctagtacccccattactaccttttgggtaatttccaaattacacaaatcagyttcctcttctataaaatgaaagtactaattatgattgaggattagaaatatttgtaaaaggtttagcattgagcttggcacataaagtcttaaatgatat

SEQ ID NO: 169873 - DNA, 201 bp, Homo sapiens
aggtgatccacctgccttggccccccaaagtgctgggattacaggctagttcttctttaaatatttggaattcaccaagtaagccttctgggccaggttttgtgtgtgtgtgtgtgtgtgtataggaaggtaaggttttttgtttgtttgtttgtttgtttgccctgttacccaggctggagtccagtggcgtgatcttgg

SEQ ID NO: 169874 - DNA, 201 bp, Homo sapiens
gaataaattaacaactctttcaaacggatcagctccactttatacacccaaaaacagagactgagacttaaaccaaagactgactccagaacacatgaccrctatatttaaatggccattgggaagcataaaaatcatcatgactctgaaaaagaatttgagatttcaggatattctgaatatgaacactttcttcaaaag

SEQ ID NO: 169875 - DNA, 201 bp, Homo sapiens
ttggctgtggaactggtgactgttgcatttgttttttaactttcatgtataaacatttattttaagtcacatttccatagatggttttccttacttcattyacatatcatcagttttcttagttttgttactctgctcagccacacaagggaaataaactttttacaagagccagaattcccaagtgcagtagttaataag

SEQ ID NO: 169876 - DNA, 201 bp, Homo sapiens
atttggaattcaccaagtaagccttctgggccaggttttgtgtgtgtgtgtgtgtgtgtataggaaggtaaggttttttgtttgtttgtttgtttgtttgycctgttacccaggctggagtccagtggcgtgatcttggctcactgcaacctcttcctcctgggttcaagcgattctcctgtctcagcctcctgagtagct

SEQ ID NO: 169877 - DNA, 201 bp, Homo sapiens
  misc_feature (1)...(201): n = A,T,C or G
gtagagacgtggttttgccatgttggccaggctggtcttgaactcctgacctcaggtgatctgcccgccttggtctcccaaagtgctgggattacaggcgnactgcgcccagccaggtaaggttttataaaccacaaatttaatatctttaataaatatttctatatattctatatttatagagctatttagatttactct

SEQ ID NO: 169878 - DNA, 201 bp, Homo sapiens
cacgtgtttaaaactgccacattttctcttcatagagtagatggcttctattgagaatagcacataagtactgaagtttcttttcttttcttttctcttctcttcttttctcttctcttttctttccttttttttttttttttttgacggagtcccactctgtcacccaggctggagtgcagtggcatgatcttggctcac

SEQ ID NO: 169879 - DNA, 201 bp, Homo sapiens
acgtgtttaaaactgccacattttctcttcatagagtagatggcttctattgagaatagcacataagtactgaagtttcttttcttttcttttctcttctcttcttttctcttctcttttctttccttttttttttttttttttgacggagtcccactctgtcacccaggctggagtgcagtggcatgatcttggctcact

SEQ ID NO: 169880 - DNA, 201 bp, Homo sapiens
atgttatatctggaactgaatttaaaatatgtgctaaagtgggtaatatcaggtatcatttattgagtgcttaattactgtatgccaagcattgcagtaarcactttacatacattatcttacttaatctgcttaacaacttgactctgacaagtcatgttctcctattatatagtcttatgacatcctgatttctgcttt

SEQ ID NO: 169881 - DNA, 201 bp, Homo sapiens
cgtgtttaaaactgccacattttctcttcatagagtagatggcttctattgagaatagcacataagtactgaagtttcttttcttttcttttctcttctcttcttttctcttctcttttctttccttttttttttttttttttgacggagtcccactctgtcacccaggctggagtgcagtggcatgatcttggctcactg

SEQ ID NO: 169882 - DNA, 201 bp, Homo sapiens
acaacaaaagcaggtttatgagatttcaaaaaaagatactttcctgtccaaagtgcttgttttgctgaagatactcagaggcttacataggctctagcctygtctcccttcctaaggctcctagtactaagttttgccatgctttcatttaggaacctctgccagcttttctcaaccagggatcctcatctgaatcacaga

SEQ ID NO: 169883 - DNA, 201 bp, Homo sapiens
cttcatagagtagatggcttctattgagaatagcacataagtactgaagtttcttttcttttcttttctcttctcttcttttctcttctcttttctttccttttttttttttttttttgacggagtcccactctgtcacccaggctggagtgcagtggcatgatcttggctcactgcaacctctactcccaggttcaaacg

SEQ ID NO: 169884 - DNA, 201 bp, Homo sapiens
tgcaatggcacaatcctggctcactgcaacctccacctcccgggttcaagcgattcttctgcctcagcctcccaagtagctggaattacaggcatgcgccrccatgcctggctaattttgtatttttagtagagacgggggtttctccatgttggtcaggctggcctcaaactcccgacctcaggtgatccacctgccttg

SEQ ID NO: 169885 - DNA, 201 bp, Homo sapiens
gtgggccgggcgcagtggctcacgcctgtaatcccaacactttgggacgccgaggtgggtggatcacgaggtcaggagatcgagaccatgctggctaacaygatgaaaccgcatctctactaaaaatacaaaaaattagctgggcgtggtggcgggcgcctgtagtcccagctacttgggaggctgaggcaggagaatagc

SEQ ID NO: 169886 - DNA, 201 bp, Homo sapiens
cctcataaatataaaacagtgttccaaattctataaaatggacataaacatattgaatacattgagtatgcaagttgcccccaaagtataattaagaataygtacagcatacataaattttaaatttggtaatttcttaagcacctactatatcgcaggtattgtaggcaaatcaaagtaggctaagcccctgaagagcct

SEQ ID NO: 169887 - DNA, 201 bp, Homo sapiens
ccaggctggagtgcagtggcgcgatctcggctcactgcaacctcttccaagttcaagcgattctcctgcctcagcctcctgagttgctgggattttaggcrcgggccactgcacctggctaagttttgcatttttagtagagacggggtttcaccacattcaccaggctggtctcgatctcctgacttcaggtgatctgcc

SEQ ID NO: 169888 - DNA, 201 bp, Homo sapiens
  misc_feature (1)...(201): n = A,T,C or G
ccagttgagattctaagttttttggctttggttatttctggaaaggattcatgtagcacctctggataatgtctccataaagccagagctttgtcacctcntaaattaaaattacattatttttattttctcctttgtatcttttctatttctaaatattatattttcaaaatattatctaataaatgtatgttgctttta

SEQ ID NO: 169889 - DNA, 201 bp, Homo sapiens
taatcccagcactttgggaggctgaggtgggcggatcacgaggtcaggagatcaagaccatcctggctaacacggtgaaaccccgtctctactaaaaatamaaaaaaattagcctggtgtggtgggcgcctgtggtcccagctactcgggaggctgagggaggagaatggcatgaacccaggaggcggagcttgcagtgag

SEQ ID NO: 169890 - DNA, 201 bp, Homo sapiens
gacactcccaaatatttgaagggtgttaacattggaagaagagaagaattatttagcctggactacagaactttgtaagaaggtgaaaccaagggcagggmaaatttatacctctctaaaagaaatgccctgatgtagtttttgggtgattcgggtgccttcatccctcaggactttttgtagtatgaagctgtaaggcca

SEQ ID NO: 169891 - DNA, 201 bp, Homo sapiens
agttttaaaatagaccttcaaaaaatatagtcactgaaacttaaaatttggtggacaatatcaatggtagaatggatacattatggtatattcatagaacrgaatactattaagcaatggaaatgaataaattgctgctatgcataagatcatggctgaataacaataatgttgaaggaaggaagccagatgtaaaataat

SEQ ID NO: 169892 - DNA, 201 bp, Homo sapiens
tggataaaccggtatcgagctcacgggatgtaaagagtgttattaaaatgatggttcatggaatgtaagggtaagaaatcatggataagaaggaaaggaaraaaggagatgaccgagagattgaagtaaaagaattagtgagctaaagtctgtgaaattatagtagagaaaattaaacaagcaagctaaaaagaagtcaga

SEQ ID NO: 169893 - DNA, 201 bp, Homo sapiens
catttttttttaacctgtgggtcattcatggtataggtttgcgtagagagcttgatggaacttaagaatgacttaggaattatttagttgtaaattaaatkatttttaagctacattaatgtgggcaggggatggcgctttggattattttggttgagagagaacactgaaactacatagccagatttcttgtgactcggg

SEQ ID NO: 169894 - DNA, 201 bp, Homo sapiens
aaaaaaaataaaataaaataaaatttcatttcaaatagatggaagagtcatgagaaaagtgtactcattatccagtttaacaaatgttttcattttgcaaratttctttattttttaaagatgtaaaacattggataaaattgaagacgcagctggccacagtggctcacgtctgtaatccctttgagaggccaaggtggg

SEQ ID NO: 169895 - DNA, 201 bp, Homo sapiens
cttgccgctgctatagccattattgtaaaaggccgactgcttatactctttttcccctcctttcctgctttcatccctccctctggcataaggtgagctayccctcttttaacagtctctttccctcccttgccttaatgcctgttggaattaggcagttctctctcaaatggaaaaggaggattaccttaaaagaccctg

SEQ ID NO: 169896 - DNA, 201 bp, Homo sapiens
ttgctcttgttgcccaggctggagtgcaatggcacaatcctggctcactgcaacctccacctcccgggttcaagcgattcttctgcctcagcctcccaagkagctggaattacaggcatgcgccaccatgcctggctaattttgtatttttagtagagacgggggtttctccatgttggtcaggctggcctcaaactcccg

SEQ ID NO: 169897 - DNA, 201 bp, Homo sapiens
atgcaaatgtttcaaaatatacttgtttaggttttcatgtttcatgcattttcaaaggagtaaaaataattacagaaaagagaaacaaatgtagtttatarttatatcttttctgcttaactattatgatttagttaatcaaacacaaggtaaaaagctgaacttgaattcttgttctgtagtactttaaccaagtgttta

SEQ ID NO: 169898 - DNA, 201 bp, Homo sapiens
ccaaagtgctgggattacaggtgtgaaccactgtgcccgtccatgccataatttaagtcagtcttctataaggatttaaattattttcagtctttcttttytttgagatggagttttgctcttgttgcccaggctggagtgcaatggcacaatcctggctcactgcaacctccacctcccgggttcaagcgattcttctgc

SEQ ID NO: 169899 - DNA, 201 bp, Homo sapiens
gctttttctcaactgccttcagtgtgaaatagttcttatgccagggtagcatactctgaaccccttcgttagaattaactaaaagcatagcatataattctttggtaccacttaccagagaaagaaagggaaagtataggaatgaagagatctggcggcggcagtggctggcagggtggtgatggaggtgggaggcagatg

SEQ ID NO: 169900 - DNA, 201 bp, Homo sapiens
gtgaaagtcttcaagataatgttgagggggaaaactggatgcagaactacatgtatgatatgctaccatctgtgtagaaaaagaaacaataaccccccccmcacacacacacatacatgcttttatgaaaagaatgtctctacaagaatgcacaagtaagatttctctctagagaggatattcaggtgctgaaggaaaagg

SEQ ID NO: 169901 - DNA, 201 bp, Homo sapiens
acaaagcttttgttaatcaccagacctcacagtggtctcgcagcacctcttaaagcagtggttctcaaaatgtggtccatggactcccaggagtccctgayactgtttttcaaggtctgtgaggtcagagctgttttcataataatactaaggtgtttgccttttctatggtgttgacattttgcactaatggtatataag

SEQ ID NO: 169902 - DNA, 201 bp, Homo sapiens
tcaccgtgttggccaggctggtctcgaactcctgaccttaggtgatccacctgcctcggcctcccgaagtgctgggattacaggggtgagccaccatgccyggccattctttacattctttacattctttacaacctcattctccctttcattcactaaattccagccacacaagtaatctttctattccttaaacatgcc

SEQ ID NO: 169903 - DNA, 201 bp, Homo sapiens
attccagaaaaattagaaaacagaccagcaatttaggaactgtgtaggccctgttgatctcctaatggaaacagagatccttagttcatgttgattaagargggagggtctctgatttacttaaggccttgaagatactccaaaagtttgtcaaaagtcacagagaagaaaagtgtcaccttccacataaaatccatgggg

SEQ ID NO: 169904 - DNA, 201 bp, Homo sapiens
cctccttgggctaataagagcagaatgaccaacaaagacaaaggaatggataaaggggctgaaggcaacgccaatcagtgaagaatgtcaatccaaggagyatagcagaatgagagagttggaaattaggaaaaaccagaatcttctcactaaaattagggggtcagccttttttggtctttaatggtttccctttgttcc

SEQ ID NO: 169905 - DNA, 201 bp, Homo sapiens
gaatggcgtgaacccgggaggcggggcttcctgtgagcagagatcgcgccactgcactccagcctgggagacagagcgagactccgtctcacacacacacaaaaaaaaaaacaaaaaggaatgaaattctgccatatgctacaatatggaggatccttgagaacattatgctaagtgaaatgtcagtcacaaaaggacaaa

SEQ ID NO: 169906 - DNA, 201 bp, Homo sapiens
tgttctcttttccttccttttactcttcagctacctgttctatatttaattcattttaggctttgccctgagctagctagctatttttttttaattttaatttttttttttttgagacggagttttgctcttgttgcccaggctggagtgcaatggcatgatcttggctcaccgcaacctctgcctcctgggttcaagtga

SEQ ID NO: 169907 - DNA, 201 bp, Homo sapiens
aacatttattttaagtcacatttccatagatggttttccttacttcattcacatatcatcagttttcttagttttgttactctgctcagccacacaagggraataaactttttacaagagccagaattcccaagtgcagtagttaataagaaggaacatatggtgtgcaggttactcaatcacatcttatctttggcacct

SEQ ID NO: 169908 - DNA, 201 bp, Homo sapiens
gtgggaggatcacttgaggtgaactcctgggagttcaagacaagcctgagcaacacagtgagaccgctatctctacaaaaaattcaaaaatgtgccaggtrtggtggtgcacacctgtagtctcagctactcaggaggttgaggtggcaggatcacttgagcctgggagttcaagcaatgatcacatcactgcacctcagc

SEQ ID NO: 169909 - DNA, 201 bp, Homo sapiens
gctggtgtgatgtatgggttgtgtttcctgtgactgttttgcacttctgttttcaacctgatgcttcatttgtttctctgggggtaaagaaaaagaacaaygaggagaaaaaacaaaaacagaacttacagaaatggtgctctctgaagtctgcaaagattgcaaacatttctcccctccctgcccgtatttttcccttca

SEQ ID NO: 169910 - DNA, 201 bp, Homo sapiens
cttcaatttcgtagacacagtatgggcacagggattaatgttttttttaaattgttgtgaatggtttttaattgctttatcagaacagcaacaaagagackggaagtgtgcattggttttactgtgtgggaccagctgaattggaaccttggatccaccataactttttgttgtcatagcgtcatgattaaggtatagcgg

SEQ ID NO: 169911 - DNA, 201 bp, Homo sapiens
aaaactatacatagaattaaattcaactgcatataacagtaacccccaataacaatgccttatattgtatatgagtttatttttattaaaaaatcagcttygtttcacattttttacagaatttatggtatttattagattctaacttgagtaagttatatacatgatttattaaatctggtcaattgtaatccagaatgt

SEQ ID NO: 169912 - DNA, 201 bp, Homo sapiens
cacagtcagtcctcattattttcagattccatatttgcaaatttgcctagtcagtaaaatttatttgtaaccccaaatgaatacccccgatccttttgggrtcatagacatgcatagaatggtgaaaaatttgtgtcacctgacatgcattaagaagcaaaaattgtcctggaatacaaaccttcaagaagacctacagag

SEQ ID NO: 169913 - DNA, 201 bp, Homo sapiens
tttctcatagttctggagaccaggaagttcaagaacaaggcaccaatagattcagtttctggttagggcccacttcctggttcatagagagccatcctctmgccatgtccttgcatagtggaagggatgagagagctctcagctctcttttataagggcactaatcccattcagtcctcatgacctaatcatttcccaaag

SEQ ID NO: 169914 - DNA, 201 bp, Homo sapiens
tgtggttcatgtaataccagccaatgtggttgaatgacttacttcagcagaacttagctcaggtgtagaaacagagaaagttgacagtgttttttgctgtktagtttcagtggacagccagacagacaaaggagttagccagatactgactgaagtgataataccttgagttttggctagcctgagaaagaagcgatagtc

SEQ ID NO: 169915 - DNA, 201 bp, Homo sapiens
tgggacgcattgggtcagtcctgaagccagtaaagtgttgaatcttgtccagggggtgctgtgaccactacctggctgctgcgtatgttcactcaaggccytagggctctacagtcagcaggtagtgaagccagctagtcttgtgcctttcccttcagggtggcaagttcccttgggccctgggcaagtccagagatgctg

SEQ ID NO: 169916 - DNA, 201 bp, Homo sapiens
atttaggtgataagtcagaggcaagactgaaggaatttctgtaatgctttagacaatgtctttgtcgtttgtagtatgaaactcctctgggaagaattagmgtagaaagaggcagcatcctgcagaaatgggtttaaagaaaaaaagtaaagtaaaaaagagaggcagcagcagcaccagtgctgggagtacctagatctg

SEQ ID NO: 169917 - DNA, 201 bp, Homo sapiens
taagactggaggcaaaaagagtagcgccaattcttttcttccccaagcagtgcaggtgagcagtgagatccagaactggggcagtggcagttgggatagasagatgtttaattcaagacatagtaaaacattaataaaacgtaattttttttttgagacagggtctcactgtcacccaggctggagtgcagtggcacgatc

SEQ ID NO: 169918 - DNA, 201 bp, Homo sapiens
acagctcactgtagccgcaatcccctgagctcaagcaatcctcccacctcagcctcctgagtagctgggactgcaagcgcaagccaccgtgcctggctaawttttaattttttgtaaagacgggtgtctcatcatgttgcctaggctagtctcgaactcctggactcaagtgatccttctgccttggcctcccaaaatgtt

SEQ ID NO: 169919 - DNA, 201 bp, Homo sapiens
cttcagtttttgaattagtcaaattactcatctaaatttgcagttcatggtctgcttgtccatattaaagtctagggtgtctagattgtgaccaaaaccgrtgaagcctttgtgttttctgatgctgttttaaagcttattataattttcccttctatggggaaagattctgtgctgttttctcttaaagtgaaatgtatg

SEQ ID NO: 169920 - DNA, 201 bp, Homo sapiens
gaatcttaaacatacaatatgaactcttatctggcttccttcactcagcaaaattattttgagattcattcacgttacagcacgtatcaatagttcattcstttataactgaatggatatactgcaatttgttatcaggtttactgttgatggacatttgggtggttttcaatatgaggctattacaaataaagctgttgt

SEQ ID NO: 169921 - DNA, 201 bp, Homo sapiens
tgtgaccttagggaagaaacccacccaggaatagaataaagaaactttttacatcctgaggctttaaaaaacaaaatcaaaatccagctatttaaaaaatwttaatatctttaaacctttctacaatggagtcatttttttaaaagaaagcactgtcctttgcctggttaatgaataatgtgagtactattttattataaa

SEQ ID NO: 169922 - DNA, 201 bp, Homo sapiens
gactggaaataaagatatggaaaaatctattccaaaagaaagctggcatagcaggttaatagtagccaaaactgatttgaaggcaaaaatcattatttgcrttaaaaattatcagaaaaaaattgtaaaggaagaattaagcaagaagctataattccaaatcagtatgcatcttatagcatggccttaaaatagatagat

SEQ ID NO: 169923 - DNA, 201 bp, Homo sapiens
gatatcttatacagtaagagacctattaatatgggatgccatggggccagtccttgaataagttcatctcttttctgtcatggtgatcgtacctattcctktggttttaaatatcatctaacctaaatgctgacaagtcccaaactctcctgaattccagacttgcatctctaactgccatctttatatgttctctcaggt

SEQ ID NO: 169924 - DNA, 201 bp, Homo sapiens
ttgataaatttgcttgatacttaattcatgcttatatccttatcactaaatgcataatatatgtcaaataaattatttgtaatggattttttatggacatyaaaatatattctttattgatattgttccagtgtctgactttcatttataatttcatattaccatttttgctcctatctactactcactttctagctaaag

SEQ ID NO: 169925 - DNA, 201 bp, Homo sapiens
catcacactgaagaattaattcatcctctcagtaatcaattctagtggcaggtaggcagctgctgcctatgagctccaacacatgccaggtggctgtaccrtagctcccttgagcattagggggaagaatgaaatcagttacagagctgctaatctctgctccgacagctggaggatgaagctctgggctggtttcttttt

SEQ ID NO: 169926 - DNA, 201 bp, Homo sapiens
attgacgtttcttctgtaacagttcccaactctaaaattactttgattaaattagatgattatttgtatgggtttcagtctcccttttccccagctgtatygtgcaacagttcagttagctatttccctcttggacgcttgcactaaaagctggtgattttattttctttttttttttcaagggtctatcagtagaaatct

SEQ ID NO: 169927 - DNA, 201 bp, Homo sapiens
ttttgaatatggtgcaagtctaatacctgtgaaggaagaccgggaagaaaaggctgggtaggaaatcttgcagaccacagcatagttgagaaaatcccagscatgcagatgtagagtccccaggcaaaagttgcttgttagcagaatcccgtatggggcaggtgggcaggcactactacccctgccttgctcagtcactgg

SEQ ID NO: 169928 - DNA, 201 bp, Homo sapiens
tcatttcccaaaggcctcacttccaaataccaacacattggagattaggtttcaacatatgaatttgggatgggagtggggtggggacacataggacacaytctaggcactgaataaatgaattgaaatagagaacgtaagctgtctgtgaccagattaaggatatagtactctggaataaggttctagaagccacaatgg

SEQ ID NO: 169929 - DNA, 201 bp, Homo sapiens
ccatcctcctgccttagcctcccaagtagctgtgattacaggtgtgagccactatgctcagctctgctacactccttcagatctctagttcttaatagttwttagtcaggaggtcaatatacaagattacctttttgctacagttacctataactatttagactttttttatttgaaaaaattgaggtgtaaaatacacag

SEQ ID NO: 169930 - DNA, 201 bp, Homo sapiens
agaggtcttaagggaatacttcttaggcttactatgttaaacaatagggcttctagggatcttaagtgtgttttctcacagtagcctcacataagacttgygatagaaaaggtggatgtggcttttgtctgctggagtgaatcccaataagattcataggaaatccacaagattttaaagaaatcataataataaaagagg

SEQ ID NO: 169931 - DNA, 201 bp, Homo sapiens
aagccagatgtaaaataatatatactatgttattttatttatataaagctaaaaacccgggtgcgggtaacattggatttttgtcctgggtgatagttacrtggctgtttcactctgttataattcattgaatttataatttgtatacttcctccatttaatagaaagcagataaggaaaatgtaataaatgtcatagaaa

SEQ ID NO: 169932 - DNA, 201 bp, Homo sapiens
tcaaagggacttgggtgttgagatctgtttttggtcactgcagccatatctgcattaagtggcaccccaaacccagtaatgctgtagttcatacagactcrtagaggtatcacctcgatggtcttgggtaagatccagatgaattctctggattaccaggcagagactcttgttaccttactttcttccaaacaaacggag

SEQ ID NO: 169933 - DNA, 201 bp, Homo sapiens
aaatcagtgttaagtacataagctaaagttacggctgctctggatgactaagagacttagttttaacaaccacatgggaataagagacttttttactcccytgcagaaagctaagttcctcaaagggtttccacattattgaaaagatgatctagaaaaaacatttgccccatggcatagagaaatgtcaaggaagtttgt

SEQ ID NO: 169934 - DNA, 201 bp, Homo sapiens
ttgcaaatattttttcctactccatttcttgtttcttgtaacattgtttattattttcaaagtttttataaacttggatttaccagtttttttcctttttsgcttcaacattttgtgtcttagaattgcctttccaaccccaaatttataaacaacatctgtgttttcttcacctgtttatatggttgtatttattatatt

SEQ ID NO: 169935 - DNA, 201 bp, Homo sapiens
caaagacatagaaaaataaacaggcacagatatatagagacagacacaccgagacccagagggagagttacacacagactccctacacacagagacacttsccccatatatacataacagaacccctgccccaccatgcccaagcctctacccagtcccttcccacacacagagaccccatacccacagagagaaccccac

SEQ ID NO: 169936 - DNA, 201 bp, Homo sapiens
ccatatgtttccatatggacaaccaattgttgactgagtatgtcttttctctgtgatacgtgtcatagtccactcaggttgctgtaacaaaaataccatasatagggagtcttataaacaatggaacttgctttctcatggttctggaggctgggagtctgagatcagactggtgatcagattcaatgtctggtgtggcct

SEQ ID NO: 169937 - DNA, 201 bp, Homo sapiens
ccgctgctgattatttagagcccaagggctgtttagtcagcaggtgatgaatcctgccaggactgtttcccttctggcctaagatatgtctagaaatgtcmgggagctagggcctggaatgggaccttatgatcctgcctggtgctctttcctactgtggctgaactggtatctaagttgtaaaacaacatcctctttact

SEQ ID NO: 169938 - DNA, 201 bp, Homo sapiens
gatcacaccactgcactccagcctgggcaagagtgaaaccctgtctcaaaaaaaaaaaaaaatgtacgacagacttgaatatgtttaggtgcctatggaaragagtttggagaggaagaaagcaagattggaagaagaagggaataaaaatggactgaagtccttgaaaagaaagaaaggaacatgattcaaagcatgaat

SEQ ID NO: 169939 - DNA, 201 bp, Homo sapiens
gcaaaatatttatgttgtggagacatagtaaattatgatacattcatagagcataatactaagcagccatcagaaatgatgttgcacaagtatgcctaatragaaggggaaatgatcattttgttttaagtgaaaacaaaaaaagattatgaaatcacacaaatagaaaatctgaaatttaacatgagtggggtgtgtggt

SEQ ID NO: 169940 - DNA, 201 bp, Homo sapiens
aacccttaggaaagaagcctaatgctgggcagcaagggatgggtataatgaggtgtgtctgacctttcacttggtcatggctgggaactcagatttcaggrcttctctggggtctccttggccaagagatggtcacttcagtcagttggggggcttagaattttatttctcaggaggaacaacattcctttttatgaagaa

SEQ ID NO: 169941 - DNA, 201 bp, Homo sapiens
ttaattcttttaagaggcctcgaagatagctagtgttctccttgttttattgaagaaactgagtgtcgaagagattaaggaatttgtctcaaggttacacrgtaatgtgatggaactaacagagccctaaactgttgcttttcaattcaaatagtactctgttcgaaactcaggatgaaccttctaaatcttttttttttt

SEQ ID NO: 169942 - DNA, 201 bp, Homo sapiens
cagaggattgcttgaggccaggagttcaacatcagccctggcaacttagcgagatctcatctctacccaaaaaaaaaaaaaaaaaaaaaatttttttttargttccaaggtgtctaattgaatgtgccctagaggcactgtgcaaagactacatataggtggtcagtgactgtcaagtatttacactcacaattgaaagga

SEQ ID NO: 169943 - DNA, 201 bp, Homo sapiens
ccaggcacggtggctcacgcctgtaatcccagcaccttaagaggctgagtccagaggattgcttgaggccaggagttcaacatcagccctggcaacttagygagatctcatctctacccaaaaaaaaaaaaaaaaaaaaaatttttttttaagttccaaggtgtctaattgaatgtgccctagaggcactgtgcaaagact

SEQ ID NO: 169944 - DNA, 201 bp, Homo sapiens
agagatactcatttcatagcagaagggtggagtgtattaaaaaaataaatattccttcttcccctctgtttctgggtgtatttctgagatatatttctgartttgggtgtattcactcctgaagttgcatgtaattgcctcttggcactagtttataaaaactagaaagttgaaacagtgatgttattctgagatctgaag

SEQ ID NO: 169945 - DNA, 201 bp, Homo sapiens
gctgaggcaggagaatcgcctgaacccgggaggcggaggttgcagtgagccaagatcacgccactgcactctagcctggatgacagagtgagactccgtctcagaaaaaagcagacctgcttacccatgtgtatcacatagaaggcctgtgtaattgtaagcttcacaattcaggtggtcaaaccagtaagtacataggct

SEQ ID NO: 169946 - DNA, 201 bp, Homo sapiens
ccttggcctcccaaagtgctgggattacaggcatgagccatcacgcccagccagattccaacttttaggagtacttccgtaacaaagaaaacttgtcagargggtgttgtacctgttccatctcatcaccaaccacatggcatagaagtacagaactttgtatatgtggaagatgattctttacccacacatgtaggatca

SEQ ID NO: 169947 - DNA, 201 bp, Homo sapiens
ataattatcacaatcattactgaattatacaataaaataaaacttttcttggtctaaaggtaggcaagctttttctgtaaaggctcagatggtaagtgttktaggctttgcaggctatatgttttttgttgtaactactcaaacctgttattgtagcgaaaaaaagtatataggcaatacataaatgaatgagttccaaaa

SEQ ID NO: 169948 - DNA, 201 bp, Homo sapiens
aaaggggagaatagtagaaccagtgagttgtagttctacactaataaaaaatgcctctatcaatattgatcattatctgttacttgattgaagtccagatyatagttcttatttatgaaaaaccaatctgcatactttaactcagatgtacatttagttattcatattattgtacaactcaattactcagaaacatttgtc

SEQ ID NO: 169949 - DNA, 201 bp, Homo sapiens
atggtgacaggtgcctgtaatcccagctactcgggaggttgaggcaggaaaatcacttgaacccaggaggcagaggttacagtgagccgagatcatgccastgcactccagcctgggccacagaaaaaagaaaagaaaaattctgccttcagtgggagagggtaagaaggaagctgtgcatatgaggtttgcctggtgatt

SEQ ID NO: 169950 - DNA, 201 bp, Homo sapiens
aaaaatacgaaaattagccaggcatggtgacaggtgcctgtaatcccagctactcgggaggttgaggcaggaaaatcacttgaacccaggaggcagaggtyacagtgagccgagatcatgccactgcactccagcctgggccacagaaaaaagaaaagaaaaattctgccttcagtgggagagggtaagaaggaagctgtg

SEQ ID NO: 169951 - DNA, 201 bp, Homo sapiens
aggctgaggcaggagaatcgcctgaacccgggaggcggaggttgcagtgagccaagatcacgccactgcactctagcctggatgacagagtgagactccgtctcagaaaaaagcagacctgcttacccatgtgtatcacatagaaggcctgtgtaattgtaagcttcacaattcaggtggtcaaaccagtaagtacatagg

SEQ ID NO: 169952 - DNA, 201 bp, Homo sapiens
ggtgctggaacaactaaatactgtttgggggcaaagtgaactttgtttctgatctcattccaagtatagaagttaactcaaaatggatcatagactatagmaaaaaacaaaggagaatatcttcatgaccttggggtaggcaaaactttctttgcacacaaaaaatactctaaaagaaaatgttttgatagagttctccaa

SEQ ID NO: 169953 - DNA, 201 bp, Homo sapiens
attcacttgccacctattttgggagttcatgtataagcatataaaattaccattagactgtttcaaagtggtagaccttattttaaagtaagagcatttaytttacatgtttaaaataagggatatgtaaatctttcctttctccctactcacctctgttcaccacaggcagtcattgttgacatcatcttgtgcttcatt

SEQ ID NO: 169954 - DNA, 201 bp, Homo sapiens
attattcttattcttaattttcagttgggaaactaagaagttaactaccttgtcaggcatataattgattcaagatgaaactggtgcacaggccaggcacrgtggctcacacctgtaatcccagcactttgggaggctgaggcaggtggatcacctgaggtcgggagttcaaaactccatctcaaaaaaaaaaaaaagaaa

SEQ ID NO: 169955 - DNA, 201 bp, Homo sapiens
gtgatggaggtgggaggcagatgaagatggaatggaggactgagtatgtgtaagtcattgatagcagtaaaagtgactattgtccccaaagctttcttgtygaatgcctgtgaatttcgagggtgggaataacacactcatggttatcatatgaaacctatttgtggcaagatagtagaaataaaacaaactgtgtaatct

SEQ ID NO: 169956 - DNA, 201 bp, Homo sapiens
tcctgggttcaagcgattctcccgcctcagcctcccgaatagctgggactacaggcacgtgccactacgcctggctaattttgtatttttagtagaggcgrgatttcaccatgttggctaggttggcctcaaactcttgacttaatgtgatccgcccatcttggcctcacaaagtgctgggattacaggtgtgagccacct

SEQ ID NO: 169957 - DNA, 201 bp, Homo sapiens
aaatcttcagaggaagggaaggggaaggaattttccttcctaaaccctcaagaagctctgaaataaaaataattccaaatgcagtgatgtaccttttgtawttttactttatctcatttcatctttttgacgactccatgaggcattattcttattcttaattttcagttgggaaactaagaagttaactaccttgtcagg

SEQ ID NO: 169958 - DNA, 201 bp, Homo sapiens
gactgaaaggtgtattctagctggcatttaaatatatgtttagttggtagaacaattactttgtgtacctatgatgaatgttatttatttggacacatttrccttttcctatttttttcttaattggtttgactgcatctctaaaagctctctttagattgatgccaaaaaatcccacatgtctgacggaagtgccaggaa

SEQ ID NO: 169959 - DNA, 201 bp, Homo sapiens
gacatgggcatacctggttttatgcagtctagacataaaatcttataaacacatacctataaaacacatgttaaaaattggagcctgggccaggcgcggtrgctcacgcctgtaatcccagcactttgggaggctgaggtgggcggatcacgaggtcaggagatcaagaccatcctggctaacacggtgaaaccccgtctc

SEQ ID NO: 169960 - DNA, 201 bp, Homo sapiens
acgatctcaatgggccctcctgtctatccaaggctaattaagcatgaccaagactgtgctttgaataaatacttcgagtcaaaatttagactaaaatgctrggtggaatatttggatttctcttggcaattcagagtggagcttaatagaggcctcctcttccaatagagtcagaagagggtgattaaggaaattgaattc

SEQ ID NO: 169961 - DNA, 201 bp, Homo sapiens
aatctatatccaccacaacactgtagctgttcatctgaacaggatatcttttattagcaaatattttaataagatggggcaggtattgagattagtagacktgttaaggagattgcaatatgtgatgtatagaaaaatcctgggactataacttcataaattagaattttagatccactattaacgtgtaccctggataag

SEQ ID NO: 169962 - DNA, 201 bp, Homo sapiens
attgagattaagacttggatgtgatttgttccaaactaatttagagattgttaattcacttttaggaactaatttcacagtcaacgtgattttttacttaytggttgtgaaaagtgctttatctggtttgtttggtagtaatggagaaagattatttagattaatgtttgtattatttcactttgtatctaatcagttatt

SEQ ID NO: 169963 - DNA, 201 bp, Homo sapiens
ctaggcatatggctcccagtctagttatcctcaatcaatggagccaccttacctgaggccccagatgttatagagcagacacgagctgttcctgctatacyctgtctgaatcagaattgtgagtataataaaatggttgtagttttatgccactaagctttagggtagtttgtagtgatagataactgaaaccaaatttgg

SEQ ID NO: 169964 - DNA, 201 bp, Homo sapiens
aacaactctttcaccatacatttaccaatactgagtatttttccatctttgggggaaagtcttttactggtctttttataatatctgcattcttctgacasaatgaggctgagagtattttcatgcatatattggcaatttatattctttttcttgtaattccctgttcatattcattaacaaattatttattgattgact

SEQ ID NO: 169965 - DNA, 201 bp, Homo sapiens
gacatggtgacaactgatatgaagagcaaaaggggcaaagactagcagaagagaatgaggggtggaggggcaaaagggtctcaagtacctacccagtgccyggtgcatggtggctgctcagtaatggtagttccttactggtggaagtatggactggtctgaccattttgaaggatggtacttaatcagattatgcattat

SEQ ID NO: 169966 - DNA, 201 bp, Homo sapiens
aacttatcagacacctccttcatgtgatattacagcacttcacatatagtatgtcaatcttatgatagtgtacttccatttctttccactcagccttcacrttattattgtcatacattttagttctgcacataactccacagtacctttttatttatttttttataaaaaccttcaaggatatctaaataattgtaaaaa

SEQ ID NO: 169967 - DNA, 201 bp, Homo sapiens
gccattctcctgcctcagcctcccaagtagctgggactacaggcgcctgccaccacgcccggctaattttttgtgtttttagtagagacggggtttcaccrtgttagccaggatggtctcaatctcctgacctcgtgatccacctgcctcagcctcccaaagtgctgggattacaggcatgagccactgtgcccggcctgg

SEQ ID NO: 169968 - DNA, 201 bp, Homo sapiens
ggagtgcaatggcgagatctcagcccactgcaacctctgcctcccaggttcaagagattctcctgcctcagactctcgagtagctgggattacaggcaccygccattgtgcctggctaatttttgtatttttgtagatttcgtagattttgtagattttgtagatttttgtagatgttggccaggatggtcttgaactcct

SEQ ID NO: 169969 - DNA, 201 bp, Homo sapiens
catgtcaccatgcatagctaatttttgtatttttagtagagatgcggtttcaccatgttagccaggttggtctcgaactcctgacctcaagtgatccaccrcccatcccaaagtcttgggattacaggcgggagccaccacgtctggccttatcacagtttttaaaaaaattgagatataaataatatgccataaaatctt

SEQ ID NO: 169970 - DNA, 201 bp, Homo sapiens
tttagctttatctgttttctctgagcctcagtttcctcctgttagattaagatactaatgcctatttaacagggttatggtaaccattaagtgagtttagyatggaaagcacatcatacagcacctaccacatagttggtgctctgtaagtgataggctgaaatggccatcttcatttttttccttctgaaaaaaacccta

SEQ ID NO: 169971 - DNA, 201 bp, Homo sapiens
cattctaggcactgaataaatgaattgaaatagagaacgtaagctgtctgtgaccagattaaggatatagtactctggaataaggttctagaagccacaayggcagtacagagtacattttactaaatttgattctgtttcagtggttggcttatttgctgctttttttagctttatctgttttctctgagcctcagtttc

SEQ ID NO: 169972 - DNA, 201 bp, Homo sapiens
gagacaaggctgagaatggaccccaatggacatcaacatttgagggaattggtgaaggaaaagataatgaaggaaattagaagccagggttgaaggagaargccaggagagtgtggtattccaaaaagaagagagtttttaagaaggaggggaattaagtgttaaatgctatacagatgtaaaataaaatcagtattgaaa

SEQ ID NO: 169973 - DNA, 201 bp, Homo sapiens
ttttgtatttttgtagatttcgtagattttgtagattttgtagatttttgtagatgttggccaggatggtcttgaactcctgacctttgatgatccacccrccttggtgtcccaaagtgctgggattacaggcatgagccaccgtgccctgcccagctttcttttgattaatattagcatagtatatctttttccattctt

SEQ ID NO: 169974 - DNA, 201 bp, Homo sapiens
ttaattttacgttggttggttccctttgccttttccttcagcagctgttacagacttctactcatctcagaccccttcctaatctctgtctcattgtcatmcaacccaccttggatctgggacaccaaaaagtttaggctttctcttgtgaactctttcaacttccttctgactttctcattacatgtctctgtttgacct

SEQ ID NO: 169975 - DNA, 201 bp, Homo sapiens
tcaaacaggcagagtttggacgaagagaaattgaaattgctgaacaaggtaaagaaaacaagcaccttttccttcttaacctacctgtgtctttttgtccrtattaatccctttttatgtctggggtctggtagcttgtgaaatttctatgtgataagaatacttataacaaaagaaatgtgagttcaagaaacactgggg

SEQ ID NO: 169976 - DNA, 201 bp, Homo sapiens
ttgaaaatatacaaaaggtagcagcatacaatacacaccatttaccattttacatcttgcttcccgccccccaccccccaccccccccccgccttaatctwtcttgtagctgctttgttgtttttaaagtctatataatatttcattgtatggatgtaccataatttatgtaaccagttttttattgttggttatttaaat

SEQ ID NO: 169977 - DNA, 201 bp, Homo sapiens
gcactccagcctgggtgacagggcgagactccatctcaaaaaaaaaaaaaaagaaagtggggcctcaaatagatatttgcacatcactgttgataccagcrctgttcacagtagccaaaagctggaaacaacacaaatgcctatcgacagatgaatggataaacaaaatgtggcatagacataaaatggaatattattcag

SEQ ID NO: 169978 - DNA, 201 bp, Homo sapiens
ctcaagtgatccttctgccttggcctcccaaaatgttgggattacaagtgtgaaccactacatgctggctaacatatttgtaaagaaattatttatattcraatagctagtaaataaatgaacaaaattcaaaatgttcaaaaggatagataataaaaataagttttttatcatctcttctcccctacttgcccagttttc

SEQ ID NO: 169979 - DNA, 201 bp, Homo sapiens
atgccttattaaattggggctgtactgctgaaggggttgttggagctgcttcagggattccaaggaagagtagtcccccactccccagcccaaaaagctgkctggaaccagagccaacagaattgctgatgaggaaagtttaaaggcctgatcacaagggtccctggaccacagaggtggcagtggggctggtaatgtcac

SEQ ID NO: 169980 - DNA, 201 bp, Homo sapiens
caaatggttcatcattttagtttgtcacatataaatatcttctattcttttggttcttgtccgctgccagcccccgcattcctggatcaattttacagtckgccttctctgtttctgcctgtgccttaaaaactgagtgctataaagttatggaattgctgcctctctaagctcatgtctctaaattccaatctcatttga

SEQ ID NO: 169981 - DNA, 201 bp, Homo sapiens
cacgaagtaagtgatggaactttttaagtttttttttagtagaaaccctgtctctactaaaaaaaacaaaacaaaacaaaaaagcaaaaaaactagccagrcgtggtggcatgcgcctgtagtcccagctactcgggagactgaggcaggagaatcacttgaccccgggaggtggaggttgcagtgagccgagatcgcgcc

SEQ ID NO: 169982 - DNA, 201 bp, Homo sapiens
ggtttccaaagtgtggtcttcagactggtagcatcagcgtctcccggggagttactcaaaacacaaaatcttcaaccagagaattggaagctgaaaaaaawttttttttttaaattacaaaatacaaaatcttgggccctctccagacctaataattcaaaaactctggtggttaagatccagcaatgtgctttaataagc

SEQ ID NO: 169983 - DNA, 201 bp, Homo sapiens
gcaagagaatcacttgaactctgagaggtggaggttgcagtgagccgagatggcaccattgcaccccagcctgggagacaagagcaaaacaccatcccccmaaaaaaaagaaagaaaagaaaggatcacctcattgtattctctgacctttcaaataacctttacttttctgcctgtgaacgtgcctccatggttatagcc

SEQ ID NO: 169984 - DNA, 201 bp, Homo sapiens
tcaggagttcgagaccagcctgcccaacatggcgaaaccccatctctactaaaaagtacaaaaaaaaataagccaggcatggttggtgtgctcctgtaatygcagctactcaggaggctgaggcaagagaatcacttgaactctgagaggtggaggttgcagtgagccgagatggcaccattgcaccccagcctgggagac

SEQ ID NO: 169985 - DNA, 201 bp, Homo sapiens
acttaatttgaaagaatagaaatattaatattttagacttgcatatcaatatgtagttttcaaaaccctctcacatcttattatctcagcatacattttawataggcaaagtagatatgattatccctattttagaaatgatgacagaccttaggaagtagagacacagatacatcctttgtagtattactttatgtactt

SEQ ID NO: 169986 - DNA, 201 bp, Homo sapiens
tctagacatccatggaatataggttaagaacacttaatttgaaagaatagaaatattaatattttagacttgcatatcaatatgtagttttcaaaaccctytcacatcttattatctcagcatacattttaaataggcaaagtagatatgattatccctattttagaaatgatgacagaccttaggaagtagagacacaga

SEQ ID NO: 169987 - DNA, 201 bp, Homo sapiens
atagtatatctttttccattctttttctttcagaatgattttatctttatatgtaaagtagatgtcttataggcagcatatagataggtcttgcttttatstagtctgacaatctctgccttttaattgggatgtttagaccatttacatttgatgtgattattcatatggatgtgtgtaaatctgccatcttgctgtttg

SEQ ID NO: 169988 - DNA, 201 bp, Homo sapiens
aataaatttacttactagtactggaaagctaactaatatattttaaaaagctttaacaaattagagtggctacctgcaagagttacgagagcattgaaccrtaggggttgggtagggagtagatttattgaatttcctgctatgtttcaatttacacacattgtctcattgaaccctctctaaaacctgtgaggtaagtac

SEQ ID NO: 169989 - DNA, 201 bp, Homo sapiens
gcatgcctcaagatcagagtccagagacaatggaaacacttggaccctggccttgtcttgggctggacaagcttaagcaactctttttgggcctgtggccytgctcccccaaaactaatattttgtaccttgttgcagaatattccaacccgggaccggctagagggcatggcagccttcagggagaagcggactcccaaa

SEQ ID NO: 169990 - DNA, 201 bp, Homo sapiens
caaccatctaatgtactggggttcatcctgcccacttaatgccgagaatcacagaacacaggtccttaagaggaagaaccacatcttttgcctctgtatcrgatgccactgtaaagttcaggatggagttgggaggtcaagggcttggttgtagcctgcaggctgtgttcaatgtaggggctgtacacttgggactgacct

SEQ ID NO: 169991 - DNA, 201 bp, Homo sapiens
tgatagaaaaagaacctcagctaacaggttataggactaacgctaaagaaactgtcagcagaatggctggaaccagacccagacatctgcctccctccttyaaaacaaagctgtgcacctcagacctgcaactatcagccttgatgccctcctcaaccaagactttttgcttttccctaggcccccattgccgtgcggctg

SEQ ID NO: 169992 - DNA, 201 bp, Homo sapiens
gtagcaccattagatgagtctgtgggggaggaaagcactttgtaaactagttatgttgtgcatgttggaaggatgggctgaataacaagaaacccaggtgytcagggatcagagtctggcttctttcatgatagaaaaagaacctcagctaacaggttataggactaacgctaaagaaactgtcagcagaatggctggaac

SEQ ID NO: 169993 - DNA, 201 bp, Homo sapiens
ggaagtggggctgagactggagtgctagggctggtgtggaaccaaggccagtgacaaagcagacactgttgcttctatgtggctgtattaaaatgcacccrcccctctgcaccgccccacagaccaggatttcaacacagccctgtcgacttgaaagcccaagttcctaaccctgactttgtttcactctgctggggtaaa

SEQ ID NO: 169994 - DNA, 201 bp, Homo sapiens
aattttaaaaacaaactaaatatttaatgtatttcaaatacaaaaatttacaaatgtcacaaaacaaagttaaccatacatcattttaatattgacatatwttgaattaatcatataaaagtaaccattttggcttagcatggtggctcacgcctgtaatcccagcactttgggaggctgaggtgggaagactgcttgaga

SEQ ID NO: 169995 - DNA, 201 bp, Homo sapiens
cctgggtgacagagcacaactccatctcaaaaaaaaaaaaaaaaaaaaaaaaaaaaaaaaaacgaaattgtggtgaaatataagtaacacaaaatttaccrttttaaccatttttaagtgtacaattcagagtggcattaagtacattcacaatattgtgcaatgtcaccgctatccattcccagaacttctttatcatac

SEQ ID NO: 169996 - DNA, 201 bp, Homo sapiens
tggaggccccttcgggcccgcggctgcgcttccgacggggcggccgggggctcagagatccaagtgcgcgccctggcgggtccggaccaaggtaaatgtgyagttccggggcggcgcatgacgcgactgggactaggccggaggcagcgggggaccggcaggtgggccgctcagtgcgttgaaggattcgatccccagtcc

SEQ ID NO: 169997 - DNA, 201 bp, Homo sapiens
ataagatttttttgtgtggtgttttttttttttttttttaagctcatcagttaccgttggtgttagtgtattttatgtgtagcccaagacgattcttccartgtggcccaggaaagccaaaagattggaacccctggcttagagtatacaggaggatatatgagcataggtcatattgcaaatactacaatattttataca

SEQ ID NO: 169998 - DNA, 201 bp, Homo sapiens
ggagagccgttggggttcgtgttggaattggcctgtgtcctgttagcggtggcagttgagagtgaattcatgaatttaaactcacaggacaccaagaaagmggggatgggcaggatctcacacatggatacaatgtctaaatcaaaaaacccaggctccgtcaccagctgcgtgacctttttaatcttgtgaacaaaagtt

SEQ ID NO: 169999 - DNA, 201 bp, Homo sapiens
tcatagctatctctgctcatatagatgtctgtaggcaatagggtgggctggcttccagtgtgggtgaagatggacaaggtcagaccaatccagggagcacrtctttcttgcaggtggacattgcatctgggatggccattgaagggatgtgctatgcccaggtatgtagcaaccagcccatgcctgcttgttaacataggc

SEQ ID NO: 170000 - DNA, 201 bp, Homo sapiens
gatcacgaggtcaggagttcaagaccagtctggccaacatggtgaaacccccgtctctacttaaaaaaaaaaaaaaaaaaatacaaaaaaattagctgggygtggtggcgcacatctgtaatcccagctactcaggaggttgaggcaagagaatcacttgaacctgggaggcagaggttgcagtgagccaagatcatgcca

SEQ ID NO: 170001 - DNA, 201 bp, Homo sapiens; identical to SEQ ID NO: 30639

SEQ ID NO: 170002 - DNA, 201 bp, Homo sapiens
tctaatagacgtgaggtagtatctcattgtggtttttgatttgcatttgtctaatgacgatgagattgagcaacttttcaagtgcttattgaccatctgtrtatctcctcaggagaaatgtctattcaagtcctttttcctttttttttttttttttttttttttgagactctgtcacccaggatggagcgcagtggcaca

SEQ ID NO: 170003 - DNA, 201 bp, Homo sapiens
tggtgtacaagtaccgtcagccctctgcatctgcaggttccgcacccacagactcaaccaaccgcagattgaaaatgttaacaacaaaaataacaatgcarcaacaaaaaataatatagataaaaacaacacagtacaacagtttacatagtatttacattgtattaggtattgtaagtaatctagagacaatttagagca

SEQ ID NO: 170004 - DNA, 201 bp, Homo sapiens; identical to SEQ ID NO: 30651

SEQ ID NO: 170005 - DNA, 201 bp, Homo sapiens
ggtttctttttttttttttttctttgagatggtctcactctgttgcccaggccggagtgcagtggcgtgatctcggcccactgcagcctctgcctcttggkttcaagcgattctttgccccagcctcccaagtagctgggattataggtgtgtgccaccacgcctggctaatttttgtctttttagtaaagacggggtttc

SEQ ID NO: 170006 - DNA, 201 bp, Homo sapiens
agctgccatctcctatgataacaatcgggaatacctactgaaggacctgcctgaggctgtgttacactgaacttttttcttttctttttttttttttttttaataagtaggagtacacacggcccaggccaggtacagtggctcacctggctcactcttgtaatcccagcacgttgagagggtgaggcaggcagattgctt

SEQ ID NO: 170007 - DNA, 201 bp, Homo sapiens
ctgatgaacagaccttctgcccgcaatgccttggggaatgtcttcgtcagtgaggtaagaaagggcgggcgccagggtgggctggggatgggctggcactrtctaactgggtgtcctctgtagctgctggaaactctggcccagctgcgggaggaccggcaagtgcgtgtcctgctcttcagaagtggagtgaagggcgtg

SEQ ID NO: 170008 - DNA, 201 bp, Homo sapiens
gcatgggactcattgttgccattttaccgatgtgaatgcagagactcagggaggaaaattcccttgcctaggatcacatagctagtaaggggtaggatagmctttagtttgaacttggcctctctaacccttagatcttagttatttcggctatgccatgctttgttctgacccttcacgggggaaataagaaaatggagt

SEQ ID NO: 170009 - DNA, 201 bp, Homo sapiens
gtgtctctgatcagcttaaactgagaatgccaacttcataaacactgcttgtttacagacaaagctgaggaccctgggagataataataaggggtctttgmaggccaaaggattgggaaacactcctctgggcacctgctggatttcagccctgggaagacctgaaatgtccatcctgatttttcgtaggaggagaaacag

SEQ ID NO: 170010 - DNA, 201 bp, Homo sapiens
gcccccgggattagcactgggggaccggatgggggagggaggcctcactttgttctatctgagcagcttcctcggcagtcatgggactgattgagaccacrcgagggctcctcccgggggcaggtaatcgcaactacagcacccgcccaattccaccccatccagggtccttcgctgctttccttttttgccctctgttct

SEQ ID NO: 170011 - DNA, 201 bp, Homo sapiens; identical to SEQ ID NO: 30640

SEQ ID NO: 170012 - DNA, 201 bp, Homo sapiens
tgggcggaggcctagagcttgccctggcctgtgacctccgagtggcaggtactgggccaggactgggggcagggggtggggctagggagtcaggggtgagygaaacagggtgagtctggacattctgcagtcagccactgttcttggcttccaaccaaaagcaaaactaaggcaaggcagagcacagagggtgctcaggca

SEQ ID NO: 170013 - DNA, 201 bp, Homo sapiens
ggtgcagccattagctgctgtagtatctgtgacctgtcagaacctgcttccttcattttgggaatatttgaccaacctcagagcaattgctgttacgagcyaaggaggtcaaagagcaatgtccagtcttcccattctgtccaagtcagatttatcgaccatgtttcggaaaaaggtgagcctcagggatagtttgtcaat

SEQ ID NO: 170014 - DNA, 201 bp, Homo sapiens
agactgcaccagagctccctgaagcccgaagccagggccgcgggcggcaacacaggcgcgtgagagtgcgcgtgcgtaggggcaggaggagggggcggggyggggcgcgtcctgtggggcggggagcgttctctagcccttaggcagccgaatccctaatttgcggacttgggcatgggactgagtcaacctgtccccatc

SEQ ID NO: 170015 - DNA, 201 bp, Homo sapiens
gatgactgtgacccaaatgtgggaacgaatgtgtgtgtgctgggagggagcaagactgaggactcgagggccaggtgggtgatccgagggatgcaggaaasagcctatgccagattaatggctgtgagaagcggtgtgagctgagaggcctgagatctctttaagaggttggattagcaggccttagtgactgagtgcatt

SEQ ID NO: 170016 - DNA, 201 bp, Homo sapiens
ttgggagtccaatccaagtctcaccaatgattggataaacacagccaagtgcttcacctccctgcactgcaatctcacagctgtaaaatcacagctgggtsatcagtgatgacaccagcctagaagtgtgggtagcaccattagatgagtctgtgggggaggaaagcactttgtaaactagttatgttgtgcatgttggaa

SEQ ID NO: 170017 - DNA, 201 bp, Homo sapiens; identical to SEQ ID NO: 30642

SEQ ID NO: 170018 - DNA, 201 bp, Homo sapiens
gagactggagtgctagggctggtgtggaaccaaggccagtgacaaagcagacactgttgcttctatgtggctgtattaaaatgcacccacccctctgcacygccccacagaccaggatttcaacacagccctgtcgacttgaaagcccaagttcctaaccctgactttgtttcactctgctggggtaaaaccttaccgcag

SEQ ID NO: 170019 - DNA, 201 bp, Homo sapiens
tcctgcccccatctgtgctctgcagggtgcccaccagcctccaggggttgggggaaaccttagatcagcttcagcatgggactcattgttgccattttacygatgtgaatgcagagactcagggaggaaaattcccttgcctaggatcacatagctagtaaggggtaggatagactttagtttgaacttggcctctctaac

SEQ ID NO: 170020 - DNA, 201 bp, Homo sapiens
atataacttaacctaatctcaggagtaacattgtataacctttgctgtatactattgcttagaagcaattcacaggtcccacccacatgcaagggaggggwttattcaggatgtaaacatgagggccactctggggaccttggatctagactgctctgaagtttgtgggggtcagggtccttgactcctcctgatctggca

SEQ ID NO: 170021 - DNA, 201 bp, Homo sapiens
ccactgcgcctggccctttgcccatttctgaattgggttgttttgttgtttagttggagaagttctttatatatcctagatattaaacctttatcagatayatgatttacacatattttcttccattctgtgtgttgtcttttcttttttttcttttttcttctttgaaacggagtcttgctcgtcaccgaggctggagtg

SEQ ID NO: 170022 - DNA, 201 bp, Homo sapiens
tgggttgttttgttgtttagttggagaagttctttatatatcctagatattaaacctttatcagatatatgatttacacatattttcttccattctgtgtrttgtcttttcttttttttcttttttcttctttgaaacggagtcttgctcgtcaccgaggctggagtgcagttggtgcgatctcagctcactgcagccttc

SEQ ID NO: 170023 - DNA, 201 bp, Homo sapiens
agttaagtttccccaagcatgctttcaagttttgacaattgctgttacctttgcctgagataccccttcttggttacttgaacttttacttgtccttcaakccctccagtacctcctcctccaggaagccttcccaacccaccctctgagctttttattggagcactgatgatcctgggtcaataatgcctgatacacatt

SEQ ID NO: 170024 - DNA, 201 bp, Homo sapiens
gcttgaacccaggaggcggagtttgcagtgagccgagatcgcaccactgcactccagcctgggcgacagagcgagactccgtctcaaaataaataaataartaaataaaataaaatgttcagtttctccttcacgctaatcacagttcacgtgcttgacattcacatgcggctagtggctaccatactgggcagtgctcgg

SEQ ID NO: 170025 - DNA, 201 bp, Homo sapiens
ctgcccctctcggagcttcagtttccgcatctctcacagaagggctggaactgatcaaagatttccaaaggctctcccagctctgacttcctgtagtctargactggaagagtctatttactctctactcctgctcacccctgcatctggcctttgaggaccccaccacggtcactcttcccgccaaggcgcttgcccacc

SEQ ID NO: 170026 - DNA, 201 bp, Homo sapiens
gtgaggttcgcaagtgtagacacgctcaagggactcattaaatgtcatttcatttaaaaaatgaaattgagcatatgtgcaagcaaggttcacacaccccrtttaatcttcacaccaccacggggtagtcactattatccccattttacaggattaaaacactgacgctgggaggttgacagagttacaccaaatcacaca

SEQ ID NO: 170027 - DNA, 201 bp, Homo sapiens
ggaggctgaggcgggcgatcacgaggtcaggagatcgagaccatcctggctaacacagtgaaaccccgtctctactaaaaatacaaaaaattagccaggcrtggtggcaggcacctgtagtcccagctactcaggaggctgaggcaggcgaatcgcttgaacccaggaggcggagtttgcagtgagccgagatcgcaccac

SEQ ID NO: 170028 - DNA, 201 bp, Homo sapiens
gaatcgcttgaacctgggaggcggaggttgcagtgagccaagatcgcgccattgcactccactgggcgacaggacgagacttcatctcaaaaaaaaaaaaraaagaaagaaagaaagaaatacaacatacaggacatgtattaagcatttttttctttgaagagatagggtctcgctgtgtcatccaggctggagtgcagt

SEQ ID NO: 170029 - DNA, 201 bp, Homo sapiens
tccatcaaaggggcatggtgaaataagggcctgggctcctgacttctgggctagggctcttccaaaggcagagtctggagaggcctggctgtggccagacyatggggcaagtggctagaggggcgagtagacagcagaggcagctgtggcccccgggattagcactgggggaccggatgggggagggaggcctcactttgt

SEQ ID NO: 170030 - DNA, 201 bp, Homo sapiens
gaggatctgggtgtggggtggaggagggggtttgggggtccctgccgatgacagtcccgctacccccaccagcatctaaggagagtcttctttctgtttgkagttctgtgataagacagatgactcacccagggggatggaggaggatgaccgagggcagttctctcagagagggagttctggctcttcagcttttgtgtc

SEQ ID NO: 170031 - DNA, 201 bp, Homo sapiens
taccagcgggcacgagcactggcccaggagatcctgccccaggtgtggtgacagctcggcaccagaaggagggctggagtcatgggggaggcatgtgtggrgcagggtgtccccttgggctgcacatccattctcccagagacatatgattaaccctctttggagtttgtttaaccatccagtaaacacaatcaagtcaaa

SEQ ID NO: 170032 - DNA, 201 bp, Homo sapiens; identical to SEQ ID NO: 30643

SEQ ID NO: 170033 - DNA, 201 bp, Homo sapiens; identical to SEQ ID NO: 30656

SEQ ID NO: 170034 - DNA, 201 bp, Homo sapiens; identical to SEQ ID NO: 30657

SEQ ID NO: 170035 - DNA, 201 bp, Homo sapiens; identical to SEQ ID NO: 30658

SEQ ID NO: 170036 - DNA, 201 bp, Homo sapiens; identical to SEQ ID NO: 30659

SEQ ID NO: 170037 - DNA, 201 bp, Homo sapiens; identical to SEQ ID NO: 30660

SEQ ID NO: 170038 - DNA, 201 bp, Homo sapiens; identical to SEQ ID NO: 30661

SEQ ID NO: 170039 - DNA, 201 bp, Homo sapiens; identical to SEQ ID NO: 30662

SEQ ID NO: 170040 - DNA, 201 bp, Homo sapiens
gaacccaggaggcggaggttgcagtgagctgagattgcgccactgcactccagcctgggtgatagagtgagactccgtctcaaaaaaaaaaaaaaaaaaaaaaggaaaaaagatgaagaaaatcacctatgatctcagaactgttaagaattggtcattttcttccagttttttcccttatctatgtattttttaagcaga

SEQ ID NO: 170041 - DNA, 201 bp, Homo sapiens
actcgggaggctgaggcaggagaatcggcttgaacccaggaggcggaggttgcagtgagctgagattgcgccactgcactccagcctgggtgatagagtgrgactccgtctcaaaaaaaaaaaaaaaaaaaaaaggaaaaaagatgaagaaaatcacctatgatctcagaactgttaagaattggtcattttcttccagtt

SEQ ID NO: 170042 - DNA, 201 bp, Homo sapiens; identical to SEQ ID NO: 30665

SEQ ID NO: 170043 - DNA, 201 bp, Homo sapiens; identical to SEQ ID NO: 30667

SEQ ID NO: 170044 - DNA, 201 bp, Homo sapiens
acctgggaggtggaggttgccgtgagccaatattgcatcattgcactccagcctgggcaacaagagcgaaactccgaaactctgtctcaaaaaaaaaaaamaaaacaaaacaaaataaaacaaaacaaaacagttacctctcaacttttgacatttcctaccagaggaatatactttttgttacgtgttgttgtatatttt

SEQ ID NO: 170045 - DNA, 201 bp, Homo sapiens
aactcagatggctcagatcctagcctgatgctttttccaccacatcatgctgccacctttcttagaggcttatttggaagcaggataaggaagatacgacrttttgtcaatccactttaagtgcatcctctgccaatccaccttgctcttctctcagtagtgcgggcttgaaaggtcaagaatccacttctgtgatatcac

SEQ ID NO: 170046 - DNA, 201 bp, Homo sapiens
attcaaattattgttgctctgtatgtaatatgttgtttttccatggctgttcccaagattttcctttgtcttttgttttcagcagtttaagtatgatgtgyctggaaatggtttattttaatttagccttttgggattctcaaatcttgaatatttaaatttatgtctttctctaaattgtctttctctaaatttggaaag

SEQ ID NO: 170047 - DNA, 201 bp, Homo sapiens
aaatcaatgaaatagaaaacaaacaatagagaaaaaccaacaaaaattttcgaagaactaaaaaaatttgttctttgaaaagatggataaatttgataaayccctcatgagactgatgaagaataaaagaaagaaaacaaattaccaatattgttaataaaagaggacattcctattgatcctgcagatatttaagcaatt

SEQ ID NO: 170048 - DNA, 201 bp, Homo sapiens
tctcaaaaaaaaaaaacaaaacaaaacaaaataaaacaaaacaaaacagttacctctcaacttttgacatttcctaccagaggaatatactttttgttacrtgttgttgtatattttgcattgcctagcaacatttcttacctagctatcataagtgggcaattcttttgggtgtctaaataaagtgttcttattgcagca

SEQ ID NO: 170049 - DNA, 201 bp, Homo sapiens
agacccagtcacctgacaaatacttatgaagcgttcaccaggtgccctgtgcacagcactgtgttctgtcctgaggatgctagtggcagtaacccacggtytttctcttccagaaccgtatctttctggcctcctcactgtatggtaaaaacctgtaaaactgtggggagtggttttgaggtcactgagaaaaaaatgttg

SEQ ID NO: 170050 - DNA, 201 bp, Homo sapiens
acattttggactgcctccaagatatcagccagatgtgaagtttatccaggtacttagagaggaggaacttaaaatcagaaatgtctatgttcattattctycctatcagccgtaatcagctctgttatcttcttgattactattaaaaaaactgttctctttttacacaagtagaattttacaaattgtctaacataatta

SEQ ID NO: 170051 - DNA, 201 bp, Homo sapiens
gccgcaccacgccccctccgtacctgctcttagcgcgccttccgccctgaatatgcgcatgcgccattctccctttacagccccgaaaacgctccagctgrccgactcggagacaatggcgagaggcctcagagttcggcttcttacctgctttgcataggcagcaatctcctgctagtcccgcctccctctggcattctg

SEQ ID NO: 170052 - DNA, 201 bp, Homo sapiens
acacaagacccagtcacctgacaaatacttatgaagcgttcaccaggtgccctgtgcacagcactgtgttctgtcctgaggatgctagtggcagtaacccrcggtctttctcttccagaaccgtatctttctggcctcctcactgtatggtaaaaacctgtaaaactgtggggagtggttttgaggtcactgagaaaaaaa

SEQ ID NO: 170053 - DNA, 201 bp, Homo sapiens; identical to SEQ ID NO: 30664

SEQ ID NO: 170054 - DNA, 201 bp, Homo sapiens
tctccaacaggcttgatgctggtactttcggaacaatgggagttggtttgggatttgctattgcagctgccgtggtggctaaagatagaagccctgggcartggatcatctgtgtggaaggagacagtgcatttgggttttctggcatggaggtagaaaccatctgcaggtaaaacatcatcctgaatcagagcatttgat

SEQ ID NO: 170055 - DNA, 201 bp, Homo sapiens
ttatattcttatctgtgaaattgctggatccaaagatatgctgatttaaattttttgtagattttaacttcctttcccatttatagtctcaccagcagttyatagaagtgcctattttcctgtgttgtgttagatggtgggtattatcagacttttgcatctttgccaaaagattttgcatctttggtatgatacgcttcc

SEQ ID NO: 170056 - DNA, 201 bp, Homo sapiens
atcattagacaaagtctatttgtaaatcagaaatcattactgagaacttcaaaaaataaaatttcatatatgataaactaaaatactgaactctagtatargttaatgcaaaagttatatttttatactcttagaagggaatcgaagttttatttagttaatagtagacgataacagttatttaaaagatgcttatgtgtt

SEQ ID NO: 170057 - DNA, 201 bp, Homo sapiens
cacactaagtttcacattttggaagattttggatttttggattacagatactcaacctgtattataaattataatcagcatttatacgtgaaattacattktagctgtttcaaaaccaggagttacagaaaccatttgatacgtgtaacagcatcacagtttctgaaaacactgccagattactaagattaggaagcagat

SEQ ID NO: 170058 - DNA, 201 bp, Homo sapiens
cttaatttttttatacttaggttgaaatgaagtttatcttcagtctagccagattttaagaggataatattaatgacattaccagtgtaaaaaaggttacragggactataaataattgaatcaatgatttcaagagttttagagtatcagtaagcaagtccgtcctgctgattgcagttatctgtttgttaaattgggtc

SEQ ID NO: 170059 - DNA, 201 bp, Homo sapiens
acactggcagaaatgtaagaatagattattattataacaaaatctaacagatgaagttttatattcttatctgtgaaattgctggatccaaagatatgctsatttaaattttttgtagattttaacttcctttcccatttatagtctcaccagcagtttatagaagtgcctattttcctgtgttgtgttagatggtgggta

SEQ ID NO: 170060 - DNA, 201 bp, Homo sapiens
ctgcaagctctgtctcctgggttcacaccattctcctgcctcaccctccctagtagctgggactacaggcgcctgccaccacacccggctaattttttgtwtttttagtagagatggggtttcactgtgttagccaggatggtctccatctcctgattttgtgatccgcccgcctcagcctcccaaagtgctgggattaca

SEQ ID NO: 170061 - DNA, 201 bp, Homo sapiens
atacgtatatagtgtgtatatatacgtatatagtgtgtgtatatatacgtatatatacgtatatacgtatatatacgtatatagtgtgtgtatatatacgyatgtagtgtgtgtatatatacgtatatagtatatactataggtatatagtgtgtatatatatacactatgtatatagtgtgtgtatatatacacgtatat

SEQ ID NO: 170062 - DNA, 201 bp, Homo sapiens
atacatatatacgtatgtatacatatatacatgcatgtatacgtatatacgtatgtatacatatatacacgtatgtatacgtatatagtgtgtatatataygtatatagtgtgtgtatatatacgtatatatacgtatatacgtatatatacgtatatagtgtgtgtatatatacgtatgtagtgtgtgtatatatacgta

SEQ ID NO: 170063 - DNA, 201 bp, Homo sapiens; identical to SEQ ID NO: 30669

SEQ ID NO: 170064 - DNA, 201 bp, Homo sapiens
catgtgcgtacatgtgtatacacgcacacatgtgcgtacatgtgtatacatgtgtatatgtatacaagtgtatatacaagtgtatatgtatacaagtgtgtatgtatacgtgtgtgtatgtatacgtgtgtgtatgtatacgtgtgtctacatgcatacgtgtgtgtatacgtgtgtctacatgtatacacgtgtgtgtat

SEQ ID NO: 170065 - DNA, 201 bp, Homo sapiens
gcctggactaggaggccttgtgtagaggaggtttactggagatgaggaccaacatatgagggtagagagagcctttctctttcagggcaacatttttccctggccacctgggcctctcaatgaagatagtgtgttcagggacttgtagagtgtagtttagtaggaccatagcatagaatgggtaagtgacagtagcaagag

SEQ ID NO: 170066 - DNA, 201 bp, Homo sapiens; identical to SEQ ID NO: 30666

SEQ ID NO: 170067 - DNA, 201 bp, Homo sapiens
ttgatagcatcttattaacattggttattttcattgtatcccaatttaatttgattatattcccatctacttttcaggaactagcttctaaaaaatccctrcctatgaattattacacagtattctaccatgttcaagaacaactacctagagactgtttcgtggtaagtgaaggagcaaatactatggacattggacgga

SEQ ID NO: 170068 - DNA, 201 bp, Homo sapiens
gctcagtaaatagaaaggtacgtttcaaacactgttcctaggaaccaactagaagtggtactttagagagtattaaatagggaaggtgttcttcatatacyatctagacttatgaaaacccagattcagaaaagctcagtgatttgtctgaggttcatagctaatagctaaaggactatcaactttttttttttttttctg

SEQ ID NO: 170069 - DNA, 201 bp, Homo sapiens
acatgtgcgtacatgtgtatacacgcacacatgtgcgtacatgtgtatacatgtgtatatgtatacaagtgtatatacaagtgtatatgtatacaagtgtgtatgtatacgtgtgtgtatgtatacgtgtgtgtatgtatacgtgtgtctacatgcatacgtgtgtgtatacgtgtgtctacatgtatacacgtgtgtgta

SEQ ID NO: 170070 - DNA, 201 bp, Homo sapiens
aacccaggaggcggaggttgcagtgagctgagattgcgccactgcactccagcctgggtgatagagtgagactccgtctcaaaaaaaaaaaaaaaaaaaaaaggaaaaaagatgaagaaaatcacctatgatctcagaactgttaagaattggtcattttcttccagttttttcccttatctatgtattttttaagcagaa

SEQ ID NO: 170071 - DNA, 201 bp, Homo sapiens
accatgttgcccaggctggtctggaactcctgggctcaagtgatctgcctccctcggcctcccacagtgctggaattacaggcatgagtcactgcgcccascttttaatcagattttggagtaggggagtgagaggagctggttggtggtggtttttttttctttaaaattattattactttttttttctttaaaattatt

SEQ ID NO: 170072 - DNA, 201 bp, Homo sapiens
aaggcctggggggaattagccagcagaggagggaggtgagcaggcagaaggtcagcacgtgcccacaaggtaattttctggtgttgatgtgtatttccagytattgtcattttcccttcgcccaaaggacttcttctacatttcttgtagggtagatctcttggtgatgaattatttccgcttcggatgtctgaaatatct

SEQ ID NO: 170073 - DNA, 201 bp, Homo sapiens
tgatgtgtatttccagctattgtcattttcccttcgcccaaaggacttcttctacatttcttgtagggtagatctcttggtgatgaattatttccgcttcrgatgtctgaaatatctttatttcatcttcattttggaaagatatttttgctgggtacagaattctagatgggcagttttttcttttactgcttaaaagac

SEQ ID NO: 170074 - DNA, 201 bp, Homo sapiens
ggatctgtggatttattatttttatcaagtttggaaaagtttcagtcactatttcttcaaatatatttatgtcttctctcatctcactttttttttttttwatctaatttagagacagggtcttgctctgtcgctcaggctggagtgcagtggcacaaacacagctcactgcagtctcaaactcccgggctcaagtgatcc

SEQ ID NO: 170075 - DNA, 201 bp, Homo sapiens
tggattcaacagcagaaactttttttctcactgttctggaggcttgaagcctgagatcagggtgccagcaagtccggtttctggtgagggctctcttcccrgcttgtagatggccgccttcttgcagtgtcctcccatggcctctcctctgtgcttgcatggagagggcactccagtgcctcttcctctggtaaggacagc

SEQ ID NO: 170076 - DNA, 201 bp, Homo sapiens
gcttgtagatggccgccttcttgcagtgtcctcccatggcctctcctctgtgcttgcatggagagggcactccagtgcctcttcctctggtaaggacagcrgtcccatcagatcagggccccctctgacctcattcgcccttaaagaattacctccttacaggccctgtctccaaatacagtcacgctgcgggctagtgaa

SEQ ID NO: 170077 - DNA, 201 bp, Homo sapiens
gtcctgagagatctgcttaggcaggaccagagaagacagatcagagggcccgaccgtcgctctgaagtctctcctgcgggttgggagctgtggctgagtgygaggtgagtgaggaaggctcagcgcacctgggtccagggtcaggaagttggtcccttccagctacctcccagaccctcccaggcttcccccgacgtgtat

SEQ ID NO: 170078 - DNA, 201 bp, Homo sapiens
tttttatatcggctgcatgttgaaatgctgatatttcgtgttaatttcacccatttatttaaatttttgttaacgtggctactagaaaaggttcgctggcytctgcaggagtgttggtggccccaggtggcagctgccctcctcctgcactgtccccttctccctccagatggtactcttggtacacagatacactgaaat

SEQ ID NO: 170079 - DNA, 201 bp, Homo sapiens
ttatacagcagaataacatgcagtgtaagaaggaatgagtaccttgtctatagacatattactagtggagacagcaagcacacagcaggatgcacggtgcrctgtttctggtatagaaaatgcagaaatgcaagaatgtatttctcctgctgtgtttgcataaagacactggaaggacgcaggctgcttcagagtctggga

SEQ ID NO: 170080 - DNA, 201 bp, Homo sapiens
gcacccggtcttcttgccctgccccgctcgcgggactacagttcccaggcgcccctgcgcggccgcggcgccggcgcaggcgtcggttgggacgcggagcygaggagcagggccgggcgccatggcaccgtggggcaagcggctggctggcgtgcgcggggtgctgcttgacatctcgggcgtgctgtacgacagcggcgc

SEQ ID NO: 170081 - DNA, 201 bp, Homo sapiens
cgtctcagggcacacctgtgacccgtgagcacaagtgacacctccctgcttgggagcacagcggtgtggctcggcaggaggtggaaagggagaaccgtacygtgttgtgtactgggcttcttccagttccttggaggagaaacatgtctgtcctgaatgccacctcagttggggtctttctggccagcccaggccaggtgc

SEQ ID NO: 170082 - DNA, 201 bp, Homo sapiens
gaccagggctcccccttctcatgggtgagtgaaagttgctgaaaataggcctcctggtgaggaacctcccagccagccctgtcagtggcactgaggctgcyctccgactgtggcatcccccatgtctgtcctcattactgagcaaaaatttgtgcagaggagtgctctacactttccaagggtttaatccaggagctgagg

SEQ ID NO: 170083 - DNA, 201 bp, Homo sapiens
tgaaaataggcctcctggtgaggaacctcccagccagccctgtcagtggcactgaggctgctctccgactgtggcatcccccatgtctgtcctcattactragcaaaaatttgtgcagaggagtgctctacactttccaagggtttaatccaggagctgagggccaggggctccatgactgtagactcaacatcctgggcc

SEQ ID NO: 170084 - DNA, 201 bp, Homo sapiens
atgactgtagactcaacatcctgggccacagccatccgtgagggggaggacgaggggccacgccctgcactctgtcccagcatcccctctccctggagccrtgcagagatggcctcatttcatcccacactcacatgcgggtcctagacaccagctcatgcacatacacacacacacacacgcacacacacacacacacac

SEQ ID NO: 170085 - DNA, 201 bp, Homo sapiens
cgctctctggagggctgttttgggactggaattgcctgcgtggtgctccctatggatgtgtggccagcctggggccagcacacagcctctggagtcagccrggcacctgccgctgggccggcatcccttccttccaggaaatacccccagccaggctctatggagcagcacctcgcccttccagggccacccccagccctc

SEQ ID NO: 170086 - DNA, 201 bp, Homo sapiens
ccacattttgcagcagtcacagggcctggcctcactccagggctccatgtttggatgcgaggcccagtgggtaagtgcactgctgcccacgcccccccccmagcactgtctgctcctccctgcttgcctgcctgtcaaggcagccctcatcttccttggaggatggggctgggctgggagcctgcgccctcccattctgac

SEQ ID NO: 170087 - DNA, 201 bp, Homo sapiens
ttttctggctcaatagactcagcctgacaaaggggaacttggagaaagagaacaagaaatccatatgctgagctgggacagaacccaagtggggttctcaygtggggagcatatggggctttcctcctgcccaccccctgcacctgcagccaggatgcacctgagctcggactgccctgaaaccccgggaaaatcccaaca

SEQ ID NO: 170088 - DNA, 201 bp, Homo sapiens
cccagacttcgcagtgacggatttcagagtgtttcctgttacgagaaggctgtggattcgctttggaacatgacagatttttcttctgtgctacgtggagygtgagggaaggaagtgaaactggtgttaatttttcagcagtcacatgtcaaagtgagtggctagcaagcaggggggtccaggctgtggtggccctggtca

SEQ ID NO: 170089 - DNA, 201 bp, Homo sapiens
aggggccacgccctgcactctgtcccagcatcccctctccctggagccatgcagagatggcctcatttcatcccacactcacatgcgggtcctagacaccrgctcatgcacatacacacacacacacacgcacacacacacacacacacatgcgcacatgcacccacgcactctctttgcctgtgggagggcaggatccca

SEQ ID NO: 170090 - DNA, 201 bp, Homo sapiens
tttttttttttttttgagacagagtctcactctgacagccaggctggagtgcagtagcatgatcttggctcactacaacctccgcctcccaggttcaagcrattctcctgcctcagcctcccaagtagctgggattatagccacgcaccaccatgcccaactaatttatgtatttttagtagagatggggtttcaccacgt

SEQ ID NO: 170091 - DNA, 201 bp, Homo sapiens
agcataatgaataacaaagcaaacactctaaggtcaagaattaggaggctatcagctccccagaagacctagtccctgattgacatgcccagtcctgcagrggcggccccgccttgccgtgggcacagtggccgcggtgactgggcctgctttcttctcccacatggctggcttccctccaacatggcgctggctcttcct

SEQ ID NO: 170092 - DNA, 201 bp, Homo sapiens
tctgggaggttttgttattgtgctgtctgtgggcctgcagaaccgatggcctggtctctcaaccccatgggcttcccatgccataggaccaagtccccatrtcctgccttgtccacgaggaccttctcaactgacctttgtggcctcttccactggcccccagttacacagacttcttggtggggttttcactgaaggggc

SEQ ID NO: 170093 - DNA, 201 bp, Homo sapiens
tcaagaattaggaggctatcagctccccagaagacctagtccctgattgacatgcccagtcctgcaggggcggccccgccttgccgtgggcacagtggccrcggtgactgggcctgctttcttctcccacatggctggcttccctccaacatggcgctggctcttccttctctgacctttatccaagtggaatcgcacact

SEQ ID NO: 170094 - DNA, 201 bp, Homo sapiens
ggctctgagctgaggaagggggtcccaggtggaggccgggaggtggctgcagagtgaggccacaaggcctgggggttggcccagaaggtaggacccctgtaggcagcctcccaaccccaggaatttgcctcttgggaacgtgcaggtccctcgagggtcctggaaggcgctggagtggtgggacagggattgagggagcgt

SEQ ID NO: 170095 - DNA, 201 bp, Homo sapiens
gggcccagcccaggcccggctcggcgtttttggagccggcggaaggaagaagacttggcccagggcagcctcataaagcaattcccacccaggaccgccccgatcgatcggcctggtgctgtggagccaggcccacagcccttccgtccagtagcacctctcaatcccctgtgtgtctgggtgccttcgggatcctgataa

SEQ ID NO: 170096 - DNA, 201 bp, Homo sapiens
tctgggctcactgcaacctctgcctcccaggttcaagtgattctcctgcctcagcctcccaagtatctgggattacaggcacccgccaccacgcccagctratttttgtatttttggtagacatggggtttcaccatactggctaggctggtctcgaactcctgacctcaactgatccacctgcctgggccttctaaagtg

SEQ ID NO: 170097 - DNA, 201 bp, Homo sapiens
gtatttcactgccgtgacaggccgtcatgattggggacgatatcgtgggcgacgtcggcggtgcccagcggtgtggaatgagagcgctgcaggtgcgcacygggaagttcaggtcagtgccagctggagtcatttattcaccttccttccaggggatgaccacattctcattctgttttgttcttcaaaataaaggggata

SEQ ID NO: 170098 - DNA, 201 bp, Homo sapiens
tacctatctgtaggtggcaattaactgagtctcttggtccttcttagagaccccattctaccaatctgcatgtctgatgtctgggagctgctgagataatrgggacccaaacggtcccgcatagtgaagccggaggtgtttgggaggctgggaactgggaacagggagacttggcttccaggagcaagcacaaagggcagc

SEQ ID NO: 170099 - DNA, 201 bp, Homo sapiens
agcaaggtgtctctgttctctcttctacatgttgatcgaggtataacacccaggaaaggacatcaagtgtacagtttgaatttttgcacacacgtacaccygtgtaacccccacacagatcaagatgtagaacattccagcacccagaagtttccccgtgccccttcccagtcagaccccccgaccccaggtcacccctgc

SEQ ID NO: 170100 - DNA, 201 bp, Homo sapiens
ggggtgaagtgggcctcatctggggagcaggaagccagagctcaatgctgtgactggggcaggcaaggcctcatgggagaccctgccactcattgcttgcrgaagatacatttgacattatctaccagtggttccacttctgagaatttgtccttgtctcatgcgtgagaaatgacatgagtacaaggtcattcctggcag

SEQ ID NO: 170101 - DNA, 201 bp, Homo sapiens
ttttgcacacacgtacacccgtgtaacccccacacagatcaagatgtagaacattccagcacccagaagtttccccgtgccccttcccagtcagacccccygaccccaggtcacccctgccctgacttgcagtgtagagctcacccggccacttcctcttttgcccacagcaggtgaggagggccttctactgggaaaaac

SEQ ID NO: 170102 - DNA, 201 bp, Homo sapiens
gaggagggccttctactgggaaaaactgtgactattaatttaggtttaaaatgtattggtaacaggcagatctggccagtccctccctggcttcaatctcyttggtagcttccaggattactcttaggagggactggaggaaaagcccctctctgtccccacggcacccacagtgaccatcacagccctcctctgggccct

SEQ ID NO: 170103 - DNA, 201 bp, Homo sapiens
ccaccttggcctcccaaggtgctgggatcacaggcgtgagccactgcgcccagcctgagaaatgcaaattaaaactatatcaagctgccctgtttcatcartttgacaaaattggccaaaatccaaaagtttgagaacactttctctgtgagagtttgtggaaacagaccctgccacacattgcttgcagaagatacattt

SEQ ID NO: 170104 - DNA, 201 bp, Homo sapiens
gactggaagcagctcagatatccatcagtaggggagttttagggtctgtctgtttatacagcagaataacatgcagtgtaagaaggaatgagtaccttgtytatagacatattactagtggagacagcaagcacacagcaggatgcacggtgcgctgtttctggtatagaaaatgcagaaatgcaagaatgtatttctcct

SEQ ID NO: 170105 - DNA, 201 bp, Homo sapiens
acaggttgctccctgctgatagccttgacctgcttcccggggcatttgcaagggagtagaacgaagaccaagtccgtgcaggggctgctggctctgtgctsagcacacgccccgtgaccacctcaggggcggctctgcgagtccccacttgacaggtgagccacagggccacaggcatggcttggggtcctctgcggagcc

SEQ ID NO: 170106 - DNA, 201 bp, Homo sapiens
cagaaaaccctggggctgggcaagacagcagctttcaggagctgggaggaggcatcatttccactttccaggccctgcgatctggtttgtagcctgtaccrgggcactggagtcctgccttggcacagctcatggtctagaggaataacctcaggtccaggtgagacactcagcctgtgatggcttcatatggtcactacg

SEQ ID NO: 170107 - DNA, 201 bp, Homo sapiens
tcctaggtgggagtgcagtggcaccatcatggcccactgcagcctggaactcctgggcacaagtgattctcccgcctcagcctcccaaatagctgggaaasaggtttatgccaccacgcccaactaatttttaaattttttataaagatggagtctccctgtgttgcccagcctcctgggctcaagtgatctccccgcctt

SEQ ID NO: 170108 - DNA, 201 bp, Homo sapiens
tgagtgctcagtaggcagacctggttttgagctgatagagaaggcccacgcgaacgggcagagctgggcctcgccagggcctggcactcagtagtgctcascaaatgcctgttgcacaagggatggtgcccaggtaacctgggtgagctacaaaccagagccgctggacgagttccaaagggaactcgggcgcactagccc

SEQ ID NO: 170109 - DNA, 201 bp, Homo sapiens
acagcccctttgaccctcagtggggaggttttcttggaatgaagcagaaggaacaatattactggtgcctcctgaatatttaaaaagaagagacattagcrattccagacacttctccattggtccactgcaccttcttccttcctctgcacttgatatttttagttttacaaactgctaggcagaggcaagcatggtttt

SEQ ID NO: 170110 - DNA, 201 bp, Homo sapiens
ccatgctcacgactacagctctgtgcaccaggccagtgccaggcacgtagtaggcgctcagtgacagtttgcagaagggtggatgttacttcatttggtgygttctgagaacttgcccaggtgcagcctggattcgcgggtctcctatgaagtcaggagggaagaagctcggtgccgccggccagtggcagcatcctgaag

SEQ ID NO: 170111 - DNA, 201 bp, Homo sapiens
aagtgattctcccgcctcagcctcccaaatagctgggaaacaggtttatgccaccacgcccaactaatttttaaattttttataaagatggagtctccctrtgttgcccagcctcctgggctcaagtgatctccccgccttggcctcccaaagtgctgggattacccggcttgagcatgatctttttgccttgcttggctc

SEQ ID NO: 170112 - DNA, 201 bp, Homo sapiens
cacacgacctgctgctgagctggacataagcaggacctggctctgggggcttctgacctagggcaggccctgaagttggtcattagaccccacccacccasctgagagcctggcggagatgtgacaggtgacagccccagaagtcccatcgttgctgcctttgtggttaaagtccgctgaacccaagcgctctcttcccct

SEQ ID NO: 170113 - DNA, 201 bp, Homo sapiens
gaacctgggccacttgggctctgctggatgcccacagggctgccagagcctgcccgccacagagcccctctgagacctggagtctcacctgagccctctcrctgcccacagggctggcctctgcctttccgctgctgctctgcggctcggggacacggccagggctggtggcgcttacagcccaggggcaggggagggcac

SEQ ID NO: 170114 - DNA, 201 bp, Homo sapiens
gctcctgcagccgtggcgtggcagaggagggaagcacttcctgggatttatgctgcctccctgacatttcaaggcccttcatttctctaaatattggaggrgttgaattatttttagttgagcctcaagggatcagagaataagcttgcagcaacgttggcagatgggcttcttctagcagagagtggttattcggggcct

SEQ ID NO: 170115 - DNA, 201 bp, Homo sapiens
gatgtgaacccggtgtgctcctctagctccactgtcctcaggttggggacagccagggacaaggccccctactccagctccaaacgtagttccaggctggrgtgccctttgcccaggcccagcctggtagccccgggtgctctccctgacttttcatgagcccgggggctgaaaccagagcagcagggagacagaaaagcc

SEQ ID NO: 170116 - DNA, 201 bp, Homo sapiens
ttccttatctttaaaatggacagagttggccgggtgaggtggccctgcctgtaatcccagcactttgggaggccaaggctggcagattgcttgagcccagkagtttgaagccagcctgggcaacatggcgaaaccccatctctactacaagtacaaaaatttggccgggcatggtggctcatgcttgtaatcccagcactt

SEQ ID NO: 170117 - DNA, 201 bp, Homo sapiens
aacccggtgtgctcctctagctccactgtcctcaggttggggacagccagggacaaggccccctactccagctccaaacgtagttccaggctggagtgccytttgcccaggcccagcctggtagccccgggtgctctccctgacttttcatgagcccgggggctgaaaccagagcagcagggagacagaaaagcccagccc

SEQ ID NO: 170118 - DNA, 201 bp, Homo sapiens
ctccactgtcctcaggttggggacagccagggacaaggccccctactccagctccaaacgtagttccaggctggagtgccctttgcccaggcccagcctgrtagccccgggtgctctccctgacttttcatgagcccgggggctgaaaccagagcagcagggagacagaaaagcccagccccaccctccagagggggagtc

SEQ ID NO: 170119 - DNA, 201 bp, Homo sapiens
ccagagggggagtccagctgcccggagaccccaagagcactgccagaatctgggtatgagacccagtcccctgccgcgtgctaaccatgtaaccttggacrtgatctctttgtgcttttttttttttgtttttttctttttgagatgcggtcttgttctgtttcctaggtgggagtgcagtggcaccatcatggcccactg

SEQ ID NO: 170120 - DNA, 201 bp, Homo sapiens
gtgactattaatttaggtttaaaatgtattggtaacaggcagatctggccagtccctccctggcttcaatctctttggtagcttccaggattactcttagragggactggaggaaaagcccctctctgtccccacggcacccacagtgaccatcacagccctcctctgggccctcactgccaccagtggactcactgtctc

SEQ ID NO: 170121 - DNA, 201 bp, Homo sapiens
acaggcagatctggccagtccctccctggcttcaatctctttggtagcttccaggattactcttaggagggactggaggaaaagcccctctctgtccccayggcacccacagtgaccatcacagccctcctctgggccctcactgccaccagtggactcactgtctccctctgccctgtgcacagcttcttaatttgggtc

SEQ ID NO: 170122 - DNA, 201 bp, Homo sapiens
gtccctccctggcttcaatctctttggtagcttccaggattactcttaggagggactggaggaaaagcccctctctgtccccacggcacccacagtgaccrtcacagccctcctctgggccctcactgccaccagtggactcactgtctccctctgccctgtgcacagcttcttaatttgggtccctctggtttagctcag

SEQ ID NO: 170123 - DNA, 201 bp, Homo sapiens
atatccatcagtaggggagttttagggtctgtctgtttatacagcagaataacatgcagtgtaagaaggaatgagtaccttgtctatagacatattactartggagacagcaagcacacagcaggatgcacggtgcgctgtttctggtatagaaaatgcagaaatgcaagaatgtatttctcctgctgtgtttgcataaag

SEQ ID NO: 170124 - DNA, 201 bp, Homo sapiens
cctccccagtcacgtggaactgtaagtgcattaaacctctttcttttgtaaactgcccagtctctctggtatgtctttatcagcagtgtgaaaacggactratacacttccactttttggctattgggaatagtggtgctgtgaacactaatgtataggtttttgtgtggacacgtttccagttgtcttggatatatacct

SEQ ID NO: 170125 - DNA, 201 bp, Homo sapiens
atgtataggtttttgtgtggacacgtttccagttgtcttggatatatacctagttgtggaattcctggctcatgtggtaattcatgtttaactttttgagkaacgagcggccatttttaaagactggataggaatatgtaaggaagaaagtaaatttattcacttccgttcaggaaatttacctaccaaacaacatgctga

SEQ ID NO: 170126 - DNA, 201 bp, Homo sapiens
ataggtttttgtgtggacacgtttccagttgtcttggatatatacctagttgtggaattcctggctcatgtggtaattcatgtttaactttttgagtaacragcggccatttttaaagactggataggaatatgtaaggaagaaagtaaatttattcacttccgttcaggaaatttacctaccaaacaacatgctgaatgg

SEQ ID NO: 170127 - DNA, 201 bp, Homo sapiens
ggtctcgaactcctgatctcaagcgatccacccgcctcagcctcccaaagtgctgggattacaggcataagccactacgcccggcctcaattttgtattgwactttttctttctttctttaatagagacagggtctcactatgttgactaggttggtctagaactcctgggcacaagctgtccgcccgcttctgcctccca

SEQ ID NO: 170128 - DNA, 201 bp, Homo sapiens
tgcctgggaggaggaccagcaaagggcagagccccccgtgtttcagatggaaaggttaagtaatgtgactctggtaatgcagtccagttcatttatgagaycatggacctcttatactacagattttttgtgttttttttgctgagtcttttgctccctaaccgtgttccctggctggccaccctgccagcaccacgctgg

SEQ ID NO: 170129 - DNA, 201 bp, Homo sapiens
gggtttcaccatgttgaccaggctggtctcaaactcctgacctcaagtgatccactcgcctgggcctcccaaagtgctgggattacaggcatgagccaccrtgcccagcccccaagggacagtttgagccctggtctgcccaacccagacccctacttggaatccttcagggagaagggggtgttgggaaatgtcacaggc

SEQ ID NO: 170130 - DNA, 201 bp, Homo sapiens
gagggttttgtttggatttgctttggctcctgcagatttatctagctgggggtgtctctggtagcagctatactgtatacatctaacagcaatgtaataayaatcctgaaatacaccacagcctgttatgtagctgggagaggctaaaatctcccttcccaaaagcatatgggattatttttggtgaggggacatcacacc

SEQ ID NO: 170131 - DNA, 201 bp, Homo sapiens
gattttttgtgttttttttgctgagtcttttgctccctaaccgtgttccctggctggccaccctgccagcaccacgctggccctcaggaagcatcatcagycagagacacaggcctttgctgtggcctcacatgctagcagaggaagatagacaacatggcgatggatgaggaagttgggttgtctgtaagaggatgagaa

SEQ ID NO: 170132 - DNA, 201 bp, Homo sapiens
tttgtttggatttgctttggctcctgcagatttatctagctgggggtgtctctggtagcagctatactgtatacatctaacagcaatgtaataacaatccygaaatacaccacagcctgttatgtagctgggagaggctaaaatctcccttcccaaaagcatatgggattatttttggtgaggggacatcacacccgtgat

SEQ ID NO: 170133 - DNA, 201 bp, Homo sapiens
tctgtaagaggatgagaagggctgtcattaaacaggtgggttcaggtgggtctcattgaaccatgagatttgaaccaagacctaggggggtgagtgagggkttggggaagggagattaatgcgagttctggggaaggaacattccaggtgaggaaacagccactgcagagccccttgggtgttggagaaagacactcaggt

SEQ ID NO: 170134 - DNA, 201 bp, Homo sapiens
tcctgcagatttatctagctgggggtgtctctggtagcagctatactgtatacatctaacagcaatgtaataacaatcctgaaatacaccacagcctgttwtgtagctgggagaggctaaaatctcccttcccaaaagcatatgggattatttttggtgaggggacatcacacccgtgatctgggaggttttgttattgtg

SEQ ID NO: 170135 - DNA, 201 bp, Homo sapiens
catcaccctcagggcccgggaagctccgtacaccctccctcgcatgcctgtggggctcgtggcagatgcccagagtggctgcgaaggtggtgcaggaaackccccctccaggaaagtgtgcctgcttttggaattttccctggggattttccagagatgcaggacacctgttttcctcgcctggtgattgagccgggaagc

SEQ ID NO: 170136 - DNA, 201 bp, Homo sapiens
tgtgttgcccagcctcctgggctcaagtgatctccccgccttggcctcccaaagtgctgggattacccggcttgagcatgatctttttgccttgcttggctctgggtttcctcatgtgtcaagtggggctgagccccagctgtgtgggctgaacaggggagggttaagctcggcccctagagtgagggcccgccatggtgg

SEQ ID NO: 170137 - DNA, 201 bp, Homo sapiens
ccatggtggtggctcccgtatggcatatttccctaacggttcccatttggtctgtcctgctagaccaggctggtgggacgtacactgactctggggttctrtccaccccgtgggtgtggtccaccacatggtcatggtggctttctagggtagacttgaccttccccactgcctttatttatttatttattattttatttt

SEQ ID NO: 170138 - DNA, 201 bp, Homo sapiens
gccgggtgaggtggccctgcctgtaatcccagcactttgggaggccaaggctggcagattgcttgagcccaggagtttgaagccagcctgggcaacatggygaaaccccatctctactacaagtacaaaaatttggccgggcatggtggctcatgcttgtaatcccagcactttgggaggccaaggagagcggatcacttg

SEQ ID NO: 170139 - DNA, 201 bp, Homo sapiens
ccaccaccatgcccagctaatttttttgtatttttagtagagacggggtttcactgtgttagccaggatggtctcaatctcctgacctcgtgatctgcccrcctcggcctcccaaagtgctgggattacaggtgttgggggattcttaaggaaaaccacctgaaagtgcggggttattaaaaacagaaaccaacccatgca

SEQ ID NO: 170140 - DNA, 201 bp, Homo sapiens
tcatcccacactcacatgcgggtcctagacaccagctcatgcacatacacacacacacacacgcacacacacacacacacacatgcgcacatgcacccacrcactctctttgcctgtgggagggcaggatcccagctgccccagcggggaaggggtgtggggaatcagccctgcagatgcggtgtgaggggcagacatggc

SEQ ID NO: 170141 - DNA, 201 bp, Homo sapiens
gccctgcctgtaatcccagcactttgggaggccaaggctggcagattgcttgagcccaggagtttgaagccagcctgggcaacatggcgaaaccccatctytactacaagtacaaaaatttggccgggcatggtggctcatgcttgtaatcccagcactttgggaggccaaggagagcggatcacttgaggccagaagctc

SEQ ID NO: 170142 - DNA, 201 bp, Homo sapiens
gacatggcatgctggtctttggcagtgtggtcccaagtgggggcggctggagaggtgccttgccacagggcccaggccacccgcatgcatcccatgaggcygtccaagcccgtctgccctgcatcagagaggacaccccaatgcggggagggaggaacctggtgaagccaggagcggtgggcaggggccagcaaggatccc

SEQ ID NO: 170143 - DNA, 201 bp, Homo sapiens
cttgggggacacagccgacacgaccagcctgcagtaccaggatagacaatttgggctggagccaaacttgatcagagggaggctgactttatcgagggctsctttgtggcgggcgttcattgtggaaagagcccaggaaggagctctctgccttgcaagaacattgcctgtggctcaaaatggccacatgggatgcagttc

SEQ ID NO: 170144 - DNA, 201 bp, Homo sapiens
agccaggcttccacaagcctgcccattcctcaggacactgaccctctcctctgccacccttcacgggtgcagacgatgagcatggagaacaccacagcgcrcagggccgagggccaccatcagagtctcctgcagccctggattccctgggcctgaagcaggcagagcggccaaggtagcctcatcagcctcaccagcccg

SEQ ID NO: 170145 - DNA, 201 bp, Homo sapiens
acggttcccatttggtctgtcctgctagaccaggctggtgggacgtacactgactctggggttctgtccaccccgtgggtgtggtccaccacatggtcatkgtggctttctagggtagacttgaccttccccactgcctttatttatttatttattattttatttttttttgaaacggagtcttgctctgttgcccaggct

SEQ ID NO: 170146 - DNA, 201 bp, Homo sapiens
ttatttatttatttattattttatttttttttgaaacggagtcttgctctgttgcccaggctggagtgcaatggtgcgatcttggctcattgcaacctccrcctcccgggttcaagggattctcctgcctcagccttccaagtagctgggaatacagatgtctgccaccacacccggctaatttttgtatttccactagag

SEQ ID NO: 170147 - DNA, 201 bp, Homo sapiens
ttaggtgacaagccacagtcatacagggaggaggtgtgtctgcttcccgagctgagctcccaccttacttacaggggcctggcctttgtcccctgcagccrccatggccctcagggacgtcgggctgctgctgaggctcctaggctgaggagtggaagaaaggagccaggatccccacccctcacccccacatgccacgag

SEQ ID NO: 170148 - DNA, 201 bp, Homo sapiens
cctccgcctcccgggttcaagggattctcctgcctcagccttccaagtagctgggaatacagatgtctgccaccacacccggctaatttttgtatttccastagagacggggtttcgccatgttggccaggctggtcttgaactcctgacctcaggtgatctgcccacctcagcctcctaaagtgctgggattagaggcgt

SEQ ID NO: 170149 - DNA, 201 bp, Homo sapiens
gggtgagtgagggtttggggaagggagattaatgcgagttctggggaaggaacattccaggtgaggaaacagccactgcagagccccttgggtgttggagraagacactcaggtggctggaggggtgggggaagcattggcagggagaggccagggctggcaggcctgccgaaggctttgcttctcttctgccaggctggc

SEQ ID NO: 170150 - DNA, 201 bp, Homo sapiens
gattaatgcgagttctggggaaggaacattccaggtgaggaaacagccactgcagagccccttgggtgttggagaaagacactcaggtggctggaggggtrggggaagcattggcagggagaggccagggctggcaggcctgccgaaggctttgcttctcttctgccaggctggccatcacgggccttgcacagaagagag

SEQ ID NO: 170151 - DNA, 201 bp, Homo sapiens
ccataggggacagggccccactgtcccccatcactgaacagtgtgcccaggtgagatcatggacttgggccccctaggccagcccagtctctttgcagccraggaaagtgaggcttagctgtcgggggctgtggggggatgcagcttgccacacttgacacccaaacgctgattttgtttacatgagactcaggtccgagt

SEQ ID NO: 170152 - DNA, 201 bp, Homo sapiens
ctgcaggagctcaaaggaagttcctggggtgagaccagccgccgcagagggaaaagtgtgattggagtggggtggggggtcttagggttggcagggggaayacatgcctccgtggcagctcccggcaccatgggctccctggcagcatcgtccgttctctgagcctgcgaggggcgacacactgtcaccattcttcttctt

SEQ ID NO: 170153 - DNA, 201 bp, Homo sapiens
agactcaggtccgagtttatgtctgagacctgggaatcaaaaagccacccccacagcctccagggacctggctcccctggagccaccgtgctgccccacasgtgtcacccatggaggctgcaggagcacctggcgtggtccaggggacacgaagccctggtgctggctcctcccaacgcccctgtgagttctgcctcccat

SEQ ID NO: 170154 - DNA, 201 bp, Homo sapiens
aaagtgtgattggagtggggtggggggtcttagggttggcagggggaacacatgcctccgtggcagctcccggcaccatgggctccctggcagcatcgtcygttctctgagcctgcgaggggcgacacactgtcaccattcttcttcttggattttctgtgatgatgggtcctccgattttattgagggccacggagcacg

SEQ ID NO: 170155 - DNA, 201 bp, Homo sapiens
atggatctcagcgcgcagccacagcaaacaggcagcgtggcgctgaggggcacaggtttgctggggggcgtgagccgggagcatcgccagcagcaggctcrcccccctgcgagggcgcgcacggattcgctcgccaccaagagcagggccccaagaggggccctcggcatagtcccctcgagtccccagaacttcacaggc

SEQ ID NO: 170156 - DNA, 201 bp, Homo sapiens
ggcagctcccggcaccatgggctccctggcagcatcgtccgttctctgagcctgcgaggggcgacacactgtcaccattcttcttcttggattttctgtgrtgatgggtcctccgattttattgagggccacggagcacgggggaagtagaagctcaactttttaaaataatatccacagcaacagcagtcaccccgcatc

SEQ ID NO: 170157 - DNA, 201 bp, Homo sapiens
ccaccaagagcagggccccaagaggggccctcggcatagtcccctcgagtccccagaacttcacaggcagagagcctggctcgaggatgggcgggagctcrgtctggctttgatctgcgggaggtgttgtgtgcagaagctgtgggcaccgggggctgcagagcttcagacctggagcctgctcccagggccgatctgaac

SEQ ID NO: 170158 - DNA, 201 bp, Homo sapiens
gagcagggccccaagaggggccctcggcatagtcccctcgagtccccagaacttcacaggcagagagcctggctcgaggatgggcgggagctcagtctggytttgatctgcgggaggtgttgtgtgcagaagctgtgggcaccgggggctgcagagcttcagacctggagcctgctcccagggccgatctgaacccggcac

SEQ ID NO: 170159 - DNA, 201 bp, Homo sapiens
gcaaacattgagtgcctctgctgtactaaagacaccatcctaggccctggggatgtgcagcagtgaacaggtggagccgatgctgcagtcatgggggaccrgcaggcgacagcgtgcactcgggaaggctagagcatctgagacacgcagtgaggtggggagccctgggctgggtacctggcctcgcagatcccatggcga

SEQ ID NO: 170160 - DNA, 201 bp, Homo sapiens
cctggggatgtgcagcagtgaacaggtggagccgatgctgcagtcatgggggaccagcaggcgacagcgtgcactcgggaaggctagagcatctgagacaygcagtgaggtggggagccctgggctgggtacctggcctcgcagatcccatggcgagggagctgggattggaggatgctgagcgagccagccaggcaggca

SEQ ID NO: 170161 - DNA, 201 bp, Homo sapiens
ggatgtgcagcagtgaacaggtggagccgatgctgcagtcatgggggaccagcaggcgacagcgtgcactcgggaaggctagagcatctgagacacgcagygaggtggggagccctgggctgggtacctggcctcgcagatcccatggcgagggagctgggattggaggatgctgagcgagccagccaggcaggcatctgg

SEQ ID NO: 170162 - DNA, 201 bp, Homo sapiens
tcctgcaggtgcccttgccccaacgcaccactcagcctaaccatggggagcatccgacaaaaccaagctgtccgcatctccaaggacaggcacactggggsttagggcttcagtgggggcggaggtacagttcactccctaatacgccatttacttggagaagccctctccagctgcctgaggcagaagcacccggttctc

SEQ ID NO: 170163 - DNA, 201 bp, Homo sapiens
tgtgggtgggcgtggtcacaggccggaggacatctgtaaccggccgtgtccccccaacaggccctttattgaagccctttcatgggcggattgggttcccygaggggagccattcagaggcagggcccagcacagcgaggggtgcagaggccggcctcggggccctggccctatggctgggaggcatctgcatgtgaaagg

SEQ ID NO: 170164 - DNA, 201 bp, Homo sapiens
ttgaagccctttcatgggcggattgggttccccgaggggagccattcagaggcagggcccagcacagcgaggggtgcagaggccggcctcggggccctggscctatggctgggaggcatctgcatgtgaaagggggtgggcatttactgcatcctgtcttgggccactaaagcacatctgctgggcccagcccaggcccgg

SEQ ID NO: 170165 - DNA, 201 bp, Homo sapiens
ctgatatttggagccaggaatcttttctttcttttaacagatacttaagtgattcctgtggtccaggaagttttgcaagctctgatgcagaagagctcgcyggagcaaacatgtatgttctgttttactaattagatatacgctgttgatgactccaaagtggacgtgccatttctgtcccctccagcagtaggaaagaat

SEQ ID NO: 170166 - DNA, 201 bp, Homo sapiens
actcagaggctcgtcctggcctgctgagatgaggtaaaggtcagttcaaagatccagtttgggccaggcgcggtggctcaggccgggtgccatggctcacrcctgtaattccagcactttgggaggccgaggcaggtggatcactggagattgggagttcaagaccagcctgggcaacatggtgagaccccgtctctacta

SEQ ID NO: 170167 - DNA, 201 bp, Homo sapiens
ttatacttagaaagaaggatattctacattctccttcaggagttctaaagatttgctttgcacattcaggttccaaatctacttgaatttgacttgtgtatatggtgtgaggtagggatttgattttattttctatgtggataacagttgttccattatcacttttgagtagtccaccttttctctcactgacttataatg

SEQ ID NO: 170168 - DNA, 201 bp, Homo sapiens
aggcagcgtgctgaggtgggggccatggtctcagaggggctatctggcagccaggaccctgcagaaggcccctttccccaaggttcttgggtggtggggtsggaacagcccatcccagagctgggcttgtccttctttgcaggggctctttgtacagctctctgcaagccttgctggggtcctggagccgcacctgactag

SEQ ID NO: 170169 - DNA, 201 bp, Homo sapiens
ctgttgtcacccaggctagagtgcaatggcacaatcttggctcactgcaacctctgcctcctgggtttaagcacttctcctgcctcagcctcctgagtagmtgggattacaggcacccgccaccacacccagctaatttttgtatttttagtagagacggggtttcgccatgttggccaggctggttttgaactcctgatc

SEQ ID NO: 170170 - DNA, 201 bp, Homo sapiens
aggaattctggctgcctggtggaggtcggggctggccctgcaccgccaggagaagcagtctgagggagggctgctcaggctggacccagccctgaccagcsgggccatcgggcgtcctgggccctggcaggatgtcgttccagtgatacagcacttccttgcttctaaactgctgagtggtcagtgtcggttatcagctgt

SEQ ID NO: 170171 - DNA, 201 bp, Homo sapiens
atgaggacacgcccacccgccaagctcccctcctgccagtcccacctggagccttcatgcatgctgtctgcgcccttcacctgtcccaccacctcttcttyggcctgcctggatcctgccatatcctcaaggccttccctggtgatggaattccagagtcctcccaattgcaagggcctgagggatccgctgccctccaac

SEQ ID NO: 170172 - DNA, 201 bp, Homo sapiens
ggaattctggctgcctggtggaggtcggggctggccctgcaccgccaggagaagcagtctgagggagggctgctcaggctggacccagccctgaccagcgkggccatcgggcgtcctgggccctggcaggatgtcgttccagtgatacagcacttccttgcttctaaactgctgagtggtcagtgtcggttatcagctgtc

SEQ ID NO: 170173 - DNA, 201 bp, Homo sapiens
actgattgatgtatgccagtgtgggctcgtggcttcctatgtaattcagtgggttatcgtctgttaaccgtcatcactgggatattcagatggtccccgaygcaggcactggcagccccttcaggctggccctgtgacctttcggcacatcctcaccgttctttgagcccttccttgcattttggcccaaaaagatgtttc

SEQ ID NO: 170174 - DNA, 201 bp, Homo sapiens
cgtggccaggctagggccaggggggctgcgcaggatggggccttttcaccactgcctggagccgctcgcccaccaaccccactgacggctctcagtttccmtttccccgagcgcccttcaccctgaggcacagcacagcctcgtgctcctggccccactggcctgctcccttaagctgagttttgcctttgcagtttgagt

SEQ ID NO: 170175 - DNA, 201 bp, Homo sapiens
atttattttaaaattagaaggaaaatatctctggaacatttagggccaaagaaaatgttttaatgttttttctcactttagaaataataattcaaaaatcyattaaattatttaacagcttttttaatggaggaaggggccccccaaatcacaaagtggccctgggccctgggatggccgggtgagagcctgccataccca

SEQ ID NO: 170176 - DNA, 201 bp, Homo sapiens
ccagtgccaggcacgtagtaggcgctcagtgacagtttgcagaagggtggatgttacttcatttggtgcgttctgagaacttgcccaggtgcagcctggawtcgcgggtctcctatgaagtcaggagggaagaagctcggtgccgccggccagtggcagcatcctgaagttcatgagacctccaggctgggtttgggcagg

SEQ ID NO: 170177 - DNA, 201 bp, Homo sapiens
caaaaagatgtttcaggttcatttgttcagtctttgcttcagccctggaatcggccatttctccaaggagccccagttccttccagtggagggcactgttkagaatctcagcccagggccccaggtgtgcttgtgttgtctctgggcattgctgctcaggccctggcggtggacagaggtaggaaagatgcgcatggtatg

SEQ ID NO: 170178 - DNA, 201 bp, Homo sapiens
ggtgtgcttgtgttgtctctgggcattgctgctcaggccctggcggtggacagaggtaggaaagatgcgcatggtatgcaggtgtgacacacacatgcgtycgtgcttaccctacccacctggacctgcccaaaagcccgagctcacagcagtgcctccgattccagtccagcagcacagggttccttctcacctcatgcc

SEQ ID NO: 170179 - DNA, 201 bp, Homo sapiens
cttcccaggccatttctgcatttgtggttctcttccaagcctcttgggtaggcatagaaagtcttctctgttttccagggaagctgcagactcacccagcrtcacccagctggtaagggtgtagcaggacagtgccagcatgtctgtcccaactgtccctatggcccctatggaagattagctatgtggtggcaaagtgtc

SEQ ID NO: 170180 - DNA, 201 bp, Homo sapiens
gaaatacaccacagcctgttatgtagctgggagaggctaaaatctcccttcccaaaagcatatgggattatttttggtgaggggacatcacacccgtgatmtgggaggttttgttattgtgctgtctgtgggcctgcagaaccgatggcctggtctctcaaccccatgggcttcccatgccataggaccaagtccccatat

SEQ ID NO: 170181 - DNA, 201 bp, Homo sapiens
accaaatgaaattttgagtagaactccaaaattatatatatataatatatatatttatatattatatatatatttatatattatatatatatttatatattatatatatttatatatattttatatatatttatatatatataaattttttttatatttatatattttttatatatttatatatattacatatatttttat

SEQ ID NO: 170182 - DNA, 201 bp, Homo sapiens
tcagagcacttatccaaccaaatgaaattttgagtagaactccaaaattatatatatataatatatatatttatatattatatatatatttatatattatrtatatatttatatattatatatatttatatatattttatatatatttatatatatataaattttttttatatttatatattttttatatatttatatata

SEQ ID NO: 170183 - DNA, 201 bp, Homo sapiens
ctgcaggactggctggcccttgtgtctgtctttcccctcgtcctggccccctttgtccactcctgcaccagcttccctggacccactgccactgcgtcacstggtcggatctgtgtcccctgcactctcaccacctccaacttgcatcccggtcccccacaccctgacccccaaaggcattgtgcatgtggatgagtgagt

SEQ ID NO: 170184 - DNA, 201 bp, Homo sapiens
ggcattgtgcatgtggatgagtgagtgaaggaaaggctggcgtgttgggtgtgcgaggtcgcaggggcatgaggtgcctggacggcagagagccagggctkggtgaggacctgggtgccaggtcgggggtctgggcagcctggtggccccctgaaaacgttcacatcccttggggcctgctgtgatacatactaatcagtg

SEQ ID NO: 170185 - DNA, 201 bp, Homo sapiens
gccactaaagcacatctgctgggcccagcccaggcccggctcggcgtttttggagccggcggaaggaagaagacttggcccagggcagcctcataaagcarttcccacccaggaccgccccgatcgatcggcctggtgctgtggagccaggcccacagcccttccgtccagtagcacctctcaatcccctgtgtgtctggg

SEQ ID NO: 170186 - DNA, 201 bp, Homo sapiens
cccggcagaacataaagtactagtgtggggtatgaggcagcatgtgggggcgctggggtggcagcagggccagaccccacttcaggggttgcccccaggamcccccttgcggtacccgtatatcccacccccagactcctttccatgagctgctcccagaccccctcatatccatcctgcctccagaacccctatatcttg

SEQ ID NO: 170187 - DNA, 201 bp, Homo sapiens
tgcatttccgagtaaaatgcagacacgggtatactcccctatacacttcagcatatcattggagtttggtatttgtttacggtttttcctgtttgatgtamaatttacatacaatgaaatgtacacacgtcaagtgtacttttgctgagttttgacatatgcatgcacccatggaacccaaccccgtgaagagctagacca

SEQ ID NO: 170188 - DNA, 201 bp, Homo sapiens
ggggcgctggggtggcagcagggccagaccccacttcaggggttgcccccaggaccccccttgcggtacccgtatatcccacccccagactcctttccatragctgctcccagaccccctcatatccatcctgcctccagaacccctatatcttgctcccactccctaccatatgctgttcccagacccccctccatggcc

SEQ ID NO: 170189 - DNA, 201 bp, Homo sapiens
gggggtactggggggctgaggggggttctttagggcaggagttacctgccctgtagacggggagaccacattagtgtttgtgcaaagccctgccctcgtgmacctgtccttccgtagcccacgatacctcatccagcccgggcccgtgggtgggctgctgagcacccgaccacagccaggcctccatgtgccactgtcaag

SEQ ID NO: 170190 - DNA, 201 bp, Homo sapiens
gagaggagacacatggggcaaagtctaggagaagacaggcatgaacttccagttgtcccttcgaaatggagtcctactgggcacacttgattctcccagcratgatgtgtgacaacacgtgggaagcattggccaccagggaagctcactggagcctcagtgtccagggtttttgtgtagacattagcacctgtgtgactg

SEQ ID NO: 170191 - DNA, 201 bp, Homo sapiens
ggaagctcactggagcctcagtgtccagggtttttgtgtagacattagcacctgtgtgactgactttagcgactcagtctccagccccacagagtccaaastgatacagctgggccagggccgcagggatacagaaacaggtgttcactgtaagccaagctgttagcgtaaatgatctggtcagactgagagagcagggcc

SEQ ID NO: 170192 - DNA, 201 bp, Homo sapiens
tttagggcaggagttacctgccctgtagacggggagaccacattagtgtttgtgcaaagccctgccctcgtgcacctgtccttccgtagcccacgataccycatccagcccgggcccgtgggtgggctgctgagcacccgaccacagccaggcctccatgtgccactgtcaaggggacttggcccgccatgatcctgagtg

SEQ ID NO: 170193 - DNA, 201 bp, Homo sapiens
tgagcaacctagtcctgctgagttaaccctttccgtcacagtagtcttttgtgtaaggcttcttttacccaacgtaatgtttttgagactcatccatattrttgcatgtatcagcagtgttgttcatttttattgcagaatagtattccattgagtgaacagaccacagtttatccattcacatgttgttgatacctggat

SEQ ID NO: 170194 - DNA, 201 bp, Homo sapiens
agaagggccaggtaggctgatgggtcctgagcttgtgctcccgaccgccaggctgtgtgtctgatggccgaggccagggtggctcagccaagcccagccarcccaagactagaccatccccagcgtccaccccagcctcctgggcacaggggtcacctcccacccctggcccacccatacagccttttcccatctaacctt

SEQ ID NO: 170195 - DNA, 201 bp, Homo sapiens
tgcacatgcatatgtgtgcacacatatgcacataccttcaccttcctatccctccccaggggaaggccttccttggggctgcccctcctccactctggcarcattgggacttgaatcttgtggccccgtcacaactgtactcagctactccagctccttgtgtgacctctcagcccccaggctctgagctacctgaggtga

SEQ ID NO: 170196 - DNA, 201 bp, Homo sapiens
gcacacacctgagtcgctcttcctcccatagacacatttggagttcccactgccttcctaggccccaccacatgctgtcacctccaggaagccttcacagrttgctccctgctgatagccttgacctgcttcccggggcatttgcaagggagtagaacgaagaccaagtccgtgcaggggctgctggctctgtgctcagca

SEQ ID NO: 170197 - DNA, 201 bp, Homo sapiens
tgccagcccccgcccctgtagtcatttctaaatcgggtctagatggactggacgcgtggctgccagagaccatttgaaccccctacctccaaattccccarggtccccgcctgcaaaggaccagccccagcatgaggccctgaaagtggcaacatttcaatagcctatcctggacaatcaggacgatccctttactaattt

SEQ ID NO: 170198 - DNA, 201 bp, Homo sapiens
caagggtgctgcctccccagctcctacctggggagatgctgacatctggtcattcgcagagtgccctgtgcccacatgctgtccctgtccagacatgaaayggacagcaggagggggctttgaggggtctctcctgagacacctctccagctgaggctcctggagttggaagcccctgcagactcggtggctgcctcacca

SEQ ID NO: 170199 - DNA, 201 bp, Homo sapiens
ttccccaaggtccccgcctgcaaaggaccagccccagcatgaggccctgaaagtggcaacatttcaatagcctatcctggacaatcaggacgatccctttrctaatttatatgctatacgtttggggtttaattggagcgtaattgtaatccatatgctgttaaggtaattacacttataaacctaatataatccatagat

SEQ ID NO: 170200 - DNA, 201 bp, Homo sapiens
gttctggagctgggaattccaatatcaaggcactggtaggttggtgtctggtgagtgctactctgtgctttcaagatggtgcctcttggtttgtcctcacrtggcgaaggagggaaaggagaaacagggacgaacagtgttcatagcagctcttttatttataaattgctaatcctgttcatgagagcagagccctcatga

SEQ ID NO: 170201 - DNA, 201 bp, Homo sapiens
agacagcccctttgaccctcagtggggaggttttcttggaatgaagcagaaggaacaatattactggtgcctcctgaatatttaaaaagaagagacattarcaattccagacacttctccattggtccactgcaccttcttccttcctctgcacttgatatttttagttttacaaactgctaggcagaggcaagcatggtt

SEQ ID NO: 170202 - DNA, 201 bp, Homo sapiens
ggtcattcgcagagtgccctgtgcccacatgctgtccctgtccagacatgaaacggacagcaggagggggctttgaggggtctctcctgagacacctctcsagctgaggctcctggagttggaagcccctgcagactcggtggctgcctcaccaaaggctccatctgcatttgcccccatgaccttcccactgtgcctggg

SEQ ID NO: 170203 - DNA, 201 bp, Homo sapiens
ctgcttttagcacccagggactctgatcagggacccagctgatgagtggcagcaccatgggaagccaggtccctgtgacttggccatccccagaacacggctgattttctggctcaatagactcagcctgacaaaggggaacttggagaaagagaacaagaaatccatatgctgagctgggacagaacccaagtggggttc

SEQ ID NO: 170204 - DNA, 201 bp, Homo sapiens
ggctctggtgggcacggggcttgcacagatcggactgtgaccccaggctgtgggactcagccaccaagcgccttcacttatttactgaccttgaagttatmcagcacttatgtgtttacagatacctgcacaacagccagagaggtacgaatacatctccacctacaggtgagggcacagagaggttaggacccacctgag

SEQ ID NO: 170205 - DNA, 201 bp, Homo sapiens
ctctaaaccacaggtcccatctccaaaccacaggtcccatctgtaaatggaaacatgaacccacctctcagactgtcaagaggattcgatgtgaacatgcsgttggggctcggtggaggaggagccagtcaccgggcgctgctgtagccactgctggggctcagttcaccctgggctccctgctggtgtaaactttcccct

SEQ ID NO: 170206 - DNA, 201 bp, Homo sapiens
aaaggattctcatcccagttctgtccctagacaagtcactgaacccctccaaaccacaggtcccatctccaaacagcaggtcccatctctaaaccacaggwcccatctccaaaccacaggtcccatctgtaaatggaaacatgaacccacctctcagactgtcaagaggattcgatgtgaacatgccgttggggctcggtg

SEQ ID NO: 170207 - DNA, 201 bp, Homo sapiens
cactgattgccaacagcagctttatgcggctggcattttagtctcactttagggtgaggaaactgaggctcagagaggctgaatcactggtttgagtacgwccagcgagagggcagctgggccaggatttgaagccagccattctcaacaccactgtgctctctgcctcccgagtggaggccctgacccctttgctctctt

SEQ ID NO: 170208 - DNA, 201 bp, Homo sapiens
cagtgccagcatgtctgtcccaactgtccctatggcccctatggaagattagctatgtggtggcaaagtgtcccgaggaaggggcattctgggatgttcasgtgctcgactgggctgggacttgtactttggaaatgagaagaagcccaggctcaaatctttgccccactgcttgctggcaggaagaccactgagcctcag

SEQ ID NO: 170209 - DNA, 201 bp, Homo sapiens
tctccacctacaggtgagggcacagagaggttaggacccacctgaggggatgcagccagcaggtgggacttgggccctggcagtctgtttccagcctgtgygctcaggtccagggtctccctgggactggagagggcgctgggggaatggagccgcctcctgcatcagagcttctcctgctccagttcagcctgcagctct

SEQ ID NO: 170210 - DNA, 201 bp, Homo sapiens
cctgaagggtcccacgctgcagagggccccagcccagggccagaccccaagtgtgtgcctggagtgactcaggggtgcgcgaggaggactcagtgggatayggaatgcaggggctgaggcatagggagtgacacaggggctcagggctttcccatgagtcgaggctcattgggttggcagggaccacatctgccctggtcg

SEQ ID NO: 170211 - DNA, 201 bp, Homo sapiens
attgtgctggggcctccagtgctacccccaggctgaatgattcattagcaggactcacagaacttagaaaaggtattacactcccagttagacttattacygtgaaagaataaagattaaattcagcgaagagaggagacacatggggcaaagtctaggagaagacaggcatgaacttccagttgtcccttcgaaatggag

SEQ ID NO: 170212 - DNA, 201 bp, Homo sapiens
cacagagaggttaggacccacctgaggggatgcagccagcaggtgggacttgggccctggcagtctgtttccagcctgtgtgctcaggtccagggtctccstgggactggagagggcgctgggggaatggagccgcctcctgcatcagagcttctcctgctccagttcagcctgcagctctcctgcatccccaggtgggga

SEQ ID NO: 170213 - DNA, 201 bp, Homo sapiens
cgcagcagggcaggtagcttgtcttttagtttgttttgttagtctcctgtatctgtgactctgcagagagccaacggcaggaagagggcagcaccggcacrtcggaggccgaggacggcttagacgggaggtccggaggctctcagcctgaccagccctggcctagggccggggaaaggcctgggctttggggtcaagggc

SEQ ID NO: 170214 - DNA, 201 bp, Homo sapiens
ccgtcacggtcgttctccccggtccctgcctgcccatggctcttgccacagtggggatgcagcagctctgggttgagtgtctgtcgttgcccctgcactgmgtgtgccctgtgagtgggggctgctgtgccacacctcactgccacccatgcccatctcagggtgtgggcccagcgggtcctcaggctgtacctgtcaggg

SEQ ID NO: 170215 - DNA, 201 bp, Homo sapiens
ttctgctcaaggagctgtattttccacatctgtttgtattttcatgaagccaacataaaaggattctcatcccagttctgtccctagacaagtcactgaayccctccaaaccacaggtcccatctccaaacagcaggtcccatctctaaaccacaggtcccatctccaaaccacaggtcccatctgtaaatggaaacatga

SEQ ID NO: 170216 - DNA, 201 bp, Homo sapiens
aacggatctgcccacctcagtctcccaaagtgttgggattacaagtatgaaccaccgtgcccggccatatgaagtcttgtagttgttgaactcggtgtacrtgctaaaccaaagcacacagttctgctcaaggagctgtattttccacatctgtttgtattttcatgaagccaacataaaaggattctcatcccagttctg

SEQ ID NO: 170217 - DNA, 201 bp, Homo sapiens
agcagtgaggccttacaagtagttctaggcctggaaaggaaagggaaagaaagagcaatggaatctggtattttctcaggtgtcctggactccatctgaamgatttcgccatgggaaacattccttcctgggtcctcggcgcctattgttacagcacgcaggcacccgggctgtggcctaggggtgaaacctctctcgatt

SEQ ID NO: 170218 - DNA, 201 bp, Homo sapiens
catttggagttcccactgccttcctaggccccaccacatgctgtcacctccaggaagccttcacaggttgctccctgctgatagccttgacctgcttcccrgggcatttgcaagggagtagaacgaagaccaagtccgtgcaggggctgctggctctgtgctcagcacacgccccgtgaccacctcaggggcggctctgcg

SEQ ID NO: 170219 - DNA, 201 bp, Homo sapiens
tgatagccttgacctgcttcccggggcatttgcaagggagtagaacgaagaccaagtccgtgcaggggctgctggctctgtgctcagcacacgccccgtgrccacctcaggggcggctctgcgagtccccacttgacaggtgagccacagggccacaggcatggcttggggtcctctgcggagcccgatgtgtcactggcc

SEQ ID NO: 170220 - DNA, 201 bp, Homo sapiens
cctgagtgctgctttagctttggccccacccatcttaggctgctcagaggcctcaggcctccctggagggccagaagggattcccaggggcaggatagcayggacggggggtccgctgtgtaagcctgggaaattctggctgcttgaagctggcacactcccctgaggctgttccaggcacagtcactgggtctccccgtc

SEQ ID NO: 170221 - DNA, 201 bp, Homo sapiens
ctgctttagctttggccccacccatcttaggctgctcagaggcctcaggcctccctggagggccagaagggattcccaggggcaggatagcacggacgggkggtccgctgtgtaagcctgggaaattctggctgcttgaagctggcacactcccctgaggctgttccaggcacagtcactgggtctccccgtcgaagtggc

SEQ ID NO: 170222 - DNA, 201 bp, Homo sapiens
actcccctgaggctgttccaggcacagtcactgggtctccccgtcgaagtggctctaaggcaggtcttcccggttaccagcaagcagatacatgttgtaaygggctgagagtgggtgtgtatctcatattccccagaggagcttacggacagcccctctttaaggaacatctcccgggccgagcgttctgagcgccctctg

SEQ ID NO: 170223 - DNA, 201 bp, Homo sapiens
gaactgtgctgtagcatttcaatgtatggctgtcccacaatttatattccagtcccctgatgatggacatgtaggcggtttccagtttttttcatgatcayagatcacacttctgtgaacagctctggatgtgtctccttgtgcaaatatggtgctaggtgttcttcagagcatttttctccaaacttgccgggtaatatg

SEQ ID NO: 170224 - DNA, 201 bp, Homo sapiens
tgaacagctctggatgtgtctccttgtgcaaatatggtgctaggtgttcttcagagcatttttctccaaacttgccgggtaatatggtcaccttggggagyttgttaaatatacatatttccaggtctgctctggtgggtctgatatttggagccaggaatcttttctttcttttaacagatacttaagtgattcctgtgg

SEQ ID NO: 170225 - DNA, 201 bp, Homo sapiens
gctgacgtgagcccagatttcgattcttgtgcgagggagacgaaccaggtttaaaccccagctctgccacttctggctgtgactttgagcatggctgttcrtctctgggggtctctctcctcatctcagagaagcagatcatggtgcgcaccccatggcgcgctgtgcagagcacatagagacgccacccacagctggctt

SEQ ID NO: 170226 - DNA, 201 bp, Homo sapiens
aaatatggtgctaggtgttcttcagagcatttttctccaaacttgccgggtaatatggtcaccttggggagtttgttaaatatacatatttccaggtctgytctggtgggtctgatatttggagccaggaatcttttctttcttttaacagatacttaagtgattcctgtggtccaggaagttttgcaagctctgatgcag

SEQ ID NO: 170227 - DNA, 201 bp, Homo sapiens
gtctgatatttggagccaggaatcttttctttcttttaacagatacttaagtgattcctgtggtccaggaagttttgcaagctctgatgcagaagagctcrctggagcaaacatgtatgttctgttttactaattagatatacgctgttgatgactccaaagtggacgtgccatttctgtcccctccagcagtaggaaaga

SEQ ID NO: 170228 - DNA, 201 bp, Homo sapiens
gtctaagcatatatgaaacacaaattttatgtttagatttgggtcccatccccaagatatctcatgtatatgcaaatattccagaatcaaaaaatatatakagagagaaatttgaaacacttttggtcccatgcattttggataagggattctttacttgtattttgtagtgttcacaatataaactataatataatacaa

SEQ ID NO: 170229 - DNA, 201 bp, Homo sapiens
gctttaaggtactttgtctatcttgactgttaggctctttatttttcaaaaaaaaattcaatataatagtttgcattttttcttattgataataaaaccaytgacattattgagctcttgttctgggctcagctctgccccgagctgtttgtacatgttaccttgctgaacctgcacccaagtcctcaggccatattcccc

SEQ ID NO: 170230 - DNA, 201 bp, Homo sapiens
ggctctttatttttcaaaaaaaaattcaatataatagtttgcattttttcttattgataataaaaccactgacattattgagctcttgttctgggctcagytctgccccgagctgtttgtacatgttaccttgctgaacctgcacccaagtcctcaggccatattcccccttacagatgaatgaagtcactggcccgaggt

SEQ ID NO: 170231 - DNA, 201 bp, Homo sapiens
ggaggagggactgcagtctgggcccagagcccggttgtcccccatggagccacacagcaggcacctcagagtttgcatccattggagatggccaggagtcygctcgtgtgggaagaatggcttctgagcgccaaggtagcctgtgctggagccttggctgccatagaaggccattcacgtccctcacaccctggcctgtgc

SEQ ID NO: 170232 - DNA, 201 bp, Homo sapiens
tactaaaatacaaaaaattagccaggcatggtggctggcgcctgtagtcccagctactcgggaggctgaggcaggagaattgcttgaacccaggagatggrggttgcagtgagctgagatcgcgccatcacactccagtctgggcgacagaacgagactctatctctaaaaaaaaaaaagaaaaagaaaaaaaagaaaaca

SEQ ID NO: 170233 - DNA, 201 bp, Homo sapiens
gaggtgaggctggtgaggcccagagtgtacctgttggggatgctgcaacacttggaaatccggctgcccgaggctggaagccgtcttgctgcgtatgtcaygtaggataatgagtggactcttttctcagtcctggaggacttcctcggccagtctggagtaagccatggctggggagatcagttcttggaagtgctgggt

SEQ ID NO: 170234 - DNA, 201 bp, Homo sapiens
atagatttgggtcccaggttccccaccaggggcctggctggcttccccaggtccacacccttccagcgaagtcacatcacaagttgtgtggaaatggaggycaccaccctggccacagaggtgaggctggtgaggcccagagtgtacctgttggggatgctgcaacacttggaaatccggctgcccgaggctggaagccgt

SEQ ID NO: 170235 - DNA, 201 bp, Homo sapiens
cggtggagatgctgtgggtgggtgggcaggtgtgccttgtgctgtggcctcccgagacaaggagggctcccacctaagcagggtcctgcagcccaggcacrtagccctgccctggccctccaggtccacacggctgtgggttcccaccagggggcggcagggacttgcggccggggacccagcctggtttctcccgctttg

SEQ ID NO: 170236 - DNA, 201 bp, Homo sapiens
tgggccctagctggttgaccccagtgcccactatttatttggtgcttacatgcactggctcattttgtctctacagccttgcaaaggccacagttatgagrtggcagaggtggtattcaaattcaggcccctaaacttgtgtctgtgttccctcttgaaaacttcagtaaactgaagaagtgaaaggcagagggtaaacca

SEQ ID NO: 170237 - DNA, 201 bp, Homo sapiens
ctagtccacaggtgaggtcaggagcacaggctgttttgggacatctcttcccagtgcccagttccagaacacccttccaaaccaccgtgcattctccgggkccatcgttttaatggctgcaccctgctcccgcgtgtggacgcatcctaaacagtcccttagtattatggttagatgctccatgtgtttccaattcttcat

SEQ ID NO: 170238 - DNA, 201 bp, Homo sapiens
gcccatggctcttgccacagtggggatgcagcagctctgggttgagtgtctgtcgttgcccctgcactgcgtgtgccctgtgagtgggggctgctgtgccrcacctcactgccacccatgcccatctcagggtgtgggcccagcgggtcctcaggctgtacctgtcagggggctggatacctggacagggccttgtccgag

SEQ ID NO: 170239 - DNA, 201 bp, Homo sapiens
aggggcagacctaggcagaagccctgagtgggcatcctggtcagccctgtgggggttgggggccagtgggcaggggcactcaccatgctacccaacccccyatggcacccccaatgtggaacgcacgggctcaggactcacttttattttggtagagcttggagtccccatttccatgttttgtttttctttacagtccca

SEQ ID NO: 170240 - DNA, 201 bp, Homo sapiens
atctcttcccagtgcccagttccagaacacccttccaaaccaccgtgcattctccggggccatcgttttaatggctgcaccctgctcccgcgtgtggacgyatcctaaacagtcccttagtattatggttagatgctccatgtgtttccaattcttcattattgtaaacccaactgcattgctcatccttgtagcatagct

SEQ ID NO: 170241 - DNA, 201 bp, Homo sapiens
ccgttccagctcgggcagtacaagccttcatcctcccagactccacctccctggctgctccttcctgtatggcccccacaggggttggcagggcgcactcmccagagggacaggagtttgtggccaacctgagggtagacactgcctgtcctccagacccctagacacccccggtcggcccaggtgcggggtctgcccgca

SEQ ID NO: 170242 - DNA, 201 bp, Homo sapiens
ggaaaggcttgagaaccagtgatcttctgccctgttacagacgcggaagccggggtggagcaggcctgtaaggtgggggctggggccggcactgggtcccygggcttttccacccctgccgcgtgtgcgtgcagactggccctgcggtccatgggcttgggcctgccttttggcttgctcccgagtattttgcccagaggc

SEQ ID NO: 170243 - DNA, 201 bp, Homo sapiens
tctaagctacattctagagcagactttttgcccacacaagccttaaatgtgggctggggacagtggctcacgccggtaatcccagcactttgggaggacawggtgggcagatcacctgaggccaggggttcaagaccaggctggccaacatggtgaaaccctgtctctactaaaaataaaaaattagccaggtgtggtggt

SEQ ID NO: 170244 - DNA, 201 bp, Homo sapiens
tctcccatctgcactgtggataattctgcaactctcgacaccctcaccaacaaataacaccgaggactagcagtgtcatttttaaaacgcgcctccatcartgggaaaagaatgggatcttctttgattgataatgagactaaaggctttttctgtcttcctcagtcgctgatatttgtttcttctataaattgcatattc

SEQ ID NO: 170245 - DNA, 201 bp, Homo sapiens
tagcagtgtcatttttaaaacgcgcctccatcaatgggaaaagaatgggatcttctttgattgataatgagactaaaggctttttctgtcttcctcagtcrctgatatttgtttcttctataaattgcatattcatatcctttctcagtcttttttgtatgttttttaaacgaaggctcttctttaatgggaaatctgcat

SEQ ID NO: 170246 - DNA, 201 bp, Homo sapiens
tggccatgttggccaggctggtctcgaactcctggcctcaagtgatccacccgcctcagcctcccaaagtgctgggattgcaagcataagccaccgcgccyggcctccactttctgtggtgtaaatattcctaccatggctgatttcctctggggaagccatgtcccctccacttctaccttcatggtctttgcttgttta

SEQ ID NO: 170247 - DNA, 201 bp, Homo sapiens
tcttctgccctgttacagacgcggaagccggggtggagcaggcctgtaaggtgggggctggggccggcactgggtccccgggcttttccacccctgccgcrtgtgcgtgcagactggccctgcggtccatgggcttgggcctgccttttggcttgctcccgagtattttgcccagaggccttgtggctttcagggatgctg

SEQ ID NO: 170248 - DNA, 201 bp, Homo sapiens
tggcaccttcaatttttttcttttaaaaattaatgtatttttttttctgataatataagaaatgcatgccttctttggaaaatacagaaaatcacaaagamaataatccacaatcccaccttccaaaaggaaccacagttagcattttgttcagcctgttttttaaaaaacaaacaaacaaaaaatgcatactaaaagcaa

SEQ ID NO: 170249 - DNA, 201 bp, Homo sapiens
ggctggtctcgaactcctggcctcaagtgatccacccgcctcagcctcccaaagtgctgggattgcaagcataagccaccgcgcccggcctccactttctrtggtgtaaatattcctaccatggctgatttcctctggggaagccatgtcccctccacttctaccttcatggtctttgcttgtttattttcaaatgtggcc

SEQ ID NO: 170250 - DNA, 201 bp, Homo sapiens
cagattttaagtaaagaatttgagaatcagagacattcacagcaacctggtgcacccggagcctggctgaccccagcaccgctgctggcggccccacctcrctcgcccagtctccctgcttccccagccaccgtccagctacctcgagagatcctgggagcatggtgattgtggggtgcatgggggcccgtgagctgttgg

SEQ ID NO: 170251 - DNA, 201 bp, Homo sapiens
gggacgagggtcatggcctttgagggcctgcagagggccttgcctgtggtggcgtggccaccctggtcctcagcagggtgctcagtggattccaaggtgcwccctggacccggacctccccttcacttccttttagctcaggtctcagctttccatgcctctgctgcctccctgaacccagcctgtcccccgccctgttca

SEQ ID NO: 170252 - DNA, 201 bp, Homo sapiens
acctggtgcacccggagcctggctgaccccagcaccgctgctggcggccccacctcgctcgcccagtctccctgcttccccagccaccgtccagctacctygagagatcctgggagcatggtgattgtggggtgcatgggggcccgtgagctgttgggggtgtcagggttctgcccgtgagatcctccttgttgccagaca

SEQ ID NO: 170253 - DNA, 201 bp, Homo sapiens
agcccaccaggtaggttggcgccttgtgaagtgggtcaggggaggcagccccgtcagggaggccgccccgtcagggaggccctggagcttggaatggattrcaggactcaggcagcctgtggggttggccaggcagccaagcgtgggctccctgtgaaagctgacctggctgggaaggagggggaagacagcaaacgaaat

SEQ ID NO: 170254 - DNA, 201 bp, Homo sapiens
ggtattaagagaacggttacggagaactctagtactgaacccaagattactttgccaatgaggagtgaagccaggcaccaaaccatcgtcttccagccccrtccagtgctctttgccatagcccaactctcagggaggaccagcggtgcagcagaatttcttagggaggtggggagggtagggaggatttcaggttggggg

SEQ ID NO: 170255 - DNA, 201 bp, Homo sapiens
tgcagaagagctcgctggagcaaacatgtatgttctgttttactaattagatatacgctgttgatgactccaaagtggacgtgccatttctgtcccctccagcagtaggaaagaatcccattatcccacatcctggccagttcttggtattgtgagatttttttaaacttcttctcttaagactatgatggtattttgttg

SEQ ID NO: 170256 - DNA, 201 bp, Homo sapiens
acggggtttcgccatgttggccaggctggttttgaactcctgatcttgggtcttgggatccacccgccttggcctcccaaagtgctgggattacagacgtragccaccatgcccggctattttcattacccccaaataaaccttgtaccctttagttacctcctcatctctgtaaccctaagcaaatactcatctgctttc

SEQ ID NO: 170257 - DNA, 201 bp, Homo sapiens
ggttttgccacattggccaggctggtttcgaactcctgacctcatgtgatctgcccaccttggactcccaaagtgctgggattacaggtgtgagccaccgygcccagcctgcatatcatttttaagatttttaaactatgtgaatgtgttttctattcaaaatattacaattcaaatattaaattgaatattaaaattcaa

SEQ ID NO: 170258 - DNA, 201 bp, Homo sapiens
tgtggccttttctgtcttcttttactctgcgtgttttcaaggttcatccatgttgtagcatgtatcaggacttcatttctttttatggctgaataatgctycactgtatggatagaccacagttatttattcattcctgtgttagtgtatatttgggttgtttctgcctttggctattgtgagtaatgctgctataaggat

SEQ ID NO: 170259 - DNA, 201 bp, Homo sapiens
ttcttttactctgcgtgttttcaaggttcatccatgttgtagcatgtatcaggacttcatttctttttatggctgaataatgctccactgtatggatagamcacagttatttattcattcctgtgttagtgtatatttgggttgtttctgcctttggctattgtgagtaatgctgctataaggattcatgggcaagttttt

SEQ ID NO: 170260 - DNA, 201 bp, Homo sapiens
gatagaccacagttatttattcattcctgtgttagtgtatatttgggttgtttctgcctttggctattgtgagtaatgctgctataaggattcatgggcamgtttttgtgtggacataggtcttcatttctcttgaatatatgcctaaggagtggaattgctgggtcacgtggtatctatttttaatcacttgaggaattg

SEQ ID NO: 170261 - DNA, 201 bp, Homo sapiens
ctcccgagtagctgagattacaggcacctgccaccatgcctggctaatttttgtatttttagtagagatggggttttgccacattggccaggctggtttcraactcctgacctcatgtgatctgcccaccttggactcccaaagtgctgggattacaggtgtgagccaccgtgcccagcctgcatatcatttttaagattt

SEQ ID NO: 170262 - DNA, 201 bp, Homo sapiens
cagttatttattcattcctgtgttagtgtatatttgggttgtttctgcctttggctattgtgagtaatgctgctataaggattcatgggcaagtttttgtrtggacataggtcttcatttctcttgaatatatgcctaaggagtggaattgctgggtcacgtggtatctatttttaatcacttgaggaattgccagactat

SEQ ID NO: 170263 - DNA, 201 bp, Homo sapiens
gaagaggagggttggtcttgctgtctcaaggtggcagaggtagaagaaaaactgcatataagtgggcccatgcagttcaaacccagttgttaagggtcaastgtattttctcatattttgtgggttgtcttttcattttcttgatgttgttttttaaagcataaaagtttttaaagttttgatgaagtccatttgatcttt

SEQ ID NO: 170264 - DNA, 201 bp, Homo sapiens
gaagcctcaggaagcttccaatcacagtggaaggcaaagcaggagtaggcatctcacatggcgagaatgggagcaagagtggtaggggtgccgtatacttytaaatgaccagatctcatgagaacttactcactatcgcaaatatggcaccaagccctgagagatctgccccatgacccaaacacctcccaccatgcccca

SEQ ID NO: 170265 - DNA, 201 bp, Homo sapiens
tgaacacatgagcccgtggacatctagtgagcttagggcatggcaggggtggggtgcgttgcctgcagcctggggcggcctcggctccttcatgtcagcgygtcctgacaccgtgacactgcgcatggtcacatggagcctgtcctcttgtatctgcttcatctctggctttcctgtccatctgcctggtgctttggaggg

SEQ ID NO: 170266 - DNA, 201 bp, Homo sapiens
ctggctttcctgtccatctgcctggtgctttggagggtgtaccaggctgtgagggagaagcagccacgtggctccgttttcttgtgctgcagctgggccarcagatctaggggaaaggccacttcctagtggcctttctggtgggagggagtcatagtgatgagtctggaagctgagccctggcttgggagcagctggaaa

SEQ ID NO: 170267 - DNA, 201 bp, Homo sapiens
ctaggagccatccgagcaggcccctgcggccatatgcattcccatgcgtagcgaaaccaggccctcttgccaagcactctttgggaggatatttggaaaaratgtcaaggcattcatttttctctcgaccttttctgttggaatcgtggggccttaacactggaagtaaaaggagttataagacacagctggcttcctgca

SEQ ID NO: 170268 - DNA, 201 bp, Homo sapiens
tgtggaaatggaggccaccaccctggccacagaggtgaggctggtgaggcccagagtgtacctgttggggatgctgcaacacttggaaatccggctgcccraggctggaagccgtcttgctgcgtatgtcatgtaggataatgagtggactcttttctcagtcctggaggacttcctcggccagtctggagtaagccatgg

SEQ ID NO: 170269 - DNA, 201 bp, Homo sapiens
cccagcagagctggagggggtaggggcagcctccccaggactgatctgacagacgggtatgtgcctcacccggcatcacccaccggggaggcctccgtccrcccccatgcagtcatgctgggtccccccatctcgtgtcttctggggaatggagcggaagacctcccctctctggaaccaggggtgggagggactgtgctc

SEQ ID NO: 170270 - DNA, 201 bp, Homo sapiens
gtcagtacagcagaattagccatgactcagagtgggtctccgtggtgattctgcctctagagaacatgccgtgctcccgacgtcaggctcacaggtgagcrggggcactagccggggacgaggggctggagcctggccggcccaactacagaggggcctggggtttggctcctgccggaggagcccctctagggctctccg

SEQ ID NO: 170271 - DNA, 201 bp, Homo sapiens
atctcagacgtggagctgaagaagccagcaagagcctctgcagaagcctgctctccctggctgaaggaccaagccaggggcacctggcgagacagaaaacrtttaggcaataactgtggtactccagccaaacaccacagaaaaccctgtggccccctcagctactcgtgccagcaagggctcagcagggagcctggacca

SEQ ID NO: 170272 - DNA, 201 bp, Homo sapiens
caaagtgctgggattgcaagcataagccaccgcgcccggcctccactttctgtggtgtaaatattcctaccatggctgatttcctctggggaagccatgtyccctccacttctaccttcatggtctttgcttgtttattttcaaatgtggcccaaatccaccctgaggcaggcgcagtggctcacgtctgtaatcccagca

SEQ ID NO: 170273 - DNA, 201 bp, Homo sapiens
acagaaaacatttaggcaataactgtggtactccagccaaacaccacagaaaaccctgtggccccctcagctactcgtgccagcaagggctcagcagggakcctggaccaaaacactgaccaggctgaaatgagcccctaccactgggggtgtcagagaaggccaaggagggagccaggagcagggtgggaatgaggtccc

SEQ ID NO: 170274 - DNA, 201 bp, Homo sapiens
ttccttggttatctgaaggcctgtttgggagacggttcccaggacagttgcttcaggcttatatgtgtgtgctttctggaattcacagcatggcgtgcccyggtgagtggtggggagatgggtagtgaacacgtgtggtagcccctgctgggcgtgtcccacctgtcctccatgtcctacaacctggttggccccttttgc

SEQ ID NO: 170275 - DNA, 201 bp, Homo sapiens
gtgaggttcttgtctggccgcccggctcatagcaatgtttaatagatagtaactggtgttatgactgaagacgtcctttgtgggctattggagttcttaayatccccgagtaaccacagggcaacgctctggcttgacaaggggcggcactgctggtcagcagcccagccagccgcagcggccacttgtgttcccagctgt

SEQ ID NO: 170276 - DNA, 201 bp, Homo sapiens
accacatggtaagcctgtgcttcccctagtcagtggtgacaagacatcccttcccctcccactggacgggcagcatcatactgaagagtcaggacttcatygccactcagaggttacaaggctatccgccccccccacaacagtgacaatggagcccgcatgggacacagtaatgagggattcctgcacctcccaaccagg

SEQ ID NO: 170277 - DNA, 201 bp, Homo sapiens
cctgtccactgctcagcactaggcctgcagcagacaccatgagccccaaacttcccaaagcccttccccagtcccacaagatggtgtctgcggaccgtgcwcgtgagagatggcagccaggcagtccccacagggcacccattttcagctgcccccgcttctcagacaaggaaactgaggccagaaagccaggtggcccag

SEQ ID NO: 170278 - DNA, 201 bp, Homo sapiens
ggttatctgaaggcctgtttgggagacggttcccaggacagttgcttcaggcttatatgtgtgtgctttctggaattcacagcatggcgtgccctggtgartggtggggagatgggtagtgaacacgtgtggtagcccctgctgggcgtgtcccacctgtcctccatgtcctacaacctggttggccccttttgcttgtca

SEQ ID NO: 170279 - DNA, 201 bp, Homo sapiens
ctgtccactgctcagcactaggcctgcagcagacaccatgagccccaaacttcccaaagcccttccccagtcccacaagatggtgtctgcggaccgtgctsgtgagagatggcagccaggcagtccccacagggcacccattttcagctgcccccgcttctcagacaaggaaactgaggccagaaagccaggtggcccagg

SEQ ID NO: 170280 - DNA, 201 bp, Homo sapiens
gcggaagacctcccctctctggaaccaggggtgggagggactgtgctccccagaatgaatattccttggctgtgggtgagcctgccagcccagagtccccrggggtcaggagcagactggcaggggccatggcaacgactgggacacctggggagccaggtgtccaggcaggctccagtgtccactcccaacaagtatggg

SEQ ID NO: 170281 - DNA, 201 bp, Homo sapiens
gaagagacggaggatgaaattgtgttgccagatagtccatttgttgttctgagactcgcatgcctgggagaatcctgggaattaactagctccttctctcycatcccattttacagaaaagtgagacccaaggtggtttctgacttgcccagaggtcataactgcttggacagtcatggtcctcagagcccacgtttgctg

SEQ ID NO: 170282 - DNA, 201 bp, Homo sapiens
atattaaaaaaaaaaaaagagcatgagtccatttaagcaataacacatgttaatgtggcaaaaggagacccacaaatgactgacgtttcagccacactggygaggactgtatgactccctccactctatgtaggtgaccaatgggaagtcttgtttgcgcctcataagtgtgtccagacacagccagccgtgccgtaatgc

SEQ ID NO: 170283 - DNA, 201 bp, Homo sapiens
caggtcgggggggtagacaggatttcaggtggggagggtaggcatgagggctgcagtgatcttcatggctcgcaccctcagaactgcctgtgaaaaatggsggtgaggtttgcaggcttatccagaggcctggccatataaactcaaaggtgccctaccatttcgttccctgattctcagggcatcagtcctgactatagg

SEQ ID NO: 170284 - DNA, 201 bp, Homo sapiens
ctcccctctctggaaccaggggtgggagggactgtgctccccagaatgaatattccttggctgtgggtgagcctgccagcccagagtccccaggggtcagsagcagactggcaggggccatggcaacgactgggacacctggggagccaggtgtccaggcaggctccagtgtccactcccaacaagtatggggcattgaga

SEQ ID NO: 170285 - DNA, 201 bp, Homo sapiens
aaaaaattaggcatggtggcgtgcacctgtagtctcagctactcaggaggctgaggtgggagaatcacttgagcccaggaggtcaaggcagcagtgaaccrtgatccactattgcattccagcctgggcaacagagcgagactctgtctcaaaaaaaaaaaaaaaaagaaaaagaacagcaatttatttcctcacggttct

SEQ ID NO: 170286 - DNA, 201 bp, Homo sapiens
gtctcagctactcaggaggctgaggtgggagaatcacttgagcccaggaggtcaaggcagcagtgaaccatgatccactattgcattccagcctgggcaayagagcgagactctgtctcaaaaaaaaaaaaaaaaagaaaaagaacagcaatttatttcctcacggttctggagctgggaattccaatatcaaggcactgg

SEQ ID NO: 170287 - DNA, 201 bp, Homo sapiens
tctcagctactcaggaggctgaggtgggagaatcacttgagcccaggaggtcaaggcagcagtgaaccatgatccactattgcattccagcctgggcaacrgagcgagactctgtctcaaaaaaaaaaaaaaaaagaaaaagaacagcaatttatttcctcacggttctggagctgggaattccaatatcaaggcactggt

SEQ ID NO: 170288 - DNA, 201 bp, Homo sapiens
ctggagttgggagggggaaatagccctgccccaacatgtgatccagcatggactatggtcagttacaaatatgagtgagccaggcccctgccctgaaggayctcccagatttgtggggaagacacaaactcagcacagaatggaaaggggcctggggacacagtgctgtgccgagcttggaatttgtttcatgaagggaca

SEQ ID NO: 170289 - DNA, 201 bp, Homo sapiens
agcaaaagatgcaaacaggtcatggaagaggaagtgagagaggctccgccttactcaaataagaggtgtgtgatctcggctcactgcagcctctgcctccygggttcaagccactcttgtgcctcagcctcctgagcagctgggactacaggcatatgccaccgtgcccagctaatttttggtatttttagtagaggcagg

SEQ ID NO: 170290 - DNA, 201 bp, Homo sapiens
tttaaaggtaacaaacaaccccttctggctggtgtgggggaagccctaatttgtagtgcttgctacttttttttttttttttttttgagacagtgttttgytctcgtcacccaggctagagtgcaacggcacaatcttcactcattgtaaaacctccgtctcccgggttccagcgattctcctgcctcagcctcccgagta

SEQ ID NO: 170291 - DNA, 201 bp, Homo sapiens
ctatcccaaaaggttatgtactttctgattccatgtatagaacatcctcaaaatgacaaaattctatcatgcaaaacagatactgttggatggggtggggyggggcaggagggcagtgggcgtggctataaagagcagcctgaggggtcctggtggtgatggaaagcttctttatttcactgtatcaatgtcaattgttga

SEQ ID NO: 170292 - DNA, 201 bp, Homo sapiens
ttcagaacaatgacaactctgggacaagcatgccgctgggagaaagagaccaggagctgcacagccagacagatgcttttgcagtgggatggcggtggggrgttggaatggttcatcatttactttttatatttaacacttttttttttaagagatggaatgctctgtcacccaggctggagtgcagtggtatgatcgtgg

SEQ ID NO: 170293 - DNA, 201 bp, Homo sapiens
ctccagtgtccactcccaacaagtatggggcattgagatcctgggtggatcacaggggagcaggcgtgctcaagctgacacagcccaagctgtctttattcaccaccagacccgaatccacctctgggccaacagtctcaccctgcaggaggcctggcacctgtgtttgtattttatcaccatgaggttgtgtgggctgct

SEQ ID NO: 170294 - DNA, 201 bp, Homo sapiens
acgcgcccctggctgcctctctcagcctcggccccctccactcatgagtgggaataaataagagagtagaaaacgtaagtgaggttcttgtctggccgccyggctcatagcaatgtttaatagatagtaactggtgttatgactgaagacgtcctttgtgggctattggagttcttaatatccccgagtaaccacagggca

SEQ ID NO: 170295 - DNA, 201 bp, Homo sapiens
tcaatacgtgtacggttcatgatgttcctagcagattctccaaactgactcactcagcccctggaacactaaaaactgcatttcccagactcctttgcagmgtgggctaggttccaccaagccagacacagtgaaagtgagtgggtggccacaggtggagggcacagtggtggatatgttttgttcttttgggggcagcta

SEQ ID NO: 170296 - DNA, 201 bp, Homo sapiens
ctgtggccggctgagtggccgggcctcggtgttctcgtctctgaagtggggagaaggctgcccccgtcacgggacctcacagtgttagatgagattgcagmtgcgatgaggtgggggcccagcaggcctgctcagggcgtggctgtccctcctggtgcagacaccatcacgtggaaggcgatcacatcgagtgttctggcc

SEQ ID NO: 170297 - DNA, 201 bp, Homo sapiens
gtagaaaacgtaagtgaggttcttgtctggccgcccggctcatagcaatgtttaatagatagtaactggtgttatgactgaagacgtcctttgtgggctaytggagttcttaatatccccgagtaaccacagggcaacgctctggcttgacaaggggcggcactgctggtcagcagcccagccagccgcagcggccacttg

SEQ ID NO: 170298 - DNA, 201 bp, Homo sapiens
atgtgggtgctttgagctgagtgaaggaggaacttctctaggagagagctctgcctgccacctccctggtgcccccgcccccagagcagagctgtccttayagggccacagcctctgctggccccgaagcccctttgcagtgaaggggggctcctgtgtgcggctccctccagatggacaaaaaccaggtttggatgccgg

SEQ ID NO: 170299 - DNA, 201 bp, Homo sapiens
gtctctgtgggagcctgggttcctttggggcctggattcagggctcatcctagagtgagctgtcatctcagggcatctccctgggggatatgtgcaccccrgagctgcagttacagacactgagctcactccaccttcaccacccagccctgctgcttcccgccctaatcctcctggcagagcccctggataaggaaaata

SEQ ID NO: 170300 - DNA, 201 bp, Homo sapiens
gatagtaactggtgttatgactgaagacgtcctttgtgggctattggagttcttaatatccccgagtaaccacagggcaacgctctggcttgacaaggggyggcactgctggtcagcagcccagccagccgcagcggccacttgtgttcccagctgtggcttgtgatctatggtcgactgagctgttactctcctcggtta

SEQ ID NO: 170301 - DNA, 201 bp, Homo sapiens
tgggtgctttgagctgagtgaaggaggaacttctctaggagagagctctgcctgccacctccctggtgcccccgcccccagagcagagctgtccttacagrgccacagcctctgctggccccgaagcccctttgcagtgaaggggggctcctgtgtgcggctccctccagatggacaaaaaccaggtttggatgccggggc

SEQ ID NO: 170302 - DNA, 201 bp, Homo sapiens
tcaatacaaacaaaccacaggcataatttgggtctgtaaaggccgacgctgtcattctgctgcaagagggagggaagttcagttggggggaaaatgcagcrcttttgctgtcattaagtccaatggtggctggcgacagtcacggcgctggtggagctcagagcagaggtgggaggggtggtattgaccaggcgtgtgtgt

SEQ ID NO: 170303 - DNA, 201 bp, Homo sapiens
ggacggacccgcctttcccgcatctctgggggtgaggtcggctctcgttcaggcctgcagggtccctggtgccgcagcccctctggttggaaggccccctrcgtgcagccccgtcctccagccccgctcggctctgaatgagttcattatgtctcagcgcgccctggccgccaggctggcagttcttcgggctggcggggc

SEQ ID NO: 170304 - DNA, 201 bp, Homo sapiens
agggtccctggtgccgcagcccctctggttggaaggccccctgcgtgcagccccgtcctccagccccgctcggctctgaatgagttcattatgtctcagckcgccctggccgccaggctggcagttcttcgggctggcggggctcgggagctgtcagcctgccaaatccagttgtttgacttcatgtttcaaggccaaatc

SEQ ID NO: 170305 - DNA, 201 bp, Homo sapiens
aaggccaaatcctttcaggaaagttctctccatcccaccactccaccgccccccgcccttagaaaaataaatgcgtgattgactggctttgcaggtttttyatccatcgttctttccaaagaatagtgtgaacagctcattcgattcgttcatgtgacgtcctccctctcccaatccctgtctctctctctccttccacag

SEQ ID NO: 170306 - DNA, 201 bp, Homo sapiens
ccttagaaaaataaatgcgtgattgactggctttgcaggttttttatccatcgttctttccaaagaatagtgtgaacagctcattcgattcgttcatgtgrcgtcctccctctcccaatccctgtctctctctctccttccacagccacatgaaattgaagtgggagaacatggtgtgtgagcattattgggggtggggtg

SEQ ID NO: 170307 - DNA, 201 bp, Homo sapiens
gcactggctttggttgaggtctgcaaaggaaagcacccccactgccaggctgctcaggagtggctcccaccctcgactgcggggaagtgctggaaccctcygcacgagggcaacctttcttgggctctgaaggcgcctctcatcctctgagccaagaagacttctgacccagaattctgagttgagttccgacgcaggcgt

SEQ ID NO: 170308 - DNA, 201 bp, Homo sapiens
ccgcacgagggcaacctttcttgggctctgaaggcgcctctcatcctctgagccaagaagacttctgacccagaattctgagttgagttccgacgcaggcrtgggcgatggtgagcaactccaggctaccccgagaaagccgctgtgtgaccccattaggggacttggctctcctgccaagcccccacccagcacctgtcc

SEQ ID NO: 170309 - DNA, 201 bp, Homo sapiens
cgagggcaacctttcttgggctctgaaggcgcctctcatcctctgagccaagaagacttctgacccagaattctgagttgagttccgacgcaggcgtgggygatggtgagcaactccaggctaccccgagaaagccgctgtgtgaccccattaggggacttggctctcctgccaagcccccacccagcacctgtcccttgt

SEQ ID NO: 170310 - DNA, 201 bp, Homo sapiens
tctcctgccaagcccccacccagcacctgtcccttgtgtcatgactggacttgttacttctagcccaggagctccaggtgaaggggactgtgttggtcctrtctgcccaggactctccccacccgcacagtgtacctgtcccacagtggcaccaacaaggctcagctgagcccttgccagaggagacacggtgggcaccag

SEQ ID NO: 170311 - DNA, 201 bp, Homo sapiens
aggaggaagagaacatcgtgccagccaagacttgaccatgaggacacttttttttttttgagacagttttgctcttgttgcccaggccggagtgcagtggygccatctgggctcactgcaacctctgcctcccaggttcaagtgattctcctgcctcagcctcccaagtatctgggattacaggcacccgccaccacgccc

SEQ ID NO: 170312 - DNA, 201 bp, Homo sapiens
tgcattggtttaggtgagaggaggaggaagagaacatcgtgccagccaagacttgaccatgaggacacttttttttttttgagacagttttgctcttgttkcccaggccggagtgcagtggcgccatctgggctcactgcaacctctgcctcccaggttcaagtgattctcctgcctcagcctcccaagtatctgggatta

SEQ ID NO: 170313 - DNA, 201 bp, Homo sapiens
ggtgaagaactttgtttaggaacaatttaagatgccaacaggttcatctgctctcctgcctccttctccccaccttgtaacacaccctagacaagtcagcrctcaagtttatatggacaaataagcaagtaaaattagttaggaaatcaaatattggggttggggaacaataagagaaggcaagccctatgggatggtaaa

SEQ ID NO: 170314 - DNA, 201 bp, Homo sapiens
ggcatgtgccaccacacccggctaattttttgtatttttagtagagacggggtttcaccatgttgggcaggctggtctctaactcctgacctcaggtgatycacctgcctcggcctcccaaagtgctgggattataggcgtgagccacatgcccagttgataatatttttaatatactgttttaggttaaaatatttgaaa

SEQ ID NO: 170315 - DNA, 201 bp, Homo sapiens
tagtaactggtgttatgactgaagacgtcctttgtgggctattggagttcttaatatccccgagtaaccacagggcaacgctctggcttgacaaggggcgscactgctggtcagcagcccagccagccgcagcggccacttgtgttcccagctgtggcttgtgatctatggtcgactgagctgttactctcctcggttaga

SEQ ID NO: 170316 - DNA, 201 bp, Homo sapiens
ccagccccaactctgagcctccgttgggtcagcggtaagatggggcagtggcacctacctccccggctgctgtgaaaaccaagtgagcggaagcatggcascccctcaccaggtccccagtgggaggactctcaatgattggcactgccaggagtaatgttatgagaggagcgtcccatcagcctggaggggacacaggct

SEQ ID NO: 170317 - DNA, 201 bp, Homo sapiens
tggaggtgaaaccgcgcgatgaggcccctttcgagtctggctgcttttgcttagccctgcgcttgtgagatccctccgcggtggcgtggagaggtgtggcyacttcccgcttcgtggcaagtcgtgttctgccatttctccgaataccgatggaggcttacagtgctggaccatggaatggggtctggaatgttctcatac

SEQ ID NO: 170318 - DNA, 201 bp, Homo sapiens
gggcgtcctgggccctggcaggatgtcgttccagtgatacagcacttccttgcttctaaactgctgagtggtcagtgtcggttatcagctgtccacatatrttgcataatctcagatgctggcttgtaacagtgagtggaggtgggtggccacactgtccctttagaataatccacatggccctgtccaggcagggcagcc

SEQ ID NO: 170319 - DNA, 201 bp, Homo sapiens
tggcttgtaacagtgagtggaggtgggtggccacactgtccctttagaataatccacatggccctgtccaggcagggcagcctctgggctcccgcccaccrcctgatgcccctgtgcctggtgagcctgggccggggtgtgttcgctgtggatgggtgtgttccgagttctccggtcagcaagctccctttgtctctaggg

SEQ ID NO: 170320 - DNA, 201 bp, Homo sapiens
ggagggaggaaggaagggagggagggagaaaggaggaagggagggagggaggaagaggggaggtggggagggctctgttcacataataaagaaatccagasgtttgaccatgggcgtcatttcatcactgcacttggcagaggtcatcgctgctgctcccatccagctcagtcctgtggtccctgtcgtgtgtagaaacac

SEQ ID NO: 170321 - DNA, 201 bp, Homo sapiens
acactgtccctttagaataatccacatggccctgtccaggcagggcagcctctgggctcccgcccaccacctgatgcccctgtgcctggtgagcctgggcyggggtgtgttcgctgtggatgggtgtgttccgagttctccggtcagcaagctccctttgtctctaggggagttcctgggaggtaaaggggagccttttca

SEQ ID NO: 170322 - DNA, 201 bp, Homo sapiens
gtgactaggtgagggacagtgcggggtggcctgcctgcatatgccaggttctgtgtatcacatctctcaccaggaaggcaaaacctggcagatggcacccrggcctgatggctcctcaaccctctcagcaccccaaagagggaagtcccatcaccctcactcacccagccccgggctggccctgtcagctctcgaactgca

SEQ ID NO: 170323 - DNA, 201 bp, Homo sapiens
atctggtgtagatatctcccttcttccttactgtggtttctgagccaccctgcaaacttcctctgcatctgtcccagtacaaatatcactgtgtgcccttytaggctatctgggacacttaaaaataaataaataaagacatctgtctgaggcttaacttgcatatagcaaagtgcatgaatctgaagtgtgtggctgatg

SEQ ID NO: 170324 - DNA, 201 bp, Homo sapiens
caaatatcactgtgtgcccttctaggctatctgggacacttaaaaataaataaataaagacatctgtctgaggcttaacttgcatatagcaaagtgcatgmatctgaagtgtgtggctgatgaatctgtacacaccgctctccctgcacagccacccagatgaagacgaggagcacctccaatacccaagcctccctccac

SEQ ID NO: 170325 - DNA, 201 bp, Homo sapiens
atagcaaagtgcatgaatctgaagtgtgtggctgatgaatctgtacacaccgctctccctgcacagccacccagatgaagacgaggagcacctccaatacscaagcctccctccacccagtcaacactcttctccagagggagctagcccgtgccttcacccccgtcttctgcctgacggtaaacttgaggtgaatgggct

SEQ ID NO: 170326 - DNA, 201 bp, Homo sapiens
atacccaagcctccctccacccagtcaacactcttctccagagggagctagcccgtgccttcacccccgtcttctgcctgacggtaaacttgaggtgaatsggctcctacccatgaacacccaccgttcatttcatccgtgttgttctgtgcagccagactccatcctacggcatccgtgggtgatgtttcatcacgaggc

SEQ ID NO: 170327 - DNA, 201 bp, Homo sapiens
attgaaggatgcctagatggctggtaaagttttgtttctggctggttaagtgtgtctgtgagggtgttgccagaggagactgacttttgagtcggtggacygggtgacggagacccaccctccgtgtgggtgggcaccatctcatcggctgtccttgtggctggaacaaagcagatggaggaaggtgggaagactttgttt

SEQ ID NO: 170328 - DNA, 201 bp, Homo sapiens
gtgtgggtgggcaccatctcatcggctgtccttgtggctggaacaaagcagatggaggaaggtgggaagactttgtttgctgggtcttctggctttcatcygtctcccgtgctggatgcttcctgctctgggacatcagactccaggttctttgacctttggactctggtttagctggagctctcgggaggtgtcggcttc

SEQ ID NO: 170329 - DNA, 201 bp, Homo sapiens
atgacactaggctctaagtagtggggctgcgtgactccagcgcccctaggaccagcaagggcacccagagcactgtgggaggactggtgccgcctccctgmccccctgctttctcctgggccactgggctagacatggggcctccctgcccccatgtggtttggcctgaaaaagagaggaggtggggtggcacttctgggg

SEQ ID NO: 170330 - DNA, 201 bp, Homo sapiens
ggccctacgcccaggcccgtccctctgccaaagcgagccttttaggtgagccctgccggccacctgctagcccaggccccggctcctggtgggccctggaycaggctgcaagcatatccaagtgcatggcagtgagacgtccaggcctcccagccccaactctgagcctccgttgggtcagcggtaagatggggcagtggc

SEQ ID NO: 170331 - DNA, 201 bp, Homo sapiens
tgaaaaccaagtgagcggaagcatggcagcccctcaccaggtccccagtgggaggactctcaatgattggcactgccaggagtaatgttatgagaggagcrtcccatcagcctggaggggacacaggctgggtcagcacccacaggggcttccgcttctctgtctcagggggtccagggtggccccttgccactggtcccc

SEQ ID NO: 170332 - DNA, 201 bp, Homo sapiens
tggatgcacaggctccatgggaaggagctcctgctcgggtttctttgtaagcagcacgacatggcaccttcccagaggtacatgggtctgggcatgtcatyccccgacctgcttccagaacccaggggacggaggtcggagcagcctgcctgagatctgtggccatctccactccgccacccagctaccccgtaaggaggc

SEQ ID NO: 170333 - DNA, 201 bp, Homo sapiens
gctgcctctgcctcctgtgaacgccatcctctggttcttcaccttcaggctcccgcatgagctgggtggttggtgttaactcctctcttctctctttctasccggaaccccctgcccagagctccagggagctccaccatagccagtagagggagggctctgtttacctccttccaagttcccaattttgctctactgatt

SEQ ID NO: 170334 - DNA, 201 bp, Homo sapiens
aggctcccgcatgagctgggtggttggtgttaactcctctcttctctctttctacccggaaccccctgcccagagctccagggagctccaccatagccagkagagggagggctctgtttacctccttccaagttcccaattttgctctactgatttttgtctgcggtgcataatcaatcagcctggaccccagagaggcct

SEQ ID NO: 170335 - DNA, 201 bp, Homo sapiens
gagctcagtctggctttgatctgcgggaggtgttgtgtgcagaagctgtgggcaccgggggctgcagagcttcagacctggagcctgctcccagggccgayctgaacccggcacctgtgctgacccaagggtcaaccaaagtcctgagtttggtggcgccgagggaggggagtggtcgcatcccaccgggtgcctggaatg

SEQ ID NO: 170336 - DNA, 201 bp, Homo sapiens
atcccttcctgatcttccaggtcatgggctccaggcttgggcccactgctgtccttctccactctctccccagggaacccacctgggttgtggccttaaamccagccagatgatgcttctccagcctctgcctcctgccgggccctcccctgagctcagaagctgccatcagtagccatgcaacctcccccttgccatcat

SEQ ID NO: 170337 - DNA, 201 bp, Homo sapiens
tagccttgaagtctccctaacctggcaagacagtggagaagggggacagccagcgggacattccactgtagaataaatacatgcatggcaaaacacttgayatctattaacttctaagtggcaagagtgattcttgtggttagacctgaatgggaacttgtaagtctaaagtgaaaatctaattagatttttcccacaaaa

SEQ ID NO: 170338 - DNA, 201 bp, Homo sapiens
ttgcgtgctgtgaactgggcgtgaacacctcctgtgatggggagctcactccttgccgagggagcctggtaagctgccggcacagtcatcctcataccctstctcctgacctgtgtcttatggcctctgcccccaggcagctgcggggcagggggctggggtgacccccgtcttggttgttgagcccttccactagctgga

SEQ ID NO: 170339 - DNA, 201 bp, Homo sapiens
ggcactgcattcaaagtgagtgcgcctgcttttgtttcttcctaggacttctgaaaacgtgtgggtgggggagggtgtggagggttcgtgcaccgggtggygtggctgcagtggcgtgggaggcggccccagaggggcagaggcgcagtgtgtttatgtgcacagggccgttcccttcctgtccctcatgtgaacaccagt

SEQ ID NO: 170340 - DNA, 201 bp, Homo sapiens
ctggaggggacacaggctgggtcagcacccacaggggcttccgcttctctgtctcagggggtccagggtggccccttgccactggtccccaggcacagccrctacacaggtgcctctgcagggtctgggagtcagctgtccagggcctgcttggccaccgcagggcaggagtgtggcactgtgagcctggtggcctggctg

SEQ ID NO: 170341 - DNA, 201 bp, Homo sapiens
gcagccaggggttccgtactccctgccaggcagctgccagccctccccgctcccctctcagttcctcagcctggctatgggaggcccaagtcccacgtgtmactggaattcgggaggcctggctctcaaagctttctgtacaaaacaaggagaaaaagagaagccacttttgctgtctggacatgctgtgggtgtcctggg

SEQ ID NO: 170342 - DNA, 201 bp, Homo sapiens
tggcacctgcagctcttcctaggcccctgccctggggcactggtgcctgcttcgccaaaggcacagagggctgcaggcgactggggcagggtggggggctygcctcttagggctcagcttcactggccagaaacagggctggctcgagctgggtgttggcctgggtggggtggccagcatgcccacacctctcagtctgga

SEQ ID NO: 170343 - DNA, 201 bp, Homo sapiens
tgcttcgccaaaggcacagagggctgcaggcgactggggcagggtggggggcttgcctcttagggctcagcttcactggccagaaacagggctggctcgakctgggtgttggcctgggtggggtggccagcatgcccacacctctcagtctggatgtggggagaggttgttccatccagggcagttggtctccagaaggaa

SEQ ID NO: 170344 - DNA, 201 bp, Homo sapiens
tgacttgttcttagggaatgaggcccagggagctaaagctttagggcagggcagcagattcagagacacccccaggggtagggggaagtgcactagagtgrcgtgtgcctggcgtgggaacagggagacattagagaatagtgggagtgtggcaggctgggcccgccttgcccctttcaaggaagcagctgccgcgtcaca

SEQ ID NO: 170345 - DNA, 201 bp, Homo sapiens
ccacgtgagggagtctctggagaccaccaacccgctggtgggcggccaagcgtcaccaccagtccctctcagtgcgtcccacctctgttctcagcccctgyggtgcccgcagtcagtggggcagtgagaaccgcgcaggaaatagctggcgccatggtgtcggttctggttgacagagtgccacctggctaaacccagccg

SEQ ID NO: 170346 - DNA, 201 bp, Homo sapiens
gcctgtgggcagagctggcctgggaggacacgggcctgagggctgagcaatccctgagtgagaacaggtagctgaggctggagcctgtgtcccccaggcasctgctaaggcccgggcctggggctggagtgctgggctcaggtgccatgtgagctctttgcaggcagggaccaggtcagagtcctttgtgtgcctcttgac

SEQ ID NO: 170347 - DNA, 201 bp, Homo sapiens
ttctgtcccaaactctcttcagacctcagggcacctgggactttttgggtctttgttgagaagaggctgtgcttaattaacgtacaaatggccttttgggyttccacaaaggctgccttcctattctgggctcccctggccgggccctcgggccctcaggccctcagctgtcctcctccctccccatctctcccttcccat

SEQ ID NO: 170348 - DNA, 201 bp, Homo sapiens
agcctgaacacatcctggatcagccaggaccccctcaggggctcgcagtggcctagtctgctctgggctttgctggatgcccttcgagaatcaccgcgcarcctccttcagaggcccaacactccacgtgctgacttcccgggcctgtgtctcccctgccgcagactgaagcgttcccggctgaaggtgaggttctgcacc

SEQ ID NO: 170349 - DNA, 201 bp, Homo sapiens
agcaccagtgtctccatgaagttggggttcctggggagatggctccccccagcctcgcctcctccctgcctcagagactgcgcagaaggagggcagctggrctgatgagcaactcgcctggggccccagagaggcccgatcccatcccgctggggcacgccccaggtccaagcctgtctgggcacccccagggctctggac

SEQ ID NO: 170350 - DNA, 201 bp, Homo sapiens
ctccatgaagttggggttcctggggagatggctccccccagcctcgcctcctccctgcctcagagactgcgcagaaggagggcagctgggctgatgagcarctcgcctggggccccagagaggcccgatcccatcccgctggggcacgccccaggtccaagcctgtctgggcacccccagggctctggactcacctccacc

SEQ ID NO: 170351 - DNA, 201 bp, Homo sapiens
ctgcatccttggtggtgacaccatcggcaagtttggcacccccggccctcacactgaccccagcaccccttccccaggctctggtggactccttgctcacrctgcctgctctgcagggtgggggcgggggggcagagcctgccagcccctcccacacttccctcaccagatcacaggaccctcggggtggaggctggtgcg

SEQ ID NO: 170352 - DNA, 201 bp, Homo sapiens
tggtgcaccaggcactctgctaagcactttatgtacattcttaaattaccggatccccattacggaaacggagtcttaggttgaaaaactacttgaccaargtcatcccagctgtaagtggcagagcaggccctgaatccaggcaacccaggctgatcaccaccctgccaccacccacccctctctcacatacaggctcta

SEQ ID NO: 170353 - DNA, 201 bp, Homo sapiens
cctggagggagagcagtgaggggcatcattaatgggctgttgggtgtcctgatttctttgagagaagacgagctgagcaggcacagctcttaatcctccarccactgccccccaggctggggcctgccagcccccgcccctgtagtcatttctaaatcgggtctagatggactggacgcgtggctgccagagaccatttga

SEQ ID NO: 170354 - DNA, 201 bp, Homo sapiens
cccgccaggccccactgctctctgcctggctggcacacgcccttgcctcaggcctggctccccgggtcctgttgaccaccaggctgcagatcccaaggaaygcaggcatctgggtggccccacgtggagcaccagccatggggaggccgtgggctaccaggccccgcgtgcactcgcagcatgcaccactccttctccagg

SEQ ID NO: 170355 - DNA, 201 bp, Homo sapiens
caggcacagctcttaatcctccagccactgccccccaggctggggcctgccagcccccgcccctgtagtcatttctaaatcgggtctagatggactggacrcgtggctgccagagaccatttgaaccccctacctccaaattccccaaggtccccgcctgcaaaggaccagccccagcatgaggccctgaaagtggcaaca

SEQ ID NO: 170356 - DNA, 201 bp, Homo sapiens
cctgttgaccaccaggctgcagatcccaaggaacgcaggcatctgggtggccccacgtggagcaccagccatggggaggccgtgggctaccaggccccgcrtgcactcgcagcatgcaccactccttctccaggtcccgttgacctccatgtgtgctgtgccccgtcctccgctgcactgcctcttcgtagtgccccagct

SEQ ID NO: 170357 - DNA, 201 bp, Homo sapiens
ccaccaggctgcagatcccaaggaacgcaggcatctgggtggccccacgtggagcaccagccatggggaggccgtgggctaccaggccccgcgtgcactcscagcatgcaccactccttctccaggtcccgttgacctccatgtgtgctgtgccccgtcctccgctgcactgcctcttcgtagtgccccagctccatccgg

SEQ ID NO: 170358 - DNA, 201 bp, Homo sapiens
atctgggtggccccacgtggagcaccagccatggggaggccgtgggctaccaggccccgcgtgcactcgcagcatgcaccactccttctccaggtcccgtygacctccatgtgtgctgtgccccgtcctccgctgcactgcctcttcgtagtgccccagctccatccgggggtgggtgggagtggagacccctgcctacag

SEQ ID NO: 170359 - DNA, 201 bp, Homo sapiens
ccagccatggggaggccgtgggctaccaggccccgcgtgcactcgcagcatgcaccactccttctccaggtcccgttgacctccatgtgtgctgtgccccrtcctccgctgcactgcctcttcgtagtgccccagctccatccgggggtgggtgggagtggagacccctgcctacaggcctccgggtctagccagagtcaa

SEQ ID NO: 170360 - DNA, 201 bp, Homo sapiens
gcctccgggtctagccagagtcaaccagcccaccagagacacccagatgcaggctatgccccacgtgcccagggaggatctgctgacgtgagcccagattkcgattcttgtgcgagggagacgaaccaggtttaaaccccagctctgccacttctggctgtgactttgagcatggctgttcatctctgggggtctctctcc

SEQ ID NO: 170361 - DNA, 201 bp, Homo sapiens
agccagagtcaaccagcccaccagagacacccagatgcaggctatgccccacgtgcccagggaggatctgctgacgtgagcccagatttcgattcttgtgsgagggagacgaaccaggtttaaaccccagctctgccacttctggctgtgactttgagcatggctgttcatctctgggggtctctctcctcatctcagaga

SEQ ID NO: 170362 - DNA, 201 bp, Homo sapiens
cggggcaggctctgggccctgggcaccacccactggaaggaaagggggttcagttagcccagccctgccccccaatggaagaaaattggggttcagttagmccagccctgccccaccccagctcttcacacatccagatccagatgggggccagaccaccaggagactgtaaggatccaaggccgaggggcaggagacgca

SEQ ID NO: 170363 - DNA, 201 bp, Homo sapiens
agcccagccctgccccccaatggaagaaaattggggttcagttagaccagccctgccccaccccagctcttcacacatccagatccagatgggggccagaycaccaggagactgtaaggatccaaggccgaggggcaggagacgcagtgcgcccctctcctatttctgggttgcaaccgcccacacatgtgcacacaggga

SEQ ID NO: 170364 - DNA, 201 bp, Homo sapiens
gatcatgcatttattttgggggtaggataggtcctgaagaccacagggcagggatctctgagttggggcttttgcggagtgagggagtgagagggtgttcyaggcagaggaggtggcagagaaaggcaccaagtgaggcaggggcagttggggacatgagtgctcgggagcggggagagggggcagctggtgggtaagcag

SEQ ID NO: 170365 - DNA, 201 bp, Homo sapiens
cttgggcatcggacctgcccaccatctcctgaggtggggcctgctctccagacagtcaggtcagcatgagttcccatgaggccagggccagcacgaggacytgctgggagcggtccatccacccatccgtccgtccatccatccatccatccatccatccctatccacctgtccaccctgatgcagttcctgccatccacg

SEQ ID NO: 170366 - DNA, 201 bp, Homo sapiens
ctccctttcatgtatagacatggatcctatgagtcttttccctctggggagccctgcctaacacagtggcatagagctccaggcaggcccctcacctggcyttcagcttcagtttctttgcctactgggctgaatattggtgtcaccacccaggatagcaagtccccatcagtgtcactgccacctgtcgaagagatcccc

SEQ ID NO: 170367 - DNA, 201 bp, Homo sapiens
tgagtctcactgtggtgcccaggctggtcttgaactcctgggctcaagtgatcctcccacttcagcctctcaaagtgctgggattacaggtgtgccccacygtgcccagcctcggattgtcatttagcggtctgtctgaacatcagtctcctgacgtccttcctacagatatgaacagagcccctgctaggcatgagtatt

SEQ ID NO: 170368 - DNA, 201 bp, Homo sapiens
aggctggcagattgcttgagcccaggagtttgaagccagcctgggcaacatggcgaaaccccatctctactacaagtacaaaaatttggccgggcatggtrgctcatgcttgtaatcccagcactttgggaggccaaggagagcggatcacttgaggccagaagctcgagaccgcctctactaaaaatacaaaaattagcc

SEQ ID NO: 170369 - DNA, 201 bp, Homo sapiens
agacaggatttcaggtgggggggtagggaggatttcaggtgtggagggtagacaggatttcaggtggggggatagggagtatttcaggtggggggggtagrgaggatttcaggtgtggagggtagacaggatttcaggtgggggggtagggaggatttcaggtgggggggtaggcaggatttcaggtcgggggggtagaca

SEQ ID NO: 170370 - DNA, 201 bp, Homo sapiens
gacaggatttcaggtggggggatagggaggatttcaggtgtggagggtagacaggatttcaggtggggggatagggagtatttcaggtggggagggtaggsaggatttcaggtgtggagggtagacaggatttcaggtggggggatagggagtatttcaggtgtggagggtagacaggatttcaggtgtggagggtagaca

SEQ ID NO: 170371 - DNA, 201 bp, Homo sapiens; identical to SEQ ID NO: 30674

SEQ ID NO: 170372 - DNA, 201 bp, Homo sapiens
ccaatggaagaaaattggggttcagttagaccagccctgccccaccccagctcttcacacatccagatccagatgggggccagaccaccaggagactgtarggatccaaggccgaggggcaggagacgcagtgcgcccctctcctatttctgggttgcaaccgcccacacatgtgcacacagggaagatgtctcttttggt

SEQ ID NO: 170373 - DNA, 201 bp, Homo sapiens
gggaggtcccagccaggggaagtgtgtccccatccctgctctggtccccaggccagagaggtgagggacccagagaggcccaggatgaggactccttcagkcctgggtttttgtttggattttttttttctgccaagtgactttaaagccgcccgagaaggtcctgtatgtgtgagcaggttgggcaaggggagggcgggt

SEQ ID NO: 170374 - DNA, 201 bp, Homo sapiens
gactttaaagccgcccgagaaggtcctgtatgtgtgagcaggttgggcaaggggagggcgggtctccaagctgggagcctcctcgcggccctcgcctcggsactgatgtggccctggaccctccggtccctccaggccacccttcgtgccaggacccagctggcttcaatggcaggaggtgccctgggctggagggtcccc

SEQ ID NO: 170375 - DNA, 201 bp, Homo sapiens
actttaaagccgcccgagaaggtcctgtatgtgtgagcaggttgggcaaggggagggcgggtctccaagctgggagcctcctcgcggccctcgcctcggcrctgatgtggccctggaccctccggtccctccaggccacccttcgtgccaggacccagctggcttcaatggcaggaggtgccctgggctggagggtcccca

SEQ ID NO: 170376 - DNA, 201 bp, Homo sapiens
ctgatgtggccctggaccctccggtccctccaggccacccttcgtgccaggacccagctggcttcaatggcaggaggtgccctgggctggagggtccccasgctgggctccggggctccaggttgactcagcagtccccaggcctgtgggcagagctggcctgggaggacacgggcctgagggctgagcaatccctgagtg

SEQ ID NO: 170377 - DNA, 201 bp, Homo sapiens
tgcaggcagggaccaggtcagagtcctttgtgtgcctcttgacccccaggtcctgggagaagaggggcttgggaggccttggctggatgcacaggctccaygggaaggagctcctgctcgggtttctttgtaagcagcacgacatggcaccttcccagaggtacatgggtctgggcatgtcattccccgacctgcttccag

SEQ ID NO: 170378 - DNA, 201 bp, Homo sapiens
gtgctgtctggttttgtatgtgggaggagcatgcacacagtttcattttccccggaagcatggaggtgtaggatgacatgtaatatttggaagacccattscatttccaaggaaccttctagcaggatggccctggagtctctggcagcagtggacatggtcctgaattggagtgctgtgaatgttcactgctgacctcac

SEQ ID NO: 170379 - DNA, 201 bp, Homo sapiens
gcccggcctcactacctccacctcatgaatcaccctctgtccttgtcctgcaagtctgtcggcacagccgagctggcgtcaccctctgatgccagtgcccrgatccctgaattcactgggcagccgccccctgcacctggctcccagccactgcctttccaaagcaaatggggacagggatacctgcccctccctgggtag

SEQ ID NO: 170380 - DNA, 201 bp, Homo sapiens
caagtctgtcggcacagccgagctggcgtcaccctctgatgccagtgcccagatccctgaattcactgggcagccgccccctgcacctggctcccagccaytgcctttccaaagcaaatggggacagggatacctgcccctccctgggtaggcagctgttgcggcctccagttgtgagagtctctgccccaccctgcccct

SEQ ID NO: 170381 - DNA, 201 bp, Homo sapiens
tcactgggcagccgccccctgcacctggctcccagccactgcctttccaaagcaaatggggacagggatacctgcccctccctgggtaggcagctgttgckgcctccagttgtgagagtctctgccccaccctgccccttcccctgcccctgcagggtagagaggaggcgggtgggccaccgactgggagtcccgggcagc

SEQ ID NO: 170382 - DNA, 201 bp, Homo sapiens
cgggcagagctggtggggcagcttcagaggctgggatttgacatctctgagcaggaggtgaccgccccggcaccagctgcctgccagatcctgaaggagcraggcctgcgaccatacctgctcatccatgacggtaggcctgtcggacaccaggacctcacgggggtgaaagctcccctttcccagggtgggggctgtgca

SEQ ID NO: 170383 - DNA, 201 bp, Homo sapiens
gacaggatttcaggtgggggggtagggaggatttcaggtgtggagggtagacaggatttcaggtggggggatagggagtatttcaggtggggagggtaggsaggatttcaggtgtggagggtagacaggatttcaggtggggggatagggaggatttcaggtgtggagggtagacaggatttcaggtggggggatagggag

SEQ ID NO: 170384 - DNA, 201 bp, Homo sapiens
agacaggatttcaggtgggggggtagggaggatttcaggtgtggagggtagacaggatttcaggtggggggatagggagtatttcaggtggggagggtagrgaggatttcaggtgtggagggtagacaggatttcaggtggggggatagggaggatttcaggtgtggagggtagacaggatttcaggtggggggataggga

SEQ ID NO: 170385 - DNA, 201 bp, Homo sapiens
tgtgttttatatatagagagaaaggctaatgctttaagtttaaaaatcagtatttaaaagtttataagtaggctgggcatggtggctcacacctgtaatcycagcactttaggagtccaaggagggcggatcacctgaggtcagaagttccagaccagcctggccaacatggcaaaaccccatctctactacaaatacaaa

SEQ ID NO: 170386 - DNA, 201 bp, Homo sapiens
accttgtgggatctaggcaggtcattgctgttttgcaagtggggttgttgaagccacaggagatgaaataagctgctgtcccccagccattgagtgctgayaggatcaggagtgccagttggtgtggctgaccccagaccctgtgcgtgttacctctaagctacattctagagcagactttttgcccacacaagccttaaa

SEQ ID NO: 170387 - DNA, 201 bp, Homo sapiens
tttttaattctcaccattctggtgggtatgaaatcgtatctcattgtgtatttcagtttctttctttctttctttctttttttttttgagacagagtctcrctctgttgcccaggctggaatacagtggtgcaatctcagcccactgcaacctctgcctctcgggttcaagtgattctactgcctcagactcctgagtagc

SEQ ID NO: 170388 - DNA, 201 bp, Homo sapiens
ttcagagggattgcaatattttacacgtcctccatctgctgcagctgttcagtatcctcaccagaccttggtgttatcagtctttttaattctcaccattstggtgggtatgaaatcgtatctcattgtgtatttcagtttctttctttctttctttctttttttttttgagacagagtctcgctctgttgcccaggctgg

SEQ ID NO: 170389 - DNA, 201 bp, Homo sapiens
caaagtctaggagaagacaggcatgaacttccagttgtcccttcgaaatggagtcctactgggcacacttgattctcccagcgatgatgtgtgacaacacrtgggaagcattggccaccagggaagctcactggagcctcagtgtccagggtttttgtgtagacattagcacctgtgtgactgactttagcgactcagtct

SEQ ID NO: 170390 - DNA, 201 bp, Homo sapiens
gcgaagagaggagacacatggggcaaagtctaggagaagacaggcatgaacttccagttgtcccttcgaaatggagtcctactgggcacacttgattctcscagcgatgatgtgtgacaacacgtgggaagcattggccaccagggaagctcactggagcctcagtgtccagggtttttgtgtagacattagcacctgtgt

SEQ ID NO: 170391 - DNA, 201 bp, Homo sapiens
ttatgtaaatagaatcatacagtatataattgtgctggggcctccagtgctacccccaggctgaatgattcattagcaggactcacagaacttagaaaagrtattacactcccagttagacttattaccgtgaaagaataaagattaaattcagcgaagagaggagacacatggggcaaagtctaggagaagacaggcatg

SEQ ID NO: 170392 - DNA, 201 bp, Homo sapiens
agtgggagatggggacaggtgagtggggtcttgaaacgtgaacaggagtttgcaggtggagcaggtttcaagagcattccagggcacagcatgggcaatgrcagggagagctgggatgtctgaagagcagcggcccagacactgagtggctggcgaggcgagggaggtccgcgggtggggcccagtcaggatggactcatc

SEQ ID NO: 170393 - DNA, 201 bp, Homo sapiens
gagcaggtttcaagagcattccagggcacagcatgggcaatggcagggagagctgggatgtctgaagagcagcggcccagacactgagtggctggcgaggsgagggaggtccgcgggtggggcccagtcaggatggactcatctgccatgctgaggagctgggctatgatgtgggcaatagggagccacagcagtttacac

SEQ ID NO: 170394 - DNA, 201 bp, Homo sapiens
aaagggttctgttaacttctctgggttctgggttggtgtcttctgactgattgattgccaggagggttttgtttggatttgctttggctcctgcagatttrtctagctgggggtgtctctggtagcagctatactgtatacatctaacagcaatgtaataacaatcctgaaatacaccacagcctgttatgtagctgggag

SEQ ID NO: 170395 - DNA, 201 bp, Homo sapiens
gtctgaagagcagcggcccagacactgagtggctggcgaggcgagggaggtccgcgggtggggcccagtcaggatggactcatctgccatgctgaggagcygggctatgatgtgggcaatagggagccacagcagtttacacaggggaggcgggagcagctgagcatttagggaaaccactctggctgcaaaagaggagag

SEQ ID NO: 170396 - DNA, 201 bp, Homo sapiens
gccccgagggccaggcactctggcttagtgaagaagccacccagcaaaggcctggtgtctccacaccattctcgggggggacagcagcaaggacgatggamgggagcagtgctcggccttaacgtccctgtttccggaagcgtccctgccccgctcagtcctgccccactccctctcccatcagtgccctcagactccagg

SEQ ID NO: 170397 - DNA, 201 bp, Homo sapiens
acgatggacgggagcagtgctcggccttaacgtccctgtttccggaagcgtccctgccccgctcagtcctgccccactccctctcccatcagtgccctcaractccaggcccttttctttctttcccagcagtgctgacaactgtgagtgtggaactggactgtgaaccctggagggcagatggtggaggtgggagggggc

SEQ ID NO: 170398 - DNA, 201 bp, Homo sapiens
gagcagcgctgtgacccccacggggagccgtcagccaggcccgtagccagggaagggcggaggggcttaacgcaggcccacatggccaggacacagaaccrtgggggcagccccagcccttccctgcctgttacaggcccctgcccctgttcctgtgtcccatgcctgtcccctccctccatgtgtctgtctctactcgcc

SEQ ID NO: 170399 - DNA, 201 bp, Homo sapiens
gggatttgacatctctgagcaggaggtgaccgccccggcaccagctgcctgccagatcctgaaggagcgaggcctgcgaccatacctgctcatccatgacrgtaggcctgtcggacaccaggacctcacgggggtgaaagctcccctttcccagggtgggggctgtgcagagagcctctttcactgggccaaaccactgac

SEQ ID NO: 170400 - DNA, 201 bp, Homo sapiens
ccctgttcctgtgtcccatgcctgtcccctccctccatgtgtctgtctctactcgcctgccctctctctgccctcttttctctgcttcatcctctttttcygtttctgcctgtctcatggttcttcctgtccctgccctccctccctccgtgtgtggccgtgtctctctgtctgtctcttcctcctcctccagctctgtcc

SEQ ID NO: 170401 - DNA, 201 bp, Homo sapiens
tgcgctcgccccactgggtgtggcggcctgccgcccggctctgtggtgctggtcccctgcggtcattctcagcgtagcgcctggactgcccctcagccgcrgcttggctctgcagccagcgggacaggcccggcgctcagctcccgatacttagcatcctgcggtcagctccccgtgctcagcatcccgtgctccgttctg

SEQ ID NO: 170402 - DNA, 201 bp, Homo sapiens
aagccagccctgggctcaaagagcagtgaggccattttgagagaggaatgctccctcgtgcagagcctgtctccacctccatgagacgggaaggaacagtkgtcttctcataaaagcatctggcgcccatgaaacctggcacctcgcttgacctccggctaacgggatgcggcagggtgctgtggaactaatggagttctc

SEQ ID NO: 170403 - DNA, 201 bp, Homo sapiens
cacccatggaacccaaccccgtgaagagctagaccatcaccatcactgacagctctgacagctacctcgcaccttgcccaggtggtcttcaccccttgtcyccttagaggcaaccactgtttggattttttccgttataaataagttttcctattctagaattttatgtaaatagaatcatacagtatataattgtgctgg

SEQ ID NO: 170404 - DNA, 201 bp, Homo sapiens
tttgatattttcttcactttatatccatccatccctccgtctgtctatccatgttattatttagatgcatttccgagtaaaatgcagacacgggtatactyccctatacacttcagcatatcattggagtttggtatttgtttacggtttttcctgtttgatgtacaatttacatacaatgaaatgtacacacgtcaagtg

SEQ ID NO: 170405 - DNA, 201 bp, Homo sapiens
acttggaatagttttggtttttttttttggagacagagtcttgctctgtcacccaggctggagtacaacagtggtgtgatcttggcttcctgtgacttccrcttccctggttcaagcgattcttctgcctcagccccccaagtagctggggttacaggtgtgtgccaccacgcccgcctaatttttgtatttttagtagag

SEQ ID NO: 170406 - DNA, 201 bp, Homo sapiens
gaccatacctgctcatccatgacggtaggcctgtcggacaccaggacctcacgggggtgaaagctcccctttcccagggtgggggctgtgcagagagcctytttcactgggccaaaccactgactgagctaggccaccaacactcatgggttgggggtaaaaacctcatgggacttcctgctgggggctgggggcaggtta

SEQ ID NO: 170407 - DNA, 201 bp, Homo sapiens
gtggatgttacttcatttggtgcgttctgagaacttgcccaggtgcagcctggattcgcgggtctcctatgaagtcaggagggaagaagctcggtgccgcyggccagtggcagcatcctgaagttcatgagacctccaggctgggtttgggcagggtccacgtcctgtctgtccatcccggaatgttggtgtccctgatga

SEQ ID NO: 170408 - DNA, 201 bp, Homo sapiens
cctcctattccaacctggatggtggcctggagatcagggaacttttccatgctcacgactacagctctgtgcaccaggccagtgccaggcacgtagtaggygctcagtgacagtttgcagaagggtggatgttacttcatttggtgcgttctgagaacttgcccaggtgcagcctggattcgcgggtctcctatgaagtca

SEQ ID NO: 170409 - DNA, 201 bp, Homo sapiens
aaattgcccttcctttgcagggtctcttgttcctattccaacctcctcctattccaacctggatggtggcctggagatcagggaacttttccatgctcackactacagctctgtgcaccaggccagtgccaggcacgtagtaggcgctcagtgacagtttgcagaagggtggatgttacttcatttggtgcgttctgagaa

SEQ ID NO: 170410 - DNA, 201 bp, Homo sapiens
ggcccttgggcttgcagcttgatgtcttttccacgagtccacactgcagctccatgcagatgtcaaatatgaccgctgccttgttggggccggtttgtccrggaagggatcttgtgatcttggcgagggagccaggtcctgcctgtcaccctccccccaggtctgagtgacccaccccgcctgcctctgtaggttcctcta

SEQ ID NO: 170411 - DNA, 201 bp, Homo sapiens
actagggtttcttaaaagtgcctcccggcccttgggcttgcagcttgatgtcttttccacgagtccacactgcagctccatgcagatgtcaaatatgaccrctgccttgttggggccggtttgtccaggaagggatcttgtgatcttggcgagggagccaggtcctgcctgtcaccctccccccaggtctgagtgacccac

SEQ ID NO: 170412 - DNA, 201 bp, Homo sapiens
ctcaaactcctgccctcaagtgatccacccacctcgacctcccaaagtgctggggttacaggactgagccaccatgctctgccttatctgccctctcagtkgtcctccactccagcctcatttcctggctccaccttccacataccccacgctgctcgagttctttctatccgagagggtggggccagtgcacacctgcct

SEQ ID NO: 170413 - DNA, 201 bp, Homo sapiens
cacctggctaattttttttggtatttttagtacagacaggatttctccatgttgaccaggctgatctcaaactcctgccctcaagtgatccacccacctcracctcccaaagtgctggggttacaggactgagccaccatgctctgccttatctgccctctcagtggtcctccactccagcctcatttcctggctccacct

SEQ ID NO: 170414 - DNA, 201 bp, Homo sapiens
tgtcactaccactcatggctgtatttggggccctctctcactggtggggaatcgtgcctggcttatctgccccccttttttttttttttttttttttgcgrcagagtctcactgtgtgacccaggctggagggcagtggcttgatcttggctcactgtgacctccacctcctgggttcaagagattcttctacctcagcct

SEQ ID NO: 170415 - DNA, 201 bp, Homo sapiens
ctctttttctgtttctgcctgtctcatggttcttcctgtccctgccctccctccctccgtgtgtggccgtgtctctctgtctgtctcttcctcctcctccrgctctgtcccagtagggccactccaggcaggatggtctgcggcccctcctgcttcaccctctccactctgtccccactgccgaggacacacctttgctgg

SEQ ID NO: 170416 - DNA, 201 bp, Homo sapiens
gtctgcggcccctcctgcttcaccctctccactctgtccccactgccgaggacacacctttgctgggtttcttggttcagcttttgtaccgtgacatctcygaggtccacaggtcacagggcactggccagtgtggggcagggactcctcctgcccaggccattggacaaagcagagctgcttcaggggctttggggccac

SEQ ID NO: 170417 - DNA, 201 bp, Homo sapiens
tgcccaggccattggacaaagcagagctgcttcaggggctttggggccaccaggccaggaacaggtcccctcctgcctaccccagctccctgggagacacmgcccacagcagcgtcacgtaattaagacataaaagtccacgatttccgctgcgtgtgggcaaacaccggccgggtgctaatgcaatcctttcttttagtg

SEQ ID NO: 170418 - DNA, 201 bp, Homo sapiens
ggcaaacaccggccgggtgctaatgcaatcctttcttttagtggattcttgaatttaaatgatatgtaattaaacataattagccacggacgccattcggytaggtacacgtgcggagtggggctggccggattctcattacaaagcgtcatcttctatggggagacctcttgttccctctcggggctggttgcttttgcc

SEQ ID NO: 170419 - DNA, 201 bp, Homo sapiens
cagcctggcagggctgatgcaggcccatgcacacaggccaggcagaggtgagaccagggaatagaagcgttgcaggggcagagggcaggagggggcagagyctcggcgtaggagtgagcctactggtccttcccgcaggcaccctccctagtgccaggtctgctgggactccaggctgttggtatgccccctagggtcctg

SEQ ID NO: 170420 - DNA, 201 bp, Homo sapiens
acatcagtgtgtccgtccgcctgcctgtctgccccccaccagcctgtgtgcccaggggaaggctcaaggccggtcatgctctacctccctggccagcccasccccagcccacggtgcattccctggacaggattgctgagttttccattttagccacaacagcgcccacacccgcgccaaccaacctgtccttgccacgaa

SEQ ID NO: 170421 - DNA, 201 bp, Homo sapiens
aagttgcctgaggtcacgtggctggtagggggcggagccagctttatcctcatggcacagatgaggaaactgaggcagagaggtgttttgccagggggctratttactgagctagccagccgttctggttttgtctctgtctcgctcagagggtcccccaccccacccacctgcctacccagcttgccgtgtcctcggcca

SEQ ID NO: 170422 - DNA, 201 bp, Homo sapiens
tcatggcacagatgaggaaactgaggcagagaggtgttttgccagggggctgatttactgagctagccagccgttctggttttgtctctgtctcgctcagmgggtcccccaccccacccacctgcctacccagcttgccgtgtcctcggccagggccagcagtctcagaggtagagctgctgagagaagcctgtcatctgt

SEQ ID NO: 170423 - DNA, 201 bp, Homo sapiens
ggcacagatgaggaaactgaggcagagaggtgttttgccagggggctgatttactgagctagccagccgttctggttttgtctctgtctcgctcagagggycccccaccccacccacctgcctacccagcttgccgtgtcctcggccagggccagcagtctcagaggtagagctgctgagagaagcctgtcatctgtcctc

SEQ ID NO: 170424 - DNA, 201 bp, Homo sapiens
gaagcctgtcatctgtcctccaagagggatctgagtaagccggagagcatcagcagcctcaaggggaccttggacccctgcccacctttcattctgtaccrgggcagggtgtgtctgcacagcctggagccaggtgtggctggcagccccaggaagacagggccaaccctgcccagcccagagcagccgcatctctgcagc

SEQ ID NO: 170425 - DNA, 201 bp, Homo sapiens
caatctccattgctttccaaaaggggagcgactgaagatctgaaaattagacagtggctagcactgcccagaggccccgttattaaaaacatttcaaggcygggtgccggtggcttacgcctgtaatcccagcactttgggaggctgagactggcggatcacgaggtcaggagttcaagaccagcctagccaacatagcga

SEQ ID NO: 170426 - DNA, 201 bp, Homo sapiens
cctctctgaggaaactgaggcattgagcttgtatttctctgcactggttcccatttcagtagtaatagggaccctccagcacaccaggtgatgtctgcaaygtggccccagaggcaggagcaggctgggagttaggaggctgaagcctgatgtgggggagcgctgccccccaaccccactccctgggaaccaaccctccac

SEQ ID NO: 170427 - DNA, 201 bp, Homo sapiens
tgtactaaagacaccatcctaggccctggggatgtgcagcagtgaacaggtggagccgatgctgcagtcatgggggaccagcaggcgacagcgtgcactcrggaaggctagagcatctgagacacgcagtgaggtggggagccctgggctgggtacctggcctcgcagatcccatggcgagggagctgggattggaggatg

SEQ ID NO: 170428 - DNA, 201 bp, Homo sapiens
gtccccaggccagagaggtgagggacccagagaggcccaggatgaggactccttcagtcctgggtttttgtttggattttttttttctgccaagtgacttyaaagccgcccgagaaggtcctgtatgtgtgagcaggttgggcaaggggagggcgggtctccaagctgggagcctcctcgcggccctcgcctcggcactga

SEQ ID NO: 170429 - DNA, 201 bp, Homo sapiens
tagtgcctactttctttattttcagtaatttaaaataaggaagaggcaacctggggctggtccctggtggtcagaatgggtctctggtgacggctcaaagsggggtgtggtccggggcgcagaaggacagaacccaatgggagcggacttaccccagcatttcacatccgatttttcagggatagatttcgtctctaaaac

SEQ ID NO: 170430 - DNA, 201 bp, Homo sapiens
ttttcccatcctccccctggcgggcatttgtccagtgtttgacttttgctattgcaactaaagctgtgtggagcagtgtgcctttggtgaacgtgcctttrgtgaacgtgaggatgcatttctgctgtgtacatacttaggagtgggactgcagggttgcaagtggatatcaacacgcagttttccaatgtggcccgtacc

SEQ ID NO: 170431 - DNA, 201 bp, Homo sapiens
ctcacagtcacaggggagcccacactgccctcccctcccagggactgcccctgtggcccccgtccaggtccacagcctcagcagtccctgagggccaggargtagcctccaggccactgggctgagaacccttaaaagaaaaagcccccctgcccatgacagtcattttagggtcaagaaagccctttgcagaaaccaaac

SEQ ID NO: 170432 - DNA, 201 bp, Homo sapiens; identical to SEQ ID NO: 30675

SEQ ID NO: 170433 - DNA, 201 bp, Homo sapiens
acctcttagaggcaacctggccctttctaggattcagtaataaggcaaagaataacataccttaaaggttacttctagaaatatctaattctcacggtttmagcttctgaatcagtggatggttttatagcttcatatgagcacccaagtgatgtgaaggttttggcagttctccatcatcataagaagttctgtgggatg

SEQ ID NO: 170434 - DNA, 201 bp, Homo sapiens
acggctcaaaggggggtgtggtccggggcgcagaaggacagaacccaatgggagcggacttaccccagcatttcacatccgatttttcagggatagatttmgtctctaaaactagcacttgatattataagagcatataggctgaatgaacttatattgctatttcagaggaggccagtggcttaagagtcccaaagtgag

SEQ ID NO: 170435 - DNA, 201 bp, Homo sapiens
tgagttttcagtctgcactcagaatagatataactccccaaatccaattttcattttaacctttcctcagtggcctagaaatcacagattgctggtattaygctaatagattggaaattcaaacctcttagaggcaacctggccctttctaggattcagtaataaggcaaagaataacataccttaaaggttacttctaga

SEQ ID NO: 170436 - DNA, 201 bp, Homo sapiens
cagaaggacagaacccaatgggagcggacttaccccagcatttcacatccgatttttcagggatagatttcgtctctaaaactagcacttgatattataaragcatataggctgaatgaacttatattgctatttcagaggaggccagtggcttaagagtcccaaagtgagttctgtgacttactcatgtttcatccacat

SEQ ID NO: 170437 - DNA, 201 bp, Homo sapiens
gtaacaggagaaatacgtcgcatctctagtgtgtggagattaccgggcctttatattaaaaaaaaattttaagtgcttatatttgctctgtctctaaaaartgtttccaggtaacagttggcctcaagatgcctttttgtttttctgaatgaataaggaataaagaaaaattctgggcactataaaatcaagcccagattc

SEQ ID NO: 170438 - DNA, 201 bp, Homo sapiens
cctcagtggggaggttttcttggaatgaagcagaaggaacaatattactggtgcctcctgaatatttaaaaagaagagacattagcaattccagacacttmtccattggtccactgcaccttcttccttcctctgcacttgatatttttagttttacaaactgctaggcagaggcaagcatggttttttcctttccagggc

SEQ ID NO: 170439 - DNA, 201 bp, Homo sapiens
cagcccacctcaccgccgaaagaagacccctcatgggggtctggtgaatctgggtttgtcgttttcggatgctggggcagtgcgtctgggagggagcgggsctgtggattcctggtgggtcaccgtggctgcttgaggctttggtccctgccgctgccatccaccctgagcatctgtggccctggagagcgaaagacttgt

SEQ ID NO: 170440 - DNA, 201 bp, Homo sapiens
gacattagcaattccagacacttctccattggtccactgcaccttcttccttcctctgcacttgatatttttagttttacaaactgctaggcagaggcaarcatggttttttcctttccagggcaaggtgggggctctcaagaagtggcgggtgctccctggaaagcctagatgtcgacttcatagccctggtgccagtta

SEQ ID NO: 170441 - DNA, 201 bp, Homo sapiens
gtgatcttggcttcctgtgacttccgcttccctggttcaagcgattcttctgcctcagccccccaagtagctggggttacaggtgtgtgccaccacgcccrcctaatttttgtatttttagtagagatggggtttcaccatgttggccaggctcgtcttaaactcctgacctcaggtgatccacccaccttggcctcccaa

SEQ ID NO: 170442 - DNA, 201 bp, Homo sapiens
aaataatgtgttttatatatagagagaaaggctaatgctttaagtttaaaaatcagtatttaaaagtttataagtaggctgggcatggtggctcacacctrtaatcccagcactttaggagtccaaggagggcggatcacctgaggtcagaagttccagaccagcctggccaacatggcaaaaccccatctctactacaaa

SEQ ID NO: 170443 - DNA, 201 bp, Homo sapiens
ggtgggtcaccgtggctgcttgaggctttggtccctgccgctgccatccaccctgagcatctgtggccctggagagcgaaagacttgtttcctctggtggytccgagcatatgtggcaaagctgtgtcttatttacctcccacatcatcatcctctcctaccctcatatgacatttctgcctgtccccttgacagtggagt

SEQ ID NO: 170444 - DNA, 201 bp, Homo sapiens
tgggaggcaggggttgcagtgagccaagatggtaccactgtactctaggctggacaagagagtaagaccttgtctcaaaaaaaacaacaaacccccccccmaccccgcggtttctcaacctcgacacttggtgtttttggactgggtcattttgtggtgaggggatgtcctatgcattgtagggtgctaaacagcatccca

SEQ ID NO: 170445 - DNA, 201 bp, Homo sapiens
tccaggtctctgtgggagcctgggttcctttggggcctggattcagggctcatcctagagtgagctgtcatctcagggcatctccctgggggatatgtgcmccccggagctgcagttacagacactgagctcactccaccttcaccacccagccctgctgcttcccgccctaatcctcctggcagagcccctggataagga

SEQ ID NO: 170446 - DNA, 201 bp, Homo sapiens
cgtgtgtagaaacacatactctgtacgttgctgggatcatagcagaatatcagctccaccaatcctggttcctcaatggcgacacccacgcactcagggcrtgtatcagtgtgcatggagttgcctcgcgttcaactgcgtggtgtgggtaacgcagttgtgccattgtgtgtctcacaattcccagactggtaaataatg

SEQ ID NO: 170447 - DNA, 201 bp, Homo sapiens
acccattgcaatttaggtcgctgctatggagcaagccacagaacctggcctcttaactcatttacccgggctgacccattaggcctttgagtcaccaacamctcactagagaacaagcataatgaagaagctctgctgtaattcgttaatgttaacacttttttctttaaagatgtctcatgctgagcttcgtggcacacg

SEQ ID NO: 170448 - DNA, 201 bp, Homo sapiens
gctatccatccagccagggacctcatctagggattgggggcagcaaggggctggtaagggccagaggtaattccagggccactctgtgccctaccctcagrtggggcacaagggtgggggcactgcgctgggtagaagccccccgccagcccctggcccaccagtcatctgtcagatacggaggcaggggtgaggggaggg

SEQ ID NO: 170449 - DNA, 201 bp, Homo sapiens
ttttacacaaaatatccagatttctggattcttttgaagaatcagaagatctgacaatacggagcctcacattcctgcacacacagcagccatcgctggarccactgcctccattagtttgaatttactgcagaccccactcctccctgtcgtccctgtctccagaccacagagttagttgtcattgatcgtgtgccattt

SEQ ID NO: 170450 - DNA, 201 bp, Homo sapiens
ctcctgcaccagcttccctggacccactgccactgcgtcacgtggtcggatctgtgtcccctgcactctcaccacctccaacttgcatcccggtcccccamaccctgacccccaaaggcattgtgcatgtggatgagtgagtgaaggaaaggctggcgtgttgggtgtgcgaggtcgcaggggcatgaggtgcctggacgg

SEQ ID NO: 170451 - DNA, 201 bp, Homo sapiens
tcacaggcagagagcctggctcgaggatgggcgggagctcagtctggctttgatctgcgggaggtgttgtgtgcagaagctgtgggcaccgggggctgcaragcttcagacctggagcctgctcccagggccgatctgaacccggcacctgtgctgacccaagggtcaaccaaagtcctgagtttggtggcgccgagggag

SEQ ID NO: 170452 - DNA, 201 bp, Homo sapiens
aatgttaaataaaatgaagtcgtgtctgtgaagcacctggcatggtaatcggtggccgtgaggatgacgctggcctcgcagggactgggtggcacaggtgycctgaccttggcatgcagggtggatgggccaggcttccagccagtgctggatctcagaggcccaggggttagagaactaagggcctccgagccaggctcc

SEQ ID NO: 170453 - DNA, 201 bp, Homo sapiens
cggtgatgtgctgactgggaacggcagaggtgccctgggaaggcggaggtctgggagccccacaagggctgagccttggggcctcaaaacagggagtcttytctgggctcagggcctttctggagatgggacttctaggttgccagggccactagccgtgaggagttcagctgcccatggtggcggcggctgggctgtatc

SEQ ID NO: 170454 - DNA, 201 bp, Homo sapiens
ctctgtggattcgcccgctctgggcatttcatgtaaatggaatcagacgatacatggtcttttgtgtctgactccattcactttgcttaatgtcttgaccrttcatctgtgttacggtgtgtatcagagtttcacttctttttgtggctgagtaatattccactatgtggataggccacattttgttgatctgttatcagc

SEQ ID NO: 170455 - DNA, 201 bp, Homo sapiens
ggtggcctggctgggcgtggccttgaggttctattgataaccccatggggaaagcccccctgaggtgcttgggcatcggacctgcccaccatctcctgagrtggggcctgctctccagacagtcaggtcagcatgagttcccatgaggccagggccagcacgaggacctgctgggagcggtccatccacccatccgtccgt

SEQ ID NO: 170456 - DNA, 201 bp, Homo sapiens
gcttgggcatcggacctgcccaccatctcctgaggtggggcctgctctccagacagtcaggtcagcatgagttcccatgaggccagggccagcacgaggamctgctgggagcggtccatccacccatccgtccgtccatccatccatccatccatccatccctatccacctgtccaccctgatgcagttcctgccatccac

SEQ ID NO: 170457 - DNA, 201 bp, Homo sapiens
gctggtttggcgcagccccggcttctgtgagcttttgtttctgttactggcacctgcagctcttcctaggcccctgccctggggcactggtgcctgcttcrccaaaggcacagagggctgcaggcgactggggcagggtggggggcttgcctcttagggctcagcttcactggccagaaacagggctggctcgagctgggt

SEQ ID NO: 170458 - DNA, 201 bp, Homo sapiens
ctgtgagcttttgtttctgttactggcacctgcagctcttcctaggcccctgccctggggcactggtgcctgcttcgccaaaggcacagagggctgcaggygactggggcagggtggggggcttgcctcttagggctcagcttcactggccagaaacagggctggctcgagctgggtgttggcctgggtggggtggccagc

SEQ ID NO: 170459 - DNA, 201 bp, Homo sapiens
gagactgaggaaaatctgatggctgcttgaaagctttcccgtggctctgctggcaggagtaaggtctgcttctcagtttctgatctcagccttggtgggcrggggtcaccctgtgaaaatcaagggcagccagggtgggtctggcacaggattattggtttaccctgcaggtgctgcctctggttggaagcccttggccaa

SEQ ID NO: 170460 - DNA, 201 bp, Homo sapiens
agtgtggcacaagttacaaagctcatgaatggagtcctgcccctacccccagtgccccacaacgtgcaagaagccatattggcaaagcagtgccacacctscccactgtggtgtgcagggtgatttcccaggcccccggcaacaggcacgttgctgtccagcttgtagaggaggaacttaaggttcacagaagtgatagga

SEQ ID NO: 170461 - DNA, 201 bp, Homo sapiens
gggctggctgccatgtcaagctcgtttctgttgtacccaaaacacagtctcacctccagaagaattacctggcactccctggagttcccgcagccttctcrttttcaaataatttttcagatttccagaatagaaagaaattccatacacccttctcccagagacagaccccattcaagctttgccaatcattccatgaac

SEQ ID NO: 170462 - DNA, 201 bp, Homo sapiens
cagggcaggcaccacctcttacctgttgcaaagcttaatcctgtcacagaaagtgccaggtgtcagctctagtgtgagagcgtgggtttccaatcccagcwctgccccatagttgccatgtggcctcaaggaagtcccttagcgttccgtcaccccattatggctgcagctcaagggccccagtttcctatgtgtaattcc

SEQ ID NO: 170463 - DNA, 201 bp, Homo sapiens
attgtccaactgggaaaaagaaaaagcagtacttttttaggccatgtaaatgcaaaatatacatttgaagtctgcgtttaagacatgaacttagagatttytaagcctgtttttgggggtcactctaaaagggagggcattttcaggtcccccctctgtgagcattcacagcatcccagccagcctgtatccctgtgccgt

SEQ ID NO: 170464 - DNA, 201 bp, Homo sapiens
tgggcggtgtttgctggaagaatttttgttccgcttcgggcaacaaggaacccaaacctctcactgttgtggggagaaaagttggaaatcagatgggaackggctgcggtaccagagaggacgtcagacccgggccgcggcctcagcccccgactccttgtaagcgtgggctgggtgcacacgtggcggctgcgagcagtg

SEQ ID NO: 170465 - DNA, 201 bp, Homo sapiens
ttccgcttcgggcaacaaggaacccaaacctctcactgttgtggggagaaaagttggaaatcagatgggaactggctgcggtaccagagaggacgtcagamccgggccgcggcctcagcccccgactccttgtaagcgtgggctgggtgcacacgtggcggctgcgagcagtgctttggagctcatctccccagaccctag

SEQ ID NO: 170466 - DNA, 201 bp, Homo sapiens
ttcttggttcagaacaatgacaactctgggacaagcatgccgctgggagaaagagaccaggagctgcacagccagacagatgcttttgcagtgggatggcrgtggggggttggaatggttcatcatttactttttatatttaacacttttttttttaagagatggaatgctctgtcacccaggctggagtgcagtggtatg

SEQ ID NO: 170467 - DNA, 201 bp, Homo sapiens
caggtcagcatgagttcccatgaggccagggccagcacgaggacctgctgggagcggtccatccacccatccgtccgtccatccatccatccatccatccatccctatccacctgtccaccctgatgcagttcctgccatccacgtgtccatctgtctacccgtacacctgttcatccccatccatccatccccctgtcca

SEQ ID NO: 170468 - DNA, 201 bp, Homo sapiens
tgggtcaggcctgtgggggggaccactgagggcaggaaacctggcctgtccctccaggaagcgaagtcaacactggcacctgcagatgaagtggcagagcrgcccccagctttgatggcatggggtggttggggggcacattctgcatgctcagaagagagagcaactcgccctgtggaaggagcatacagtgggagatgg

SEQ ID NO: 170469 - DNA, 201 bp, Homo sapiens
agctctctgcaagccttgctggggtcctggagccgcacctgactagggctttcctgatattttggaattcttgtacttcatgcctcccaaggcttagtctktgacatctggtggcaggccccacggagggatgacaagggtttgcttccttagctgtcctagtcggcctgggctgccataacaagtgccattgactgggga

SEQ ID NO: 170470 - DNA, 201 bp, Homo sapiens
tgactagggctttcctgatattttggaattcttgtacttcatgcctcccaaggcttagtctgtgacatctggtggcaggccccacggagggatgacaaggktttgcttccttagctgtcctagtcggcctgggctgccataacaagtgccattgactggggacttcaacagcagacgtttattttttcacagttctggagg

SEQ ID NO: 170471 - DNA, 201 bp, Homo sapiens
acttcaacagcagacgtttattttttcacagttctggaggctggaaggctgatatcagggggtcggcatggccagtttctggtgaggccccttttctgggyttgtaagcaggtgccggcttgctgtgtgctcacatggcctctttgtgcattcatgagggtgctctctggtgtctcttcctcctaggacactgatcctgtc

SEQ ID NO: 170472 - DNA, 201 bp, Homo sapiens
tctggtgacggctcaaaggggggtgtggtccggggcgcagaaggacagaacccaatgggagcggacttaccccagcatttcacatccgatttttcagggayagatttcgtctctaaaactagcacttgatattataagagcatataggctgaatgaacttatattgctatttcagaggaggccagtggcttaagagtccca

SEQ ID NO: 170473 - DNA, 201 bp, Homo sapiens
gggcaattaaccactaagtgtaattgataattcataaacctctgattaggaaagacaaataataagaaaggaatgaatcacccatcctattgaagaagacrttgccagcctctggtctgcattcactatgtggtcagcagatctacagatttcttcctaaattgcacctgtcagctccagggctgggggtctggaggctca

SEQ ID NO: 170474 - DNA, 201 bp, Homo sapiens
aaataaacgttaaagtttctcattttgatttctggaagttcgtgttctccttggactctaaagattagcatgcaaagacaaggttttgattgtgtattttmagttgcacgttcagtttttttaaaatcccatccaggactaaatttaaacataagaaaatccaggtttctttcgctttcgaagaggctgcagggaacttga

SEQ ID NO: 170475 - DNA, 201 bp, Homo sapiens
aaaataaaaatgcaggcgtagaaccaccatgaatttaaccccgtgtggtgtttctgacactggtatacttgttgcggtatctagcctcaaaaaatggccaygcctaatcaaccatgctgcttagtgctcatgcccctgtgtcatccactcccacactgagcctggcctggccctgggtgaccagtacaacatggctgaagt

SEQ ID NO: 170476 - DNA, 201 bp, Homo sapiens
ggccgcgccccagttccgggtttgcacccggtcttcttgccctgccccgctcgcgggactacagttcccaggcgcccctgcgcggccgcggcgccggcgcmggcgtcggttgggacgcggagctgaggagcagggccgggcgccatggcaccgtggggcaagcggctggctggcgtgcgcggggtgctgcttgacatctcg

SEQ ID NO: 170477 - DNA, 201 bp, Homo sapiens
cttgtgagatccctccgcggtggcgtggagaggtgtggctacttcccgcttcgtggcaagtcgtgttctgccatttctccgaataccgatggaggcttacmgtgctggaccatggaatggggtctggaatgttctcatacaggtcctgtggtgcaatgggcgtgtgctggcactgggattctgtgtctaatgctcttcatc

SEQ ID NO: 170478 - DNA, 201 bp, Homo sapiens
gctatagaagtgagagcaggtgcctggggacacttggaggcccccctaggtttgtctgtaatgagcttgtgctggcgactggcatgttctgtcccccccayggctcccagcgtgctcccagcgccctcccacagctttaggcaattaagacacgggcttggagtggccattgcaggacctgctggtaatgggggtgagggg

SEQ ID NO: 170479 - DNA, 201 bp, Homo sapiens
  misc_feature (1)...(201): n = A,T,C or G
ggtttcctgcctgcgatagtgacctcagggagctcctggggctgatgtggtattgggatggagggtcctgggtgtgtccacctttctcctcataagccctntctgaggagccgaattccctcctctgtcaaataggaataacccttctgtgtctacctcccatggcagctgtgatgatcagaaagaaatgcatctgagaaa

SEQ ID NO: 170480 - DNA, 201 bp, Homo sapiens
attctgctttttcttcaggacatatgtgtggggttgcctgaaatgtgtcaacggttcttacagtttgggaccagtagtgccaaccctccaaggcttgtgcrgccccatttcctcctgctgcaggctctcagtgtcttctgagcagatttcccttctcagtagcaaagctgtgggtttcctgcctgcgatagtgacctcagg

SEQ ID NO: 170481 - DNA, 201 bp, Homo sapiens
gagcctcccaccccaggcccacccacctgctgggtcctcccacctgcggggcccgccatgcggggtcaccatgcgagtctcaccatgcagggtcaccacacgagtctcaccatgcagggtcaccacgcgagtctcaccatgcagggtcaccatgcggggtcaccatgcagggtcaccatgtggggtcaccatgcggggctc

SEQ ID NO: 170482 - DNA, 201 bp, Homo sapiens
gccctccccgctcccctctcagttcctcagcctggctatgggaggcccaagtcccacgtgtcactggaattcgggaggcctggctctcaaagctttctgtrcaaaacaaggagaaaaagagaagccacttttgctgtctggacatgctgtgggtgtcctggggaatgtgctggcccactgcttggggcctgacttggagtg

SEQ ID NO: 170483 - DNA, 201 bp, Homo sapiens
gagggccaccatcagagtctcctgcagccctggattccctgggcctgaagcaggcagagcggccaaggtagcctcatcagcctcaccagcccgtccttcttgtctccctggcaccttgtcagagagaggcctaagaacacgctctgggcattgggggcctcccagtgttccctgcgagtttggagaggccaggtccctggg

SEQ ID NO: 170484 - DNA, 201 bp, Homo sapiens
gcttggggcctgacttggagtgcccaggagctgcgtctgcactgtggcttgaaccgagtgtcgtgctctgtggacagagccatccactctgggggtgctcrtcccatggcactgtcagcccccattctggaaggtcccaactgggtcccccaggcctgtgtcccagagaccttccaggtcttcattcactgatcatgcatt

SEQ ID NO: 170485 - DNA, 201 bp, Homo sapiens
cgagggccaccatcagagtctcctgcagccctggattccctgggcctgaagcaggcagagcggccaaggtagcctcatcagcctcaccagcccgtccttcttgtctccctggcaccttgtcagagagaggcctaagaacacgctctgggcattgggggcctcccagtgttccctgcgagtttggagaggccaggtccctgg

SEQ ID NO: 170486 - DNA, 201 bp, Homo sapiens
agagggggcagctggtgggtaagcagaggccagctccaaggcccccctgtgggccacattagggagacagggtctggccttgttggtagcgcggcccctcscagtgatgggtcccctgtcagacctccaggatcctgggttgctggtttggcgcagccccggcttctgtgagcttttgtttctgttactggcacctgcagc

SEQ ID NO: 170487 - DNA, 201 bp, Homo sapiens
ccgagggccaccatcagagtctcctgcagccctggattccctgggcctgaagcaggcagagcggccaaggtagcctcatcagcctcaccagcccgtccttcttgtctccctggcaccttgtcagagagaggcctaagaacacgctctgggcattgggggcctcccagtgttccctgcgagtttggagaggccaggtccctg

SEQ ID NO: 170488 - DNA, 201 bp, Homo sapiens
gtgcgcacgccaggccccacaggttctcaggcccaggccacacatccacaggtgcccactctcatgctggcctcatagtgcatgcacacacacacacacamatatacatacactcacgcccagacccccccacgccccaggccacacatgtgggcctgctcacaccccactcattccctcccagatgccgcgccaccccca

SEQ ID NO: 170489 - DNA, 201 bp, Homo sapiens
tcgtgctggatggagctggactctagggaggaccaggagggtgagctcaggccagggcgccaaggccctgagccccaggggcctgcctgtctgcccatcaytcctccactcatggggagggactgccccccagcccagatttctaggagggccgaggctcacaggaagccaatgccaggcgataacccacagtccccagtg

SEQ ID NO: 170490 - DNA, 201 bp, Homo sapiens
tgcagagatggcctcatttcatcccacactcacatgcgggtcctagacaccagctcatgcacatacacacacacacacacgcacacacacacacacacacmtgcgcacatgcacccacgcactctctttgcctgtgggagggcaggatcccagctgccccagcggggaaggggtgtggggaatcagccctgcagatgcggt

SEQ ID NO: 170491 - DNA, 201 bp, Homo sapiens
catcccctctccctggagccatgcagagatggcctcatttcatcccacactcacatgcgggtcctagacaccagctcatgcacatacacacacacacacacgcacacacacacacacacacatgcgcacatgcacccacgcactctctttgcctgtgggagggcaggatcccagctgccccagcggggaaggggtgtgggg

SEQ ID NO: 170492 - DNA, 201 bp, Homo sapiens
gccatgaggccactaacggaatgtccctgatctcagggatctcagtgtggaggtggcagcacacaggtaaccaaacaattgtggcagattgatgggtgctktgatggggtccacacagttaccgtggagtgcagagtgggcacctaactgaggaggcaagggttggagggaggaaggtttcagggaagacttcctggagga

SEQ ID NO: 170493 - DNA, 201 bp, Homo sapiens
gcatcccctctccctggagccatgcagagatggcctcatttcatcccacactcacatgcgggtcctagacaccagctcatgcacatacacacacacacacacgcacacacacacacacacacatgcgcacatgcacccacgcactctctttgcctgtgggagggcaggatcccagctgccccagcggggaaggggtgtggg

SEQ ID NO: 170494 - DNA, 201 bp, Homo sapiens
tgccgcgtcacacgctgcagcgcagtgctgcccatggtttgtcggcccatattgtgggatctttcagattttctcaagaagccaggtttccagctcctagktttgaaaagttctatgtgcgcttgaccggggggccttacgtacgtgaattgggtgagggcctgagacaggcgggtgagcacttgccccacactccagcca

SEQ ID NO: 170495 - DNA, 201 bp, Homo sapiens
ctgcactctgtcccagcatcccctctccctggagccatgcagagatggcctcatttcatcccacactcacatgcgggtcctagacaccagctcatgcacayacacacacacacacacgcacacacacacacacacacatgcgcacatgcacccacgcactctctttgcctgtgggagggcaggatcccagctgccccagcg

SEQ ID NO: 170496 - DNA, 201 bp, Homo sapiens
tttcactgtgttagccaggatggtctcaatctcctgacctcgtgatctgcccacctcggcctcccaaagtgctgggattacaggtgttgggggattcttarggaaaaccacctgaaagtgcggggttattaaaaacagaaaccaacccatgcacccaccactcacgagcagcccacacagctcccacctgaccagggctcc

SEQ ID NO: 170497 - DNA, 201 bp, Homo sapiens
gtggcccctcgggacagcctacagagcagctgtctcttccaggcattgctgcagggcctgctgtctctgctgtcctgggccaggcgctgagttctgtcgcrgaaagtctgagggcagagctgggagggcagcgtttccaaagcaaatggaaaaggcaaacgggaacgtggcgggcagggtgggcagggcagcctggaaaca

SEQ ID NO: 170498 - DNA, 201 bp, Homo sapiens
cctgctgtctctgctgtcctgggccaggcgctgagttctgtcgcggaaagtctgagggcagagctgggagggcagcgtttccaaagcaaatggaaaaggcwaacgggaacgtggcgggcagggtgggcagggcagcctggaaacaccctttgtcccatgcagctcattcactcggccaggatttgccgagtggcttactgc

SEQ ID NO: 170499 - DNA, 201 bp, Homo sapiens
tgtgttaacctacagggattccctctttgctttggctgccagggaactcaaagctaagttttttcgctcacattcccaggcttctggtgtagatatctccyttcttccttactgtggtttctgagccatctggtgtagatatctcccttcttccttactgtggtttctgagccaccctgcaaacttcctctgcatctgtcc

SEQ ID NO: 170500 - DNA, 201 bp, Homo sapiens
cagcgtttccaaagcaaatggaaaaggcaaacgggaacgtggcgggcagggtgggcagggcagcctggaaacaccctttgtcccatgcagctcattcactyggccaggatttgccgagtggcttactgcactctgtggccctgaaccagggctgggggatctcagggacatgtgtgtccacagagatggtcacctgccacc

SEQ ID NO: 170501 - DNA, 201 bp, Homo sapiens
gtgacagcagcttgcagaggacactgctcccccaacactgccttccaagggagacatgccctaccccaaggcctcccttgtcccctccctcctctgacagycaggtccagggggtcctggagagggcactggcccaccctccacacatgttgcacagtgccctgggaatgaggaaggaagggcaaaggttagggaaaacca

SEQ ID NO: 170502 - DNA, 201 bp, Homo sapiens
ataggtcttcatttctcttgaatatatgcctaaggagtggaattgctgggtcacgtggtatctatttttaatcacttgaggaattgccagactattcaaargcagctgcaccattttatgccattttacattcccaccagtagtgtatgagggctgatttatctatgtccttaccaacgcttcttatctgactgtttaatt

SEQ ID NO: 170503 - DNA, 201 bp, Homo sapiens
tgtgcagaagctgtgggcaccgggggctgcagagcttcagacctggagcctgctcccagggccgatctgaacccggcacctgtgctgacccaagggtcaaycaaagtcctgagtttggtggcgccgagggaggggagtggtcgcatcccaccgggtgcctggaatggtgctggaggaggcagcatctgatttgggccccgt

SEQ ID NO: 170504 - DNA, 201 bp, Homo sapiens
agccacagcaaacaggcagcgtggcgctgaggggcacaggtttgctggggggcgtgagccgggagcatcgccagcagcaggctcgcccccctgcgagggcrcgcacggattcgctcgccaccaagagcagggccccaagaggggccctcggcatagtcccctcgagtccccagaacttcacaggcagagagcctggctcga

SEQ ID NO: 170505 - DNA, 201 bp, Homo sapiens
aacttgggtccccagataaccgtggggaggggagggtttacctgcaggtgccctggcccagccgttcatgcagcgccgtgctgtttctgtgtctgtgcgcytcggtggagatgctgtgggtgggtgggcaggtgtgccttgtgctgtggcctcccgagacaaggagggctcccacctaagcagggtcctgcagcccaggca

SEQ ID NO: 170506 - DNA, 201 bp, Homo sapiens
tgaaaagttctatgtgcgcttgaccggggggccttacgtacgtgaattgggtgagggcctgagacaggcgggtgagcacttgccccacactccagccaggrttgggggttcaagggaccgcatttgccacgtgagggagtctctggagaccaccaacccgctggtgggcggccaagcgtcaccaccagtccctctcagtgc

SEQ ID NO: 170507 - DNA, 201 bp, Homo sapiens
ccacataacacttttgtaagaataagagttattttttatggcacaatcgcccctgccctgggtttgtgaatttgggggattcttttttttttttttttttytttgagacagagtcttgctctgtcgcccaggctggagtgcagtggtgtgatctcggctcactgtaagctccgcctcccgggttcatgccattctcctgcc

SEQ ID NO: 170508 - DNA, 201 bp, Homo sapiens
gcgcttgaccggggggccttacgtacgtgaattgggtgagggcctgagacaggcgggtgagcacttgccccacactccagccagggttgggggttcaaggkaccgcatttgccacgtgagggagtctctggagaccaccaacccgctggtgggcggccaagcgtcaccaccagtccctctcagtgcgtcccacctctgttc

SEQ ID NO: 170509 - DNA, 201 bp, Homo sapiens
cctgtgttgcccagcctcctgggctcaagtgatctccccgccttggcctcccaaagtgctgggattacccggcttgagcatgatctttttgccttgcttggctctgggtttcctcatgtgtcaagtggggctgagccccagctgtgtgggctgaacaggggagggttaagctcggcccctagagtgagggcccgccatggt

SEQ ID NO: 170510 - DNA, 201 bp, Homo sapiens
acgtacgtgaattgggtgagggcctgagacaggcgggtgagcacttgccccacactccagccagggttgggggttcaagggaccgcatttgccacgtgagrgagtctctggagaccaccaacccgctggtgggcggccaagcgtcaccaccagtccctctcagtgcgtcccacctctgttctcagcccctgcggtgcccgc

SEQ ID NO: 170511 - DNA, 201 bp, Homo sapiens
gatggagtctccctgtgttgcccagcctcctgggctcaagtgatctccccgccttggcctcccaaagtgctgggattacccggcttgagcatgatctttttgccttgcttggctctgggtttcctcatgtgtcaagtggggctgagccccagctgtgtgggctgaacaggggagggttaagctcggcccctagagtgaggg

SEQ ID NO: 170512 - DNA, 201 bp, Homo sapiens
ggtcctgttgaccaccaggctgcagatcccaaggaacgcaggcatctgggtggccccacgtggagcaccagccatggggaggccgtgggctaccaggcccygcgtgcactcgcagcatgcaccactccttctccaggtcccgttgacctccatgtgtgctgtgccccgtcctccgctgcactgcctcttcgtagtgcccca

SEQ ID NO: 170513 - DNA, 201 bp, Homo sapiens
agatggagtctccctgtgttgcccagcctcctgggctcaagtgatctccccgccttggcctcccaaagtgctgggattacccggcttgagcatgatctttttgccttgcttggctctgggtttcctcatgtgtcaagtggggctgagccccagctgtgtgggctgaacaggggagggttaagctcggcccctagagtgagg

SEQ ID NO: 170514 - DNA, 201 bp, Homo sapiens
gcctggaactcctgggcacaagtgattctcccgcctcagcctcccaaatagctgggaaacaggtttatgccaccacgcccaactaatttttaaattttttrtaaagatggagtctccctgtgttgcccagcctcctgggctcaagtgatctccccgccttggcctcccaaagtgctgggattacccggcttgagcatgatc

SEQ ID NO: 170515 - DNA, 201 bp, Homo sapiens
ccttggggccacattttgcagcagtcacagggcctggcctcactccagggctccatgtttggatgcgaggcccagtgggtaagtgcactgctgcccacgcmccccccccagcactgtctgctcctccctgcttgcctgcctgtcaaggcagccctcatcttccttggaggatggggctgggctgggagcctgcgccctccc

SEQ ID NO: 170516 - DNA, 201 bp, Homo sapiens
ggtgacttgtagctcgcccacagtgagacgtgcaggaagtgtaaaatacacactggatttcagagactgggtggggagaaaggattgtgaaagagctcatkagtatttttttatatcggctgcatgttgaaatgctgatatttcgtgttaatttcacccatttatttaaatttttgttaacgtggctactagaaaaggttc

SEQ ID NO: 170517 - DNA, 201 bp, Homo sapiens
cgcagtctcggctcactgcaagctccgcctcccgggttcacgccattctcctgcctcagcctcccaagtagctgggactacaggcgcccaccaccacgccyggctaattttttggtatttttagtagagacggcgtttcaccatgttagccaggatggtctcgatctcctgaccccgtgatctgcccacctcggcctccca

SEQ ID NO: 170518 - DNA, 201 bp, Homo sapiens
caactccatctaggtttgctgttaatgccattatttcgttcctttttatggctaagtagtattccatggtgtatatgtaccacattttttttctttgtttstttctttttttttctttgagatagagtcttgctctgtcacccaggctggagtgcagtggcgcagtctcggctcactgcaagctccgcctcccgggttcac

SEQ ID NO: 170519 - DNA, 201 bp, Homo sapiens
ttgggcatgcttcatagtcatcgtttcattttgtcttgattttggtttgtgtatttatcggttagcccctcttagcatctgaattccagtgagaagacatrtagtttgtttgtttgtttgtttgtttgtttgttttaagacagagttttgctcttctcgcccaggctggagtgcaatggttgcaatcttggctcattctcc

SEQ ID NO: 170520 - DNA, 201 bp, Homo sapiens
tttggttggggcagcatcagcttcctcctctgctgggtttcctgccttctgttggctgctggggcaggggagacaggattgggaacagtcaccctctctgrtactgaccctcattagcattcttggttcctgagcaaggctgcttcatgtccagggcaagaggggaaagatgttaaaacctgaacccccctgctgggcttg

SEQ ID NO: 170521 - DNA, 201 bp, Homo sapiens
gcttgaagttgtgccatagctcactgatgctctgttcatttttgaaaataatttttctgcctctgtttcattttgggcagtttctattgccatgtctccargttcattcatcttttcctctgcggtatctcttctggcattaatcccacccagtgtattttgatccctgacattgtagttttcatctctagaagcttggtt

SEQ ID NO: 170522 - DNA, 201 bp, Homo sapiens
agtttgcaaatggcgtaggaacaaggtttgcatcctgattttagtctgaatgcaagaacagacagcccctttgaccctcagtggggaggttttcttggaaygaagcagaaggaacaatattactggtgcctcctgaatatttaaaaagaagagacattagcaattccagacacttctccattggtccactgcaccttcttc

SEQ ID NO: 170523 - DNA, 201 bp, Homo sapiens
accagggctgggggatctcagggacatgtgtgtccacagagatggtcacctgccacctccaccatcacagatgccatgaaggctgtgaagggaaacagacytgtaaggcagcggagccgagatggggttgatgagtgtcaccagtcacaagcaaggtgtctctgttctctcttctacatgttgatcgaggtataacaccca

SEQ ID NO: 170524 - DNA, 201 bp, Homo sapiens
gcccaggggacagatgccgatctgttgctgctcctacctgcaggtggtcccccagcccaagctggtgtgcttcatggtgcagggcacggggtgggctcatscgcacatcagtgtgggcgtccccggggcatatgtgaataactgtatttttctattgaaaaaacaactctgctctgcttacggggctcctgcttgaccttc

SEQ ID NO: 170525 - DNA, 201 bp, Homo sapiens
tgcacacacgtacacccgtgtaacccccacacagatcaagatgtagaacattccagcacccagaagtttccccgtgccccttcccagtcagaccccccgaycccaggtcacccctgccctgacttgcagtgtagagctcacccggccacttcctcttttgcccacagcaggtgaggagggccttctactgggaaaaactgt

SEQ ID NO: 170526 - DNA, 201 bp, Homo sapiens
cctgggaggcggagcttgcagtgagccgagatcgcgccactgcactccagcctgggtgacagagcgggactccgtctcaaaaaaaaaaaaaaaaaaaaaaagtttaggtaatgtattatgtcctggccctgtgctgggtgcttcactaagatgatttcctttaaacgccacacctgttatacccattttacagatggaggt

SEQ ID NO: 170527 - DNA, 201 bp, Homo sapiens
gtagcacccgacccaggacacctgcctctgggactgtggcgcctccatccggctctctggatcctgggttctggggggtccgacctttcatttttttctccgcctcacaccccaccatgtcgtgtctgaaaggaagcgaagcccagccctggcaggtggagtatttttatttcccctgacagcgcacctcctgacctctat

SEQ ID NO: 170528 - DNA, 201 bp, Homo sapiens
aggacacctgttttcctcgcctggtgattgagccgggaagccttcatggagcaggccctacttgcccaggtgaagtctgtgtggcctgcagccacgggggygagtggccctgcgcctttcatgctgtggcctccttgatatgtacagcctgctttgaagtcctgcaggagctcaaaggaagttcctggggtgagaccagcc

SEQ ID NO: 170529 - DNA, 201 bp, Homo sapiens
ctttgtctttgtgatgtgtcctagtcataaggtgctctgagacctcatggcttagttttccttcagagttttttctcccttggaggcttttttttttttttaagtagattttattttcttctcaaaacacaagtatttaaaatatctgattatgaagcaactcatgctcattaaaggagctaagaaaaattcaggaaagta

SEQ ID NO: 170530 - DNA, 201 bp, Homo sapiens
accatgggggcagccccagcccttccctgcctgttacaggcccctgcccctgttcctgtgtcccatgcctgtcccctccctccatgtgtctgtctctactygcctgccctctctctgccctcttttctctgcttcatcctctttttctgtttctgcctgtctcatggttcttcctgtccctgccctccctccctccgtgtg

SEQ ID NO: 170531 - DNA, 201 bp, Homo sapiens
gccgaggtgggcaggtcattagagcccaaaagtttgagaccagcctgggcaacacggaaaaaccccgtctctacagaaaaaatgcaaaaaaaaaaaaaaaaggcagatgtggttgcatgtgcctatggttccagctacttggggggctgaggtgggcagattgcttgggcccaggaggttgaggttgcagcaagctgagat

SEQ ID NO: 170532 - DNA, 201 bp, Homo sapiens
agaaccatgggggcagccccagcccttccctgcctgttacaggcccctgcccctgttcctgtgtcccatgcctgtcccctccctccatgtgtctgtctctrctcgcctgccctctctctgccctcttttctctgcttcatcctctttttctgtttctgcctgtctcatggttcttcctgtccctgccctccctccctccgt

SEQ ID NO: 170533 - DNA, 201 bp, Homo sapiens
tgggcatggtggctcacacctgtaatcccagcactttaggagtccaaggagggcggatcacctgaggtcagaagttccagaccagcctggccaacatggcraaaccccatctctactacaaatacaaaaattagccgggcctggcagcaggtgcctgtaatcccagctactcaggaggctgaggtgggagaatcacttgaa

SEQ ID NO: 170534 - DNA, 201 bp, Homo sapiens
ctgctcccacctcccagccaggccccgagggccaggcactctggcttagtgaagaagccacccagcaaaggcctggtgtctccacaccattctcgggggggacagcagcaaggacgatggacgggagcagtgctcggccttaacgtccctgtttccggaagcgtccctgccccgctcagtcctgccccactccctctccca

SEQ ID NO: 170535 - DNA, 201 bp, Homo sapiens
gccatgtttataaatattaaagctataaatattttataaatattatagctttttttatttaaaaaataagcaactatgtatatatttgtattcccctcatrggatgaatttaagagacaaattctcaaaataatgtgttttatatatagagagaaaggctaatgctttaagtttaaaaatcagtatttaaaagtttataag

SEQ ID NO: 170536 - DNA, 201 bp, Homo sapiens
gtcagcatgagttcccatgaggccagggccagcacgaggacctgctgggagcggtccatccacccatccgtccgtccatccatccatccatccatccatccctatccacctgtccaccctgatgcagttcctgccatccacgtgtccatctgtctacccgtacacctgttcatccccatccatccatccccctgtccatcc

SEQ ID NO: 170537 - DNA, 201 bp, Homo sapiens
tgagtagctgggattacaggcatgtgccaccacgcccatctaattttgtgtttttagtagagacggggtttctccatgttggtcaggctggtctcaaactytcaatctcaggtgatccgcccgcctcggcctcccaaagtgctgggattacaggcatgagccaccacatccggccttcattggtgtattttatgtgtggcc

SEQ ID NO: 170538 - DNA, 201 bp, Homo sapiens
ggtcagcatgagttcccatgaggccagggccagcacgaggacctgctgggagcggtccatccacccatccgtccgtccatccatccatccatccatccatccctatccacctgtccaccctgatgcagttcctgccatccacgtgtccatctgtctacccgtacacctgttcatccccatccatccatccccctgtccatc

SEQ ID NO: 170539 - DNA, 201 bp, Homo sapiens
ttctctattgctgctgggaaggtgaaatgacaatgctgccacggaaagccacttggtggttcctcaaagttaaacatagaatttgccgtatgactcagcawcccatttccaggtctatacccagaagaactgaaacacgtgttcaaacaaaaacttgtacacagatattcatagcagctccatacacaatagccaaaaggt

SEQ ID NO: 170540 - DNA, 201 bp, Homo sapiens
aggtcagcatgagttcccatgaggccagggccagcacgaggacctgctgggagcggtccatccacccatccgtccgtccatccatccatccatccatccatccctatccacctgtccaccctgatgcagttcctgccatccacgtgtccatctgtctacccgtacacctgttcatccccatccatccatccccctgtccat

SEQ ID NO: 170541 - DNA, 201 bp, Homo sapiens
gctggagtgcagcggcgtgatctcggctcgctgcaacctctccctcccgggttcaagcgattctcctgcctcagcctcctgagtagctgggactacaggcrcccgccaccatcccagctaatttttatatttttggtagaggcggggtttcaccatgttggccaggatggtctcaatctcctgaccttgtgatccgcctgc

SEQ ID NO: 170542 - DNA, 201 bp, Homo sapiens
tgggattacaggcatgagccaccgcacccagcccctttgctcttcctttgtcttctgccatgattgtgaggcctccccagccatgtggagttgtgagtccrttaaacttctttcctttaaacattacccagtctcaggtatgtcttcattagcagcatgaaaacagactaatacaccatgtcatttaatgaggctgggcct

SEQ ID NO: 170543 - DNA, 201 bp, Homo sapiens
aagtggggttctcacgtggggagcatatggggctttcctcctgcccaccccctgcacctgcagccaggatgcacctgagctcggactgccctgaaaccccrggaaaatcccaacagcggcaccatagggccaggattacagccattctttttttttttttttttttttttttttgagacggagtctcgctctgtcgcccag

SEQ ID NO: 170544 - DNA, 201 bp, Homo sapiens
tggttatctatggtgtggctatcttgtatatatatatattttttaagactgagtctcgctctgtcacccaggctggagtgcagcggcgtgatctcggctcrctgcaacctctccctcccgggttcaagcgattctcctgcctcagcctcctgagtagctgggactacaggcgcccgccaccatcccagctaatttttatat

SEQ ID NO: 170545 - DNA, 201 bp, Homo sapiens
cctctgctgccctccaaggtgccctgggtccagctggccagaagcactgctttctggagcagccacttatgcttttacttttttctcttctttttttttttaagactgagtcttgctctgttgcccaggctggagtgcagtggcacaatcttggctcactgcattctccagttcaagtgattctcctgcctcagcctcctg

SEQ ID NO: 170546 - DNA, 201 bp, Homo sapiens
atgaacttgggggattttaaaggtaacaaacaaccccttctggctggtgtgggggaagccctaatttgtagtgcttgctacttttttttttttttttttttgagacagtgttttgctctcgtcacccaggctagagtgcaacggcacaatcttcactcattgtaaaacctccgtctcccgggttccagcgattctcctgcc

SEQ ID NO: 170547 - DNA, 201 bp, Homo sapiens
cagggcaggaagtggcctgcacagaggccccgaggcgagaaggaccacaactctcctgtggacctcctctttgtacgatcagttttaattacgcaaaaaaattatgcagttaaagctttgctcatttaaacagaccttccctggattaagagtaattaggttttattgtcattgtcttgaaaattgccttgccatggacct

SEQ ID NO: 170548 - DNA, 201 bp, Homo sapiens
cagtcattggtggattttctgtctaacattttatgaaaattttcaagcatccaacaaagttcaaataatttttacttggaatagttttggtttttttttttggagacagagtcttgctctgtcacccaggctggagtacaacagtggtgtgatcttggcttcctgtgacttccgcttccctggttcaagcgattcttctgc

SEQ ID NO: 170549 - DNA, 201 bp, Homo sapiens
gagtcctgccacctttttgtagtagctgtcactaccactcatggctgtatttggggccctctctcactggtggggaatcgtgcctggcttatctgcccccyttttttttttttttttttttttgcgacagagtctcactgtgtgacccaggctggagggcagtggcttgatcttggctcactgtgacctccacctcctggg

SEQ ID NO: 170550 - DNA, 201 bp, Homo sapiens
tgaaggagcgaggcctgcgaccatacctgctcatccatgacggtaggcctgtcggacaccaggacctcacgggggtgaaagctcccctttcccagggtggrggctgtgcagagagcctctttcactgggccaaaccactgactgagctaggccaccaacactcatgggttgggggtaaaaacctcatgggacttcctgctg

SEQ ID NO: 170551 - DNA, 201 bp, Homo sapiens
ccccgactctactaaaatacaaaaaattagccaggcatggtggctggcgcctgtagtcccagctactcgggaggctgaggcaggagaattgcttgaacccrggagatggaggttgcagtgagctgagatcgcgccatcacactccagtctgggcgacagaacgagactctatctctaaaaaaaaaaaagaaaaagaaaaaa

SEQ ID NO: 170552 - DNA, 201 bp, Homo sapiens
taacaagtatcattaatccaaaaatctgaaatctggtatgctccaaaacctgaaactttctgagcactaacatgacagcaacagtggaaaattccacccctgtcctcacgcgatgggtcgcagtcaaaacccaatcaaaaccttgtttcatgcacaaaattatttaaaattttgtataattaccctcaggctatgtgtcta

SEQ ID NO: 170553 - DNA, 201 bp, Homo sapiens
taaccctaagcaaatactcatctgctttctgcctttgtgggtttccctattctaaatattttttatgaatggaatcatatagtatgtggccttttctgtcbtcttttactctgcgtgttttcaaggttcatccatgttgtagcatgtatcaggacttcatttctttttatggctgaataatgctccactgtatggatagac

SEQ ID NO: 170554 - DNA, 201 bp, Homo sapiens
attactgtgcttgagcacttcttcaaatgtttgatgaccttgaccattgaaacttcctttttgtgaattacctattcatatcctttgtagcttcactgtggaatgcttgttactgatttgtagccattctttatacatttcactcccactcgtttgtcagttatatgtggtgcacacatctgctcccagtctgtggtttgt

SEQ ID NO: 170555 - DNA, 201 bp, Homo sapiens
tattattactgtgcttgagcacttcttcaaatgtttgatgaccttgaccattgaaacttcctttttgtgaattacctattcatatcctttgtagcttcactgtggaatgcttgttactgatttgtagccattctttatacatttcactcccactcgtttgtcagttatatgtggtgcacacatctgctcccagtctgtggt

SEQ ID NO: 170556 - DNA, 201 bp, Homo sapiens
atattattactgtgcttgagcacttcttcaaatgtttgatgaccttgaccattgaaacttcctttttgtgaattacctattcatatcctttgtagcttcactgtggaatgcttgttactgatttgtagccattctttatacatttcactcccactcgtttgtcagttatatgtggtgcacacatctgctcccagtctgtgg

SEQ ID NO: 170557 - DNA, 201 bp, Homo sapiens
tatattattactgtgcttgagcacttcttcaaatgtttgatgaccttgaccattgaaacttcctttttgtgaattacctattcatatcctttgtagcttcactgtggaatgcttgttactgatttgtagccattctttatacatttcactcccactcgtttgtcagttatatgtggtgcacacatctgctcccagtctgtg

SEQ ID NO: 170558 - DNA, 201 bp, Homo sapiens
ctatattattactgtgcttgagcacttcttcaaatgtttgatgaccttgaccattgaaacttcctttttgtgaattacctattcatatcctttgtagcttcactgtggaatgcttgttactgatttgtagccattctttatacatttcactcccactcgtttgtcagttatatgtggtgcacacatctgctcccagtctgt

SEQ ID NO: 170559 - DNA, 201 bp, Homo sapiens
tctatattattactgtgcttgagcacttcttcaaatgtttgatgaccttgaccattgaaacttcctttttgtgaattacctattcatatcctttgtagcttcactgtggaatgcttgttactgatttgtagccattctttatacatttcactcccactcgtttgtcagttatatgtggtgcacacatctgctcccagtctg

SEQ ID NO: 170560 - DNA, 201 bp, Homo sapiens
gctttagctttggccccacccatcttaggctgctcagaggcctcaggcctccctggagggccagaagggattcccaggggcaggatagcacggacggggggtccgctgtgtaagcctgggaaattctggctgcttgaagctggcacactcccctgaggctgttccaggcacagtcactgggtctccccgtcgaagtggctc

SEQ ID NO: 170561 - DNA, 201 bp, Homo sapiens
catgatcctgagtgcacaggtacattgctccgccctctcaacagccacgacccagaaataaagtaggcactgtaatttgcattttgaggataaggaaaccraataatagagtctactgagcgcatactcagtctttccagaccctagaaagtaggtaccattgtcatcctcatttcagagctaggagagcagaggccagac

SEQ ID NO: 170562 - DNA, 201 bp, Homo sapiens
cctgccctgtagacggggagaccacattagtgtttgtgcaaagccctgccctcgtgcacctgtccttccgtagcccacgatacctcatccagcccgggcccgtgggtgggctgctgagcacccgaccacagccaggcctccatgtgccactgtcaaggggacttggcccgccatgatcctgagtgcacaggtacattgctc

SEQ ID NO: 170563 - DNA, 201 bp, Homo sapiens
gtacccgtatatcccacccccagactcctttccatgagctgctcccagaccccctcatatccatcctgcctccagaacccctatatcttgctcccactccytaccatatgctgttcccagacccccctccatggcctgcccccagatccccctttgctgccacccctatatcttaccccagactcccccatatctcgcccc

SEQ ID NO: 170564 - DNA, 201 bp, Homo sapiens
gggcagagccccccgtgtttcagatggaaaggttaagtaatgtgactctggtaatgcagtccagttcatttatgagatcatggacctcttatactacagaytttttgtgttttttttgctgagtcttttgctccctaaccgtgttccctggctggccaccctgccagcaccacgctggccctcaggaagcatcatcagcca

SEQ ID NO: 170565 - DNA, 201 bp, Homo sapiens
tagtctcacaagatcagatggttttaaaaagcggagttgccctgcacacgctctcttctcttgtctgccgccatgtgagacatgcctttcaccttctgccrtgacggtgaggcctccccagtcacgtggaactgtaagtgcattaaacctctttcttttgtaaactgcccagtctctctggtatgtctttatcagcagtgt

SEQ ID NO: 170566 - DNA, 201 bp, Homo sapiens
gtgctatagaagtgagagcaggtgcctggggacacttggaggcccccctaggtttgtctgtaatgagcttgtgctggcgactggcatgttctgtcccccccacggctcccagcgtgctcccagcgccctcccacagctttaggcaattaagacacgggcttggagtggccattgcaggacctgctggtaatgggggtgagg

SEQ ID NO: 170567 - DNA, 201 bp, Homo sapiens
tcaatctcctgatctcgtgatctgcccaccttggcctcccaaagtgctgggattgcaggcgtgagccaccgcgcctggccaatttttttttttatagagaygagtctcactgtggtgcccaggctggtcttgaactcctgggctcaagtgatcctcccacttcagcctctcaaagtgctgggattacaggtgtgccccact

SEQ ID NO: 170568 - DNA, 201 bp, Homo sapiens
tttcaccatgttacccaagatggtctcaatctcctgatctcgtgatctgcccaccttggcctcccaaagtgctgggattgcaggcgtgagccaccgcgccyggccaatttttttttttatagagatgagtctcactgtggtgcccaggctggtcttgaactcctgggctcaagtgatcctcccacttcagcctctcaaagt

SEQ ID NO: 170569 - DNA, 201 bp, Homo sapiens
aaaggtcaaggttgtagtgagctgagatcacgccactgcactccagtctgggcaacagggtgagaccctgtctcaaacaaacaaacaaacaaacaaacaaataaatagaagatacaatgaagagccaaatgaaaattttagaactgaaaaatacagtagccaaaatagaaaactccatggatgggtttgacagcagaatca

SEQ ID NO: 170570 - DNA, 201 bp, Homo sapiens
gaaaggtcaaggttgtagtgagctgagatcacgccactgcactccagtctgggcaacagggtgagaccctgtctcaaacaaacaaacaaacaaacaaacaaataaatagaagatacaatgaagagccaaatgaaaattttagaactgaaaaatacagtagccaaaatagaaaactccatggatgggtttgacagcagaatc

SEQ ID NO: 170571 - DNA, 201 bp, Homo sapiens
cctgcagcctccactttgttccctgggaacacttgccctggagacatttcctctttgactcttgctgtcatgctgtgagatacacaagccacatgcagaggccatgtgtaggactccagaaaatagcccacatcaactgacagccatcttccaggttcctagggccacccagacctcctgaatctaaacctgttttaaaaa

SEQ ID NO: 170572 - DNA, 201 bp, Homo sapiens
gtcatgccactgcactccagtctgggtcatagtacaagaccctgtctcagaaaggaaggaaggaaggaaggaagaaaggaaggaaggaaggaagggaggaagggaagggaacagaaaataaaaatgcaggcgtagaaccaccatgaatttaaccccgtgtggtgtttctgacactggtatacttgttgcggtatctagcct

SEQ ID NO: 170573 - DNA, 201 bp, Homo sapiens
tgagtcatgccactgcactccagtctgggtcatagtacaagaccctgtctcagaaaggaaggaaggaaggaaggaagaaaggaaggaaggaaggaagggaggaagggaagggaacagaaaataaaaatgcaggcgtagaaccaccatgaatttaaccccgtgtggtgtttctgacactggtatacttgttgcggtatctag

SEQ ID NO: 170574 - DNA, 201 bp, Homo sapiens
tatgagtcatgccactgcactccagtctgggtcatagtacaagaccctgtctcagaaaggaaggaaggaaggaaggaagaaaggaaggaaggaaggaagggaggaagggaagggaacagaaaataaaaatgcaggcgtagaaccaccatgaatttaaccccgtgtggtgtttctgacactggtatacttgttgcggtatct

SEQ ID NO: 170575 - DNA, 201 bp, Homo sapiens
agctatgagtcatgccactgcactccagtctgggtcatagtacaagaccctgtctcagaaaggaaggaaggaaggaaggaagaaaggaaggaaggaaggaagggaggaagggaagggaacagaaaataaaaatgcaggcgtagaaccaccatgaatttaaccccgtgtggtgtttctgacactggtatacttgttgcggta

SEQ ID NO: 170576 - DNA, 201 bp, Homo sapiens
tgctcacacgtgctcttctcccaagacactccctgaagcgcgttccccaggagctggaagggggataacgcaggtatgcctcatggcggggccagtgctcrtgcttacacacactcggcctcagctcgtctacaccctgcaacagcccagagaagccacccgccttcttacccctaccatttagatttgcaaatggaagct

SEQ ID NO: 170577 - DNA, 201 bp, Homo sapiens
tgaaaggtcaaggttgtagtgagctgagatcacgccactgcactccagtctgggcaacagggtgagaccctgtctcaaacaaacaaacaaacaaacaaacaaataaatagaagatacaatgaagagccaaatgaaaattttagaactgaaaaatacagtagccaaaatagaaaactccatggatgggtttgacagcagaat

SEQ ID NO: 170578 - DNA, 201 bp, Homo sapiens
cacaccctagacaagtcagcgctcaagtttatatggacaaataagcaagtaaaattagttaggaaatcaaatattggggttggggaacaataagagaaggyaagccctatgggatggtaaactgcagtataaagccccatttgctggcacagtgtggtctggcctgtgactaggtgagggacagtgcggggtggcctgcct

SEQ ID NO: 170579 - DNA, 201 bp, Homo sapiens
ggcagattcagccaggccaacacttctggatagaaccacagggccataaactgagaccattgagggagactgcttggcttggaaaactcgcccagggaccrtgtgctctgatttgcaaaatgcaccccccagagcggcttcctgccttcactttgtgcagagttgggggcggcaggggcgtggggggttggatggaccatg

SEQ ID NO: 170580 - DNA, 201 bp, Homo sapiens
tctcccaagacactccctgaagcgcgttccccaggagctggaagggggataacgcaggtatgcctcatggcggggccagtgctcatgcttacacacactcrgcctcagctcgtctacaccctgcaacagcccagagaagccacccgccttcttacccctaccatttagatttgcaaatggaagctcagagaggtgaagtaa

SEQ ID NO: 170581 - DNA, 201 bp, Homo sapiens
ctgaaaggtcaaggttgtagtgagctgagatcacgccactgcactccagtctgggcaacagggtgagaccctgtctcaaacaaacaaacaaacaaacaaacaaataaatagaagatacaatgaagagccaaatgaaaattttagaactgaaaaatacagtagccaaaatagaaaactccatggatgggtttgacagcagaa

SEQ ID NO: 170582 - DNA, 201 bp, Homo sapiens
cctttcataatccaccggcaacatcagttaacatgtggcatatttccttcccgtctcctccactcccattttttttggacttcttaaacataattgagattgtgttttatgtacaattttatagcatgtacttgttagctttgaaacagacccatctgcgtttgcaatttggcctgcagggaaaagaccagattgctgagt

SEQ ID NO: 170583 - DNA, 201 bp, Homo sapiens
gcaggagctgtggccaccgtcctagccaggccggccacctgcccaaaatgttctctaaccttaacatgaacctgggccacttgggctctgctggatgcccmcagggctgccagagcctgcccgccacagagcccctctgagacctggagtctcacctgagccctctcgctgcccacagggctggcctctgcctttccgctg

SEQ ID NO: 170584 - DNA, 201 bp, Homo sapiens
gaggtgggactactggcatgcaccaccacaccggctagtttttaaaattcttgcagagacagggtctccctgtgtggcccaggctggtcttgaactgggcycaagtgatcctcctgccttggccttccaaaatactgggattacaggcatgagccactacacccggcctggactcagtttctataatgggatatggcagtt

SEQ ID NO: 170585 - DNA, 201 bp, Homo sapiens
ccatacagcttgtctggcagagcctcagcaggagcccgggtccccggacaccgaggctagctctttctgctgtggccttctcacagaccaaggtgggatcrcagccttggtagccttgaagtctccctaacctggcaagacagtggagaagggggacagccagcgggacattccactgtagaataaatacatgcatggcaa

SEQ ID NO: 170586 - DNA, 201 bp, Homo sapiens
gccacccgcatgcatcccatgaggccgtccaagcccgtctgccctgcatcagagaggacaccccaatgcggggagggaggaacctggtgaagccaggagcrgtgggcaggggccagcaaggatccccaggcccccagggcagtgtgcatccggccttcttgcatgcccacctggcatcctgcctgccgcctcctgcctccc

SEQ ID NO: 170587 - DNA, 201 bp, Homo sapiens
tgcagctgaggcatgttttctggggttcctggctttggcctgcacggctgggtgggaggagggcatgggaggtgatgctgctcactgagcagggcctgctytgaccacctcgggatcaagagtcctgttagatgcccaggtagagacccttgctgggcgggcaggtggatcttcgagaatggagctccgagggacaggttg

SEQ ID NO: 170588 - DNA, 201 bp, Homo sapiens
cacccgcatgcatcccatgaggccgtccaagcccgtctgccctgcatcagagaggacaccccaatgcggggagggaggaacctggtgaagccaggagcggygggcaggggccagcaaggatccccaggcccccagggcagtgtgcatccggccttcttgcatgcccacctggcatcctgcctgccgcctcctgcctcccgc

SEQ ID NO: 170589 - DNA, 201 bp, Homo sapiens
tggagggggtaggggcagcctccccaggactgatctgacagacgggtatgtgcctcacccggcatcacccaccggggaggcctccgtccgcccccatgcartcatgctgggtccccccatctcgtgtcttctggggaatggagcggaagacctcccctctctggaaccaggggtgggagggactgtgctccccagaatgaa

SEQ ID NO: 170590 - DNA, 201 bp, Homo sapiens
acacacacaaatatacatacactcacgcccagacccccccacgccccaggccacacatgtgggcctgctcacaccccactcattccctcccagatgccgcrccacccccatgccctgtgtgccctctgcctctcggggccctggggccccagctccaagaaccacgggcttgctttagccaggcttccacaagcctgccca

SEQ ID NO: 170591 - DNA, 201 bp, Homo sapiens
aagccactttatatatttgggattctattaatccttctagtttgtacattttttatggcaccttcaatttttttcttttaaaaattaatgtatttttttttctgataatataagaaatgcatgccttctttggaaaatacagaaaatcacaaagaaaataatccacaatcccaccttccaaaaggaaccacagttagcatt

SEQ ID NO: 170592 - DNA, 201 bp, Homo sapiens
agcgcacagaaaagccactttatatatttgggattctattaatccttctagtttgtacattttttatggcaccttcaatttttttcttttaaaaattaatrtatttttttttctgataatataagaaatgcatgccttctttggaaaatacagaaaatcacaaagaaaataatccacaatcccaccttccaaaaggaacca

SEQ ID NO: 170593 - DNA, 201 bp, Homo sapiens
cagcgcacagaaaagccactttatatatttgggattctattaatccttctagtttgtacattttttatggcaccttcaatttttttcttttaaaaattaawgtatttttttttctgataatataagaaatgcatgccttctttggaaaatacagaaaatcacaaagaaaataatccacaatcccaccttccaaaaggaacc

SEQ ID NO: 170594 - DNA, 201 bp, Homo sapiens
gaggggtccgtggggcctgtctgggcccagcacagcagcgcacagaaaagccactttatatatttgggattctattaatccttctagtttgtacattttttatggcaccttcaatttttttcttttaaaaattaatgtatttttttttctgataatataagaaatgcatgccttctttggaaaatacagaaaatcacaaag

SEQ ID NO: 170595 - DNA, 201 bp, Homo sapiens
gctctctcctaggcgttactacaaggagacctctggcctgatgctggacgttggtccctacatgaaggcgcttgaggtaccagccctggttctgtcccaarctctcttcagacctcagggcacctgggactttttgggtctttgttgagaagaggctgtgcttaattaacgtacaaatggccttttgggcttccacaaagg

SEQ ID NO: 170596 - DNA, 201 bp, Homo sapiens
ggatttgctttggctcctgcagatttatctagctgggggtgtctctggtagcagctatactgtatacatctaacagcaatgtaataacaatcctgaaatayaccacagcctgttatgtagctgggagaggctaaaatctcccttcccaaaagcatatgggattatttttggtgaggggacatcacacccgtgatctgggag

SEQ ID NO: 170597 - DNA, 201 bp, Homo sapiens
tgagctatgagtcatgccactgcactccagtctgggtcatagtacaagaccctgtctcagaaaggaaggaaggaaggaaggaagaaaggaaggaaggaaggaagggaggaagggaagggaacagaaaataaaaatgcaggcgtagaaccaccatgaatttaaccccgtgtggtgtttctgacactggtatacttgttgcgg

SEQ ID NO: 170598 - DNA, 201 bp, Homo sapiens
agtgagctatgagtcatgccactgcactccagtctgggtcatagtacaagaccctgtctcagaaaggaaggaaggaaggaaggaagaaaggaaggaaggaaggaagggaggaagggaagggaacagaaaataaaaatgcaggcgtagaaccaccatgaatttaaccccgtgtggtgtttctgacactggtatacttgttgc

SEQ ID NO: 170599 - DNA, 201 bp, Homo sapiens
cagtgagctatgagtcatgccactgcactccagtctgggtcatagtacaagaccctgtctcagaaaggaaggaaggaaggaaggaagaaaggaaggaaggaaggaagggaggaagggaagggaacagaaaataaaaatgcaggcgtagaaccaccatgaatttaaccccgtgtggtgtttctgacactggtatacttgttg

SEQ ID NO: 170600 - DNA, 201 bp, Homo sapiens
tggcacagctcatggtctagaggaataacctcaggtccaggtgagacactcagcctgtgatggcttcatatggtcactacgttgttgtatatggagagagractctttcttggttttaaattttgtttttaattttataaatgtaatatattcacatggaaaatttggaaattataaacaatcaaaaagaagcagctaaaa

SEQ ID NO: 170601 - DNA, 201 bp, Homo sapiens
acagccgacacgaccagcctgcagtaccaggatagacaatttgggctggagccaaacttgatcagagggaggctgactttatcgagggctgctttgtggcrggcgttcattgtggaaagagcccaggaaggagctctctgccttgcaagaacattgcctgtggctcaaaatggccacatgggatgcagttcctgaggtggc

SEQ ID NO: 170602 - DNA, 201 bp, Homo sapiens
gttgtgatgtcttttgccagctctcttctgtagcttgaaattggccacggtggaagtatttacaccatggaagttggcaaatgcacggacccagcaccccyaccccatcccggagagccagttaccagcacacgtctgccttttggggtcttttgtgcaggactgatggatggagtcgcagcagacacttggcctggccac

SEQ ID NO: 170603 - DNA, 201 bp, Homo sapiens
cttgaacctgggaagtagaggttgcagtgagctgagatcgtgccactgcactctagcctgggcgacagagcaaaaccctgtctcaaaaaaaaaaaaaaaaattagtcaggcatggtggcacacacctgtagtcccagctactcaggaggctgaggtgggaggattgtttgagcccagaaggttgaggctgcattgagctga

SEQ ID NO: 170604 - DNA, 201 bp, Homo sapiens
tcttgaccgttcatctgtgttacggtgtgtatcagagtttcacttctttttgtggctgagtaatattccactatgtggataggccacattttgttgatctrttatcagctgatggacatttggattgcttcctgatatggtttggctgcatcccaacccaaatctcgtctcgaattcccatgtgttgtgggaggtaattga

SEQ ID NO: 170605 - DNA, 201 bp, Homo sapiens
tcctcccacctgcggggcccgccatgcggggtcaccatgcgagtctcaccatgcagggtcaccacacgagtctcaccatgcagggtcaccacgcgagtctcaccatgcagggtcaccatgcggggtcaccatgcagggtcaccatgtggggtcaccatgcggggctcaccatgtggggcttcaggagcttgctgagcaccc

SEQ ID NO: 170606 - DNA, 201 bp, Homo sapiens
cggtgcagcgcggttatttatagccctggtggagcgcccataaatcaaggctttccccagcagcgcggctgtgagggctccgagatgatctcatggtgccyctcccttgaaccatcccagagaaaggaggcctgtcaccttcaaggaccaatgcttctgccgggactcaagcagaacctgttcctgctgctgcaaggttta

SEQ ID NO: 170607 - DNA, 201 bp, Homo sapiens
gtcctcccacctgcggggcccgccatgcggggtcaccatgcgagtctcaccatgcagggtcaccacacgagtctcaccatgcagggtcaccacgcgagtctcaccatgcagggtcaccatgcggggtcaccatgcagggtcaccatgtggggtcaccatgcggggctcaccatgtggggcttcaggagcttgctgagcacc

SEQ ID NO: 170608 - DNA, 201 bp, Homo sapiens
cgtgtgcaggaaataagccggggggaagggggcaccgcgggtgggtgttaactgctgcttcggggtccagtcctgttaatgaaagcaggggtgaggcaagsggggaagactctctgtacctgatcagtggcatgtgtgtggctccagccggcatggcctgagctgccggtgagggagaggcctcagggagaaaagacaaaa

SEQ ID NO: 170609 - DNA, 201 bp, Homo sapiens
ccacccacctgctgggtcctcccacctgcggggcccgccatgcggggtcaccatgcgagtctcaccatgcagggtcaccacacgagtctcaccatgcagggtcaccacgcgagtctcaccatgcagggtcaccatgcggggtcaccatgcagggtcaccatgtggggtcaccatgcggggctcaccatgtggggcttcagg

SEQ ID NO: 170610 - DNA, 201 bp, Homo sapiens
caagggcacccagagcactgtgggaggactggtgccgcctccctgcccccctgctttctcctgggccactgggctagacatggggcctccctgcccccatrtggtttggcctgaaaaagagaggaggtggggtggcacttctggggcagcccagagtgagtgccctgccctgagcccagcgtgtgccccgcctgtgcccct

SEQ ID NO: 170611 - DNA, 201 bp, Homo sapiens
cccacccacctgctgggtcctcccacctgcggggcccgccatgcggggtcaccatgcgagtctcaccatgcagggtcaccacacgagtctcaccatgcagggtcaccacgcgagtctcaccatgcagggtcaccatgcggggtcaccatgcagggtcaccatgtggggtcaccatgcggggctcaccatgtggggcttcag

SEQ ID NO: 170612 - DNA, 201 bp, Homo sapiens
ccctgcccccatgtggtttggcctgaaaaagagaggaggtggggtggcacttctggggcagcccagagtgagtgccctgccctgagcccagcgtgtgcccygcctgtgcccctgggtggggggtgcatacagacctcggggggatctggccgttggagtgcgcactgggagggacggagtcagctctttttaatctaaaca

SEQ ID NO: 170613 - DNA, 201 bp, Homo sapiens
aggcccacccacctgctgggtcctcccacctgcggggcccgccatgcggggtcaccatgcgagtctcaccatgcagggtcaccacacgagtctcaccatgcagggtcaccacgcgagtctcaccatgcagggtcaccatgcggggtcaccatgcagggtcaccatgtggggtcaccatgcggggctcaccatgtggggctt

SEQ ID NO: 170614 - DNA, 201 bp, Homo sapiens
gctgagccccacctcccagccgtgggcattttctttggattgtcagtgtggggatgaccctgctcaactcctgactgggagcaggctggcctgctgggccrtgcccacttccagcactgaaagaatgggcccaggacgggggtcagccctcctgcagccctggtttgaattggaaactctgtccaccgatgcctggcacct

SEQ ID NO: 170615 - DNA, 201 bp, Homo sapiens
ctcccaccccaggcccacccacctgctgggtcctcccacctgcggggcccgccatgcggggtcaccatgcgagtctcaccatgcagggtcaccacacgagtctcaccatgcagggtcaccacgcgagtctcaccatgcagggtcaccatgcggggtcaccatgcagggtcaccatgtggggtcaccatgcggggctcacca

SEQ ID NO: 170616 - DNA, 201 bp, Homo sapiens
cccgtccctctgccaaagcgagccttttaggtgagccctgccggccacctgctagcccaggccccggctcctggtgggccctggaccaggctgcaagcatwtccaagtgcatggcagtgagacgtccaggcctcccagccccaactctgagcctccgttgggtcagcggtaagatggggcagtggcacctacctccccggc

SEQ ID NO: 170617 - DNA, 201 bp, Homo sapiens
cctcccaccccaggcccacccacctgctgggtcctcccacctgcggggcccgccatgcggggtcaccatgcgagtctcaccatgcagggtcaccacacgagtctcaccatgcagggtcaccacgcgagtctcaccatgcagggtcaccatgcggggtcaccatgcagggtcaccatgtggggtcaccatgcggggctcacc

SEQ ID NO: 170618 - DNA, 201 bp, Homo sapiens
gggacagctgtctttgtgcttattgaagcactttaacgaagcagttttcacagctgcatactattccactgttcagactcccgtcatattcttgaccattycctattgatggagatgaggctgcttccagtttcgctcttgtgcgtaaccctgatgaacacatcttgtatgtacatcctcttgtacatttctaattatttg

SEQ ID NO: 170619 - DNA, 201 bp, Homo sapiens
gcctcccaccccaggcccacccacctgctgggtcctcccacctgcggggcccgccatgcggggtcaccatgcgagtctcaccatgcagggtcaccacacgagtctcaccatgcagggtcaccacgcgagtctcaccatgcagggtcaccatgcggggtcaccatgcagggtcaccatgtggggtcaccatgcggggctcac

SEQ ID NO: 170620 - DNA, 201 bp, Homo sapiens
gcttatttctgtttcagaaaggtgtgtccgttcaccttcctgacctgctgcgtatacagatgcttgtttccccacatccttaccaacaccatgatttctgrctttttttttttaaagtggtctttgagttttgctgttagtcttgttccttatgaaggtgtccgaccacagtggcaatcactcagcattgcactgtctcca

SEQ ID NO: 170621 - DNA, 201 bp, Homo sapiens
cttaccaacaccatgatttctggctttttttttttaaagtggtctttgagttttgctgttagtcttgttccttatgaaggtgtccgaccacagtggcaatyactcagcattgcactgtctccaggtctctgtgggagcctgggttcctttggggcctggattcagggctcatcctagagtgagctgtcatctcagggcatc

SEQ ID NO: 170622 - DNA, 201 bp, Homo sapiens
gtctcgcggtggcttgcggctaccagtaactggcagaattctcaacattgtggccctcagccacctcctccgagctctctctcagcaccaccatccgccgwggcttctctgagggaggcccctctggcctctgcttgactatgatacatgtcgagtccatgccgagtggcagaaaagctccgttttcagctgaaactacct

SEQ ID NO: 170623 - DNA, 201 bp, Homo sapiens
gatgattccttggttatctgaaggcctgtttgggagacggttcccaggacagttgcttcaggcttatatgtgtgtgctttctggaattcacagcatggcgygccctggtgagtggtggggagatgggtagtgaacacgtgtggtagcccctgctgggcgtgtcccacctgtcctccatgtcctacaacctggttggcccct

SEQ ID NO: 170624 - DNA, 201 bp, Homo sapiens
gagacgggtttcaccatgttgcccaggctggtctggaactcctgggctcaagtgatctgcctccctcggcctcccacagtgctggaattacaggcatgagycactgcgcccagcttttaatcagattttggagtaggggagtgagaggagctggttggtggtggtttttttttctttaaaattattattactttttttttc

SEQ ID NO: 170625 - DNA, 201 bp, Homo sapiens
ggagaaaggtattagaaagttagagctgacactagatacgctcattgctaccggagtgttgttgcttatgggccttctcagtggacagagtagggaaatgygtgtgcatactaacccgtatgtatacatatctctataactacacatgcacccatacacatatatctgcatctacattaaactaaacatgagttcccattg

SEQ ID NO: 170626 - DNA, 201 bp, Homo sapiens
atcaatcaccaggaccctgctgactagctgccttggcctccttctgcaaggctgctgcttctagatggtattaagacagactcagaaaagggagagtttcrgttaattaatggcactgaatagaaagcaagctgtgatcctcggggaactctacactgtcatgtaagttcctggcgtgagtaatcaggaggctgagcctct

SEQ ID NO: 170627 - DNA, 201 bp, Homo sapiens
gcgcacatccttcctgctaattttctctgtattcacacacacggacccctgttagctcttcaaatcagacaacactggggctgatggctcagggctggatrccttcctttctcctgtgccccaaaggatgaagaggtggcttttcctgttttgcctggcagtaccctcactccatgcggacatcccattcttttgcagagc

SEQ ID NO: 170628 - DNA, 201 bp, Homo sapiens
tacctctgtttttttccccatcattctttctggccttgattctggctcttcatcctctgtgtctgtgatggctgcttgcctacctaccagccttgaacctsgtacttggagggagtcagtttcatgggcctgacttcctgctccttctctgtgatctgttgtgggccccacattggcattgacagccataagcatggaagc

SEQ ID NO: 170629 - DNA, 201 bp, Homo sapiens
tccttttctacctctcatcaagtgcactgatgcatggaaataatgcacgtagtatctgcctcacagggggctattgtgtctgtgcttgtaagcatcttacrcaacaggcatctacaaaagctacttgccttttcctatggacacggtgcattatttttctagcagttttatctttctaaaataagctttttaaaaaaatca

SEQ ID NO: 170630 - DNA, 201 bp, Homo sapiens
agatcctaaacttaattctgtttgcatatttggtttatatcccctttcccaaataaggaaacatttgtagattctggggattaggatttggacatttccckttaggaaccacgattcagcccactgcaccttcctactgtcatctcttatggctcattcctttcagtcacattggccaccttcatgcgtctccaacataga

SEQ ID NO: 170631 - DNA, 201 bp, Homo sapiens
actgcagaaaaggaggtgtgtaaaatatctagaatagacccataaatctatagagacagaatgcaggttggtggtgattaccaggggttgggggtcaggakaacagggagaaacggcttcatgagtaaggagttgactttggagtgatggaaatgtttccgagctagacagaggtggtggttgcacaacatcgtgaatgtg

SEQ ID NO: 170632 - DNA, 201 bp, Homo sapiens
tgctggaggaagagatgcacccctgtgctggtgaagctgcttgttgtctggggtgaatacccgaggttcatggtatcacgccaaggaaattgagtactcacgacacccaagaaatgggtttaggagcacagttttaataagcaaaagaaagagaaaggagaatagctccctctcttatgagagagagggggcccacagcga

SEQ ID NO: 170633 - DNA, 201 bp, Homo sapiens
tatgccatttactgaaaatttgatatatgccaggtcttgagttaccagtggtattttaactgatttaatgctcagaaaacgttatgagattggtgtttttwaaaaaaaaaaaaaaaaacttattttaggtttggtgttatttttaatcccattttacagatgagaaaataaaggcttggagaagttaagaacaactcaagg

SEQ ID NO: 170634 - DNA, 201 bp, Homo sapiens
cttccaaactggcttctgttcccttatgggctacaggactagccttggcagaactggagtatttgtctctgcttcctgtgttcatttctgccacatggtgrcaaccactccatcggccagtgccgaagggcttttgcaccattccagaaggaaagcctcttctaggaggtcgagttagggagcagaatcccccaaccccac

SEQ ID NO: 170635 - DNA, 201 bp, Homo sapiens
ctactgctcttgggcaaggcctgggtaatatgcctctaccctccaggcgtgactgctgtgcttctgacattgatgatcctcattcctgtcttgggagctgscatcataggtctgattttaaggatgcagaggcaaaacaaagacatctggtggcaaatcaattttgatgatatcaccattcttccccagaacaaggtgagg

SEQ ID NO: 170636 - DNA, 201 bp, Homo sapiens
taataaattaatcagtgataatgcaagtcaatgagaaagaatcaagtatggcagcctaccttacctacagcaagaaaatgagggaaatgaatgacttgtatttgtttggttgttgggatgaactttgttggtgtccttcagtatcatgtcgcctgaaaagtgttgatgcaaaaggtgaacaggaaggagcagcacaggtct

SEQ ID NO: 170637 - DNA, 201 bp, Homo sapiens
gggagctggttccggcctcgggcaacccagaaaggggctcccacagtgcagcggcgggctgaagggctcctgaagcaccgccagagtggacgccgaggccraggaggcgccaagagcgagcgagggctgctagcacgttgtcacctcacttttatcatcctcgttttacagaagaggaaactgaggttcagagaggtgcca

SEQ ID NO: 170638 - DNA, 201 bp, Homo sapiens
cctgccaccacgctgggctaatttttgtatttttagtaaagatggggtttcactatgttggccaggctggtctccaactcctgacctcgtgatccgcccgycttggcctcccaaagtgctgggattacaggcgtgagccaacgcgcccagcctatccccattttataaacgagtgagctgagattcagagaggctgtggaa

SEQ ID NO: 170639 - DNA, 201 bp, Homo sapiens
tttcttaagcttgctgcctatacttttaccaccagaagcgacaaagccagtgacctgggagtcagtccggtgaggaaacctctcagtcatgggcagcacgrtgaagggtggtggtccactgctagtcattagtccaaccatcaatcaaccaacagactcctgtggggaagactcatctgggtgttgagagggcaaaaagga

SEQ ID NO: 170640 - DNA, 201 bp, Homo sapiens
ttgccttttcctatggacacggtgcattatttttctagcagttttatctttctaaaataagctttttaaaaaaatcacaagaagctgaaataggacagaaraaaataaagggagatatatagtaatgtcccagatttttctttctttatcatgaagtctttcagatccacaaaagcatctcagatttctttgggtagggag

SEQ ID NO: 170641 - DNA, 201 bp, Homo sapiens
actgtgacgtggttgagttaatcaccgtgcgtgaggttagactttgatcgttcctctgatttatttgctgcagacagacttcctgggtttacctcccagckctgccacttgtaggtgttactttaccttacctttcagtggcagttcccttatttgtaaaatgggatctgtaacagttcttatctaacaaggtctttataa

SEQ ID NO: 170642 - DNA, 201 bp, Homo sapiens
gtctatgcaattgaattcatgctgcttcatgaaagaatagcataaatctattttatgaaactattcccagtataggtttaggtggaaaaaaatcaagctgvattatggtatgatatcatcatatatatatatatatgtgtgagtgtgatgtcatatatatgtatatatacatacatatatgtataatgagtgggtatatac

SEQ ID NO: 170643 - DNA, 201 bp, Homo sapiens
cgggcggacggaacagagattcctcctaatttagtgctggacggtgacccaagaggccaagaacctcttgagaccctgctttgcttgtcttattgaaggtragcccttactctgcctaccttcacgacgccgtcctgctctatgctgagaccgtgaagcaggtggtaaaggctggaggcgacttccaggatgggtggcagc

SEQ ID NO: 170644 - DNA, 201 bp, Homo sapiens
agaaatagcaaacagcacatcaggccctgtaaagcctctgcaccaagcctctgcaaagggcctgcaaggcctctgcacccagaccaggagggaaggggctrccatgagaacagagattgcaaacttgtgccccagggcctggcagcatggaggcgtggggtgggtggggtcaggggaggaagatgggaggaactggaggaa

SEQ ID NO: 170645 - DNA, 201 bp, Homo sapiens
taactggaaacaaacttttttttttatttttaagtgctggatgagcttccccagtgtgggcctgagaaaatacatctgcctgcccagtgtggccctttaamcctaacaggatgctatctctgaactgtcttcttccctttgctggtccccattgaccctgtctcagattcactgaaatgacagaaaccctgtgtctggttt

SEQ ID NO: 170646 - DNA, 201 bp, Homo sapiens
aggctgaaccaggccatgaactaggtcagctggcttgaaggcctagcccgctgtattccgtatcagacaacaacagttgaggaactactgtcatttctacygggcagctgagaccttcccaagggaccctcagacacaagcggctctcacttctttttcttccacagctaccgccgtgtccctgctgaagctttaacaaag

SEQ ID NO: 170647 - DNA, 201 bp, Homo sapiens
ctgtacatgaggtagagtcaaatagaacaaactgagctgacgctgacctttatttttttttttaaagacccacagggaatttctccaatatgacctggccscatggctcccttcctgaagacagacctggctgtggattttataatgagctctgtgaaactcagtctgcttttacgggtaagtatggctgtttggagaacg

SEQ ID NO: 170648 - DNA, 201 bp, Homo sapiens
tacattttgtatttggtatttcgaacagccttggaaggtagatattattgttattccaatgtacaggtaaaaaaacccaaggcttaattaaggtaccttayctaagatttcagcactcccaagtggcatacctagtcttccagactgggcctttcagtctgagctcaccccacacaactctgccttctggagagcttatgg

SEQ ID NO: 170649 - DNA, 201 bp, Homo sapiens
acaagtgaaacattgtttatatttatggtataccatgtgatgtttcggaatacgtatactgtgtagaatgattaaatcaaggtaattaacctaaagatacmtcttaagtaagcttaagatacatccccatattttttacttagaaaatatggacctcaatgttatgacaaatctattttcctatgtgagtctaggtctcct

SEQ ID NO: 170650 - DNA, 201 bp, Homo sapiens
ggtggggaatgggccattgaaggccaccatttgttgagtgcctgtggccctggacgtgaccctagacactttatgcatgttatctccctacatcctcagarcaacaacgtgatcgtatgtacatgaggtacgcgtgattatcttcattttccaaatgagtaaagtgaggctcagagaaatgaaggaggcagcttagagggc

SEQ ID NO: 170651 - DNA, 201 bp, Homo sapiens
aaattttgtttttattattaattaattaatctttttttttttttttttttgagacagcgtatggctctgtcgcccaggctggagtgcagtggcgcgatctyggctcactgcaagctctgcctcctgggttcaagcaattctcatgcctcagcctcccgatgtagctggggatcacaggcatgcaccaccacgcctgactaa

SEQ ID NO: 170652 - DNA, 201 bp, Homo sapiens
attatttccatgattatttttctaagagaatgtcaggttcttctaaaaggggtcaggcatttttttttgtgcagtttggtacacctgtaaagggagatagwggcaaactctcctgaatccatagaaatagaggctgtagtcggtcttttacgtggagggtggtggatgcagcaacaggagagtagccactagatggcgccc

SEQ ID NO: 170653 - DNA, 201 bp, Homo sapiens
agctagctcagtgcctggccatgcacagggccaccgaaggggttgatttgggcagtgaggagcttgatgattggctcctaggtgcatttctttccagcttkttttctcccctccctagccctaagtggagctttttctggttcattctgagttaagaacattccactttttctttgattctagggaaaccatgtggccatc

SEQ ID NO: 170654 - DNA, 201 bp, Homo sapiens
cgggtaccccgcaaggagatgtttacagcttcgccattctgatgagggagctgatctaccattgggaccacgggccttttgatgacctccacgaggcaccrgatggtaaagcgggacagcctgcttgggaggttttggtcgtgtgggccagctttgaaatgctggttttttaaattaattgttttattaatatacaattta

SEQ ID NO: 170655 - DNA, 201 bp, Homo sapiens
ccacaattgtttttaaaaataaaggcaatacagagaaggaacttgaacatgaaaaccagctgtaattttagtcttgagtaaaccaccgttaacatgttagygcacatccttcctgctaattttctctgtattcacacacacggacccctgttagctcttcaaatcagacaacactggggctgatggctcagggctggatac

SEQ ID NO: 170656 - DNA, 201 bp, Homo sapiens
tggataccttcctttctcctgtgccccaaaggatgaagaggtggcttttcctgttttgcctggcagtaccctcactccatgcggacatcccattcttttgyagagctctactggactgccccagagctgctgcagttcccggagatgccctggtcgggtaccccgcaaggagatgtttacagcttcgccattctgatgagg

SEQ ID NO: 170657 - DNA, 201 bp, Homo sapiens
tagactttgatcgttcctctgatttatttgctgcagacagacttcctgggtttacctcccagctctgccacttgtaggtgttactttaccttacctttcartggcagttcccttatttgtaaaatgggatctgtaacagttcttatctaacaaggtctttataagaattgactgaaaatatgcaaagcacatagcatggtc

SEQ ID NO: 170658 - DNA, 201 bp, Homo sapiens
agcattaacccaaaggtttctctggaaaaacgctatggcaggtgggcatggcactttgaaggggaagagctccctggtggtcatcacctactctagctcastgagtctaccctctactctgtgccaggaaaacagaggacagcttggcattttgctttggaaggatcattacctcctgagatggagtgtgcacattctggg

SEQ ID NO: 170659 - DNA, 201 bp, Homo sapiens
tacacaagcatgtgcaactggcggactctggttttcattcttatagttatcatcttaacgtgcagctcagaggatgcaaaaattattcttctggctgcagyaaacctgggactcaacactggagaatttgttttcatcattttgcagcagttggaggtgggtaccgttgaccactcaatggctctggtagtaagaggtagc

SEQ ID NO: 170660 - DNA, 201 bp, Homo sapiens
tggggtcttggcatctgaattgttttttaaatgctcccaagtaattctgctgtgcatctgaagacaaaaccattgcctcaagtccacttttcccttccctatgtgccaagtggggttcaatgactcttcctacctgtccagttaattgaatgccttggattcgtacctttgcatgtatcctgggctctcctgagaccagtg

SEQ ID NO: 170661 - DNA, 201 bp, Homo sapiens
cttcagcctcctaagtagctggaaatatagacacatgccatcatgtcttgataattaaaaaaaaattttttttgtagagacgcgatttccctatgttgccraggcagctcttgaactcctgggctcaagcaatccttctgacttggcctcccaaagtgctagaattacaggcgtgagccactgtgcctggcccagaacaga

SEQ ID NO: 170662 - DNA, 201 bp, Homo sapiens
gaagacctactaagggtcagggactgcaatggatagtttacctattatgcctcatttaactattgtcacattcaacccaacagcagttttatccccctcctttcttttttttttgagatggagtctcgctctgtcacctaggctggagtgcagtggcgcaatctcggctcacagtaacctctgcctcctgggttcaagtga

SEQ ID NO: 170663 - DNA, 201 bp, Homo sapiens
tttttggaaggaagtactgacaaatcagaaaatgatgcacctccaaaaggtgtatgggtcactgcttctcattgccctcagctcctacagaaaaggccgtsgagacgaaggcttttggaaacaagtctaccaaacaccgaggaggtcgcccttccgcagcaccatctcctgggaggagcaggtgtgatgccgggtcttcca

SEQ ID NO: 170664 - DNA, 201 bp, Homo sapiens
gcactcagcttcctcatctataaaatgcattcccttttgtacttggccttgctgctgagagtgaccaaattacttcctgttttacagccatcccagagagscacacctgtgtcaaaaggcatcaacagtaactcatctagtgtgatgatttctgtggacctcagctcttttgtcaagagccagcagtgggaagagctcttc

SEQ ID NO: 170665 - DNA, 201 bp, Homo sapiens
ctctcttaccctagatatccattgtgaccgcctccctttctcttcacttttcctctcatctctgccttcaggcacattgttttggcagggaaacttttcamctcccctgttgctttctcccacacattgatgatccattccaactggtgtgtaatggcagaaagaaggtagaactaagaatacaccaatgtctatgcaatt

SEQ ID NO: 170666 - DNA, 201 bp, Homo sapiens
gacctactaagggtcagggactgcaatggatagtttacctattatgcctcatttaactattgtcacattcaacccaacagcagttttatccccctcctttyttttttttttgagatggagtctcgctctgtcacctaggctggagtgcagtggcgcaatctcggctcacagtaacctctgcctcctgggttcaagtgattt

SEQ ID NO: 170667 - DNA, 201 bp, Homo sapiens
aggtagcaagtatggagcactcgttatgacccacatgtattagctcactgagcactcactacaaccctgtgaggtaggcactctcgcgtcctcttcttaarattaggacactaagacagagctggaagaacttgcccagagttcttctccacagctagtgaaaggctgaaccaggccatgaactaggtcagctggcttgaa

SEQ ID NO: 170668 - DNA, 201 bp, Homo sapiens
ccgtttttggaaggaagtactgacaaatcagaaaatgatgcacctccaaaaggtgtatgggtcactgcttctcattgccctcagctcctacagaaaaggcygtggagacgaaggcttttggaaacaagtctaccaaacaccgaggaggtcgcccttccgcagcaccatctcctgggaggagcaggtgtgatgccgggtctt

SEQ ID NO: 170669 - DNA, 201 bp, Homo sapiens
ctgtccctcggccccagacgactgctgacatgttgtcacatctgattgttcgagggaagcataaatctcaggttttaagtgaaattaactggaaacaaacttttttttttatttttaagtgctggatgagcttccccagtgtgggcctgagaaaatacatctgcctgcccagtgtggccctttaaccctaacaggatgcta

SEQ ID NO: 170670 - DNA, 201 bp, Homo sapiens
gctgcagcaaacctgggactcaacactggagaatttgttttcatcattttgcagcagttggaggtgggtaccgttgaccactcaatggctctggtagtaasaggtagcaagtatggagcactcgttatgacccacatgtattagctcactgagcactcactacaaccctgtgaggtaggcactctcgcgtcctcttcttaa

SEQ ID NO: 170671 - DNA, 201 bp, Homo sapiens
tatagagatatgcttctcctcaagcaaagttctattttaaaaaatcttgatttgaaaacaaattaattaggaggatgtttgtttatatgtttttcattagrattgttcattttccaggcagattctcagagtattcctattaaaatatccagattactttggaattctaatctgttctatttatttaaaaactcagtttac

SEQ ID NO: 170672 - DNA, 201 bp, Homo sapiens
atttgatatatgccaggtcttgagttaccagtggtattttaactgatttaatgctcagaaaacgttatgagattggtgtttttaaaaaaaaaaaaaaaaaacttattttaggtttggtgttatttttaatcccattttacagatgagaaaataaaggcttggagaagttaagaacaactcaaggttgttaaggcagtaagt

SEQ ID NO: 170673 - DNA, 201 bp, Homo sapiens
tgggcaggctggtcttgaactcctgaccttgagtgatccacctgcctcagcctcccagaatgctgggattataggcatgagccgcccagcccctatcccattttttttttttttttttttgagacagagtctcactctgtcgcccaggctggagtgcaatggcatgatctcagctcactgcaacctccacctcctgggttc

SEQ ID NO: 170674 - DNA, 201 bp, Homo sapiens
atggggtcttggcatctgaattgttttttaaatgctcccaagtaattctgctgtgcatctgaagacaaaaccattgcctcaagtccacttttcccttccctatgtgccaagtggggttcaatgactcttcctacctgtccagttaattgaatgccttggattcgtacctttgcatgtatcctgggctctcctgagaccagt

SEQ ID NO: 170675 - DNA, 201 bp, Homo sapiens
actgtgattgcgccgctgcactccagcctttagagaccccgtcaaaaaaaaaaaaaaagggatggggagaaattttgtttttattattaattaattaatctttttttttttttttttttgagacagcgtatggctctgtcgcccaggctggagtgcagtggcgcgatctcggctcactgcaagctctgcctcctgggttca

SEQ ID NO: 170676 - DNA, 201 bp, Homo sapiens
tgaaccctccgcagccgctggcccaggtgctgagcccctcactgcccggggctggcggcgctggccggagctccgagtgcggagcccacccccacccggawctcacgctgtccagcgagcggcacccagccccggttcccgcccgcgattctccctccacacctccctgcaagcagagggagctggttccggcctcgggca

SEQ ID NO: 170677 - DNA, 201 bp, Homo sapiens
ggaaatgtttccgagctagacagaggtggtggttgcacaacatcgtgaatgtgctaaatgccactgaattgttcatttaaaatggttaatttttttttggsggggggatggaatctggatctgttgctcagggtggagggcagtagtgcaacctcgactcactgcaacctctgcctgctgggttctagtgattcttctgcc

SEQ ID NO: 170678 - DNA, 201 bp, Homo sapiens
tagagctagagcaagcagcagcaaaactttagcccaaaaagcaagacaacaaactttccaaaaagaacccaaaagggttatcgctgttagcccacgcagcyttttattcccttatctgaccccacccacatcctgctgattggtccacttaacagagagctgattggtccattttgacagggtgctgattggtgcgtttac

SEQ ID NO: 170679 - DNA, 201 bp, Homo sapiens
gaaatgtttccgagctagacagaggtggtggttgcacaacatcgtgaatgtgctaaatgccactgaattgttcatttaaaatggttaatttttttttggckgggggatggaatctggatctgttgctcagggtggagggcagtagtgcaacctcgactcactgcaacctctgcctgctgggttctagtgattcttctgcct

SEQ ID NO: 170680 - DNA, 201 bp, Homo sapiens
tttctagccatgaaattgaggagataaatatattttaactatattcaaaatccatgataaatgctgttcagttgtccacttacaaaggatattttcgggcttttttttttttttttttgctgggttgtctcttaatggctgatgcctggatctcagcctgagattctgatatcattggttcggggtgctgcctcagtgtca

SEQ ID NO: 170681 - DNA, 201 bp, Homo sapiens
gttagaggtggttatctattgttagcaggggagggggtcacaaggtgtatggtggggagatcataagactcattgtccagaagaagaaagtcacagggtcrattgatcagttggggcagggtaggaacaagtcataatggtagaatgtcataaggtgggttaattagttaaggcaggaactggctgtttcacttctttgtg

SEQ ID NO: 170682 - DNA, 201 bp, Homo sapiens
taacacaaacttaccaaagaatgaatatgatagtgtttttgagttgctgtgtcttgaaataaactgtaatttttcttgaaaatgttagacctcttcagatstcctcttcagagtgattccagctctaaaatctatcacttctatctgattttttcttttcttcttccctgattacagataaatatatagagaggaaagtat

SEQ ID NO: 170683 - DNA, 201 bp, Homo sapiens
aataaataaaaaataaaacccactacttcatttgtgtattctgaaaatgaacggtgatgggattaaacggcagaaaagtaccatggcctactcctccctcyggccagcccaactcagaaagtccaaatgcccttgaaagtccacatgtccaaaggtcctctgtgaactcctcttagctgaagtgtggctgacaagtcacaa

SEQ ID NO: 170684 - DNA, 201 bp, Homo sapiens
acacggacccctgttagctcttcaaatcagacaacactggggctgatggctcagggctggataccttcctttctcctgtgccccaaaggatgaagaggtgkcttttcctgttttgcctggcagtaccctcactccatgcggacatcccattcttttgcagagctctactggactgccccagagctgctgcagttcccggag

SEQ ID NO: 170685 - DNA, 201 bp, Homo sapiens
aactggcggactctggttttcattcttatagttatcatcttaacgtgcagctcagaggatgcaaaaattattcttctggctgcagcaaacctgggactcarcactggagaatttgttttcatcattttgcagcagttggaggtgggtaccgttgaccactcaatggctctggtagtaagaggtagcaagtatggagcactc

SEQ ID NO: 170686 - DNA, 201 bp, Homo sapiens
tcagcctcctgagtagctggtattacaggtgcatgccactgcacccagctaatttttgtatttttagtagagacggggtttcaccatgttggccaggcttrtcttgaactcctcacctcaggtgatccacccacctcagcctcccaaagtgctgggattacaggtgtaagccaccacacccaggcaacttgaggctttttt

SEQ ID NO: 170687 - DNA, 201 bp, Homo sapiens
gccagagggatcctattagaaaatgaggcagattatgtcacttctctatcagaagcctcccctggcttcccatctgaggagtgaaaactaagtcctcctcrtggcctacaagaccactgaaggcgttgaaaccgtgtaacctctgcggccttctggattagtttcctagggggccataacagtgaccacaagcttggtggc

SEQ ID NO: 170688 - DNA, 201 bp, Homo sapiens
gtttgttccttcacatgttcagatgtgtctggagtttcttccttttggtgggtttgtggtctcgctgacttaaggagtgaagttgcagaccttcacggtamatgttacagctcttaaacgcagcgtggctggaattgttcattccttcacgtgggtttgtggtctcgctggcctcaggagtgaaattacagaccttcacag

SEQ ID NO: 170689 - DNA, 201 bp, Homo sapiens
ccatgttggccaggcttatcttgaactcctcacctcaggtgatccacccacctcagcctcccaaagtgctgggattacaggtgtaagccaccacacccagscaacttgaggcttttttctccccttctcttatggaattttaatggaccaaaatgggccagaaaacaaagtaaccatggcaaactaggtctttagtattgt

SEQ ID NO: 170690 - DNA, 201 bp, Homo sapiens
ttgtgtatactgttccctctgccgggacacctctcgcctcatattcctatgtacaaatttgccccattctttcttaagggctacaaaatttttcactgtgrgaatatgccataagtggtaccttgatacacattttggaaattgctgcaatgagcagctctatatctttgcacacatggtgaatgttgtttcaggctagat

SEQ ID NO: 170691 - DNA, 201 bp, Homo sapiens
cctgggaagatttccagttattaggtttaatgttttctgccccacattgcgttagttctggccaaaaatataagctatattagagtcaaatctgttcaatygttaaagctcactgtgcttcaggttgagtcactaggaatcttttgaattactgagtttttcaggatgttttgagaaactcggatcatgaaatggattgga

SEQ ID NO: 170692 - DNA, 201 bp, Homo sapiens
tttgttccttcacatgttcagatgtgtctggagtttcttccttttggtgggtttgtggtctcgctgacttaaggagtgaagttgcagaccttcacggtaartgttacagctcttaaacgcagcgtggctggaattgttcattccttcacgtgggtttgtggtctcgctggcctcaggagtgaaattacagaccttcacagt

SEQ ID NO: 170693 - DNA, 201 bp, Homo sapiens
ccccttctcttatggaattttaatggaccaaaatgggccagaaaacaaagtaaccatggcaaactaggtctttagtattgtcagaacaggcacactccacrtaggaggagatgttttgttctgtgaaatgtcaagctgctatataacaagatttgtctacgtcaaacacagatgaaagtcccagcaacattgacttggcat

SEQ ID NO: 170694 - DNA, 201 bp, Homo sapiens
atccggaatcgttcatcactcccagtgggttcacggtctcggcagcttcaggagtaaagctgcagactttcgcaccatgttatagctcacaaaggtaacayagagctagagcaagcagcagcaaaactttagcccaaaaagcaagacaacaaactttccaaaaagaacccaaaagggttatcgctgttagcccacgcagct

SEQ ID NO: 170695 - DNA, 201 bp, Homo sapiens
tacgcgtgattatcttcattttccaaatgagtaaagtgaggctcagagaaatgaaggaggcagcttagagggctgatgaaaggcaggctctgtcctgtcaygcggctgcaatgccattgtcacttccccgatgtccgttggcaacccttaactaggacacctgaaaggcaagcaatattttcctggaatgtgtagctggaa

SEQ ID NO: 170696 - DNA, 201 bp, Homo sapiens
gtacctgtggcttcacattcaaatattgcttcatttttggttctgtttctatatgttcactctctcaacacttggcagaagtatttgctgttaaaattccygtgcgcttcttgcatgtctagaccaaagaagtgggggcagggatttttaatgagattggttgactgaaatgaaattgatttgtggattggtgaatgatta

SEQ ID NO: 170697 - DNA, 201 bp, Homo sapiens
aggcaagcaatattttcctggaatgtgtagctggaagctctgttccactgaggccctaagggtcttgggagaaaacatcaatgtctggtttcttttaaagycatgtgagcatactggccagtgtgatgagcaagctggaagtgtatgccaattacctggaggaagtggtgcaagagaggaccagccagctgactgcagaga

SEQ ID NO: 170698 - DNA, 201 bp, Homo sapiens
tgtcctagagtgatgcatgtaacaggtcagaaagatcagggttcaaatcctggctctcttattattaactgtctgaccttggcactcagcttcctcatctrtaaaatgcattcccttttgtacttggccttgctgctgagagtgaccaaattacttcctgttttacagccatcccagagagccacacctgtgtcaaaaggc

SEQ ID NO: 170699 - DNA, 201 bp, Homo sapiens
ataataaggtcccaggtgaaacttgggtcaaatccagcaccatgttggatccaattggtcttagctggcttggcccacaccctgttcttttcagggtcttrtcagccctgaaaataatggcttatgcagctatttcagttcctttttgctagtcatgtgtaactgcctggaattttctgttctcctgcagccactcctgtt

SEQ ID NO: 170700 - DNA, 201 bp, Homo sapiens
tggaacttgcatggggtggaggtcagggagtgtgacgcgtccaaacatggggcctcaaggttggggacaaatgaggggccttaatctctgaccccaccccmacccttggcctccctcatggaaaacaaaggtcactctgtcactttgttttcaggttgagaccattggagatgcatacatggtggctagtggactccctac

SEQ ID NO: 170701 - DNA, 201 bp, Homo sapiens
catgcatgccatctcttggagaggaatgcacacccagaattccaagcgcccctcagcatgtcattttcaccctaatggaaggagctctgttaaaatcctakaatataaaatcgttgactgtaaaatatctcatacttggggtaggcatggcactagcaaaggcaggaggaaagcagaaaaaaaccttgtgtgtatcaggga

SEQ ID NO: 170702 - DNA, 201 bp, Homo sapiens
gcaccgaaccacctaacatctgcattgtcacccagtattgcaaaaaaggaagtcttaagataagcaaaacagtaaaatgctccttaggtttgattagtggyagataataaagaagtttctcagtgccctctgctattcatccaaggtcagttcctctctgttctagttgcaagacctgaactatcttgtcaggctaccttc

SEQ ID NO: 170703 - DNA, 201 bp, Homo sapiens
agaccattggagatgcatacatggtggctagtggactccctaccacaatggaagccagcatgtggctgagattgccaccatgtccctgcacttcctcagtkccaccatctgcttccaaattgggcacatgccccaggagaagctccagcttcgtattggcctctacacaggtagacaaaactgatggcctgatggtccagg

SEQ ID NO: 170704 - DNA, 201 bp, Homo sapiens
cgttcatcactcccagtgggttcacggtctcggcagcttcaggagtaaagctgcagactttcgcaccatgttatagctcacaaaggtaacatagagctagrgcaagcagcagcaaaactttagcccaaaaagcaagacaacaaactttccaaaaagaacccaaaagggttatcgctgttagcccacgcagctttttattcc

SEQ ID NO: 170705 - DNA, 201 bp, Homo sapiens
ttctagccatgaaattgaggagataaatatattttaactatattcaaaatccatgataaatgctgttcagttgtccacttacaaaggatattttcgggcttttttttttttttttttgctgggttgtctcttaatggctgatgcctggatctcagcctgagattctgatatcattggttcggggtgctgcctcagtgtcag

SEQ ID NO: 170706 - DNA, 201 bp, Homo sapiens
gttctggccaaaaatataagctatattagagtcaaatctgttcaattgttaaagctcactgtgcttcaggttgagtcactaggaatcttttgaattactgwgtttttcaggatgttttgagaaactcggatcatgaaatggattggatattcaaactctcatttgcatacgacatagtcaatgtaagtataacacaaactt

SEQ ID NO: 170707 - DNA, 201 bp, Homo sapiens
gaagctgcggcatcaccatctagcagccccacataggggggattatttccatgattatttttctaagagaatgtcaggttcttctaaaaggggtcaggcatttttttttgtgcagtttggtacacctgtaaagggagatagaggcaaactctcctgaatccatagaaatagaggctgtagtcggtcttttacgtggagggt

SEQ ID NO: 170708 - DNA, 201 bp, Homo sapiens
gccagcatgtggctgagattgccaccatgtccctgcacttcctcagtgccaccatctgcttccaaattgggcacatgccccaggagaagctccagcttcgkattggcctctacacaggtagacaaaactgatggcctgatggtccagggatggcagcaggtagttccgggttccactcctaggtccagggcttttaggaac

SEQ ID NO: 170709 - DNA, 201 bp, Homo sapiens
gggctggcggcgctggccggagctccgagtgcggagcccacccccacccggaactcacgctgtccagcgagcggcacccagccccggttcccgcccgcgaytctccctccacacctccctgcaagcagagggagctggttccggcctcgggcaacccagaaaggggctcccacagtgcagcggcgggctgaagggctcctg

SEQ ID NO: 170710 - DNA, 201 bp, Homo sapiens
ggttctgtttctatatgttcactctctcaacacttggcagaagtatttgctgttaaaattcccgtgcgcttcttgcatgtctagaccaaagaagtgggggsagggatttttaatgagattggttgactgaaatgaaattgatttgtggattggtgaatgattatattcccttccacaactgcagagtctttacaccctaac

SEQ ID NO: 170711 - DNA, 201 bp, Homo sapiens
gccactgacttattgagtgattttgccaggccacttcccctctctagaccttgacctccacgtaggtagaatgaatgaggctggcccaattgaagtctaasggctttccttcaacaaggattttattgctttttgtttctagggagctgagtcccatatctctgtgagactttgatttcctaggctttagcaggaagccag

SEQ ID NO: 170712 - DNA, 201 bp, Homo sapiens
tggagaatttgttttcatcattttgcagcagttggaggtgggtaccgttgaccactcaatggctctggtagtaagaggtagcaagtatggagcactcgttrtgacccacatgtattagctcactgagcactcactacaaccctgtgaggtaggcactctcgcgtcctcttcttaaaattaggacactaagacagagctgga

SEQ ID NO: 170713 - DNA, 201 bp, Homo sapiens
gcactcgttatgacccacatgtattagctcactgagcactcactacaaccctgtgaggtaggcactctcgcgtcctcttcttaaaattaggacactaagasagagctggaagaacttgcccagagttcttctccacagctagtgaaaggctgaaccaggccatgaactaggtcagctggcttgaaggcctagcccgctgta

SEQ ID NO: 170714 - DNA, 201 bp, Homo sapiens
cgtcctcttcttaaaattaggacactaagacagagctggaagaacttgcccagagttcttctccacagctagtgaaaggctgaaccaggccatgaactagrtcagctggcttgaaggcctagcccgctgtattccgtatcagacaacaacagttgaggaactactgtcatttctaccgggcagctgagaccttcccaaggg

SEQ ID NO: 170715 - DNA, 201 bp, Homo sapiens
tttctgaggccaggtggctgcccgtagatcttagtgtatctctgttctgttctctgcatcgtttctgccaggcagggcattctgaatagaagaacattctsctagcaaaagccaaggtggtcttgtgactccatactagtgcttcccaaaccttaatgtgcagatggatcacctgggactcttattaaaatgcagattctg

SEQ ID NO: 170716 - DNA, 201 bp, Homo sapiens
atcattttgcagcagttggaggtgggtaccgttgaccactcaatggctctggtagtaagaggtagcaagtatggagcactcgttatgacccacatgtattrgctcactgagcactcactacaaccctgtgaggtaggcactctcgcgtcctcttcttaaaattaggacactaagacagagctggaagaacttgcccagagt

SEQ ID NO: 170717 - DNA, 201 bp, Homo sapiens
acattctgctagcaaaagccaaggtggtcttgtgactccatactagtgcttcccaaaccttaatgtgcagatggatcacctgggactcttattaaaatgcrgattctgggtcagtaggtctggtgtggcacctgagattctgcattttaaataatctcctggccgggcatggtggctcacgcctgtaatcccagaacttcg

SEQ ID NO: 170718 - DNA, 201 bp, Homo sapiens
gataaatgctgttcagttgtccacttacaaaggatattttcgggcttttttttttttttttttgctgggttgtctcttaatggctgatgcctggatctcarcctgagattctgatatcattggttcggggtgctgcctcagtgtcagggtttcaaagctcccggggtgattgtaatatgtagcagctcaggctgcttggag

SEQ ID NO: 170719 - DNA, 201 bp, Homo sapiens
catggtggctcacgcctgtaatcccagaacttcgggaggccaaggcgggcggatcacgaggtcaggagatcgagaccatcctggctaacacggtgaaaccycgtctctactaaaaatacaaaaaattagctgggcttggtggtgggtgcctgtagtcccagctacttaggaggctgaggcaggagaatggtgtgaacccgg

SEQ ID NO: 170720 - DNA, 201 bp, Homo sapiens
tgctgattggtccacttaacagagagctgattggtccattttgacagggtgctgattggtgcgtttacacaccttgagctagacagagtgctgattggtgygtttacaatcctttagctagacataaaagttttccaagtgccgacccaactcaggaaccctgctgccttcgcctagtggatgccgcctgcggagctgcct

SEQ ID NO: 170721 - DNA, 201 bp, Homo sapiens
aacaagtctaccaaacaccgaggaggtcgcccttccgcagcaccatctcctgggaggagcaggtgtgatgccgggtcttccagctcaggctccctcctccycttctttgatcatatttgtgtttgcctttgcatttctccctcttatttctcctcatctctccctaccccccttacacacatgcaggtgcacacacacatg

SEQ ID NO: 170722 - DNA, 201 bp, Homo sapiens
aaaagttttccaagtgccgacccaactcaggaaccctgctgccttcgcctagtggatgccgcctgcggagctgcctgccagtcccaagccacgcacccacscttctcagcccttgggcggtcgatgggcggggccctttggggacgctggggctgcgcggaagcccactggtggcgggggggggcggaggggaggcatggc

SEQ ID NO: 170723 - DNA, 201 bp, Homo sapiens
gttcaagtgattctgattctcatgcctcagcctccagagtacctggaattacaggcacccaccaccacgtccagcaaatttttatatttttagtggagatrgggtttcaccatgttgggcaggctggtcttgaactcctgaccttgagtgatccacctgcctcagcctcccagaatgctgggattataggcatgagccgcc

SEQ ID NO: 170724 - DNA, 201 bp, Homo sapiens
tcctgtttcttaaggcatgcccaaggaaagaaaaagttcacgtctcatttacagtgactttaggccagacttagagtgagagcatgcgtgagaaagcacayatacacaagcatgtgcaactggcggactctggttttcattcttatagttatcatcttaacgtgcagctcagaggatgcaaaaattattcttctggctgca

SEQ ID NO: 170725 - DNA, 201 bp, Homo sapiens
ttgcttcctgatgctcatctgtacaggtatccacaggtgggccttcctctggagctgatgatatgtggctgttccgttcaactgaggagaacgagaaaaaraaaaagtatctgcaggtggcatgagttcgtggggtgatgtctgggtttggagactggttctcgtcctagctcagctgagccacctggagcaaccattgcc

SEQ ID NO: 170726 - DNA, 201 bp, Homo sapiens
tttccagagtactttttttttttttgagatggaatctctctctgtcgctcaggctggagtgtgatggcgtgatctcggctcactgcagcctctacctcccrggttcaagcaattctgccttggcctcctgagcagctgggactacaggcatccaccaccatgccaggctaatttttgtatttttagtagagagagggtttc

SEQ ID NO: 170727 - DNA, 201 bp, Homo sapiens
aaatgaacacagagatgggcgcatcccctgccccaggcccctctgtctgtgtttctgtccatctgtctctctgccttggttccttccagcagtgttatcarcacctggtctgcctcatttgctcattttcacccttgcagggcatgctgttcctccacaggagccccctgggctcccacagcaacctgaaaccttccaact

SEQ ID NO: 170728 - DNA, 201 bp, Homo sapiens
gatgggaatggttgcttatgcctgaaatcccagcactttggaggctcaggtaggaggattgcttcagtccaggagtttgagaccagcctgggcaatatagtgagatgctcccgccccaccatctatacttaaaaaagaaaaattagctggtgtggtgacatgaggctgaggtaggaggatcacttgagcctgggaggtcaa

SEQ ID NO: 170729 - DNA, 201 bp, Homo sapiens
cttaacaccactgtgagaaggaattcaaggataaatcagaaagtagtgaaagtatggagatttactgcaaagtgaagagtacacactcaggaaaggggagygcgggcagacttgagagagagtcacgcaatggaatttggggcttctaccttcatgagtttctttaaccaaggggtagaacattcatgaggattcctggaa

SEQ ID NO: 170730 - DNA, 201 bp, Homo sapiens
gcctctgtgatgggggccctggcaccacagacttctgaagatgggttgtagtctcattcttgctttcctggtggggatgagtataggttggggagtgaacygctttcaaatcacattcagctgaccaactgctttgatctttcttgttctcgttttctcagttgtaagatagggataacacctgttaccacatgcagaaat

SEQ ID NO: 170731 - DNA, 201 bp, Homo sapiens
aagaaatagcaaacagcacatcaggccctgtaaagcctctgcaccaagcctctgcaaagggcctgcaaggcctctgcacccagaccaggagggaaggggcygccatgagaacagagattgcaaacttgtgccccagggcctggcagcatggaggcgtggggtgggtggggtcaggggaggaagatgggaggaactggagga

SEQ ID NO: 170732 - DNA, 201 bp, Homo sapiens
agctgctgcagttcccggagatgccctggtcgggtaccccgcaaggagatgtttacagcttcgccattctgatgagggagctgatctaccattgggaccaygggccttttgatgacctccacgaggcaccggatggtaaagcgggacagcctgcttgggaggttttggtcgtgtgggccagctttgaaatgctggtttttt

SEQ ID NO: 170733 - DNA, 201 bp, Homo sapiens
ttcattttccaggcagattctcagagtattcctattaaaatatccagattactttggaattctaatctgttctatttatttaaaaactcagtttacaaatrtaagagcacaattactattgaaaatgaagtgtagtaagtggcacaaagttctgatgtttggctgtctaaacccaacatgaatttcagaaatcatcaacca

SEQ ID NO: 170734 - DNA, 201 bp, Homo sapiens
ggtaatatgcctctaccctccaggcgtgactgctgtgcttctgacattgatgatcctcattcctgtcttgggagctgccatcataggtctgattttaaggmtgcagaggcaaaacaaagacatctggtggcaaatcaattttgatgatatcaccattcttccccagaacaaggtgaggccatatgtgacccagatgtccca

SEQ ID NO: 170735 - DNA, 201 bp, Homo sapiens
cacgagagcattgttcccttctttggtatttgcaccgaaccacctaacatctgcattgtcacccagtattgcaaaaaaggaagtcttaagataagcaaaasagtaaaatgctccttaggtttgattagtggtagataataaagaagtttctcagtgccctctgctattcatccaaggtcagttcctctctgttctagttgc

SEQ ID NO: 170736 - DNA, 201 bp, Homo sapiens
tgatcactaggatgtatttattttaagctggcctggccttcttggcttcacactaaggagctggaaatagttttctccattttgggtgtcccagccccagytgactccagggacaaggggctatgctggtggctcctgaacaaatgaacacagagatgggcgcatcccctgccccaggcccctctgtctgtgtttctgtcc

SEQ ID NO: 170737 - DNA, 201 bp, Homo sapiens
tgccagttaaaggagatcttagtgttaagcagctagctcagtgcctggccatgcacagggccaccgaaggggttgatttgggcagtgaggagcttgatgaytggctcctaggtgcatttctttccagctttttttctcccctccctagccctaagtggagctttttctggttcattctgagttaagaacattccacttttt

SEQ ID NO: 170738 - DNA, 201 bp, Homo sapiens
gaacttgcccagagttcttctccacagctagtgaaaggctgaaccaggccatgaactaggtcagctggcttgaaggcctagcccgctgtattccgtatcasacaacaacagttgaggaactactgtcatttctaccgggcagctgagaccttcccaagggaccctcagacacaagcggctctcacttctttttcttccaca

SEQ ID NO: 170739 - DNA, 201 bp, Homo sapiens
tcggaggttcagagaagctttgaaatactggtctaggtttccctgaagacatttcagagttgactttcaggcttcctgtgttgcttttctttgtaattgtycatgctctgcagtttctgcaaaccatcccggtacctgtcaaggtgtgtcttattggtatgtttaactgaaactggtgttggtgggggtgctacagagaaa

SEQ ID NO: 170740 - DNA, 201 bp, Homo sapiens
aagagaggaaagagggaattttttccttcctgtctttacctgaaatacttactttctcatattgatcactattgaaatggagtcagacaaggccttgcatstcatgctacgcaatcagttttgggtttcagcccagctctaccactgactagctctgacttggacaagttattaaatgcatctgagcctcaagttgcccat

SEQ ID NO: 170741 - DNA, 201 bp, Homo sapiens
ggtttcagcccagctctaccactgactagctctgacttggacaagttattaaatgcatctgagcctcaagttgcccatccgtaaaatgggaataatgttayctacctcacagattttgtgaaattggtatgatgtaggcacatctaaatggttaagcccccagaggccagccatagtagatgctgataaaaataccagttg

SEQ ID NO: 170742 - DNA, 201 bp, Homo sapiens
tgtcctttgtccctgcatccagggtggcccagttgaaatccttcccttcctctaccttggaagtgcctaccatgcatccaagtgcgagttcctcgccaacytgcacatcacagccctgctgaatgtctcccgacggacctccgaggcctgcatgacccacctacactacaaatggatccctgtggaagacagccacacggc

SEQ ID NO: 170743 - DNA, 201 bp, Homo sapiens
ctaaactttaaattgttgccagagaaaatttttatttctttacgtaattcatgtgcagataggagttcaggttttaatctggtggcatctcagatcttggygggggcaatgccttttgacactttccataatcccctgtctcccaaacaaccactaaaatgaaatggtgatgactgaattgcgtggtcagtgcttatttat

SEQ ID NO: 170744 - DNA, 201 bp, Homo sapiens
tggttaagcccccagaggccagccatagtagatgctgataaaaataccagttgttattaccgtatgtaaaatcttgtgtaattttctttcaagtgactgamctggcctttgcttaaacacttgacttctcaggaaacaaaaagctaactccgggtgtggggtaaattgagaattgcctgtggctggcccctgtcccacgca

SEQ ID NO: 170745 - DNA, 201 bp, Homo sapiens
ttaaatgcatctgagcctcaagttgcccatccgtaaaatgggaataatgttacctacctcacagattttgtgaaattggtatgatgtaggcacatctaaakggttaagcccccagaggccagccatagtagatgctgataaaaataccagttgttattaccgtatgtaaaatcttgtgtaattttctttcaagtgactgaa

SEQ ID NO: 170746 - DNA, 201 bp, Homo sapiens
ttgggatttatttatttgtaaatgaacaacagggtgatggtggtggaggtgcagctataggcatgacgatacagaatgttgctttccaactgaggggtttycctaagctaaccggcaagagaattccttagtgcaggcctcatagggaggtggtgagagtatctgcccactcagggcccttcactgccatcgcactaggca

SEQ ID NO: 170747 - DNA, 201 bp, Homo sapiens
ttttgtctgttagttatttctccaggggaaaaggcaataattttctaagacccgtgtgaatgtgaagaaaagcagtatgttactggttgttgttgttgttsttgttttttatagtgtaaaataaaaatagtaaaaggagaaaagcacttcttcatgttgttggtgaattgggataaggtaggaatacccttgggtggggac

SEQ ID NO: 170748 - DNA, 201 bp, Homo sapiens
acccatttcacaagagaagattgagagtgagagagccctcatcagccagtgtggaaaaccagtggtaaatgtcagctacaggccagcttatgaccaggtaygtgatgtgatggggaagaggtatcctgagtggtattctgggctcctgtctcccttccttcctcagcacctgactgttctctccccactcagcaatgatgg

SEQ ID NO: 170749 - DNA, 201 bp, Homo sapiens; identical to SEQ ID NO: 30714

SEQ ID NO: 170750 - DNA, 201 bp, Homo sapiens
actagaaatctggggtgtgggtagcctcccaaaaggatggctctgtaagcgggtctcaccagcaccttcaacaaacccccgtgtgaagaaggtcagaggcrgggaagcccctctgcttgtggcctgacaacattttttatctaaagattctgagtaggtagtggttattttcatttctaaaaagcatacttttttgtggag

SEQ ID NO: 170751 - DNA, 201 bp, Homo sapiens
gaggttccagctagaatcctgcttagagcagatgggctggggaagaagccacttcaggagcctgtcttctcgccaattaatgaaattttgggtaatcacaycttccttttagataaacaagagagaaaatagcctttgttttctggagggatttggttagtatttgccagatgctagacactttctttcacagtttaatct

SEQ ID NO: 170752 - DNA, 201 bp, Homo sapiens; identical to SEQ ID NO: 30715

SEQ ID NO: 170753 - DNA, 201 bp, Homo sapiens
tcaaggattttccagtgccctcttggaaccatcagtggaacctaggttaagatggcatccccaggaagggactgctccaggtccatcgcctccagaggcasaatctgcaagtatcttgggaactgtaaagcttctgtgtgcttatgtctcttgtgacaatagctgctgtaaactgtaaaggtcctacttggggatagtctt

SEQ ID NO: 170754 - DNA, 201 bp, Homo sapiens
acaagagttgcttctccaagtcagtctttgagcctgggatgctctccttagaaaaatgtatgtgcccaataaaaatgtgcacaatttcaaggattttccartgccctcttggaaccatcagtggaacctaggttaagatggcatccccaggaagggactgctccaggtccatcgcctccagaggcacaatctgcaagtatc

SEQ ID NO: 170755 - DNA, 201 bp, Homo sapiens
ctaccttggaagtgcctaccatgcatccaagtgcgagttcctcgccaacctgcacatcacagccctgctgaatgtctcccgacggacctccgaggcctgcrtgacccacctacactacaaatggatccctgtggaagacagccacacggctgacattagctcccactttcaagaagcaatagacttcattggtaggtttag

SEQ ID NO: 170756 - DNA, 201 bp, Homo sapiens
taccttggaagtgcctaccatgcatccaagtgcgagttcctcgccaacctgcacatcacagccctgctgaatgtctcccgacggacctccgaggcctgcaygacccacctacactacaaatggatccctgtggaagacagccacacggctgacattagctcccactttcaagaagcaatagacttcattggtaggtttagc

SEQ ID NO: 170757 - DNA, 201 bp, Homo sapiens
aggcaataattttctaagacccgtgtgaatgtgaagaaaagcagtatgttactggttgttgttgttgttcttgttttttatagtgtaaaataaaaatagtraaaggagaaaagcacttcttcatgttgttggtgaattgggataaggtaggaatacccttgggtggggacccagcctgcttcattgggatttatttatttg

SEQ ID NO: 170758 - DNA, 201 bp, Homo sapiens
ttttgtttgtttttgtagggggatatgagactttctactcggaatatcctgagtgttgcgtggatgtaaaacccatttcacaagagaagattgagagtgasagagccctcatcagccagtgtggaaaaccagtggtaaatgtcagctacaggccagcttatgaccaggtacgtgatgtgatggggaagaggtatcctgagt

SEQ ID NO: 170759 - DNA, 201 bp, Homo sapiens
gagagttggagccaacatgggatgcagctaccaaaaaggtggaagggaggatttaagttgctatgaataggagctttaatttgcaagataaatgaattaayataattttatggcagtactcactgtcgatcttgttattgtttctagctgggcaggagctgagtgtatccctgcgtaatgctccacacaaggaaagcaggg

SEQ ID NO: 170760 - DNA, 201 bp, Homo sapiens
aggaggctgaggtaggaagatcgcttgaggccaggagttgaagaccattctgggcaacatagcaagaactcatctctaccaaaaaaattataaaattagcyaggcatggtggtacatgcctgtaggcccagctactcgggagactgagacggtaggatctcttcagcgtaggaattcaagattacagtgagctatgattgt

SEQ ID NO: 170761 - DNA, 201 bp, Homo sapiens
ctttttttttctttttgtctgttagttatttctccaggggaaaaggcaataattttctaagacccgtgtgaatgtgaagaaaagcagtatgttactggttrttgttgttgttcttgttttttatagtgtaaaataaaaatagtaaaaggagaaaagcacttcttcatgttgttggtgaattgggataaggtaggaataccc

SEQ ID NO: 170762 - DNA, 201 bp, Homo sapiens
gggaaaagaagtgttctgtgacaagtgagatgattgattttgcagagtcctacagctggttcaaggcagcatcaggctcagaacccctttctctcagctcyctgttgtgattatttcaggaccttgttctgttttccacatggcctctaatctagacacctgacctggtgggagtaacctttcaaacttttcacataaacc

SEQ ID NO: 170763 - DNA, 201 bp, Homo sapiens
gtggatcagggtgttggcaaaatcccctggctttagggagcttctgttgcttgccagcttgagcttccatccaagagtaaatgggcttccttccagcaaaygagctgacaagagcaaaccagccacaggatgcttggcagcttctggggaaaaggggaagtgaaagatacattattgtcatctggcttcggaggttcagag

SEQ ID NO: 170764 - DNA, 201 bp, Homo sapiens
ttgttttaatgttgattttatatctcatgaccttactgaatttgttaatcagttctaatagttttttggtggagtatttaggtttttccaaatataagatmatggaatgtgcaaacaagtataattggacttcttcctttccaatttggatgccttgtgtttctttctcttgtctgatggctctagctgggacttccagtt

SEQ ID NO: 170765 - DNA, 201 bp, Homo sapiens
tataaggtggttatagaaaatgaatgtaaaatcacttcattaagtgtaacaaaacaaaataatatgaggaattgttatactgtttaagcatttgaaaaackataaaggagtatagaaattttgttaccactactatgattagtttctcatttggtttttcactttaagaattggaataaaagttgaaatcttgattaaaaa

SEQ ID NO: 170766 - DNA, 201 bp, Homo sapiens
aaagacctacactaaggaaaacagctgttccgggggtgtcccagtcacctcgattgtgctcagcttcccttttcttacacaaggaaacaccacatatttaytaaatgggtcgccagcacttaaatagattctggatttttataagtaggtttcaattttagaacacaataattttcatttaatagaaaagaggcacagaca

SEQ ID NO: 170767 - DNA, 201 bp, Homo sapiens
ttatgtcaagggcggctcgatggtgtggatgaaagaactattgggaatggctactgaaagatcaaaggcaagtggaacctcaaaattctggaagtagaacragtcagatacaatataagaagtacttcaaaggcaagaaaataagaataataaaaatacctttagttgtcaaatgtaaaatttgtgccagttttgtcacat

SEQ ID NO: 170768 - DNA, 201 bp, Homo sapiens
ttctgtctgctcagtcttacccctttcaccctggtgttggcctccatcagctgtgtctggattctgacagtctctcctgtttgtcccctccagtcttgcaygctgctcacagattagccaggatgcagcaatgtcagcgtcacagcaaataacagctacattttcacgctgttttcctcattttctcaagataaaagccaa

SEQ ID NO: 170769 - DNA, 201 bp, Homo sapiens
ggtgttatgtcaagggcggctcgatggtgtggatgaaagaactattgggaatggctactgaaagatcaaaggcaagtggaacctcaaaattctggaagtakaacgagtcagatacaatataagaagtacttcaaaggcaagaaaataagaataataaaaatacctttagttgtcaaatgtaaaatttgtgccagttttgtc

SEQ ID NO: 170770 - DNA, 201 bp, Homo sapiens
gagaattcaaacaatgaaactttagtcatttattaaatatttattatttatacactgttggatttacttattttccaaagtttcctaaagcacacattcayagaatattagtttaattaggaaatataataagaatgtaaagacactaattaaaattagtatagacacgatgaaggtaatttgaaatgcttaagtaattcc

SEQ ID NO: 170771 - DNA, 201 bp, Homo sapiens
ttgatttaatatggtaatgcacaattccaactaacgtacattcaacagatcatgaaattgggttattaaaatgaatatttttgtcattaaataaaaattcygtccaaatgaagaaaacaaataaccatgaaaatagtaacaaaaacacttctgaatctgcataagaactatatttccttatttttaaagaaggtctaacac

SEQ ID NO: 170772 - DNA, 201 bp, Homo sapiens
ttttgatagatattgcattgaatctgtagatagttttgagtagtatggacattttaataatactgagtctttcaattcatgaacatggaatagctttccaktttttatgtcctcttcaatttcttgcatcaatgtttcatagttttcattgtagagatctttcacttctttggttaagtttattcctaggtatttatgttg

SEQ ID NO: 170773 - DNA, 201 bp, Homo sapiens
ctttaagaggacaagtcgggtgtatcatttgaggtcaggagtttgagaccagcctggccaatatggtgaaaccccgtctctactaaaaatacaaaaaaatrttagccaggtgtggtggcatgcacctgtaatcccagttacttgggagactgaggcagtagaatcacttgaacctgggaagccgaggttgcagtgagccaa

SEQ ID NO: 170774 - DNA, 201 bp, Homo sapiens
ctagaggtagttactatcctattactgtacttagttggctatgctggcatgtcattatgggtaaaagtttgatggatttatttgtgagttatttggttatraaaatctagagattgaagtttttcattagaaaataacacacataacaagtctatgatcattttgcatttctgtaatcacagaatagttctgcaatatttc

SEQ ID NO: 170775 - DNA, 201 bp, Homo sapiens
acagaaatggggagtggctgcaaataagaacaggctttcattttgtgatggtgaaaatgttctataattagatattggtgatggttgtactatttagtgartgtaatatgaataccaaattgtacattttaaactggtgaactttatggtatgtaaaatgtgtatctcttatttccaacaaatgaattttatttttaattt

SEQ ID NO: 170776 - DNA, 201 bp, Homo sapiens
taatacccatttatcttataaagaaaataaagaaataataaaagcatttgctaaccatgttagatgctatagtaaatgtaaaaataaagggtctgttaatmtattaactgagcttaatatatgatgtgatataacagcagccttcaaatatgcggagggctataacagagatcatgatgaacagacttttattctggctta

SEQ ID NO: 170777 - DNA, 201 bp, Homo sapiens
aaagcatttattatacttcacctctcagaggcatttaacgctattgacaacttccttcttttcaaaaccctgtcctcccctaattttcatgaaacatgaarctaccttctagttctcttatttatctcagccatctggctcctctttctctattcccttgttacctattggtgttggtatgtattccattctagaactttg

SEQ ID NO: 170778 - DNA, 201 bp, Homo sapiens
taatgtgtcatgagatagaagtttcaggaagttacttaaattaatgttgaattcttgtgacccatgtttcaaatttaatccaatggcaaaggtcatccctytctgaagagctcctttagttactgaggtgaatttaggagtctgagataattctggaagaagccagtataatattttatctgcctctgtactcctttatct

SEQ ID NO: 170779 - DNA, 201 bp, Homo sapiens
tcaggtcttgcatgtgcaaaggggagccggaagaggagaaatctattatacatgcaacactgaactggagaacacggcttggggcctctgggacagttcargtccctgagctgccccctacttcccagacagctgctcctgcagtttgggcacatagtcgtcccactcagcctggtaacgctttctggccactggggccac

SEQ ID NO: 170780 - DNA, 201 bp, Homo sapiens
catggaaaatggttaccaactagagctgcagggtatcagggaatgtgacaaggcagcaaaatgtttctacacatgtctgttttttcaggcattatctttcwtgagactatcaagtgtgtatttaaggagccattcaacttacttcagtgcatttgcttgcaaagggtgcaatgtgatgtttcctactggtagggtcgtatt

SEQ ID NO: 170781 - DNA, 201 bp, Homo sapiens
cctaaatttgtccccactcaagagatttgttctgaaagttgtcaatcattaatttgtaagaaaaaagttttttttttaacataattcctgatcttaatttygattactctaagcaaatttttttatcaatatgaagaaaatattttacaggatatctcatttactcaaaacggtcattggtaagggggaaattatttttcc

SEQ ID NO: 170782 - DNA, 201 bp, Homo sapiens
atgtttaaaaagagaatatgggtaaggaagcatctttctcagttgttcttaacccttgtttccatcataatcaccatcagagctttaagaaaataccagtrcacagatcacgttaccccacaaacctactaaatcagattttccagcgctggagcccagaaatagtcacctttaatctaattcccagtcaggattaataca

SEQ ID NO: 170783 - DNA, 201 bp, Homo sapiens
ggcttgtcgctgcccagagtgcttactccataaatacttaataatttaatatgatttgttagatttattgtctgtggaccatatagcagatttctagcataaaaaaagtgcaattctcttatttttattgtgcactttattattatcatgcattgctaagaaaggaaagccatacatatctgttttagctgacccttattt

SEQ ID NO: 170784 - DNA, 201 bp, Homo sapiens
aatcagtaataaacacctgagcagaacaggaaaatccatctcaaggagttaaggtggacttggaaagtgtcaatgaaatattttatctcaaaattggtacygattgcaccttggaacgcagtagaatttactcactcagaccccatgaaaccctgaatgtggccctcagttcagaatgaatgaataccaggcattcccaac

SEQ ID NO: 170785 - DNA, 201 bp, Homo sapiens
ataagacaaggaacactttgggtcattttaggagcctattgcaataagaacttcttccctaaaaatgttcactgcaatccacctatatattcacattcatstatcccatccatttttatatatgccggcagtataaatacccctttaaaggagataaaattatttctattttatatatgaggaaactcaagtttggataat

SEQ ID NO: 170786 - DNA, 201 bp, Homo sapiens
ttttccattaattaacaggattgactacagcaaagatgcccagtgttccactttcaagtgaccccttacctactcacaccactgcattctcacccgcaagcacctttgaaagagaaaatgacttctcagagaccacaacttctcttagtccagacaatacttccacccaagtatccccggactctttggataatgctagtg

SEQ ID NO: 170787 - DNA, 201 bp, Homo sapiens
ccagttggttaaactactggatgcttcatcagaaagcacccactaagcatcactcaccatgaagttcgttgggtactctatacaatgaacaaaggagataycacataatttttaaaaaacttaaaagattcacaggtgagaattttgtagtaacaattaagtattaactattagaaaaatttaagaagttttaacaaaatg

SEQ ID NO: 170788 - DNA, 201 bp, Homo sapiens
taggaatatacagcatggaaaatggttaccaactagagctgcagggtatcagggaatgtgacaaggcagcaaaatgtttctacacatgtctgttttttcargcattatctttcttgagactatcaagtgtgtatttaaggagccattcaacttacttcagtgcatttgcttgcaaagggtgcaatgtgatgtttcctactg

SEQ ID NO: 170789 - DNA, 201 bp, Homo sapiens
ctcccattttccattaattaacaggattgactacagcaaagatgcccagtgttccactttcaagtgaccccttacctactcacaccactgcattctcaccsgcaagcacctttgaaagagaaaatgacttctcagagaccacaacttctcttagtccagacaatacttccacccaagtatccccggactctttggataatg

SEQ ID NO: 170790 - DNA, 201 bp, Homo sapiens
atattaggattattttttctatttgtaaagaacattattggtattttgatagatattgcattgaatctgtagatagttttgagtagtatggacattttaayaatactgagtctttcaattcatgaacatggaatagctttccattttttatgtcctcttcaatttcttgcatcaatgtttcatagttttcattgtagagat

SEQ ID NO: 170791 - DNA, 201 bp, Homo sapiens
tggtgttatgtcaagggcggctcgatggtgtggatgaaagaactattgggaatggctactgaaagatcaaaggcaagtggaacctcaaaattctggaagtrgaacgagtcagatacaatataagaagtacttcaaaggcaagaaaataagaataataaaaatacctttagttgtcaaatgtaaaatttgtgccagttttgt

SEQ ID NO: 170792 - DNA, 201 bp, Homo sapiens
acacaaaagttgttaacttaaatatcagggaatgtcatttagaaaattctacagttatcagtacaacttgtctttaaattatttgcacagtttctaagtawgtgattttattcaagtgcagaaattgcaggaaattagtatctgtgaaatatagatcgactgaagtaattaatgcatgttgttagggagtggagagagaaa

SEQ ID NO: 170793 - DNA, 201 bp, Homo sapiens
ttgaaataaaagattttcccttttctaagaataaaagatggtgttatgtcaagggcggctcgatggtgtggatgaaagaactattgggaatggctactgaragatcaaaggcaagtggaacctcaaaattctggaagtagaacgagtcagatacaatataagaagtacttcaaaggcaagaaaataagaataataaaaata

SEQ ID NO: 170794 - DNA, 201 bp, Homo sapiens
cagttatcagtacaacttgtctttaaattatttgcacagtttctaagtatgtgattttattcaagtgcagaaattgcaggaaattagtatctgtgaaatayagatcgactgaagtaattaatgcatgttgttagggagtggagagagaaaagaagggaagcaagatctccaaggacaatcaggaggggaaatttgttctag

SEQ ID NO: 170795 - DNA, 201 bp, Homo sapiens
gtaggtctcaactggagacataaacataggagtcattgcattcagatggagcttaaagctaagggactgcatgtgacagtgtaaataaacatgtagagagkagcagatgactggtttctgagccttgggaaacttcatatttggaagagacacaaggaggagctaggaaaagatagtgagaagaggtagccagtgaaaaaa

SEQ ID NO: 170796 - DNA, 201 bp, Homo sapiens
atgtaaaaatctggtatgtaataaatattttaaaagagtaattgtgacgcttattagaatccaagtatggaaagccgtgaatgaaagggaaatgaatagtytgaggaagattgcatatcatcaactaagaattatatcaaggaatgaatagttttccctcaatttatacaatgtttagtttaaataacttgaaataaatct

SEQ ID NO: 170797 - DNA, 201 bp, Homo sapiens
gtggttcttctcacagtaggacaggaagataggtgtccaactattgcatatgtggacaattacattgtcctcctaattttagtcctgtgcctcatcccttycctgtactgagcctgactttattctcagtctctcactgctttcatttaattttccttttgtcttctcctccctggtagtattttttcaagaagatatttt

SEQ ID NO: 170798 - DNA, 201 bp, Homo sapiens
caggctggagtacagtggcaccatcacatctcactacagcctcaacacacactcatgggcgtagcctcccaagtagctgggactataggtgtgcaccaccytacccggataatttttgtattttaagtagagacgaggttttgcatgtttcccagactggattgcttggttcaagcgatccagctgcctctccctcccaaa

SEQ ID NO: 170799 - DNA, 201 bp, Homo sapiens
gatgggaaagagccaaattagggggtcagaaatccagagttatgtttgggctgttattgatgtctgattttcattaggtggtagagaggtcaagaaatccrttggagataagaggctgaggcccattcagtaggtctcaactggagacataaacataggagtcattgcattcagatggagcttaaagctaagggactgcat

SEQ ID NO: 170800 - DNA, 201 bp, Homo sapiens
actgatgtaatgatctcactttcctaccttaggtgtttcatcagtacagacgcctcaccttcccacgcacgcagactcgcagacgccctctgctggaactsacacgcagacattcagcggctccgccgccaatgcaaaactcaaccctaccccaggcagcaatgctatctcaggtttgcgggtcctttagacttgtgcaaa

SEQ ID NO: 170801 - DNA, 201 bp, Homo sapiens
acaatactagtgagcatacagaatttaaaacactcattatctcactgtctactgatcgtattttgtacatgtaacttcataatatacacatttatatgcayttaacacgtattatcaacattctgagtacacagttttcaaaatacagttttaaaactgtatttttaatatatcactatatcacacacacctttctatgtt

SEQ ID NO: 170802 - DNA, 201 bp, Homo sapiens
aatgttgggtgaataaaaatgaacatgggcccatgtagccgctggggccagtttggtgtaatcttgggagcatagttctaagtttagaattagacttctgyagaagtaatgcaattaaaaaaaaaaagaagaagaaagaaatgtgctatgactagttcactcatgaaatgttcaaatgagatgctatttaagagaacaaat

SEQ ID NO: 170803 - DNA, 201 bp, Homo sapiens
tacagacccagtttccccattgacaaccaccctcagccttgcacaccacagctctgctgccttacctgcacgcacctccaacaccaccatcacagcgaacrcctcaggtctgactatgctgctctagtagtgtcttcagttatagataatgaaatggaaactcaaaactttaatgtagctcttttattttgtgccagatat

SEQ ID NO: 170804 - DNA, 201 bp, Homo sapiens
aattaagagaagtggctgcatggaaaagacaaagacattttagagaatgactttttttccccatgagcactgggatgggaaagagccaaattagggggtcrgaaatccagagttatgtttgggctgttattgatgtctgattttcattaggtggtagagaggtcaagaaatccgttggagataagaggctgaggcccattc

SEQ ID NO: 170805 - DNA, 201 bp, Homo sapiens
acaatattgtatactgctctttctagagttactaacattaccaattgatctgagcctatggaggaaggagacctagtactctactttgggctttctctacyggttaacattgtaaatagaattatttaagcctgtatgtactttgttgtcagcaacttctaggtctttctatctttgccacttctagttcttcctctctta

SEQ ID NO: 170806 - DNA, 201 bp, Homo sapiens
tactgaatttgtttattaatgataatattgagaaatttttgacaaaacttataaatgtaattctaaattttgttttgttttgattttgagacggagtctcrctctgttgcccaggctggagtgcagtggcgtgatctcggctcactgcaacctctgactcctgggttcaagcaattctcctgcctcggcctcccaagtagc

SEQ ID NO: 170807 - DNA, 201 bp, Homo sapiens
ctgattatgaagctgcataggtttccagttgtctgcccctaaatgcatctttcccataagccctggtatttttggtacagttctgtagaatgcatgtgtcrtggtatagcagaagtgcttgaagatttgtttctctgccttatctttagtaattgtgtttatgttggctatctggctattgcccttgcgtgacagacacaa

SEQ ID NO: 170808 - DNA, 201 bp, Homo sapiens
ctgataaaagtaacttgaagaaactttagtgcaaatgttggattcagacaatcgctacttttaaagtacttaaagaagtcagtctttgaaatcttgcccgkattccattccagtttcatcattggagacttccaatgatgaaaaattggggaagaattaccttccaaagcctcagtttcctcgtgtgtaaaatggaaataa

SEQ ID NO: 170809 - DNA, 201 bp, Homo sapiens
ctcttcatgttcttataattatttgagaatcataggaaatgaattgtctttttgctgtttttgatactttttaagcatatgctttttatttcaatgaagckcaatttatctatttttacttcttttgcttatgtttttggtgtcgtatatgaaagtccattgccaagtcatgcagatttatccatatgttttgttctaaaa

SEQ ID NO: 170810 - DNA, 201 bp, Homo sapiens
ataaatttatatttgttgtaaagatatttttatcagtcagcagaaattgttgacactaaacaaaggtgctttggaggtatattatcaatcataattttacscaagttaaggaaagaatgagggcttctgatccctgagtaattaatgccccacatatatcaagaaacaggtggttaataactacgttttagaaaacaagaa

SEQ ID NO: 170811 - DNA, 201 bp, Homo sapiens
ccaagtatccccggactctttggataatgctagtgcttttaataccacaggttggcacacaaaagttgttaacttaaatatcagggaatgtcatttagaarattctacagttatcagtacaacttgtctttaaattatttgcacagtttctaagtatgtgattttattcaagtgcagaaattgcaggaaattagtatctgt

SEQ ID NO: 170812 - DNA, 201 bp, Homo sapiens
cattttcaattctaatggaatgtatgtgtgaaattatagactgtactgcatttgtaattggtagacacctgcaagctcaaatcaaagccatgttcagaacrtgcatgcatgtatcactgcagaaatacagactctgcctgcaaatgtgagactaatctcacatcattgaactgatgaccccagggatcttgacagaaaata

SEQ ID NO: 170813 - DNA, 201 bp, Homo sapiens
ctgtttaacaatgccatttatcttcgtttgaaaaacaagcatatataataccatcacagaaattttgtttagggtacatcaaagtattttgagtaccttamtgatgaagtttattggatatagtaagcagttaaataaatggtcagtgccttcctacagcaagtacaagactgtgtatttaatcttccatttgtttccctg

SEQ ID NO: 170814 - DNA, 201 bp, Homo sapiens
cagagccaatgtttgatctgaacaacttgattctaggatcattttggctgggaattttctgagagctgtgtgtgtgtgtgtgtgtgtgtgtgtgtgtgtgwgagtgtgtgtgtataaacatgagaccatattagtatatacacaaatgtcaatatatattttaaactggaatgttttaatagagtggcttatatgatagaa

SEQ ID NO: 170815 - DNA, 201 bp, Homo sapiens
gacatagagttgggaatgatagacactgggaaatacaagagcgatgatggagggaggaagacaagggttgggaaactacctatattgggaactgtgcctayttgctgggcgtcgaattcaattttactgcaaacctcagcatcctgcaatatacctttgtaacaaacttgcacatataaccctggaatccaaaataaaagt

SEQ ID NO: 170816 - DNA, 201 bp, Homo sapiens
tagtttttcctccaacgtaaggatctcatatcacgctttcattctgaactaaccattccctctctgcagttgatgtaactgtgccatgtgaccattgtacmcatgtgggagggaggagctgaattacgcctgacccctggccagagcaagagctactggccaaaggggagattgagcatctgtgttgtacttcccacgtct

SEQ ID NO: 170817 - DNA, 201 bp, Homo sapiens
tacagtgcttgctccttggctcttctcctaaagctgttatcatcagatctgtttgatttctcctttgcacttactcatgcttaaaagaatccagcaattayttatcaatcacttcttatacacaagactctttgctacagctatttctctttcttctcctcctcttcctcatcttattatgtgattcatgctgatgttgat

SEQ ID NO: 170818 - DNA, 201 bp, Homo sapiens
atttctggcatttctgattattgtgacatcaatagccctgcttgttgttctctacaaaatctatgatctacataagaaaagatcctggtaagagttgattwtaaatttttaaataataatggtattagtaatggtgcaaacgcatatccatatggcagtgatggaaccagttaaatgaaatatgtgaactagagagaagac

SEQ ID NO: 170819 - DNA, 201 bp, Homo sapiens
cataaagtgaaaaacattaaataattcaccaaagtatctagatttttttttgtttttgaagtgcaagggaagtaacttgacctttgttaaacactttgatmatggaaaacacataaggttctcatcttattccaggaagtgtagacactagataatcttttcatagtcatccaaaaagcatattaagtgaaccaggtaaat

SEQ ID NO: 170820 - DNA, 201 bp, Homo sapiens
tggcatttctgattattgtgacatcaatagccctgcttgttgttctctacaaaatctatgatctacataagaaaagatcctggtaagagttgattttaaawttttaaataataatggtattagtaatggtgcaaacgcatatccatatggcagtgatggaaccagttaaatgaaatatgtgaactagagagaagacagcat

SEQ ID NO: 170821 - DNA, 201 bp, Homo sapiens
ccatacccaccattaccaggataatctttgtaaaaggcagaacttacctttgtccattcctcttttaaaagctcctattggtagaaaatatactgaacccrtgatttgataccaagtatgttttggctcaacttttatgaaaacaaatatttaattagaatataccaacatttatgagttttccttaaagataaattttgg

SEQ ID NO: 170822 - DNA, 201 bp, Homo sapiens
ttccacagatgtttcaatctgataaatattaaatagagaattataaatgtgaaattagaaaataaatgtgtgcgtgaaatattgcatcgatatattcattygaaatatttctttatttcaggtaatatgatatttgataataaagaaattaaattagaaaaccttgaacccgaacatgagtataagtgtgactcagaaata

SEQ ID NO: 170823 - DNA, 201 bp, Homo sapiens
acaaataaattctatggtgcttaactctatagtatttaaagattcaatatttatttcctctaaaaatgagtcaagtgtctgaaaggaaaaagccacctaamtgaaacttcagtttctactatacagggtatttattataaaactgtaattacaatgcaattatattgaagtataaatgatcatcattcatttatttaagaa

SEQ ID NO: 170824 - DNA, 201 bp, Homo sapiens
ttttagtatggttttattggtttgaattaaacattaatattattttctaaatttactaataatgttgtggacttgtttaataataaccagtgaaaagaatrtgtgtggtttttagtacaaagtgggtcagagggatctaggagtgtcaaaagaaaaagaaaggagggagatgtctggggaagttaatgtgtttctttggtc

SEQ ID NO: 170825 - DNA, 201 bp, Homo sapiens
ttactttgttaaaggaatttactctaaaacaaattaaatgagcccagatgcatttctttaaattttattttgaattcatcatttgtcaaaatatggttatmaataatgcatgcttataatatgaagaatgctttatccatgtcttatttttcatattacataacattcttattcttttaacaggtccaggagagcctcaga

SEQ ID NO: 170826 - DNA, 201 bp, Homo sapiens
tatcaaggaatgaatagttttccctcaatttatacaatgtttagtttaaataacttgaaataaatctttgattcactttattattttaaaaacaagcgaaygtcaaatcaaacgaggactcctagagcaaagatgccaataggaaattatctttgctaaagagtttttctttcaccttttaatataacgaattaattagct

SEQ ID NO: 170827 - DNA, 201 bp, Homo sapiens
tagttttccctcaatttatacaatgtttagtttaaataacttgaaataaatctttgattcactttattattttaaaaacaagcgaatgtcaaatcaaacgmggactcctagagcaaagatgccaataggaaattatctttgctaaagagtttttctttcaccttttaatataacgaattaattagcttttattcttctatt

SEQ ID NO: 170828 - DNA, 201 bp, Homo sapiens
ttcaaatcttgcttttaattattaatacgagggtgagtggtattgtttattaagtaattttagtctgactgcacctcagttaagtcatctgtaaaatggaracaatgataatacctcacagacttataaccacaaaagtaatacaaataaagcacttaaacaagtccctggcccatgctatgcatttggtgattgtaagtg

SEQ ID NO: 170829 - DNA, 201 bp, Homo sapiens
tttgagaatcataggaaatgaattgtctttttgctgtttttgatactttttaagcatatgctttttatttcaatgaagcgcaatttatctatttttacttmttttgcttatgtttttggtgtcgtatatgaaagtccattgccaagtcatgcagatttatccatatgttttgttctaaaaattttatagcattggctctta

SEQ ID NO: 170830 - DNA, 201 bp, Homo sapiens
ctgaaatccaaaatattcacttactagagcagaaaaaaattagctgtgcatttatgctgatcacagtgtagataattaatctttaagaaagtaggtttttmtgtttatagttgataaagtgttagtggcaagaactttttctgttattgaatattatcatcagattactcgtgctttccattttattcctttaaaaaaatc

SEQ ID NO: 170831 - DNA, 201 bp, Homo sapiens
gattgatatatgtatactagtaatcactggtatggattgacaatttcagtgaaaggaatttcagatagagataagacaaggaacactttgggtcattttargagcctattgcaataagaacttcttccctaaaaatgttcactgcaatccacctatatattcacattcatgtatcccatccatttttatatatgccggcag

SEQ ID NO: 170832 - DNA, 201 bp, Homo sapiens
tttgcaactgtgtaaggcagtcatttccagtaagaattgctagaacaaacattaagcatttcacagtgaaaagggtcataggtatattttcatcctttgcrtatagaagaaatagcaatctattattctcagtttttgacttaaaaggtattgttgcttccctttctttccctcccctactcaagtttttgcccatggatc

SEQ ID NO: 170833 - DNA, 201 bp, Homo sapiens
acttgatcaggatgaatgatctttttaaagtgttgttgaattcagtttgctagtattttgttgaggatttttgcatcagtattcatcagggatattgaccrgtagttttcttttttttgatgtgtctttgtctggttttggtatcagagtaatactggccttgcagaatgagtttggaagaattcctttctcttccatttt

SEQ ID NO: 170834 - DNA, 201 bp, Homo sapiens
ccacaaacccagatgataaatccagttgacccatgttaatgcaccatgtttatcctgcatgtgaatccccatattatttgacttcaaccatttccttctcraaacaccctctactctttattcttgtttgctacagttttcctcttacttggaaaatttgattacctatgctggctctctccttaatattcactgaacttc

SEQ ID NO: 170835 - DNA, 201 bp, Homo sapiens
aaagcacagataattacgaaaaaaatgatatggaggcacctaatgtgttttttctttttcatgttttttggggatatttggttagttgatttgatattttkgcatttgcattaatgtagttttatttattctggaaaaataacactcaatgttctattttcttttagatgaaaaatatgcaaacatcactgtggattactt

SEQ ID NO: 170836 - DNA, 201 bp, Homo sapiens
gtctatctgtatctttatttacaactgttcaaagatattacaaaagcaacattattacttaacttccaaagtgacaataacacacatttataaaagcctgkgaattttttaatgataaaataagtgagtttttattcttttaacaaatttgatcttttaaaaagtcataaaacagctttggttgtatgtaagccactccct

SEQ ID NO: 170837 - DNA, 201 bp, Homo sapiens
tgatgtggactgtaattgtgctcatgaaagacacaatgtatacatacctccttgagacggaatgataaggataacgtagaatgtttaccatgatttatcartctctcctatataagaaaaatatttcttgtcctgaagtggtaactttggtgaagtcttttgcttgctcttttacagactaattaacaagttttctatgcc

SEQ ID NO: 170838 - DNA, 201 bp, Homo sapiens
tatatgtgttttatgggttataagcttatccagggcaagggtcatgcttttatcatgtttgaacctagtctccaacagcataccagcaaaacaatgtatgwttcttgaacctaagtgaactaaattaacttgtttcaagttccaaggaatgaggtgcttgcatgagaaggggcatatcaacctaattttagatatgtaaga

SEQ ID NO: 170839 - DNA, 201 bp, Homo sapiens
attgtacacaagttgaaaaagcagatactactatttgtttaaaatggaaaaatattgaaacctttacttgtgatacacagaatattacctacagatttcartgtggtaagaatataacattgaccagagaatttttttttgtggcacaatgttgttctagatattatttaatcttactctctgccctttctctcttcctcc

SEQ ID NO: 170840 - DNA, 201 bp, Homo sapiens
gcaacattcctgcctctgtaaactagacacagcagcacatttacccaacctgctctgactgtgacaaccagaaatgtctccaggcattgccaaatgtcaamtgagggcaaaattgcctaccctagccaccttaactgaaaactacaaacttcattgaaataatttctttatggctcccagcagtaacactgtgctattcta

SEQ ID NO: 170841 - DNA, 201 bp, Homo sapiens
cttactaaactctatgtatttctactttccaatgacccatgttcttattttctgaatttacttattgatgctttaggtatgataaaggtatgtaatggctraggaaacataaatgaagcataagacatcagttgagagttttgacggaaaggaagtggtgatatgaaggaaacagataaaccaaagaaaaaggaaaaggtc

SEQ ID NO: 170842 - DNA, 201 bp, Homo sapiens
tatttatggtaaaaatttctacataatagaaaatttggaaaatgtcaagaaatagaaggaaaaagaaattgcttagagcccatgctaacattttgtttttyttcctctatcttttgatcacatgctgtgtatgaaatttcatgttcaattttttcccaagtaaaccttgattattctagacaatttgaaaaatatagaaat

SEQ ID NO: 170843 - DNA, 201 bp, Homo sapiens
ctttaccaggctctcttgcagcaactggtgagctcatgtaggctatcactgggtctctgcttatttgccagtgcctgcaggtcctcagtacctgtttgctraacaaacgaatggtctgtcagcttaacccaactctgtatgtagaaggcacttaataattcttaaaaacaattttgattctgtccttttattgttatttat

SEQ ID NO: 170844 - DNA, 201 bp, Homo sapiens
aaaaagcaaggtatgaactttttagcctacaatatttctatctttattctagcaagcacatttacctggcacatttgttaacatctagggcttataaacaygtaaaatctaaaagtttaaaaaccgttatcctggattctctctcttcttcagatatagtcatagaattttaaggacaaagcataaaagcatcttaattgg

SEQ ID NO: 170845 - DNA, 201 bp, Homo sapiens
tttgcattctttatttcagagatttttcaggcttctccagattctacagtctaaatagtttgtaaatccacacacttctactttgccagggatttcttagkgtaaaaatatcctgaagtctcacctgccttcaatccttactgtgtccatacccaccattaccaggataatctttgtaaaaggcagaacttacctttgtcc

SEQ ID NO: 170846 - DNA, 201 bp, Homo sapiens
atgtgccaagagttgaagaacagcttggcccttccaagaattgaggaagctggtttggtagaagtattgagggacccagtaaggtgtaaggctggagaaayagtcaggggcgtatcaataaagactttttatgctattttgaggaggtttgttgtcctcttatagtgatggaaagctgttcatcttcagaagagcatcttc

SEQ ID NO: 170847 - DNA, 201 bp, Homo sapiens
ccattcatagtaccttcaattgattgatttcttaacagacaatcagcaaaattatcagtttttattagagattttagtagagaccgagcttaaacaaatawattctatggtgcttaactctatagtatttaaagattcaatatttatttcctctaaaaatgagtcaagtgtctgaaaggaaaaagccacctaactgaaact

SEQ ID NO: 170848 - DNA, 201 bp, Homo sapiens
ggttttaattggtggaaagaaaaaaaaaagggtgaagtgactgttgggagaagatgattaagataaatgggagttcacagatgacagacgatgggcatcakagggcagggaggaaggcactgatgggttagatgtaagagactgggttgtatctgaggatacaaataaccattcaggaataaaaatctggggaatgtggat

SEQ ID NO: 170849 - DNA, 201 bp, Homo sapiens
aataatatgatggggtctagaaacctttatatcaactttgctgaatgatttataccatagcaaataaatggatatacataaatttattttgaaaactcaastttatcttcagttgctcacataaatattgagagcaaacatttttctaaaagacatttgtagactccctgagatatatgcttatttgtggaaaaacatata

SEQ ID NO: 170850 - DNA, 201 bp, Homo sapiens
tactttgaaactgcccagagaaattcacaatcacaaaatgatggatctgaagcaattcctctaactcacaatttttcctgttaatgagtaattgaatgttyagcaaatgacatatctctgcatgtgttttcaatagggtttcaaagaacccaggaaatacattgctgcacaaggtaatttctttgataatccaatattctt

SEQ ID NO: 170851 - DNA, 201 bp, Homo sapiens
caatacttgcacaaacaatgaggtgcataaccttacagaatgtaaaaatgcgtctgtttccatatctcataattcatgtactgctcctgataagacattamtattagatgtgccaccaggtaaatatcaatttatttcttttaataaatttataaaaacagtacacttttgtgtgtggtgttctccagtggtcacaggagc

SEQ ID NO: 170852 - DNA, 201 bp, Homo sapiens
gcacagactagggagcatgtctggcaacatgttggcaaataattaaattggcacattcaggataaaatgagaacatggaaaaacagaatatgattctcttyccagccctggaaagacatcccaagtgtacgtattgtttatattatgttattagtatatctttaccagcaaagggcaggtcatcatcattcaatatgctca

SEQ ID NO: 170853 - DNA, 201 bp, Homo sapiens
tatttgctatcctctcaccagtgacaattaaccagtatagaaatatagatgtttctacattgttcatatacttgaacatatatttctttatgtagatactmacacataaactagttatatatttgtgggttatatatactagtcaatctatctatctgatctatctatctatctatctatctatctatctatcagttctcc

SEQ ID NO: 170854 - DNA, 201 bp, Homo sapiens
tgatttcagatcccaaaagggcatggctgaatgtttagcctttcagagttggggaatccatttcttcctgtggaaggattagtctttaggtgaatagataygtatcgaagggaaattaagagagcataagaaaaccccactttacctgccatctatccatggaagcagcaataagaccacctgagagctatggtacaatta

SEQ ID NO: 170855 - DNA, 201 bp, Homo sapiens
tctcaccagtgacaattaaccagtatagaaatatagatgtttctacattgttcatatacttgaacatatatttctttatgtagatactcacacataaactagttatatatttgtgggttatatatactagtcaatctatctatctgatctatctatctatctatctatctatctatctatcagttctccatgtttgtctat

SEQ ID NO: 170856 - DNA, 201 bp, Homo sapiens
caacctattgcaccatttggtagcgcctgtgtgcttaaccgcatgagctgcgcctcttcctttcctataaagactcagaataagaaaaacagaagtacacsgaagagaagaaaccacaagagcagtaaagacactgctgttagcttttagctgtgcaaacagcagtcttatgagaacaacacattgaaaacctcttctatt

SEQ ID NO: 170857 - DNA, 201 bp, Homo sapiens
cattgttcatatacttgaacatatatttctttatgtagatactcacacataaactagttatatatttgtgggttatatatactagtcaatctatctatctgatctatctatctatctatctatctatctatctatcagttctccatgtttgtctatttggcgttcccatgaacttcagaccttcgcctgtgttctcttttc

SEQ ID NO: 170858 - DNA, 201 bp, Homo sapiens
atgcaaaggtaatgctctgttgaaccattttgtagcttatgttttgttttgatacatattttaaaatattgtttaagacaatacttgaacagattgggattgtgtgtgtgtgtgtgtgtgtgtgtgtgtgtattggttaaataactggtttatttttaaactgaaattaaaccttccatttctttgagaaatttaaaaagt

SEQ ID NO: 170859 - DNA, 201 bp, Homo sapiens
tgcaaaggtaatgctctgttgaaccattttgtagcttatgttttgttttgatacatattttaaaatattgtttaagacaatacttgaacagattgggattgtgtgtgtgtgtgtgtgtgtgtgtgtgtgtattggttaaataactggtttatttttaaactgaaattaaaccttccatttctttgagaaatttaaaaagta

SEQ ID NO: 170860 - DNA, 201 bp, Homo sapiens
ttgggacaagttttgaatcctaactctattactaattcctcttcactagactgagattctggtatgtggtattcaataagtgacttgacttctttaagccttggtttctttttcagtgagatttacagcttagactagtttctgaatcttgaccctgtggacaatctagttggagaactgagatgacctgggcattgtagg

SEQ ID NO: 170861 - DNA, 201 bp, Homo sapiens
gagctatgaaggcacaatggaagcttgcctggcaatcagtgccagaacagacagctagtctgatgaattctgctacacatcacagggctactagttttttkttttttgttttttttttttttgtcatacattactgcaagttccctgaggaagtttactgatctgtagttttacgagaaatgcacgtcatggaggtggcgt

SEQ ID NO: 170862 - DNA, 201 bp, Homo sapiens
gaaggcacaatggaagcttgcctggcaatcagtgccagaacagacagctagtctgatgaattctgctacacatcacagggctactagttttttgttttttkttttttttttttttgtcatacattactgcaagttccctgaggaagtttactgatctgtagttttacgagaaatgcacgtcatggaggtggcgtgggggag

SEQ ID NO: 170863 - DNA, 201 bp, Homo sapiens
ttttggagaagttagtaaaaccgaatctgacatcatcacctagcagttcatgcagctagcaagtggtttgttcttagggtaacagaggaggaaattgttcytcgtctgataagacaacagtggagagtatgcatttatttatttacttttacatttttgattcgtttttacagagaaaaacttctacagagataacaatta

SEQ ID NO: 170864 - DNA, 201 bp, Homo sapiens
tttctgtatcttcttgtcaggggttgaaaagtttcagttacatgattgtacacaagttgaaaaagcagatactactatttgtttaaaatggaaaaatattraaacctttacttgtgatacacagaatattacctacagatttcagtgtggtaagaatataacattgaccagagaatttttttttgtggcacaatgttgttc

SEQ ID NO: 170865 - DNA, 201 bp, Homo sapiens; identical to SEQ ID NO: 30739

SEQ ID NO: 170866 - DNA, 201 bp, Homo sapiens; identical to SEQ ID NO: 30738

SEQ ID NO: 170867 - DNA, 201 bp, Homo sapiens
gcttcttggagatggtgttttaaatcttccaaaatcttcatcagcaccccaaaacttcctcctcaaagtaacaacataccttgctacagataattattggkgttatcaatgttttataaattataaatttaaaaatcactatcttaagatctatatataacatattaagtaaaacttatattcttacaagacttcctccag

SEQ ID NO: 170868 - DNA, 201 bp, Homo sapiens
aatcaatatattaatataaatagcacatattgtatgaaaaacaaccagatattataaaacaaagatttaataggaatagtgtcacttttttgcatttttasaaatcttttaaatgtctgtctgaataatagatagctggattctcatatatgctttaatattctctatctgttgtaatattatataccatatagtttctgg

SEQ ID NO: 170869 - DNA, 201 bp, Homo sapiens
cctgcacaattgcactgcaggcaagactgaacttatgaccaccacttctgtgtaattttgaatttcttagacctgaaccctgctgagtacacctgcttccytctattccttgctgaagttcattcttttcagtgcgttaatggagccaaaccaagctggtggtggtaacaatttgaataataatagtctttaactttttat

SEQ ID NO: 170870 - DNA, 201 bp, Homo sapiens
aaaaatccaggtatcctaatctggagggttaccctttggatctgaatgggattggagtcagtacaaggggtggggagtgtttttagaacatcccggcagcmtttttttttttttttttttttttttgagacggagtctcgctctgtcgcccaggctggagtgcagtggtgcaatcgcggctcactgcaagctccgcctccc

SEQ ID NO: 170871 - DNA, 201 bp, Homo sapiens
tattttcatcctttgcatatagaagaaatagcaatctattattctcagtttttgacttaaaaggtattgttgcttccctttctttccctcccctactcaaktttttgcccatggatccagatacctacaagggcctaatacagggaaagtgcactgtgtatgagctatgaaggcacaatggaagcttgcctggcaatcagt

SEQ ID NO: 170872 - DNA, 201 bp, Homo sapiens
cttaaacataaacctaatttttagcataattgtggaatataaagaggttttgtctatgtgggttatatatatttattgtaaaataaactagatagaatttwaaaatatttaattatttattaaataataataaatcaatatattaatataaatagcacatattgtatgaaaaacaaccagatattataaaacaaagattta

SEQ ID NO: 170873 - DNA, 201 bp, Homo sapiens
tgattttaaagatttgtgataaaacaagacaccattgatgaaatacatagaaaaaggaagacaaaatagcttgggacacattaataacttacacaaaaaawtttaaaaattaaatcttctaatagatttgatatataatataccccagaaatatttacattatattttcaaagtctagagcatttcttccatagactccaa

SEQ ID NO: 170874 - DNA, 201 bp, Homo sapiens
ctctgtatatccaagagttcagttattttaaattttggctcccacaaataagtaacaacatatgaagtttgtatttctgtgtctggcttatttcacttaaygtaagtcctccaggtccatccatgttgttgcaaatgactagatcttacccctttttatggctgaataatacttcattgtatatatgtactacattttgtt

SEQ ID NO: 170875 - DNA, 201 bp, Homo sapiens
gaaaataacagctgcatgttacattccccacccacaattctgtttgccaggcaaccacttttaaccatttctatttttgggtctccttatagtttccttcatatatatatatatatatataaacaatattgtatactgctctttctagagttactaacattaccaattgatctgagcctatggaggaaggagacctagtac

SEQ ID NO: 170876 - DNA, 201 bp, Homo sapiens
tttgaaatgtataataaattattgttgaatagtcaccctgttgtgctatcaaatacaaggtcttattcattttatctaattatatttttgtacacattaaycatcaccatttccacccctgccatacccttccaatcctttggtaaccatcattctactctgtatatccaagagttcagttattttaaattttggctccca

SEQ ID NO: 170877 - DNA, 201 bp, Homo sapiens
acataacaaaatggcaggagtaagtctttatttatcagtaataacattgaatatcagtagactaaactctctaaacaaaatacatagagtggctgaatagatattaataaaacaagacccaacaatctgttgcttacaagaaacattcttcacctgtaaagacacaaatagacttaaaataagagatggaaaattatattc

SEQ ID NO: 170878 - DNA, 201 bp, Homo sapiens
atttgacccagcaaaatcacatatatgcatatacccaagagaagcatcaactagaaacatttgcaagaatgtgcattgcattcagcattgtcaaaatagcaaaaaaaaaaaaaaaaaaaaagtgaaatacatatcaatgaaagaatggaaacaccgtaaatatgtatcaataggggaataggaagacaaaatgtggacatg

SEQ ID NO: 170879 - DNA, 201 bp, Homo sapiens
cataacaaaatggcaggagtaagtctttatttatcagtaataacattgaatatcagtagactaaactctctaaacaaaatacatagagtggctgaatagatattaataaaacaagacccaacaatctgttgcttacaagaaacattcttcacctgtaaagacacaaatagacttaaaataagagatggaaaattatattct

SEQ ID NO: 170880 - DNA, 201 bp, Homo sapiens
agagatgctcagatgaaaacaatgagtgagtaaagctgccatacgaaacattcaagatataatttatgtgatttaaaaaaaacatgaaaatgtacaatgcktgtgattacagatacatagatagcagtgtagaaacataaaaacaaattgttaaccaggtaaaaagaaattatttacagtggaaaataaagtacagtggaa

SEQ ID NO: 170881 - DNA, 201 bp, Homo sapiens
gttcggactgtctgaggaaatcgacagtgtgtgtttaatgaccaaaccaacatggctttgaagaatatatatatatttttttttttgctttttttttttcrttgcccaggctggagttcaatggcatgatctcagctcactgcaacctacgcttcccaggttcaaggaattctcctgcctcggacttccgagtagctggga

SEQ ID NO: 170882 - DNA, 201 bp, Homo sapiens
gagggggccagtgctcattttgaggacacgatagttcggactgtctgaggaaatcgacagtgtgtgtttaatgaccaaaccaacatggctttgaagaatayatatatatttttttttttgctttttttttttcgttgcccaggctggagttcaatggcatgatctcagctcactgcaacctacgcttcccaggttcaagga

SEQ ID NO: 170883 - DNA, 201 bp, Homo sapiens
ccccaggtgggatttcttgtgtaggccccatgcagtggagggacagagggggccagtgctcattttgaggacacgatagttcggactgtctgaggaaatcsacagtgtgtgtttaatgaccaaaccaacatggctttgaagaatatatatatatttttttttttgctttttttttttcgttgcccaggctggagttcaatg

SEQ ID NO: 170884 - DNA, 201 bp, Homo sapiens
actatttcaaatctagcactttcctcgtgtgtgcctgtgagcaatttactaaactcttttaggtcccagtttcattccctataaaaaaggataaataatgytaactcattggcttactgggatgcttaaaagaaaaaaaatacatatatattatataaagaggtgtgcatagtgtctgctacataacatttcagtaaactg

SEQ ID NO: 170885 - DNA, 201 bp, Homo sapiens
tttttgtcaaagttgtcaaagtcaagaagtcattattgagaccctgagggtaaggcaggagccaagtgagaacaagcagatgtcaaagatggtgaaaaacyagaacagccaggtcccccaggcatatacagagaagttttgcaatggcaggtccccgtggttgtctgacccagacttccaccttgaggtaactggggtaac

SEQ ID NO: 170886 - DNA, 201 bp, Homo sapiens
aactggggtaactataacgatattttcatcctgatctcttcatgcagttatatgtttccaagaacagataaactgtgaacttaatacaagtgtctcctttmcttggattctcaccatctgggtggtaaacatgacagaaacattcaagtatgttcaatgtagtacatggtaacaaatgctttagcacagactagggagcat

SEQ ID NO: 170887 - DNA, 201 bp, Homo sapiens
ttgtttaaaatggaaaaatattgaaacctttacttgtgatacacagaatattacctacagatttcagtgtggtaagaatataacattgaccagagaatttwtttttgtggcacaatgttgttctagatattatttaatcttactctctgccctttctctcttcctccctgcctctcttgttctccctctgtttgtcttttt

SEQ ID NO: 170888 - DNA, 201 bp, Homo sapiens
gcctaagagttcaagaccggcctgggcaacatggcaaatcccatctctacaaaaaatacaaaaattagctgggtatagtgcctgtggtcccagctacttgrgaggctgaggtgaaaagattgtttgagtcgaggaaatggacgctgcagtgagccatggtcacaccactgcactccagcattctagcctgggcaacagagc

SEQ ID NO: 170889 - DNA, 201 bp, Homo sapiens
tagtctaataattgtttaagatctagaaaaaaaaaatcaagaatagtggtatttttcatgaagtaataaaaactcgttttggtgaattctgtaatagcttmtcatgaaggtcaaacacaacctttagattggtttggttttctatatctttactcttttgtctgattttatatgtcttaactatacagcaccgattattgt

SEQ ID NO: 170890 - DNA, 201 bp, Homo sapiens
acaggtccaggagagcctcagattattttttgtagaagtgaagctgcacatcaaggagtaattacctggaatccccctcaaagatcatttcataattttaycctctgttatataaaagagacaggtaatttgtgtagaatttaatttcatcagaaaagagaaatcaagaatttgaaagtactagaaatttttattgagcca

SEQ ID NO: 170891 - DNA, 201 bp, Homo sapiens
taatacttactgaataaatgagtgatttattcttcagggttttgatattgttttttaatttatgtactatcataacttccttatttataacccccaagctracacttaaaatactttatactatatccaagtattgtcaagtaatttacatatgcatctattaaattattaataacaaatctttcttcattttgatagctc

SEQ ID NO: 170892 - DNA, 201 bp, Homo sapiens
cagggttttgatattgttttttaatttatgtactatcataacttccttatttataacccccaagctaacacttaaaatactttatactatatccaagtatygtcaagtaatttacatatgcatctattaaattattaataacaaatctttcttcattttgatagctccaagccaggtctggaacatgactgtctccatgac

SEQ ID NO: 170893 - DNA, 201 bp, Homo sapiens
aatataaagcccagaagagatctgaagtacaagattgaaaagtcattgatttataggtaaatgtttgtatgtgagtgagatttctcagatgaaatgtgtaygaggaggaaagaagctaaaggattgagtacacggtgtaaatttaatgaaatgtgtatgcccacctgaaagacacatgtaactagtattgaatctttaata

SEQ ID NO: 170894 - DNA, 201 bp, Homo sapiens
gagaaattcacaatcacaaaatgatggatctgaagcaattcctctaactcacaatttttcctgttaatgagtaattgaatgttcagcaaatgacatatctytgcatgtgttttcaatagggtttcaaagaacccaggaaatacattgctgcacaaggtaatttctttgataatccaatattctttttgaaaaatttttata

SEQ ID NO: 170895 - DNA, 201 bp, Homo sapiens
agtttgataaaaaattggcttaaattaaaaattaaaatacttaataattttttaaaatgtagaacaagtgtgcagaatactggccgtcaatggaagagggyactcgggcttttggagatgttgttgtaaagatcaaccagcacaaaagatgtccagattacatcattcagaaattgaacattgtaaatgtgagtttgcttt

SEQ ID NO: 170896 - DNA, 201 bp, Homo sapiens
ctcgtttgttcttttttcccctttccttttctcttctctattttctttcctattcttttagcttttctacttttacatgataattcacattaaattattadaagtctaaataagagcctaaagtttactagcactttgttgtgacagttcatgaagagcctttccctaaatgctcatgaatttcttaattttctttccttc

SEQ ID NO: 170897 - DNA, 201 bp, Homo sapiens
aactggtttatttttaaactgaaattaaaccttccatttctttgagaaatttaaaaagtagttgttatcaatgtggcagatattaggtagaatctaatatygtgaaaattaaactgcacataaatagatataaatccttttgtcagtgtgtgtatatctctgtgtgtaattttgatctcaggcttggcaggtttccttaaa

SEQ ID NO: 170898 - DNA, 201 bp, Homo sapiens
cacatactattttatagtaattacttgcatattttgtagaaaaggcagctgtgttttctacaaatatttcacaaatgttagtattgctctatgccaaggarcagaagacaaatttgtggaaaagatacatgtggcccctccccaggtgggatttcttgtgtaggccccatgcagtggagggacagagggggccagtgctca

SEQ ID NO: 170899 - DNA, 201 bp, Homo sapiens
cagtttctaagtatgtgattttattcaagtgcagaaattgcaggaaattagtatctgtgaaatatagatcgactgaagtaattaatgcatgttgttagggrgtggagagagaaaagaagggaagcaagatctccaaggacaatcaggaggggaaatttgttctagtatcctctgatctatacacactcgccatgattctcc

SEQ ID NO: 170900 - DNA, 201 bp, Homo sapiens
agagaatgtgtcttctattaaataataacaaataagaataccttttattttgtgatggtctttactatttactgagagacaagtattgttcaagttgccgkttttttttaattagctgacatatttcctgcttttatttgagttagaattcctgtaccaaacattttaaaaagagaaaaaaaattaaagaaagagaaaagg

SEQ ID NO: 170901 - DNA, 201 bp, Homo sapiens
agacgaggttttgcatgtttcccagactggattgcttggttcaagcgatccagctgcctctccctcccaaagttctgggattacaggtgtgaaccattgcrcctggccacaaccaatctcatcaggtcttttttttctatcagtgaagattcagcacagtggcttctatctatgattttggtaatgtttaataatgtttgc

SEQ ID NO: 170902 - DNA, 201 bp, Homo sapiens
ctcactttataatgaaaggagatttaaaattagggattatatggtacacgaaaaatttatatacacagattacaagtactagtttttttagtgaagaaaakacaactatatattttctctttttatctgttgtcctattttacaattgtagcaattaatctgccaaactctttaatcaataaaatatggtatttaacaacc

SEQ ID NO: 170903 - DNA, 201 bp, Homo sapiens
aatataaaatggtgctgataattctaattacatagtttatagaaaagatacatgaccaagcttgaagcaagaatgattgataaggaattaggtaggttctktataaggaaaggtgatttcagatcccaaaagggcatggctgaatgtttagcctttcagagttggggaatccatttcttcctgtggaaggattagtcttta

SEQ ID NO: 170904 - DNA, 201 bp, Homo sapiens
tcctttcatgtactgtgtggtccaccatactacctaatctgctatatactcacaaaactatttacttcttttgaaaaaaatgtattattagatttaaatawatgtatttatatttcccttcactttttaaagttttcactttatttttatactatgttttaagcttccctaatatcccactgctgaatcccaccgacatgg

SEQ ID NO: 170905 - DNA, 201 bp, Homo sapiens
gcgagagagggcatccttgtcttgtggcggttttcaatgggaatacttccagcttttactcatttagtatgatggtagctgtgggtttatcatatgtggcrctcattattttgaggtatgtttcttcaatacctagattatcaagagatttcaacatgaatggatgttgaatttgatcaaaaatcttttctgcagctattg

SEQ ID NO: 170906 - DNA, 201 bp, Homo sapiens
ttacactgtaaaactatatatgtttcttagaatatgatttatgtacaataactaaagtgtcctgctgataacatattgtttaaattgaatctttatgatartgctttatacttctcattgtttggtaaactatttgattgccctctttttagtgaataattctactaggtattacttttctactgatgcagaagtgaaaac

SEQ ID NO: 170907 - DNA, 201 bp, Homo sapiens
ggaagagggcactcgggcttttggagatgttgttgtaaagatcaaccagcacaaaagatgtccagattacatcattcagaaattgaacattgtaaatgtgrgtttgctttttacataatttttgttttgatacttttttataaaaatataattatggaatattaaaagtgagaaaataaaatatatcaggaaaaattattt

SEQ ID NO: 170908 - DNA, 201 bp, Homo sapiens
gagagtgagcatgattcagatgaatcctctgatgatgacagtgattcagaggaaccaagcaaatacatcaatgcatcttttataatggtaggtacttaaaytgccaaaacccaagatccaaacattttaaaataatatctatgttattagggccattcattaagcgattttataaaagaataatgagcttggtcataacta

SEQ ID NO: 170909 - DNA, 201 bp, Homo sapiens; identical to SEQ ID NO: 30728

SEQ ID NO: 170910 - DNA, 201 bp, Homo sapiens
attcacatatttattttgtccttctcccattttccattaattaacaggattgactacagcaaagatgcccagtgttccactttcaagtgaccccttacctrctcacaccactgcattctcacccgcaagcacctttgaaagagaaaatgacttctcagagaccacaacttctcttagtccagacaatacttccacccaagt

SEQ ID NO: 170911 - DNA, 201 bp, Homo sapiens
tttcacacttagtaccaatttcttattcattattggagcaaaaagtaaagagaagaatcaaggtgataagtttaaaatcttctcaatgtaaaatagtgtgyggggaaagtgtcaaatcatcctactttggtctttgtgcatttaggaaaaataaaagcaattagcattgcacacacatatgtaattgaatctcttcagatt

SEQ ID NO: 170912 - DNA, 201 bp, Homo sapiens
cacattgtgatttaatctgcatatctatttttagggtcaaggttattttagcatttgtagcactactagtaatttacttgcagccaaattatgattaagaygcatttttacttagctcatgagtttttaataaacaccttctgtaaaagaattctcatgcttaaaatttcatatgaagaggaaaggctgtaaggacaagtt

SEQ ID NO: 170913 - DNA, 201 bp, Homo sapiens
aagttgaaatcttgattaaaaaaacaagaaatgattcacaaattattttacaaattgaaatactgaaatacagaatgttcaaccactgtcaacatgaactyctattctgtaattaatctattctataaacatctgtatttgctaaagagcaacagatcaaggaaaagaaaaaataatccttgccatccatagagccatgat

SEQ ID NO: 170914 - DNA, 201 bp, Homo sapiens
cgaaaattcttatgagcaaatgttgacgatataaaaatcatgcacctgccagtgaggcagtgagaatatactgttctagtgtgtactcagctagccatacrttttagcatatttgtgggtccagtatactaacaattcttgttcttcaagtttaggaaatagattcctttgaagcatatgccttggaagcccttggaaggg

SEQ ID NO: 170915 - DNA, 201 bp, Homo sapiens
agtggtggacgaactactgacgaaagaaaaatgcatttgtatctctgacagttctcccattcgccagtgatacctataatggctcttattttattgtcaakgggtgcttagatgagaaggtttcaagactgttccctaattctatgttaatgtcttcctccgaaaattcttatgagcaaatgttgacgatataaaaatcat

SEQ ID NO: 170916 - DNA, 201 bp, Homo sapiens
tttgtttctggttgcaccattcagggatagtggtggacgaactactgacgaaagaaaaatgcatttgtatctctgacagttctcccattcgccagtgatayctataatggctcttattttattgtcaatgggtgcttagatgagaaggtttcaagactgttccctaattctatgttaatgtcttcctccgaaaattcttat

SEQ ID NO: 170917 - DNA, 201 bp, Homo sapiens
ttttgtttctggttgcaccattcagggatagtggtggacgaactactgacgaaagaaaaatgcatttgtatctctgacagttctcccattcgccagtgatrcctataatggctcttattttattgtcaatgggtgcttagatgagaaggtttcaagactgttccctaattctatgttaatgtcttcctccgaaaattctta

SEQ ID NO: 170918 - DNA, 201 bp, Homo sapiens
tgaaactttcttccttgtgtgcttacttattattttttttcctgaacttttttctttcataatccttcctgatgattaagcctgaaacaaaagttttcttycagttttgcattctttacagttatttcctcatacttgtggttttcttgtcaacaacttccccaactataccataaaggactttgcccaatcctgttgctg

SEQ ID NO: 170919 - DNA, 201 bp, Homo sapiens
attgcttgtacccgggaggcggaggttgcagtgagccgagatcatgccattgcactccagcctgggcaacaagagcgaaactctgtctcaaaaaaaaaaaagaaagaaagaaagaaaagaaaagtgaaagaaaaagaaaggggccagcacacaggaaagagtgtgacagccacgagggcagggtgtaggatgggaatactt

SEQ ID NO: 170920 - DNA, 201 bp, Homo sapiens
ggcatggtggcacatgcctgtaatcccagctacttgggaggctgaggtaggagaattgcttgtacccgggaggcggaggttgcagtgagccgagatcatgycattgcactccagcctgggcaacaagagcgaaactctgtctcaaaaaaaaaaaagaaagaaagaaagaaaagaaaagtgaaagaaaaagaaaggggccag

SEQ ID NO: 170921 - DNA, 201 bp, Homo sapiens
aaattagctgggcatggtggcacatgcctgtaatcccagctacttgggaggctgaggtaggagaattgcttgtacccgggaggcggaggttgcagtgagcygagatcatgccattgcactccagcctgggcaacaagagcgaaactctgtctcaaaaaaaaaaaagaaagaaagaaagaaaagaaaagtgaaagaaaaaga

SEQ ID NO: 170922 - DNA, 201 bp, Homo sapiens
agtgcctcacgcctgtaatcccagcactttgagaggccgaggcagccggatcacctgaggttgggagttcgagatcagcctgaccaacatgcagaaacccyctctctactaaaaatacaaaaaaattagctgggcatggtggcacatgcctgtaatcccagctacttgggaggctgaggtaggagaattgcttgtacccgg

SEQ ID NO: 170923 - DNA, 201 bp, Homo sapiens
atgtttatacaacacgggaaaatggtagagagtacaaaggctttagatctgatagaccttaggtcaaatgctggctctgtaacccacctgctgtgtggtcytagagaagccactttaacccttgtaacctcggttttctcacctccaagtggagtaagaccacttccctcatagaactgttgtgaaatgacacataaagca

SEQ ID NO: 170924 - DNA, 201 bp, Homo sapiens
atatttccctagagcccgctggtatgattactacacggtaagtttttctgaatgtttatacaacacgggaaaatggtagagagtacaaaggctttagatcygatagaccttaggtcaaatgctggctctgtaacccacctgctgtgtggtcttagagaagccactttaacccttgtaacctcggttttctcacctccaagt

SEQ ID NO: 170925 - DNA, 201 bp, Homo sapiens
tctttacttctgttgttgattaggcttctgattaaaatatcaattaattgtacctccctcaaatatatatatatatatatatatatatatatatatatatwtatatatatatatttttttttttttttttttttttttttgagacagagtctcactctgttgcccaggctggagtgcagtggcatgatcttggctcattca

SEQ ID NO: 170926 - DNA, 201 bp, Homo sapiens
tgcatatttccctagagcccgctggtatgattactacacggtaagtttttctgaatgtttatacaacacgggaaaatggtagagagtacaaaggctttagrtctgatagaccttaggtcaaatgctggctctgtaacccacctgctgtgtggtcttagagaagccactttaacccttgtaacctcggttttctcacctcca

SEQ ID NO: 170927 - DNA, 201 bp, Homo sapiens
tcttatgtagcagttttgttatatggacccaggtcacaaaagaaggatttcagcaagagaattgagggacgagggccatcctcacatttaaaatgtgccayggttaagaaatgaggtaatattttacaggagagaacacatctacatcccagcatttctgaagtttgaggcacatcccatggggaaagcagaggctgggtg

SEQ ID NO: 170928 - DNA, 201 bp, Homo sapiens
tactggggaccagagacaaaagctctgcacgcgctttacccagctgggcatgtgcaagtgactagactcattgcacaaattttttgaatttgtctagaaarcacttacgagtggtcatgccaccaaagggttctcacagctaggcttcttagttttttaggcttatgtgaattccatcacaggaattttttggtgtcatca

SEQ ID NO: 170929 - DNA, 201 bp, Homo sapiens
gctttggtgactctttccggtctattaagaatattctctgggcctcatgtatagttttcttttgtttagctgtgagtgatcttcaattggagtatgctttyagtgaccttcttaaatcccctagaaattccagggcgagctcccaacactgttctctttctcctttagagacaagaccctgtgtcctgggatgctgctttt

SEQ ID NO: 170930 - DNA, 201 bp, Homo sapiens
tttaaaatataatcatttgttaattcaagggtataatccatattggacatgatctttattcctcatgtaaatgaagctcagttctgaatcacctcccattrtgcaacctttgtaatccactatagaaggtagcaatatgggagccatggggaaagtttatttgtagccagcggagataaactttcataggatttatggtca

SEQ ID NO: 170931 - DNA, 201 bp, Homo sapiens
tctatttgcaagccaggaattccttccatctgacatcacgttaacttccatcaaggatcccggcttcatgtgggaatcagaggttcacattctgtaccttkgattactaggcttaatagcccaattttaaccttgctgtgggaatttgccacatggagattctaggttttgcttactaagcaccctttgagttctagctca

SEQ ID NO: 170932 - DNA, 201 bp, Homo sapiens
ttctacctccactgttttatgtcacttgaaagacagtctccatttctgtgctaaaagtaatgcagtctctatttcctgggatatctttaaaaaaaggtgtktttttttgttttgttttgttttgtttttttttttgaaacagggatttactctgttggccaggctgaatcgtgcagtgtcccaatcatggctgactgcagc

SEQ ID NO: 170933 - DNA, 201 bp, Homo sapiens
cttctacctccactgttttatgtcacttgaaagacagtctccatttctgtgctaaaagtaatgcagtctctatttcctgggatatctttaaaaaaaggtgkttttttttgttttgttttgttttgtttttttttttgaaacagggatttactctgttggccaggctgaatcgtgcagtgtcccaatcatggctgactgcag

SEQ ID NO: 170934 - DNA, 201 bp, Homo sapiens
aactggtatgtgaaaagatgctcagcatcagtaaatgacacaggtatgcaagtcaaaaatcacagcgagatgtcacctcacacctgttagcatggaaatcmtaaaaaagaaaggagagaagtgctggtgagggtgtggagaaaatagaattttttagactgttggtgggactgtaaattgttacaaccattatggaaaata

SEQ ID NO: 170935 - DNA, 201 bp, Homo sapiens
agaaaccacaataccattgggaccagggtaggacagtggcttctacctccactgttttatgtcacttgaaagacagtctccatttctgtgctaaaagtaaygcagtctctatttcctgggatatctttaaaaaaaggtgtttttttttgttttgttttgttttgtttttttttttgaaacagggatttactctgttggcca

SEQ ID NO: 170936 - DNA, 201 bp, Homo sapiens
gaaatcatcagcaggctccttttatttcctcttgtttcagacgggagcagatatctgtgggttctttcaagacgctgagtacgagatgtgtgttcgctggwtgcagctgggggccttttaccccttctcaagaaaccacaataccattgggaccagggtaggacagtggcttctacctccactgttttatgtcacttgaaa

SEQ ID NO: 170937 - DNA, 201 bp, Homo sapiens
gtaagcaagtgattaggcaatgtgcaaaacacacacagaggtatgggacccaacccttgtgagtctaagcagtgcaagtgcatttagaaatgaggaagcartaagagctccttgccgcatagtttctgtgctattatgttccccaaagacttatctgggaagccagggtcttccagggcagctctggagtggtgggctctt

SEQ ID NO: 170938 - DNA, 201 bp, Homo sapiens
atgccatgggtaaggccatccagcgcctcccttattttggggggataccagtcatgcctgagtcagtttagaatgtgtttagcctaactgttccttgaagkcaaaatcttcattttacgggcactgctgtttattttttctttgtgtttagcctttctgttcatttcagtctaatatcatgtgataagaagatttaaccca

SEQ ID NO: 170939 - DNA, 201 bp, Homo sapiens
tacctaaggtaagcaagtgattaggcaatgtgcaaaacacacacagaggtatgggacccaacccttgtgagtctaagcagtgcaagtgcatttagaaatgrggaagcaataagagctccttgccgcatagtttctgtgctattatgttccccaaagacttatctgggaagccagggtcttccagggcagctctggagtggt

SEQ ID NO: 170940 - DNA, 201 bp, Homo sapiens
ggagagcgacacaggcaggactgaagttagtcttaagatccagggcccagtcccttgaagagaagtcagggagaaacagaatcagggctgggtttcacctygccagttcttcctcctcagatttggagtccagggacaggggcctgagcagcaagaccctttgtatggagagtcagcagatcctcccagacggctccctgg

SEQ ID NO: 170941 - DNA, 201 bp, Homo sapiens
tatgtgagggtagaggaaaataaagggaagttgatgcatcctctttaagtcctctcaatttatgttacacacagctgtagttgtcatgtgattctgaaatygtagaaaacactgaggcgtacttgtctaatatccagaaatgtaatcttattccttcctcccctctctcagtgggaatgacataggagggagtccctgggt

SEQ ID NO: 170942 - DNA, 201 bp, Homo sapiens
ttaaatttgcctaatacctcaagataaacccaccaagacaccagtgttggtgtttgcatatgtatatgcatataaatgtgtgtgtggagatgtgtacatamagcaaaagaaacctggaaattctgagctggttaggaagatgctgggatggtagaccacaaggaagagaagtgacttaaaaatggtgtcaggaaactgtgt

SEQ ID NO: 170943 - DNA, 201 bp, Homo sapiens
acacggtacatatatcaggcagtgataagacccttttcagttccattatctttttctggttcaggtcacacaaccctaaaataagttaatcatgctacatyagactatgtcattatccagagaacattgagaaatcattgagggaacaatgagacctgccctaattttcatttggaaaagattactgtggctactgttagg

SEQ ID NO: 170944 - DNA, 201 bp, Homo sapiens
catatatcaggcagtgataagacccttttcagttccattatctttttctggttcaggtcacacaaccctaaaataagttaatcatgctacattagactatrtcattatccagagaacattgagaaatcattgagggaacaatgagacctgccctaattttcatttggaaaagattactgtggctactgttaggaaaatggt

SEQ ID NO: 170945 - DNA, 201 bp, Homo sapiens
tttttatgaagttggaaggggtcatccgagcagtacttagggaagttcctacatcatggctggccaagttcaccacgtgtaccccatatgggatacaattmtgactctgatgtggctgataatctctttattctaattgtccatcccccacccatcccgtcgtttctaacccttcctgatctggagctctctgtttctggt

SEQ ID NO: 170946 - DNA, 201 bp, Homo sapiens
taattctatgttaatgtcttcctccgaaaattcttatgagcaaatgttgacgatataaaaatcatgcacctgccagtgaggcagtgagaatatactgttcwagtgtgtactcagctagccatacgttttagcatatttgtgggtccagtatactaacaattcttgttcttcaagtttaggaaatagattcctttgaagcat

SEQ ID NO: 170947 - DNA, 201 bp, Homo sapiens
tggctaatttttgtatttttattagagctggggtttcaccatgttggccaggctggtctcaaactcctgacctcaaatgatccacccacctgggcctcccrgagtgttgggattaccggcgtgagccaccgcacccggcccatattgaattatttaaaggcccatctctaccactgaataatctttgtactctaaaaaatt

SEQ ID NO: 170948 - DNA, 201 bp, Homo sapiens
gaagttggaaggggtcatccgagcagtacttagggaagttcctacatcatggctggccaagttcaccacgtgtaccccatatgggatacaattatgactcwgatgtggctgataatctctttattctaattgtccatcccccacccatcccgtcgtttctaacccttcctgatctggagctctctgtttctggtgaaagat

SEQ ID NO: 170949 - DNA, 201 bp, Homo sapiens
tctgcttctaagagatgaacttttttagattccacatatgagtgagaccacgcagtattggactttctgtctctggcttatttcacttagtataatgtccycctaagtcattcatgctgttgcgaatggcagaatattcttctttctatgtctgaaaaatattctactgtatatatgtaccagaacatctttatctattca

SEQ ID NO: 170950 - DNA, 201 bp, Homo sapiens
tacgggtggtcccagaccagacccacatacgagtgagtctctgtctcccttctccagctgtcacaacctgtagggattgccagtgactgacatagctaccytacttttcttttcattcccattctaagggttaagaagattctcatgacaactgtgtaatgattcttattagataaacacttagtgacatggagccaggcc

SEQ ID NO: 170951 - DNA, 201 bp, Homo sapiens
agaatatactgttctagtgtgtactcagctagccatacgttttagcatatttgtgggtccagtatactaacaattcttgttcttcaagtttaggaaatagrttcctttgaagcatatgccttggaagcccttggaagggaatctttgcaatgttctggtagaaaagagaaggaaaaacaatggcttggccttggagactct

SEQ ID NO: 170952 - DNA, 201 bp, Homo sapiens
tagtggtggacgaactactgacgaaagaaaaatgcatttgtatctctgacagttctcccattcgccagtgatacctataatggctcttattttattgtcartgggtgcttagatgagaaggtttcaagactgttccctaattctatgttaatgtcttcctccgaaaattcttatgagcaaatgttgacgatataaaaatca

SEQ ID NO: 170953 - DNA, 201 bp, Homo sapiens
tcagtgcaacctctgcctcccaggttcaagtgattctcctgcctcaacctgccgagtagctaggactacaggcacgtgccaccaggcctggccaatttaawtttttttttttatttttagtagaaacagcattccaccatgttagtcaggatggtcttgatctcctgacctcatgatccgcctgactcggcctcccaaagt

SEQ ID NO: 170954 - DNA, 201 bp, Homo sapiens
gtggtgctatgtcagctcagtgcaacctctgcctcccaggttcaagtgattctcctgcctcaacctgccgagtagctaggactacaggcacgtgccaccakgcctggccaatttaaatttttttttttatttttagtagaaacagcattccaccatgttagtcaggatggtcttgatctcctgacctcatgatccgcctga

SEQ ID NO: 170955 - DNA, 201 bp, Homo sapiens
cctcccagcagtaaaagccatttctttacttctattgttgattaggcttctgattaaaataccagttaattgcaccttcccaaaatcttttttttttttttgagacagagtctcactctgtcatccaggctggagtgctgtggtgctatgtcagctcagtgcaacctctgcctcccaggttcaagtgattctcctgcctca

SEQ ID NO: 170956 - DNA, 201 bp, Homo sapiens
cagctgtcctaggagagcatcagtgaacttttccagtctattaagaatattctctgggcctcatgtgtagttttcttttgtttagctgtgagtgatcttcmattggagtatgctttcagtgaccttcttaaatcccctagaaattccagggcaagctcccaacactgttctctttctcctttagagacaagaccctgtgtc

SEQ ID NO: 170957 - DNA, 201 bp, Homo sapiens
gagccgtgcaggaggtgacaggacagcgaggggtcgtcatcacccgctccacatttccctcttctggccgctgggcaggacattggctgggagacaacacrgccgcgtgggatcagctgaagaagtctatcattggtgcgtgggtccttcccagggcctgtgccggtagggcagggagttgggatccttggggaagaggtg

SEQ ID NO: 170958 - DNA, 201 bp, Homo sapiens
ggaggtgaagggaacacagaggactgggcatctctcccctttatttcaaagtgaatcatctttggagttcttttttgtttttcaccattcttggtggaggstaattggtattccactgaattagcacagtcctgctttgtaagctcaattaatagtgtgaattcttctaaggacgatcttataatcttcactgtgttcctc

SEQ ID NO: 170959 - DNA, 201 bp, Homo sapiens
gcatgtgcaagtgactagactcattgcacaaattttttgaatttgtctagaaagcacttacgagtggtcatgccaccaaagggttctcacagctaggcttsttagttttttaggcttatgtgaattccatcacaggaattttttggtgtcatcaatgggtggaaattattggcttgcctttattgtggagctgatggactt

SEQ ID NO: 170960 - DNA, 201 bp, Homo sapiens
gcttcgtgaatggggcagtttctccaggctgcagggatgcctctctgaaccaccctccctacatgccgtgtaagaatccttggccttcttgattggcagarccatgattgaaagaaggattacactggaggagcccgaggccaggggtggccgcacagctcagggcacatcctcatggctgctgtggtttactggggacca

SEQ ID NO: 170961 - DNA, 201 bp, Homo sapiens
agaacctggaaggcagaggtttcagtgagccgaggtagcaccactgcactctagcctgggtgggtgacagagcaagactctgtctcaaaaaaaaaaaaaaagaagttgtacctttaacccatcttgcaggttaaaacaaaaacacacctgttattatctgaagaaagatgaaaataaggggaagttgaaatgtcctcttta

SEQ ID NO: 170962 - DNA, 201 bp, Homo sapiens
gttatatcactgtttgaagactggagaaagtgaaggcagaagccacaaaggcaagacttgaatatgcacaggtgtaaggtagagccagcacgttggagaayggcagaacatttttatgaagttggaaggggtcatccgagcagtacttagggaagttcctacatcatggctggccaagttcaccacgtgtaccccatatgg

SEQ ID NO: 170963 - DNA, 201 bp, Homo sapiens
ttcctggtcagccctgtcctggagcgtgtgagtatggaggcctccgatgaggggaggatcctagctgtgaggcttggggaaaaggacgaggagaagaggcstgagctggtgggggtcctaagacatggtttcttattctacctgtgtctcttcctctctttctgagctgaagtccatcacttaggtgttcttggcctcagc

SEQ ID NO: 170964 - DNA, 201 bp, Homo sapiens
agctgtatttccgacttggatctgaacttgaggagcttcttcagagtgtcgggctggggctctgttgggctctgttgggcaccttcatttccctttccagrtttgtgtcagaccaggtgacatgggacatagacagtcagttcctgctgggcccagccttcctggtcagccctgtcctggagcgtgtgagtatggaggcct

SEQ ID NO: 170965 - DNA, 201 bp, Homo sapiens
tgctcctgatgaagctaggcctaggaaaaaggcaaggatggctcaggggcagctgtatttccgacttggatctgaacttgaggagcttcttcagagtgtcrggctggggctctgttgggctctgttgggcaccttcatttccctttccagatttgtgtcagaccaggtgacatgggacatagacagtcagttcctgctggg

SEQ ID NO: 170966 - DNA, 201 bp, Homo sapiens
gaggcacatcccatggggaaagcagaggctgggtgctcctgatgaagctaggcctaggaaaaaggcaaggatggctcaggggcagctgtatttccgacttsgatctgaacttgaggagcttcttcagagtgtcgggctggggctctgttgggctctgttgggcaccttcatttccctttccagatttgtgtcagaccaggt

SEQ ID NO: 170967 - DNA, 201 bp, Homo sapiens
tctatgactttggccttacttttcaggcatccaattcttctggagtccctttttgctattttgtcaacgacctatactctgtcagtgatgttcagtataaytcccatggggccacagctgacatctccttaaagtcttctgttcatgccaatgccttcccttccacacccgtgaacccccttcgcctggatgtcacttacc

SEQ ID NO: 170968 - DNA, 201 bp, Homo sapiens
gcttggggaaaaggacgaggagaagaggcctgagctggtgggggtcctgagacatggtttcttattctacctgtgtctcctcctctctttctgagctgaartccatcacttaggtgttcttggcactcagctccttcatctttaaaatgagcctaacaattctggttcgtaggatgatcaagaagaaaacacctcatggaa

SEQ ID NO: 170969 - DNA, 201 bp, Homo sapiens
gataagacccttttcagttccattatctttttctggttcaggtcacacaaccctaaaataagttaatcatgctacattagactatgtcattatccagagarcattgagaaatcattgagggaacaatgagacctgccctaattttcatttggaaaagattactgtggctactgttaggaaaatggttgggagagcaagagt

SEQ ID NO: 170970 - DNA, 201 bp, Homo sapiens
tgttgtgcggcctctgctccatgagtgagtgtccagcagggatcccgatgactaatggatgacttattgcattctatgtggtagcagttgatatacacaaygcttccaaattaaagacatgatggccttttgacatgagctcttcagacacaaagtatacctgattactgtctttagcacagtgttatacataccgtaggt

SEQ ID NO: 170971 - DNA, 201 bp, Homo sapiens
tcgccagtgatacctataatggctcttattttattgtcaatgggtgcttagatgagaaggtttcaagactgttccctaattctatgttaatgtcttcctcygaaaattcttatgagcaaatgttgacgatataaaaatcatgcacctgccagtgaggcagtgagaatatactgttctagtgtgtactcagctagccatacg

SEQ ID NO: 170972 - DNA, 201 bp, Homo sapiens
ggggaggatcccagctgtgaggcttggggaaaaggacgaggagaagaggcctgagctggtgggggtcctgagacatggtttcttattctacctgtgtctcytcctctctttctgagctgaagtccatcacttaggtgttcttggcactcagctccttcatctttaaaatgagcctaacaattctggttcgtaggatgatca

SEQ ID NO: 170973 - DNA, 201 bp, Homo sapiens
aatataaatatcactcagaaggatataaaacaaacttcttactctcaaaaatctacaatgtagttaaaaagttgtatcttgaatctttctttcaggttaargtaaaaacactgcttttattatgtgagggtagaggaaaataaagggaagttgatgcatcctctttaagtcctctcaatttatgttacacacagctgtagt

SEQ ID NO: 170974 - DNA, 201 bp, Homo sapiens
actcttacaatggtgtgattatcatagaggaggctatttactgagacaaacaaaggactgtaatgttctataacaaacaacatgagtatattaaaattgawggacatttacttgctgcttctaagtggtgtgaacccactgttaaacactgagtatgtattttatcccaggttctaagctcagcattgtgggcaatataaa

SEQ ID NO: 170975 - DNA, 201 bp, Homo sapiens
agggaagttcctacctcacggctggccaggttccctacgtgtaccccgtatgggatagaattctgactcagctgtggctgataatctctttattctaattstccatcccccacccatcccgtcgtttctaaccctgcctgatctggagctctcagtttctggtgaaaggttctctttgtcgggtttcctggttcctacctc

SEQ ID NO: 170976 - DNA, 201 bp, Homo sapiens
ccttattgtaaaacttgctctctcctggggacggtttgttgcttgtaatggatccaagtagtccatgcttctggacctgaatttttttcccgattgactawgcatttcttgcctgaatgaatacatggctccttacaggagagtggagaaagtgaaggcagaagccacaaggcaagagttgaatatggacaggcaaagcca

SEQ ID NO: 170977 - DNA, 201 bp, Homo sapiens
tttacctgtcagtttccagccttattgtaaaacttgctctctcctggggacggtttgttgcttgtaatggatccaagtagtccatgcttctggacctgaayttttttcccgattgactatgcatttcttgcctgaatgaatacatggctccttacaggagagtggagaaagtgaaggcagaagccacaaggcaagagttga

SEQ ID NO: 170978 - DNA, 201 bp, Homo sapiens
ttgggtggagtcagggtttgtaggcaggggcagctgttcctgggattgtggacatgcctgtaccgtggacatgggcttggcaagggagaaacacttagggsatgtgtcttgggtgtcattctgtatgcctattactttataggtagtcatactttactggccactgggatgtagatatgtattattatccttggaatttaa

SEQ ID NO: 170979 - DNA, 201 bp, Homo sapiens
tttgggtggagtcagggtttgtaggcaggggcagctgttcctgggattgtggacatgcctgtaccgtggacatgggcttggcaagggagaaacacttaggkcatgtgtcttgggtgtcattctgtatgcctattactttataggtagtcatactttactggccactgggatgtagatatgtattattatccttggaattta

SEQ ID NO: 170980 - DNA, 201 bp, Homo sapiens
gcagcctctcagctccccatgtcctcccgcaggatgtgcagtactcagacatcgactacatggagcggcagctggacttcaccctcagccccaagtttgcygggtttccagctctgatcaatcgcatgaaggctgatgggatgcgggtcatcctcattctggttagtcctgatgtgaatgtgtgcggtctgtttgggagca

SEQ ID NO: 170981 - DNA, 201 bp, Homo sapiens
gctgtctggaattccaccatgggtggtggagggttgttctcctataaagcttgggcgtgtacagcagcagcctctcagctccccatgtcctcccgcaggaygtgcagtactcagacatcgactacatggagcggcagctggacttcaccctcagccccaagtttgccgggtttccagctctgatcaatcgcatgaaggctg

SEQ ID NO: 170982 - DNA, 201 bp, Homo sapiens
ggctccagggctctttctgctctcccgtgcttccttccatttctttctcttggcttcaaaacatgtagtcaaaaaagtccttggtttcataagaataaagwatatcccacagttcttttacttaattcttgaaaagactaaccacaaatcaatcagacaattgtatatgtgaatacaacctcagttcctgcatcagctctg

SEQ ID NO: 170983 - DNA, 201 bp, Homo sapiens
tctatctatctatctatccactctatctactcaggttatatctatctttctatctgtctgtctatctatctatctatctatctatctatctatctatctahccatccagccaccctattcatttatgtctgtctgtctgtctgtctgtctgtctatctatctatctatctatctatctatctatctatctatctatctatc

SEQ ID NO: 170984 - DNA, 201 bp, Homo sapiens
cagagagctcagatgacttgtccacggttttaggtgacagagtgttgatttcaattccaaggctgtcagattacaaaggcccaagaaattcccactgggcratacctcctagcagtgccatcttttctctgaactggtatacttaactgttgttgccttggttatcccttttaaacagtcttctaacctcaaagactgttt

SEQ ID NO: 170985 - DNA, 201 bp, Homo sapiens
gtacgttctcagtcatggctctggagtttgaaaactaacccaggtgcctctgtgtctggcttcatttgtctaatgtttgtgagattctataaagacataawgttctttttcagacaatatcacagttagcctcaccccagcacagtaatagaggtaagggcccttgtttccatcttctagagatgatagctcaagacttac

SEQ ID NO: 170986 - DNA, 201 bp, Homo sapiens
ccagatcccttatgtacgttctcagtcatggctctggagtttgaaaactaacccaggtgcctctgtgtctggcttcatttgtctaatgtttgtgagattcyataaagacataatgttctttttcagacaatatcacagttagcctcaccccagcacagtaatagaggtaagggcccttgtttccatcttctagagatgata

SEQ ID NO: 170987 - DNA, 201 bp, Homo sapiens
ctgaatttgagatacgtataaaatagccaccaacctgcagcgatttcatttctttccagaatttaattgcatttaaagactagggatggactagctgttaygtctgcttctctattaaactaatcttctcaaggataggaatgtgccctttcctctttgtgcttctgaagtctaatacagagcctggcagatagttagtgc

SEQ ID NO: 170988 - DNA, 201 bp, Homo sapiens
tctgtctattttctagttgattggccggcctgtgatggtaccttactggtctttggggttccagctgtgtcgctatggctaccagaacgactctgagatckccagcttgtatgatgagatggtggctgcccagatcccttatgtacgttctcagtcatggctctggagtttgaaaactaacccaggtgcctctgtgtctgg

SEQ ID NO: 170989 - DNA, 201 bp, Homo sapiens
acttgctctctcctggggacggtttgttgcttgtaatggatccaagtagtccatgcttctggacctgaatttttttcccgattgactatgcatttcttgcytgaatgaatacatggctccttacaggagagtggagaaagtgaaggcagaagccacaaggcaagagttgaatatggacaggcaaagccagcaccttggaga

SEQ ID NO: 170990 - DNA, 201 bp, Homo sapiens
ttttaataggacctggatgagaaggagccacccacatgagacagggcgaagggaaagagcatttcagacagagggaataggaagtgggtaggccaggagaygaagcgaagctggcatgctaaagaaaagaagtctagtgtggttggagcaatggaggaagtaagcaggtgagtgctgggagaggaagctgcaacgccggtt

SEQ ID NO: 170991 - DNA, 201 bp, Homo sapiens
tagaggccttagtaatgagaaatgacagacaaacatattaaatctgacattgttatttgatgtgttaattaaatctcagacatcataaacttaaagaagayagaaacatagcatctgaacttttgtccaaaaatcaaaaaggttctgctaagggtataggtttcaagagtagtattcttgcctaaaatcgttttcctctgg

SEQ ID NO: 170992 - DNA, 201 bp, Homo sapiens
gttagagaactttaagaccacatgctgtgctgatctatgactttggccttacttttcaggcatccaattcttctggagtccctttttgctattttgtcaaygacctatactctgtcagtgatgttcagtataactcccatggggccacagctgacatctccttaaagtcttctgttcatgccaatgccttcccttccacac

SEQ ID NO: 170993 - DNA, 201 bp, Homo sapiens
cacacctaatctatagtttcttaagcatagcagtggcacttatataactacttaaaatccatagaaaggacttcctaagggacatgatctggatgtgacargtaggtggggacatgtggaaaactttttaaaataaatattttgcttggagaccaggaaattaaatttatgttattgccaagtgataagtgataggctggt

SEQ ID NO: 170994 - DNA, 201 bp, Homo sapiens
aggaacagcaaagttggaaagtggggaatagcctgacattattagactgtgaattttgtatgactagcacaaataagatttggtatttgaaaaaggccagyttggataggaaacttgtggtcaggctttggaggtcttagttaccaacttgaattaattctcaagcagtctcatattgatccttgaatgaaggctgtgcta

SEQ ID NO: 170995 - DNA, 201 bp, Homo sapiens
ttgtcaacgacctatactctgtcagtgatgttcagtataactcccatggggccacagctgacatctccttaaagtcttctgttcatgccaatgccttcccytccacacccgtgaacccccttcgcctggatgtcacttaccataagaatgaaatgctacagttcaaggtaaacacggtacatatatcaggcagtgataaga

SEQ ID NO: 170996 - DNA, 201 bp, Homo sapiens
tttacttctattgttgattaggcttctgattaaaataccagttaattgcaccttcccaaaatcttttttttttttttgagacagagtctcactctgtcatscaggctggagtgctgtggtgctatgtcagctcagtgcaacctctgcctcccaggttcaagtgattctcctgcctcaacctgccgagtagctaggactaca

SEQ ID NO: 170997 - DNA, 201 bp, Homo sapiens
atctggagctctctgtttctggtgaaagattctctttgtcaggtttcctagcttctacctccatttcctaacaaaaggcatccctggcatgcccacttctktcaagattctccgtgatgtgacccactgtcttctcacatccttgacagccagacccatgtaggctggtctgtttctgttttctcatgttccttttcttgc

SEQ ID NO: 170998 - DNA, 201 bp, Homo sapiens
tgattaggcttctgattaaaataccagttaattgcaccttcccaaaatcttttttttttttttgagacagagtctcactctgtcatccaggctggagtgcwgtggtgctatgtcagctcagtgcaacctctgcctcccaggttcaagtgattctcctgcctcaacctgccgagtagctaggactacaggcacgtgccacca

SEQ ID NO: 170999 - DNA, 201 bp, Homo sapiens
cctgatctggagctctctgtttctggtgaaagattctctttgtcaggtttcctagcttctacctccatttcctaacaaaaggcatccctggcatgcccacktctgtcaagattctccgtgatgtgacccactgtcttctcacatccttgacagccagacccatgtaggctggtctgtttctgttttctcatgttccttttc

SEQ ID NO: 171000 - DNA, 201 bp, Homo sapiens
ctggagtccctttttgctattttgtcaacgacctatactctgtcagtgatgttcagtataactcccatggggccacagctgacatctccttaaagtcttcygttcatgccaatgccttcccttccacacccgtgaacccccttcgcctggatgtcacttaccataagaatgaaatgctacagttcaaggtaaacacggtac

SEQ ID NO: 171001 - DNA, 201 bp, Homo sapiens
ctgatgtggctgataatctctttattctaattgtccatcccccacccatcccgtcgtttctaacccttcctgatctggagctctctgtttctggtgaaagrttctctttgtcaggtttcctagcttctacctccatttcctaacaaaaggcatccctggcatgcccacttctgtcaagattctccgtgatgtgacccactg

SEQ ID NO: 171002 - DNA, 201 bp, Homo sapiens
agtccctttttgctattttgtcaacgacctatactctgtcagtgatgttcagtataactcccatggggccacagctgacatctccttaaagtcttctgttyatgccaatgccttcccttccacacccgtgaacccccttcgcctggatgtcacttaccataagaatgaaatgctacagttcaaggtaaacacggtacatat

SEQ ID NO: 171003 - DNA, 201 bp, Homo sapiens
agtttctgttatctagcccttgttcctgagttgccttggaatggtctgcacattttgggattcctccacctgtagaatataagtatcttaacagctgagaytttttgtctcctgtagagttcagggcagtgcgaaagaccctgtagctgcttgtcaatgcaaagtggatgggagttggcaataggccatagagtgatgaaa

SEQ ID NO: 171004 - DNA, 201 bp, Homo sapiens
gatacaattatgactctgatgtggctgataatctctttattctaattgtccatcccccacccatcccgtcgtttctaacccttcctgatctggagctctcwgtttctggtgaaagattctctttgtcaggtttcctagcttctacctccatttcctaacaaaaggcatccctggcatgcccacttctgtcaagattctccg

SEQ ID NO: 171005 - DNA, 201 bp, Homo sapiens
gtgtgggtggttatatcactgtttgaagactggagaaagtgaaggcagaagccacaaaggcaagacttgaatatgcacaggtgtaaggtagagccagcacsttggagaacggcagaacatttttatgaagttggaaggggtcatccgagcagtacttagggaagttcctacatcatggctggccaagttcaccacgtgtac

SEQ ID NO: 171006 - DNA, 201 bp, Homo sapiens
ccagagatgacagctcaagacccagcatgactcgccagagtgggagataggctggctccagggctctttctgctctcccgtgcttccttccatttctttcwcttggcttcaaaacatgtagtcaaaaaagtccttggtttcataagaataaagaatatcccacagttcttttacttaattcttgaaaagactaaccacaaa

SEQ ID NO: 171007 - DNA, 201 bp, Homo sapiens
ggctgcccagatcccttatgtacgttctcagtcatggctctggagtttcaaaactaacccaggtgcctctgtgtctgggttcatttgtctaatgtttgttrgattccataaagacataaagttctttttcagacaatatcacagttagcctcaccccagcacagtaatataggtaagggcacttgtttccgtcttccagag

SEQ ID NO: 171008 - DNA, 201 bp, Homo sapiens
tggctgcccagatcccttatgtacgttctcagtcatggctctggagtttcaaaactaacccaggtgcctctgtgtctgggttcatttgtctaatgtttgtkggattccataaagacataaagttctttttcagacaatatcacagttagcctcaccccagcacagtaatataggtaagggcacttgtttccgtcttccaga

SEQ ID NO: 171009 - DNA, 201 bp, Homo sapiens
ccagcttgtatgatgagatggtggctgcccagatcccttatgtacgttctcagtcatggctctggagtttcaaaactaacccaggtgcctctgtgtctggsttcatttgtctaatgtttgttggattccataaagacataaagttctttttcagacaatatcacagttagcctcaccccagcacagtaatataggtaaggg

SEQ ID NO: 171010 - DNA, 201 bp, Homo sapiens
gctatggctaccagaatgactctgagatcgccagcttgtatgatgagatggtggctgcccagatcccttatgtacgttctcagtcatggctctggagtttsaaaactaacccaggtgcctctgtgtctgggttcatttgtctaatgtttgttggattccataaagacataaagttctttttcagacaatatcacagttagc

SEQ ID NO: 171011 - DNA, 201 bp, Homo sapiens
caaccagcagcttgctgtgacaactgtttgagttccgccaatagctaactttgccgtgccttgttaccgatagacaactggaagatgtcgggtcacgtgcytgtctctacccttcaaagtggctctgttattttctcattggtcaacaccagtatggtgattcaatatcttccagttactagttagcaagaatggaaggtg

SEQ ID NO: 171012 - DNA, 201 bp, Homo sapiens
cttggggcacagaaaaatattcttattacttgatgtaaaacttcaatctggtgtctctgttctgaggactaatattttctgtctattttctagttgattgsccggcctgtgatggtaccttactggtctttggggttccagctgtgtcgctatggctaccagaacgactctgagatctccagcttgtatgatgagatggtg

SEQ ID NO: 171013 - DNA, 201 bp, Homo sapiens
agttggaaggggtcatccgagcagtacttagggaagttcctacatcatggctggccaagttcaccacgtgtaccccatatgggatacaattatgactctgmtgtggctgataatctctttattctaattgtccatcccccacccatcccgtcgtttctaacccttcctgatctggagctctctgtttctggtgaaagattc

SEQ ID NO: 171014 - DNA, 201 bp, Homo sapiens
aatccactatagaaggtagcaatatgggagccatggggaaagtttatttgtagccagcggagataaactttcataggatttatggtcaaggacacattccygaattacatggtttactgtcccagtaagaggggtaatacctctatccgttgtattatttatgggatattttctattaggagtttataggaattggtaaac

SEQ ID NO: 171015 - DNA, 201 bp, Homo sapiens
catctccccattttccacttctgcaggctctaagaacaactgttgtaggctctgcttctaagagatgaacttttttagattccacatatgagtgagaccaygcagtattggactttctgtctctggcttatttcacttagtataatgtcctcctaagtcattcatgctgttgcgaatggcagaatattcttctttctatgt

SEQ ID NO: 171016 - DNA, 201 bp, Homo sapiens
tgagtacgagatgtgtgttcgctggatgcagctgggggccttttaccccttctcaagaaaccacaataccattgggaccagggtaggacagtggcttctayctccactgttttatgtcacttgaaagacagtctccatttctgtgctaaaagtaatgcagtctctatttcctgggatatctttaaaaaaaggtgttttttt

SEQ ID NO: 171017 - DNA, 201 bp, Homo sapiens
taacaaaatgctaaatttcagccagaaatgtgtgaaaaagagattatctgttggaaccaatatggcttaccggagttaacgcagaaagagcttgctgacgycacagcctgaatttccaccacaggttcttactaactccctcccaaatttgcacatgagacccatgatgaggcatgaagagataactgtgcatgcctgagg

SEQ ID NO: 171018 - DNA, 201 bp, Homo sapiens
ggaaaatcaacacctcagtagaatggaaaagagggcattctctccagtttgtgcagttgtttctcttcagcggttgcatattgaacattttttttttttttgactgagtctcactctgttgcctaggctgaagtacactggtgcaatcttagctcactgcagtctccgcctcccaagttcaagtgattctcctgcctcagc

SEQ ID NO: 171019 - DNA, 201 bp, Homo sapiens
gtttcttcttgccaagtttgcatgggtccctgaagtaccagggcacctttgatgcatgttttggggaattgagagggcacctttgatgccttttttggggraaaaaatgaggtggccagagctagaatgagttgggtatttttcttcttattcccttctctgcctatcagtgttcccatctctctagctggtttcacttgc

SEQ ID NO: 171020 - DNA, 201 bp, Homo sapiens
tatttgtctttaatagactaggagttctttggaagccagaaacctgtcttttcttttgaacctctcttactgctttaatttttcaaattctagactttttwatgatactaatgggaaatatccctaaatccaataccagttggcttccattttctaactgttcaccttcaagctgttctgtacagtgataccaaattgatt

SEQ ID NO: 171021 - DNA, 201 bp, Homo sapiens
aggaaaatcaacacctcagtagaatggaaaagagggcattctctccagtttgtgcagttgtttctcttcagcggttgcatattgaacattttttttttttttgactgagtctcactctgttgcctaggctgaagtacactggtgcaatcttagctcactgcagtctccgcctcccaagttcaagtgattctcctgcctcag

SEQ ID NO: 171022 - DNA, 201 bp, Homo sapiens
tcccaagtttgggtaactattactcattctagagcacaagctggcaaactatggcccacagccaaatctggttgttagctgatttgcaaataaagttttaktggaacacagccatgcatatttgtttgcttgttgtcaacaataactgcttcttacctgtaaagtagcagctctgaaatgagaggattttgcctaccaggg

SEQ ID NO: 171023 - DNA, 201 bp, Homo sapiens
tttgaacctgggaggcggaggttgcagtgagctgagattgtgccactgcactccagcctgggtgacggaaccagactttgtctcaagaaaaaaaaaaaaaagaaagagatgaaatttttaatgtttaattaaaatgaagatgaatctcatagttaggattaatgaagaagtgtcaccttaattaatcttcccaagtttggg

SEQ ID NO: 171024 - DNA, 201 bp, Homo sapiens
taggggcatgcacctgtagtcccagctactcgggaggctgaggcatgacaattgtttgaacctgggaggcggaggttgcagtgagctgagattgtgccacygcactccagcctgggtgacggaaccagactttgtctcaagaaaaaaaaaaaaaagaaagagatgaaatttttaatgtttaattaaaatgaagatgaatct

SEQ ID NO: 171025 - DNA, 201 bp, Homo sapiens
taatcccaggactttgggaggccgagatggacagatcacaaggtcaggagatcgagaccatcctagctaacacggtgaaaccccatctctatgaaaaatamaaacaattagccgggtgtaggggcatgcacctgtagtcccagctactcgggaggctgaggcatgacaattgtttgaacctgggaggcggaggttgcagtg

SEQ ID NO: 171026 - DNA, 201 bp, Homo sapiens
tggtggctcacacctgtaatcccaggactttgggaggccgagatggacagatcacaaggtcaggagatcgagaccatcctagctaacacggtgaaaccccrtctctatgaaaaataaaaacaattagccgggtgtaggggcatgcacctgtagtcccagctactcgggaggctgaggcatgacaattgtttgaacctggga

SEQ ID NO: 171027 - DNA, 201 bp, Homo sapiens
gcatgatcttggctcattcaacctctgcctcctgggttctagtgattctcttgccttagcctcttgagtagctgagactacaggcatgtgccaccattccyggctaatttttttttctttttttgtatgtttagtagagatggggtttcactgtattagccaggatggtctcaatatcctgacctcatgatctgcctgact

SEQ ID NO: 171028 - DNA, 201 bp, Homo sapiens
cactgcacccttaaaaattgtgaagacctggtgtctcaatgaaccatattcctcattgtgctttagattattatttttttcctgtatttcaggcagaattktaccaaatgttccaaaaagaatgtcttacagtgaaattttatcagctgtcttaggagagctttggtgactctttccggtctattaagaatattctctggg

SEQ ID NO: 171029 - DNA, 201 bp, Homo sapiens
ttgttgattaggcttctgattaaaatatcaattaattgtacctccctcaaatatatatatatatatatatatatatatatatatatatatatatatatatwtttttttttttttttttttttttttttgagacagagtctcactctgttgcccaggctggagtgcagtggcatgatcttggctcattcaacctctgcctcc

SEQ ID NO: 171030 - DNA, 201 bp, Homo sapiens
tgttgttgattaggcttctgattaaaatatcaattaattgtacctccctcaaatatatatatatatatatatatatatatatatatatatatatatatatwtatttttttttttttttttttttttttttgagacagagtctcactctgttgcccaggctggagtgcagtggcatgatcttggctcattcaacctctgcct

SEQ ID NO: 171031 - DNA, 201 bp, Homo sapiens
tgctatgtcagctcagtgcaacctctgcctcccaggttcaagtgattctcctgcctcaacctgccgagtagctaggactacaggcacgtgccaccaggccyggccaatttaaatttttttttttatttttagtagaaacagcattccaccatgttagtcaggatggtcttgatctcctgacctcatgatccgcctgactcg

SEQ ID NO: 171032 - DNA, 201 bp, Homo sapiens
gtgagccaccgtgtccagcccgcaaatcttatggtacccacagaatttttttctgccccagacacaacctcagttgtttgtctctttaagagggaatggcrtaagcctatttctataagcaaatagtgaattttttttttcccgaagtcctgggtaccaaagtgctttatgaaagccacttgttttggggtagacagatct

SEQ ID NO: 171033 - DNA, 201 bp, Homo sapiens
ggggaaaaggacgaggagaagaggcctgagctggtgggggtcctgagacatggtttcttattctacctgtgtctcctcctctctttctgagctgaagtccrtcacttaggtgttcttggcactcagctccttcatctttaaaatgagcctaacaattctggttcgtaggatgatcaagaagaaaacacctcatggaatagt

SEQ ID NO: 171034 - DNA, 201 bp, Homo sapiens
acctgtgtctcctcctctctttctgagctgaagtccatcacttaggtgttcttggcactcagctccttcatctttaaaatgagcctaacaattctggttcrtaggatgatcaagaagaaaacacctcatggaatagtcaatgacacaatcatttcttcgttaactaaaataattaatagaaggtcagatgggggcagtatt

SEQ ID NO: 171035 - DNA, 201 bp, Homo sapiens
ataagaatgaaatgctacagttcaaggtaaacacggtacatatatcaggcagtgataagacccttttcagttccattatctttttctggttcaggtcacasaaccctaaaataagttaatcatgctacattagactatgtcattatccagagaacattgagaaatcattgagggaacaatgagacctgccctaattttcat

SEQ ID NO: 171036 - DNA, 201 bp, Homo sapiens
aacacggtacatatatcaggcagtgataagacccttttcagttccattatctttttctggttcaggtcacacaaccctaaaataagttaatcatgctacawtagactatgtcattatccagagaacattgagaaatcattgagggaacaatgagacctgccctaattttcatttggaaaagattactgtggctactgttag

SEQ ID NO: 171037 - DNA, 201 bp, Homo sapiens
aaatgaggaagcaataagagctccttgccgcatagtttctgtgctattatgttccccaaagacttatctgggaagccagggtcttccagggcagctctggrgtggtgggctcttgctgggaccctgacaagtcagaccctgattcttggggtagaatcaaagaaggcatttccttggtctctaatggggcctcttctgact

SEQ ID NO: 171038 - DNA, 201 bp, Homo sapiens
ttccccaaagacttatctgggaagccagggtcttccagggcagctctggagtggtgggctcttgctgggaccctgacaagtcagaccctgattcttggggwagaatcaaagaaggcatttccttggtctctaatggggcctcttctgactttctgaggagaacatcgttgagggctggaaatacagcaaaggggtacaagc

SEQ ID NO: 171039 - DNA, 201 bp, Homo sapiens
ttctggtagaaaagagaaggaaaaacaatggcttggccttggagactcttgtccctctaatccaatatgtagattaaaaattaattatttatttggtagtyaaatattttgttggcaaataaagattgaatatatttaaggtggacgatgtgaggatttaatatatgtaggcatagtataatgattaccacagctatttta

SEQ ID NO: 171040 - DNA, 201 bp, Homo sapiens
tctatcctatattctgcctatattaattctgcttctagatttgtttttttttttttttgacaaagaagttcccccaaaatgcatcctgtctgtttcatggmtgcattactttgtggaaatttagtagagctcttggctcctgatgctagggacctctgttttgctattatcccatagggtcattatttatctttgtttttt

SEQ ID NO: 171041 - DNA, 201 bp, Homo sapiens
ggtcaggagttcgagaccagcctggccaacatgatgaaaccccatctctactataaatacaaaaaaattagctgggcatagtggcgggtgcctgtaatccyagctacttgggaggcagaggcaggtgaatcttttgaacccaggaggtagaggttgcagtgcgccgagatcatgccattgcactccagcctgggcaacaag

SEQ ID NO: 171042 - DNA, 201 bp, Homo sapiens
aaggatacttgtctagaggtccgcatgctcacacagacctgcccagtgcgttcatttcctgtaggaaaagctaacacaggcccaattatcagatgcttgtygatattagggagaacttctcagttaagatagcatgaggccctcttcccactgtaaggatagccttttcacagaaggcttcatggacataggcatggacaa

SEQ ID NO: 171043 - DNA, 201 bp, Homo sapiens
gcatccaactaagccagggacttactttaatgaatgataagaatgatgtgtcatgaacagactaattgcatataaaaggagcgcttctgaagtgtgcagcrtgttcccttaagcactttaaataccccccagagatgccgtttgcagtcataatttgcattatcaatgaagaggcagtttgccaagcaaaggggaacatca

SEQ ID NO: 171044 - DNA, 201 bp, Homo sapiens
actccattttgacaagctgacaagtggaggaaattcatatattatatggctgggagctatggctttctctctaatttattatagtggttcttatccatagstttcccctcccctagaaggacacccatgttcctgggcaaaggtaggaggcctgaagcacctttacatcctgctttggctgtgatgtttttaacaagccat

SEQ ID NO: 171045 - DNA, 201 bp, Homo sapiens
acttctgtaagcaaggagcaatattatgatatggacataaaatttgaaatggcaggtaatgaaatggcttgtgaagtggtatagttggaaataacatttcsaaatttaattttttttttttttgagacagtcgcgttttgttgcccagaccggagtgcagtggtgtgatcttggctcactataacctctgcctcctgggtt

SEQ ID NO: 171046 - DNA, 201 bp, Homo sapiens
atgactaatttttaacatcctggttggtaaggaggatgtggtgtttattagttgtcttttaaaaatatgtcctatatctccaactggatgccaacctctgygtgtgaccaatctctggatacttcccactccacattccagcaaacacacagtctctgtggcatgatgcctggtccataatgggctctcaatcagtgatca

SEQ ID NO: 171047 - DNA, 201 bp, Homo sapiens
aaggtgctaatcatataaatcctgcagagggaaatttcagacaagttaaatatgccaaactgaaacaggaaggcttcattaaaaaaaaaacaaaaaaaaaatgtcacaatgaagcaatgcctttctcaatgcttacaatgctctttctctccttttatgtagttctcttcccttcttcaagactttcctggcagcggcaca

SEQ ID NO: 171048 - DNA, 201 bp, Homo sapiens
gaaggaataaagcatgacaatagtggtagctattattttaggtttgggttatggcagcacctcacctatggtatcaatttctacatcagttaaggttaagytaaactgctataaccaaatgaccaaaagagaaaatggctgcaaaaatataggccctatgttgcccaggctggtctcaaacccctgtgctcaagtgatcct

SEQ ID NO: 171049 - DNA, 201 bp, Homo sapiens
tgtatcctgtatgtgctctgtgccaagcatgagcctgctatctaatagatggtaaataattatctgttaaatgaaagaatgagtgaatggtgggcctcccsctcgcaggtatggggtgtgctcctggaagaaggagtgagcataggcccaataaagcctcaagacccctgctgattggctgaaagtccaaggcccagcttt

SEQ ID NO: 171050 - DNA, 201 bp, Homo sapiens
aaacgttctgtgaatgtggggttatcagaagctcaagatggagatgtgtctcaagaaacagtggaaaatgtaaaagttcaaaaatctcctcagaaatccaytgtattaacaaacggagagacagcaatgcagtctcccaattcagaatcaaaaaagaaaaagaagaaaaagggaaaaatggtgaatgatgctgggcctgat

SEQ ID NO: 171051 - DNA, 201 bp, Homo sapiens
acaaagaatggtgatgctcctaattcggatttctttatttcaaggtggtttggattttggtaagccttttcactctacagagtacttagaagacaaggccrccaactaccttggacttaaagccaagccatcagatagtgcccagcacatattaatgttagcttatttttgagaaaaattacctcttctaggccccgaagc

SEQ ID NO: 171052 - DNA, 201 bp, Homo sapiens
tcagcaagatagtaaactatcaaactgcttttatttgttatttgatttatttgacctgtcatatatttgattaatccacatgtgttttttgagcagctcaytggggtctggagagagaacattgacaaagtctctgccctcaaggagtttggagtctagtggaacagggctcctctgaaactcagggatgtacattatggt

SEQ ID NO: 171053 - DNA, 201 bp, Homo sapiens
gataaccatccaattcatggatggcaagttgctggcctagccagaactagcaagaacaagagctatctaaagatagtcaccactttgacaggtgtagacaygattctcttctctccaccctactcctaaccccatcttagcattttaaggggcaccatctgttagtttgctttgagctgtgattggattggactactctct

SEQ ID NO: 171054 - DNA, 201 bp, Homo sapiens
cagaactagcaagaacaagagctatctaaagatagtcaccactttgacaggtgtagacacgattctcttctctccaccctactcctaaccccatcttagcwttttaaggggcaccatctgttagtttgctttgagctgtgattggattggactactctctctgaattgcaagtaagacgttctcatcttattcagacagat

SEQ ID NO: 171055 - DNA, 201 bp, Homo sapiens
gctcattaactgcatatacttcctcctgcaacaccccaaattagcttttatcttatgtatactatgcttagcaccttgggtatttttgtaattaaaaaaawtgttgctagatattttttatctttttttaacagctttatgggggcataatttacatgtaataaaattcacttgtgttgcatgtacaattcaatgacttaa

SEQ ID NO: 171056 - DNA, 201 bp, Homo sapiens
acttgattggatgaggcccacccacattatctaggataatattctttactcaaagacaactgattgtaaatgttaataacaaaataccttcacagaaatayctagactaatgtttaggcaccacagcctagccaagctgacacaaaaaattaatcatcatgagttccatgaattattttcacagaatatattctactgtat

SEQ ID NO: 171057 - DNA, 201 bp, Homo sapiens
cttctgtttaattaagggattgctcatttcagagaagatatcatgctgggccttctactacttttgtgattcaacgcccaactaaggatgtatgggaaacrgtttggtgatcttagctcagtccctaatggtgagagcttcatattacaaagccaataaaccatgctgccagacttgcaaaaagagagtcaagggacttat

SEQ ID NO: 171058 - DNA, 201 bp, Homo sapiens
gactttttaatgatcaccattctaactggtgtgagatggtatcacattgtggttttgatttgcatttctctaatgaccagtgatgatgagcttttttttayatgtttgttggccgcataaatgtcttcttttgagaagtgtctgttcatatccttcacccactctttgatgaggttgtttgtttgttttttttcttgtaaa

SEQ ID NO: 171059 - DNA, 201 bp, Homo sapiens
agcacaaattatttgcttgctgtggagatttggcatcaacacaagtcccctacctgcccccactctagtctctaaacacttctcatgtagaaaattaagawctgccttgccctataacttagtgaacttggtcagggtgatgggaatatcctgaagataaaagtgcacactctgttctagtgttgcctttggttagtgact

SEQ ID NO: 171060 - DNA, 201 bp, Homo sapiens
gtcgcttgaggccaggaattcaagaccagcctggccaacatggcgaaaccccgtctccactaaaaagaaaaaatgataataacacaaaaattagtctgggrtggtggcacgcacccgtaatctcagctacttgggaggctgaggcaggagaatctattgagcctagtaggtcgcaccactgaactccagcatgaacaatag

SEQ ID NO: 171061 - DNA, 201 bp, Homo sapiens
tttttattaaaaaggcaatacatctttattgtacaaaattgtaaaaagcaccaacaagcaaaaagaaataacattcactcacagttctattgactagagayagcaaaagcaaagaggttgggatatatccttccccatgtaaacctatgtggcttgcaaaaggattataatgtatattctgttttgtgaccagcttatttc

SEQ ID NO: 171062 - DNA, 201 bp, Homo sapiens
acgtcagtatccatcaatacggttttattggaatataaccacaccattcatttccatcttgactgcctgcagagttcagaaattgtgatgagatgttatgrtctgcaaagccgaaaatatttactatctgactcatcctagaaaaatcctgagctagaagaaagcattgctgaagcaccatgagggttgtagacaagataa

SEQ ID NO: 171063 - DNA, 201 bp, Homo sapiens
atgagaaaggagtgaatgagctgatttggacttctttgaacttatttatgttaaaaatatttttattaaaaaggcaatacatctttattgtacaaaattgkaaaaagcaccaacaagcaaaaagaaataacattcactcacagttctattgactagagatagcaaaagcaaagaggttgggatatatccttccccatgtaa

SEQ ID NO: 171064 - DNA, 201 bp, Homo sapiens
tgatgcaatgcactttgttgctgatacttcaacattgtgcctgtgcagcactctgtagaacttcaatgaggcaatgaaaaagaacccagttctcttccatyccaatgaaagatgcaattcccagggtattctccctgtcttttgcacaagacttcctatatgccaggcataacacctcatgaggtagcccttattgcctat

SEQ ID NO: 171065 - DNA, 201 bp, Homo sapiens
tctccaataggcattcaaagcagttgctgcaggaacaggcaggaaatgagaataaggatttgactaccctctggtgtagatctctcaagccctttaacacmttcagtgcacagatctcctgcgggttatctcaaagtgcatcgtttaaaacaagacctgtttaagccaataggggttaaatagggcttattttgttgaacc

SEQ ID NO: 171066 - DNA, 201 bp, Homo sapiens
agatagattctcatatatgttatcatttatatgtattaaagtgatataaaagaaaaattttatgtcttttaatatttttcttttaatactgagtcattcastttagaatctgtattttaaactctttcttccagtatgataaatgttctttgttgtttccaaatgcatgatgtaaattccaattctgatgtagcctataga

SEQ ID NO: 171067 - DNA, 201 bp, Homo sapiens
ggccctaatatttaaatattaaaggccaagtgtgggcagatagattctcatatatgttatcatttatatgtattaaagtgatataaaagaaaaattttatrtcttttaatatttttcttttaatactgagtcattcactttagaatctgtattttaaactctttcttccagtatgataaatgttctttgttgtttccaaat

SEQ ID NO: 171068 - DNA, 201 bp, Homo sapiens
gctcacacaattcttcaacattaataattggctccagctcaccagtgagtagtgggaagaaaaaggttcattgctaagaacaccaccacaaccaataacaraaaaaactgagtggtactatttctaataaagtgatgttttattatttatattagggggaggcaacctgaccccaaaataagagtgtgagctggctcgtgc

SEQ ID NO: 171069 - DNA, 201 bp, Homo sapiens
tgtaaaaatataagaaatctcaaagtgatgaaaattatgctgtgttttcagcctaaaagtgtggcccgtggtgagaaaatgggggaaaatatgtgaaccargattgtcccctgacagtacttttagcttgtaaaagtactcttttcaaaacaaatgattttactgagcagttctgtgctgggcttagacatgaaggcaagc

SEQ ID NO: 171070 - DNA, 201 bp, Homo sapiens
tggaggcatcacgctacctgacttcaaactatactacaaggctatagtaaccaaaacagcatggtattggtaccaaaacagatacatagaccaatgtaacrtaacagaggcctcagaaatagcatacatttgtttcttactgagccctaaaatgatgaccttattgataacacctccattcagatgaggaaattgggacat

SEQ ID NO: 171071 - DNA, 201 bp, Homo sapiens
tttactttaagttctgggatacacgtgctgaacgtgcagctttgctacataggtatacatgtgctatggtggtttgctgcacctatcaacccgtcatctakgttttaagcccctcatgcgtttgtcctaatgctttccctcccctttctccctattccccaacaggccccggttgtgatgttcccccttcctgtgtccatg

SEQ ID NO: 171072 - DNA, 201 bp, Homo sapiens
atttgtatcttaccactctttctctattctcacaagaatataggggtattttttccaatttaaaaaatgttatatactaaaatattactcacttttttctsttaacaattcatatcttagatatgagacagggagatatagtaacttgaccttgacagtctgagcccttaactgctacaaacagctgctcctgacagaaga

SEQ ID NO: 171073 - DNA, 201 bp, Homo sapiens
aagaggatacttgtataaattgagactcattgattgtaggagtcattatatgcctattacaaagaatgaattagatttctctacaataatctgaattaaaytgtcttcaaatcttaacagcttagaatttgggaaccaaatctactttaataaaaggtgaagtaacatagggaaaagtaaaaacgtgtgtttgtagttgat

SEQ ID NO: 171074 - DNA, 201 bp, Homo sapiens
gtctacattttgctgatttaaatatcactgagctttctgctgttttgccttagctttggatttatgagatgttatttacaataatacaagagaggctttgrgttttgtctaaagacacagttaggtctaggagagagatgttgatttttatgcaaaatttaaagggatgcaagcaatttccttttgtagccatgctggagg

SEQ ID NO: 171075 - DNA, 201 bp, Homo sapiens
ctcataggtggggagggtactcattcttgttcctgctccttcctgctcccttgtcaatctcttcctcttccctatccagatccttctgttcccctcccccyagtcctcccctgccccatactgcaagaccagggaaaaacgaagctaatttatcctgaaggtttaactaaatgaagcatttgcagtttaagctgaattgga

SEQ ID NO: 171076 - DNA, 201 bp, Homo sapiens
acaaaactacagacacaaaattaggcatgagtgggtatatacagctaaccctcaaacagtgtcgacccctgtgtaatacaaaaaatccatgtataactttygactccccagaaaattaactactaatggcttattcttgactggaaccttaccgataacataaacagtcaattaacatgtattttgtatgtttatatgtat

SEQ ID NO: 171077 - DNA, 201 bp, Homo sapiens
actactaatggcttattcttgactggaaccttaccgataacataaacagtcaattaacatgtattttgtatgtttatatgtattatatactgtattcttayaataaagtaatttagagaaaagaaaacgttaagaaaatcataaggaggagaaaatgtatttactattcattaaataaaagtggattatgatcatcataaa

SEQ ID NO: 171078 - DNA, 201 bp, Homo sapiens
aacacattcagtgcacagatctcctgcgggttatctcaaagtgcatcgtttaaaacaagacctgtttaagccaataggggttaaatagggcttattttgtwgaaccagcctgtataggtacccagtcccaccctctgtttgtgtatgggtgtgtctctgtgtgtgcatatatagaatgtgcatgtgtgcacacatgtgcgt

SEQ ID NO: 171079 - DNA, 201 bp, Homo sapiens
atcagtttcgttcgttactgttgcctacaaggtacttcatgggattacctgctagctcatagatgaaccacctttgcgtcatattcttatttcttgtccastctgggtccacccctggacaagaaagagtccagcactgcctctttgtttagggggctggaaacagggaaatcctagctaacaagtgacaatggtatgaca

SEQ ID NO: 171080 - DNA, 201 bp, Homo sapiens
aatgctttgcttctgtaaagctgacttttttctctttcttaaactcaccatacatttttctctcacttcctggaatgcttccctactggctcttcgccatgtagccaagtcctagacatttgccaaggtcaagaacaaacccttccactttcacaaagtcttccagacttacctggccctagcaagaaatccacctccaaa

SEQ ID NO: 171081 - DNA, 201 bp, Homo sapiens
atggggtggccttactctcttccactgtagatgcgcattgaggtccacagttacctaggcactccaggcttacattatcatagcccatgatgtaagagggraaaaaaaagtctgtctttcttggtgtgttctattaaatctcatgaaatgactctaattagctcagtcttggtcacatgcccttctcttggcctaatctga

SEQ ID NO: 171082 - DNA, 201 bp, Homo sapiens
ccctaggggtaaatgagttgtcaaagtctttcctcataaggttatccatggctggagccactggaaaatcagaagagggagcagtggggtggcgtcaccarcagtaaggtcttcattcttgggcgcattcctgagtggaaaatgccctctgctctctgccactgagttggaagtaaaggcagcttccccaaccctgtaaaa

SEQ ID NO: 171083 - DNA, 201 bp, Homo sapiens
agggtcattatttatctttgttttttgtttgtttgtttgtttgtttattttttgagacagagtctcgctctgtcgcccaggttggagtgcagtggcacagyctcggctactgcaagctccgcctcccaggttcacgccattctcctgcctcagcctcccaagtagctaggactctgggactacaggcgcctgccaccacgc

SEQ ID NO: 171084 - DNA, 201 bp, Homo sapiens
gtgggcaccctaggggtaaatgagttgtcaaagtctttcctcataaggttatccatggctggagccactggaaaatcagaagagggagcagtggggtggcrtcaccaacagtaaggtcttcattcttgggcgcattcctgagtggaaaatgccctctgctctctgccactgagttggaagtaaaggcagcttccccaaccc

SEQ ID NO: 171085 - DNA, 201 bp, Homo sapiens
aatatggttggtagaaagaatttcacttattgtctattttgaatttttttatctttataaattataattgataacatcacatagatttttagtattgtatktatttatttatttatttatttatttatttatttatttatttgagacagagtcttgcccggtcacccaggctggagtgcagtggcttgatcttggctcact

SEQ ID NO: 171086 - DNA, 201 bp, Homo sapiens
cacacctgcacatgactgcttctttttgcccaagttcctccttcaatgtcctaattctgaatttctggataaaggctacatctgtaagttagcttatcttkgttcaagaatttatcctagatccaagagtggaatctcaaagtaaaagaactgccctcctaaggattatgtaagattatcctagaagaaaagatgagaact

SEQ ID NO: 171087 - DNA, 201 bp, Homo sapiens
cattttgggtgggtggattgcttgaggtcaggagttcgagaccagcctggccaatgtggtgaaactccacctctactaaaaataaaaaaattagccaagcrtagtgacacacagctgtaatcctagctactaggatgactgaggcacgagaattgcttgaacccaggaggtagaggttgcagtgagctgagattttgccac

SEQ ID NO: 171088 - DNA, 201 bp, Homo sapiens
cgaagctaatttatcctgaaggtttaactaaatgaagcatttgcagtttaagctgaattggagaaaaataagactcagccctgctaaagtaatcccaggcrccagttagatttcagcaaacacgtagaaagatatttcaggaagcaaactagcatgaagactcatcaactggccaggtgcggtggctcacacctgtaatgc

SEQ ID NO: 171089 - DNA, 201 bp, Homo sapiens
gattcaggaccatggacagaatctgagacagtctggctgtggctgggactgctggcccctgtaagcttggccaagaattaaaatactgaatccacagaagyggaagatgtggtcaattccagtgctgtccaggggccccatttcattaagcagagcatggtggccagaggaggcaggaaggtgagtggtcctcggggtgag

SEQ ID NO: 171090 - DNA, 201 bp, Homo sapiens
tacaagtgtgcaccaccacttgtaatttttttttatctttagtagagccggggggttcaccacgttggccagactggtcttgaattcctagcctcaagtartccttgctccttggtctccctaggtggtaggattacaggaatgagctactgtgcctggcagaaatgtctctatgaacactcagtagccacctgacctata

SEQ ID NO: 171091 - DNA, 201 bp, Homo sapiens
tgtagacatcgagaggggagtctccctgttaaaatatatctcactggattccctgtttgtatttaggctccaagagtcctggtctcattgcctcaaaatcyagattgtttctgacgttgtgactggtgtgacatgatgacccagagctgcctccaagcagtgtgacttctattcttcaagtggaatgcagaagcaattagt

SEQ ID NO: 171092 - DNA, 201 bp, Homo sapiens
cacctggaagtggaagggaagtcctaattttctttgccttggagcctcttaagaatgcaggttggacctcatgttggaatgtttccaggccttttttactytttctttaacaccagctactaagtcccagttgcccctgtgactttcgtatctagcatgtgaagcaacttctgtaagcaaggagcaatattatgatatgga

SEQ ID NO: 171093 - DNA, 201 bp, Homo sapiens
tttgatagtacctcctagttttcctttgaggaaccacctcccacttgcagtccgtgtgctccaagaggagctggtcccattcccatgtccagttggttttktttttgttgttgttgttgttgttttaaattttactctaagttctgggatacatgtgctgtatgtgcaggtttgttacatagataaacatgtgccatggtg

SEQ ID NO: 171094 - DNA, 201 bp, Homo sapiens
gcacatggcaggcttgcctggggccagttccctagggccatgcttgtctggagaggagatcagacaaaaattgtttgttcataagaaacaaaaatcaactyaaactaatgtaaataaaacagtgcaggaaagtctcccagatagtcactgggatggctctggtgacacaactgtcaaagtgatggacttccattctggagc

SEQ ID NO: 171095 - DNA, 201 bp, Homo sapiens
aaggacataacttttcttccctaaaggggaattgaattgaaactaatacatagtgtctcaagacttctgagtacagagtagattcaagaaactttttttgyctgttacctgaggacaccaggctggatgtggcaagaatgaagaggtaactaagactcagtccataccctaaaagaacttaatgtctagtagtggagttca

SEQ ID NO: 171096 - DNA, 201 bp, Homo sapiens
taaaataaggaagccatttccaatcgacaaaaacaaacaaatctgtaggttgaaatgagactgtcccctcctccttttctttttttggtttctgaaaccaygtggtcaaaaataacttcaggcctgacctttctcttcatatatctgaagaatgagtaaaggaacctcttggaggtaaatataaatattaagaaagaaacc

SEQ ID NO: 171097 - DNA, 201 bp, Homo sapiens
ggagtttgtgaagatgcattagacttagattctgcttccatgaggatccagataagacactgacttaaaatagtgacagaaaaagagaaaagtgactccasaatgttgctccttgagaaatgtgaggggaatgacgctgctgagggaaacagggccatggggtgggaagtgtttctgtccttagatgaccttggatcttag

SEQ ID NO: 171098 - DNA, 201 bp, Homo sapiens
aattgtgccgcaatgactgttgctctaagacgcctccactgtaatcgctccctaaattaactctcgcctcttatttaacactaagttaaggctttaaaatragctgtgatttgtagtaggcagcacagcagttgctgaattgtggagtcacacctataaataaataaatataagtatatatacacacatacatataatttt

SEQ ID NO: 171099 - DNA, 201 bp, Homo sapiens
actatttctaataaagtgatgttttattatttatattagggggaggcaacctgaccccaaaataagagtgtgagctggctcgtgctaagagaatatctgtratttcataatatctgctgggatttttgtgcaaaaagttggcaacttggagcagacagctttctattgaagaaggaaacgttttttagtgatagcagagat

SEQ ID NO: 171100 - DNA, 201 bp, Homo sapiens
ttggaagcattaaataaaatgataggtgtgaaaatactttgtaaaccatttaacctatgcttcctgcccttttttcccaagggacactataccataaccckctatatcttttttttttagatctacccgtgttaaatgcaacatcttagaaacttacaatgtactttgacatattaaggactctgagcccggacatcatgg

SEQ ID NO: 171101 - DNA, 201 bp, Homo sapiens
ggcctagcgctaagctcttgcacgtgtggctaattctcacaacaatctgcaaaggggacatgatcatccccaatcagaaaaggaaactactgttcagagasatgaaattacataagctactcactaaggccaagggagattagagcctaggtgtgtttggtgtccaagccccaggcttttctggcactctgattgcttccc

SEQ ID NO: 171102 - DNA, 201 bp, Homo sapiens
tcattgagttagtcctgtgggagttactctcaattacaaattgaagactaattgtgccgcaatgactgttgctctaagacgcctccactgtaatcgctccytaaattaactctcgcctcttatttaacactaagttaaggctttaaaatgagctgtgatttgtagtaggcagcacagcagttgctgaattgtggagtcaca

SEQ ID NO: 171103 - DNA, 201 bp, Homo sapiens
aaacccttccactttcacaaagtcttccagacttacctggccctagcaagaaatccacctccaaagacctgcatccctgatgactaatttttaacatcctkgttggtaaggaggatgtggtgtttattagttgtcttttaaaaatatgtcctatatctccaactggatgccaacctctgtgtgtgaccaatctctggatac

SEQ ID NO: 171104 - DNA, 201 bp, Homo sapiens
ctcctagtttttgacctgttttggcactaattaccctcatccccccaattttagaataagaggcctttggacttgttcccttacatcaaatcctgggattkactcaacatgcaggttggattttcctccagttggcccatccaattataggcagatctcatgctgtctctgcaacactcttgacctccctaccaacatttc

SEQ ID NO: 171105 - DNA, 201 bp, Homo sapiens
gcccatccaattataggcagatctcatgctgtctctgcaacactcttgacctccctaccaacatttctaatcaatcaggtgacttcccatttgagcggagstgtaaatgtgtttaaagcagggatcacatctggcattccaagggctagatctgttaagcagccaagttttatttgcctataccatgttttaaaaaaattg

SEQ ID NO: 171106 - DNA, 201 bp, Homo sapiens
tagttgttattccatactacatcaaccataaactacttaaaggcaaggacaaggtattattcatcttcattctttgttcttggtccacacctggcatggarcaagctgcctgtaaatagttgttgaattaaatgagtgtctgttcctgggtccaacacactccctgtacttgagggagcagagccagttgggtgaggggag

SEQ ID NO: 171107 - DNA, 201 bp, Homo sapiens
cattgtgaaagtcatttaaaattagcctgacatacagaatctttggtattctattatatgcctacatttcaattaggtccttgttgtaggtcagtttcccrggaaacagattctgagactctgagatttatgtacagagcagggaatgaaggaggcagaatcgggcaaaggagaaaggtaaactgccatgtagtgatattt

SEQ ID NO: 171108 - DNA, 201 bp, Homo sapiens
ctttttttgtctcccaggcctcccacagcattgcttctgctgagagctcctttcactcctggccccactcctcccaccagggctgaaagccaggggagggkgttggggaaaaattggcacaccattgtctgcatttctctcctctctcttgcctgtgtaccaaaagaaacacattttttttaaaagtcccattttttctcc

SEQ ID NO: 171109 - DNA, 201 bp, Homo sapiens
aaaagaatgagtgaatgctttgcttctgtaaagctgacttttttctctttcttaaactcaccatacatttttctctcacttcctggaatgcttccctactkgctcttcgccatgtagccaagtcctagacatttgccaaggtcaagaacaaacccttccactttcacaaagtcttccagacttacctggccctagcaagaa

SEQ ID NO: 171110 - DNA, 201 bp, Homo sapiens
ctggaatgcttccctactggctcttcgccatgtagccaagtcctagacatttgccaaggtcaagaacaaacccttccactttcacaaagtcttccagactyacctggccctagcaagaaatccacctccaaagacctgcatccctgatgactaatttttaacatcctggttggtaaggaggatgtggtgtttattagttgt

SEQ ID NO: 171111 - DNA, 201 bp, Homo sapiens
aacatgaggtttagatcaaaaaacactgttttactttctggttttataattttgaatgtttcatgaactgatagataaatctagcctcagcacattatgawtctgaggacattcttaagtttgagttggctaaaacttccaaattgttttttttaaaatcattccccaagagtgtcagcttatactagcatagcaacagga

SEQ ID NO: 171112 - DNA, 201 bp, Homo sapiens
atagagctttacaggctcctaaagtatatgaaattagttaacatattggtcaaacactaaaaatgccccttcaggcaatcaactgaccctgcccagacagrggcaaaaatggttagacagaacacagagaatgagggaattcatttttctatatacatgacagctgctgtcttactggggtgttgattactttttttctcc

SEQ ID NO: 171113 - DNA, 201 bp, Homo sapiens
accatgctgccagacttgcaaaaagagagtcaagggacttatcaagaaaatgatctcttcaagacacaggaggcaatccatgagaatgtatgttattctaraataattctgatcaaaatttagaaacataatgaattccttgtggaataaccaaccacatttaagtaggaaaagaaagagccaaggaaaattaatagagct

SEQ ID NO: 171114 - DNA, 201 bp, Homo sapiens
gctttttaaggtcaacaaatttaactcgagtcctcatgggaactgtggtcactatgacagactcagaggagactgggcctgtggaggtgagccgtgtccckgggagaagtgggagctcttgcagcttggagtgtaggtgcactcccctatgcttcacctgttcctaaggtgtgtgtgggatgatttcagtctaccttaaga

SEQ ID NO: 171115 - DNA, 201 bp, Homo sapiens
gtgaaagaaacagaaggcaggaccagggacccaggacttcctgtgacatctttactctgacctgcagcaatgaactgtttcatggtgagtggtctctacarattgccttcaggtgttagtttaagagagcagataaaaaagaaaagttaaaaagattttgaaggtttattaaaagggagcacttgatacacatcaagtcca

SEQ ID NO: 171116 - DNA, 201 bp, Homo sapiens
tattacaaagccaataaaccatgctgccagacttgcaaaaagagagtcaagggacttatcaagaaaatgatctcttcaagacacaggaggcaatccatgaraatgtatgttattctagaataattctgatcaaaatttagaaacataatgaattccttgtggaataaccaaccacatttaagtaggaaaagaaagagccaa

SEQ ID NO: 171117 - DNA, 201 bp, Homo sapiens
cgttcactctcagccggctctggccccaccctctccactttatggctacactctgcagagagatagaatgcctgcccacgccactctagccctttgggacrtaggtgctggttgcagcctaaagtagggttagctccttcagtcactcattatcccagtagctaccctaaagtttcatcagtctcatgttccaagctgcat

SEQ ID NO: 171118 - DNA, 201 bp, Homo sapiens
ccgcacctggccttatctttgttttaatctgtctctgactgaacgattagtgcagtgaaagagtcaggagtcttgcagtttcaagtgatgtatgtctcaaytcaacatagcttatgcagaatggaaaaatggttgtggttcatgtaactgagatgtccaagtttggttttgactacaaacacagtaggacccaagggcata

SEQ ID NO: 171119 - DNA, 201 bp, Homo sapiens
agagagctacaggaaggttttaaaaagcagaacggttgtgctagaacacagaacacaggggaaggaaccctgagtttgaaatgtccgtgtattcttggggyctaaacatggctaacataggctttgaatctgcccaatgaatgcaggttccctccccgtgcgctttcccttgacagcagacacagaggcccgggagctgtt

SEQ ID NO: 171120 - DNA, 201 bp, Homo sapiens
tgtgctgggcttagacatgaaggcaagctcctgccgtgttaagggccgatgcctggcagagatctgcctcacactcctttttcactgtgggagtgtttgawgatgaaaggacccacgggtccttaacccggggcttggcacaggaggcatagttagaaacactgtgtgaattcacgaaacaacataatgggcatgaactca

SEQ ID NO: 171121 - DNA, 201 bp, Homo sapiens
tttgaagtgctgagtgtaaatttaagtctcaaaaacattctcaagccaagtgcactgatatatttttagataatagcaggaaaagttatgtaagtggatgytttacagagggacacacactgagggtcacatgctgcagttttctgaactgtaaaagcaaagagagaatgtatgagatgaggaagggacccgattttggtg

SEQ ID NO: 171122 - DNA, 201 bp, Homo sapiens
aatggagtgtggtgggcaaatgaaggaggaatgccaggtgagaatggataggtttctagaggataggctctaaccattcgagcatgattttaattttttttctttctttccacttgctatgtaccagacactgttgtgttttacaaataccgattcatttaatctttataacaatttaggcagatcgttgttctacagcat

SEQ ID NO: 171123 - DNA, 201 bp, Homo sapiens
agtgtagtctagtgcttattagaatttctgagctttcacactggaagtttcaacaggcttactgtgatgcttttgaagtgctgagtgtaaatttaagtctsaaaaacattctcaagccaagtgcactgatatatttttagataatagcaggaaaagttatgtaagtggatgttttacagagggacacacactgagggtcac

SEQ ID NO: 171124 - DNA, 201 bp, Homo sapiens
gcaatacttgtgaaatgatttgagataacaccattttaggatcctcatctttttgtagaaaagtaagggcttattgaaacatagtcatcaggccccattgstgatggttccagctgccttgttggagataatggaaatgagaaattacatccacattatatatctgcaaaagcttccagaagatatttcagagtcattcta

SEQ ID NO: 171125 - DNA, 201 bp, Homo sapiens
ggcacactatgaggaagcacagaaaagaaaatgatgagggaaggagacatgagggaagactttctggaagaagtgtttgcttagctgggttttgaaggatraataagagtttaataggccaccaagtggaaaaggaaagttacttgtggcaaaaaaccaaaaccaaccaaataaaaaaacagcatttgcaaagccacaaag

SEQ ID NO: 171126 - DNA, 201 bp, Homo sapiens
tgagtgatctgtcatgagatctggctgtttaaaagtgtgtgacacctcctccttctctctctctctcttctttctctctctttctacacctcaggtgattmacccacctcagcctcccagagtgctgggattataggcatgagccactgtgcccagccctgacttacatttttaaaactccactctggctgctgtgttgag

SEQ ID NO: 171127 - DNA, 201 bp, Homo sapiens
cctcttcctatctcacccctctacacacacaaatctttccaccccaaacaaatgtcttcatttggtccgtgcttgaatagactttaaaagaaaaggtcttrtaaagacataattaacatttgggattaattgcagatacaaagatatttttaaactttttcttccgaaataattttctatttacagaaaatttacaaaaat

SEQ ID NO: 171128 - DNA, 201 bp, Homo sapiens
ccaaacactgcatctaatcatcggcctaagtcaagtcttatagcagcttttttttttttttttaagcagttgattgaatgaatacaaatgcctctctgttrtcacttgggatgccacttgatatatcccattttctagactctaattattccatttgtagacatgaatgccatttagatgtgagctaattcagcatggtaa

SEQ ID NO: 171129 - DNA, 201 bp, Homo sapiens
aactgagtctttatagatcccagagaaagagctttaaaaatgaaactcagattgtcctctttcttccaaaacttaaaagtagtaaaaacaaataaaaattrtaggctagaacttctcgagtgaggtttcatgatgccaagctttggagattttgtcaagttgaatcagttgaaggaatttagcataaaaattgaagagttt

SEQ ID NO: 171130 - DNA, 201 bp, Homo sapiens
tggaggtaaatataaatattaagaaagaaaccaaatgcccaaacactgcatctaatcatcggcctaagtcaagtcttatagcagctttttttttttttttwaagcagttgattgaatgaatacaaatgcctctctgttatcacttgggatgccacttgatatatcccattttctagactctaattattccatttgtagaca

SEQ ID NO: 171131 - DNA, 201 bp, Homo sapiens
cccctcctccttttctttttttggtttctgaaaccatgtggtcaaaaataacttcaggcctgacctttctcttcatatatctgaagaatgagtaaaggaamctcttggaggtaaatataaatattaagaaagaaaccaaatgcccaaacactgcatctaatcatcggcctaagtcaagtcttatagcagcttttttttttt

SEQ ID NO: 171132 - DNA, 201 bp, Homo sapiens
agtcacttagtctttttgcaatattgttttctcatctgtaaaggtagataggactcattaatcacaaagtctcttctagatctttctttccatgatttctrttgtacattgttgatcactccccaactttattttacccttgacatctctctccatcagaggtgttttaaaaaatgtgtacaattttttagcttcccaaaa

SEQ ID NO: 171133 - DNA, 201 bp, Homo sapiens
agagatgagcagctttttcaggtacaagcttcagaatcatagatctcaaaagacgaagctatttctctcccacttttgcagccaccaaataatcaactgcwtgtaccatctgcatgtattggtggttatctcccctcacctcacactgtcctcaccctgctgtcctcaatatgaaaatgtttctggcataaaatacacatg

SEQ ID NO: 171134 - DNA, 201 bp, Homo sapiens; identical to SEQ ID NO: 30796

SEQ ID NO: 171135 - DNA, 201 bp, Homo sapiens
actgtatttatttagaataacaatataaataaaaataagcaacaaaatgttaaataccaacaaaaaccacaagcgtcacattgattaagctcatcactgtstgcttcatgtgtttctatattttctccccaatatttgccagctgcatacattttcattgccttctcaagtgacaattttgtaatattttctatatagaaa

SEQ ID NO: 171136 - DNA, 201 bp, Homo sapiens
ggcctccccaccatcagacttctctgcctgagcccagatcaggcctccctcctccatctctcctgaccttaactcaacactgtttcctctcctccaagaayaccaggtgcaatttttttttcccatttgtttttattttcgggagtcatcagttgattttttttacattgcaaaccccattttatttctgtcactattcta

SEQ ID NO: 171137 - DNA, 201 bp, Homo sapiens
atctgaatagacagggtatggccagaccatgctcacttgcctactcctgtcttcagaaagctgggcatcacaattggcacttgctcttcagcactgataastggagtgcagagaagtcccccaaagaaacagggcggcatcctagacaaatcaaaatgacatacatgccctactcataggtaaagctaaatgctattgaca

SEQ ID NO: 171138 - DNA, 201 bp, Homo sapiens
tgctgggcctgatgtaaaaaaaagcaaaaactgaaaacaaaggggaatctaaagaagaaagtgccaagactcccaaagaaacagaaaataatctggagaarccagataatgaggaagataaccgtgaggtgcccagcctgcgcctgagactgacaggagcttttgacgatacttcatttgcttctctatctaatcttgtca

SEQ ID NO: 171139 - DNA, 201 bp, Homo sapiens
ccaaagtgctgggattacaggcgtgagccacgatgcctggccctaatatttaaatattaaaggccaagtgtgggcagatagattctcatatatgttatcayttatatgtattaaagtgatataaaagaaaaattttatgtcttttaatatttttcttttaatactgagtcattcactttagaatctgtattttaaactctt

SEQ ID NO: 171140 - DNA, 201 bp, Homo sapiens
gggaaagtttaggaaactacgtggcatgttccgtccttctgggttatggatgctgccaagtgaaaatgtgagatgtgttgccaaagacaacacagtctttyatttgacacagaaaaaagcaacattctgatttccctgtcttaagaactgtttcctctacaatctggcaaggcatgcttatggaactcatggcaacctgct

SEQ ID NO: 171141 - DNA, 201 bp, Homo sapiens
gcttcagaatcatagatctcaaaagacgaagctatttctctcccacttttgcagccaccaaataatcaactgcatgtaccatctgcatgtattggtggttwtctcccctcacctcacactgtcctcaccctgctgtcctcaatatgaaaatgtttctggcataaaatacacatgttctatagatcagagcctgtccaagca

SEQ ID NO: 171142 - DNA, 201 bp, Homo sapiens
ctgtgtggcactgtggtcttggcacttcttggacagcatgtctcacctgctgatgaaactcctgagcaagaagatcaagaagcagaacctcaaaatgcacrccggaacctaaagttgccgggggcctcaaatctgaccctatcagaaactcaaaacggaggtgtgtctgaagaaacgatgggaggtggaaaggttaaaaaa

SEQ ID NO: 171143 - DNA, 201 bp, Homo sapiens
ctaaagttgccgggggcctcaaatctgaccctatcagaaactcaaaacggaggtgtgtctgaagaaacgatgggaggtggaaaggttaaaaaatcaaaacrttctgtgaatgtggggttatcagaagctcaagatggagatgtgtctcaagaaacagtggaaaatgtaaaagttcaaaaatctcctcagaaatccattgta

SEQ ID NO: 171144 - DNA, 201 bp, Homo sapiens
tcccaattcagaatcaaaaaagaaaaagaagaaaaagggaaaaatggtgaatgatgctgggcctgatgtaaaaaaaagcaaaaactgaaaacaaaggggawtctaaagaagaaagtgccaagactcccaaagaaacagaaaataatctggagaagccagataatgaggaagataaccgtgaggtgcccagcctgcgcctga

SEQ ID NO: 171145 - DNA, 201 bp, Homo sapiens
attgggagtttatgagtgtaggggggcatggtgataaggtaaacaaaactcaaaggaaaaagctgatactttgaataatggcactctatctaaatgccttyggcctgtgaatggagtaggctgcttttctctaaagcagcagccacagcttggctggggaggcctcaacagtctctctagtttcatcagtgtctccaagac

SEQ ID NO: 171146 - DNA, 201 bp, Homo sapiens
tctgagatgaggtcctggagtttgtatttaatgtgattgctttcaagggagcttggaaaatgctagtgggagagaaagacctacatgcattgccctcaggrctgaagcatataaaatgtgggccctaacacctgatctctctgcaaaggaagaaccggttttaatctacctggaaatattaattcaaagattaatccaaga

SEQ ID NO: 171147 - DNA, 201 bp, Homo sapiens
aaaaaatgagccagctgtggtggcatgtgcctgtagtcccagctactcaggaaactgcggcaggaggatcccttgagcccaggagtccaaggccgcagtgrggtaggatcgtgccactgcattctaacctgggtgacagagtgaaaccctgtctctaaaaataaataaataaataaataaataataatctgagaagtcctg

SEQ ID NO: 171148 - DNA, 201 bp, Homo sapiens
aaaataaaaaaaatgagccagctgtggtggcatgtgcctgtagtcccagctactcaggaaactgcggcaggaggatcccttgagcccaggagtccaaggcygcagtgaggtaggatcgtgccactgcattctaacctgggtgacagagtgaaaccctgtctctaaaaataaataaataaataaataaataataatctgaga

SEQ ID NO: 171149 - DNA, 201 bp, Homo sapiens
atacatagaccaatgtaacataacagaggcctcagaaatagcatacatttgtttcttactgagccctaaaatgatgaccttattgataacacctccattcrgatgaggaaattgggacataaagagagtaaagggcttgcctaaggttcccagctggtgcgtgtcagagctgggactcataccaggtcctcttcctatctc

SEQ ID NO: 171150 - DNA, 201 bp, Homo sapiens
ttccctcccctttctccctattccccaacaggccccggttgtgatgttcccccttcctgtgtccatgtgttctcattgttcaactcccacttatgactgaraacatgcggtgtttggttttctgttcctgtgttagtttgctgaggatgacggtttccggcttcatcaagtccctgcaaaggacatgaattcattcttttt

SEQ ID NO: 171151 - DNA, 201 bp, Homo sapiens
gtttagaaattcattatagctacatactaataaaatattaggagtgacagggggtgcttttcaagtcaaaactggaaggaaacacccagcagatcactttscttgccccttgtttgggccagttttaaacacaacgttgggaaacaccacagcccagtggaaagctcactggcttggatatcagaagatgcgaattctttt

SEQ ID NO: 171152 - DNA, 201 bp, Homo sapiens
gatcttagggtgttgaatttcagatgttgcaggacagatctgtggacatattttatgcagctggagaccatcaggcaattagaatttttttttttttttttgagacggagtcttactctgtcgcccaggctggaatgcagtggtgcaatctcggctcactgcaacctccacctctcaggttcaagcaattctcctacctca

SEQ ID NO: 171153 - DNA, 201 bp, Homo sapiens
ttgtcagccaagatggccttttccccaaaactggatcatagttcctgggaaaacttttctctcaaaagctgagtggattgagccagtgttcccacatctgycttcccatgcagagagtccaggtaaagaataaatgtatttcgtttagatgcaaactcctcttacctgccccgccccagtttagaattaaagcctatttaa

SEQ ID NO: 171154 - DNA, 201 bp, Homo sapiens
ggaagtggaagggaagtcctaattttctttgccttggagcctcttaagaatgcaggttggacctcatgttggaatgtttccaggccttttttactttttcyttaacaccagctactaagtcccagttgcccctgtgactttcgtatctagcatgtgaagcaacttctgtaagcaaggagcaatattatgatatggacataa

SEQ ID NO: 171155 - DNA, 201 bp, Homo sapiens
tttatttttcttagatggtttctaagattaagtggggaaaacagaatatgtggggatggaggaaaacattagtttatggccttaccaatttattaatgtawtatttaaaaatatacgatttcattctttacctttttgaattggtctatagattagttgacatgcatacattttgaaatgtttctttgctttggaaatttc

SEQ ID NO: 171156 - DNA, 201 bp, Homo sapiens
tttattcatttctttaaaaaagcattgaatgcttactgtgttttatattgtgctaaatatgaaaatatgtaagaaaggatataccttatcttcaaatagcktataatctagtaggaaggggaacacatgcaaaatttagcaataagccaggcacggtggctcacatctgtaatcccagcactttgggaggccgaggcaagc

SEQ ID NO: 171157 - DNA, 201 bp, Homo sapiens
gatgaaaccgaaaggagttgctgcattttgagataaaccaatgactggattttaaagacttccatgaaagggaagtcttcagtctaaggaccttgagaagraagaagatttggagcggaattttctgtggaattgatgcaaaaattaggaataggattttgacgcaacaaaggacccatcaaagagagaatctatttttag

SEQ ID NO: 171158 - DNA, 201 bp, Homo sapiens
ttgaattcatctaagaaacaggaagaaaactgtcaaatatttaaacgtaatctatatgacaatattttttaatttgttaaagtttatcagtataattttgraatagggattcacacttataaatatttaaaatgtgaaataatttcattcctctttttagaagcattatatatggattactattttggatcaaatagagtt

SEQ ID NO: 171159 - DNA, 201 bp, Homo sapiens
tattattttaaataagatataaaccgtatcttctactaatttagagtaaggataacaaatgaggtacccccaaaagaaagtacccaggggcagctgggaartggctggttcttggcctcacatgtagccaggtcagatttcagaaaaggaaaaaaataatgccagaggtagggagatctggtagaaagcagttctgccagt

SEQ ID NO: 171160 - DNA, 201 bp, Homo sapiens
gaattatatattttcattttatctttcactattaatacactcatgccttactttaaataagaagcttctttcagtttggaaatatgtccacctagattggrctctctaggcctgacttagaacttagcagagagtaggtactcagtaaatagtcataaaatgaaaggaaaaattaataaataatatgtactggttatgaaa

SEQ ID NO: 171161 - DNA, 201 bp, Homo sapiens
gggaaatggctggttcttggcctcacatgtagccaggtcagatttcagaaaaggaaaaaaataatgccagaggtagggagatctggtagaaagcagttctrccagtccagggcctgacctgggttagtagtggaaagaaaggaaaagtatgaagacattgtgaaagaacaacttttaagtggctgtgtggggttgggaaat

SEQ ID NO: 171162 - DNA, 201 bp, Homo sapiens
ttaagtgttgtctcctgaaagccaaatttgctgaccaggcattaaatcatttttctagtctttttataagaataaagcctgtattattgagcaagaaacawcagagaatattacttaagtaagcattctattaatagacttccagaagtttatgccaacatatcctagtgttccagtctccaagttttagattcccctaaa

SEQ ID NO: 171163 - DNA, 201 bp, Homo sapiens
gaaaactgtcaaatatttaaacgtaatctatatgacaatattttttaatttgttaaagtttatcagtataattttggaatagggattcacacttataaatrtttaaaatgtgaaataatttcattcctctttttagaagcattatatatggattactattttggatcaaatagagttagatactgataaaatagaaataaa

SEQ ID NO: 171164 - DNA, 201 bp, Homo sapiens
ttgttaagaaagctgtgggaagaaataatttaaaagtggtacggagagtggtcagcagtctggtgtgctgtagaattatgaggagcctgagaataaaagcrtagaatttggagtttggagtctttcaaagactctaacttcaggggcctgatatagccaaaagacagttccaggaagtttaggagtggagaaggctttgcc

SEQ ID NO: 171165 - DNA, 201 bp, Homo sapiens
ggatttccttcattttctatttgtttcttcttatataagagtattcaacctttaagtgcatgacaaagtttatacccattcctgttctagaatagtcttayaggctgggctctgtggctcatgcctgtaatcccgtcactttgggaggccaaagtgggaggatcgcttgagcccaggagttcaagaccaggccgggcaaca

SEQ ID NO: 171166 - DNA, 201 bp, Homo sapiens
atactgataaaatagaaataaatcaaagatagccttatatacacaaagatttttaaaggtaactagaagataattggtgggtaggtatagacaagaaagaragtctgaagttaaatgtaaggagaaataagcagataaagctaactcttttgtgttcaaatgttgcatagaggtcaagggtaggttgcttgacataataaa

SEQ ID NO: 171167 - DNA, 201 bp, Homo sapiens
gtttttataaaagcgtctttactgtgtagcaaccaaaaagtcatttttacaagtgtggaaagtgaagtcaatgctggtataacactgtgttgatccacacygttcactgttctatgtaaggtagttttgatgacctggtctaaatagggagctgtgggacctcactgggtctttgctattaatatagctgtttactatgtt

SEQ ID NO: 171168 - DNA, 201 bp, Homo sapiens
gaggctcgggggttatatttatttgcccaagtttgtgcagttagttattaggtggcagagctgggattttaatccagtttctaccaaaactctgctcttartgtgcatgggtgaatggatagaaatttcacattcacttttaaagaagccagtttcccatattgctaattttatttacaaaactgatatgtatatgtgtat

SEQ ID NO: 171169 - DNA, 201 bp, Homo sapiens
ctttttctcaatttttacttttatgtcagataaaccaataagtattattaaattgtacttgaacaaaaataactaggtaacatttatttcaggccaaagawgatgatttaaattcattcaatgccacagacctgaaggatctctcttctcatcaattgaatgagtttttagcacagacgctccagagggtaagtactagct

SEQ ID NO: 171170 - DNA, 201 bp, Homo sapiens
tgagagataattaaagagtatgatttgtagggctcaggattttggggatagaaaatactctgacacttgatgtcactccttcatgcccaaagcagttgtcyttaattggccatggcaagtagatatggcctcccaatcctctgcagaatcatttggtctgagttaccataccaggttgggctttttctagatatacaacca

SEQ ID NO: 171171 - DNA, 201 bp, Homo sapiens
ctcaggcttaaatttattttgaataatcttgttcattcatatggttctttttctcaatttttacttttatgtcagataaaccaataagtattattaaattrtacttgaacaaaaataactaggtaacatttatttcaggccaaagaagatgatttaaattcattcaatgccacagacctgaaggatctctcttctcatcaa

SEQ ID NO: 171172 - DNA, 201 bp, Homo sapiens
gacttgatgttgttcatcttgttgtcttgagtgcctagaactgttcctgccatgtactaaatatgctcaactgattccaactactttagcatatactactygagcacatgacagtcttttgctgaggtgctttggcattctttctaaaagatagatgggtgtttcattaatgtggtatccatttgggtttgtgagttcttg

SEQ ID NO: 171173 - DNA, 201 bp, Homo sapiens
gatcaactcttcaatattagtagaaacaggcattgttaggaacagattcaggacactgtattcactaatgcactcttttccttatgtattttatttctcartgatttgtcttaaatagtaaataaatgcaaaagaatatttataacatattcatatggtgtataaaacaattgtgtgacccaccactagcataagaagtaa

SEQ ID NO: 171174 - DNA, 201 bp, Homo sapiens
atttttttttgacaggaaagggcattctattgtaaactgtgaattcttactattcataggttgatgttctcaatcaagttgattggaatgcctggctctaytctcctggactgcctcccataaagcccaagtaagtacttgcctgctaatgctttccttctcattctcctaactcctagagagcctcaaaatatctgaaag

SEQ ID NO: 171175 - DNA, 201 bp, Homo sapiens
cacttggactgggaggcggaggttgcagtgagccgagatcacacccctgtactccagcctgagcaacagagtgaaactccatctcataaaaaaattttttwaaaaacattagcaataaaaggaggcatactttaggtatcatttggaaaaacttaattagtgaaagactcttccaactgggggcatcagagagggaatttt

SEQ ID NO: 171176 - DNA, 201 bp, Homo sapiens
aaatctactaaagcacatcaataagcaatcagatcagatcgggcagataagaattggtggctttcaggcctctttttcctacttgtgtaggaaggatctgmattttgatttcattaatatgaactaataagtacttactttcttactcttcatccctcaacattttgctaaactgattgatttgaaaaataggtcgattcc

SEQ ID NO: 171177 - DNA, 201 bp, Homo sapiens
gtcatgtcttcttttcctctccgttcttagagtttgtgatgttgaggaatgctgaaggagacttaatcggacaaattctaagctttctaaaattcttttcmagttttgggttatttacactgaagtttgatcctccaaatttatgataactttcatacatttgtttcttttcactgaaaccttcagaaatgtttaggtgtt

SEQ ID NO: 171178 - DNA, 201 bp, Homo sapiens
aacaaaacccatggcataaagccctctatactttaaaagaagtgggccacagggttgacatggagcttcctaccagcctgtgcaaaaaaggaatcagatayctattccatgtcaactgaccagctactgagaagtacaactgctttttagggggatggagggtattgttcaaagaggatactgtgaaacatataaattata

SEQ ID NO: 171179 - DNA, 201 bp, Homo sapiens
ttacagtaactcaatctcaggattatttaagtaactcaggcttaaatttattttgaataatcttgttcattcatatggttctttttctcaatttttacttktatgtcagataaaccaataagtattattaaattgtacttgaacaaaaataactaggtaacatttatttcaggccaaagaagatgatttaaattcattcaa

SEQ ID NO: 171180 - DNA, 201 bp, Homo sapiens
ctccagcctgggcgacagagccagactccgtctcaaaaaaaaaacccaaaaaacaaaaaaacaaacaaacaaaaagaagaaattcagaatcctggatctaraaataagaacttaggaacaatttttacttaacttttaaaaattgacatttgcatgatttaagtttctataaatgcattctgtagccatataagcctagtg

SEQ ID NO: 171181 - DNA, 201 bp, Homo sapiens
tacaaattcatccaaaaagtaagatcctagggtctagatttttgttttcattggcggtaaactacagttagcttgtacacatccagagggcaaaattactkttgaaatatttcagaattttgagaacagcttttggtttttgttttcttcatttttttttcttttgtgcttttaaagggttttgttctacttacagagtgt

SEQ ID NO: 171182 - DNA, 201 bp, Homo sapiens
agaaactactaatattagttactgaggagtagtacttggagacagggagcagatccaaaagaatttttccttctgtcctatttgattttttagtatttgcrtatatttcttttaaagtaacaaaagccctagtttaaaagattataaaagtagttctaaaagatttaaaaatccttatttttataagctttatttaatatt

SEQ ID NO: 171183 - DNA, 201 bp, Homo sapiens
gtacaaattgcacaatctgtatctcataaatatctgattttcaggcagtatgtcttaatagaatgtctattaaccaaagttggcaagaaatgcaagatttrtgagtcatgaaaatgttaattttgaatatattattccatttcttattggcagcaatggtgggaatatgggaaacagatttcagctaaattaataaatgat

SEQ ID NO: 171184 - DNA, 201 bp, Homo sapiens
ttcagctaaattaataaatgattgaggtgataggaatcatgtagacatgattttgtttgatgaatttgcttacggttgttctgtatgcatatttgcctggrtttggccttatccaatgaaatacatttaaaaacccctttggtgttgccatgtcacctaactagaaaccattaaggaactatagaggcatggtcttggaaa

SEQ ID NO: 171185 - DNA, 201 bp, Homo sapiens
tgcctgggtttggccttatccaatgaaatacatttaaaaacccctttggtgttgccatgtcacctaactagaaaccattaaggaactatagaggcatggtyttggaaatctattttgggagagagaaccaggtggctctgctagtcctacttaatccatctagaggtcatttgggagcctatatctttggagaattttcta

SEQ ID NO: 171186 - DNA, 201 bp, Homo sapiens
ttataaacacaagatactcaaatcaagtttttaaaacaagttagctattctgaatagctattcagaactaggtactagactatgaagagactagagaggtrctagaatatgaaggagtaaccctattattttaaataagatataaaccgtatcttctactaatttagagtaaggataacaaatgaggtacccccaaaagaa

SEQ ID NO: 171187 - DNA, 201 bp, Homo sapiens
aacctgcacgttctgcacatgtaccccagaacttaaagtataataataaaaaaagaaaaaccacactgtgagactgccatatttgaacatgagtttatacrtcctacattcaaaagtactagagatttaaaaattaagcaattcaggacacttgtgttcagatgtgaataattgcaaaccaaaaccgaggtcgctagtgga

SEQ ID NO: 171188 - DNA, 201 bp, Homo sapiens
gttgggaaatgggatcaaaccttaggtaactggaagagttcttttaacagaatcaagaaatctggggagaaatctgattcagggagtataaaaatcatttytggaatttttagaagcctattcaatgtgtggtgctatgtcccatggaaatgttgagcaggcgattcgactgaggtcctggggagggaatacaactgtaga

SEQ ID NO: 171189 - DNA, 201 bp, Homo sapiens
tttttgaattgtgcaaatatgtctttactcatgaagcagggagggtactttaaatcacaaacagttatatttggaaaggctatttgaaagtcaggtttatmtaaggtgatattatatctactctcaatatagaaaattaagggtttgagacagggtcttgctctgttgcccaggctggactacagtggcgtgatcatggct

SEQ ID NO: 171190 - DNA, 201 bp, Homo sapiens
tactagctcaaaatcttagaaattaaaatggacagaaaggcacagcatttatgttctacccaacttggcaaaagattattaatgtggaaactaatggggaraaaatcatttataaaatttattcatttctttaaaaaagcattgaatgcttactgtgttttatattgtgctaaatatgaaaatatgtaagaaaggatatac

SEQ ID NO: 171191 - DNA, 201 bp, Homo sapiens
atttaaaatattaatttttaaaaaagatttagaaattatcttgatatagcagattagacaaaattatatatctaaggacttacaagtttaaattttttttygacaggaaagggcattctattgtaaactgtgaattcttactattcataggttgatgttctcaatcaagttgattggaatgcctggctctactctcctgga

SEQ ID NO: 171192 - DNA, 201 bp, Homo sapiens
cctagtgttccagtctccaagttttagattcccctaaagttacaccactgagtgaagtaatacctccttattagcttatttgcgtggtgatagcagtcttyctatatgtttctccatgttatttcatgtcttgcaggtaaagacatttggggagacacatcctttcaccaaacttgtggttgatctgacagatatagaccc

SEQ ID NO: 171193 - DNA, 201 bp, Homo sapiens
cctaaagttacaccactgagtgaagtaatacctccttattagcttatttgcgtggtgatagcagtctttctatatgtttctccatgttatttcatgtcttrcaggtaaagacatttggggagacacatcctttcaccaaacttgtggttgatctgacagatatagaccctgatgtagcttattcttcagttccctatgaga

SEQ ID NO: 171194 - DNA, 201 bp, Homo sapiens
agtgtagcatggtgaaatctactaaagcacatcaataagcaatcagatcagatcgggcagataagaattggtggctttcaggcctctttttcctacttgtrtaggaaggatctgaattttgatttcattaatatgaactaataagtacttactttcttactcttcatccctcaacattttgctaaactgattgatttgaaa

SEQ ID NO: 171195 - DNA, 201 bp, Homo sapiens
tatgtaacaaacctgcacgttctgcacatgtaccccagaacttaaagtataataataaaaaaagaaaaaccacactgtgagactgccatatttgaacatgwgtttatacgtcctacattcaaaagtactagagatttaaaaattaagcaattcaggacacttgtgttcagatgtgaataattgcaaaccaaaaccgaggtc

SEQ ID NO: 171196 - DNA, 201 bp, Homo sapiens
ctatgtcccatggaaatgttgagcaggcgattcgactgaggtcctggggagggaatacaactgtagaactagaatggcaggcatcttcacagagatactarttgaagatgtgggcatgagtaagagctagggagtgaaggatatggcaagaaaatcaaaggaccggggctggaacattgggacatatccatatttttgaat

SEQ ID NO: 171197 - DNA, 201 bp, Homo sapiens
aggttattggacagaaaagactttgttgatcggggtgggggctgccctttcaatagcaagaagccagatggaagaaggggaaagggaggatgattaatgargaagtagaagtagtagtcatagcagtcaaaaactcccttggagtttaaggaaggaaggaggaaaactagaatatttagtgggtagatccatcaagtagaa

SEQ ID NO: 171198 - DNA, 201 bp, Homo sapiens
tcttttaccttctttgaagtgctgtagtagaaatacagtggatcaccagtgccagtatgctaagtatttaggtaggcagtcttttagatagtctgtaattygattactaaaatactaaggtaattttctttttttgtaggcaggcgacaagtcactctccaatgtaagttaaactttttcattatggccttaccttcaaga

SEQ ID NO: 171199 - DNA, 201 bp, Homo sapiens
tcacgccatgtaacctcatccctttcccataggcacatggtaaatgcactctcactgtaaaggtttgtctacaagacattaactactttttagaaccagawgaatcatttgccatgaatttcttttttattaagctttttaatcttgcaggcaaattggcccaagaactttggtgtggtctgagaaagagcaggtggaaaa

SEQ ID NO: 171200 - DNA, 201 bp, Homo sapiens
cctgaggccaaaagaataatttctgcagtttacaaatatggtttttcacttcaagtaattgagtgcctcctttctgcacaaggatggtgagggatttagamaataagctattgtatcttccttcaaacttctgcaataaaaatattttataagtattatgttaattacaacactgttataagttattatccccatttccca

SEQ ID NO: 171201 - DNA, 201 bp, Homo sapiens
gctaggtaaagtgtcttgccctaggttgcacagctagtgagtagtaaaagttgagattcaaaccctggcagtcttattgcctccaatatactgctttcttycttctttttttttagaaacagggtctcactctgtggctcagcctggcgtgcagtgatgtgatcttagctcactgcaccctctgccttccaggctcaagtg

SEQ ID NO: 171202 - DNA, 201 bp, Homo sapiens
ctggcagttttggagtttctcgaactccccatatgtcctccaacatagtacctgagcatgctgttttctctacccggagccctttgcccagttaattccawtctcagctcaagaaccacttcctcttggaagcatttcttgacatccctggccaggtcaaatctcccattctagggctttttagtgctatatcctctcttc

SEQ ID NO: 171203 - DNA, 201 bp, Homo sapiens
ttatgctgcttcattttttaaaaaatctcatcagtttttgaaattaggataatagtgtgtattccctgaaaacatttctatggtacagaagtttataagastaacaagtgagagtccatcaacccctttccactccccaggggtaaccactgttagcagtttggtgtaaatggctccagatcattttctaggtgtaaatta

SEQ ID NO: 171204 - DNA, 201 bp, Homo sapiens
acttgatgtcactccttcatgcccaaagcagttgtccttaattggccatggcaagtagatatggcctcccaatcctctgcagaatcatttggtctgagttrccataccaggttgggctttttctagatatacaaccacagtgatatacagtttgctgatttgcttaacgaacatgaagtttgaaagtacatgagttctagg

SEQ ID NO: 171205 - DNA, 201 bp, Homo sapiens; identical to SEQ ID NO: 30803

SEQ ID NO: 171206 - DNA, 201 bp, Homo sapiens
aattttttcttttttggcagggatcttgctgcctttgacaaatcccatgatcaagctgtccgaacctaccaagagcacaaagcaagcatgcatcccgtgastgcaatgctggtggggaaagacttaaaagtggattaaagacctgcgtattgatgattttagagatttctcttttttaaatggaattcgtaaagaaatata

SEQ ID NO: 171207 - DNA, 201 bp, Homo sapiens
ataggtaaacttgtgtcatgagggtttgttgtacagattattttgtcacccaggtattaagcctagtacccattagttacttttcctgatcctttcccttytcctaccctccaccctccagtaagccccagtgtgtgttccccactgtgtatccatgtgttctcatcacttttgtagaataaaaactttatctctgttcta

SEQ ID NO: 171208 - DNA, 201 bp, Homo sapiens
gtacatgagttctaggaggaaatatattgtgtaatgtattgaggagccagagtgaaagaaacttaagttatagataaagtttttcataatagagaaaattktaggagtcagaagcaaacatattttgatttagatttgacttttacttaaagcccaaaatttgtgtgactgtcctagggttatttaacaatatatatgcaa

SEQ ID NO: 171209 - DNA, 201 bp, Homo sapiens
ctgggcgtggtggtacatgcctgtaatcccagctactcgggaggttgaggcaggagaattgcttgaacccgggaggtggaggttgcagtgagccaagatcrtgccattgaactccagcctgggcaacaagagtgaaactccgtctcaaaaaaaaaaaaaaaatcccaagaaatgaggactgtttttattttaatgtctaag

SEQ ID NO: 171210 - DNA, 201 bp, Homo sapiens
tggctcttctccaccacttaataactgcgtgaagtcccaactacttgggaggctgaggtgggaagatcacttgaactcagaagttcaaggccagcctgggygacatagcgagaccccatttctaaaaaaataaataaataatgatgtgacacttgaacaagttttatgacctcgcaacctcagctggcacatatatataac

SEQ ID NO: 171211 - DNA, 201 bp, Homo sapiens
aagatgagaactatttgagaagtataaaagcaaagttatccctactaatattaggagatttgaaagggaatttacttacttttaaatatgaattgtcttaytgtgtaacatttgtgaacactaatgcaagcacgtggtgtgcgtttgtttgccctctttaggttccaataccctgctacctgattgctttagttgttggag

SEQ ID NO: 171212 - DNA, 201 bp, Homo sapiens
tcccaatctaaaaatctgctcattgtttttacattccccaaatctagagaaaagtaagattttaaaatagtgatttctggttggcatgtctgtttagcaarttagagcctggaattataataatgttacatgttatacaaggaaggcaatttatggtacaaaataacatgtttataattgtttgcttatttatgacaaaag

SEQ ID NO: 171213 - DNA, 201 bp, Homo sapiens
caaatggaggagtcaagaccaaaaaagcactcagttacagtcctggtcattagacatgtatctttgaccttcagtgaacagaatgtgtatgcatgcgtgaktgtgtgtgtgtgtgtgtgtgtgtgtgtgtgtgtgttttcttaattgacctcacaatggataatttgacttccactgcagcttctgtggttccaagctccc

SEQ ID NO: 171214 - DNA, 201 bp, Homo sapiens
atatatatacacatatatatgtgtgcatatatatacacatctatacacgttgtgttcatatatatgtgtgtgtatatatatactttttgtatatgtatatrctttttgtgttcatagtctgtttattagatagtcaagaatgggaagaaaaggttattttacatatatggtttaagacacatagaagcttttatttatgac

SEQ ID NO: 171215 - DNA, 201 bp, Homo sapiens
cagaggccagctgcatttattaatgggacaatgataatgccaaagatagaactgttacagtgcagcaatcttgggataagtgctttaaatgcattcttgtrtctaatccttacagtaaccctgctggtataatctacacttaaagatgaggaaagggaaccttagagaaataacttattcaagaaagtggcaaccagaatt

SEQ ID NO: 171216 - DNA, 201 bp, Homo sapiens
tcctaataatgtatatatgtataaaaatcttttctcttgttcgtgtaacctttgtttctaattttattgtttattgtggttatcacaatctcatttttttkttgttgttttttgagacacaggcttgctctgttgcccaggttggagtgcagtggcacaatctcagctcactgcaacctctgcccccgggttcaagcgatt

SEQ ID NO: 171217 - DNA, 201 bp, Homo sapiens
atgagacctagactagcttttgactcttcaattcttctaatttcactctgtattttactctccataagcaactagttgttgtagcctatatctaatatgarttttttctggtaaatgaaactattttcttactatttaaaaatattaattttaggttttggatacaaaggaccttacaatagaaaaagtagtgatcaatgg

SEQ ID NO: 171218 - DNA, 201 bp, Homo sapiens
gcctcaacctcctgggctcagtcagttgtcccacctcagcctcccgagtaactgggactacaggcatgtgcctccatgcctggctaatttaaaactttttrtacaaacagggtctgtgttgtacaggctggtctcaaactcctggtctccagtgatcctcccaccttagcctcccaaagtgctggaattacaggcatcagg

SEQ ID NO: 171219 - DNA, 201 bp, Homo sapiens
tagttaattagtatttatttaaagttaacttgtttctttcctccactagattgtggactcttgaatgtagagactgtgtttcataactctttgtatctcarcttcctagtatagtctatgtctggcatgtagaggacattcaaaagtttgattaatggatgatttcaattagaaaacagtgcctaagcttaacatgggcta

SEQ ID NO: 171220 - DNA, 201 bp, Homo sapiens
atgccttctctttccctttaagagaagggaaacacttaagtctagcttgtgaggtagatggtattcaccccattctacaaggaaactgtggcatagggagrtcaaataatttccccaagtttacagtaccagtaagtgatagagtcaggattcgaacaccagcagggctgctggtctctaaacctctgctgtttccttatt

SEQ ID NO: 171221 - DNA, 201 bp, Homo sapiens
cgaacaccagcagggctgctggtctctaaacctctgctgtttccttattatcagtgcttctcaaactctctggggtaaaggaccaatttctatcctcttcratctgtcatagactgatacttttgtacaatgcaataaaaatgaaatatgaggaagaagagatgaaatacaagcacacattttttattattagattcaaca

SEQ ID NO: 171222 - DNA, 201 bp, Homo sapiens
agggttatttaacaatatatatgcaaatcttagaacccaaaaattttcaagatgcttagagtcccaaaaaatgagacctagactagcttttgactcttcarttcttctaatttcactctgtattttactctccataagcaactagttgttgtagcctatatctaatatgagttttttctggtaaatgaaactattttctta

SEQ ID NO: 171223 - DNA, 201 bp, Homo sapiens
tagttccttcacccatcccccaacgctcgtctgactttaagaaacttcctttcccggcgtgcaccgcgaatccctcctcctcttctttacctctctccctyctcctcaggttctctatcgacgagtctggtagctgagcgttgggctgtaggtcgctgtgctgtgtgatcccccagagccatgcccgagatagtggatacc

SEQ ID NO: 171224 - DNA, 201 bp, Homo sapiens
gtaaataaatgcaaaagaatatttataacatattcatatggtgtataaaacaattgtgtgacccaccactagcataagaagtaaaatcttagcggtacctytgtagcatccctccccatcttatgcccctctccaccctccttgctgacccatccaggttaccattgtcctgaattttggtttatcattctcttgcttttt

SEQ ID NO: 171225 - DNA, 201 bp, Homo sapiens
gtcgctgtgctgtgtgatcccccagagccatgcccgagatagtggatacctgttcgttggcctctccggcttccgtctgccggaccaagcacctgcacctkcgctgcagcgtcgactttactcgccggacgctgaccgggactgctgctctcacggtccagtctcaggaggacaatctgcgcagcctggtacagtggggcg

SEQ ID NO: 171226 - DNA, 201 bp, Homo sapiens
cctacgaacccaaccagagcaggtttgggtgctgggaggagtggaaaccacatgcccctccccaccgtgctctgaccccttcctcttctcttagggttggrtgggctgtctgagcgctgtgcccagtacaagaaggacggagctgacttcgccaagtggcgttgtgtgctgaagattggggaacacaccccctcagccctc

SEQ ID NO: 171227 - DNA, 201 bp, Homo sapiens
aggaactgcctgctggtgaggggtctggtcggggataaagggtgggctctggggaagaggaatcccggtaacctgtcccttcatctgcaggctcttaccctgagacacttgacatttagcccttgcatctatccgttttgtggtaccagggggtccctcctctcctgtccccagccaaaccttttcctttcccctcgggaa

SEQ ID NO: 171228 - DNA, 201 bp, Homo sapiens
tgagaactgtttgattctctgccctacgaacccaaccagagcaggtttgggtgctgggaggagtggaaaccacatgcccctccccaccgtgctctgacccmttcctcttctcttagggttggatgggctgtctgagcgctgtgcccagtacaagaaggacggagctgacttcgccaagtggcgttgtgtgctgaagattgg

SEQ ID NO: 171229 - DNA, 201 bp, Homo sapiens
gaccctgtccctcgccctgcagaatggcattgtgcccatcgtggagcctgagatcctccctgatggggaccatgacttgaagcgctgccagtatgtgaccragaaggtaaatggctacctgcctgaccagtgcaaggtggctggccggggaccctggggctaacccctatcctctcctccaccccactacccaccgtgcgc

SEQ ID NO: 171230 - DNA, 201 bp, Homo sapiens
ccagcactgaccccggagcagaagaaggagctgtctgacatcgctcaccgcatcgtggcacctggcaagggcatcctggctgcagatgagtccactggtgygggcaggagacagaatgggtggagggtgcagggttgggagtggcaggctgatcccctaattcccatgtgacactcccagggagcattgccaagcggctgc

SEQ ID NO: 171231 - DNA, 201 bp, Homo sapiens
acttgaacccaggaggtggaggttgcagtgagccaagatcgcaccattgcactccaccctgggcaacagagtgagaccctgtctcaaaaaaaaaaaaaaaattaaaaataggtaaattgccattttcaaagatacctgtaaagatttttaaaatcattcatgaatgcggtctgttcgttgcacagagtagatgctcaaaaa

SEQ ID NO: 171232 - DNA, 201 bp, Homo sapiens
tcaccttcctgtctggaggccagagtgaggaggaggcgtccatcaacctcaatgccattaacaagtgccccctgctgaagccctgggccctgaccttctcytacggccgagccctgcaggcctctgccctgaaggcctggggcgggaagaaggagaacctgaaggctgcgcaggaggagtatgtcaagcgagccctggtaa

SEQ ID NO: 171233 - DNA, 201 bp, Homo sapiens
gcgctgagtcatggcgggggaggaagccggacgagatgaaggaccattctcccccttttcttgcagggacccctgtggcaaaggattagggccccttagcsctggcggggatcctaagaggcagtgaggggtgggggccggcccatgtacagccccagggttctcgcaagtgggagcttggtttctgtcctgggaaacggg

SEQ ID NO: 171234 - DNA, 201 bp, Homo sapiens; identical to SEQ ID NO: 30853

SEQ ID NO: 171235 - DNA, 201 bp, Homo sapiens; identical to SEQ ID NO: 30855

SEQ ID NO: 171236 - DNA, 201 bp, Homo sapiens
ctaactagtccttcccctctgtttcctgtatccaggaacttgctactaccagcaccatgccctaccaatatccagcactgaccccggagcagaagaaggarctgtctgacatcgctcaccgcatcgtggcacctggcaagggcatcctggctgcagatgagtccactggtgcgggcaggagacagaatgggtggagggtgc

SEQ ID NO: 171237 - DNA, 201 bp, Homo sapiens; identical to SEQ ID NO: 30833

SEQ ID NO: 171238 - DNA, 201 bp, Homo sapiens; identical to SEQ ID NO: 30858

SEQ ID NO: 171239 - DNA, 201 bp, Homo sapiens; identical to SEQ ID NO: 30859

SEQ ID NO: 171240 - DNA, 201 bp, Homo sapiens
taagtaaatgtgggggaagactggggctaaagaagaggaaagaggggcacgcccagctacctaggaggctgaggcgggaggatcacttgagtccaggaagkggaggcttcagtgagctgagattccaccactgtactccagccggggcgacagtggaaagggtgctagaggtcatttcctgtgtcttaatgttgttaccct

SEQ ID NO: 171241 - DNA, 201 bp, Homo sapiens; identical to SEQ ID NO: 143895

SEQ ID NO: 171242 - DNA, 201 bp, Homo sapiens
ccatttggcctgactccagcccatgcctaaggcagttgcgggtcatccctgtcccaggggaggacagcagtgcactggatagaccagttctcccttcttgyctctaaggacacgctgctcctattccccaaagagacagacattgtttcctccaggagctgagaagccctcttctttcttctttgcctaaagaaggcaaat

SEQ ID NO: 171243 - DNA, 201 bp, Homo sapiens
cttgaagcgctgccagtatgtgaccgagaaggtaaatggctacctgcctgaccagtgcaaggtggctggccggggaccctggggctaacccctatcctctyctccaccccactacccaccgtgcgcctgctctgctccaggtgctggctgctgtctacaaggctctgagtgaccaccacatctacctggaaggcaccttgc

SEQ ID NO: 171244 - DNA, 201 bp, Homo sapiens
gcgtaagagagagctggggaccagaagtgccccagggcctgctgggtgtggggcaggggaggtagggaacatttccctgacctccaggagaggggccctgstcatcgggagatgatgggaaaccctagctaactagtccttcccctctgtttcctgtatccaggaacttgctactaccagcaccatgccctaccaatatcc

SEQ ID NO: 171245 - DNA, 201 bp, Homo sapiens
gaaggcggatgatgggcgtcccttcccccaagttatcaaatccaagggcggtgttgtgggcatcaaggtaaggggagggcctccggacgtgaggtttgagwtggaagtggaggaaggaaatccaggttagtgaggcagggaatgaatgctggattggtggcctagagacttgcatggagcctgcttcaggcttagggcatt

SEQ ID NO: 171246 - DNA, 201 bp, Homo sapiens
ctgtccatggctatggccttttcctttcccccagttgccagtgggcaactccaccctcagctgggcaacacccagcaccagacagagttaggaaaggtacmggggcaggcctagcaaagggaagttgggcgtaagagagagctggggaccagaagtgccccagggcctgctgggtgtggggcaggggaggtagggaacatt

SEQ ID NO: 171247 - DNA, 201 bp, Homo sapiens
tccagcctgaggtcctctaactgcgcaatgcagcggctgcgcgcgctgagtcatggcgggggaggaagccggacgagatgaaggaccattctccccctttycttgcagggacccctgtggcaaaggattagggccccttagccctggcggggatcctaagaggcagtgaggggtgggggccggcccatgtacagccccagg

SEQ ID NO: 171248 - DNA, 201 bp, Homo sapiens
ttacagggatgcgccaccacactaggctaattttgtatttttagtagagacagggtttctccatgttggtcagggtggtctcgaactcccgacctcaggtkatctgcctgcctcggcctcctaaagtgctggaattacagatgtgagccaccgggctcagcctctacttgccctttttaacctgacatcacacttcgccac

SEQ ID NO: 171249 - DNA, 201 bp, Homo sapiens
aaggcggatgatgggcgtcccttcccccaagttatcaaatccaagggcggtgttgtgggcatcaaggtaaggggagggcctccggacgtgaggtttgagawggaagtggaggaaggaaatccaggttagtgaggcagggaatgaatgctggattggtggcctagagacttgcatggagcctgcttcaggcttagggcattt

SEQ ID NO: 171250 - DNA, 201 bp, Homo sapiens
taggaactgcctgctggtgaggggtctggtcggggataaagggtgggctctggggaagaggaatcccggtaacctgtcccttcatctgcaggctcttaccctgagacacttgacatttagcccttgcatctatccgttttgtggtaccagggggtccctcctctcctgtccccagccaaaccttttcctttcccctcggga

SEQ ID NO: 171251 - DNA, 201 bp, Homo sapiens; identical to SEQ ID NO: 30854

SEQ ID NO: 171252 - DNA, 201 bp, Homo sapiens; identical to SEQ ID NO: 143896

SEQ ID NO: 171253 - DNA, 201 bp, Homo sapiens
gggcacgcccagctacctaggaggctgaggcgggaggatcacttgagtccaggaagtggaggcttcagtgagctgagattccaccactgtactccagccgrggcgacagtggaaagggtgctagaggtcatttcctgtgtcttaatgttgttaccctgaccccaacaggtagacaagggcgtggtccccctggcagggaca

SEQ ID NO: 171254 - DNA, 201 bp, Homo sapiens
ctcaataggcaacctcctacctcatttggttccagtgttgttaatttgcctattacctgccatgatgcctacctccccaaaagcaagcattagctttggcscgtggaggacactcaagggctgttgaaggcagaggggccaaggagggatggtgggtggatctgaggcggctcttgtctcctgtaatctgagggctttgaa

SEQ ID NO: 171255 - DNA, 201 bp, Homo sapiens
agctcctgccagcttcctgggtctctgaccacagcccctctcgcctcacccctgctctacagggatcaccttcctgtctggaggccagagtgaggaggagkcgtccatcaacctcaatgccattaacaagtgccccctgctgaagccctgggccctgaccttctcctacggccgagccctgcaggcctctgccctgaaggc

SEQ ID NO: 171256 - DNA, 201 bp, Homo sapiens; identical to SEQ ID NO: 143900

SEQ ID NO: 171257 - DNA, 201 bp, Homo sapiens
ctgcaggcctctgccctgaaggcctggggcgggaagaaggagaacctgaaggctgcgcaggaggagtatgtcaagcgagccctggtaaggataggcaggakgtgggcagggtgcctgggtggatgggactcggagaagagcccttctcactccacccctctccctgcttaggccaacagccttgcctgtcaaggaaagtac

SEQ ID NO: 171258 - DNA, 201 bp, Homo sapiens; identical to SEQ ID NO: 143901

SEQ ID NO: 171259 - DNA, 201 bp, Homo sapiens; identical to SEQ ID NO: 143902

SEQ ID NO: 171260 - DNA, 201 bp, Homo sapiens
ggaaatccaggttagtgaggcagggaatgaatgctggattggtggcctagagacttgcatggagcctgcttcaggcttagggcatttactcgacatttttwatcctcacaattctgagagaacagtatcattcccactttacacatgaaaatctcagaagctcagggaagtgaagtgttttgctcagagtaagtggcagag

SEQ ID NO: 171261 - DNA, 201 bp, Homo sapiens
aggtgggactctgggttaggaggcctcacagtgaccctgtccctcgccctgcagaatggcattgtgcccatcgtggagcctgagatcctccctgatggggmccatgacttgaagcgctgccagtatgtgaccgagaaggtaaatggctacctgcctgaccagtgcaaggtggctggccggggaccctggggctaaccccta

SEQ ID NO: 171262 - DNA, 201 bp, Homo sapiens
aagaaggagaacctgaaggctgcgcaggaggagtatgtcaagcgagccctggtaaggataggcaggaggtgggcagggtgcctgggtggatgggactcggrgaagagcccttctcactccacccctctccctgcttaggccaacagccttgcctgtcaaggaaagtacactccgagcggtcaggctggggctgctgccagc

SEQ ID NO: 171263 - DNA, 201 bp, Homo sapiens
gaggacactcaagggctgttgaaggcagaggggccaaggagggatggtgggtggatctgaggcggctcttgtctcctgtaatctgagggctttgaagcctsagtccctggcatcatcaagatacggtcttgaccagtggctgtggagagatgtaggtgggactctgggttaggaggcctcacagtgaccctgtccctcgcc

SEQ ID NO: 171264 - DNA, 201 bp, Homo sapiens
cgagtcttgctcttgtcacccaggctggagtgcaatggtgcaatctcggctcaccgcaatctctgcctactgggttcaagctattctcctgcctcagcctyccaagtagctgggattacagggatgcgccaccacactaggctaattttgtatttttagtagagacagggtttctccatgttggtcagggtggtctcgaac

SEQ ID NO: 171265 - DNA, 201 bp, Homo sapiens; identical to SEQ ID NO: 30867

SEQ ID NO: 171266 - DNA, 201 bp, Homo sapiens
tcaataggcaacctcctacctcatttggttccagtgttgttaatttgcctattacctgccatgatgcctacctccccaaaagcaagcattagctttggccmgtggaggacactcaagggctgttgaaggcagaggggccaaggagggatggtgggtggatctgaggcggctcttgtctcctgtaatctgagggctttgaag

SEQ ID NO: 171267 - DNA, 201 bp, Homo sapiens
cacccaagctggcaacccttaaatgatatcatgtgtgtacaatagttggcacaagacctgcacacagtaaataatgatattaataataatactcattcccscatataaccctaagtgtactaggtactgtttcacgtgctttatttatatttattcatctaagcctcataacaaccatatagggcagagactattattttt

SEQ ID NO: 171268 - DNA, 201 bp, Homo sapiens
ttgaaaagcacagcgagttgttttgtggaatttcctttgggtttgtttgatgtctgctcatgattagatagaagttgtgcatctttgctaagaatacacaraacagatactgtgttcttcccaatacatcctgcaaggaggcgcatggtgtcttttttgagttaggatctcactctgtccccaaggctggagtacagtgtt

SEQ ID NO: 171269 - DNA, 201 bp, Homo sapiens
gaggctgaggcaggagaatggcgtgaacccgggaggcagagcttgcagtgagccgagatcgcaccactccagcctgggcgactgagcaagactctgtctcaaaaaaaaaaaaaaaaaaaaaattaggccaggtgcggtggttcatacctgaaatcccagcactttgggaggctgaggtgggcagatcacttgaagtcagga

SEQ ID NO: 171270 - DNA, 201 bp, Homo sapiens
gtactgctccaacgcagatctggacgactgcacacgacatgaaagcaaggtgaggtccctccctgggagacagtggggacatgctgaaagccaggtgggcrtcagtctgcgtcaccctcacccgctcattcaccctgcccaggtccgcaaaggcctccaaggcaagctgtacgggttggaggatcttttctacaaatatgg

SEQ ID NO: 171271 - DNA, 201 bp, Homo sapiens
agtcaggaggattgcttgagtgcaggaggtcaaggctgtagtgagctgagatctcaccattgcactccagcctgggcaacaaaatgagaccctttctctcwcacacacacacacacacacacacacacacacacacacaaaagatactgggtggctaggtgcagtggctcattcctgtaatcccagtactttgggaggttg

SEQ ID NO: 171272 - DNA, 201 bp, Homo sapiens
tctccccaggtgagccaggctccatgactgtaacttggaccacatgggtcccaacccgctctgaagtgcaattcgggttgcagccgtcggggcccctgccyctccgcgcccagggcaccttcgtcccctttgtggacgggggcattctccggcggaagctctacatacaccgagtcacgcttcgcaagctgctgccagggg

SEQ ID NO: 171273 - DNA, 201 bp, Homo sapiens
cctctgtccctttctccccaggtgagccaggctccatgactgtaacttggaccacatgggtcccaacccgctctgaagtgcaattcgggttgcagccgtcrgggcccctgcccctccgcgcccagggcaccttcgtcccctttgtggacgggggcattctccggcggaagctctacatacaccgagtcacgcttcgcaagc

SEQ ID NO: 171274 - DNA, 201 bp, Homo sapiens
aaaaaaaaaaaaaaaaagaaaagaaaagaaaagaaaagaaatggcggggctgggattgaacttgggcagttccagaacctgtgtccttaaccactaactgytcaacagtggtcaacgcccctcactttttctgcatatccctcccaccctgcccaggcttcactcccggtctaccctctgtccctttctccccaggtgagc

SEQ ID NO: 171275 - DNA, 201 bp, Homo sapiens
catcttggcccggcacagtggctcacacctgtaattccagcactttgggaagctggttttgaattcctgggctcaagtgatactcttgccttggcctcccraagcgctgggattaacaggtgtgagtcaccatacctggctctctcaattccagtgaaagcagagctgggcctgggtcctcaccctccttccgccccctcc

SEQ ID NO: 171276 - DNA, 201 bp, Homo sapiens
cttggtaaattctgtaggtatttaccattgtgaggcaggggaagataaagatggggggtgggacacaggtaggggaaaacaataagatgagtatgtggtasaggtggcttaaggttaggtggatccaaataataatggctcacctttctttatttttgccattgtagttttaaaataatgacaatatttatgatttattga

SEQ ID NO: 171277 - DNA, 201 bp, Homo sapiens
tgaaatagaatgctgtgagcaccagatggcttctcacggcccttggcagccaggctctgcccatgggtgattgctattctgattttatcagcacaaattgktttttttctttaattaagaaatttgaggccgggcgcggtggcttacgcctgtaatctcaacactttgggaagctgaggcgggcagatcacccaaggttag

SEQ ID NO: 171278 - DNA, 201 bp, Homo sapiens
agtttgtgctctaataatagcctacacttacatagccctttccatatgctgggctctgtttacaaatactatctcatttaactcccacaacatctatgatrtgggtactgttactcttcctatcacttttcagatgaggaaaactgaggcccagagaggcctagccacttgctcagggttgtacagcccatcagagggcag

SEQ ID NO: 171279 - DNA, 201 bp, Homo sapiens
gaagcctaggttttgccgccttggctgctgtgaccagaaactgcccaggcctgggtggggagttgggtgggccctgactcccctgccctccagaggccccmtgtagggtacatgcagccctatggagctggggcagctgttccctcctggagaggtgggagtcctggctggctgtggagggagggcaggtgtgcgggcaca

SEQ ID NO: 171280 - DNA, 201 bp, Homo sapiens
cccctcccccaggagactttgcctacaacctggatcaggacaacgcccgtgttggggataggttcatgcggctcattgaacccgtggctgccagcctgccrtacatgacatgccctgggaatcatgaagaacgctagtgaggactgagggtggtggcggtgggcgagggctggatcaatggaaatggtctcgttcttctta

SEQ ID NO: 171281 - DNA, 201 bp, Homo sapiens
cagttggaggacggccaagctgggatctgatagctaccatttatcgagtggcacatgcaccgggcgcagacttttgtgtgcatgatctcactctgttctcrtgatgactctgggcatctattactttgtgcattgcatagaacatggaagttttgctcagagagtccagcaacatgcttaaggccacctagagggtggatg

SEQ ID NO: 171282 - DNA, 201 bp, Homo sapiens
tgaggcaggagaatcgcttgaacccaggaggcagaggttgcagtgagccaagatggcaccactgcagtccagcctgggcagcagagggagactctgtctcaaaaaaaaaaaaaaaaaaaaaaagtgcccatcttggcccggcacagtggctcacacctgtaattccagcactttgggaagctggttttgaattcctgggct

SEQ ID NO: 171283 - DNA, 201 bp, Homo sapiens
gctaactttgttccagactgagtgctgggtgctttatatagtggatatcacttaaccctcagccctaaggtcgggaactcctagcggtatgttcattggayggatgtaggaacagaggcacagacaggaaaatacttgctcaaagtcgcaggtcaaataagtggcagaggttgggagctcccccaccataaagttactcta

SEQ ID NO: 171284 - DNA, 201 bp, Homo sapiens
aaaagatgagtcaggaggattgcttgagtgcaggaggtcaaggctgtagtgagctgagatctcaccattgcactccagcctgggcaacaaaatgagaccctttctctcacacacacacacacacacacacacacacacacacacacaaaagatactgggtggctaggtgcagtggctcattcctgtaatcccagtactttg

SEQ ID NO: 171285 - DNA, 201 bp, Homo sapiens
tctcacggcccttggcagccaggctctgcccatgggtgattgctattctgattttatcagcacaaattggtttttttctttaattaagaaatttgaggccrggcgcggtggcttacgcctgtaatctcaacactttgggaagctgaggcgggcagatcacccaaggttaggagtttgagatcagcctgcccaacatggcaa

SEQ ID NO: 171286 - DNA, 201 bp, Homo sapiens
agatgagtcaggaggattgcttgagtgcaggaggtcaaggctgtagtgagctgagatctcaccattgcactccagcctgggcaacaaaatgagaccctttctctcacacacacacacacacacacacacacacacacacacacaaaagatactgggtggctaggtgcagtggctcattcctgtaatcccagtactttggga

SEQ ID NO: 171287 - DNA, 201 bp, Homo sapiens
gatacatgtttgattatttttttccttttctcccccaagagaatgtgagctccctggacaacagggtttttttgtttgtttgttttttgccagttctgtcmcctgctgttaccttggtcactggtatatagtaggtgctcaataaacatggtttacgtggaagaaagaaggaatgagaaataaaggtaagcttagcacagg

SEQ ID NO: 171288 - DNA, 201 bp, Homo sapiens
tgaaagccatttcttttttctttctttctttctttttttgagacagacagagtcttgctctgttgccaggctggaatgcagtggcgtgctcttggctcacrgcaacctccatctcccgggttcaagtgattctcctgcctcagccttccaagtagctgggactacaggcacatgccaccacgcccagctaatttttgtatt

SEQ ID NO: 171289 - DNA, 201 bp, Homo sapiens
atgctgggtgcaaaatggtgattttcctcaccctggcatcctctctgctcctcatgcctggcttttctgctgcaagcacgagcattctgtttccccaggcrctgttgttttaaaaagctttcttggagggtctactgtgcagccaggcttcagatccagtgatttctctgttcttcaaattgctttttctccttcacacac

SEQ ID NO: 171290 - DNA, 201 bp, Homo sapiens
atgagtcaggaggattgcttgagtgcaggaggtcaaggctgtagtgagctgagatctcaccattgcactccagcctgggcaacaaaatgagaccctttctmtcacacacacacacacacacacacacacacacacacacacaaaagatactgggtggctaggtgcagtggctcattcctgtaatcccagtactttgggagg

SEQ ID NO: 171291 - DNA, 201 bp, Homo sapiens
ctgtgctataatgtatttaactgactccctgatgggcgttgggatggcttccagttcagggctttcactgtaatgctgtagtgggcagccttacacagccrtgtacttttctagaagtcagagacccggagcaagggaagcctgcctgggacaaattgttcaattgtgagtattattgtggccaagtctttttgtttttgt

SEQ ID NO: 171292 - DNA, 201 bp, Homo sapiens
tgagtcaggaggattgcttgagtgcaggaggtcaaggctgtagtgagctgagatctcaccattgcactccagcctgggcaacaaaatgagaccctttctcwcacacacacacacacacacacacacacacacacacacacaaaagatactgggtggctaggtgcagtggctcattcctgtaatcccagtactttgggaggt

SEQ ID NO: 171293 - DNA, 201 bp, Homo sapiens
gggtggtcagaaggcccaggcatggcctcgagtgactgcctgccacccaacgttgttcccttccccaggtatttaacggcagccgagagatgccctacacyaacccgcgagggcctgtccacatcatcacaggatctgctgtgagcagggggaagggtggctttgccttctctctctattcctatctatggagggctaact

SEQ ID NO: 171294 - DNA, 201 bp, Homo sapiens
tctacttaaaacacaaaaaattagccgggcatggtggtgggcacctgtaatcccagctactcaggagggtgaggcaggagaatcgcttgaacccaggaggyggaggttgcagtgagccgagatcgtgccattgcactccagcctgggcaacaagagcaaaactctgtctcaaaaataaaaaagaaaaaataaattgaaatt

SEQ ID NO: 171295 - DNA, 201 bp, Homo sapiens
tctccggcggaagctctacatacaccgagtcacgcttcgcaagctgctgccaggggttcagtatggtgagaggggccccaggctgagctgttgaggaggartgggaagaggagtgggatgcagactagaagctaccactggccggtggctcaggctgggctggtaactccactgcctatctgcaagcctgttgtatgagac

SEQ ID NO: 171296 - DNA, 201 bp, Homo sapiens
ggggtttcaccgtgttggccaggctggtctcgaactcctgacctcgtgatctgcccgcctcggcctcccaaagtgctaggattacagccatgagccactgygcccggcgtctctttcattcctttcatcagaaacattctctactctttcttcatttttcatgaccttgacaattttgaaaagcacagcgagttgttttgt

SEQ ID NO: 171297 - DNA, 201 bp, Homo sapiens
cgaactcctgacctcgtgatctgcccgcctcggcctcccaaagtgctaggattacagccatgagccactgtgcccggcgtctctttcattcctttcatcasaaacattctctactctttcttcatttttcatgaccttgacaattttgaaaagcacagcgagttgttttgtggaatttcctttgggtttgtttgatgtctg

SEQ ID NO: 171298 - DNA, 201 bp, Homo sapiens
caggcatgagccactgcgcccggcctctatggtggtcaagtcttcactgtcttccttgagggcagcagggtcctgggctagcaggtcatttctgcttcccygcgggtcctccacctgctctgggtctgatcagttctccccgccccagggctgtgaggagcggctgacgccctttgctgtcttcccgaggccctggagtgc

SEQ ID NO: 171299 - DNA, 201 bp, Homo sapiens
ccacatccagcaggtgtcggacgaccaggtcagtgaggggcaggccgaagtcacctgactgtacagccaggcccctccaagcaaatgagctgttaaaaacrtgggctcggccgggcgcagtggctcatgcctgcaacacctgcaatttggtggggctaaggtatgaggatcgcttgagtccaggagttcaagaccagcctg

SEQ ID NO: 171300 - DNA, 201 bp, Homo sapiens
tagaggtgctatgatgatctctgcttacagaggcagaaataaggcacacagagggcttaagtcacttctcaagggcaccagcaaggagctgggattcaacrtccagacaatctggctccaatcagtgatattatctccttcattcctgacagacgggaagctgagaactctaaagatgtggcccccagatttggagaagtg

SEQ ID NO: 171301 - DNA, 201 bp, Homo sapiens
tataagtagactgggtgctactgctcacgtctgtaatcccagcactttgggaggctgaggtgggcagattactcaaggtcaggtgttcaagaccagcctcrccaacatggtgaaaccctgtctctactaaaaatacaaaaattagccaggagtggtggtaggcgcctgtaatcccagctactctgaaggctgaggcaggag

SEQ ID NO: 171302 - DNA, 201 bp, Homo sapiens
catgagggttccatcatcatgaatgggattaggtacccctacaaaagggcttgatggatggagttcacctctcttggtcttccaccttccactatgtgagracgcagtgatcctccccttggaggatccaacagcacggagccatcttgaaagcagaaacctgatcctcaccaggcaccgaacctaccagctccttgatct

SEQ ID NO: 171303 - DNA, 201 bp, Homo sapiens
gattgggtcatgagggttccatcatcatgaatgggattaggtacccctacaaaagggcttgatggatggagttcacctctcttggtcttccaccttccacyatgtgagaacgcagtgatcctccccttggaggatccaacagcacggagccatcttgaaagcagaaacctgatcctcaccaggcaccgaacctaccagctc

SEQ ID NO: 171304 - DNA, 201 bp, Homo sapiens
tgtgactcaacgcataagaattgaatctgagacacgagcccgcatccctctggctccaaaaggaatctggaagcttattgggaaatggagaagcaacagcrccaccttcctcagccttgacacacacttgctcatgccctccctctttcccctacccccaagagatgcaatcataatagacggtcatgaatacctagagga

SEQ ID NO: 171305 - DNA, 201 bp, Homo sapiens
tgattgggtcatgagggttccatcatcatgaatgggattaggtacccctacaaaagggcttgatggatggagttcacctctcttggtcttccaccttccaytatgtgagaacgcagtgatcctccccttggaggatccaacagcacggagccatcttgaaagcagaaacctgatcctcaccaggcaccgaacctaccagct

SEQ ID NO: 171306 - DNA, 201 bp, Homo sapiens
ttttttctctaaacttctcttctcgcttcatttcattcatttgatcttaatcactgataccctttcttccacttgatcaaatcagttactgaagcttgtgyatgcatcacgtagttctcatgccatggttttcagctccatcaagtcatttaaggtcttctttacactgttcattctagttagccattcatctaatcttct

SEQ ID NO: 171307 - DNA, 201 bp, Homo sapiens
cagcggggcaggaagcggatctggtatgttgggggtattttgcccacaccacactcctggggtgtcagatcgatgtcttctggggccacggggctggccayggagaagttctggaggatggtggtgaagaagaggaacaattccgcacgggcgatgccttcaccaagacaaatccgcttccctgtggacacagaaggtcac

SEQ ID NO: 171308 - DNA, 201 bp, Homo sapiens
cccccttccctcagccccttcagcggggcaggaagcggatctggtatgttgggggtattttgcccacaccacactcctggggtgtcagatcgatgtcttcwggggccacggggctggccatggagaagttctggaggatggtggtgaagaagaggaacaattccgcacgggcgatgccttcaccaagacaaatccgcttcc

SEQ ID NO: 171309 - DNA, 201 bp, Homo sapiens
gcataagaaattataaaagtattatttgagaacagataaatgtccatattaagatgaaatcttcacaactttttttatgtttcaaaaataattgtaataastggagaacagttttgctccttccattaaacatatgaattttacaaattatagtgatatatttttctctctgggtaaatatgagtaatacagagaacaatg

SEQ ID NO: 171310 - DNA, 201 bp, Homo sapiens
cttgcaatgtgacctcagacaactggtgccatggaggggaaggaagctggcttgtagcaggtctctcagaggcaggaagttgcggggagtcagagccattrtctacagaggcggggacactgaatgaccctggaatcctttgacccccttccctcagccccttcagcggggcaggaagcggatctggtatgttgggggtat

SEQ ID NO: 171311 - DNA, 201 bp, Homo sapiens
aaaattagccaggcgtggtaccacatgcctgtaatcccagctacttggaagctgaggcaggagaatctcttgaacttggaaggcggaggttgcagtgaacmaaaatcacgccacagcactccagcctgggagacagagcaaggcttagttttaaaaaaaaaatcaaatattgtgtgattctgtttataggaaatattcaga

SEQ ID NO: 171312 - DNA, 201 bp, Homo sapiens
tatgctcagcggtgcacatattgtcttgataaacatcttaaataacagaaaacagggttcaagagcagacaaccagtctgaccacaaatttaccagggttragttttcccaaccctagtaagcatgagggttctgcaggagaccaaggtttatctcggtccttatctcaactgtacaaggcagacattcccagagcagcca

SEQ ID NO: 171313 - DNA, 201 bp, Homo sapiens
tgtcttcaaccaggcccacctgaatgcctacatacctagacaggtgacactcccctcataccagccccgtctgagtagctaaacagttgaacaggtgtttyccaacacatcctgccttgaatgtctgaacacctagctgtgcgctccaatccaccttcattgaaacctggatgtgtgcctcagtccatgttacctaaattt

SEQ ID NO: 171314 - DNA, 201 bp, Homo sapiens
atattatgcctgtaatatcagcactttggaacactgaggtgggtggatcacctgaggccaggagctcaccaccagcctggccaacatgtccctactaaaamtacaagaaaattagccaggcatggtagtacatgcctgtaatcccagctacttgggagctgagactggagaatctcttgatcttggaaggcagaggttgca

SEQ ID NO: 171315 - DNA, 201 bp, Homo sapiens
cccaatccagacccaataagtatctcggtagttgtcttcaaccaggcccacctgaatgcctacatacctagacaggtgacactcccctcataccagccccrtctgagtagctaaacagttgaacaggtgttttccaacacatcctgccttgaatgtctgaacacctagctgtgcgctccaatccaccttcattgaaacctg

SEQ ID NO: 171316 - DNA, 201 bp, Homo sapiens
cttttctttttttttttttgagatggaacctcattctgtcacccaggttggagtgcagtggtgtgatcttggctcactgcaacctccccacttcaagtaaktctcatgtgtcagcctcccgagcagctgggattccaggtgcgcaccaccacacctggctaatttttgtatttttagtagaaatggggtttcaccatgttg

SEQ ID NO: 171317 - DNA, 201 bp, Homo sapiens
accaccacacctggctaatttttgtatttttagtagaaatggggtttcaccatgttggccaggctggtcttaaactcctgaactcaggtgatccacccacygcagcctcccaaagttctgggattacaggtgtgagccaccacacctggccagttttctacttcttgaatcatccactccagtacagaagatggaagggat

SEQ ID NO: 171318 - DNA, 201 bp, Homo sapiens
acagtgtcccctcaaaatcagcccccaatattggacaaccggaaagttgcaccagaacccaggatgggtgcccaatacccagtctccaaggacacctggayagctcaacagatgatccccaaaacagagcctgaaggcaggatgcataccctcagctcagctctctcacctgggcacatgttcccatccccaacttaccat

SEQ ID NO: 171319 - DNA, 201 bp, Homo sapiens
agcagtaggaagaggcagctgggaatgaggactggggaagactacagcagtgtgtgactgtggtctacaacaggcacgaacctcaaaaatagcattcaacrtgaaagcaaccagacacaaaagatcacatattatgcctgtaatatcagcactttggaacactgaggtgggtggatcacctgaggccaggagctcaccacc

SEQ ID NO: 171320 - DNA, 201 bp, Homo sapiens
ttcagaaagccctgtggtttatttgcaaaatgctcccccaggaagggcagaggccagggcctaggagagaggcagccctgggaggtgggatggccccagamccagagtagcaagaggccactggggacaatgaggagtgagaaggctgagggcaccgtggtcctcattcctcccgccttccattctgctgtcgctcttaaa

SEQ ID NO: 171321 - DNA, 201 bp, Homo sapiens
cctgccaactgctcccctacatggggacaggtgccccaaactcccacccccctccagacagtgtcccctcaaaatcagcccccaatattggacaaccggamagttgcaccagaacccaggatgggtgcccaatacccagtctccaaggacacctggatagctcaacagatgatccccaaaacagagcctgaaggcaggatg

SEQ ID NO: 171322 - DNA, 201 bp, Homo sapiens
atgtcatcagctccattgtctttggggaccgctttgactatgaggacaaaagttcctgtcactgctgtgcatgatgctggaaagcttccagttcacggcamcctccacggggcaggtaaccggctgcagcctggccgtcacgcccctaccacaacctgccaactgctcccctacatggggacaggtgccccaaactcccac

SEQ ID NO: 171323 - DNA, 201 bp, Homo sapiens
ttctcccccaatacaccgccacacccgcaagctccagcatctatcccaccttcttcctaagccgtaccacctccaatgtcatcagctccattgtctttggsgaccgctttgactatgaggacaaaagttcctgtcactgctgtgcatgatgctggaaagcttccagttcacggcaccctccacggggcaggtaaccggctg

SEQ ID NO: 171324 - DNA, 201 bp, Homo sapiens
ttaaaggtcatggctacaacattccttcctcctctggatgagtaggaccttggttgtctgttggtccaggcatccagacactatcattaatataaacctcyactggggggtctaacaatgtaataggcctaatcagtggtgggaatggaatttaggtccaataagtgtaattttgatctgcctcagctacaaggtgacaca

SEQ ID NO: 171325 - DNA, 201 bp, Homo sapiens
ctagctaataacataatcactactaaatataggaaatgtatctgaataatggctgcaaaaggcatattttgcttccaggcatcccgtatgcaagacctggrgactacctatgggggtgtgggcaattgcgtgtgtaatgttactggattaaatatgtaaagtggccaggcatggtggctcatgcttgtaatcccagcactt

SEQ ID NO: 171326 - DNA, 201 bp, Homo sapiens
tccatcgccaccctgcgggacttcggggtgggcaagcgcggcatcaaggaggtatccaggagaaggcgggcttcctcatcaaggccgtctagggcacgcgyggtgagcagaacaccccgagtgtggaggcgggagaaggaaaacgcccagggcgaggaacccgcgcgcgttctgtctggggaccgggcctcggtggggaaa

SEQ ID NO: 171327 - DNA, 201 bp, Homo sapiens
tctactaaaaataaaaaaaaatagccaggcatggtggcatgcgcccatagtttcaggtactcgggaggctgaggcaggagaatcacttgaacctgggaggsagaggttgcagtgagctgtgatcgtgacactgcactccagcctgggcaacacaggaagactccgtctgaagacaaaaaaaaaaaaagaaacttcagatag

SEQ ID NO: 171328 - DNA, 201 bp, Homo sapiens
tgtttcttctagtgggtctccaaggtactatgacatgtgttaccaggtgaactacaaaaacaaatgcctctgtaaatcaagttattttatagcaagctctrgtccttaatcaccattgtgctctgaacaaagtatatgaccaattggactctaatactattgaactatctttattgcctgagctttgaattattcgatttt

SEQ ID NO: 171329 - DNA, 201 bp, Homo sapiens
tatcacaaggtcagaagatcagcaccatcctggctaacacggtgaaacccagtctctactaaaaataaaaaaaaatagccaggcatggtggcatgcgcccrtagtttcaggtactcgggaggctgaggcaggagaatcacttgaacctgggaggcagaggttgcagtgagctgtgatcgtgacactgcactccagcctggg

SEQ ID NO: 171330 - DNA, 201 bp, Homo sapiens
agaaagccctgtggtttatttgcaaaatgctcccccaggaagggcagaggccagggcctaggagagaggcagccctgggaggtgggatggccccagaaccrgagtagcaagaggccactggggacaatgaggagtgagaaggctgagggcaccgtggtcctcattcctcccgccttccattctgctgtcgctcttaaaaga

SEQ ID NO: 171331 - DNA, 201 bp, Homo sapiens
ctctagcattccttcaccagattatttgtagagataacggggagtcccacgttgggcgccagatgttggggaaaccagccccacaccaccctgcaggtacygcgagtccaacggagactaaagagttagaaagaaacagagtgagaatttaaaaggtgggtccgggggaccagagtgtcagaggcttgctcatggcccaga

SEQ ID NO: 171332 - DNA, 201 bp, Homo sapiens
cctgaagcttcccttcaacatagttaattgtggggcatgcaacaatgggagcagcaagtcatgtctcaggctcccattccaaaaattcataaggctgaggygggggtggccattctggaccttcccctaaaggcgcagtgggtggcactgtttctgcagtaggtggaaatgtttcttctataagtttttggaggttagcat

SEQ ID NO: 171333 - DNA, 201 bp, Homo sapiens
agccaggcacagaaagtatcacatgttctcattcgtaagtgggtgctacacaatgtgtacacatggacctagagagtggaataatagatagaacctccagygcgattttgaatcagagtggtaagaaccgccattctttacttgctcccaatcttagagggaaagcatcaagtctttcacctttaagtatgatgttggctg

SEQ ID NO: 171334 - DNA, 201 bp, Homo sapiens
agacggaagcagtaggaagaggcagctgggaatgaggactggggaagactacagcagtgtgtgactgtggtctacaacaggcacgaacctcaaaaatagcrttcaacatgaaagcaaccagacacaaaagatcacatattatgcctgtaatatcagcactttggaacactgaggtgggtggatcacctgaggccaggagct

SEQ ID NO: 171335 - DNA, 201 bp, Homo sapiens
ggggggtctaacaatgtaataggcctaatcagtggtgggaatggaatttaggtccaataagtgtaattttgatctgcctcagctacaaggtgacacaccarggagattaccaccatcatagctaccattagattactggtggtcagcggcttgttctgagacctcaggttctcttctgcaacgtgagctagtctcttcatc

SEQ ID NO: 171336 - DNA, 201 bp, Homo sapiens
acccaggagaagcaaacaatcctgacttttaagaggtggaagctgtactttcctgaccggggagaggaggcagcatggacttttctgacccaacgacctgkgtcttgctgtgctgtgtcatctgacactaagatcgggtcctcattccagccccagggtgaagcaccagtggggaggcgtgaagtgctttacacacagtga

SEQ ID NO: 171337 - DNA, 201 bp, Homo sapiens
ctaggcctgacttttgaccatgaggcaacatctttcttgcaatgttaaccaaactctttgctggatccaggatcctgaccctgaagttactttgacccagsaggagaagacaaacagtcctgatttttaagaggtggaagctgtgctttcctgaccctggagaggtgccagcacagacctgtccaacccaaggacctgggt

SEQ ID NO: 171338 - DNA, 201 bp, Homo sapiens
ctggaagcgagatatgctggcagcaatactgctctgttactctttgctaaactaagatgtttgggtaaagagaaacataaatctagcctgtgtgcacatcygggcacagtacgtttccttgaacttattcatgatacagattcctttgctcacatgtttctgtgctgaccttctcccaacctgttgccctgctacactccc

SEQ ID NO: 171339 - DNA, 201 bp, Homo sapiens
aaagggtccttctagactcctagaactttatgtctgttgagaccttaaggcaaagctgaccaggaaagtttttcccaagaagcagttggcatcttatatghggacagcttttccaagactgtggatcaagatttctcttccatcatgaaagcattatctcttatcctttcttccctgtttcttgctgtcctaaccctttcc

SEQ ID NO: 171340 - DNA, 201 bp, Homo sapiens
ccataaagggtctgtgctgaggaggagtagtgaaagagggaggcctctttgcagttgagataagaggaaggcttctgtctcctgctcatccctgggaatgsaatgtcttggtgtaaagctgaccattcccattcattctattgagataagagaaaaccacccggtggctggaagcgagatatgctggcagcaatactgctc

SEQ ID NO: 171341 - DNA, 201 bp, Homo sapiens
gagatggttgataaaatactacgaatatcaccctcaccccatacttcttatgatctgtggttttgcttttgctttttttttttttttttttttttttttttgagacggagtctcggtctgtcgcccaggctggagtgcagtggtgcagtctcggctcactgcaagctccgcctcccgggttcacaccattctcctgcctca

SEQ ID NO: 171342 - DNA, 201 bp, Homo sapiens
cctcatgggaagggaaagacctgactgtcccccagcccaatacccataaagggtctgtgctgaggaggagtagtgaaagagggaggcctctttgcagttgrgataagaggaaggcttctgtctcctgctcatccctgggaatggaatgtcttggtgtaaagctgaccattcccattcattctattgagataagagaaaacc

SEQ ID NO: 171343 - DNA, 201 bp, Homo sapiens
aagctgtaactttagccccaaccctgtgctcacagaaacatgtgctgtattgaatcaaggtttaatggatttaggaatgtgtgggatgtgccttgttaacmatatgtttgcagtatgcctggtaaaagtcatcaccattctccattctcgattaaccagggacagaatgcactgcggaaagccacagggacctctgcccaa

SEQ ID NO: 171344 - DNA, 201 bp, Homo sapiens
aaggtgggcagatcacttgaggttaggagttcgagaccagcctggccaacatggcaaaaccccgtctctactaaaaatacaaaaattagccgggcgtggtkgtgggcacctttaattccagctactcgggaggctgaggcaagagagtcacttgaacctgggaggtggaggctgcagtgagccaggattatgccactgcac

SEQ ID NO: 171345 - DNA, 201 bp, Homo sapiens
atccaaagcaccagtgcagaatcccacagctcagggaacctgggccaagggggctttttgatagacggaagcagtaggaagaggcagctgggaatgaggactggggaagactacagcagtgtgtgactgtggtctacaacaggcacgaacctcaaaaatagcattcaacatgaaagcaaccagacacaaaagatcacatat

SEQ ID NO: 171346 - DNA, 201 bp, Homo sapiens
gctcccagccctgtagtctggcgctgggaatgtggctcatcagggcagtgcctcctggaattctcagactagcatcagagctctgagttgactctcttccyaacccccttctcccccaatacaccgccacacccgcaagctccagcatctatcccaccttcttcctaagccgtaccacctccaatgtcatcagctccattg

SEQ ID NO: 171347 - DNA, 201 bp, Homo sapiens
agggcacgcgtggtgagcagaacaccccgagtgtggaggcgggagaaggaaaacgcccagggcgaggaacccgcgcgcgttctgtctggggaccgggcctyggtggggaaaggcgcccgcgctcccagccctgtagtctggcgctgggaatgtggctcatcagggcagtgcctcctggaattctcagactagcatcagagc

SEQ ID NO: 171348 - DNA, 201 bp, Homo sapiens
ctccatgttggtcaggttggtctcgaactcccgacctcagttgatccacctgcttcagcctcccaaagtgctgagattataggcatgggctgccatgcccrgccaccatccctaattctaagatgagggtagcacctcatcttgtccacaggtagttgtaaatgacacctggaaaatccccatgacaacacagataattcc

SEQ ID NO: 171349 - DNA, 201 bp, Homo sapiens
gtttgtctgtgcttgcatgcatttgtccatgcctgcttgcatccctgtatgtgcttatatgatttttacatgtaaaggggtgtttgaatttatgcaaatgyactggcgtatatttctgtggttgaatctgggggtgcttatgtgtgtatccttgcatgtgtatgagcttccttgtatttatacagttttatatacgaaagt

SEQ ID NO: 171350 - DNA, 201 bp, Homo sapiens
aagctaaggtgggcagatcacttgaggttaggagttcgagaccagcctggccaacatggcaaaaccccgtctctactaaaaatacaaaaattagccgggcrtggtggtgggcacctttaattccagctactcgggaggctgaggcaagagagtcacttgaacctgggaggtggaggctgcagtgagccaggattatgccac

SEQ ID NO: 171351 - DNA, 201 bp, Homo sapiens
aattggcttgattggaagctagtccagagcctacagtgatcccggaataggaagccagcatcccctctctcatccaggtggtacccatagccccatttctscagtccagaagacccccttgactggctgtccctggcccacctgcgacatgagggtatttgagcatgagcaggaagccgtagcggagagtggtgctggtgg

SEQ ID NO: 171352 - DNA, 201 bp, Homo sapiens
ttagggtgacgctgaaccaggagtagcaagaggcctgtgaggagtgcaaggaagaggaggacgctgagctccatggttccagtctgactgccctgcacccmactgcagcctctaactgggccttttatcctgaacctgcctcttcactcagttatgaaacttcatccattccccgcctcctttctcattatcgtcaaggag

SEQ ID NO: 171353 - DNA, 201 bp, Homo sapiens
atagtggggcatggtcgttcacacctgtagtcccagctactctggaggctaaggcgggagaatctcctgagcccaggagttcaaggttgcagtgagctatsactgtgccattgcactccagcctgggtaacagactgagaccctgtctctaaaacaatttaaatgaaaaattcaatatcgttcctgacaagcctccacttt

SEQ ID NO: 171354 - DNA, 201 bp, Homo sapiens
aaaaataaaaaaaaatagtggggcatggtcgttcacacctgtagtcccagctactctggaggctaaggcgggagaatctcctgagcccaggagttcaaggytgcagtgagctatcactgtgccattgcactccagcctgggtaacagactgagaccctgtctctaaaacaatttaaatgaaaaattcaatatcgttcctga

SEQ ID NO: 171355 - DNA, 201 bp, Homo sapiens
cgtgcctgcatctctcagtgtttcattgcctttctttcctattcgtctcccaggactcacccttggatttccgaagttcctctatcagacactgagcctcrtcctgaatccgctcctccacactccgctttcccatcccgaagtccctcatggtggtcacagagaatcgccgaagcaccttccagcggtttccattggcaa

SEQ ID NO: 171356 - DNA, 201 bp, Homo sapiens
gctgaagtgtaggtgctgggagtgtaaatcttttgcatttttctctagtaggtggggtaatgacttatggaattttcaggttcactatagtgaccaagaartgcccacacacacacacccaaaaggggacaagcagcaaagccctttctctcttgttgaattccagagccagagggctgggaaggaagccaggcatccctc

SEQ ID NO: 171357 - DNA, 201 bp, Homo sapiens
ggcacctccctcaaagggctcttgtgaggttaaaggagacaattgtaaaaattcttagaatagcacttggcttgtgctaaggaggcttaaggtttggttaytgccttgtgtttgtttctggggtatgtgtggggtatgtgtttctggccatgtgtctgtgtctgtgtctctaggctgtcttctagtctcagcctgagatcc

SEQ ID NO: 171358 - DNA, 201 bp, Homo sapiens
ctcatatggggagaatggcacctccctcaaagggctcttgtgaggttaaaggagacaattgtaaaaattcttagaatagcacttggcttgtgctaaggagscttaaggtttggttactgccttgtgtttgtttctggggtatgtgtggggtatgtgtttctggccatgtgtctgtgtctgtgtctctaggctgtcttctag

SEQ ID NO: 171359 - DNA, 201 bp, Homo sapiens
taaccaatcaggctgtttcagtacctcagttcctttccctgtggataaatagtgcctgaccacattgctggatggagctctctgaacctttactggttccktgtgctgcccaattcatgaattgtttctttgttcagatagactctgctaagtttaatttgtctaaagtttttcttttaaccagccaaagagtagaggatg

SEQ ID NO: 171360 - DNA, 201 bp, Homo sapiens
ctaagtttaatttgtctaaagtttttcttttaaccagccaaagagtagaggatgagaactgggacaagtcagagcacgtcaagaccttttccaccttcccrgtgctagaccataaatccaaactcctcctgcaaccttcaaggtcctgcccagatgagccctttgtcttatttccttctgcaatctacacccaaggctcac

SEQ ID NO: 171361 - DNA, 201 bp, Homo sapiens
actaaaaatacaaaaacattagcctggcatagcggcaggcgcctgtaatcccagctacaggaggctgaggcaggggaattgcttgaaccagggaggtggargttgcagtgagctgagattgtgccactgcactccagcctaggcaacagagcgaggctctgtctcgaaaagaaaaaaaaaaaaattagccaggtgtggtgg

SEQ ID NO: 171362 - DNA, 201 bp, Homo sapiens
gttcttcacttctcatatggggagaatggcacctccctcaaagggctcttgtgaggttaaaggagacaattgtaaaaattcttagaatagcacttggcttstgctaaggaggcttaaggtttggttactgccttgtgtttgtttctggggtatgtgtggggtatgtgtttctggccatgtgtctgtgtctgtgtctctagg

SEQ ID NO: 171363 - DNA, 201 bp, Homo sapiens
aattacatgagtatgttcagtttgtgaaaattcattgagctgtgcactttttatagtgatgttcaatttcaataaaaacttgacataaaaattagaaaaaygtttaagtttacttacaaatgccctgcattgatctctgcaaagccccttcactggtctcctgccttacattcttagaccccttaacaactgtttcactgc

SEQ ID NO: 171364 - DNA, 201 bp, Homo sapiens
gagagcgtgttgatgatgaggttctggtggctgaattcactgtgtgggttggatttctcctgcgtccacagtagggaggggagggcagggtcaggagaggytgtagccttgctgtgcacacgcctgtctccctggctgccctccgtttgcctgaaggtctttgacattatctggcccaatttgcttttctctgtcctctac

SEQ ID NO: 171365 - DNA, 201 bp, Homo sapiens
aagagtatatatagggctcagcattatttggggtttcaggcatccactgggggtctcagaacatatctccggtggataaggtgggattactgtgcagccayttggggaaccgctgggcagtatttcctgaagctgaacaaatggataactgggaaaccatccacttcactctcaggtacatgcccagcacaaatgtgtatg

SEQ ID NO: 171366 - DNA, 201 bp, Homo sapiens
agctgatgagtaagaaactctggcagaacaagttcagcgtcttcaggaactcttgatcttggtagtggaagcgttttccaaagatgatggagcagatgatsttggcggtaatggaatggaagaggaaggtggggtccacgagggctcctaggaagaagcagcaggtcaaggacacagactgaagggcctggggaacatcag

SEQ ID NO: 171367 - DNA, 201 bp, Homo sapiens
ggaactcttgatcttggtagtggaagcgttttccaaagatgatggagcagatgatgttggcggtaatggaatggaagaggaaggtggggtccacgagggcycctaggaagaagcagcaggtcaaggacacagactgaagggcctggggaacatcaggctgtcacctatctctgtgtgattgtctgccatcactcagtaatg

SEQ ID NO: 171368 - DNA, 201 bp, Homo sapiens
agaagaagttggaagaaggctctgagtccttcttccccccatatactcccttccctgatgcacccccacctgccccctcccagtgcctctgaagccctcaycatatccctggtagactgggtccatgatgacgatttttccccggccagagaaggcctcagcgttgtccaccagggcctcccgtatggcctctactccaca

SEQ ID NO: 171369 - DNA, 201 bp, Homo sapiens
gtctctatccctgtctcaccgcctcccctccctccaggtctccatgtccctgactccacgtggtctctgcatttcttccagggataagctgcatttctgarcccccaagtcaggtcatccttttctcgtgtgtcctggatgttcacctcacccccaccctccctctccttctccctctcctggacctggctggatatagag

SEQ ID NO: 171370 - DNA, 201 bp, Homo sapiens
caatgggagaacgcatggacagattcttcatgcgtccatgcatccaccaacagaattggcttgattggaagctagtccagagcctacagtgatcccggaayaggaagccagcatcccctctctcatccaggtggtacccatagccccatttctgcagtccagaagacccccttgactggctgtccctggcccacctgcgac

SEQ ID NO: 171371 - DNA, 201 bp, Homo sapiens
agggggaggtgaatgatgagaaattacttaatgggtacaatgtacactgttcgggtgataaataccctaacggccctaacttgaccattacaaaacctacrcacataacaaaactgcatatgtactccctaaatttgtacatcacaagatcaggagatcgagaccatcctggctaacatggtgaaaccccatccctactaa

SEQ ID NO: 171372 - DNA, 201 bp, Homo sapiens
atgcctggctaatttttttttgtatttttgtagagacagggtttcaccatgttgcccagggtggtttcgaactcctcagctcaggcaatctgtctgcctcrgcctcccaaaatactgggattataggcatgaaccactgtgcccagcctgtggtacattttagcataacagagggaatataactctaatgtaacacaaaga

SEQ ID NO: 171373 - DNA, 201 bp, Homo sapiens
cacaatcttggcttactgcaaactccacctaccaggctcaagcaattctcccgcttcagcctccagagtagctgggattacagatgcatgccaccatgccyggctaatttttttttgtatttttgtagagacagggtttcaccatgttgcccagggtggtttcgaactcctcagctcaggcaatctgtctgcctcagcctc

SEQ ID NO: 171374 - DNA, 201 bp, Homo sapiens
aggcataagcgacttgccttgtaccagatgagactttgaactgtggacttctgagttaatgctgaaatgagttaaggccttgagggagtgttgggaaggcrtgatttattttgaaatgtgaggacatgagatttaggaggggtcggggtggaatgatatggtttggctgtgtccccacccaaatctcattttgaaatgtaa

SEQ ID NO: 171375 - DNA, 201 bp, Homo sapiens
aggcttcaagagctcaaggggggaaaagcccaattgtatataaattgtgaatgggactgatgcgtatgagacagggagggtctatggcttccactgattcycagaggtgcaaggaacccccagtagattctaaaccacagattgggagaaaaataagaacaaagggtgctggaaaaagctcaggcagagacaaagggagcc

SEQ ID NO: 171376 - DNA, 201 bp, Homo sapiens
ctaacaaaaggttgagtttggggattaagaaaatccaggatgcccacacaggagggatgtgggggtgcagccagtcttaccttggggatggtgtaccctcrgaagctggtgtgttgggtgacaatgtggggcacacccatggggagaaggtcagcaaatctctgaatctcacggatgactgcctctgtgtatggcattttg

SEQ ID NO: 171377 - DNA, 201 bp, Homo sapiens
catccagaaagtggtcaggattgaaggcgtctggtttttcaaagtagtgtgggtcacggagagcagtgctcaggatgagaaatacttccgtgtcctgaggraggatcacaagatcaaaagatattgccattccctgcccaccctccacacacacagcacaaaaaagaaaaagaaaaaaacaaaaacaaggggactcaattg

SEQ ID NO: 171378 - DNA, 201 bp, Homo sapiens
agggcctggggaacatcaggctgtcacctatctctgtgtgattgtctgccatcactcagtaatggtaaacatgagaataaccataacagctaattatgtaycagcacgtcacgtgtaattccactgaactctcactacaacaatgtgaggcagatgcaatttgattattagctccaaattatagatgggcagacagagagg

SEQ ID NO: 171379 - DNA, 201 bp, Homo sapiens
actcaacatgtaaacaaactgcaatgtaacttgagagtatattcttgtaacaagtaaccttggacaatcagggcagccaagcttcagccagtcacaggctrcaagctgcccagacatgctcagataaggcaaacacagagctgtaaccaatcaggctgtttctgtacctcagttcctttccctatggataaatagtgcctg

SEQ ID NO: 171380 - DNA, 201 bp, Homo sapiens
ggaagaggcagctgggaatgaggactggggaagactacagcagtgtgtgactgtggtctacaacaggcacgaacctcaaaaatagcattcaacatgaaagsaaccagacacaaaagatcacatattatgcctgtaatatcagcactttggaacactgaggtgggtggatcacctgaggccaggagctcaccaccagcctgg

SEQ ID NO: 171381 - DNA, 201 bp, Homo sapiens
ttagagatgtttatttaattctcagcagatttgaaggaacatatcagggaatccaaagcaccagtgcagaatcccacagctcagggaacctgggccaaggrggctttttgatagacggaagcagtaggaagaggcagctgggaatgaggactggggaagactacagcagtgtgtgactgtggtctacaacaggcacgaacc

SEQ ID NO: 171382 - DNA, 201 bp, Homo sapiens
gtcaggctttagagatgtttatttaattctcagcagatttgaaggaacatatcagggaatccaaagcaccagtgcagaatcccacagctcagggaacctgsgccaagggggctttttgatagacggaagcagtaggaagaggcagctgggaatgaggactggggaagactacagcagtgtgtgactgtggtctacaacagg

SEQ ID NO: 171383 - DNA, 201 bp, Homo sapiens
tagaaagataggtgattagatagacagatagatatagatagatagatagatgatagatagatagatgatagatagatagatagatagatgatagatagatwgatagatagatagatagatagatagatagatagatagatagatgatagatagatagataggaaataagaaccctgccctcccagagctgtcattttacca

SEQ ID NO: 171384 - DNA, 201 bp, Homo sapiens
tacatagaaagataggtgattagatagacagatagatatagatagatagatagatgatagatagatagatgatagatagatagatagatagatgatagatwgatagatagatagatagatagatagatagatagatagatagatagatgatagatagatagataggaaataagaaccctgccctcccagagctgtcatttt

SEQ ID NO: 171385 - DNA, 201 bp, Homo sapiens
tcactctgcacctcctctccggccccacctctgactctgggagtgaatacagctaaatcccaggggtaggggctgggcagagtaggtgtttaatcaattgyttgtataaattaaaaagccctgggtgggcacagtggctcatacctctaatcccagcactttgggagcctgaggcaaaaggatcaggaattcaagaccagc

SEQ ID NO: 171386 - DNA, 201 bp, Homo sapiens
aagatggggagatcatttcagaccaagagtacaagaccagcctgggcaaaatagcaagactacatcctttcaaaatatttaaaagttagccagaggtggtrtcacaaacttagtcctcactactcaggaggctgagatgggaggattgcttgaatccaggagttggaggccgcaatgagccatgatcacaccactgcactc

SEQ ID NO: 171387 - DNA, 201 bp, Homo sapiens
tgagtttgtgagccagttccccaaaatcaggaaataatttcactggcgccaatgcctctttgtgttcccaatgggaatcacccggaaaccccaaaggaggmgtggaaagctatatcttgatattctagacatcaattgccacttgcttttttgcactcactggaaatatttgatagtggttatgttattagttatttaata

SEQ ID NO: 171388 - DNA, 201 bp, Homo sapiens
gcctgggcaacagtgtgagactctgtctcaaaaaacaagaacatatatatatatatgattttgtatattataattttcgataatctcactcctgcactcayttgcaatgtgacctcagacaactggtgccatggaggggaaggaagctggcttgtagcaggtctctcagaggcaggaagttgcggggagtcagagccattg

SEQ ID NO: 171389 - DNA, 201 bp, Homo sapiens
aaagagagattgagagcaccaaggagagatgcaggagagaaagagacagagagagatggagagagagagagaggaaagagagagacagatagagagaaaargagacagatatcaccagggagagatgggagagagagagagagagaaagacagagacagagagggagagagagagaagacagagagagatggacagagaga

SEQ ID NO: 171390 - DNA, 201 bp, Homo sapiens
ctactaaaaatacaagaaaattagccaggcgtggtaccacatgcctgtaatcccagctacttggaagctgaggcaggagaatctcttgaacttggaaggcrgaggttgcagtgaaccaaaatcacgccacagcactccagcctgggagacagagcaaggcttagttttaaaaaaaaaatcaaatattgtgtgattctgttt

SEQ ID NO: 171391 - DNA, 201 bp, Homo sapiens
ggaggacgctgagttccatggtcctggtctgactgccctgcaccctgctgcagcctccaactgggccttttatcctgaccctgcctctgcaccctgttatraaatttcatccattccccacctcctttttcatcatcatccaggagcattagcttagaaaaagttgttagggaacccagacttcctgcttgggcaacccag

SEQ ID NO: 171392 - DNA, 201 bp, Homo sapiens
agtgtatagagaaagcatgtactttctctatttcttcttatatatatactttaagttctagggtacatgtgcacaacgtgcaggtttgttacatatgtatrcatgcgccatgttggtgtgctgcacccattaactcgtcatttacattaggtatatctcctaatgctatccctccccatggtgtatatgtgccatattttc

SEQ ID NO: 171393 - DNA, 201 bp, Homo sapiens
ggtacaaagatcacatgcttcaaagagcaaaaagcagaaccactgataagggtccaacaaagatcacaggacaaaaggcaaaagcagaaccactgataagkgtccaacaaagatcataaggcaaagggcaaaagcagaaccactgataagcgtctatgctcagcggtgcacatattgtcttgataaacatcttaaataaca

SEQ ID NO: 171394 - DNA, 201 bp, Homo sapiens
acatcaggctgtcacctatctctgtgtgattgtctgccatcactcagtaatggtaaacatgagaataaccataacagctaattatgtaccagcacgtcacrtgtaattccactgaactctcactacaacaatgtgaggcagatgcaatttgattattagctccaaattatagatgggcagacagagaggttgagtaatttg

SEQ ID NO: 171395 - DNA, 201 bp, Homo sapiens
tttctggatgtatgtctggctgaaccggtgatcaccttaatttaataaactctcctgaaccttttttggtctctccagtctttgattgtcccgcaacagtrttacaaacaaatatcattaggcaaagcatgctgaattgattggagtcccttggtctcaggtattattgattgatggcaatcagatccactcctactggaa

SEQ ID NO: 171396 - DNA, 201 bp, Homo sapiens
aatggctcacacctgtaatctcagtgctttgggaagtcaagatgggaagatcatttgagaccaagagtttgagaccagcctgggcaaaatagcaagactcyatctctccaaaaaatttaaaagccagccagaggtggtgtcacacacctgtagtcaccactaatcaggaggctgaggtgggaggattgcttgaacccagaa

SEQ ID NO: 171397 - DNA, 201 bp, Homo sapiens
gaaccttttttggtctctccagtctttgattgtcccgcaacagtattacaaacaaatatcattaggcaaagcatgctgaattgattggagtcccttggtcwcaggtattattgattgatggcaatcagatccactcctactggaaagacatagatagatctcttgtaaaatagtaatagagggcctatgcccctaataata

SEQ ID NO: 171398 - DNA, 201 bp, Homo sapiens
gggctgtccgctgttatcaaactttgaatgacagtgattagcccagtgttttccttttttacatctgggacaggtacctggttccctgctttttcctcctragttttgccttttttgtacactctctttttgtatgtcctatctgtccacaattatagcaagatctggggaacactcatatgttttttgttacccttagtc

SEQ ID NO: 171399 - DNA, 201 bp, Homo sapiens
aaccttttttggtctctccagtctttgattgtcccgcaacagtattacaaacaaatatcattaggcaaagcatgctgaattgattggagtcccttggtctmaggtattattgattgatggcaatcagatccactcctactggaaagacatagatagatctcttgtaaaatagtaatagagggcctatgcccctaataatag

SEQ ID NO: 171400 - DNA, 201 bp, Homo sapiens
aattaatggattttttgatgaatttgtggacatatggacagaaggatgaaaattaaaaggatagatagatagatagatagatagatagatagatagatagdttgaaggatggaaagagtgtggtgagcctgcctcgacagcccgggacaggctcaaatatatcaggaagtgggtaagagatactgagacctgtggctaggg

SEQ ID NO: 171401 - DNA, 201 bp, Homo sapiens
aatatgaaacctggccagaaagctcagtgaattcttaatattttcccttttctcccattccaaagctttctcccagtaaggcccatcttctcatgactgarttctccataaccacatagtcacctagtagccctccccctgtggcccccaagcccttggtcttctggaactcctccagtaggtagctggcttcctggagaa

SEQ ID NO: 171402 - DNA, 201 bp, Homo sapiens
gggatatgaggagcctctctgcctggctgcccagtctggaaagtgaggagcgtctctgcccggccgccatcccatctaggaagcgaggagtgcctcttccyggccaccatcccatctaggaagtgaggagcgtctctgcccggccgcccatcgtctgagatgtggggagcacctctgccctgccgccgtgtctgggatgtg

SEQ ID NO: 171403 - DNA, 201 bp, Homo sapiens
acctcagacaactggtgccatggaggggaaggaagctggcttgtagcaggtctctcagaggcaggaagttgcggggagtcagagccattgtctacagaggyggggacactgaatgaccctggaatcctttgacccccttccctcagccccttcagcggggcaggaagcggatctggtatgttgggggtattttgcccacac

SEQ ID NO: 171404 - DNA, 201 bp, Homo sapiens
gttctttgaaaccaatgagaacaaggacacaaagcaccagaatctctgggacacatttaaagcagtgtgtagagggaaattttttttttattttattattrttatactttaagttttagggtacatgtgcacaacatgcaggtttgttacatatgtatacatgtgccatgttggtgtgctgcacccattaacttgtcattt

SEQ ID NO: 171405 - DNA, 201 bp, Homo sapiens
atgattttgtatattataattttcgataatctcactcctgcactcacttgcaatgtgacctcagacaactggtgccatggaggggaaggaagctggcttgyagcaggtctctcagaggcaggaagttgcggggagtcagagccattgtctacagaggcggggacactgaatgaccctggaatcctttgacccccttccctc

SEQ ID NO: 171406 - DNA, 201 bp, Homo sapiens
agaaataaagatgttctttgaaaccaatgagaacaaggacacaaagcaccagaatctctgggacacatttaaagcagtgtgtagagggaaattttttttttattttattattattatactttaagttttagggtacatgtgcacaacatgcaggtttgttacatatgtatacatgtgccatgttggtgtgctgcacccatt

SEQ ID NO: 171407 - DNA, 201 bp, Homo sapiens
tcacaaccagcctggccaacatgtccctactaaaaatacaagaaaattagccaggcgtggtaccacatgcctgtaatcccagctacttggaagctgaggcwggagaatctcttgaacttggaaggcggaggttgcagtgaaccaaaatcacgccacagcactccagcctgggagacagagcaaggcttagttttaaaaaaa

SEQ ID NO: 171408 - DNA, 201 bp, Homo sapiens
gcagggtggggcattgcctcacccacaaagtgcaagcagttgggggatttctgtgacagactgtaatgggaaaattgggacactgccacctaaacaatgcmcttttccaatggtcttagcaaatggcatgccaggagattatataccgcacctggctcagtgggtcccacacccatagagtcttgctcactgctagtccaa

SEQ ID NO: 171409 - DNA, 201 bp, Homo sapiens
catcaggctgtcacctatctctgtgtgattgtctgccatcactcagtaatggtaaacatgagaataaccataacagctaattatgtaccagcacgtcacgygtaattccactgaactctcactacaacaatgtgaggcagatgcaatttgattattagctccaaattatagatgggcagacagagaggttgagtaatttga

SEQ ID NO: 171410 - DNA, 201 bp, Homo sapiens
ggccaggagctcacaaccagcctggccaacatgtccctactaaaaatacaagaaaattagccaggcgtggtaccacatgcctgtaatcccagctacttggragctgaggcaggagaatctcttgaacttggaaggcggaggttgcagtgaaccaaaatcacgccacagcactccagcctgggagacagagcaaggcttagt

SEQ ID NO: 171411 - DNA, 201 bp, Homo sapiens
acggggctggccacggagaagttctggaggatggtggtgaagaagaggaacaattccgcacgggcaatgccttcaccaagacaaatccgcttccctgtggrcacagaaggtcaccagcatgggcacagggcaggtgcatacacttcgctctgccatgtccctaagcccagacatgtatgtccactgcaagagatttgcata

SEQ ID NO: 171412 - DNA, 201 bp, Homo sapiens
atcgttttccaaagacgatggagcagatgatgttggcggtaatggactggaagaggaaggtggggtccatgagggcccctaggaagaagcagcaggtcaasgacacagactgaagtgcctggggaacatcaggctgtcacctatctctgtgtgattgtctgccatcactcagtaatggtaaacatgagaataaccgtaaca

SEQ ID NO: 171413 - DNA, 201 bp, Homo sapiens
accctacagtattatcataatctgcatggtcaaagagcagaaggttttgtatttttcccccttttttcatttcttttcttttcttttctttttttttttttgagatggaacctcattctgtcacccaggttggagtgcagtggtgtgatcttggctcactgcaacctccccacttcaagtaattctcatgtgtcagcctcc

SEQ ID NO: 171414 - DNA, 201 bp, Homo sapiens
gcagacaaacagtcctatttgtaagaggtggaaactgtactttcctgaccctgaagaggtggcagcatggactttcctgaaccaagggcctcggtcttgcygtgctgtgtcatctgacactaagattgggtgctcattgcagccccagggtgaagcaccgatggggaggcgtgaagtgctttacacacagtaactcagtct

SEQ ID NO: 171415 - DNA, 201 bp, Homo sapiens
tatgtgtaagatccctttaagcatttcttgtaggtatggtttagtgatgataaatttactcagcttttatttgtttgggaaagactttatttccttttcayttacaaagtataacttttctgggtacagtatcttgcagatagtttttttctatcagtggacaccatgctggatccggacgggtggaagtcagtggcacgt

SEQ ID NO: 171416 - DNA, 201 bp, Homo sapiens
ttatgggctgtacggaaacctaaagaggtggccatcttacactgctggggtcatcagaaaggaaaggaaagggaaatagaagggaaccaccaagcagataytgaagccaaagagccacaaggcgggaccctccattagaaatgcttatagaaggaaccctagtatggggtaatcccctccaggaaaccaagccccagtgct

SEQ ID NO: 171417 - DNA, 201 bp, Homo sapiens
aaagcaggtggggacccttaatctcctgaggaattcttctgaactgcgttctttttttttttttttttttgagatggagtctcgctctgtcacccaggctrgagtgcaatggaggcatcttggctcactgcaacctccacctcccgggttccagtgattctcctgcctcagcctcctgagtagctgggattacaggcaagc

SEQ ID NO: 171418 - DNA, 201 bp, Homo sapiens
aattagccaagcgtggtagtgcatgcctgtaatcccagctactagggaggctgaggcaggagagttgcttgatccccgggggtggaggttgcagtgagccragatcacgccactgcactccagcctgggcaacagtgtgagactctgtctcaaaaaacaagaacatatatatatatatgattttgtatattataattttcg

SEQ ID NO: 171419 - DNA, 201 bp, Homo sapiens
tgatgatctccgtttacagaggcagaaataaggcacatggagggctaaagtcacttctcaaaggcaccagcaaggagctgggattcaacatccagacaatytggctccaatcagtgatattatctccttcattcctgagagacagaaagctgagaactctaaagatgtggcccccagatttggagaagtgggagttcttat

SEQ ID NO: 171420 - DNA, 201 bp, Homo sapiens
ctgaggcatgttctcagcagagcatcactaccctacagtattatcataatctgcatggtcaaagagcagaaggttttgtatttttcccccttttttcatttcttttcttttcttttctttttttttttttgagatggaacctcattctgtcacccaggttggagtgcagtggtgtgatcttggctcactgcaacctcccca

SEQ ID NO: 171421 - DNA, 201 bp, Homo sapiens
tttgaaggaacatatcagggaatccaaagcaccagtgcagaatcccacagctcagggaacctgggccaagggggctttttgatagacggaagcagtaggargaggcagctgggaatgaggactggggaagactacagcagtgtgtgactgtggtctacaacaggcacgaacctcaaaaatagcattcaacatgaaagcaac

SEQ ID NO: 171422 - DNA, 201 bp, Homo sapiens
aggcagccctgggaggtgggatggccccagaaccagagtagcaagaggccactggggacaatgaggagtgagaaggctgagggcaccgtggtcctcattcytcccgccttccattctgctgtcgctcttaaaagacatgttgctctgtttgttatttctgtggttggtgagggaatgtgtgccatgcatttgtactggcag

SEQ ID NO: 171423 - DNA, 201 bp, Homo sapiens
cctccagtctgtctcctctccatttcaccttataaaattccagaagcttctgtagttaatatataagccagaaaggaattcccaagcttgtctgtggaatyccacccaaagtacgaccccaactgccttgctgcctgtgagctgtttcccgtctacccacctcctccttttccatcccttccacactctcccatctcacca

SEQ ID NO: 171424 - DNA, 201 bp, Homo sapiens
gatgggggcaggttttgtgacagagtctcactgtgttgcccaggctggagttcagtggtgtgattttggctcattgcaacctctgcctcctgggttcatgygattctcctgcctcagcctcctgagtagctgggattacaggcgcacgccaccacacccagctaatttttatatttttaatagagatggggtttcaccatg

SEQ ID NO: 171425 - DNA, 201 bp, Homo sapiens
ccttgtaccagatgagactttgaactgtggacttctgagttaatgctgaaatgagttaaggccttgagggagtgttgggaaggcatgatttattttgaaaygtgaggacatgagatttaggaggggtcggggtggaatgatatggtttggctgtgtccccacccaaatctcattttgaaatgtaattcccgtaatccccac

SEQ ID NO: 171426 - DNA, 201 bp, Homo sapiens
cttctcttgtgtttcactgagctttttaaatatcactcttttgaattttaaggcattttatggatttcttcttcctcttcttcttttttttttttttttttgagatggagtctccctctgtagcctaggctggagtgcagtggtgcgatctcagctcactgcaaactccacctcccaggttcaagcaattcttatgcttca

SEQ ID NO: 171427 - DNA, 201 bp, Homo sapiens
tcagtctttacactcttagtgaggtattgttgccatccccattttatagatggagatattgaagcaatgacagtttgcaagtcttacccaaggtcatacartgggttggggctacattgtccaatgtgatagtcacttgctgcatgtggccactaattaagtacttgaaatgtggtccaaatgctatttacaatagcaaaa

SEQ ID NO: 171428 - DNA, 201 bp, Homo sapiens
tctctggctctctctctgtctgactttgtgtctctgttttccccctggagactcttgagctccaggtgtgtgcaaactgagtccagtttgattgatgtctrctggactcccatatgtctctatcctcactgtgcaccttcacccacacatcctctgacagggtcagtccatctttgcaaaacgtgggtgtgaatgtgtgcg

SEQ ID NO: 171429 - DNA, 201 bp, Homo sapiens
ctgtctcagaaaaaaaaagagtcttaaatgctcatatgcagccattctttgtacatccagtgggctcattacagtgggaacaacaaaaacatgaagaaaakgtaaagaatcactcaactacgttgacattgtccattgtgaattccatactgagagcagacaagtccattatgatggtgacagaagtaatgttgatgccca

SEQ ID NO: 171430 - DNA, 201 bp, Homo sapiens
cctgcagtgcaggggaggtgtgagttggttgcagaagaagttggaagaaggctctgagtccttcttccccccatatactcccttccctgatgcacccccasctgccccctcccagtgcctctgaagccctcaccatatccctggtagactgggtccatgatgacgatttttccccggccagagaaggcctcagcgttgtcc

SEQ ID NO: 171431 - DNA, 201 bp, Homo sapiens
cgttgggaagctgaggggggcagatcaattgaggtcaagagttcgagaccatcctggcccacatggcaaaaccccatctgtactaaaaacacaaaaattarccgggcgtgatggtgggtacttttaatcccagctactcgggaggctgaggcaagagaatcacttgaacctgggaggtggaggctgcagtgagccaagatt

SEQ ID NO: 171432 - DNA, 201 bp, Homo sapiens
actcacccttggatttccgaagttcctctatcagacactgagcctcgtcctgaatccgctcctccacactccgctttcccatcccgaagtccctcatggtrgtcacagagaatcgccgaagcaccttccagcggtttccattggcaaagagcatgcctgcagtgcaggggaggtgtgagttggttgcagaagaagttggaa

SEQ ID NO: 171433 - DNA, 201 bp, Homo sapiens
ggatttgagtaggcctcttctatccatctgcagaaggtttcccaaaaggggcagagggcggggccctggtgggaggcggtcatgggtgttagggtggcgcwgaaccaggagtagcaagagtcctgtgaggagtgcaaggaagaggaggacgctgagttccatggtcctggtctgactgccctgcaccctgctgcagcctcc

SEQ ID NO: 171434 - DNA, 201 bp, Homo sapiens
aaggatttgagtaggcctcttctatccatctgcagaaggtttcccaaaaggggcagagggcggggccctggtgggaggcggtcatgggtgttagggtggcrctgaaccaggagtagcaagagtcctgtgaggagtgcaaggaagaggaggacgctgagttccatggtcctggtctgactgccctgcaccctgctgcagcct

SEQ ID NO: 171435 - DNA, 201 bp, Homo sapiens
tctcactctgtcacccaggatggagtgcagtggtaagattttggctcactgcaacctctgcctcctggattcaagtgattctccttcctcagcctcctggrtagctgagattacaggcacgcatcactatgcccagctaatatttgtatttttagtagagacaaggtttcaccatgttggccaggctggtctcgaactcct

SEQ ID NO: 171436 - DNA, 201 bp, Homo sapiens
acattcctcaaagtttattacaggcccagtgacttcattttcttcgtattaccctcctgagagccatcataacagtctccctgatgtgttgtattttctcragagtcttggccgggtgcggtggctcacacatgtaatcctagcactttgggaggccgaggcaggtggattgcttgagcccaggagtttaagaccagtctg

SEQ ID NO: 171437 - DNA, 201 bp, Homo sapiens
acttggagacacctccaaataatggccgattgacacctcatacagctggttgcccctctgagacgaagcttccagaggaaggatcaggcagcaatttttgytattctgtagtatttgctgtattgcagcctctgctggtgatccccaggcaaagagggtctggagtggacctccagcaaactccaacagacctgcagtgag

SEQ ID NO: 171438 - DNA, 201 bp, Homo sapiens
ccaaaacagtcaataactgaaattactatcaacctcaaaatcgacgaagataagttggtttctgttcagaaaaggttccagttgggttcctgggtgctcaytcttggtggtatttgggtgacagttgtatggaatctgaggctaagttatacattaagggacatcttgaattttgcagctaattgaacctccaaggagttc

SEQ ID NO: 171439 - DNA, 201 bp, Homo sapiens
cctgtacctgtctgtgtttgaattcaaacatagccctagcccacctctatttctcttatatataaaaaaagaactgtgtgaagtttttaagagcatgattktaagtctgtgaggttgattttgtcatcttcattttgcaaatgagttaggtaaagccccaaaagttgtaaatgacttgcttctggcttccacagctaatga

SEQ ID NO: 171440 - DNA, 201 bp, Homo sapiens
ggcctagctcactgctgctttccaaattgtttccctgagagtttcctaatacctcccatagttaaaagccaaaacagtcaataactgaaattactatcaayctcaaaatcgacgaagataagttggtttctgttcagaaaaggttccagttgggttcctgggtgctcactcttggtggtatttgggtgacagttgtatgga

SEQ ID NO: 171441 - DNA, 201 bp, Homo sapiens
aggagctatgcagacttatgggtaaacaaatctaactgatctctgctctaatgccagtaggtgaccctcttttccaacaccacgagtgcctaccttgagtrtcttgaggtttgcttactctgttctttctcctcacaggtccagaacttgctatttggcctagctcactgctgctttccaaattgtttccctgagagtttc

SEQ ID NO: 171442 - DNA, 201 bp, Homo sapiens
ctgagaccctgtctctaaaacaattaaaatgaaaaaaattctttaatatcattccagacaagcctccactttctatgaactaataaggtagccacaaagawccttttgaaaactcattttagtatacaaaatcaattcaagatggattaaagacttaaacgttagacctaaaaccataaaaaccctagaagaaaacctagg

SEQ ID NO: 171443 - DNA, 201 bp, Homo sapiens
atgatgatatatcactctcatattattttatgttgatagatattctaattaccgggatctgtgatccttacactttgtacacatgtattgaagcatcacayggtactccataaatatgtacaattataatgtgtcaattaaaataataataatagtaatgacaataataataataaagaaagcccaggttctctctccttt

SEQ ID NO: 171444 - DNA, 201 bp, Homo sapiens
tcattgttcaattcccacctatgagtgagaacttgtggtgtttcgttttctgtccttgtgatagtttgctgagaatgagggtttccatcttcatccatgtscctgcaaaggacttgaactcatcattttttatggctgcatagtattccatggtgtatatgtgccacattttcttaatccagtctatcattgatggacatt

SEQ ID NO: 171445 - DNA, 201 bp, Homo sapiens
accagccccgtctgagtagctaaacagttgaacaggtgttttccaacacatcctgccttgaatgtctgaacacctagctgtgcgctccaatccaccttcaytgaaacctggatgtgtgcctcagtccatgttacctaaatttctggacagtagccttctcacttaaccctcatgaagacttacatatatgttcccatccag

SEQ ID NO: 171446 - DNA, 201 bp, Homo sapiens
tgtttcttgctgtcctaaccctttccctttccttacaagaaaatccatagtacaataatctgtgaatggctttagcaaaggcttataccctaggaaaaaaracaagcaattgttgagtttgtgagccagttccccaaaatcaggaaataatttcactggcgccaatgcctctttgtgttcccaatgggaatcacccggaaa

SEQ ID NO: 171447 - DNA, 201 bp, Homo sapiens
acgtccaggctgaggtggtttcagatggagaagggaaacttgttgggaactgcactaaaggccactgttgctatgccaagagactggtggcatattgcccytgcccaaaagatcagtggaactttgaacttgatacaaatgatttagggtatttggcagaagaaatttctaagcagcaaagcattcaagaggaagcagagc

SEQ ID NO: 171448 - DNA, 201 bp, Homo sapiens
accatttttattttctcctcgcagatctccccatacctcacttcccccccttccatcatcttctcccatctctgtctttttctctccctccttccctcccyatgctccatggagtgtcccgtctccctctgttctgctgtgcatctgtctgtctggcctgtctcttttctgatcctcttgttcctgttcggtctctgtttc

SEQ ID NO: 171449 - DNA, 201 bp, Homo sapiens
ccaggaaagtttttcccaagaagcagttggcatcttatatgaggacagcttttccaagactgtggatcaagatttctcttccatcatgaaagcattatctyttatcctttcttccctgtttcttgctgtcctaaccctttccctttccttacaagaaaatccatagtacaataatctgtgaatggctttagcaaaggctta

SEQ ID NO: 171450 - DNA, 201 bp, Homo sapiens
caaaaaagactctttcaccatttttattttctcctcgcagatctccccatacctcacttcccccccttccatcatcttctcccatctctgtctttttctcyccctccttccctccctatgctccatggagtgtcccgtctccctctgttctgctgtgcatctgtctgtctggcctgtctcttttctgatcctcttgttcct

SEQ ID NO: 171451 - DNA, 201 bp, Homo sapiens
tactatgcagccataaaaaatgatgagttcatgtcctttgtagggacatggatgaaattggaaatcatcattctcagtaaactatcgcaagaacaaaaaaaccaaacaccacatattctcactcataggtgggaattgaacaatgagatcacatggacacaggaagggaaacatcacactctggggactgttgtggggtgg

SEQ ID NO: 171452 - DNA, 201 bp, Homo sapiens
cagggatctagaactagaaataccatttgacccagccatcccattactgggtatatacccaaaggactataaatcatgctgctataaagacacatgcacaygtatgtttattgcggcattattcacaatagcaaagacttggaaccaacccaaatgtccaacaatgatagactggattaagaaaatgtggcacatatacac

SEQ ID NO: 171453 - DNA, 201 bp, Homo sapiens
ggatctaattaaactaaagagcttctgcacagcaaaagaaactaccatcagagtgaacaggcaacctacaaaatgggagaaaattttcgcaacctactcawctgacaaagggctaatatccagaatctacaatgaactcaaacaaatttacaagaaaaaaacaaccccatcaaaaagtgggcgaaagacatgaacagacac

SEQ ID NO: 171454 - DNA, 201 bp, Homo sapiens
tcagcttccccttttcccagttgtgtgccactggacaaatgctttccccaggctgagcatcactatcactaattttgtttgtttgtttgtttctgtttggkttttttttgagatggagtttcacttttgttgcccatgatggagtgcaatgatgcaatctcagctcagggcaaactccgcctcctgggttcaagcaattct

SEQ ID NO: 171455 - DNA, 201 bp, Homo sapiens
cacttgagaccttcacctatgtgatgggactctatttggtggggagggatccttagatctgcgaccccctactgggggcctggtagcactttgcaggcccyggccgactgtcagttctgctgagtcaggcttggagctttcactcactgactccttcatttgtttctatacacatatttgctaaacgcctattgtgtacca

SEQ ID NO: 171456 - DNA, 201 bp, Homo sapiens
cctgctggatctcagcttccccttttcccagttgtgtgccactggacaaatgctttccccaggctgagcatcactatcactaattttgtttgtttgtttgyttctgtttggtttttttttgagatggagtttcacttttgttgcccatgatggagtgcaatgatgcaatctcagctcagggcaaactccgcctcctgggtt

SEQ ID NO: 171457 - DNA, 201 bp, Homo sapiens
aggaaccccaataatgaggaacggacactgttcttgcactgacattaaccaagatgacccacccacatcctcaaacaacaacaacaacaacaaaacaaacwatttaccccaagccctccctgtgagaaaatggaaatctttgctgcaacgaagaaggggagagggtcaaacatgtctattcaaaacttatcccaatgcttt

SEQ ID NO: 171458 - DNA, 201 bp, Homo sapiens
atgaggaacggacactgttcttgcactgacattaaccaagatgacccacccacatcctcaaacaacaacaacaacaacaaaacaaactatttaccccaagycctccctgtgagaaaatggaaatctttgctgcaacgaagaaggggagagggtcaaacatgtctattcaaaacttatcccaatgctttgggatgttgaggc

SEQ ID NO: 171459 - DNA, 201 bp, Homo sapiens
ggtcgaccatggcgatttttccccggccagagaaggcctcagccttgtccacaagggcctcccgtatggcctctactccacacagcatgaccacgggcctsggtcccaggtgtaccgtgaagacgtccccatatttctctcggaactgccaatcacatccacaccaggggtggctgttagtcagcatacacctcatttgta

SEQ ID NO: 171460 - DNA, 201 bp, Homo sapiens
gcggtttccattggcaaagatcacacctggggtgcaggggaggtgtgggttggttgtagaagaagttggaagaaggctctgagtccttcttcctcccatawactcccttccctgatgcaccccccacccgccccctcccagtgcctctgaggctctcaccatatccccggaagaatgggtcgaccatggcgatttttcccc

SEQ ID NO: 171461 - DNA, 201 bp, Homo sapiens
accatgcgtggctcacttcttttctatattgtgtagagacaggatctcattatgttgcccaggctgttctccaactcttggcctcaagcaatcctcctgcytgagcttcccaaagtactgggattacaggtgagagtcatcacatccagcctctttgagtaactcttggacattatacacctggcatctctctctttccct

SEQ ID NO: 171462 - DNA, 201 bp, Homo sapiens
ccagggtattaatattaatattctttgctaggaaaagaatttagcaatatgtttcctacttgcacgtccatttataggccctctgcaagaagaaagaaagaagaaaaatatggctctttttgcctgaccccacaggcagtcagacgttatgtttgtcttcccttgttccataaaaatcactattattctgttctttttcaa

SEQ ID NO: 171463 - DNA, 201 bp, Homo sapiens
ttcagcatcttcaggaactcttgatcttggtagtggaatcgttttccaaagacgatggagcagatgatgttggcggtaatggactggaagaggaaggtggsgtccatgagggcccctaggaagaagcagcaggtcaaggacacagactgaagtgcctggggaacatcaggctgtcacctatctctgtgtgattgtctgcca

SEQ ID NO: 171464 - DNA, 201 bp, Homo sapiens
aaggacccaagaacatcaggttagtgcagcctctctctggttctcacttgcctgtcttctctcattcctctgcagaccttttcctaagctttgtctgtctstctctctaattttctctgcctcaatttctctttgcctttgtttctttctgtctctctgtgtgtatatttgtctcccccctgccgttctttattttattat

SEQ ID NO: 171465 - DNA, 201 bp, Homo sapiens
accagggtattaatattaatattctttgctaggaaaagaatttagcaatatgtttcctacttgcacgtccatttataggccctctgcaagaagaaagaaagaagaaaaatatggctctttttgcctgaccccacaggcagtcagacgttatgtttgtcttcccttgttccataaaaatcactattattctgttctttttca

SEQ ID NO: 171466 - DNA, 201 bp, Homo sapiens
tcctgcttcagtctcccaagtagctgggactacaggcacaggccaccatgcctggctaaatttttaaaaaatttttgtggagacagggtcttgttcagttscccaggctggttttgaactcctggcttcaagcaatcctcccacctcagcctcccaaagtgttgggattacaggcataagccaccacatctttgagtgttg

SEQ ID NO: 171467 - DNA, 201 bp, Homo sapiens
ggcatggtggctcacacttttagtcccagctactctggaggctaaggtgggagaatctcctgagcacaggagttcaaggctgcagtgagctatgactgtgycattgtactccagcctgggtaacagactgagaccctgtctctaaaacaattaaaatgaaaaaaattctttaatatcattccagacaagcctccactttct

SEQ ID NO: 171468 - DNA, 201 bp, Homo sapiens
taccagggtattaatattaatattctttgctaggaaaagaatttagcaatatgtttcctacttgcacgtccatttataggccctctgcaagaagaaagaaagaagaaaaatatggctctttttgcctgaccccacaggcagtcagacgttatgtttgtcttcccttgttccataaaaatcactattattctgttctttttc

SEQ ID NO: 171469 - DNA, 201 bp, Homo sapiens
taggcaacatagtgagaccgtcccccaaacacatctctacaaaaataaatagtggggcatggtggctcacacttttagtcccagctactctggaggctaargtgggagaatctcctgagcacaggagttcaaggctgcagtgagctatgactgtgccattgtactccagcctgggtaacagactgagaccctgtctctaaa

SEQ ID NO: 171470 - DNA, 201 bp, Homo sapiens
gggtaaccccactaaaatgtaaaataattaatatccacgtgctcaccaaggcctacaatattcccactttgctgagaataagatctgaagtctccactgakggttcacatggtcctacatgacgtggccctattaccgctctgacttctcctcccactcattcctccatgttgttctctgacatttttcctgtttcaggat

SEQ ID NO: 171471 - DNA, 201 bp, Homo sapiens
aggcggaggttgcagtgaggcgagatagtgccactgcactccagcctgggcgacagagcaaaattcaatctcaggaacaaacaaacaaaaacaaaaaagargttcatacacagataaaatcaacccatgatcaagatggtaggtggatagtgaatagaaaagaacagggtgcagggtttcggggcattcttgctacttggc

SEQ ID NO: 171472 - DNA, 201 bp, Homo sapiens
ggctgaaactcacaggcataatgttgagtggaagcaactaggcacaaaagagtcaatgcatcataattttatgtgtatgaagttcaaacacagggccaggygtggtgactcacatctgtaatcccagcaatttgggaggctgaggcaggctgatcacgaggtcaggagtttgagtccagcctgaccaacatggtgaaaacc

SEQ ID NO: 171473 - DNA, 201 bp, Homo sapiens
gcacctccctcaaagggctcttgtgaggttaaaggagacaattgtaaaaattcttagaatagcacttggcttgtgctaaggaggcttaaggtttggttacygccttgtgtttgtttctggggtatgtgtggggtatgtgtttctggccatgtgtctgtgtctgtgtctctaggctgtcttctagtctcagcctgagatcca

SEQ ID NO: 171474 - DNA, 201 bp, Homo sapiens
gatatctccagtggataaggtgggattactgtgcagccacttggggaactgctgggcagtatttcctgaagctgaacaaatggatacccaggaaaccagcyacttcactcccaggtacatgcccagcaaaaatgtgtatgtgtgttcaccaaaaaatgaacaaaatattcacagaagctttcttaataaaatgctcatcaa

SEQ ID NO: 171475 - DNA, 201 bp, Homo sapiens
tactctttgcttttgtgagttaaacttttttatactccacttaaaagtgagatcatgcagtatatatctttctgagcctgacttatttcacttaatgtaayatggtccaggttcacccctggtgttgcaaaggacaggattttcttctttcttaaggctaaataatatttgtgtgtgtgtgtgtgtgtgtgtgtgtgtgtg

SEQ ID NO: 171476 - DNA, 201 bp, Homo sapiens
gacatgtttgggcactagaggggtggagctggatcaggtgggcctgtcctcagacccctcaattgtgtgtgggcactgactgaggtaggcaggaggggctratgcccgggtcttcagcagatgctcagcggggtctcttgaggagagcagggttgctttcagtggctgtggagcattgcttcacccccaggtgggagtcat

SEQ ID NO: 171477 - DNA, 201 bp, Homo sapiens
gtaaacagtgtcagtagtgtctgtgatttccccattggcttagggtgtggttgttagtggaagccgtggtaaagttgttctgagatggggacattaggtgsgccaaggggtggcagcagcatggtgagtatgcctgtccttgggtctgagggtagcatacactggcaatggtgttagtggatctaggtgggccaattcttg

SEQ ID NO: 171478 - DNA, 201 bp, Homo sapiens
acccagcacttcgggagcctgattcaaaaggatcaggaattcaagaccagcctgggcaacataaggagaccctgtctctacaaaaaaaaaaaaaaaaaaaatgtagctagacatggtggcacatgcctgtagtcccagttgaaatagtccaggggctgaagtgggaggatcacatgggcccaggagtttgaggctgcagtg

SEQ ID NO: 171479 - DNA, 201 bp, Homo sapiens
ctctgcacctcctctcaggccccacctctgactctgggagtgagtacagttaaatcccaggggtaggggctgggcagagtaggtgttcaatcaattgcttrtataaattaaaaagccctgggtgggcacaggggcccatacctctaaacccagcacttcgggagcctgattcaaaaggatcaggaattcaagaccagcctg

SEQ ID NO: 171480 - DNA, 201 bp, Homo sapiens
taatcataagactccttggctccctccatgtcattcccctgaaaaatctaagtgttccataatttgagagtctatgacccaattactttgtatcttccagstaaagtgacagtgtctaactcataaccaaaaaccacatgttttgactaagtgtctaagataaatatatatgtatgacaattatcacattcatcatttgta

SEQ ID NO: 171481 - DNA, 201 bp, Homo sapiens
tgtctgaaaacaacaacaacaacaaactacagctatgcatactgttctgcagcttgatattcttaaatttaatatgtaataggcatatttccaggttaatmaataaggagacattttagtattttgttttaaaagagcagaagactgcctttacaatctggggaaagttaaaaaaaaaaacacagagggagaaggagaaat

SEQ ID NO: 171482 - DNA, 201 bp, Homo sapiens
ttttctctccctcttcccacctctcctcatctcccttgctgtgtcagatattaataaaatgattcttacacaagataagcctgctgacatgttaggactaygtattttggaggttatttctattactttgatgaagaatggaatgcctaatttattgcaaataattgcaaaaatgcaaacatatatagtcagatgtaaatt

SEQ ID NO: 171483 - DNA, 201 bp, Homo sapiens
tccttcctcagccagtcttctctctctctccctctgtctttcattctgtcttcccacctcccctctctccctgtctcagttcctcctccctattttctccytcctttcacctcatctttctttccttcctcatgttctctcctccctttccctattctcccctccctagtctttcttcttccctccccatcttccccttcc

SEQ ID NO: 171484 - DNA, 201 bp, Homo sapiens
ggtctttgacactatctggcccagtttgcttttctctgtcctctacacatccaaccgcgtatctctaactcatctctctcagcctctctttagtcttcctractctgtttctatctctctccacatctctttgatgtgtttctctctttttgtccccgtctctttctgcctctgtgagttttttctcttgttgctgtattt

SEQ ID NO: 171485 - DNA, 201 bp, Homo sapiens
accttagaacaaaaaatccttaagtgatggaagaaaacagtgggagaacgcatggacagattcttcatgcatccatgcatccaccaacagaattggcttgrttggaatctagcccagagcctacagtgctcccagaataggaagccagcatcccctctctcatccaggtggtacccatagccccatttctgcagctcagaa

SEQ ID NO: 171486 - DNA, 201 bp, Homo sapiens
accctggaagtgaagcttgcagtaagccaagagcatgccactgcactccagcctgggtgacagagcgagactctgtctcaaaaaagacaaaaaaaaaaaaaccaaaaaacaaaaaacaaacaaacaaacaaaaaccttagaacaaaaaatccttaagtgatggaagaaaacagtgggagaacgcatggacagattcttcat

SEQ ID NO: 171487 - DNA, 201 bp, Homo sapiens
aaaggtggcattgcagcacaggggattgagagtaactggcaggcagaactgggggcatcctgggccctttggggatgataatttattctgggccaaagaaraaagtgggatatggaggagacacagtctgatggagtagcctagctccattttctgtgggctgtgggggtagtgggtggctgatttagccactcattcatt

SEQ ID NO: 171488 - DNA, 201 bp, Homo sapiens
aggttaaaggagacaattgtaaaaattcttagaatagcacttggcttgtgctaaggaggcttaaggtttggttactgccttgtgtttgtttctggggtatstgtggggtatgtgtttctggccatgtgtctgtgtctgtgtctctaggctgtcttctagtctcagcctgagatccacaggcttcaagagctcaagggggga

SEQ ID NO: 171489 - DNA, 201 bp, Homo sapiens
aagtgatggcacagaaagtcaaatattgcatgttctcactcatgagtgagtgctacaaaatgtgtacacatggacacagagagaggaatgatacacagtgragactcagaagagtgagggagcagaaggggggtgaatgatgagaaattacttaatgggtacaatgtacactgtttgggtgataaataccctaacagccca

SEQ ID NO: 171490 - DNA, 201 bp, Homo sapiens
aatgcatgaatgaatgaatgaatgagccaatgaatcaatgacaaatagtccatcaacataccactgtttcaaaggatcaacttgtggatcaagtaatccamataaatgaatgacagtatatgtccttagatgaatcataaatgaaagaatcagtaattatacattctttaattaatgaattaaagaatgaatagatgaaat

SEQ ID NO: 171491 - DNA, 201 bp, Homo sapiens
atctcattttaaagaggcatttcaggccaggcatggtggctcatgcctgtaatcccagcaattttggaggttgaggtgggtggattccttgaggtcaggarttcaagatgagcctggccaacatggcaaaatcccgtctctcctaaaaatacaaaaaattagctgggtgtggtggtgcacacctgtattcctagctactca

SEQ ID NO: 171492 - DNA, 201 bp, Homo sapiens
gaagactccgtctgaagacaaaaaaaaaaaaagaaacttcagatagcaaaattgagagaagacattgacattcaagccatcaccacacatgttcccaattytcattgaagataaaatgtggaaggaggtcactgtactgcgcaaaaccgggggctgggccaaaccctggatcactgaagtcactgatgaaactcaagactg

SEQ ID NO: 171493 - DNA, 201 bp, Homo sapiens
ttattttgaaatgtgaggacatgagatttaggaggggtcggggtggaatgatatggtttggctgtgtccccacccaaatctcattttgaaatgtaattccygtaatccccacatgtcatgggagggacccagtgggaagtaattgaatcatgggagtgaattttcccatgctgtttcgtgatagtgaataagtctcacgag

SEQ ID NO: 171494 - DNA, 201 bp, Homo sapiens
aggctaaaagtaggaggtaaagaaatagtcaaatcatctatcatctgagagcacagggagagggacaatgattgggatataaaccccaggcattggagccrggggtgggcaaccccctttgggtcccctctctttgtattggagctctgttttcactctattaaatcttgccaatgcacactcttctggtccatgtttgtt

SEQ ID NO: 171495 - DNA, 201 bp, Homo sapiens
accctccagtctgtctcctctccatttcaccttataaaattccagaagcttctgtagttaatatataagccagaaaggaattcccaagcttgtctgtggartcccacccaaagtacgaccccaactgccttgctgcctgtgagctgtttcccgtctacccacctcctccttttccatcccttccacactctcccatctcac

SEQ ID NO: 171496 - DNA, 201 bp, Homo sapiens
tgatgttattattatatgtgactatacactttatgcctgtctacattgtatgtctgtgattatacattgtatgtctgtatcgaaatatctcacttaccacwtaaatatatacacctgctatgtagccacaaagatttttaaaaataaaaataattgcatagactcctcaaaccccaatctccagtacttttcttgtcttgc

SEQ ID NO: 171497 - DNA, 201 bp, Homo sapiens
acacaaagaaatgatgagtgcttgaggtgatggttaccccatttaccatgatgttattattatatgtgactatacactttatgcctgtctacattgtatgyctgtgattatacattgtatgtctgtatcgaaatatctcacttaccacataaatatatacacctgctatgtagccacaaagatttttaaaaataaaaataa

SEQ ID NO: 171498 - DNA, 201 bp, Homo sapiens
taagatgagtagaaaatgaactaatatttattgtgtttataatatagttgagacactattcttggtcctcaggtatataacagtgtaatagaacaatagakgaattcatgaacaactggataaaaacatcaatcaatcaatcaatagatcaattcatggatggaaagattgatgaataaatgaacaaaccaataaatggat

SEQ ID NO: 171499 - DNA, 201 bp, Homo sapiens
actagccagagacccgtcacctacatgtcccacagacacccagttatggagaactcaaaaataacctagtgattctttgatgacccctccagctgcacccrggcagaacatcccacctggcctgcttgctcactgccagctcatcagcacttcacccagggcaaggaaaacacaggtcattatttgttaaatgtctgtagt

SEQ ID NO: 171500 - DNA, 201 bp, Homo sapiens
atttgaatctgatttctccccaatctctttctctctcattctttcttttcatctccctctaaagataccttatttgtcttgttcattctttcttcctctckttttatgtcactctctctttttcctatctcttattctgtttctctcctttccctcctttctcccctcctccttccttttcctactctctctcctcttatt

SEQ ID NO: 171501 - DNA, 201 bp, Homo sapiens
tcttaaccagccaaagagtggaggatgagaactgggacaagtcagagcacgtcaagaccttctccacctccccagtgctagaccataaatccaaactcctyccacagccttcaaggtcctgcccagctgagccctttgtcttattcccttccgcaatctacacccaaggctcactggacttcctatagattctcaatggta

SEQ ID NO: 171502 - DNA, 201 bp, Homo sapiens
cctgtggacacagaaggtcaccagtgtgggcacagggcaggtgcatacacttcgctctgccatgtccctaagcccagacacaaatgtccactgcaacagayttgcataagactggcctttaacctacaattcagggtggacttttaggaagctgctctgaaaccagatgcaaatctttgagtggatgtgccacgttcattt

SEQ ID NO: 171503 - DNA, 201 bp, Homo sapiens
tcagccagtcacaggctacaagctgcccagacatgctcagataaggcaaacacagagctgtaaccaatcaggctgtttctgtacctcagttcctttccctrtggataaatagtgcctgatcacattgctgggtggagctctctgaacctttcctggttccgtgtgctgcccaattcatgaattgtttctttgctcaaatag

SEQ ID NO: 171504 - DNA, 201 bp, Homo sapiens
aagcaccagtgcagaatcccacagctcagggaacctgggccaagggggctttttgatagacggaagcagtaggaagaggcagctgggaatgaggactggggaagactacagcagtgtgtgactgtggtctacaacaggcacgaacctcaaaaatagcattcaacatgaaagcaaccagacacaaaagatcacatattatgc

SEQ ID NO: 171505 - DNA, 201 bp, Homo sapiens
taatccccatggaacccttgtacactgttggtggtaatgtaaattaatagagccactttgaggaacaacatggagtttccttaagaaaaagaaaaaaaaaagtagaataggccaggtgcggtggctcatgcctgtaatcccagcactttgggaggctgaggtgggcgagtcatctgaggtcaggagttcaagaccagcctg

SEQ ID NO: 171506 - DNA, 201 bp, Homo sapiens
tctgaccactcaatctgaagtaatccccatggaacccttgtacactgttggtggtaatgtaaattaatagagccactttgaggaacaacatggagtttccytaagaaaaagaaaaaaaaaagtagaataggccaggtgcggtggctcatgcctgtaatcccagcactttgggaggctgaggtgggcgagtcatctgaggtc

SEQ ID NO: 171507 - DNA, 201 bp, Homo sapiens
agcagcatgaaaatggactaatacaatggacaatagagcaagactctgcctctataaataaataaagacagacggatagatagatatatgatagatagatwgatgatagatagtagatagatagatagatagatagatagatagatagatagatagatagacaggaaataagaaccctgccttcctagagctgtcatttta

SEQ ID NO: 171508 - DNA, 201 bp, Homo sapiens
tacccttttagggaggtattgttgccatccccattttatagatggagagattgaagcagtgacagtttgcaagtcttacccaaggtcatatagtgggttgrggctacattgtccaatatggtagtaacttgctgcatgtggccactaattaagtacttgaaatgtggtccaaatcctatttacaatagcaaagatagggaa

SEQ ID NO: 171509 - DNA, 201 bp, Homo sapiens
acttctacagaactaccatgtgccaggcactgcattaagtgctttaagatagtatcccctatagcactcacaacagctcttgaaggaggttcaatcacggyctcaattttacaaatgaggaaactgaggcccaaagagtataagtggcttacctgaggtcacacagagaggaagctgaggtcccccaagctcaaatcctgg

SEQ ID NO: 171510 - DNA, 201 bp, Homo sapiens
cttacccaaggtcatatagtgggttggggctacattgtccaatatggtagtaacttgctgcatgtggccactaattaagtacttgaaatgtggtccaaatsctatttacaatagcaaagatagggaatcaacagatgaatggttaaataaaatgtggtatatatacaccattgaatactatttagccataaaaaggaataa

SEQ ID NO: 171511 - DNA, 201 bp, Homo sapiens
tcatgccacagcactccagcctgggtgacagagtgagaccctgtctcaaaaaaaaaaaaaaaagagagagagtcttaaatgctcatatgcagccattcttkgtacatccaatggcttcattacagtatgaataacaaaaacatgaagaaaacaaagaatcactcaactactttgacattgtccattgtgaattccatactg

SEQ ID NO: 171512 - DNA, 201 bp, Homo sapiens
catctacacaaatgtcccagattagcccactggaatatctggccaagcgccctctacttcacccacttaaatacctgaaaacatggacaggtgccctaacyaataccctaaacacataaatatctagacagattattccccagacacccaaataagtgttccccaaccctttccaatcacacaccttacagaggtgccccc

SEQ ID NO: 171513 - DNA, 201 bp, Homo sapiens
tagggttgtagtgaagatggaatgggataaggcaggtgaagcaatcagaatatattaagtgctcaaataatcagtatctctcgttgtttttctcaagttgrggatagtacctgccctctggtgtctgggaaagaaattgtgggtccagcttacctaaggagaaggggataaaagcttcagtctttttcagtgccccattgg

SEQ ID NO: 171514 - DNA, 201 bp, Homo sapiens
tcccacggcctgacctctccccacccctgcgttcctctcccaggagtgacctgccgcacctgggagcgcaccaagccgctcaggcgcttctccatcgccaycctgcgggacttcggggtgggcaagcgcggcatcaaggaggtatccaggagaaggcgggcttcctcatcaaggccgtctagggcacgcgtggtgagcaga

SEQ ID NO: 171515 - DNA, 201 bp, Homo sapiens
gccctgggtcttcctagccccaagactctcaagtccatatgcctggaatcccccctcctgagacccttaaccctgcatcctccacaacagaagacccccaratgcacagccacacttccatctcaccctaataaaacccagacctttgcattcttctcctcggaacccccaaatccacaattttggggtgcattctcactc

SEQ ID NO: 171516 - DNA, 201 bp, Homo sapiens
ccaggaccctgagacgtgccttgctgtccagagacagggcaatattcagctgataggcatcagctgagtctcattagctatttaaatattgaaaatgtctkcactgattggtcagtcactcctgtcccaagcccactgagtgcccgctgcccgctcctctggatcatcccctgaattcctccctgtgcctcccctgtgatt

SEQ ID NO: 171517 - DNA, 201 bp, Homo sapiens
ggacttcaatccccagcacttcctgggtgagaaggggcagtttaagaagcgtgatgcttttgtgcccttctccatcagtaagagaccactgtttgctgccwggctactactcacaccagcaggggcctcccttacccagctcccctctctgccgtgtagcctagtatttccccagcttggaagttcctgttagaatctacc

SEQ ID NO: 171518 - DNA, 201 bp, Homo sapiens
ggtgagaaggggcagtttaagaagcgtgatgcttttgtgcccttctccatcagtaagagaccactgtttgctgccaggctactactcacaccagcaggggyctcccttacccagctcccctctctgccgtgtagcctagtatttccccagcttggaagttcctgttagaatctaccgttgagccaccagctgatactccct

SEQ ID NO: 171519 - DNA, 201 bp, Homo sapiens
acagtgtgagactctgtctcaaaaaacaagaacatatatatatatatgattttgtatattataattttcgataatctcactcctgcactcacttgcaatgygacctcagacaactggtgccatggaggggaaggaagctggcttgtagcaggtctctcagaggcaggaagttgcggggagtcagagccattgtctacagag

SEQ ID NO: 171520 - DNA, 201 bp, Homo sapiens
gcaacagtgtgagactctgtctcaaaaaacaagaacatatatatatatatgattttgtatattataattttcgataatctcactcctgcactcacttgcamtgtgacctcagacaactggtgccatggaggggaaggaagctggcttgtagcaggtctctcagaggcaggaagttgcggggagtcagagccattgtctaca

SEQ ID NO: 171521 - DNA, 201 bp, Homo sapiens
ccaacatgtccctactaaaaatacaagaaaattagccaggcgtggtaccacatgcctgtaatcccagctacttggaagctgaggcaggagaatctcttgawcttggaaggcggaggttgcagtgaaccaaaatcacgccacagcactccagcctgggagacagagcaaggcttagttttaaaaaaaaaatcaaatattgtg

SEQ ID NO: 171522 - DNA, 201 bp, Homo sapiens
gctcacaaccagcctggccaacatgtccctactaaaaatacaagaaaattagccaggcgtggtaccacatgcctgtaatcccagctacttggaagctgagrcaggagaatctcttgaacttggaaggcggaggttgcagtgaaccaaaatcacgccacagcactccagcctgggagacagagcaaggcttagttttaaaaa

SEQ ID NO: 171523 - DNA, 201 bp, Homo sapiens
aacatgaaagcaaccagacacaaaagatcacatattatgcctgtaatatcagcactttggaacactgaggtgggtggatcacctgaggccaggagctcacmaccagcctggccaacatgtccctactaaaactacaagaaaattagccaggcatggtagtacatgcctgtaatcccagctacttgggagctgagactggag

SEQ ID NO: 171524 - DNA, 201 bp, Homo sapiens
ttgttattggattcgtgaataaatgaatgagtggatcaaggtagttgccatttaatgagcacttattatatactagctgtatgcaatatcccatttaatcytcacaaccaccttaggggcacacattctcattgtcatgatcttaactgacggaagagaaaactgtgactcaatgcatacgggttgaatctgagacacgag

SEQ ID NO: 171525 - DNA, 201 bp, Homo sapiens
cccaggaccctgagacgtgccttgctgtccagagacagggcaatattcagctgataggcatcagctgagtctcattagctatttaaatattgaaaatgtcygcactgattggtcagtcactcctgtcccaagcccactgagtgcccgctgcccgctcctctggatcatcccctgaattcctccctgtgcctcccctgtgat

SEQ ID NO: 171526 - DNA, 201 bp, Homo sapiens
atttactaaatgcctattgtgtaccaggtactatgttcagcactgtgctgatacctcacaggccttccttgtctggaagtgtgagggagagctcagccacrggatcacaggtaaatgcagcactatcaaggacataggctcagtaaggaggggcagctggtgtatgagagcatatgatggggacctgggggtcaggaagtc

SEQ ID NO: 171527 - DNA, 201 bp, Homo sapiens
cccaggagatggaggttgcagtaagccaagatggcaccactccaccccagcctggctgagagagcgagactccgtctcaaaaaaaaaaaaaaaaaaaaaaagacatccaggagcagaagagcagagatcaagcccaaagcctgattcattctctctctccctctctttcacattcattctcatcaactctgtctctcagga

SEQ ID NO: 171528 - DNA, 201 bp, Homo sapiens
ataagcctggccaacatggtgaaaccccgtctctacaaaaaatttaaaaattacatgagtgtggtcgtgggcacctgtaatcccacctatttaggaggctraggcaggagaatctcttaaacccaggaggcagagtttgcagtaagctgaaatcaagccatcgcactccagcctgggtgacaagaacaagactccatctta

SEQ ID NO: 171529 - DNA, 201 bp, Homo sapiens
cctagctactcaggaggctgaggcaggagaatcgcttgaacccaggaggtggaggttgcagtgagctgagatcatgccactgcactccagcctgggtgacrgagcaagactctgtctcaaaattaaaaaaaagaaaaaagaaggaaagaaaattttttaaaaagagacctttcagcagggacactactttctattgaccaa

SEQ ID NO: 171530 - DNA, 201 bp, Homo sapiens
tatataacgagatttggtacttgtgagctgattatatgcagataagattttaatctttgaattgatgtaatggaacaaaactcttaggaacctcaggggargaataatatattttgcatgtgaaagggacatgaatctttgagggtgggagggtggaccaaggtaggcaaaatttctaaaaatggtttcacaagatatttc

SEQ ID NO: 171531 - DNA, 201 bp, Homo sapiens
aataggcatatttccaggttaatcaataaggagacattttattattttcttttaaaagagcagaagattacctttataatctgtggaaagttttttttttwaaaaaaaaaaaaaacagggagaaggagcaatgggagaaaatgaagaaatgctgttccttattgtcttgtatccttgaatttcttcaggtgaggagcttta

SEQ ID NO: 171532 - DNA, 201 bp, Homo sapiens
tttgttagttttccttctaacagtcaggaccttcagctgcaggcatgttggagtttgctggaggtccactccagactctgtttgcctggatatcaccagcrgaggctgcagaacagcaaatattgcagaacggcaaattttgctgtctgatccttcttctgaaagcttcatctcagaggggcacctggctgtatgaggtgt

SEQ ID NO: 171533 - DNA, 201 bp, Homo sapiens
gttctggtggctgaattcactgtgtgcgttggatttctcctgcgtccacagtagggaaggaaggggagggtcaggggaggctgtagccttgctgtgtataygcccatctccctggctgccctccgttggcctaaaggtctttgacactatctggcccagtttgcttttctctgtcctctacacatccaaccgcgtatctct

SEQ ID NO: 171534 - DNA, 201 bp, Homo sapiens
atggactggaagaggaaggtggggtccatgagggcccctaggaagaagcagcaggtcaaggacacagactgaagtgcctggggaacatcaggctgtcaccyatctctgtgtgattgtctgccatcactcagtaatggtaaacatgagaataaccgtaacagctaattatgtaccagcacgtcacgcgtaattccattgaac

SEQ ID NO: 171535 - DNA, 201 bp, Homo sapiens
atgagcactccctacccacactcctctcctgctctccctctctcctccactctcctggcactgacatgggctagtctgctctctctcattggcacagcaaratctatttgattcgtgccaccacctcttttacctcattctttcagtggcaggcaggtacccaggatgtaacagaggatggcagagaagagtgaaattcta

SEQ ID NO: 171536 - DNA, 201 bp, Homo sapiens
tgtttccattgtccgcgtcactttcaattacaccaatcagatgtagatttggtcttttcacataatcccatatttcttggaggctttgttcatttcttttyactcttttttctctaaacttctcttctcgcttcatttcattcatttgatcttaatcactgataccctttcttccacttgatcaaatcagttactgaagct

SEQ ID NO: 171537 - DNA, 201 bp, Homo sapiens
acctggccgaatacagagctgatgagtgaaaaagtctggtagaacaagttcagcatcttcaggaactcttgatcttggtagtggaatcgttttccaaagaygatggagcagatgatgttggcggtaatggactggaagaggaaggtggggtccatgagggcccctaggaagaagcagcaggtcaaggacacagactgaagt

SEQ ID NO: 171538 - DNA, 201 bp, Homo sapiens
gtcaaggacacagactgaagtgcctggggaacatcaggctgtcacctatctctgtgtgattgtctgccatcactcagtaatggtaaacatgagaataaccrtaacagctaattatgtaccagcacgtcacgcgtaattccattgaactctcactacaacaatgtgaggcagatgcaatttgattattagctccagtttata

SEQ ID NO: 171539 - DNA, 201 bp, Homo sapiens
cgtctgtgtcttaccctcagaaaggatttgagtaggcctcttctatccatctgcagaaggtttcccaaaaggggcagagggcggggccctggtgggaggckgtcatgggtgttagggtggcgctgaaccaggagtagcaagagtcctgtgaggagtgcaaggaagaggaggacgctgagttccatggtcctggtctgactg

SEQ ID NO: 171540 - DNA, 201 bp, Homo sapiens
tcctggcactgacatgggctagtctgctctctctcattggcacagcaagatctatttgattcgtgccaccacctcttttacctcattctttcagtggcagrcaggtacccaggatgtaacagaggatggcagagaagagtgaaattctatacctgtggctcatacccagacacctcttcatgcccattcacccctccaagg

SEQ ID NO: 171541 - DNA, 201 bp, Homo sapiens
tattgtgtagagacaggatctcattatgttgcccaggctgttctccaactcttggcctcaagcaatcctcctgcctgagcttcccaaagtactgggattayaggtgagagtcatcacatccagcctctttgagtaactcttggacattatacacctggcatctctctctttccctggctctctgtgtttctctcctgccca

SEQ ID NO: 171542 - DNA, 201 bp, Homo sapiens
gagtgaaattctatacctgtggctcatacccagacacctcttcatgcccattcacccctccaaggacagtgcccccgtgcagttccaattcagagacaggktctcaatctgttacccaggctggagtgcaatggcaccatcaaattacctatgataacctatttaataaaccagtgttatgtacctgaattagagaagcat

SEQ ID NO: 171543 - DNA, 201 bp, Homo sapiens
tttagagtctgtaattccaatgtgaagcatgcactcatggagaccctagatggccgcctggtccttcctgagttcttaaaatttccattactaaaagctcygtattccatgactcatcatagaagagagaaaatgatccaaacagtgaaaaaatattgatgaggtgactattctaagattactaaatggtttataactaat

SEQ ID NO: 171544 - DNA, 201 bp, Homo sapiens
atttccattactaaaagctccgtattccatgactcatcatagaagagagaaaatgatccaaacagtgaaaaaatattgatgaggtgactattctaagattrctaaatggtttataactaatatttggtttatcaaatccataattctagtaagacaacaaaaacctcaggtgatatatttctggcacttggtagatcattt

SEQ ID NO: 171545 - DNA, 201 bp, Homo sapiens
ccatctgatgaactgggggtgcagagacattccgaggtcttttcctcttccttgggttctggctcatggcacaacttaagatgtcttgtgggtacccagasaggaagctgattctctcctggtgagatacaagcaaaccctcaaccccaacaagacccactggggccttttgtttgggccacttttttggtcattgataaa

SEQ ID NO: 171546 - DNA, 201 bp, Homo sapiens
cattttgtatcctttgatcaacatctcctcaccctctccaccaactcctggtaacccccattctactctttgcttttgtgagttaaacttttttatactcmacttaaaagtgagatcatgcagtatatatctttctgagcctgacttatttcacttaatgtaatatggtccaggttcacccctggtgttgcaaaggacagg

SEQ ID NO: 171547 - DNA, 201 bp, Homo sapiens
tgactgtggtctacaacaggcacgaacctcaaaaatagcattcaacatgaaagcaaccagacacaaaagatcacatattatgcctgtaatatcagcacttwggaacactgaggtgggtggatcacctgaggccaggagctcaccaccagcctggccaacatgtccctactaaaactacaagaaaattagccaggcatggta

SEQ ID NO: 171548 - DNA, 201 bp, Homo sapiens
aaagtatttcaagaagccagagaagagctcaaacagctgcaagaaagaaggggtggtgaggtttgcctagggctgagctagcaggtcacagggagagagcscctcctgggccccaatccctccatgggaaccccacttccccactcccctctgcctctgaacccctcactcactgactctatatctcctttgatctatctc

SEQ ID NO: 171549 - DNA, 201 bp, Homo sapiens
caagggggctttttgatagacggaagcagtaggaagaggcagctgggaatgaggactggggaagactacagcagtgtgtgactgtggtctacaacaggcaygaacctcaaaaatagcattcaacatgaaagcaaccagacacaaaagatcacatattatgcctgtaatatcagcactttggaacactgaggtgggtggatc

SEQ ID NO: 171550 - DNA, 201 bp, Homo sapiens
ctgctctcctccttttcactattctcccctccctaatctttgttcttcactccccatcttccccttccctaccccttttccctccctcttctcacctctcyatcttgccctccctcccctcccttccctttttcctctcccagaccccactttttccatgtggagcaggtaggtgtcgatgaggtccctgggggcgctggg

SEQ ID NO: 171551 - DNA, 201 bp, Homo sapiens
ccatctcagttcctcctattttctccttcctttcacctcatctttctttccttcctcatctgctctcctccttttcactattctcccctccctaatctttsttcttcactccccatcttccccttccctaccccttttccctccctcttctcacctctctatcttgccctccctcccctcccttccctttttcctctccca

SEQ ID NO: 171552 - DNA, 201 bp, Homo sapiens
tggatcctcttcccacatgcacaggtacacacacacatatgcacacacataacacgattttgcatggaatttcagattaagaactccaggccacaaatcaraacaccctctctaagatgagtagaaaataaactaatatttattgtgtgtatattataggtgagacactattcttggtcctcaggtatataacagtgtaat

SEQ ID NO: 171553 - DNA, 201 bp, Homo sapiens
tttctcttgtgggcatttagtgcaacaaatttccctccacacactgctttaaatgtgtcccagacacactggtatgttgtgtctttgttctcattggtttyaaagaacatctttatttctgccttcattttgttatgtacccagtagtcattcaggagcaggttgttcagtttccatgtagttgagtggttttgagtgagt

SEQ ID NO: 171554 - DNA, 201 bp, Homo sapiens
  misc_feature (1)...(201): n = A,T,C or G
cccatgaacatctcggcttggaagccagttcctctggtaagcttttccttaatgacccaccacaagattagctggtatttcctattttgtgctcccaaagntccctttagagcacttatcataattatgtctaattataataataattgcccctgtgagcatgtcctttgtgccaggcagttccaagcatgttgcaggcat

SEQ ID NO: 171555 - DNA, 201 bp, Homo sapiens
actttgcaatcattgattgacgcccacccatgaacatctcggcttggaagccagttcctctggtaagcttttccttaatgacccaccacaagattagctgstatttcctattttgtgctcccaaagttccctttagagcacttatcataattatgtctaattataataataattgcccctgtgagcatgtcctttgtgcca

SEQ ID NO: 171556 - DNA, 201 bp, Homo sapiens
ttttcaagtctatttgcatagaggagtttatagtattctctggtggtagtttgtatttctgtgggattggtggtgatatcccctttatcattttttattgygtctatttgattcttctcttttcttctttattagtcttgctagttgtctatcaattttgttgatcttttcagaaacccacctcctgtattcattgatttt

SEQ ID NO: 171557 - DNA, 201 bp, Homo sapiens
  misc_feature (1)...(201): n = A,T,C or G
cactttgcaatcattgattgacgcccacccatgaacatctcggcttggaagccagttcctctggtaagcttttccttaatgacccaccacaagattagctngtatttcctattttgtgctcccaaagttccctttagagcacttatcataattatgtctaattataataataattgcccctgtgagcatgtcctttgtgcc

SEQ ID NO: 171558 - DNA, 201 bp, Homo sapiens
cttttttggctttcttccatcttgcttaacctcctatctccatctatttgaatctgattgctccccaatctctctctctctccttctttcttttcatctcyctctaaagataccttatttgtctccttcattctttcttcctctcttcttgtgtcactctctctttttcctatctcttattctgtttctctcctttccctc

SEQ ID NO: 171559 - DNA, 201 bp, Homo sapiens
tgtggtttttgtctttggttctgtttatatgctggattacatttattgatttgtgtatgttgaacccaccttgcatcccagggatgaagcccacttgatcrtggtggataagctttttgatgtgctgctggattcggtttgccagtattttattgaggatttttgcatcaatgttcatcaggcatattggcctaaaagtct

SEQ ID NO: 171560 - DNA, 201 bp, Homo sapiens
ttcggtatgatattggctgtggggttgtcataaatagctcttattattttgagatacatcccgtcaatacctaatttattgagagttttagcataaagggytgttgaattttgtcaaaggcgttttctgcatctattgagataatcatgtggtttttgtctttggttctgtttatatgctggattacatttattgatttgt

SEQ ID NO: 171561 - DNA, 201 bp, Homo sapiens
gtggaatcgttttccaaagacgatggagcagatgatgttggcggtaatggactggaagaggaaggtggggtccatgagggcccctaggaagaagcagcagrtcaaggacacagactgaagtgcctggggaacatcaggctgtcacctatctctgtgtgattgtctgccatcactcagtaatggtaaacatgagaataaccg

SEQ ID NO: 171562 - DNA, 201 bp, Homo sapiens
aagtctggtagaacaagttcagcatcttcaggaactcttgatcttggtagtggaatcgttttccaaagacgatggagcagatgatgttggcggtaatggamtggaagaggaaggtggggtccatgagggcccctaggaagaagcagcaggtcaaggacacagactgaagtgcctggggaacatcaggctgtcacctatctc

SEQ ID NO: 171563 - DNA, 201 bp, Homo sapiens
cacagaaagtgaatatcacatgttctcattcataagtgggtgctaaacaatgtgtacacatggacatagagagtggcattatcaggggaaattcagccagrtatcgggcaaaattcacccccaatattccacgtaggttcttttctgttctccctaagtgtcggccagcctgagaaataaagggacagagcacaaaagaga

SEQ ID NO: 171564 - DNA, 201 bp, Homo sapiens
ggcatgagaactacatgacacatgcacaagtttcagtagccaattcggtcaagtggaaggaagagtatcagtgattgaagatcaaatgaatgaaatcaagygagaagggaagtttagagaaaaaaaagtaaaaagaaacgaagaaagcctccaagaaatatgggactatatgaaaagaccaaatctacatttgactggtgt

SEQ ID NO: 171565 - DNA, 201 bp, Homo sapiens
gggcctgttcttctgtaactctttgtgtgacctaacattttccacaacagcctgatgcttattatctccctctcatcacgccctccccatctctggggccrtctgtttggacacctttcgaatttctttggctgcagtacccttttggcttgggttatacctttctttctgcccctggcagccctactcctgtctttttct

SEQ ID NO: 171566 - DNA, 201 bp, Homo sapiens
tcagaggtgcaaggaacccccagtaggttctaaaccacagattgggagaaaaatgagaacaaagggagctggaaaaagctgaggcagagacaaagggagcytttcccttcacttcagtgtttcataatctgcaaaccttggaaaggccatgtcaagtgtgagttttcaggcattccctatgcctgccaagttgttggacaa

SEQ ID NO: 171567 - DNA, 201 bp, Homo sapiens
agaatctcttgaacttggaaggcggaggttgcagtgaaccaaaatcacgccacagcactccagcctgggagacagagcaaggcttagttttaaaaaaaaaatcaaatattgtgtgattctgtttataggaaatattcagaattggtaagtccataaggacaaaaaccagattgacaggggctgagatgaaaaagagaatgg

SEQ ID NO: 171568 - DNA, 201 bp, Homo sapiens
tggacatagtggctcatgcctgtaattccagcactttgggaggccaaggcgggcagatcacttgaggtcaggagttcaagaccaacctggccaacatggcraaaccctgtctctactaaaaatacaaaaaaattagctaggcgtggtggcaggtgcctgtaatcccagctactcaggaggctgaggcaggggaattgcttg

SEQ ID NO: 171569 - DNA, 201 bp, Homo sapiens
cactctgggacactgaggcgtgtggatcacctgaggccaggagctcacaaccagcctggccaacatgtccctactaaaaatacaagaaaattagccaggcrtggtaccacatgcctgtaatcccagctacttggaagctgaggcaggagaatctcttgaacttggaaggcggaggttgcagtgaaccaaaatcacgccaca

SEQ ID NO: 171570 - DNA, 201 bp, Homo sapiens
ccctgtgattctggcacgacctggttaacatgatcctgcgccaacaatgctaattgctgacatctgttatgaatggtctacctccgtgtcatacacggagscaagtcatccaccccgttttacctattcaggctatcatccctgctctgagacccctagatacctaaacgcattccccttcctcccccagcaaaggtccat

SEQ ID NO: 171571 - DNA, 201 bp, Homo sapiens
cctgtcccaagcccactgagtgcccgctgcccgctcctctggatcatcccctgaattcctccctgtgcctcccctgtgattctggcacgacctggttaacrtgatcctgcgccaacaatgctaattgctgacatctgttatgaatggtctacctccgtgtcatacacggagccaagtcatccaccccgttttacctattca

SEQ ID NO: 171572 - DNA, 201 bp, Homo sapiens
ggaccctgagacgtgccttgctgtccagagacagggcaatattcagctgataggcatcagctgagtctcattagctatttaaatattgaaaatgtctgcamtgattggtcagtcactcctgtcccaagcccactgagtgcccgctgcccgctcctctggatcatcccctgaattcctccctgtgcctcccctgtgattctg

SEQ ID NO: 171573 - DNA, 201 bp, Homo sapiens
ctccatctcaaaaaaaaaataaataaataaaaataaataaataataatctgggctgtttgcagtggctcccaccaaaatcccagcactttagggggctggraaaggaagattgcttgagcccaggagtttgagaccagccagggcaacatggcgagatataatctttacaacaaattttttaaaacattagccagatgtgg

SEQ ID NO: 171574 - DNA, 201 bp, Homo sapiens
tgaaggaggttcaatcacggcctcaattttacaaatgaggaaactgaggcccaaagagtataagtggcttacctgaggtcacacagagaggaagctgaggwcccccaagctcaaatcctggtctctctgagtctaaggctggtgctttttttgagacagagtttcgcttttgtcacccaggctggagtgaaatggcgcaat

SEQ ID NO: 171575 - DNA, 201 bp, Homo sapiens
actgtatatgctgaggtaagtgtcttacagagcatacctctgtatgacacttacatacagcatgtaagtgtatagagaaagcatgtactttctctatttcytcttatatatatactttaagttctagggtacatgtgcacaacgtgcaggtttgttacatatgtatacatgcgccatgttggtgtgctgcacccattaact

SEQ ID NO: 171576 - DNA, 201 bp, Homo sapiens
ccaagctcaaatcctggtctctctgagtctaaggctggtgctttttttgagacagagtttcgcttttgtcacccaggctggagtgaaatggcgcaatctcrgctcactgcaacctctgcctcctgggttcaagtgattctcctgcttcggcctcccaagtagctgggattacaggtgcccaccaccacaccaagctaattt

SEQ ID NO: 171577 - DNA, 201 bp, Homo sapiens
cagggtattaatattaatattctttgctaggaaaagaatttagcaatatgtttcctacttgcacgtccatttataggccctctgcaagaagaaagaaagaagaaaaatatggctctttttgcctgaccccacaggcagtcagacgttatgtttgtcttcccttgttccataaaaatcactattattctgttctttttcaag

SEQ ID NO: 171578 - DNA, 201 bp, Homo sapiens
actgccttagcctcccaagtagccaggactataggcatacaccacacactcagctatctgaaacttgttaaaaacacgaattcttagaccacaccccagayctactaaatcagaaaccgaaaacctgtgtttcaacaaggcctgcaggcaattctgaggcatgttctcagcagagcatcactaccctacagtattatcata

SEQ ID NO: 171579 - DNA, 201 bp, Homo sapiens
cccctttcagaggcagggaaaaccaaggcccagagtgaatcagagatttattcatctaaggtcacacagcagattcttcatatccctaaaaagtagatgaygacacagcagtcatatttacgagtgtatctggaggaaggagcacctaaacctcccattatttttctagtacctcttgtgtaccaggccctgacagacctg

SEQ ID NO: 171580 - DNA, 201 bp, Homo sapiens
gttggttttataaggggaaaccccgttctcttggttctcattctctctcttgccagccaccatgtaagacgcaacttttgcctttcagcatgattgtgagrcctccgcagccatgtggaactgtgagtttattaaactttttttctttataaattacccagtctacggtatgtctttatcagcagcatgaaaatggactaa

SEQ ID NO: 171581 - DNA, 201 bp, Homo sapiens
cagagatcatgatattcaaaccgttttcactttcattttgttgttgtcattttctctccatttgatcctgaggtaaaaaaggactagtaatattatctctrtgtcacagaggaggaaccagaggcacagagaggcttaacgacttgccaggaccctcaaggctataagcaggaaagcaggggcgagaccaccaggcttctt

SEQ ID NO: 171582 - DNA, 201 bp, Homo sapiens
ctattacatggaaaattgtcctctaagctaagttaatatacacaataaaatttgaaaacaggatggagcaccatagtattttagaactcatacaacactawaagtaacctagtctgggtcttattcgtctttgtacccataagactcagtaccaagtagaaattcacaaatgaaagaacaaaaggaagatttaattttcgt

SEQ ID NO: 171583 - DNA, 201 bp, Homo sapiens
gagtcagtatgtatgtgtgtgtgtgtttacacatatgcgcatgcggtgtggctctctgagacacttagaagaaaagttcctgcgtgctcatgaaaggcccrtagtacagctatgagtatattccaggcctcacatggctgcagtattcaccagattaccaatattagagaagcagatttttttctatgggtaatttttaat

SEQ ID NO: 171584 - DNA, 201 bp, Homo sapiens
aaatcctctcttctagctttgaacgtatacaataaattgttattaactatatttaccccatagtgcaatagaaaactacaacttattcttcctatctagcyctaattttgtattccttacccaaactctctgtcttcctcttcccactaatcttcctagcttctaataaccataattctactctctattatgagctcaatg

SEQ ID NO: 171585 - DNA, 201 bp, Homo sapiens
ctagtaaagagcgaaaaagagtcagtatgtatgtgtgtgtgtgtttacacatatgcgcatgcggtgtggctctctgagacacttagaagaaaagttcctgygtgctcatgaaaggcccatagtacagctatgagtatattccaggcctcacatggctgcagtattcaccagattaccaatattagagaagcagattttttt

SEQ ID NO: 171586 - DNA, 201 bp, Homo sapiens
ccaagcgagcagtaagtacaagctctgtctggcttccagtttcacatttacctcatctctacccaggtcacagtggcagcaacaacaattccccattaatstatggtaaggatgaaggaagaaaatgaatatgagcaggggtgacgtgatgaccattttaaggacattaatgctctatagcatgcggaatatgtagctggg

SEQ ID NO: 171587 - DNA, 201 bp, Homo sapiens
attaagctattaatatcacaaacaggctccatattctctctagtaaagagcgaaaaagagtcagtatgtatgtgtgtgtgtgtttacacatatgcgcatgyggtgtggctctctgagacacttagaagaaaagttcctgcgtgctcatgaaaggcccatagtacagctatgagtatattccaggcctcacatggctgcagt

SEQ ID NO: 171588 - DNA, 201 bp, Homo sapiens
tggccgggccaagggagcagctttgctcccctctctaaactacattttgcatctgctggacccccacattctctgtccaaatggctttgaacccacttccyggccacacaagcctcttcctgggatgtgctgcaggcatacacacccttaggcctaaggagtttaaccaagaggcagcaatgagaggtgtgaagagacttg

SEQ ID NO: 171589 - DNA, 201 bp, Homo sapiens
ctgaagattaagctattaatatcacaaacaggctccatattctctctagtaaagagcgaaaaagagtcagtatgtatgtgtgtgtgtgtttacacatatgmgcatgcggtgtggctctctgagacacttagaagaaaagttcctgcgtgctcatgaaaggcccatagtacagctatgagtatattccaggcctcacatggc

SEQ ID NO: 171590 - DNA, 201 bp, Homo sapiens
aatgcaagatttttacatgttatattacaatttagttaatattttcatgaacagagaaaagttatccttttaaatcctctacttaccctctcaaaacctasaacttagaattttcaagatgcaaggaaaagagcttaggaattttgcataattgaaaagtgtgatctagcaagacatgagcctcaaattatgccattaaca

SEQ ID NO: 171591 - DNA, 201 bp, Homo sapiens
aggggtgaaccattttgtatttaactaaataatcaataactatggaaaatgccagctcctgcagaactgacaggaaatagatcttactggccaatggattyatcttagaactctgtaagagagagggtagacaggcgctcagtccttgaaaggaatattcatgccacttttgcctaaaatgtaatgatatgattacagcag

SEQ ID NO: 171592 - DNA, 201 bp, Homo sapiens
tgggggattttattgcattcgttttaaagataagttaactgctgtccatttaaaaaagtaagtacagttgctttgcaagatcacacaacttttatggggcrgggcctgggcttgagtccaagacttcaaagcttgtgttctttccactagccacctactctcagaatgctcctgttaaacccattatgtggcaagtcaggt

SEQ ID NO: 171593 - DNA, 201 bp, Homo sapiens
tttttccagttcttcaggtgcagccatactacagtactaaacatggagcacaaaggcaactaattgccagtgctcttgggtttgcaggataaagtcacackattctaccaggccccgagccagctgggaattaggctgcatgacactggatggtgatcatgacaggctgattgccctaatgaggggtgaaccattttgtat

SEQ ID NO: 171594 - DNA, 201 bp, Homo sapiens
tgtctggggctcttcattgaaattttgaaaataggaggaggagcatatccagtggtgaaagagaaaacattttggtaagtggaaatgggagaaaaggaagyttgcctgactacctaataggccttacttagttgcttcagtgatggggacctagtagaccacagaagggccaagctgtctggaaaagagaagggttgtcat

SEQ ID NO: 171595 - DNA, 201 bp, Homo sapiens
ccctccagcttgaggcatttcagtggtccagtgttatcattaagataaagtttaaatgctggtgcttggcactcaagacaaattaatttgattgatagttrcttgggtttatatgtagtgcaatgtatatgaaatctagaggcttgtctcagcctcttttgggtagaactccatttatttatttatttatgtatttactta

SEQ ID NO: 171596 - DNA, 201 bp, Homo sapiens
gaaaaggatggctagtgaacctcctgccagctgcccaaattcgattagacatgttagagctagccgttttgcttaacaacagattgccttcttagaattgytcattaattttgtgtttcaattttcatcacctcctgaattagaagaattgtcttacacttcagcaaaatgcatcagagcatgagttcctcagtggcaaaa

SEQ ID NO: 171597 - DNA, 201 bp, Homo sapiens
tcagttcattgtcatgaacttagaagagaggctggcgcatatttgttgaatcaatgaatattttgtacataatagaccatcaataattcatagcagctctyattcatgtgaatttttcaccaactcttacacgaaattttttggagtatgtatgatgtgcataataattctgtatcccttctttagtcagaagttagggac

SEQ ID NO: 171598 - DNA, 201 bp, Homo sapiens
attctcttgtttagtagaaacctaagctctcaagaatccagtgacttgctaacaaccccctccccccgcataagttagagacacagcagggccaaaacctrtatctaatttttcagccagtgttcactacagagtatcctatatctccagtctttgtgaagttatttttcagtcctttactttgctttcacacacattttc

SEQ ID NO: 171599 - DNA, 201 bp, Homo sapiens
gaagatggaataagttcagcagaagttttacaaggcaatggtattgttatttaagatgaaaaggatggctagtgaacctcctgccagctgcccaaattcgrttagacatgttagagctagccgttttgcttaacaacagattgccttcttagaattgctcattaattttgtgtttcaattttcatcacctcctgaattaga

SEQ ID NO: 171600 - DNA, 201 bp, Homo sapiens
cttcattttgtgtgtatattttcctcacttctttaaaactgaaatattaattgcttatgagaaataggccctgatcattggagtttatgtgtatggccacytgagatttagaagtagatcagggacttcgaagtaggggaagtgtttaagaacctgggacaggtttgttcctagtggcttttctttatctcccagcaggaa

SEQ ID NO: 171601 - DNA, 201 bp, Homo sapiens
actgactacattaaaagagaaaggggaggaatgaaatccaaaaagaattttcagggaaaatctctcagtaaaagaaaaaaagagaaagatattgcataggrtgtgtttcatgactcatgcctggctctgtacctgagtgattcatttggtggaaaacatagctggctcagagaacctttcacaggccccagactttgttga

SEQ ID NO: 171602 - DNA, 201 bp, Homo sapiens
ctccttttgcccaggtatgtattatgctggccctggcttgctttcactgtcgctggtttctaagtctgaacctggccatttgtcttcttttgtccttaacygtttaaaacatttttcttctaggtccttgccagcttgcgaagtgtgagaaacaacttcactatactgacaaaccttcatggtacatctaacaagtaagga

SEQ ID NO: 171603 - DNA, 201 bp, Homo sapiens
tactacctttaaaaaattattgattattcagataattgtctcaggttaagcttgagcataacatgcaccatgacacatatgatataaggcaatgaggccasggagtggtggctcacgcctgtaatcccagcactttgggaggtcgaggcagcactttgggattgcttgagcccaggagttcgagataatgcaatgcaaaca

SEQ ID NO: 171604 - DNA, 201 bp, Homo sapiens
tctgctgtggataggggcttggggaccatgagaagggagaaatacctaattcgacttccccagctcttgtgcctggtggggacacagctcgtcagtctggyggctatcaggaaggagtagccagctgctggtgagctatgtgcgtgcccttagtcataagaggcagggccttcaggttgctgtgagggtctgcactcacct

SEQ ID NO: 171605 - DNA, 201 bp, Homo sapiens
agctgaagaaaaaggtggaaataaaagtatcatattaaataagatgtcaagttaaaagcctatgacagaggagaggcccaaatggatgcatgtgttgttcractctggagccccaggcctcgtgtggtgcctggtacagggcacatgattaataattattggttgcactaatgtagttaacaaagaaggtgccatatttgt

SEQ ID NO: 171606 - DNA, 201 bp, Homo sapiens
tcatctgaattttttcagaagagtaacagaaaattatagtcaggggagagtgagtgaaaagatattaagagtaaaaatgtgaacaagaaaaattaaaagtrgctttaactttgagcaacaaaggagaggatcagaataaggctttatagtgaagtaaagcaagatcaccattgggtcccaaaaggcaatttcagatgcttt

SEQ ID NO: 171607 - DNA, 201 bp, Homo sapiens
atgtgcctgtagtcctagctactcgggaggctgagttgggaggattgcttgagcccaggggttcaaggttacagtgagctatgattgctcccctggactcycgcttgggcaaccctgtctctaaaaaaataaaaataaaaaaaatttaaaaagtgccttacaatatacaatatacttacaaaattaatgtaattagaccac

SEQ ID NO: 171608 - DNA, 201 bp, Homo sapiens
atggctctttatgattttttttttccatcttacttttctgatttaactttcctcgacttttggacatctacttatttatgttctaatccattttacaacayaggaaagagacctcctaaagacattcagaatctcatctgacacatttataacctacatgatgactttagaagaccattaccattctgacgtggcatatca

SEQ ID NO: 171609 - DNA, 201 bp, Homo sapiens
tatttaattccgtttttccaatagaatatgtatatatgaaacaataaggagacaactacgcattttgttccattatagtcaggactcatgcgacttctccrttacactcagtttcacagggtggggaaaagtagtcatcagaaacccatcaaaatttggactatgtgtccctaaatcatttagatagttgtctctgatgtt

SEQ ID NO: 171610 - DNA, 201 bp, Homo sapiens
tagatactttcccttttcagaataaaaaatgttcagaaacttgtagctatcatgaagaggacacccgacctcctaggccatttaactttcagattttcacrcaactaaagcactctaaggagacactctaaagacttaaacagccaatgtccaaaaaataaattaaaaaaatgaggcatgttagcacaactttccttattc

SEQ ID NO: 171611 - DNA, 201 bp, Homo sapiens; identical to SEQ ID NO: 30919

SEQ ID NO: 171612 - DNA, 201 bp, Homo sapiens
cctatgttaaggaattggcctttatgttgcaagtggagagttactaagcagataaacatataatgcaacattttaaaaaaatagctctgattgcagtataraaaatggtttaaagggtagggaagcttaaaggctagtactcaaacctacagagccaaacaggaggctgccatgatattcatgtaaaagaggatggggatt

SEQ ID NO: 171613 - DNA, 201 bp, Homo sapiens
tctctacctcctccttcccactatctctttagatatgatctgtgcctaagactccctaagacactaattctacatgatttgaaaagtaacataaatacttytattgtttttctatcctaaggaagtttgaatgaatttaagatattttccaatgactttagtacgaatgtttgcaaagggccagagctccctggaagtaag

SEQ ID NO: 171614 - DNA, 201 bp, Homo sapiens
cagataattgaggtcaatatgaaaattttagtttcaatatccgagtatcttaactgtgtagattatttgtgagtatactgataataagctccttatgttgwcctacttttaggtggttgtagcctgtgaattgtttttttcataaatgagggatatatggatttgcatggagccattcacgcattctgcacataattagag

SEQ ID NO: 171615 - DNA, 201 bp, Homo sapiens
ccaaggggttgtctgctgtggataggggcttggggaccatgagaagggagaaatacctaattcgacttccccagctcttgtgcctggtggggacacagctygtcagtctggcggctatcaggaaggagtagccagctgctggtgagctatgtgcgtgcccttagtcataagaggcagggccttcaggttgctgtgagggtc

SEQ ID NO: 171616 - DNA, 201 bp, Homo sapiens
aatggggtttttcctgcattactttctatgactgatattttgtggtgcagatgtgactgccacattgtgaaacattattattaataaatccacattccccraaacaaacaagacagcatggcaaacagtggtgtttgctctgtatacatttgggttggtttttcatcatttcctaggaccaaggccctgctgcttcccatc

SEQ ID NO: 171617 - DNA, 201 bp, Homo sapiens
tttttaaccaataaaactatgcctccatgaatgtaactagtagtataaagacactcactcagcttgtaacagacagacctaggatcggaaccataaagacmctcagctagtaagcagtagagttaggatgtgaacactgccttgtttggctcagaagcctgtgtacttggcatgagctctctgtgctgtccagtaagtaaa

SEQ ID NO: 171618 - DNA, 201 bp, Homo sapiens
cattttaaatacacaacttctctttgagccccaagtctgggttagtgacatctcatacatgctcccagtacctgtattttctctgtaataatactcagctyctgccccttccatgtacctcctggttaagaagacaggctctgcagcaagactgcctgcacttagttctagttcaatacctttctttctctgtatgattgt

SEQ ID NO: 171619 - DNA, 201 bp, Homo sapiens
aagactttttttttcctcctgagactatagaaatcttgttatatagaaatagttttagagctgaaggtagagttctccagctcatacatgggaaagctgaraagtcaggagggagaatggagctgacaccaaatataaagggacacccctaaatacagctttttctcttaaaagcagagtgcaaaaaaagattgtcaaatt

SEQ ID NO: 171620 - DNA, 201 bp, Homo sapiens; identical to SEQ ID NO: 30918

SEQ ID NO: 171621 - DNA, 201 bp, Homo sapiens
gctttttaccaactgataaaacagaagaagaggctttctccttggaaacctatttctccatacaggttctgcccatagctttacttgattatgactatccytccggaggttcatgtgggtgtaccagatgcagggtctcttcaagtagtggacaagagggtcagtgagttatcttcgattttaaggaattcagaaagtcat

SEQ ID NO: 171622 - DNA, 201 bp, Homo sapiens
taccaggcctccaaatctctcatgatctcgttttccctcatgtccttgaactctatctctgcagcctctgaactttgcttgtgtctttcttatgacagctrtaaaaacccacgtgggattctagtaactcttggtgcacagagacttgcaacaagatgcctgaatgtgggtactcagtgagagttaaatatccaaatctgc

SEQ ID NO: 171623 - DNA, 201 bp, Homo sapiens
ggagccccagtactatgggaacatgggtttgcttgtttcatttaacccctgacatcagcaggcttgttatgatgtagaatgacgtcccagttcctccatgwaaattctgttccctaagtaaagcaagctggatgactgttcccagtggttgtgtgaccttggcaagtgacttcacctctctaggtctctgtctcctgaggt

SEQ ID NO: 171624 - DNA, 201 bp, Homo sapiens
ctgatgcatgtccaatataggtcagcaactaaatttataaatagatactttcccttttcagaataaaaaatgttcagaaacttgtagctatcatgaagagkacacccgacctcctaggccatttaactttcagattttcacacaactaaagcactctaaggagacactctaaagacttaaacagccaatgtccaaaaaata

SEQ ID NO: 171625 - DNA, 201 bp, Homo sapiens
ataactgcaaagaattagacaactataaaatggtatttagggatttataagccattttgtgcatgctattcttccattgagcagtttccaatggttccttmttgcctgccaaataaagtcagattccttaatctaacattaaaaacctctccaaaatttggccctgaccacactacttttggaagtttatcctactcaacc

SEQ ID NO: 171626 - DNA, 201 bp, Homo sapiens
attgagcctcttctttgcaccaggtctcatgaataattgacaaaccaaataaacatggtccctgcctttccaaagcttccacacagagatgcttatctgawttgacaactctaaataaagccatattttcaaaattaacttctgagacaaaagaatttgtatagtatgagtaatttccaagaagtcattgagagaattagg

SEQ ID NO: 171627 - DNA, 201 bp, Homo sapiens
taccatattgatagcacagtgtagacattccagattctaaagcaagtcatgtcaccttcatgagcctcaataatctcatttgtaaaaatggagataacttyaatggctttgtttgcagaagaaaatcagtaaacttgaaagcgcatgtcaactggtaaagactgtatataacaggttttctgctctttacaacacttagac

SEQ ID NO: 171628 - DNA, 201 bp, Homo sapiens
attgcccaagggctatacagtgggaaggtgccagagccaggattaggattcctgtcttcttagtcacagtccagttctgtctccactgtgctattcagggytggaaagtatgaactgctatggccatattatcttccctatttatatcaccatcttcagcaatcagccacgtaacttcttatgattcttccataagttacg

SEQ ID NO: 171629 - DNA, 201 bp, Homo sapiens
tgtctccttgagactcacccaactgagatagcccctaaggcattcctgatcacactggaggcaaactgcctcagtctgaatgcactaagtctgtgattctkgaaagttactgaatattagcaaaaaatcattatttttattaccacctcttttaagacaagcaattatggtggaatgaatgctggcctttgagtgttcacg

SEQ ID NO: 171630 - DNA, 201 bp, Homo sapiens
aaagttaagccaatccaaatgtctccttgagactcacccaactgagatagcccctaaggcattcctgatcacactggaggcaaactgcctcagtctgaatscactaagtctgtgattctggaaagttactgaatattagcaaaaaatcattatttttattaccacctcttttaagacaagcaattatggtggaatgaatgc

SEQ ID NO: 171631 - DNA, 201 bp, Homo sapiens
taatgcatagttcaagcctaaacaatacaagcatctcacgctttggagtcaacactgaaaatgaagatcacctggccaaggtgtgtataagctcaggtttygtgcatgtagctctctgctttacagcagacggatgaccgtataccttttagaaaatagtatggattgcttttgcattattattacattttgtgttaggga

SEQ ID NO: 171632 - DNA, 201 bp, Homo sapiens
gtcacccatttattaaatttccaaaaccaaataaaattggattctggaattcatgccttaaaaggtttctgggcacagatacaattgtttttatattataygtcataaaagtatcagtagctccctaaggtctccagtttggaaaattccactctgttctcttctgctattggaagggaagtcaaaaatttcaccctctgg

SEQ ID NO: 171633 - DNA, 201 bp, Homo sapiens
taacaagtaaggattgacttttttgtggagtttgaatccctaacataaaggcaaaaaatattgagcagcatttaaaaaaatacaactattacatggaaaaytgtcctctaagctaagttaatatacacaataaaatttgaaaacaggatggagcaccatagtattttagaactcatacaacactataagtaacctagtctg

SEQ ID NO: 171634 - DNA, 201 bp, Homo sapiens
cacttgccagtgtctgcttggccaaatcctgattgtctatgtcccatctctagtatcaccttcactgagatgctttccctgacctcaccaaacctggctgrgtggccctcatttggatccagagtactctgaaaaccttatcactatctttatggatctctgcccaccactagactgtgtgccctttaggagtaagaattg

SEQ ID NO: 171635 - DNA, 201 bp, Homo sapiens
tatgagtatattccaggcctcacatggctgcagtattcaccagattaccaatattagagaagcagatttttttctatgggtaatttttaataatttaaggkctctcatttctcattatttcagaaatccaacttggagcttctcatttgatcagcaagtattttccaagggcctcctgtattctcagccctgtaagaggtt

SEQ ID NO: 171636 - DNA, 201 bp, Homo sapiens
cacttggcctaggagttcgaggctgcagtgagccgtgatcacgccattgtgctccagcctgggtgacagagtgagatccagtctctaaaagaataaaatamaataaaataatttatcagctcttaggcaagattgaggaggtgggactcccaggaaaaaaaatgttgaaggactcattgtggttattgccaaacctggctg

SEQ ID NO: 171637 - DNA, 201 bp, Homo sapiens
cctcaagagcctgtgagtctcctactaaagtgttccttcctccatccctcaccacctctgctgcaccaaaccctaccccgcacacttcagacacagccctrgactgcttagatgcttactaagaaagtctttaggaggaagggctgttttatctctgaaatctatgcttatcccttcttaattaaactgtcaggccccaca

SEQ ID NO: 171638 - DNA, 201 bp, Homo sapiens
ttgtgtctttaaaacgaaataatttggaattcatgtgattcacctgggattcaaaattgcacagaggttcaataagtaaaatatgctagctgagatgattkattcagagatgcctggttacaaacatattgtatcatgggaaacacacacacatacgcaagcagggttacccagaaggaggatgattggacatctttgaga

SEQ ID NO: 171639 - DNA, 201 bp, Homo sapiens
tctgtcacccaggctggagtgcagtggcacgatcttggctcactacaacctccgcctcgtgggttcaagcgatgctcctgcctcagcctcctgagtagctrggattataggcacacgccaccacgccgggctaatttttgtatttttttttaatagagaccggatttcaccatgttggtcaggctggtctcgaattcctga

SEQ ID NO: 171640 - DNA, 201 bp, Homo sapiens
tgactgtgactctttagaacatcactcacaaccttgtggatatctgcttcatgttttaattacaaccccaaccccactttttaaattctagcagtgttctkcctgcctctccagcagttcctcctctatcatcaattaccataaaattatttatcccttgtagtaactccaagcaccatagagtgttaagtctctttactt

SEQ ID NO: 171641 - DNA, 201 bp, Homo sapiens
atagcaggatcaacaaactacagcccatgggccagccacatgtttttgcaaataaagtgttactggaacacagccatttgtttatttatgatctgtgatgrccttcgtgctaaaatggcagaattgtttgcaacagagaccatatggcccacaaatctaaaatatttattgtctggctcttttgaaaaagtttacctctgc

SEQ ID NO: 171642 - DNA, 201 bp, Homo sapiens
ctaaatcttctgcttccctcttcagcattaagaacactttcaattacattgggccccactggataagccagaataatctccttattttcatgttacctcaytagcaaacttaactccatctgctaccttttgccatagaacagcacatgtttacaggttgcagggattaggatgcagacatctttaggagagtgatttcag

SEQ ID NO: 171643 - DNA, 201 bp, Homo sapiens
ttgggtttctccagaatgtttagaaggtttggctcacatgggtgttggtattagtttcctattactgcaataaatattacacaaacttagtggcttaaaaygacacaaaccaaggttttggcaaggctgcgtttctttctagagactctaagggaacatccattttcctgtctcttccagcttctagaggttgcatgcatt

SEQ ID NO: 171644 - DNA, 201 bp, Homo sapiens
ggcagagagtggagacagagggtgccctaatgccagtggaagagaaagtcagggctgattcctgaccgccacttccccgctctgagcaccgcatatagggwtctgctctgagacctttatctttaccttcatacagagcttctccttccttacgtataaatccccaaatgtataggtctgggaacctctagagaaacacgg

SEQ ID NO: 171645 - DNA, 201 bp, Homo sapiens
tctcttccccgctgccctcaggaggtggcttcacctccactctctcaatgcaaatggaggattgttatctgctttagatttgggcttgaatcttattctcyatggaatcccttggacaatgctttgcacataatagttactcagaaaaaaagtatctttaagtggaattcaatttctaggataccctcttctcatattcaa

SEQ ID NO: 171646 - DNA, 201 bp, Homo sapiens
gtacaccttgtggctcttttctttatccctgatttttcctcccaggcttatgaataaggcttcagttatgtttctccctccaaaattgccagcagccccamctgctgggcttggaggctggggcctgcagcctaaggacagtgtggcagtctgctgccatctgctggctcacgtgtcaccagctcagggctggctttgcaa

SEQ ID NO: 171647 - DNA, 201 bp, Homo sapiens
ctaataaccacttaatttttttagtgcatatctatccaaaatgtcttttattgctgtatgtactttggcatgtgaattaaattaactgaggatcataaaaygtttagcgttcagagctggaatgaacctagccaaatttcctcagatgaagtgaagcaacataggtaaaactcctcacacaggactcagtacgttgtaaat

SEQ ID NO: 171648 - DNA, 201 bp, Homo sapiens
ggacagggagaaaggcaggcagtagactatatttaccagtccaggcactcattgatgctgtcacataatgggctccaggttgctggtgcaaggggaaataraagtgtctaatttcaagggaaacaaagcaggacctagggagaaggagaataaataatgcaagatttttacatgttatattacaatttagttaatattttc

SEQ ID NO: 171649 - DNA, 201 bp, Homo sapiens
tatcaatcgactctgtcatcaacatcatgaatgtcacctgtggctatcaggaaataatgtaacttctttgtattaacattcttccaaagcataatttaatsaacatgtatgtaatcttcaggaaagaactaataaccacttaatttttttagtgcatatctatccaaaatgtcttttattgctgtatgtactttggcatgt

SEQ ID NO: 171650 - DNA, 201 bp, Homo sapiens
ttgttcattgctgtaatccagcacccacccagcagcaggcttggcacatagcagatgctcagtgtacttttgctgaatgaatgaacaaacaacttccctakacaattctccacatctgaaaggccactgacctggtatgtcagttagaattttgtgaaaaaacgatccatcaggtcagctctatattttagaagtggaaac

SEQ ID NO: 171651 - DNA, 201 bp, Homo sapiens
agtctaccaagaaagaaagctgataagataataaagatgattcattcctcagagtaggaaaaaataaaaagaaaaatttaaaaagatgctaaatatgagckctgagtctcaacactgtctcaagatgaggcagatgtcaactttcttgcctattctgcttgctatttaggcatatctcttgagcaaaaccagtcatttgtc

SEQ ID NO: 171652 - DNA, 201 bp, Homo sapiens
gtgtcatttatcaatcgactctgtcatcaacatcatgaatgtcacctgtggctatcaggaaataatgtaacttctttgtattaacattcttccaaagcatratttaatgaacatgtatgtaatcttcaggaaagaactaataaccacttaatttttttagtgcatatctatccaaaatgtcttttattgctgtatgtactt

SEQ ID NO: 171653 - DNA, 201 bp, Homo sapiens
accttaaaaaaattattttgcttcatttcctgaactgttgagtcatttatggcatgagaaccttaacactttttatacatcacacttgaaatttcagctgygtgtgcagttttcatgaggctccagcaaagaggaaaaatggtgattggttatatgcatgctgtctcagtagcctttgcttggtgactttaataagatgtc

SEQ ID NO: 171654 - DNA, 201 bp, Homo sapiens
agtgagtgtgcccaccattcagcagtctgatagccaggggatggagctgggagcaaataggtgtcatttatcaatcgactctgtcatcaacatcatgaatrtcacctgtggctatcaggaaataatgtaacttctttgtattaacattcttccaaagcataatttaatgaacatgtatgtaatcttcaggaaagaactaat

SEQ ID NO: 171655 - DNA, 201 bp, Homo sapiens
gtgtgtgcagttttcatgaggctccagcaaagaggaaaaatggtgattggttatatgcatgctgtctcagtagcctttgcttggtgactttaataagatgycattcagacacatgcctgtgtcccttctctgaaactttaacacaatgcccacttgttgcctggctccttggtgagacacaacacactccaccgccctgta

SEQ ID NO: 171656 - DNA, 201 bp, Homo sapiens
gcagaataaatgtttagtctccatttttttaatacttttttctcatcttttaaaaattgtttagtttttttttgtttgttttttttgttgtttttttttttagaatatgtccgagtctaaaaggctcctaggttgtatgccatggttgtctatgaaagaaaaaccaagggcgatggtgcttgcatttgcagtattcttcca

SEQ ID NO: 171657 - DNA, 201 bp, Homo sapiens
ataacagagtgaaaggaaataacatttaatgagcacttcccatggagccgagctcatgttcttatgttatctctgttaatctgtcaggtaggtgtctttaktatccccactccatagatgatgaaactgggactctgagagattgagaaacttgcccctatcccatgactgtgtatcatgctgtgtcccatgatgtggcta

SEQ ID NO: 171658 - DNA, 201 bp, Homo sapiens
aggtctatctagatgtttcaagatagaataataaacatgcctcttattcagaactgttttttagaacaatagtgttgtttgcatattgtggctctcaaaastatgtctcttggtgacttttttctaaggtacactggagcattacttcactctattaaaaccacattaaaagcagtactaaataatttgcccattgtatgt

SEQ ID NO: 171659 - DNA, 201 bp, Homo sapiens
aaaacgatccatcaggtcagctctatattttagaagtggaaaccaacagtctctaacttaagacaaatgtcaagaatgcatttttctgaagtcctacagtrggaaggacgctttaggatttcatggccaaccttacaaatgcttcctttcccagggccaaatcaaaactctgtcaatgactcagctgtcaaatacatgtca

SEQ ID NO: 171660 - DNA, 201 bp, Homo sapiens
gttgtttgcatattgtggctctcaaaagtatgtctcttggtgacttttttctaaggtacactggagcattacttcactctattaaaaccacattaaaagcwgtactaaataatttgcccattgtatgtgcaggctttcagaatatgataaacatggggtaatgctgcctcttccccaaagaggagcaggagacagagttgt

SEQ ID NO: 171661 - DNA, 201 bp, Homo sapiens
cttttttctaaggtacactggagcattacttcactctattaaaaccacattaaaagcagtactaaataatttgcccattgtatgtgcaggctttcagaatrtgataaacatggggtaatgctgcctcttccccaaagaggagcaggagacagagttgtattgacagtgcagcttgacctcagcttgctggccccaataaac

SEQ ID NO: 171662 - DNA, 201 bp, Homo sapiens
cagttgcttccagaataaaatacaagatctttgcatggccttccatggctgtatataacttgatctagcttctcctatcagtctttccctgtctgcgttcmtgagcatactctgatgttccccttgcctggaatactttcctctcccttgacacttaattcttattcctcaaaatctcataactttccaaggcaggccttc

SEQ ID NO: 171663 - DNA, 201 bp, Homo sapiens
gcttctgcacagcaaaagaaactatcatcagagtgaacaggcaacctacagattgggagaaaatctttgcactctacccatctgacaaagggctaatatcyggaatctacaaagaacttaaacaaatttacaagaaaaaaacaactccatcaaaaagtgggcaaaggatatgaacagacatttctcaaaagaagacattga

SEQ ID NO: 171664 - DNA, 201 bp, Homo sapiens
ctctcttggggttatttttcaaggaaaaaaatgagatatgcaagtgaaagtgcttggtaaactgtcaagttatatatataagagccagttgtgattagaakttttgttttacttgtagtcttagaggaatttgctaaagagatcggcatcaaaatgacctacttttcactgttatttcccttaagggcagtgaacctcttc

SEQ ID NO: 171665 - DNA, 201 bp, Homo sapiens
ctgacttcaaactatactacaaggctacagtaaccaaaacaacatggtactggtaccagaacgcagatatagaccactggaacagaacagagtcctcagawataacaccacatatctacaacctctgatctttgacaaacttgacaaaaacaagcaatggggtaatgattccctatttaataaacggtgctggaaaaactg

SEQ ID NO: 171666 - DNA, 201 bp, Homo sapiens
aacttccctatacaattctccacatctgaaaggccactgacctggtatgtcagttagaattttgtgaaaaaacgatccatcaggtcagctctatattttaraagtggaaaccaacagtctctaacttaagacaaatgtcaagaatgcatttttctgaagtcctacagtaggaaggacgctttaggatttcatggccaacct

SEQ ID NO: 171667 - DNA, 201 bp, Homo sapiens
cactgttcagtccttaccattagcaacttcagtggccttcttttttttgaaggtgagtcattccctcttcctcatctcagacccagccctccctacctacraggaagtgtagtatgggaactgtggaattcagagttttcactgagggcttggttctgagccttggccacgtaaacctcactcactctccaccctcctgtg

SEQ ID NO: 171668 - DNA, 201 bp, Homo sapiens
agtacactctaacctctgtgcccatggcttagttgccatgataggaagactataaagtggacacaaagtcttgactgtgaattaagaatttggaaagtgayactctagcctaactaacattgcttcaaaatgtattaatttttgcttaaacattttgatggctgatctgaagaagagaggacaatggagcaaggtctcttc

SEQ ID NO: 171669 - DNA, 201 bp, Homo sapiens
aagtaaagctgcagtcaaagagacagataataacatttttaaaagtggatgtgttgggcgggtgcggtggctcatgcctgtaatctcagcactttgggagrccgagacgggcggatcatgaggtcaggagatcgagaccatcctggctaacacggtgaaaccctatctctactaaaaataaaaaaaattagccggcctggt

SEQ ID NO: 171670 - DNA, 201 bp, Homo sapiens
atcccttttttcctctgcatgaaggagaaatgtgatgtatcatcttgcagtcattttgcatatcagtggattcaaaaggctaggagcaagctactttctcyccaccgtcctggtgaatgtccgatattagttacagagaaccacaggttgtgatgtggaagacatgaaggtagtaaatccccagcagctgggaagtggttg

SEQ ID NO: 171671 - DNA, 201 bp, Homo sapiens
gacagcagaaaagggttagatagataggaagaaatatgtaataatttggggagctgttcaagccctaatctcatttaggagattagttatagagcagctayattcaaatttgtttgatcttttgatatttttcaattctgtatgaaggcattaatggtttttccctgctttgccttttaatatgtcacttgagcagagact

SEQ ID NO: 171672 - DNA, 201 bp, Homo sapiens
aggagaaatgtgatgtatcatcttgcagtcattttgcatatcagtggattcaaaaggctaggagcaagctactttctctccaccgtcctggtgaatgtccratattagttacagagaaccacaggttgtgatgtggaagacatgaaggtagtaaatccccagcagctgggaagtggttggactttttcctttattagaggc

SEQ ID NO: 171673 - DNA, 201 bp, Homo sapiens
tacatatatatatacacacatcatacatatatatatatatatatacacacacatcatactatatatatatatatatatatatatatatatatatatatataattttatttatgaaagaatcacatatgaccaaagttcttgtgtacagtacaacttggatgtattaaatgactggccaattaccaacatgttaataaagga

SEQ ID NO: 171674 - DNA, 201 bp, Homo sapiens
atacatatatatatacacacatcatacatatatatatatatatatacacacacatcatactatatatatatatatatatatatatatatatatatatatataattttatttatgaaagaatcacatatgaccaaagttcttgtgtacagtacaacttggatgtattaaatgactggccaattaccaacatgttaataaagg

SEQ ID NO: 171675 - DNA, 201 bp, Homo sapiens
catacatatatatatacacacatcatacatatatatatatatatatacacacacatcatactatatatatatatatatatatatatatatatatatatatwtaattttatttatgaaagaatcacatatgaccaaagttcttgtgtacagtacaacttggatgtattaaatgactggccaattaccaacatgttaataaag

SEQ ID NO: 171676 - DNA, 201 bp, Homo sapiens
tttaaggctaggaaagcaccagaaagaagaagaataagaaaatatatatatatcatacatatatatatacacacatcatacatatatatatatatatatayacacacatcatactatatatatatatatatatatatatatatatatatatatataattttatttatgaaagaatcacatatgaccaaagttcttgtgtac

SEQ ID NO: 171677 - DNA, 201 bp, Homo sapiens
ttggaaaaagaaatttaatagctccccagatgagtcggctgcgtatccatgtttgagaaccactggactagagtctcactctcttgctcattgcaaatgtsctgttactccttagtggagcagagaatccttaatgccagtgtttctgaaaatgtggtcctcagaccagcagcatcagcaccacttgggaactttttataa

SEQ ID NO: 171678 - DNA, 201 bp, Homo sapiens
ggagtcttatcagggagacctcattttccctctaattaaaggaaagatttaagggagagaaaggaatagcctatgcctcttacttgtgcgggtcagtgttygctgaattagaagttattccaacatgaacacaatcctcaggatgaatgactgcctagactttgaacgtaatggtcaaccagttttcacccgaattttgac

SEQ ID NO: 171679 - DNA, 201 bp, Homo sapiens
ttttaaggctaggaaagcaccagaaagaagaagaataagaaaatatatatatatcatacatatatatatacacacatcatacatatatatatatatatatacacacacatcatactatatatatatatatatatatatatatatatatatatatataattttatttatgaaagaatcacatatgaccaaagttcttgtgta

SEQ ID NO: 171680 - DNA, 201 bp, Homo sapiens
gaaaggaatagcctatgcctcttacttgtgcgggtcagtgttcgctgaattagaagttattccaacatgaacacaatcctcaggatgaatgactgcctagrctttgaacgtaatggtcaaccagttttcacccgaattttgactgtttcatttagaagaaaagcaaaatgagaaaaagctttcctcatttctccttgagat

SEQ ID NO: 171681 - DNA, 201 bp, Homo sapiens
tttttaaggctaggaaagcaccagaaagaagaagaataagaaaatatatatatatcatacatatatatatacacacatcatacatatatatatatatatayacacacacatcatactatatatatatatatatatatatatatatatatatatatataattttatttatgaaagaatcacatatgaccaaagttcttgtgt

SEQ ID NO: 171682 - DNA, 201 bp, Homo sapiens
tgataagctccaaagtgaagcagtggtgacagaggaagaatcaaaatgctggttatagatgtcaaggtgcaaggaattagagagttcatggatttttttcyggaaacttattattgaagtatcatatgcagagagaaaagtgcacaaatcacaaatgtagaaatcagtgatttttaataaaatgaacatacctatgtaacc

SEQ ID NO: 171683 - DNA, 201 bp, Homo sapiens
tcctgtttgtccaacaatgaggaggccagcgtaaggccacactgctagctcatgcaggatgcatagcccctgagtaaaccataacagagccataagcctgrtatttaatcacaggaacatcagcaaaaggaactgcttaattgttttttattttcccttctttcacctgttggaaatgactgcgtgctctgtagatccaaa

SEQ ID NO: 171684 - DNA, 201 bp, Homo sapiens
tgttgtggttaaacaacatgccctaatatatctattcctactagaatgaaagctgattaaaagcatgaaaagagtttttgtttgttcctttgtttttttttcactgctatatcatcactcttttccctggtcattttaggtattcaataaatggttggcaaatacgtgaaaaaagggcattattgaactactacaaacctg

SEQ ID NO: 171685 - DNA, 201 bp, Homo sapiens
ggagacagaggagcaggaaccaggaggacactgaagcagatggttaaaagcggagatagagaagcctccacagcacaaagtggtgaagtggatggaattcraattgacctttatctcatcagtgaggtagaaagttgggttcttggttaaaagttagaggatagaagtgggaatgggaatttgtgaatagtggaaatgtct

SEQ ID NO: 171686 - DNA, 201 bp, Homo sapiens
aaaggactaggttagtttctgacactaagtgacctccatttgcatacttcgccatgttgtgtgttttatggttgccttaagatgactatgttttttggtarcattgctgtgcccttagcaaaaggctcataggagaattagtttaagcctgggaaggaggaaggtgatattcatctgttaatgacttgcatgagtacactg

SEQ ID NO: 171687 - DNA, 201 bp, Homo sapiens
tgttggataggagaaaaataaatgcacatgtaggtagaagcaatgaaagccatggagagcaagagggtaaagatgtaaatcagtgaggatagtactgaaaytggtgaggtcctgcaagaaactagaggagacagaggagcaggaaccaggaggacactgaagcagatggttaaaagcggagatagagaagcctccacagca

SEQ ID NO: 171688 - DNA, 201 bp, Homo sapiens
aagaaaagctttcaggttgttgttggataggagaaaaataaatgcacatgtaggtagaagcaatgaaagccatggagagcaagagggtaaagatgtaaatsagtgaggatagtactgaaattggtgaggtcctgcaagaaactagaggagacagaggagcaggaaccaggaggacactgaagcagatggttaaaagcggag

SEQ ID NO: 171689 - DNA, 201 bp, Homo sapiens
atgtggcacttttgtaaaagatcggggacaatgatttgggaggcatctaaatgaaaataacatttgaaggtgtgaaaacaaatgtggtagccgaaatagaygtagtgcatttaagtcaaatgtgacagatgacaatggggactaagaagaagtctccactgaatttcacatttagaaggccattgggatgagagagaaaga

SEQ ID NO: 171690 - DNA, 201 bp, Homo sapiens
gaaatacagatgtggcacttttgtaaaagatcggggacaatgatttgggaggcatctaaatgaaaataacatttgaaggtgtgaaaacaaatgtggtagcygaaatagatgtagtgcatttaagtcaaatgtgacagatgacaatggggactaagaagaagtctccactgaatttcacatttagaaggccattgggatgag

SEQ ID NO: 171691 - DNA, 201 bp, Homo sapiens
gctgtgcagtgatcagttggaaatacagatgtggcacttttgtaaaagatcggggacaatgatttgggaggcatctaaatgaaaataacatttgaaggtgygaaaacaaatgtggtagccgaaatagatgtagtgcatttaagtcaaatgtgacagatgacaatggggactaagaagaagtctccactgaatttcacattt

SEQ ID NO: 171692 - DNA, 201 bp, Homo sapiens
atccgaatctaagcagaagcaatttaatttggtgttgctatttcagaagatcttatattgttttctgactgtctcattggatagtaatttgtcttcctggyaactccttaataacagattccctatgactttttaaaaatcatatactaagttcaatattaagtaattaatttattcttttatccttcatctatcacaagc

SEQ ID NO: 171693 - DNA, 201 bp, Homo sapiens
gtcttcaaatgacatagaggggtcatatcagaatcatctgggaagccttttgacaataaacacagtgctcctctcccacactaaattctcgtagacccagygaggagaatggggaaagcagggacatacagggttggaaaatgtccctcgccttattcaagaaattctcaccttcttttaaaactactgctataggacatt

SEQ ID NO: 171694 - DNA, 201 bp, Homo sapiens
tatgtgtgtgtgtgtatatatatatatatatacacacacacagtgaaatgattaaatcaagcttgttaatataatctgtcacctcatagactttttgtttrtggtaagaacatttaagatctactctctcagcaattttcaagcatacaataccttattgttagctaaagtcaccgtgctgtgcaatagatttccatagct

SEQ ID NO: 171695 - DNA, 201 bp, Homo sapiens
agtagccaagtgcttccacaaagaaaggactgttaagttatttagaaacgaagaagacagtaaaactcctgtttcttttgtttctgctttgggaagtgccwgataattttttcttcttatggaatagattttaaagctataaatcttgccattctgttcaacagtcacttttttccttctgctaattaattgtaattttaa

SEQ ID NO: 171696 - DNA, 201 bp, Homo sapiens
tgacaatgatgagtgctgcaaactttttagaaaagggagagctcaatgagtgcttgggtaatgtgattggtctttataggagaggtggaaacccacctcargctggcatttgaaggaccagaagatttaactaatcacagaggatgaggaaagacatttcagctctagaatgagcaccagtatataccttattaatactag

SEQ ID NO: 171697 - DNA, 201 bp, Homo sapiens; identical to SEQ ID NO: 30921

SEQ ID NO: 171698 - DNA, 201 bp, Homo sapiens; identical to SEQ ID NO: 30922

SEQ ID NO: 171699 - DNA, 201 bp, Homo sapiens
aattatccatggcaaaaaaaaactatattccatattcagttttcaatgttgctgaaattatctgagatttccatccaagttgacatcttaaaactttatcrtgatcatcactccctttactatgtagtcttatttggccatattttgcttacccttatcaactaaggagccagtgtaaatctctgagttgcagatctggaa

SEQ ID NO: 171700 - DNA, 201 bp, Homo sapiens
taatgtagaagagtggaaaccccttcggccaccagggctattcataattcataagtgcttcaaaccagccagctgaatacatttggacaggctcttgctcyttcgtgcaattcctgatttcattactctcttctgccaggaaataagcagggagcataggcttcttgcaagaatggagtgcgaagatgggctttgtttggc

SEQ ID NO: 171701 - DNA, 201 bp, Homo sapiens
ggcacagaatgcactgaaggcattctgtgccttcaggaggaattttcagccccttcactttcctgatgcccgggaattctttttaagttatgactaacaaagtataaaacatgagtcaaaagttagtccctaataaagtcattgtgactttaatgacttcggcagttgtttcattctgcaaaaacaggaagatcccacaca

SEQ ID NO: 171702 - DNA, 201 bp, Homo sapiens
ctttgggaagccaaggtgggcggattacttgatgtcaggagtttgagaccagcctggccaacatgatgaaatactgtctctaattaaaaaaaaaaaaaaargaaaaaaaagaaaaaaaattagctgggcgtggtggcacacactgtaatcccagctactagagaggctgaggcaggagaatcacttgaaaccaggaggtag

SEQ ID NO: 171703 - DNA, 201 bp, Homo sapiens
gtctcctgaggtacaaaaattaggggcctgaagtgattgatcgccaagggttcctctggctataactttttacagcactgcccaaaggaattgagattcastctggcatttcgagtgatgcctgagcaagtgactctttttctcagggcttcttggaacagcaaaacttaaaacagggggctggtttgggacctggagtaa

SEQ ID NO: 171704 - DNA, 201 bp, Homo sapiens
gaggcggagcttgcagtgagccgagatcccgccactgcactccagcctgggcgacagagcgagactccgtctcaaaaaaaaaaaaaaaaaaagagataagytattcttattttttaatttatatgatcattcaaatgatttgggcaatttcattatatgccacaacctttccaaggcatggaacatgaccataaaacagag

SEQ ID NO: 171705 - DNA, 201 bp, Homo sapiens
tcaaaataaaaagggaaatagagataagctattcttggccgggcgcggtggctcacgcctgtaatcccagcactttgggaggccgaggcgggcggatcacraggtcaggatatcgagaccatcccggctaaaacggtgaaaccccgtctctactaaaaatgcaaaaaaattagccgggcgtagtggcgggcgcctgtagtc

SEQ ID NO: 171706 - DNA, 201 bp, Homo sapiens
atcttaagaacagcgataggtgaaattgtgttatgctgaggggtatttgggaattacataagtgcagtctacatgcaactggtagagagttaactgtgtttggtggaggaaaagcaagcatctttcatctttacttcgtctaggtagggttgtgcttttttagtttgtttgttttccttaatcctttaaattttgaagaaa

SEQ ID NO: 171707 - DNA, 201 bp, Homo sapiens
ttcatttctagaatggagatcatagcatttgttagacttacctagaggaataggtaattgtaagaaatgcacccctcatggcaccttgtgctcagaattayaccaataaatagtgtcggttaccataattctattatgataatagcaataataatagtatgatggcttcaagcagccacttagtgctgttgatgtacaagg

SEQ ID NO: 171708 - DNA, 201 bp, Homo sapiens
ctcacgttgtaccaactctagaagtacctgagtgcttgttccatgcagtagacaatgaatgagctcactggtgtatctttgaagagtccttctcttttttagtacttctgcgggtataattactgtatgtatttccttggtcaagcttgaatagaaatcagatcccttttttcctctgcatgaaggagaaatgtgatgtat

SEQ ID NO: 171709 - DNA, 201 bp, Homo sapiens
gtatagcatgatgtttatatatatatgtgtgtgtgtgtatatatatatatatatacacacacacagtgaaatgattaaatcaagcttgttaatataatctstcacctcatagactttttgtttatggtaagaacatttaagatctactctctcagcaattttcaagcatacaataccttattgttagctaaagtcaccgtg

SEQ ID NO: 171710 - DNA, 201 bp, Homo sapiens
tgtactttattgactgtggactgttgatttatccagccttctcatttcacatgtgagggagggcgatttggagtgacttctgtgcacttacatagctgatratagaggatggacgagaatccacatctccaactaccagtccagaattctttccattccccagtcactcacttattcatacattcatctaacatttattgg

SEQ ID NO: 171711 - DNA, 201 bp, Homo sapiens
gtgtggcacctccttgctcagagatcggccagttcactgtactttattgactgtggactgttgatttatccagccttctcatttcacatgtgagggagggygatttggagtgacttctgtgcacttacatagctgatgatagaggatggacgagaatccacatctccaactaccagtccagaattctttccattccccagt

SEQ ID NO: 171712 - DNA, 201 bp, Homo sapiens
attaaaaccaaacaaaatgcatattggaaaaattggcactattgcacaaacacagacatctaggggaatgtctttctctctggtgttcgtgtttttacctycttcagccatgtgaaaagactttcaaaggttctattttattctcagagttgacagactcacccttcaacagagtgggcatcaaaagccaatagctgcctt

SEQ ID NO: 171713 - DNA, 201 bp, Homo sapiens
ttattcttcctatctagctctaattttgtattccttacccaaactctctgtcttcctcttcccactaatcttcctagcttctaataaccataattctactstctattatgagctcaatgttttttagcctccagatattagtgaaacttgcagtatttgtctttctgtacctgacttattttacttaatgtcctccaagct

SEQ ID NO: 171714 - DNA, 201 bp, Homo sapiens
tcaaatcagagtaattagcatattcatcaccttaaacatttatcatttctttgtgttgggaacattcaaaatcctctcttctagctttgaacgtatacaayaaattgttattaactatatttaccccatagtgcaatagaaaactacaacttattcttcctatctagctctaattttgtattccttacccaaactctctgt

SEQ ID NO: 171715 - DNA, 201 bp, Homo sapiens
ctattaaatgtcagctggaaagttgaacaggtattccatgattttgatcactgtaatcagtgaacacacgtaatccaaatacctgcctacatatcgtacaytgttcttattgttttaactctccaaattatttacataattatctctacctcctccttcccactatctctttagatatgatctgtgcctaagactccctaa

SEQ ID NO: 171716 - DNA, 201 bp, Homo sapiens
tgtactccaaataactttgtaaaatatagagcacattctaaatgaaaagtaattttattatggcatgacttctccaaagtcttaaggtgtattagtgggaytcaggtattaaagtataggtctgatcataaatctggcttactgttcatcttcagcaaaaggctagatatgtttgagaaagacatgggacattctctcttt

SEQ ID NO: 171717 - DNA, 201 bp, Homo sapiens
atgacctttaacaggcttgactatcactacaatagtaataatagccaatagttggtgaatgtttatctttgctgaatagtgttttatatatctatttcatrtgtaacacattcttaggcagagattatcattagccccattttgaagataaaaaacaatgagatggagagagtctaagcaacccaagatctcatagctact

SEQ ID NO: 171718 - DNA, 201 bp, Homo sapiens
acctcctctacctaagaaatcaccatcagctctccccactgccaagagctcataaatgaagaagggatgcaaaatctttacttgacacagaaagctttagrttgacaacaaatagcaatagctaacatttactgagcatgtcttttatatcaggctgtgggctaagtgcttttatatgtagtatttcccttcatctttaaa

SEQ ID NO: 171719 - DNA, 201 bp, Homo sapiens
catgaaagaataatatctagagtgaactacaaccactcatcagaaggatgaagaaattgatggctgactttaagcctcaattctggaagaggtccaaactrgatgctttgtcttctacctcacagctttccaggttcctctcagtgaccagggtacctcctctacctaagaaatcaccatcagctctccccactgccaaga

SEQ ID NO: 171720 - DNA, 201 bp, Homo sapiens
atgtggaagacatgaaggtagtaaatccccagcagctgggaagtggttggactttttcctttattagaggcagggaatgagaatgggagggttctgtctcytcagaaaaggcttccttggaagaagtgctcttctggaagcaaacagaggaggcaaggggttgtttcggacacactagagagtaagtcagagaatcttcgt

SEQ ID NO: 171721 - DNA, 201 bp, Homo sapiens
gagaaacccaactaaatgagtttaaaaaatctgtgaaagggctgggcacagtggctcatgcctgtaatccagcactttgggaggctgaggtggacggatcmcctgaggtcaggagttcaaaaccagcctggccaacatggtgaaaccctgtctctaccaaaaacacacaaaaaattggtcgagcatggtagtgtgtgcctg

SEQ ID NO: 171722 - DNA, 201 bp, Homo sapiens
tctactaaaaatacaaaaattagccaggtgtggtggcaggtgcctgtaatcccagctactcaggaggctgaggcaggagaatcacttgaacccaggaggcrgtggttgcagtgagccaagattgcaccattgcactccaccctgggtgacacagcaatactccgtctcaattaaaattaaaaaaaaaaatctgtgatttta

SEQ ID NO: 171723 - DNA, 201 bp, Homo sapiens
gggtgtaagtggaggtgataatcatcatcaccatagcttatatttattgatgtgtaccaggtaatgttctaagtaagtttcatttattaactcaatcctcwtagtaaccttatgagtaggtttgtacgtacactgtatcaaaactgagagagtctcatctgatggtctacattgtggaaggggagtcaagagggacatttg

SEQ ID NO: 171724 - DNA, 201 bp, Homo sapiens
tgtgattttgttgttgttgttctcaaccatataaaactggttgagaactccagatcagataatctctaagatttatctcaggttcaaaaagctctgtggcyggacatggtggctcatgcctgtaatcccagcactttgggaggccaagctgggcaagtcccctgaaatcaggagttcctgaccagcctggccaacatggtg

SEQ ID NO: 171725 - DNA, 201 bp, Homo sapiens
aggatcttgtaggtggtggtaagctatttggattatattaaagcaaattgggcagccactgaaaaaaatggagaagagaaaatgttatatatatatatatwtttttaaaaatgtaactcagatttcaatgtgtaataaattggattggaaagagaggatatgaggggaatgttgaagaagtctgagcaagaggtgatgctt

SEQ ID NO: 171726 - DNA, 201 bp, Homo sapiens
tggcacgatctcagctcaccacaacctccaccttgtgggttcaaccgattctcctgcctcagcctcccaagtagttgggactacaggtgtgcgccaccacrccaggctaatttttgtatttttagtagagatggggtttcactatgttagccaggctggtcttcaactcctaacctcgtgatctgcgtgcctcggcctccc

SEQ ID NO: 171727 - DNA, 201 bp, Homo sapiens
aaggtagagttctccagctcatacatgggaaagctgaaaagtcaggagggagaatggagctgacaccaaatataaagggacacccctaaatacagcttttyctcttaaaagcagagtgcaaaaaaagattgtcaaattacttaggacttctggtaaaccaaatcttagttaactgaaagccctgtcttgcataagcctgac

SEQ ID NO: 171728 - DNA, 201 bp, Homo sapiens
gtgcaatggcgcacaatcttggctcactgcaacctcagcctcccgggttcaagcgattttcctgcctcagcctcccatgtaactgggactacaggaccccrccaccgtgcccagctaattttttgtatttttagtagagacagggtttcaccatgttggccaagatggtctcaatctcttgaccttgtgatccgcccacct

SEQ ID NO: 171729 - DNA, 201 bp, Homo sapiens
  misc_feature (1)...(201): n = A,T,C or G
agaggtccaaactggatgctttgtcttctacctcacagctttccaggttcctctcagtgaccagggtacctcctctacctaagaaatcaccatcagctctncccactgccaagagctcataaatgaagaagggatgcaaaatctttacttgacacagaaagctttaggttgacaacaaatagcaatagctaacatttactg

SEQ ID NO: 171730 - DNA, 201 bp, Homo sapiens
attgatagttgcttgggtttatatgtagtgcaatgtatatgaaatctagaggcttgtctcagcctcttttgggtagaactccatttatttatttatttatktatttacttatctatttatccatccaactagtatttatttagtacataccatccattcatacatggatatatgcatttaacaaataactactgggcaccc

SEQ ID NO: 171731 - DNA, 201 bp, Homo sapiens
aatgaaaagaggtcacaccttagcagttttcaaatgaagcttcacatttttcaaatgaagcttcacattttggatcctccattttctcttctttgaaatgrggcaaaaagaattagcctgccagagttgttataattcaatgatataaaagagactcagtgagtaatttctaagaaagaaaagcaaaattgagacagcaag

SEQ ID NO: 171732 - DNA, 201 bp, Homo sapiens
attaaatggcagtgataaggagttcacagagaaggcatataatctgcaaaagctggaggaaagaaggatcaggtcacagtcacaagatgctccaccatcarcaggacttggcaccagtttctgggagaataatttgtcatgatccagctttttaagtgagcttgaccaaagctctgctttagttctgtggtttcaactgca

SEQ ID NO: 171733 - DNA, 201 bp, Homo sapiens
tgaggattacattccaacctgagagttaggtgggacatccaaaccatatcacaaacctactttttcagtttgttatgaggattaaatgaatatttgtatasttcttagactagggcctggtacatagtgtgttctatgaaaatagttttaaaatgccttatatagcctgctacaaatgacgctgaataaatgttaaagaac

SEQ ID NO: 171734 - DNA, 201 bp, Homo sapiens
ggggaagcaggcatgacacacagccagagcaggggcaagagagagagggcaaggtgccacacttttaaatagccagatcttatgagaaatcactcactacygcaaacacaccaccaagggaatggtgctaaaccattgatgagaaaaccaaccacatgattcagtcactttcaaccaggccccacctccaacactgaggat

SEQ ID NO: 171735 - DNA, 201 bp, Homo sapiens
agcgtactagtatgagaggcatgagatgttccggcagtatttacacctaattttatgagatttccaaaacttgatgatttcaggtccttcgcaacatggtmcactgtgcagacctgagcaaccccaccaagtccttggaattgtatcggcaatggacagaccgcatcatggaggaatttttccagcagggagacaaagagc

SEQ ID NO: 171736 - DNA, 201 bp, Homo sapiens
ggcccatgagtctccatagaagatgccatgtgcttctggtaattgaagtctactagtcaattttcctttctttgtaaaattgggggaatggcctactcagsgttataaactgaaactttgaggagttggaactttttgtatgttttgttttacattttctcgtcatgagccccatcattaatactaattatgaatcacagg

SEQ ID NO: 171737 - DNA, 201 bp, Homo sapiens
gagattgatgaattgggattacttgtgtgatcttgagcaagttcataatcatttctgagctttagcctcctcatctatatagcaagcaagatgaaattacracaagagcaacaatcacaacaacaatgtttattgatcattactctctgaatagcatggtggtagggcatttccttgtaatgtttaagcctcaaaacaact

SEQ ID NO: 171738 - DNA, 201 bp, Homo sapiens
gcttagttattggaatgaaagtcaccctaggggattagtgaagaaaggatagggtgtagggatatgcaggacattagacaggaaagatggctgggcaaagwaaaaagggctttgcataccttccaagattttattttgtgtgcagcgaggagccactgatatttgttcatcagggaaatacattatcaaagcagtgcttct

SEQ ID NO: 171739 - DNA, 201 bp, Homo sapiens
ggtaatgctggataatggagatacagaaatgaataaaacatggtttcttctttgggagagttaacagtcgtggggcagacaaacataacttgatttataaygcagtgtaataagaatttttcagaagcatgaataaagtgctctggaaggacacaggaaggcaggtagttgggagcaagatcctatcctaagtacaaataa

SEQ ID NO: 171740 - DNA, 201 bp, Homo sapiens
cataatttttgatgcagaataatggtagatatattcatgcttgtttttcgttgtatacttacctattgattactacgttgctgagcagttaagacaagaakcactcaattctaacatgtttagaagagtttctttctgatttggcacatggacagtgagaatgatctcactgtgtttgttccctggcacaccaaaggtttg

SEQ ID NO: 171741 - DNA, 201 bp, Homo sapiens
ggcagcatggcacagatagttcacaggcctgggtatctatgcttatggactggccttccaagtgcagtttcctgctcactcttatttatcttctgataaaraattgctcccagcaaattactaaactaaacctactgctgatacttttactccagttgtaaaaacacattactccctctgcttctgcagaagtggaacatg

SEQ ID NO: 171742 - DNA, 201 bp, Homo sapiens
tcgaaagaagttgttttcaggctagaaattaagtttaatcattccaaggctgtttgattctgtggaagttctacagttctgtttttgagtcatcgcccatyggcatttgactcttcgtgtctcttttcatacatctcttagccatatcaccatttgctgaatattagactcacacagattcagattcagagtctcggggga

SEQ ID NO: 171743 - DNA, 201 bp, Homo sapiens
gctctccccactgccaagagctcataaatgaagaagggatgcaaaatctttacttgacacagaaagctttaggttgacaacaaatagcaatagctaacatwtactgagcatgtcttttatatcaggctgtgggctaagtgcttttatatgtagtatttcccttcatctttaaaacaaaccagtgagataggaatccttatg

SEQ ID NO: 171744 - DNA, 201 bp, Homo sapiens
actgtatataacaggttttctgctctttacaacacttagactacaaaatacaatgcgattttcataaagtgatgtatccaaggtcgtgtgtgatctgagayatcactcaggatagcatcaggcagagacactctcctctaggcagatgaaagagattttagctagtagtgtttcaagaggttggaaatttcttagtcctct

SEQ ID NO: 171745 - DNA, 201 bp, Homo sapiens
aacctctgcctgccaggttcaagtgagtctcctgcctcagcctcccaagtagctgggattacaggtatgcgtcacaacacccagctaatttttttttttttatatatttttagtagagaaggagtttcaccatgttggtcaggctggtctcgaactcctgatctcaggtgatccaccctcctcggcctcccaaagtgctgg

SEQ ID NO: 171746 - DNA, 201 bp, Homo sapiens
tgcgacaaataatcctccaaaaagctagttcacaaaaattcttgtgtactggcagcctagtctaaaaacagccatggtcctaaccttttttaaatgtttgyttaaatgttcagaaaatcgattaatcaaatgcatcatcactttgatcaattagagcggctggatttttgtgcagaggctgcatctgcagaattctggtct

SEQ ID NO: 171747 - DNA, 201 bp, Homo sapiens
tctcaaacaattcaccattctttcagtaaatgaatgttcatatttcctaacacactctggatcctagatggaaaggttaaaagagtttaatacatttgtcraatgcaatctaatatgcatattaatgagctgatggagggcagaaacttacatgctgcataggaagtacttttcaaataaaataaattaattccattccca

SEQ ID NO: 171748 - DNA, 201 bp, Homo sapiens
catatctagaaaatataccttcttcccttttcaaaaaatagaagcaatttctagcagtgtatgtgaatctaatgttgggcataagcttaagaaggcatcgraggaattttttattagagtttattcacaaattttgcttgtctgtgttgaaaaggggcattggccatttcctctggggacattatttctaggtaggctgta

SEQ ID NO: 171749 - DNA, 201 bp, Homo sapiens
ctgttttttatttttgtgttgttagatccaatgtagcatggtaataaaacatatttgaagcatcccttcctgcatacacagcgctcttacctgtgttctcrtatgacactcaccctgaggaaggtcttattgtatccccattttcagatatgaaactgagattcgggaaagataaccgatttgtccaagtcctttacctac

SEQ ID NO: 171750 - DNA, 201 bp, Homo sapiens
aggcccatttcttcacttaaagtttatgtgctctcaaagcttcctgtggtaccaggatagagcattaaatagcgttattctctttgagttatagctgtttyttatttttgtgttgttagatccaatgtagcatggtaataaaacatatttgaagcatcccttcctgcatacacagcgctcttacctgtgttctcgtatgac

SEQ ID NO: 171751 - DNA, 201 bp, Homo sapiens
gaagcagccacaaatgttgaatctgcacatgggaacctccaggtaaaaataagatgccataaaaagcactggaatgagtttccacagttcagaaggaaggrtcattaaaagttccatacattttcttccaactgcatagatttgattatggattgggagtagcaatgacctgagtgaccaggggtggtctagccttaggat

SEQ ID NO: 171752 - DNA, 201 bp, Homo sapiens
agaatttgcttcaacttactggaattaattaaaaatgcttttgtatttatattttttcttttacatatttaaagtattaagataaagtcattgtctaatgytgtctgccatagtaaaatttgcaaactgagaaaggtcacatactgcttttcaagactctttagggcctttaatacagtgctaaaatagaagaactttgtc

SEQ ID NO: 171753 - DNA, 201 bp, Homo sapiens
gcttctttgacttgtatctgcttgtgttacataagcaccatgctgccacatcactggtccaagaaacaaacattagacgtttacacactccatgagatttrtgctaatatctttccaagcatcagcctttaggcttgatgtgagattgagctctggccatcatccctttcacatcagagactttatgatgatgaacagaat

SEQ ID NO: 171754 - DNA, 201 bp, Homo sapiens
gaagagacttgtgtaggaggaacttgggtaagcaggctgcggtccagggctcacgacggctgctcacaggtccctggagatggaaggacatggggaaagargagggccaacccatatccaaggagttcaagaattctaaattcaacctgaccttccaggctgttatggagggatatctgtcaaggtaaaggagatagctca

SEQ ID NO: 171755 - DNA, 201 bp, Homo sapiens
aagtaaataactgacccaggctagcatcattgtaattccattttttttcggtgcatatgtcataattataatgcaactaaaatgttctcgggtttagtacmaagcgtactagtatgagaggcatgagatgttccggcagtatttacacctaattttatgagatttccaaaacttgatgatttcaggtccttcgcaacatgg

SEQ ID NO: 171756 - DNA, 201 bp, Homo sapiens
ttgaggaaagtctttgatttaacacaaaaccaaaccaaactaagctgaacaacaattagaaaaagaaaacaaagataaattcagttattggtatatcctargctactcctatagcttagggcttattttaagaacaagctaaggaaaatggacattcaagtttatcttctaatttatgaggaaaaataatctctatttgtg

SEQ ID NO: 171757 - DNA, 201 bp, Homo sapiens
tccttaagctaaaattttatattatggcatctcactgagccaagaggaaggaggagtacttgtgtgaataagacctagactctgattgtgagtttaaaccrtttggaaataagaaataagatacattacttgaggccaggagttcaagaccagcctggccaacatagtgaaatcccgactctactaaaaatacaaaaaatt

SEQ ID NO: 171758 - DNA, 201 bp, Homo sapiens; identical to SEQ ID NO: 30914

SEQ ID NO: 171759 - DNA, 201 bp, Homo sapiens; identical to SEQ ID NO: 30913

SEQ ID NO: 171760 - DNA, 201 bp, Homo sapiens
cctcccaagtagttgggactacaggtgtgcgccaccacgccaggctaatttttgtatttttagtagagatggggtttcactatgttagccaggctggtctycaactcctaacctcgtgatctgcgtgcctcggcctcccaaagtgctgggattacaggcatgagccaccacgcccggccttatatgcattttaaatacaca

SEQ ID NO: 171761 - DNA, 201 bp, Homo sapiens
ttctcctgcctcagcctcccaagtagttgggactacaggtgtgcgccaccacgccaggctaatttttgtatttttagtagagatggggtttcactatgttrgccaggctggtcttcaactcctaacctcgtgatctgcgtgcctcggcctcccaaagtgctgggattacaggcatgagccaccacgcccggccttatatgc

SEQ ID NO: 171762 - DNA, 201 bp, Homo sapiens
tcctgagagagtaaccaacacctcagagatgccacagccagagaactgggcactttgaacaacagtaagggacgcagccacagagactgagagatgccagrttaagcagaacatttgtaagtcatggtagacatgtagattttactgcaaattcagttgggagccattaaaagattttgagaaacagattgacgtgatctg

SEQ ID NO: 171763 - DNA, 201 bp, Homo sapiens
ggttgtaaggattaaatatgttaacatgtataaagcatgtagaaagtcccagtgttagtattggtgttattagtgttatataacatgactcagatagtacycagcacatagcaaaccaccaatgtgtggtagctaagatcccagccttctggtatcagtagagaaccacaacagaaagccctgttgagctctttctagaag

SEQ ID NO: 171764 - DNA, 201 bp, Homo sapiens
tgaaaccgaggaggcctcatctaagttctcactagctgcctgaacagttgagtccgttccgtgttgactccacttcacatttttgtactgctgagaaacamcatccacccaccctccccttgaaagttggaatcatgcatgttagtaagtatttcagttatgctattgacgtcaatggagtcattaaatagattgctggcc

SEQ ID NO: 171765 - DNA, 201 bp, Homo sapiens
aggtcagcaactaaatttataaatagatactttcccttttcagaataaaaaatgttcagaaacttgtagctatcatgaagaggacacccgacctcctaggycatttaactttcagattttcacacaactaaagcactctaaggagacactctaaagacttaaacagccaatgtccaaaaaataaattaaaaaaatgaggca

SEQ ID NO: 171766 - DNA, 201 bp, Homo sapiens
tttcttttaatatgtgtctaggccattctggggaggaattggctttttaccaactgataaaacagaagaagaggctttctccttggaaacctatttctccmtacaggttctgcccatagctttacttgattatgactatccttccggaggttcatgtgggtgtaccagatgcagggtctcttcaagtagtggacaagaggg

SEQ ID NO: 171767 - DNA, 201 bp, Homo sapiens
cattaccattctgacgtggcatatcacaacagcctgcacgctgctgatgtagcccagtcgacccatgttctcctttctacaccagcattagacgtgagtarttatgacctgttttgcattcctgcccatcctccttcaaaaatgccatatcagctggatgtagtagcatgtgcctgtagtcctagctactcgggaggctga

SEQ ID NO: 171768 - DNA, 201 bp, Homo sapiens
gatgctgaaacaaggagaaacaatattcatatttgccataccaactctgagaaggtggccgtggctcccttccttcatagattaatgcatttgtgtatacygatatcatcaacaatgtgtacagcaggtcatactcttacttgacaaatgaaaatgatggtcaagtactcccaaaatgtgctggaccactgcaggaagaga

SEQ ID NO: 171769 - DNA, 201 bp, Homo sapiens
cacttgtacaaacattccctgaaaaattgtggagaggttccatacagtggaacttgagatttcatctactcagccttctaccctgaaaggttcctctgagytcatcactgtaacctgaaatgtctttcacatggatctgaaaacatttagtgaagtagaaagtactgtgctcatagtagtcattctgtggtaccttttttt

SEQ ID NO: 171770 - DNA, 201 bp, Homo sapiens
ggtacaaaaattaggggcctgaagtgattgatcgccaagggttcctctggctataactttttacagcactgcccaaaggaattgagattcactctggcatdtcgagtgatgcctgagcaagtgactctttttctcagggcttcttggaacagcaaaacttaaaacagggggctggtttgggacctggagtaaacaacttcc

SEQ ID NO: 171771 - DNA, 201 bp, Homo sapiens
ttgctaagatagaaatggaagatagatggtccttcttctcttaaggcattgtgaagtcggctacagataaccatcatgaggaagtgagtcctcctggctaygcaggcttatttttccagttcttcaggtgcagccatactacagtactaaacatggagcacaaaggcaactaattgccagtgctcttgggtttgcaggata

SEQ ID NO: 171772 - DNA, 201 bp, Homo sapiens
gaggggtatttgggaattacataagtgcagtctacatgcaactggtagagagttaactgtgtttggtggaggaaaagcaagcatctttcatctttacttcrtctaggtagggttgtgcttttttagtttgtttgttttccttaatcctttaaattttgaagaaaactgagtgattcaaatctcctaaaagactttctcaaa

SEQ ID NO: 171773 - DNA, 201 bp, Homo sapiens
ggggggactcttcctacttggaactctttgtttattggttaatgaaagggcaaaaataagtccctttctaaaattttagtttagagtttaagttggaaggraaaaaaaaagaaaagaacacatttgaggattaactatttattgacttttctctgaagttctcaattgaaggttaaactcagggattttccaggctggggt

SEQ ID NO: 171774 - DNA, 201 bp, Homo sapiens
tcccacttgttctgtcatctataaattaatgataacaaatctatctcacaaggttgttttgagtattagagatattttgttcagggttgactatcagttgrtggttgcaatgattagcattatttttatatccatccccttagggtctttcagtttttgttgcacaagctcttaagcatttggagttagagaaagtaaaat

SEQ ID NO: 171775 - DNA, 201 bp, Homo sapiens
ctctttggagctttgtattaatggaatcatactatttaatgtactttttaatatctgggcattttttgctccacatttgtacttatgagattcattcctgwtgtttcatgctacagttgttccagtagatttaaccactaatataaccatgcaaatagttgccaccttttctaatgagaaaagagtcccattatgtgaggc

SEQ ID NO: 171776 - DNA, 201 bp, Homo sapiens; identical to SEQ ID NO: 30916

SEQ ID NO: 171777 - DNA, 201 bp, Homo sapiens
aatttgtgaatagtggaaatgtcttgacataatgactgtggagaatcagtagagagatgtaaacccagattgagggccttgctgagggtaaagtagtgcayttgtggtagacctaatcaatctagtttctatgctgttcaactatggaagcagaagagaaaatatgaacaatgggagatttccaggaattttcaggtggtg

SEQ ID NO: 171778 - DNA, 201 bp, Homo sapiens
aaaagtatttaactgtaaagcaattaacagaatttcagggcaggaatcatgtcttattcttcattgtatttctactaagggatgcagtgtatctcaaaatrtcttgttcagtgtccggtaaatagtatattctcaatatgcaattacttatctgaactgcccaatgccaccctaggtatatatagagcactatattccaag

SEQ ID NO: 171779 - DNA, 201 bp, Homo sapiens
agatggttaaaagcggagatagagaagcctccacagcacaaagtggtgaagtggatggaattcaaattgacctttatctcatcagtgaggtagaaagttgkgttcttggttaaaagttagaggatagaagtgggaatgggaatttgtgaatagtggaaatgtcttgacataatgactgtggagaatcagtagagagatgta

SEQ ID NO: 171780 - DNA, 201 bp, Homo sapiens
tcagattgcaagtttgaatgtttgagactccactttccttgcaggattcgggctaatacatgccaaggaggcatagatttctttctgtttaattgtaaggrtggaagtgaaaagcaaagaaagtttttgtcagttggtggtagttgatttttggtttattttaaaaagctgtctgcagttttcttgatcatttaagaaatt

SEQ ID NO: 171781 - DNA, 201 bp, Homo sapiens
ggagcctgccaactggtgggttgtagaagttgagagaaatggaggaattgaagataaagctgagattttaaatcaacgtgactgggagaaagacggtgccmttcacaaaagtatggaaaacctagggagattggtagattgtaggtggagaagacttaatcatttttaaatattgcattatagaatgtatagctataaaga

SEQ ID NO: 171782 - DNA, 201 bp, Homo sapiens
gttgttgtcattttctctccatttgatcctgaggtaaaaaaggactagtaatattatctctgtgtcacagaggaggaaccagaggcacagagaggcttaaygacttgccaggaccctcaaggctataagcaggaaagcaggggcgagaccaccaggcttcttaccgctaggacaatgcttttttttttttctaactatgcc

SEQ ID NO: 171783 - DNA, 201 bp, Homo sapiens
gaccctctccctacaccctagaatgtttctgcacaatgaaccagattatgtaaagctctcacagctcaaatataatttctagactcttgagtcatattacsaagatcctagtggagttaggtacaatggtgttggcagctgccttgtaaatagtttaaatcaaataagtctaattcacagcatatagagacacatttttat

SEQ ID NO: 171784 - DNA, 201 bp, Homo sapiens
ctctgccactttgcagagctgttagcatggaaagttgaacgtgagatggtgattccagtttgaccctctccctacaccctagaatgtttctgcacaatgarccagattatgtaaagctctcacagctcaaatataatttctagactcttgagtcatattaccaagatcctagtggagttaggtacaatggtgttggcagct

SEQ ID NO: 171785 - DNA, 201 bp, Homo sapiens
catcttttaaaaattgtttagtttttttttgtttgttttttttgttgtttttttttttagaatatgtccgagtctaaaaggctcctaggttgtatgccatkgttgtctatgaaagaaaaaccaagggcgatggtgcttgcatttgcagtattcttccaaaacatttttcttctgagtaaaagtgtgctcaacaagtggaga

SEQ ID NO: 171786 - DNA, 201 bp, Homo sapiens
gtatatcctaggctactcctatagcttagggcttattttaagaacaagctaaggaaaatggacattcaagtttatcttctaatttatgaggaaaaataatytctatttgtggaactgcttattagttatataaataaatcgcaaaatctatttgtaatagggcatacgtgactgttggttccaaaagcttgtgtttggatt

SEQ ID NO: 171787 - DNA, 201 bp, Homo sapiens
attgagatattacataaatcaacaatccctctcccaacaagaataaagtaggatactttacaaatgaaactgaataagcaggataggcgaattggatgtgkagttaaatgtgtttatttgcccgacaggctgtcttcacagatttggagatcctggctgccatttttgcagctgccatccatgacgttgatcatcctggag

SEQ ID NO: 171788 - DNA, 201 bp, Homo sapiens
catcatccctttcacatcagagactttatgatgatgaacagaatctacatttacttaaattagtatattgagatattacataaatcaacaatccctctccmaacaagaataaagtaggatactttacaaatgaaactgaataagcaggataggcgaattggatgtgtagttaaatgtgtttatttgcccgacaggctgtct

SEQ ID NO: 171789 - DNA, 201 bp, Homo sapiens
attggagaagcatccttttaatggctagcacatccgagtcatgtaaatgtgacttgatgtaaaataatatgtatcatgtatacaatattttagcagccaayttgatacataaggtggggtgctctctactaaatttctttttctaaaatttatcagtaaatttactgagcaggaacattaccactggtaacagatcagatg

SEQ ID NO: 171790 - DNA, 201 bp, Homo sapiens
ttctgacgtggcatatcacaacagcctgcacgctgctgatgtagcccagtcgacccatgttctcctttctacaccagcattagacgtgagtagttatgacytgttttgcattcctgcccatcctccttcaaaaatgccatatcagctggatgtagtagcatgtgcctgtagtcctagctactcgggaggctgagttgggag

SEQ ID NO: 171791 - DNA, 201 bp, Homo sapiens
ttgttcctcaacggtgttttgttttgttttgttttttgttttttaagaacctaacctctcatctttcaggacagtgcatccacttttcttggtgtgttgaragctgcagagaggaagggccaccttgaaggaacaccatggagttctgttggaactgaaattcttcttcacacaaaatgcaaccagttctatgatatttgt

SEQ ID NO: 171792 - DNA, 201 bp, Homo sapiens
ccatcctgggtgccagggatcaagcggtaaacaagttgttccctgctcacataatgtttacatttaatcaaaggaactatgtattgaacactaactagacmgagcctatttaagctataattttaaagtgctacaaaagagaagtacaggatgcatgagagcacagagccagtcagtggtctgagatgaaatgtcaggcaa

SEQ ID NO: 171793 - DNA, 201 bp, Homo sapiens
gtcaccaacaaaaattcaagagagggcacatttaccactagagcttcaccaaagggagttgagagtggtgcagtctagctcagactcagtcctgaataatrgatttcagacatcagggagctgaaatcaatgaaatcaattagccatctctggagcagtctggcaggggcaggctggaaaactgagtgtccatttaatgca

SEQ ID NO: 171794 - DNA, 201 bp, Homo sapiens
cagctgaagcacagcccttcccacactctggctgaggactacccttcaaatcacggccccttgtgtcacccttggtccaaagcaagccatgcttatcacamaaagcaggcctccagtggtaagatagttgtatctaatgatctttctcaaattcatacccatgtgtacagagttgatcctgttactgattgcaagtactac

SEQ ID NO: 171795 - DNA, 201 bp, Homo sapiens
taggatactttacaaatgaaactgaataagcaggataggcgaattggatgtgtagttaaatgtgtttatttgcccgacaggctgtcttcacagatttggaratcctggctgccatttttgcagctgccatccatgacgttgatcatcctggagtctccaatcagtttctcatcaacacaagtgagttcaccactacagcag

SEQ ID NO: 171796 - DNA, 201 bp, Homo sapiens
tgggttataggaagaagtccctggaaggctttggaacagaaagacatttaggaagaacttatggaatagatgaaggtcagaaagcctgaagacagagacastagctaaaacaatattttcaggaattaaacatgagggtatagctctaaaccagaatgatggagatggcaatggggaggaagggattaatatggacacatt

SEQ ID NO: 171797 - DNA, 201 bp, Homo sapiens
gtagtttctgcctttgtaaatagtaaacagcaatacttaccttccaggattaagagagaatacatcgattgcattcagtgtaagacccactgtattgtgartgcccaaatcatggaatccattatgattgatctttctgaagttattaatgttctttctttgcatggaaaccaggaaaccttgtttacttttcaagcacca

SEQ ID NO: 171798 - DNA, 201 bp, Homo sapiens; identical to SEQ ID NO: 30920

SEQ ID NO: 171799 - DNA, 201 bp, Homo sapiens
caggaagcctgcttggtgcagctgttcagtttaacaaagtttactggccagtgtggctttgtgtcagaccctgggctggctgctaggaagggagggattgraaagacccctaccagctgggcgtggtggctcatgcctgtaatcccagcattttgggaggctgaggcaggaggatcacctgaggtcaggagtttgagacca

SEQ ID NO: 171800 - DNA, 201 bp, Homo sapiens
ggagtgggaacggtgggcttgggagtgcctgccttattgtagagaccataaggattggattttgtctggaatgctgaacaaggacatgatagaagccagtraaattatggagatttgaaaccggtagacagacttgttcactgatccacaatgtacaagaactggcaagagggtttaaaagagttacattttggataaata

SEQ ID NO: 171801 - DNA, 201 bp, Homo sapiens
gggctgggtggctctctgtcagtgacagagcctgtgggcaggttcagaagaggcctgggaaggggtgggcttgggagtgggaacggtgggcttgggagtgsctgccttattgtagagaccataaggattggattttgtctggaatgctgaacaaggacatgatagaagccagtaaaattatggagatttgaaaccggtaga

SEQ ID NO: 171802 - DNA, 201 bp, Homo sapiens; identical to SEQ ID NO: 30935

SEQ ID NO: 171803 - DNA, 201 bp, Homo sapiens
agtggtgcagtcttagctcactgctgcctccactttccatgttcaagcaatcctccaccttagcctcctgagtagctaggattacaggtgtgtgccaccawgcctggctaatttttgtatttttagtagagatggggtttaaccatgttggctaggctggtttcaaactcctgacctcatgtgattcgcttgtcttggcct

SEQ ID NO: 171804 - DNA, 201 bp, Homo sapiens
ccctacctcatagcaggcatccaacacggctgccaggatatcggggcccgcagcctgtctgtccttcggtgagtgctgagactgggggtggctcctgcttyctttctctcgctcttctccacccttggtggccctgatctgctccacctaccttcctcctaggtccatgatgtactcaggagagctcaagtttgagaagcg

SEQ ID NO: 171805 - DNA, 201 bp, Homo sapiens
cagatggcagccagtccccatatggtggttctggaaactgaggcacagggcttaagtagcagacccaggatctgtccctgggccatctgactcagcccagkgaggggtggcctgggggaccttcctgggcggtatcccgtttttgcccttaagaggtggggtggggtcctctgagcttcaagctgctgggctcagtcttcc

SEQ ID NO: 171806 - DNA, 201 bp, Homo sapiens
gcccgggctccctgcatgagcccaagaatgctgaaggttcagaggtgcttcccacacatcgctggcaatccggccccagcctcccctctgcacacagatgkaacagtctgtgttttcctggcagggtcccgggggcatcaatgggggaggctgggcatcccagggaacctcgtggcttggaggccaagcctcccctgggcc

SEQ ID NO: 171807 - DNA, 201 bp, Homo sapiens
tagcaggcatccaacacggctgccaggatatcggggcccgcagcctgtctgtccttcggtgagtgctgagactgggggtggctcctgcttcctttctctcrctcttctccacccttggtggccctgatctgctccacctaccttcctcctaggtccatgatgtactcaggagagctcaagtttgagaagcggaccatgtcg

SEQ ID NO: 171808 - DNA, 201 bp, Homo sapiens
tcctctcagtagagccttggggccgagccctcattttcccactggctcctcatcccactgaggatcctggcttctctgcagcacagctgcatcctctgttycctgtggccagcctggacatcatccctggctttcttccagccttttcctcccccatctctgcccgcagaagtttgaacagggcttcatcacggaccctgt

SEQ ID NO: 171809 - DNA, 201 bp, Homo sapiens
gcttcatttcacccctgcattccttgtcagggaagctgcctatcgtcaatgattgcgatgagctggtggccatcatcgcccgcaccgacctgaagaagaaycgagactaccctctggcctccaaggattcccagaagcagctgctctgtggggcagctgtgggcacccgtgaggatgacaaataccgtctggacctgctca

SEQ ID NO: 171810 - DNA, 201 bp, Homo sapiens
  misc_feature (1)...(201): n = A,T,C or G
cccagcaagatgccacctggcagtccccacctcagaggccctcccagcctcccctgccagccctgcactgctacactccctgcgtgtccttcctctcagtngagccttggggccgagccctcattttcccactggctcctcatcccactgaggatcctggcttctctgcagcacagctgcatcctctgttccctgtggcca

SEQ ID NO: 171811 - DNA, 201 bp, Homo sapiens
agccagggaggggactgtgtcccacaccaccttattctcttctccccaagtgagctgtgggagccacaggaggacacagggaggaggctgtggagtctggktggggggacccactcttggtctgggaagagcactggcagttctggtcccataagagggaaggggatctacttcctaccaccccacctttccccatgtgaa

SEQ ID NO: 171812 - DNA, 201 bp, Homo sapiens
tagaataaagataaaggcttattgatcccttgtgagtgatctggaccatacatctagattcatctgtattctataactaggaggaagagaaattaggaagrtcactggcaccctctcaacagctcacaacagactgcaaacaaaggcctctgagggccttcttggctcataagttgaccctgataatttagctcacgttta

SEQ ID NO: 171813 - DNA, 201 bp, Homo sapiens
tgagtgtccagtgggtgataaactctttacgtgggctgtgcctccatcctcaggacctgacctcagccctgacccggaagatcacgctgaagacgccactsatctcctcccccatggacactgtgacagaggctgacatggccattgccatggctgtgagttacacacctgcatggggactccagggcacacaggaactga

SEQ ID NO: 171814 - DNA, 201 bp, Homo sapiens
gatggtaaaatccagctgctctcctgggccctggctctggttgaatcctgaatagtactctagccattcctaactcatactgtaggggacagtgacccagmgcaggtcctttagtgacccagtaacccagagagaccactgggctggtctctgctgtgtgccaatctctgctctgtgcctgcagttggcatgatagctctg

SEQ ID NO: 171815 - DNA, 201 bp, Homo sapiens
taacttcccgaaacgccacgctcccggctttggttgggggatgcagacgggcactgtgcgaagggttaggtgcttcgttgcacgggggagcggaggagagrgaacaggtcgtaaaaaccttccctaaaatcttagccctagattggacctcgctacacacccgacgacaccccgttcaggtggctccaactcctggggttc

SEQ ID NO: 171816 - DNA, 201 bp, Homo sapiens
gtgggtaggaaggttctcccagagaagaaaaggggactccggtctaggagcagtgggagttgagtggttccccaggaggggatgttgcaccaggaccttgsggtgaccgacatgtcactctcctacctcaactttaacctcttcatttccatgcctccctccctgtggaaaggcagatagtgggaaacaaagtttccaagt

SEQ ID NO: 171817 - DNA, 201 bp, Homo sapiens
catctgctggtgttcagcagcttggggaggtgacctggcagctgggttagatgggggtggtctgggggaattagcccggcagctctgcccaggggttggcygcttatgtaagaacttttaacggcttaaggggctcctcggcagtggggctgctgagttaggcccccctgtcctggcaggctgcctctctagaattgactc

SEQ ID NO: 171818 - DNA, 201 bp, Homo sapiens
gtttttgcccttaagaggtggggtggggtcctctgagcttcaagctgctgggctcagtcttccaccctccacgcagcgagggggataaagtgaagatcgcrcagggtgtctcgggctccatccaggacaaaggatccattcagaagttcgtgccctacctcatagcaggcatccaacacggctgccaggatatcggggccc

SEQ ID NO: 171819 - DNA, 201 bp, Homo sapiens
agattacaggctgtggagatccctctccccgctctctaacgtggagtcggctgagcacgactctctcgccccagcgcgggaggtctgcggtctgcgggtaygaggcgctccaggggacctggcatcgtcggcgtgcaagagaggagcggacctgagacgcaaggagaagccctgcctctggagtccagctcctttcctctt

SEQ ID NO: 171820 - DNA, 201 bp, Homo sapiens
catcacagtgctcttgctcactcctctcatcaaacaagggcaatttttcaagagtgttaatgggaaatcattaggcatccaccttacagtcctaatttggytccttctgacttggttttgtttcctaatctcaacaaaaatcgtggctgggtgcagtggctcacgcctttaatcctagcactttgggaggctgaggcgggt

SEQ ID NO: 171821 - DNA, 201 bp, Homo sapiens
ttggtcctcagagcctctgctatttaggtttgtgcccttcgccttaggtggccaccatggtgaaatgagggccctctctcacccacttaacaaatattcaytaggcacctacttgtctcaggcactgttcaaagctttgaggtagagtagggacaaaacaaatgagaggcgccatctctggtttatccagctttgcatccg

SEQ ID NO: 171822 - DNA, 201 bp, Homo sapiens
attaccgcctcagcctctaacttcccgaaacgccacgctcccggctttggttgggggatgcagacgggcactgtgcgaagggttaggtgcttcgttgcackggggagcggaggagagggaacaggtcgtaaaaaccttccctaaaatcttagccctagattggacctcgctacacacccgacgacaccccgttcaggtggc

SEQ ID NO: 171823 - DNA, 201 bp, Homo sapiens; identical to SEQ ID NO: 30933

SEQ ID NO: 171824 - DNA, 201 bp, Homo sapiens; identical to SEQ ID NO: 30934

SEQ ID NO: 171825 - DNA, 201 bp, Homo sapiens
catagccgatggcggcatccagaccgtgggacacgtggtcaaggccctggcccttggagcctccacaggtgaggggagaatgtgctggggattgggcaggygagggctggaagctgggggggtggcactagtgggctggaggcactaatcccttgcccactgtagtgatgatgggctccctgctggccgccactacggagg

SEQ ID NO: 171826 - DNA, 201 bp, Homo sapiens; identical to SEQ ID NO: 30936

SEQ ID NO: 171827 - DNA, 201 bp, Homo sapiens
cttttaaatggatacttgcaatcctgaccactctcctgagctccagaccattcgttgcttgctttcctggatgcctaaaagactcttttccatgcctaccyccacctcagcccttgtcacccagaatccattctccaccttggagcctgagtgacctttttgaaacataaatcagatcatttctctgtcaagaccctccag

SEQ ID NO: 171828 - DNA, 201 bp, Homo sapiens; identical to SEQ ID NO: 30937

SEQ ID NO: 171829 - DNA, 201 bp, Homo sapiens
tgttggcctgaccctcagaggggtatgtgctctggcctttcctccatgggcaggtggcttttaaatggatacttgcaatcctgaccactctcctgagctcyagaccattcgttgcttgctttcctggatgcctaaaagactcttttccatgcctacccccacctcagcccttgtcacccagaatccattctccaccttgga

SEQ ID NO: 171830 - DNA, 201 bp, Homo sapiens
cagggcagagcgcgcggggcgcatccggggcgggcggccgaggagggcgcggcggctccgggaacccggcgacgctgcgggggaggggcaggccccacaawcccttcccctattaccgcctcagcctctaacttcccgaaacgccacgctcccggctttggttgggggatgcagacgggcactgtgcgaagggttaggtgc

SEQ ID NO: 171831 - DNA, 201 bp, Homo sapiens
ggccaggggatgctcaggtggcgggaatgagcagaccaaggagaagatctggatacactcctatggctaagggaggggcccctcagctccctgctgccatsccatgctaatacctgccttctcccaggccccttctgccaaagagctacttgctcaggggccagcctttcactgcatcattttttagctttgtgcttctag

SEQ ID NO: 171832 - DNA, 201 bp, Homo sapiens
tgtgccctggaatctggccttgatgagcacctgagtcagaggtgacccagcggggagggaggacaatgcccaggtcccaggggatggttgaagatgagagrggatggatcaaaacatggtttcatggtttgtcttgtttcatggtttgtcttgtgcattggtttacaaaagtcatgcaggaagcaccttgaccagctgttg

SEQ ID NO: 171833 - DNA, 201 bp, Homo sapiens
  misc_feature (1)...(201): n = A,T,C or G
ccagtcaccttgttgccagtggtcgcttggcctttttgtttttctctgcagccttcatcctgactgaagtcatcttgagcatatgtcctgtgtctgtcatntttctttccaagtagaacataagctccattagatgagctgggaactcatccaccttgttcactgccatgtccccagggcctgtcctggtgccggtgcatg

SEQ ID NO: 171834 - DNA, 201 bp, Homo sapiens
cccttccctccactcccctggccttctttttctttcttaagtgtgcctccgaaagaactggaccctgaggcgggtttgcactcagtccctcagccgagagkgacagcccctctgacttctacttaatcggctcccactggtcacctcccaggaaagaggctttccccagtcaccttgttgccagtggtcgcttggcctttt

SEQ ID NO: 171835 - DNA, 201 bp, Homo sapiens
gaggaatgggccccggctctgaccacacttcccttctacatcagctgatgggaggtattggtttcattcaccacaactgcaccccagagttccaggccaaygaggtgcggaaggtcaaggcaagtaccaggcctgtccccagcaagatgccacctggcagtccccacctcagaggccctcccagcctcccctgccagccct

SEQ ID NO: 171836 - DNA, 201 bp, Homo sapiens
tcgtcaatgattgcgatgagctggtggccatcatcgcccgcaccgacctgaagaagaaccgagactaccctctggcctccaaggattcccagaagcagctsctctgtggggcagctgtgggcacccgtgaggatgacaaataccgtctggacctgctcacccaggcgggcgtcgacgtcatagtcttggtaaggcccccgc

SEQ ID NO: 171837 - DNA, 201 bp, Homo sapiens; identical to SEQ ID NO: 30941

SEQ ID NO: 171838 - DNA, 201 bp, Homo sapiens
atgctcatcagaaaaaaatcctgagcaataactcctttctctatcccctatcttgcataaagaattgcacattcacttattaaaggctctcagaagtcctrcagttaaatttatttgacactagagctgtttttataatattttccagctagaaacaactttagcttttttttttttgagacagagtctcactttctcacc

SEQ ID NO: 171839 - DNA, 201 bp, Homo sapiens
ctgtcctgtgctgggtcatgttcatactgtgttgagcgccacaaaattgttctcaggtttgttcccaatgtttacttattttctctccccatcaagattgrgaagttttcaaaggcaggcactgtgtctgctgtgtgtggcgatatgggaacttctgtgtcgcttgacaaactctgagacttaaaggcaatggatattttg

SEQ ID NO: 171840 - DNA, 201 bp, Homo sapiens
ctgctgtgtgtggcgatatgggaacttctgtgtcgcttgacaaactctgagacttaaaggcaatggatattttgggcctattaccttgatggtaccccagyagacctttcgctgtctttggctctagctctgggggctggagtttgccagactctagtgaggtgcacgaggtgggaactgccctgatggggcagtagggat

SEQ ID NO: 171841 - DNA, 201 bp, Homo sapiens; identical to SEQ ID NO: 30942

SEQ ID NO: 171842 - DNA, 201 bp, Homo sapiens
gatgctcatcagaaaaaaatcctgagcaataactcctttctctatcccctatcttgcataaagaattgcacattcacttattaaaggctctcagaagtcckgcagttaaatttatttgacactagagctgtttttataatattttccagctagaaacaactttagcttttttttttttgagacagagtctcactttctcac

SEQ ID NO: 171843 - DNA, 201 bp, Homo sapiens
ctaagactgcattagttgtggttaacctttcagggaagcagtcccctttgagaattgactgaaagttgtcaagtgaatttccagaaaaaaaaaaaaaaaaacaaccagaaggaaagagcattctcataacagttttcataggatttgaggggttcatccactcaggctctccctcctgccttgagaatcctcagctgtcta

SEQ ID NO: 171844 - DNA, 201 bp, Homo sapiens
  misc_feature (1)...(201): n = A,T,C or G
ctgccagccctgcactgctacactccctgcgtgtccttcctctcagtagagccttggggccgagccctcattttcccactggctcctcatcccactgaggntcctggcttctctgcagcacagctgcatcctctgttccctgtggccagcctggacatcatccctggctttcttccagccttttcctcccccatctctgcc

SEQ ID NO: 171845 - DNA, 201 bp, Homo sapiens
tttcttaagtgtgcctccgaaagaactggaccctgaggcgggtttgcactcagtccctcagccgagagtgacagcccctctgacttctacttaatcggctmccactggtcacctcccaggaaagaggctttccccagtcaccttgttgccagtggtcgcttggcctttttgtttttctctgcagccttcatcctgactgaa

SEQ ID NO: 171846 - DNA, 201 bp, Homo sapiens
acctttttgaaacataaatcagatcatttctctgtcaagaccctccagtggcttctctccgaatcaaatctgagcttctgtccgtggtcttcacggccatrcatgctgcccctgccttcctcctgcctctcccttccctccactcccctggccttctttttctttcttaagtgtgcctccgaaagaactggaccctgaggc

SEQ ID NO: 171847 - DNA, 201 bp, Homo sapiens
aaaggccttatgtactctaagactgcattagttgtggttaacctttcagggaagcagtcccctttgagaattgactgaaagttgtcaagtgaatttccagraaaaaaaaaaaaaaaacaaccagaaggaaagagcattctcataacagttttcataggatttgaggggttcatccactcaggctctccctcctgccttgag

SEQ ID NO: 171848 - DNA, 201 bp, Homo sapiens
cctgcttggtgcagctgttcagtttaacaaagtttactggccagtgtggctttgtgtcagaccctgggctggctgctaggaagggagggattgaaaagacycctaccagctgggcgtggtggctcatgcctgtaatcccagcattttgggaggctgaggcaggaggatcacctgaggtcaggagtttgagaccagcctggc

SEQ ID NO: 171849 - DNA, 201 bp, Homo sapiens
aatcccagcattttgggaggctgaggcaggaggatcacctgaggtcaggagtttgagaccagcctggccaacatggtgaaaccccatctctactaaaaatrcaaaaattagctgggcattgtggcgggcatctgtaatcccagctactcgggaggctgaggcaggagaatcacttgaatctgggaggcggaggttgcagtg

SEQ ID NO: 171850 - DNA, 201 bp, Homo sapiens
gttgccctgccagttacttaattcacgaagtttgtggtctacttatttgtaggggggcgggaaacagtgcatgcaatgtgtttccctgggtcccttgttgkgcaggatttcttttcctggtcctatagtgtctggccgtggctggtcctgtagtggccttctctctaactatggggacacttccatgtctttctaatagac

SEQ ID NO: 171851 - DNA, 201 bp, Homo sapiens
gtggcccaagtctattcttttctagtcatactggcaatgtagattgaggagtaagacatttacatgattctgctcccactacatgtccttttaattttccscatcagagtagtaaaagccttcattctgatgatctggccagtttctcatttggctaatttgtataaataaacatacggatttgaagcatttagtgaatat

SEQ ID NO: 171852 - DNA, 201 bp, Homo sapiens
cacaagaatattatcattattccattgcagtatatgagcttcttaaggttttttttttaatggctacagactgttccataatacagacataccaatttatktaaccattcccttagctatagatactcagtaatcttcagtgtttgtcattaaataaagcagcagtaaagttttcttacatatatcctaacattcttctgt

SEQ ID NO: 171853 - DNA, 201 bp, Homo sapiens
acgaagtttgtggtctacttatttgtaggggggcgggaaacagtgcatgcaatgtgtttccctgggtcccttgttgtgcaggatttcttttcctggtcctrtagtgtctggccgtggctggtcctgtagtggccttctctctaactatggggacacttccatgtctttctaatagaccttgggagaattagaagcatcaca

SEQ ID NO: 171854 - DNA, 201 bp, Homo sapiens
gctttttagtttgttgtaatcccttttgcttttgcctagtttttcttttgttgcctatgcttttgaggtcttctccagaaaatgtttgcccagagtaaacrtcctgtaatgcttccctaatgttttcttctagtagtttcatagtattggatcttacatttaagtctttaagttcattttttttttaatatgatgagagta

SEQ ID NO: 171855 - DNA, 201 bp, Homo sapiens
gctacatcttttcagcaaagtcctcgtttcaaattctgctgtaaaatgatctctttctatctttagttggaaatctaaaataaaccgtgacttttttttttctaactttagttaatgacctttttccatgactgtggaagtgctgaggagctagaggacactgtccttgttaaacaccaactgagtggggcttcctagccc

SEQ ID NO: 171856 - DNA, 201 bp, Homo sapiens
atggaacgaagcttagattaagtcagatgcttagtgctcctggcaacgtgcctgaggagctgtcagtgctgggtgctgtggttcctgcctggacaccccttcaccctgctgcagtccagtcccttggtcaggtcactttttttttttttttaactgctccttgaggagcaggactaccccagaggcagtgtggctagagta

SEQ ID NO: 171857 - DNA, 201 bp, Homo sapiens
gtggagatggaacgaagcttagattaagtcagatgcttagtgctcctggcaacgtgcctgaggagctgtcagtgctgggtgctgtggttcctgcctggacaccccttcaccctgctgcagtccagtcccttggtcaggtcactttttttttttttttaactgctccttgaggagcaggactaccccagaggcagtgtggct

SEQ ID NO: 171858 - DNA, 201 bp, Homo sapiens
  misc_feature (1)...(201): n = A,T,C or G
ccagttatcagaagactcacagggctcatgaaataaacactacagactttgaactgaaagggaccctttagtaataacaatagtagctgacagtgatgttncacttcttttgcggtgggggccgttctaagcagtttacaaatactaactccttttctcctcacaacagctccgcccatgtgcctcagctagcaagcagtg

SEQ ID NO: 171859 - DNA, 201 bp, Homo sapiens
gtatatctgaaaggtacagtactgtgataactgaagaatggtggtgccatcacattgagaaagggttgaggactgcggtggggctatgcagccttgggccrtggcgttgggggcatgaaaaccaggagcttgaaataaattcttatggaggcttttttttttctttttttttttttttttggaattcgtggtgggaggttt

SEQ ID NO: 171860 - DNA, 201 bp, Homo sapiens
ctgattaagattttttttttttttgcatatactcaataaagatgatgtcctcctgctgctgctttaatgataaagggaaagtttcatttttttttttttttactagattcacttaagaagatttgaatctgatagtctcattctgatagtctcaactattacagttgctctaattaactgttagtttaaccctctacagtt

SEQ ID NO: 171861 - DNA, 201 bp, Homo sapiens
atctgaggtctagttactccacatcctattcagcacttggtattgccagtctgtttaattttaaccagttttgtaggtgtattgtagtcattcattgtggytttaatttatattaccctgtgactaatgagactgagcaccctttcttttgctttcattgtttttaatgatcacaaataattgtaggtatttagtatttat

SEQ ID NO: 171862 - DNA, 201 bp, Homo sapiens
ccttggtcagactggatttctaattttgacctgtgcaaaatatgtagaaattcaaggtcatccttctttgactatgtacaatatgttttaaagttattccrgaaagaatgatcagaaagcgtgtttgtatgcttatgtatgcgtctagtggaggcaaaacagttaaaatggctgagaaaatgaaaaacaaaagaagaaagg

SEQ ID NO: 171863 - DNA, 201 bp, Homo sapiens
tctgttctgcttgttaatttggaagaaagggaaggaaaagggggtggaaggcataattttatacataagtagtaagaataaagggatctaaccttaacaaktcttcagttttaaggaactcaggaagagataaaggagagaagttaatagagtatggcaagcagtttcctgaatgtatttgaataagtgtaaaagtaaggc

SEQ ID NO: 171864 - DNA, 201 bp, Homo sapiens
tatggcaagcagtttcctgaatgtatttgaataagtgtaaaagtaaggccatgaaaaggccgtttcatgtcagatagactgtgttgttctgtgacagattmaataaatatgagcgtcatccacttaacccttggaattaactctacatcttctagaactgattaagattttttttttttttgcatatactcaataaagatg

SEQ ID NO: 171865 - DNA, 201 bp, Homo sapiens
taccgatgctgtatatctgaaaggtacagtactgtgataactgaagaatggtggtgccatcacattgagaaagggttgaggactgcggtggggctatgcasccttgggccatggcgttgggggcatgaaaaccaggagcttgaaataaattcttatggaggcttttttttttctttttttttttttttttggaattcgtgg

SEQ ID NO: 171866 - DNA, 201 bp, Homo sapiens
tctgaaaggtacagtactgtgataactgaagaatggtggtgccatcacattgagaaagggttgaggactgcggtggggctatgcagccttgggccatggckttgggggcatgaaaaccaggagcttgaaataaattcttatggaggcttttttttttctttttttttttttttttggaattcgtggtgggaggttttttta

SEQ ID NO: 171867 - DNA, 201 bp, Homo sapiens
aattcgtggtgggaggtttttttagaacaggaaaatggaagagaatacattctgttagcagagagggaagactgataagcaggaaactggtaaggaccacrttatctcctgatagcttgtgtaaaagtatttcgtaggacaggatacctaaaattgagtaatcctaaatggcgtggtaacatcagtagtaaacaatgctaa

SEQ ID NO: 171868 - DNA, 201 bp, Homo sapiens
atcctagtacccagattttaaaaaatagggctcaggctgggctctgaggtgagggaagaggaaagttggggctagccagggccctgaggcatgggcggggygtggtgtgacatggtaaggggtgggagtgggcaggagagactgcctgggtgaggcttgcctcagatggagaagcctgacctggatccacttgctgcctgt

SEQ ID NO: 171869 - DNA, 201 bp, Homo sapiens
agttttattacaaatgtatattgcttttgttatttactttgagatttagaggttaatcactccaggaggcagatgaaccaaaacttaggatcatcaaattsaggactattgttaacagttaccaaggtgccttttgttgttacctaagaaccttcaaaacagatgctctccgtctcatcatagttgacatgaactatagtt

SEQ ID NO: 171870 - DNA, 201 bp, Homo sapiens
ggaagaaaggtgtagcgtggactgtcttttcagaggcctcgaatagcttgaacagtaagtggtgaagggcagggagtagggtgggctgcagagccatgtgyagagagagtgctggttaagatagaagctcaaacttgggttgctgcctgaagttctttttaaggatcatcaaaaccacaggaatacataataacaaagcct

SEQ ID NO: 171871 - DNA, 201 bp, Homo sapiens
cgggtctgccagggtgggaaagggaagcctccgttctttttggtaagctagcataaagacaggtaagggagtctattttcaagaaagctggatctgtttcrtactctttctgcccctaatcgctgtggacagctccagcagcacaaagagatgaagggcaaaggcaggatgcagcaggcaaagttaacattgtatttgtga

SEQ ID NO: 171872 - DNA, 201 bp, Homo sapiens
aagttgctggcagttggttccttctgagagttctgagggagaatcttttccttgcctctctcttagcttctggtaatcccagacattccttggcttattgwtgcttatagatgtcctttgaatagtagacgcaatcctccattttcatatggtgttctccttgggtctctttcttcatgtctgtcttctgttaaagatacc

SEQ ID NO: 171873 - DNA, 201 bp, Homo sapiens
gggaagcctccgttctttttggtaagctagcataaagacaggtaagggagtctattttcaagaaagctggatctgtttcgtactctttctgcccctaatcrctgtggacagctccagcagcacaaagagatgaagggcaaaggcaggatgcagcaggcaaagttaacattgtatttgtgagtacagttgaggataaaaaag

SEQ ID NO: 171874 - DNA, 201 bp, Homo sapiens
ctggaggagtcttcacttctcctcccataatcttacatttaaaatctattctcttcctttccccttcttttttcctctccccctctctttctcttttaaasaatgaccagcttttgcccaggcttggtggctcacgactgtaatcccagcactttgggaggctgaggtgggaggattgtttgaggtcaggagttcaagacc

SEQ ID NO: 171875 - DNA, 201 bp, Homo sapiens
aagcctccgttctttttggtaagctagcataaagacaggtaagggagtctattttcaagaaagctggatctgtttcgtactctttctgcccctaatcgctrtggacagctccagcagcacaaagagatgaagggcaaaggcaggatgcagcaggcaaagttaacattgtatttgtgagtacagttgaggataaaaaaggga

SEQ ID NO: 171876 - DNA, 201 bp, Homo sapiens
attgtaattcaaataatgacaaaaaccacgattatttttgtaccagcctaatataaccagaaaaatctgggaatggacctagttttaggtagagcagaatmtaaggttcaaattatgcatttggaagtgtctctcctccctcctcccttcttccctccttctctctctctccttcccttcctccctcccttttttcttctc

SEQ ID NO: 171877 - DNA, 201 bp, Homo sapiens
tttgttcagtagatgcctcctcctgggttgcaagagctacagggccaagactgtgtagtatccctgtgttgggcaccattcttgcacatggtaggtgcttygtgaatatttgtcaggaaaaccaaaaagaatgaaacataagagaacaacaagaaaaagaatctttacctttaccctttctcttggaggaatatttgactt

SEQ ID NO: 171878 - DNA, 201 bp, Homo sapiens
  misc_feature (1)...(201): n = A,T,C or G
cagttatcagaagactcacagggctcatgaaataaacactacagactttgaactgaaagggaccctttagtaataacaatagtagctgacagtgatgttgnacttcttttgcggtgggggccgttctaagcagtttacaaatactaactccttttctcctcacaacagctccgcccatgtgcctcagctagcaagcagtgg

SEQ ID NO: 171879 - DNA, 201 bp, Homo sapiens
ggaaaaccaaaaagaatgaaacataagagaacaacaagaaaaagaatctttacctttaccctttctcttggaggaatatttgacttcttattcttgtgaawtctgggagattaggaaaaaagcttctgaaatgaaggttatttcagaagtaatttttatgggagagcttccagaattcttagcctcagtaatgataatggc

SEQ ID NO: 171880 - DNA, 201 bp, Homo sapiens
ctggatataatttatgttcaggggctcccaacctggatgtccctgagaattttcagtatttccaaaatctagtagaagtagtttaagcatctgtattttgwtgaattatatcaatccaatgtggtaaaccgtttagcatctctgccttttacattcatgttttaaacaggggaaatgacttcatttttatttaataatgtt

SEQ ID NO: 171881 - DNA, 201 bp, Homo sapiens
ttgtcccttttaatcctcgcatgaactctttggaataggtactataggtgctgagcctggctcttcagaacaataagcatcctgacaaatgactggtcccytgaagacagtaccaggtcttattctttgcacttggccggagactagccagatgctgaggtgtgctcagtaaatggggatcatggctgagaggcccttgca

SEQ ID NO: 171882 - DNA, 201 bp, Homo sapiens
gcagctttaaaagggctaagggaattttctgggatgctctacgcttatgtgggagctgactttgctttgggccaaaaatctgtgggtggtgttcagatctscttctatgtccttgtaaataaaaaacctttgaaatgcacaatcacacaaaaagcaccatttatttgaactttttgaatctgttcttcctaagtgggtact

SEQ ID NO: 171883 - DNA, 201 bp, Homo sapiens
tgaggaaggtcttgaagcccattcaactcacagatccaggaaaaatcaaacgtattagaggaatggcgtatcctttccatttatttggatttctttttttkttgttgttgttgcctcactaagataagaatgactaacagctttacttcttcccgaggttatttacattttagactacaactttgaaaagtcttagcagtg

SEQ ID NO: 171884 - DNA, 201 bp, Homo sapiens
aaacctttgaaatgcacaatcacacaaaaagcaccatttatttgaactttttgaatctgttcttcctaagtgggtacttatgcttgccaccagaaactgaytgatttctttctaaagcccttggtatctgtcttagtcttttatatggctgtaaccatacacaataccataaactgagtgtcttataagcaatggaaattt

SEQ ID NO: 171885 - DNA, 201 bp, Homo sapiens
ctgggtgggagcaggtgttggaggccgtagagcaagacaggctgtgggatgactttcctggcgggagtgtgacaaggagggcagaccagaaagcctgcttstcagggcgggggtgggtgcttaaggtcgggttttgtgttctcaggaggtttggcaatggtattacttggaggaagaaaggtgtagcgtggactgtctttt

SEQ ID NO: 171886 - DNA, 201 bp, Homo sapiens
agccacatatgatatacccacagctaatatcatactgaatggggaaaaactgaaagcctttcatctttttttttttttttgagacacagtcttgctctgtyacctagcctggagtacagtggtgcgatctcagctcgctgcaacctctgcctcccagatgcaaacaattctcatgtctcagcctcaccagtagctgggatt

SEQ ID NO: 171887 - DNA, 201 bp, Homo sapiens
gagcaggtgttggaggccgtagagcaagacaggctgtgggatgactttcctggcgggagtgtgacaaggagggcagaccagaaagcctgcttgtcagggckggggtgggtgcttaaggtcgggttttgtgttctcaggaggtttggcaatggtattacttggaggaagaaaggtgtagcgtggactgtcttttcagaggcc

SEQ ID NO: 171888 - DNA, 201 bp, Homo sapiens
tagtgaaacaagtattttggctagtctcctgccagacacatagaaagtattgtgtgagcgtgtgttgagttgtgttaaagggggcaggtctgtgttgtggytgcatacggattgtactgctgggaaggccgccacacctttcctgttgatgtgtctacttaacagtcattgggaaagtagaattgagctgtcaaatcttaa

SEQ ID NO: 171889 - DNA, 201 bp, Homo sapiens
gttggaggccgtagagcaagacaggctgtgggatgactttcctggcgggagtgtgacaaggagggcagaccagaaagcctgcttgtcagggcgggggtggrtgcttaaggtcgggttttgtgttctcaggaggtttggcaatggtattacttggaggaagaaaggtgtagcgtggactgtcttttcagaggcctcgaatag

SEQ ID NO: 171890 - DNA, 201 bp, Homo sapiens
tgtgagcataaagtaaggtgataatagatgtgaaagaactttgggagccgtgagctctgtgggattatgtgctaggatggtgacatctcttgtgctttccyggggacagtgggcagcctcagacctcagaaggacagcacctacttggtccaaagggtatgagattcaggactgtttgtctaagctgtctgtggtcaaaag

SEQ ID NO: 171891 - DNA, 201 bp, Homo sapiens
ttatcagaaagtgtcctggcatgaagcagagcaggcctgacagccatcctgccaccagcttatagtgtggctttttgttataccactgactcagctgaccstagagtgtggtcaagtccatacttactaatggtgagtagaagccttacacgtagataaagacatggacatgatgtagactgtgggccatcaactccaagc

SEQ ID NO: 171892 - DNA, 201 bp, Homo sapiens
cccgattgctgccatgtgggaagatggactcattctttttagatcttttaagagaagctagaaatctggatttgtatgtgacagttgattcatatataaamcaatagcaacaggctagattttgcaatgcattctagagcacagaatctcagttaacagataagtattagaaaagaagaaaaaaatttaaaaaagcacaga

SEQ ID NO: 171893 - DNA, 201 bp, Homo sapiens
tcaccaaagccttgaagtcctgggctcaagtgatcctcccacctcagcctctcaagtagctaggaccacaggcgtgcagcatgcccagcttatttttttttagtagagatgaggtctcactatgttgctcgggctgtagctttaatatttaaaattagctaatcttcagtggttttcctagtttcccctgccccacctgat

SEQ ID NO: 171894 - DNA, 201 bp, Homo sapiens
aagaaagggaaggaaaagggggtggaaggcataattttatacataagtagtaagaataaagggatctaaccttaacaattcttcagttttaaggaactcakgaagagataaaggagagaagttaatagagtatggcaagcagtttcctgaatgtatttgaataagtgtaaaagtaaggccatgaaaaggccgtttcatgtc

SEQ ID NO: 171895 - DNA, 201 bp, Homo sapiens
aagacctactattaatggcactgaatgccataaagtacttgccttttcttggcatcatgtttggtgaatgaggtatatgagaaatatcatttcaggggccctagaggatgctggttgctggtgtgatgatttaagcacatcatttgtaattcccctctgtggtcagcctagtctgagaatgtgctgttgggagactagggt

SEQ ID NO: 171896 - DNA, 201 bp, Homo sapiens
tggtttgtacaattattaatttgtgtttacagggtggatgcgtagactcgaccaaccaaagcctggcgctactactcatgacccttggacagcaggatgtytccaaagtcctgctaggccctctctctccctacacgtaagttattctttttcaacctcgttattctgtccagtgtaattttctcattgcccaaaatgaca

SEQ ID NO: 171897 - DNA, 201 bp, Homo sapiens
taccaggagaccgtggaaatggtatttagcatcttggagccttggtgtcatttgtagataaggtgcgtggtcctgaagtcctggacttgtggagatggaamgaagcttagattaagtcagatgcttagtgctcctggcaacgtgcctgaggagctgtcagtgctgggtgctgtggttcctgcctggacaccccttcaccct

SEQ ID NO: 171898 - DNA, 201 bp, Homo sapiens
ccatctcctgacagtgcagctagcctagttctctgtttcctgctgcctcagtaactgaatgtagtaatttcatttggagcagaggtcagcttgtctttggraaagcctctattcagcagaaaaagcatcagcagtatatttaaaagctgccatgtaatgactatagggactccattgagcagatccttttcttatctccag

SEQ ID NO: 171899 - DNA, 201 bp, Homo sapiens
acatccagagaaagttgttattgcagacgtgaatttggtttagtgaaagcctttgctttgctaaaaaataaaaattttaaaaattagaaaaaaattctaartaaggaaaataagttcttaaaaaatgatgctctatgtaatgaagatacctgttttaggctttgcttgtgtatttagcaactaggaagttagagaagcaat

SEQ ID NO: 171900 - DNA, 201 bp, Homo sapiens
ctgtgtgcaagatgttgttttaagcactcagacataataacttatctggttttcatcataacttcataagggcaaaaaaggcaagtactatcatgtgcacygtcttacaggtgatgggattgaggcacagcgaggtcaagttacgtgcccagggtcacacagacagtaagtggggttcagacctggacagtctcctccagt

SEQ ID NO: 171901 - DNA, 201 bp, Homo sapiens
aatgtgtgagctttggtagtttgtgggtgtcagcaagcttttgatttttattttattttttttcaccaagggtcatgccagagcaagctttttattaaacwtgctaatttttctgcagatatggggagaatggtttaatatcaagcaaaactttttattgtgatcacaactgtcttaatgccattctaggatgaagtgtgt

SEQ ID NO: 171902 - DNA, 201 bp, Homo sapiens
attatgaatatttgcgtgcaagtttttgtgtgggtgtatgttttcatttctcttgtacatattcctaagagtagaattaccgtatcctatggtaactcccyggttaacattttgaggaactgccaggttgttttccacagcggctgtaccgttttacattcccaccagcagtgtatgagggttctagtggttctgcctcct

SEQ ID NO: 171903 - DNA, 201 bp, Homo sapiens
ctccagtgtagtgctgtggaagagaggggcagggaaatatgaactcaagaggcggtgcctcagtgcagctgctgctgtggagagctgttgggctgtggagmaggacgtggatcagcactggacaagactttgttcaagtgcatgtagatacaggacgagcttactcttcatttgcttttcgttttcttaaggaggctgttt

SEQ ID NO: 171904 - DNA, 201 bp, Homo sapiens
ggctcttccatatggacatttcctaccagttgcaagttcaccataaccttcaggaacctgtgtatttaatgaactgttcaggtgagtcttatggtcaggcyagctggggtgacgctaggtctgccaggcgagaccattagaagcctgtgcacctgcactgcggttcatccacagaattgctcttcccaaggtactcttgga

SEQ ID NO: 171905 - DNA, 201 bp, Homo sapiens
tggttgcaataaaggatcatgatcgtaaagatcattcccatttgacaaagggaagaggaaaattgcagtaggataatgagtgatgctttttattttggtcytgttccctgggatgttggcagcctaaccatataaggatttccagttggcagttagaaattattgtctggagcctcagagacaggtcatcacgatcttacc

SEQ ID NO: 171906 - DNA, 201 bp, Homo sapiens
actccacctatttcatggcaagcctgttgtttcacgtgcagagattacttcatcccttaagactgcctcctgcaaacacagttttgagaaagaacccaggyaagagcctgcccagcaagaatatgcaggaataccaggatccatggcagatttcccctgccagctaatagagtctgcatttgatatgtgcataggcttgaa

SEQ ID NO: 171907 - DNA, 201 bp, Homo sapiens
tcacaattaaactacgtgcccactctttcaccaatgtttgtttgctagatgctatgcaagggactagagctgtgtttctcaaaatgtaggtcattagaacmatgtggaatacttaggtagagggttagaaatggctggtggaggtgtccagtggatgggcctgagacagtgcccctggctccattgtcttcttataacctg

SEQ ID NO: 171908 - DNA, 201 bp, Homo sapiens
aacagagagagactccgtctcaaaaaacaaaaaagttcacccatgatgcagcctaatccaatcccagctttcttggtagtcatgagcaggagaccataacrggagggagggatgaagaagaaaaggaaaaacaaagcctttgggaattggatcatttgttaacatctttctgttttacacttctgtttttgcacctctacg

SEQ ID NO: 171909 - DNA, 201 bp, Homo sapiens
ccatgtttaggcttaataatttccatggctcttgtctatagagaaaagtacaaagcaagtataatcacacagaacacacctatgcacacacatgcacacasgcacacacacacacacacacaccccactggccaacagaaaacctgcctttctccttcatagcctttgcttctgctgtccctctgtctgagtggtccttcc

SEQ ID NO: 171910 - DNA, 201 bp, Homo sapiens
tttctgcccagatgcttcattctctctctctgcaatcctcctttttctgcttcttagtgtacccagtgggaagaaagtggtgtctctacaacctcccggtyttgatcttcttcattcaagggaccagcctaatttaaatgtgcaaggaaagaaagctgattgatccagcttgagtcagatttccaccccctaatcaattgt

SEQ ID NO: 171911 - DNA, 201 bp, Homo sapiens
gtaacctcaaactcctgtgctcaagtgatcctcttgcctcagcttcccaagtagctgggactataggcatgagccactgtacccagctaattaaaaaaaawttttttagagatgttgtccaggctggagtttttgtgtttttgtttttgtttttccaatttaattttaagttctgggatacctgtgcaggacgtgcaggtt

SEQ ID NO: 171912 - DNA, 201 bp, Homo sapiens
tctttttaatggtataaatattatgtttaaagctttactaatcactttgtattatataaatcaccattaaattagaattttggggggacttatatgaggamctcaccatataactttggagttatatgaggaagctgtgagtgtagatcataataaaagcatatcattctagatcattttaaaaaataccgtgttccgatg

SEQ ID NO: 171913 - DNA, 201 bp, Homo sapiens
gatggtgaatcatttgaactgaaggtaagaatgtttgaactgttgaccatatgttcctgtggaaaacattttcccactgactcattggaagagctgtgtgrctcagtgtatgtgtgtcacatttgaagtcaccagttatcagaagactcacagggctcatgaaataaacactacagactttgaactgaaagggacccttta

SEQ ID NO: 171914 - DNA, 201 bp, Homo sapiens
tgcatcatctacctggttgctaagccttacttgttttttttgactcttgtattctgctgaaggcttaattaaacttttcttttctgaaataatttcatagrttgatgttcttaaggcaacagcactccctttgttgaaacaatttgggattgatggtgaatcatttgaactgaaggtaagaatgtttgaactgttgaccat

SEQ ID NO: 171915 - DNA, 201 bp, Homo sapiens
caaccttatattatcagcctggcctcctgtatggtggatctgtggaacatgactgtagcgtccttcgtggcattgggtattacctggagagtcttctttgsttggctccatttatgaagcacccgttaaaaatagttctacgaggagtgaccaatgatcaggttgacccttcagtgagtattgagaacaaaccgtggtgtg

SEQ ID NO: 171916 - DNA, 201 bp, Homo sapiens
ctggaagaatggcaccctaggtacagagactcgcttcctgtagagagctcactggaggcggctgccagctgtgtggccactgtggccccaccggctttgtwgctgggctcgtagctgccgttccccagcccttgcttcaggcctggggaagtcctgcttgcacacacggtatgaggtatggggtgttgtcttgaatgtgtg

SEQ ID NO: 171917 - DNA, 201 bp, Homo sapiens
acagagactcgcttcctgtagagagctcactggaggcggctgccagctgtgtggccactgtggccccaccggctttgtagctgggctcgtagctgccgttycccagcccttgcttcaggcctggggaagtcctgcttgcacacacggtatgaggtatggggtgttgtcttgaatgtgtgtggtcctggggcatggggtttg

SEQ ID NO: 171918 - DNA, 201 bp, Homo sapiens
tgcccacttcccagtagactggctcttcccagcatggtaaccagtggtggttgtgctgagcaaatgcttctgtgattggggaggtgctggcagggatgtakgcacacaaagatgctgtggatagtctggatttcttgctaacttggcctggggttttggagccttgggtccaggatgctcctggaagaagggtcagtcttt

SEQ ID NO: 171919 - DNA, 201 bp, Homo sapiens
ttaaacaacaccgtgtttactgtgtgcaagatgttgttttaagcactcagacataataacttatctggttttcatcataacttcataagggcaaaaaaggyaagtactatcatgtgcaccgtcttacaggtgatgggattgaggcacagcgaggtcaagttacgtgcccagggtcacacagacagtaagtggggttcagac

SEQ ID NO: 171920 - DNA, 201 bp, Homo sapiens
attcattgcctactaagcagtgggcaggttggctatccactctttctcatctctgtgtctttaaagccatgattctcgagggaggggagggaggggggagsatgccttcctaagtaagagtatcagggtcatttattctctccctctgatcccagcacctataaactccatcctgccccctcctcaattctgatatgcttt

SEQ ID NO: 171921 - DNA, 201 bp, Homo sapiens
ccttctcttggtttggcttgtttctgcttggtttcattctacaggcagggcctcttcgcaaagagggttttaaaatggtggctgaacattctgaaaacatmatctcagtttagctaccccagcagaatgagaacttctcttcccaactccctagatcaatcctggggaagacactgattggccttgcttgaatcatgtgcc

SEQ ID NO: 171922 - DNA, 201 bp, Homo sapiens
aggaggaaacaagttactagactaacactatagctactacggtccactacatattccaaccagcttaaaggaaagggggaatttatcttaaggatacaggrgtatcttgtggaatacgagggaaggcatacagctgggcctttggagagaacttggaagctatcaggaccctggcagcttctttctgcccagatgcttcat

SEQ ID NO: 171923 - DNA, 201 bp, Homo sapiens
atagtaaccaggtggcttagtggaggaggacgcaggaccctctgttgtggtttgtgcctgtgggggctgccagagagagggctcaccccatgattgccttyaccccaatctctcacatgcttcaaaagaggggtctggtgggaggggctgtgtttaagggtgggatctggcagcctgtcaaatcctggtcagttgggattc

SEQ ID NO: 171924 - DNA, 201 bp, Homo sapiens
attgccttcaccccaatctctcacatgcttcaaaagaggggtctggtgggaggggctgtgtttaagggtgggatctggcagcctgtcaaatcctggtcagytgggattcaacggacccatgaccacaagcctcatggcctttcctgttgaccagcagtggcagtgggaacaactcaccttttgaaaatacataggaaggcc

SEQ ID NO: 171925 - DNA, 201 bp, Homo sapiens
cttccctaataaccagtgatgttgagcatcttttcatgtccttattggatatttgtgaggaaatatccgtttagctctcccacttttttttttttttttttcagtgagtcttactctgttgcccaggtgggagtgcagtggtgcaatcatagctcgagtagctaggactacaggctcctgccatcatgcctggctaatttt

SEQ ID NO: 171926 - DNA, 201 bp, Homo sapiens
gaacctgggaggcagaggttgcagttagctgagatcgcaccattgcaccccagcctgggtgacagagcaagactccgtctcaaaaaaaaaaaaaaaaaaamataggaaaagttatctctgtgctccagaattctctgaaacctgcttgtcagatggactagaggctttcgtagaaaagtcagttgctttttgttttctgaa

SEQ ID NO: 171927 - DNA, 201 bp, Homo sapiens
agaagaaggagatgaaatcttcctgaaggaggaggtattctttgacaagtcttgtgcagtcacgatctggcctcagatgttttggtgctaaatcagtttayttttttatgctaaatttaataattttgtgaaaaatgggtagtaactaaaagtttggggtagatgatcaagaggttgccctgccagttacttaattcacga

SEQ ID NO: 171928 - DNA, 201 bp, Homo sapiens
atcacttgaacctgggaggcagaggttgcagttagctgagatcgcaccattgcaccccagcctgggtgacagagcaagactccgtctcaaaaaaaaaaaamaaaaaaaataggaaaagttatctctgtgctccagaattctctgaaacctgcttgtcagatggactagaggctttcgtagaaaagtcagttgctttttgtt

SEQ ID NO: 171929 - DNA, 201 bp, Homo sapiens
cctgaggagctgtcagtgctgggtgctgtggttcctgcctggacaccccttcaccctgctgcagtccagtcccttggtcaggtcactttttttttttttttaactgctccttgaggagcaggactaccccagaggcagtgtggctagagtagcccggtcaggtcactttgaaccccaggaggcctagtaaacttgctttgg

SEQ ID NO: 171930 - DNA, 201 bp, Homo sapiens
gtatgtgtgaaactcttttttttttttttttttgagacagagtttcgctctgtcgcccaggctagagtgcagaggcgcaatctccgcccactgcaagctcygcctcccgggttcaacgccattctcctacctcagcctcccgagtagctgggactacaggcacccgccaccgtgcctggctaattttttgtatttttagta

SEQ ID NO: 171931 - DNA, 201 bp, Homo sapiens
gtggttttctgtgctacttgagaaagtaagtctgtatgtgtgaaactcttttttttttttttttttgagacagagtttcgctctgtcgcccaggctagagkgcagaggcgcaatctccgcccactgcaagctctgcctcccgggttcaacgccattctcctacctcagcctcccgagtagctgggactacaggcacccgcc

SEQ ID NO: 171932 - DNA, 201 bp, Homo sapiens
tgggattgctgttggtggttttctgtgctacttgagaaagtaagtctgtatgtgtgaaactcttttttttttttttttttgagacagagtttcgctctgtygcccaggctagagtgcagaggcgcaatctccgcccactgcaagctctgcctcccgggttcaacgccattctcctacctcagcctcccgagtagctgggac

SEQ ID NO: 171933 - DNA, 201 bp, Homo sapiens
atttttatgtgcagttaaagtcatagaaacctgttttgtgaaacctcagatttctaaagaaaaccagaagcaagaccttccttggtttaaaaaaaaaaaaagcatttcttcaagcagtttggacctgtttttcgtgtgtataaaacagctttttaaatgtctatgtaaagagcattgggattgctgttggtggttttctgt

SEQ ID NO: 171934 - DNA, 201 bp, Homo sapiens
agggttgaggactgcggtggggctatgcagccttgggccatggcgttgggggcatgaaaaccaggagcttgaaataaattcttatggaggcttttttttttctttttttttttttttttggaattcgtggtgggaggtttttttagaacaggaaaatggaagagaatacattctgttagcagagagggaagactgataagc

SEQ ID NO: 171935 - DNA, 201 bp, Homo sapiens
tgttgttctgtgacagattcaataaatatgagcgtcatccacttaacccttggaattaactctacatcttctagaactgattaagattttttttttttttkcatatactcaataaagatgatgtcctcctgctgctgctttaatgataaagggaaagtttcatttttttttttttttactagattcacttaagaagatttg

SEQ ID NO: 171936 - DNA, 201 bp, Homo sapiens
cagggtatgtccacagcttcctctgatagaggagtgaccaggaagcagtttgttttctcattctcatctcttggcagctttcgtcctcttccaagggctcmagccaaggagataatctgttcctgtgcattaagcagttcagccttaactagtttaattgattagctcaaccagtcagtgagtagagatctagccccactg

SEQ ID NO: 171937 - DNA, 201 bp, Homo sapiens
cagggccagggagcagcagtacttccagaggaccttggcaggaactgtgcccggctgctgctggaggaaatctacagggtatgtccacagcttcctctgayagaggagtgaccaggaagcagtttgttttctcattctcatctcttggcagctttcgtcctcttccaagggctcaagccaaggagataatctgttcctgtg

SEQ ID NO: 171938 - DNA, 201 bp, Homo sapiens
ctaactttgctttttctaactgttccaaaggctacaaataccccaaacttgcaaatacacaggcctgcacacttgagcctgtgttcctcccatccttctcyaagagatcagaagcaagctgagggcccgtagaaattctgccagctggggagggtgtctggtttttcaagcacagttgagtgattcagagtgaagtaggct

SEQ ID NO: 171939 - DNA, 201 bp, Homo sapiens
ggttgccgccagctggaagctttgcccacagatgtggactgtttatctgtggtttgctgtgttttcttttttccctaggacaggatgggggagatggtggratggatagaaagcaacaacgacaacagaaatttaattggttagtaagacaggaaagccagcagggaaagctgacttcccttaattgccaagaatgttgaa

SEQ ID NO: 171940 - DNA, 201 bp, Homo sapiens
gacaccggctgttcctgtcgccatgatttctcggctgccctcacacttgtccttgggtgtggataaagaaatttttaaaattctgtgtttgttttcagccktgactgtgattgatgtgcgcaggacaggagctttgagatagacttttaacagtcatgggcctaattgccttgactttagaaaaggggtcggtgacaatcg

SEQ ID NO: 171941 - DNA, 201 bp, Homo sapiens
atagaaagcaacaacgacaacagaaatttaattggttagtaagacaggaaagccagcagggaaagctgacttcccttaattgccaagaatgttgaaaattktttctcaaaattaccccaactcctaaattctatccagtgcctctttactgagaacctttacagtgccttgtttgaataacgggttcagtgatggagaaga

SEQ ID NO: 171942 - DNA, 201 bp, Homo sapiens
ggcacagttttattacaaatgtatattgcttttgttatttactttgagatttagaggttaatcactccaggaggcagatgaaccaaaacttaggatcatcraattcaggactattgttaacagttaccaaggtgccttttgttgttacctaagaaccttcaaaacagatgctctccgtctcatcatagttgacatgaacta

SEQ ID NO: 171943 - DNA, 201 bp, Homo sapiens
attgccaagaatgttgaaaattttttctcaaaattaccccaactcctaaattctatccagtgcctctttactgagaacctttacagtgccttgtttgaatracgggttcagtgatggagaagagcctctttactgaggctaaattctattcagtgcctctttactgagaaccttatacagtaccttgtttgaataacgggt

SEQ ID NO: 171944 - DNA, 201 bp, Homo sapiens
gtgttgttctgtgacagattcaataaatatgagcgtcatccacttaacccttggaattaactctacatcttctagaactgattaagatttttttttttttkgcatatactcaataaagatgatgtcctcctgctgctgctttaatgataaagggaaagtttcatttttttttttttttactagattcacttaagaagattt

SEQ ID NO: 171945 - DNA, 201 bp, Homo sapiens
gattttttttcttcacagattttgaagccagcttcataaggctattggacaaaataacgaatggttctcgaattgaaataaaccaaacaggtaagctcctyttagattcctaaaagcacctccatgcactaaagcattcctgtttctcactcttttttttctttcctttttttttctagtcagtctctgcttatccaaatc

SEQ ID NO: 171946 - DNA, 201 bp, Homo sapiens
ctatggaaacctggaggggtgggaaagatcgtttggggtagggtttatgggctaggaaagacttcatagaaaagttgacaaatgggatgttattttaaagrtcgagatgaagttgcacattcctaggtggaaggaaagcaaggaattgggggatttttctatgagcatccagcactgaccagaactcctgccctctagggt

SEQ ID NO: 171947 - DNA, 201 bp, Homo sapiens
tttctccatgttggtcaggctggtctcgaactcctgacctcaggtgttccacccgcctcggcctcccaaagtgctgggattacagacgtgagccactgtgsctggcaattttttttctttagttgagatctactttcagtcttccattgtgcctggaccaaatttctttcgttttcttttagttattcagaaaacttcctt

SEQ ID NO: 171948 - DNA, 201 bp, Homo sapiens
ctccaggctgggtgtggtggctcacacctgttatcccagcactttgggaggctgaggtggcagattacaagttcaagagattgagaccatcctggccaacrtggtgaaaccccgtctctactaaaaatacaaaaattagctgggcgtggtggcacatgcctgtagtcccagctactcaggaggctgaggcaggagaatcgc

SEQ ID NO: 171949 - DNA, 201 bp, Homo sapiens
tttagctctcccacttttttttttttttttttcagtgagtcttactctgttgcccaggtgggagtgcagtggtgcaatcatagctcgagtagctaggactrcaggctcctgccatcatgcctggctaattttaaaacaatttttttgtagagatgggggtcgtaatagactggtcttgaattccaggccccaagcaatttg

SEQ ID NO: 171950 - DNA, 201 bp, Homo sapiens
tttctagcccagtgccctttgtacaaattgcagaatccattatgacaagagttatgggacagtgttatgtaacagactaggtagatgggaattgcttagtkgatccactcaccctttgggatcagtttaggtgactactggactgtgtccataaactctgctggtttattacaggagtgggaattgtctaaaagtgtcagg

SEQ ID NO: 171951 - DNA, 201 bp, Homo sapiens
ttgggaggccgaggcgggcagatcatgaggtcaggagatcgagaccagcctggctaacacagtgaaaccccgtctctactaaaaatacaaaaaattagccrggcatggtggcgggcgcctgtagtgccagctactcgggagactgaggcaggagaatggcgtgaacctgggaggcagagcttgcagtgagccgagatcggg

SEQ ID NO: 171952 - DNA, 201 bp, Homo sapiens
ggactacaggctcctgccatcatgcctggctaattttaaaacaatttttttgtagagatgggggtcgtaatagactggtcttgaattccaggccccaagcratttgcctgccttggcctcccaaactgttgggattacaggtgtgaggtaccatgcctgtactctcccatcgtttaattaggttatttgtctttttattat

SEQ ID NO: 171953 - DNA, 201 bp, Homo sapiens
ggtgtgaggtaccatgcctgtactctcccatcgtttaattaggttatttgtctttttattattgagttgtaagagttgtttatatagttgagatgcctgasctttatcagatatatgacttgcagatcttttctccaatcctgtaggttgtttttttactttcttgatggtgcactttgatgcacaaagtattttaatttt

SEQ ID NO: 171954 - DNA, 201 bp, Homo sapiens
ctctactaaaaatagctggacatggtggcacgtgcctgtagtcctagctactcgggagggtgaggcaggagaattggttgaaccctggaggcggaggttgyagtgagctgaggtcttgccagtgcactccagcctgggcaacgcagcaagactctgtctcaaaaaaaaaaaaaaaaagaaaaagaaattgaaatcacatta

SEQ ID NO: 171955 - DNA, 201 bp, Homo sapiens
catttgttgcaatgattatgctttcctcattgaggaaattagccataactgtgtggtttatttcttgactctcaattctcttccattgatctatgtgtttmgcgtcagtgtttttaaagctccttaggttattccatgtgcagtcgagattgagaaccatctggccagagtggagagtttggctggtttgattgggagaca

SEQ ID NO: 171956 - DNA, 201 bp, Homo sapiens
ggctaggtggctcacgcctgtaatcccagcactttgggaggctgaggcaggcggatcacgaggtcaggagatcaagaccatcctgtccagcatggtgaaascctgtctctactaaaaatagctggacatggtggcacgtgcctgtagtcctagctactcgggagggtgaggcaggagaattggttgaaccctggaggcgga

SEQ ID NO: 171957 - DNA, 201 bp, Homo sapiens
gaaatccggccgggctaggtggctcacgcctgtaatcccagcactttgggaggctgaggcaggcggatcacgaggtcaggagatcaagaccatcctgtccrgcatggtgaaagcctgtctctactaaaaatagctggacatggtggcacgtgcctgtagtcctagctactcgggagggtgaggcaggagaattggttgaac

SEQ ID NO: 171958 - DNA, 201 bp, Homo sapiens
ggagtgcagtggtgtgatctcgcctcattgccacctccacctcctgggctcaagtgatcctcctatttcagcctcccaagtagctgggactataggtgtgygccattatgcctggctaatttttgtattttttgtagagacagggtttcgccatgttgcccaggctggtctcggatctcctgagctcaagtgatccacctg

SEQ ID NO: 171959 - DNA, 201 bp, Homo sapiens
gcaatggcatgatctcagctcaccacaaccttcgcctcccgggttcaagtgattctcctgcctcagcctcctgagtagctgggattacaggcatgcacaamcacacctggctaattttgtatttttcgtagagacagggtttctccgtgttggtcaggttggcctcaaactcctgacctcaggtgatccgcctgcctgagc

SEQ ID NO: 171960 - DNA, 201 bp, Homo sapiens
acatatgtatgtatgtgtatatccatatctgtttaattcttctaccaacccagtgaggtgggtgtttcagacaaggtaactggagagcaggtttcttcctstcttttttctttttttagcatagattgattacatttttaccttttgattgattgactgcactgtaatggtaatacctttgccctgagctgccacttaggg

SEQ ID NO: 171961 - DNA, 201 bp, Homo sapiens
gtttgcaaaataaacagttctttttttaaagaaattttattttagagtcgggggtacatgtgcatgtttgttacatggatatattgcctactggtggggaytgggcttctggtgtacccattatccaaatagtgaacatcgtacccaataggtaatttttcaatctccctcaatcttcctccttttccagtccccaatgtt

SEQ ID NO: 171962 - DNA, 201 bp, Homo sapiens
ggtgtttcagacaaggtaactggagagcaggtttcttcctctcttttttctttttttagcatagattgattacatttttaccttttgattgattgactgcrctgtaatggtaatacctttgccctgagctgccacttagggtttgatctttgccttttctctctgaccgcagagtggaccgatcactttcccttaagcaga

SEQ ID NO: 171963 - DNA, 201 bp, Homo sapiens
atgtttgttacatggatatattgcctactggtggggactgggcttctggtgtacccattatccaaatagtgaacatcgtacccaataggtaatttttcaayctccctcaatcttcctccttttccagtccccaatgtttgttatttccatgtttaagtccatgtgtatccattgttcagctcccacttataagtaagaaca

SEQ ID NO: 171964 - DNA, 201 bp, Homo sapiens
aaactagaatgtgcaaagctgcaggagactggagagtgttcggcccagcctctcattttacgaaggaggaaactgaggcccaggagacagggaattgtctmgggtctaacagccagtgagaggcagagtaggtcccaagccctcatctgcttttcctgcccttgtcccaccgcaccaagttgcctgtcttccatgtcatat

SEQ ID NO: 171965 - DNA, 201 bp, Homo sapiens
tagctggaactacagatgtgtaccacagcatctagttgatttttaaaattttttttgtagagatggggtgttgtctatgttgccgaggctggtcttgaackcctggactcaagcagtcgtcctgcctcagccttccaaattgctgggattacaggcatgaataaccatgcccagcctgatttcattcttttttatggctgt

SEQ ID NO: 171966 - DNA, 201 bp, Homo sapiens
gtaacttggagatggctgggcttgagccccttgccttagagataaggaaattcagatagttgtgattttcttgtctgaggcaacatagctaattagaagcrgagctgggaccaggactagggcttttcctatgccttctgtgtggtgcctgccctccctgccagctgacagatccaagaagggaacaagtaatggagtaat

SEQ ID NO: 171967 - DNA, 201 bp, Homo sapiens
agatacagaacatttctgtcactccaaggattcttcatgtctgttgctcttttgtagccacactcagtttcctccttcccccacttcttccttaacccttstcagtctctaatctgttctttaatttctgtaattttgtcatttgaagactgctccataaatggaatcatatagtatgtaacctttggattggcttttttc

SEQ ID NO: 171968 - DNA, 201 bp, Homo sapiens
gaagggaacaagtaatggagtaattttctttcccatgtagcagttgaggcaacatttgccaactcgttagataacagtacctgatttgaatgccatctttmtactcttatcaggaatccacaaatggatcagaaagaccccagacttcctgggagctctgaatgcaggaggagataacagttacacgtggcaaagtcttgc

SEQ ID NO: 171969 - DNA, 201 bp, Homo sapiens
aattggagtgatagtagatccaatcacagatcccaactgttctttgatttttatcttttggattcctaatttttcttgattattcactcacaagttgactsagttcagcacttgaccatgattgtagtgcttcccaggtggcctcctcttctcactggggaggcagtgtgaaaggtaaaaaaaaaaaagctactgaattct

SEQ ID NO: 171970 - DNA, 201 bp, Homo sapiens
agatccaatcacagatcccaactgttctttgatttttatcttttggattcctaatttttcttgattattcactcacaagttgactgagttcagcacttgaycatgattgtagtgcttcccaggtggcctcctcttctcactggggaggcagtgtgaaaggtaaaaaaaaaaaagctactgaattctcttctggcggcgtgg

SEQ ID NO: 171971 - DNA, 201 bp, Homo sapiens
tgggcattgctgaaagcggggcctgtgcccaggtgggcctctatgggccagacgttggaggcctgcggctgtagggtgcccccactgctgagtgggtgccrgcacggctgcctttgctcacactgaagaccaaagagctgccgaactcgttcccaggggcactccttgacgctgtccacatggaacttgcctgccagcctg

SEQ ID NO: 171972 - DNA, 201 bp, Homo sapiens
ttgcccagagtaaacgtcctgtaatgcttccctaatgttttcttctagtagtttcatagtattggatcttacatttaagtctttaagttcattttttttttaatatgatgagagtaggcatctagttcctttcttctgcatatggctatagttttcccaggaccattatgtatatttttaaattttagaaatagagacgag

SEQ ID NO: 171973 - DNA, 201 bp, Homo sapiens
ttggagtccagcctatctggacttaaggctctaccacgcgctaccaggagaccgtggaaatggtatttagcatcttggagccttggtgtcatttgtagatraggtgcgtggtcctgaagtcctggacttgtggagatggaacgaagcttagattaagtcagatgcttagtgctcctggcaacgtgcctgaggagctgtcag

SEQ ID NO: 171974 - DNA, 201 bp, Homo sapiens
gtgtgagcgtgtgttgagttgtgttaaagggggcaggtctgtgttgtggttgcatacggattgtactgctgggaaggccgccacacctttcctgttgatgygtctacttaacagtcattgggaaagtagaattgagctgtcaaatcttaaaattttgtggagagatgcttgtttttggactgattttcttttctggtcagc

SEQ ID NO: 171975 - DNA, 201 bp, Homo sapiens
tttttaatgtgccacaatttagttttgatgaaaatttggcttgtttccacttttaactattaaaaacagtgataccaagaatattcttgtacagtcttttgtgcacatatatgtgtatgtctcttgcctgaatgctggatcgtagggtgtgcctatgtttagttttcccaagtggttgtacaaagtgactgtaaatatatc

SEQ ID NO: 171976 - DNA, 201 bp, Homo sapiens
gtgaaggggagggaaacagcggcttgtggggaccactctttacagaaccttgacaggaaagagaaggagaaggaaggatgagggagtaacttgatgaagcragagtcagggagactccctcccttttacaaaaagattggtaaggatttgagtgtttttgtaggttgttaatgtagatgaagcaaagtaatgagctgatta

SEQ ID NO: 171977 - DNA, 201 bp, Homo sapiens
gccagggattcttgttaacaacatagatttctggcctctatgaactggggagtacagggcctggtggagggtagggagggatcagctttgtgtgtggactrtgattctgggctcttccatatggacatttcctaccagttgcaagttcaccataaccttcaggaacctgtgtatttaatgaactgttcaggtgagtcttat

SEQ ID NO: 171978 - DNA, 201 bp, Homo sapiens
tggactgatgccatcgccctgtgatgccattgtccttgttgtgtttactgtgcacacttccccggccaccttatttaatattgccttctgccaaatatgtrcaaatactgtcatacccacagttcttccccgtctgtgttgtttgctttgtttacattacatagcacttttcaggaataaaattaatttatttatctagtc

SEQ ID NO: 171979 - DNA, 201 bp, Homo sapiens; identical to SEQ ID NO: 30986

SEQ ID NO: 171980 - DNA, 201 bp, Homo sapiens; identical to SEQ ID NO: 30987

SEQ ID NO: 171981 - DNA, 201 bp, Homo sapiens
gaagaggggatagaaagattagaaatgaagcctccagcctgggcaatgtggtgagaccccatctctacagaaaacaaacaaaacaataagcaaaacaaaamaaacaaacaaaaccaaaaactttggttggtgaggtgggacctgtagtcccagctacttgaggaggctgaggcaggaggatcacttgagcctaggagttcc

SEQ ID NO: 171982 - DNA, 201 bp, Homo sapiens; identical to SEQ ID NO: 30982

SEQ ID NO: 171983 - DNA, 201 bp, Homo sapiens
tgtgtaccaccacacttgggtaatttttttctttttctttttcctttttcctttttttttttttaagagttagggttcactgttttgtccaggctggtctmggaactcctgggctcaagcagtcctcctgtcttggcctcccaaagcgtcagaattacaggtgttgagccactgcatctgaccaaaatgttaaagacataa

SEQ ID NO: 171984 - DNA, 201 bp, Homo sapiens
cactgcaccctcccactcccgggttcaggcgattctcccacctcagcctcccgagtagctgggattacaggcacccaccaccatgcccagataatttttgyatttttagtagagacggggtttcggcacgttggccaggctggtctcgaactcctgatcttaggtgatccacccacctcagcctcccaaagtgctgggatt

SEQ ID NO: 171985 - DNA, 201 bp, Homo sapiens; identical to SEQ ID NO: 30989

SEQ ID NO: 171986 - DNA, 201 bp, Homo sapiens
tatggtgtctagctctgttgcccaggctggagtgcagtggcacgatcttggctcactgcaccctcccactcccgggttcaggcgattctcccacctcagcytcccgagtagctgggattacaggcacccaccaccatgcccagataatttttgtatttttagtagagacggggtttcggcacgttggccaggctggtctcg

SEQ ID NO: 171987 - DNA, 201 bp, Homo sapiens
atggatggctgcggggctccaagtaagttattgggatgtttttatattccaggtgtgctgtacattcttattttattttcacaatagctctgtgatgtaartgctatctccatgagaaaattcataaagggtgttttgttcctttgaaatgtataatgtaaagacattaaatctcctcatttaaggatctaagtgtaataa

SEQ ID NO: 171988 - DNA, 201 bp, Homo sapiens
acttcatcccttaagactgcctcctgcaaacacagttttgagaaagaacccaggcaagagcctgcccagcaagaatatgcaggaataccaggatccatggyagatttcccctgccagctaatagagtctgcatttgatatgtgcataggcttgaagtttgtagaaggggaaagatgtacttctttctacttgaattccaaa

SEQ ID NO: 171989 - DNA, 201 bp, Homo sapiens
gcctggggcgttgaggcttcagtgagccatgatcatgccactgcactccagcctgggtgaccgagtgagatcctgtctcaaaaaaaaaaaaaaaaaaaaaaggcggggggaaagaaaaaagaaagaaagaaaagaaagaaaaggaaggaaggaaggaaggacgggagggagggaggggaaagaaagaagaaaaaattttcc

SEQ ID NO: 171990 - DNA, 201 bp, Homo sapiens
ggcctggggcgttgaggcttcagtgagccatgatcatgccactgcactccagcctgggtgaccgagtgagatcctgtctcaaaaaaaaaaaaaaaaaaaaaaggcggggggaaagaaaaaagaaagaaagaaaagaaagaaaaggaaggaaggaaggaaggacgggagggagggaggggaaagaaagaagaaaaaattttc

SEQ ID NO: 171991 - DNA, 201 bp, Homo sapiens
tggtccatgaggtcatgggactcctcccatggaatgtggcattgctaccactgaaagctacgccaactcagccgctctcccaagtctgtcaccaggtcatrgggtggctgggaagcaccaggggaagtcgctttatgtggagagcacctccaactgccggacggtgtcttctgcttcccgttgggtggaatgcaacatgga

SEQ ID NO: 171992 - DNA, 201 bp, Homo sapiens
cctgtgtggtgtctgttctgggcttaggttcttaagagagagactcattggctacagcagtgggaatggacagagaatagaaagtgttcttaggtgttgtrcttcagagggagcctggatcatgacccgcagagaggcaggtgtctttacaccttccaaaattgacttgaaccatttctaggggaagcgtgtgggtaggaa

SEQ ID NO: 171993 - DNA, 201 bp, Homo sapiens
aagggtctggttcctagccttggggaattaaaacctttatctattaatacacaatgctttaggctttaaattccatctgcactctgttccaacaaaaaaawtaaagtggacaggttcttccaccctgagtaaataacagtatagggttaaaatcttttgttatctaagtgtaagtcagcatctctcttcatcagtggaaac

SEQ ID NO: 171994 - DNA, 201 bp, Homo sapiens
ggaggtggaggttgcagtgagccgagattgcaccactgcactccagtgtgggcaaaagagcaagagaggaagacatcatctcaaaaaaaaaaaaaaaaaaagaaagaaagaaagaaagaaagaaagaaattcattgtaatgaattgtaattcaaataatgacaaaaaccacgattatttttgtaccagcctaatataacca

SEQ ID NO: 171995 - DNA, 201 bp, Homo sapiens
ggagacagctttaaaaaaaagttttatatacaaaagtttttagaaaactaaactcttatagaaatagacaatcagcagggtaagtaggtcaagtggccagsctgtactctctttgactcatcagttccctcatgctatgggcacagggacagtgggcaggtagctggtcaggtgactggcagtggtgggtgtagctgaggg

SEQ ID NO: 171996 - DNA, 201 bp, Homo sapiens
gtcatttccttggaatttattttctgtgtagctggtcatgttgtctacaaatagtaacagtttgatttcttcatttttgatatgtacgccttttatttccytctgccttattgcactggctagaatttctagcaccatgttaagtaaaatgggtgggagggaacatccttgccttgttccctatcttagggggaaagcatc

SEQ ID NO: 171997 - DNA, 201 bp, Homo sapiens
tctttttaaacaatgaatgagtgttgtattttgtccaatgctttttctgcaccagttgatgtgaccatgtgatttttcttcttcagcctataaatatggtrtattgccttgattgatatttaaatattgaaccagccttgcattcctggaatagattctacttgatctacacacacacacacacacacacacacacacaca

SEQ ID NO: 171998 - DNA, 201 bp, Homo sapiens
acagggtttctccgtgttggtcaggttggcctcaaactcctgacctcaggtgatccgcctgcctgagcctcccaaaatgctgggattacaggcgtgagccmccgcgcctggcagctatgggtcatttataagtctgttgtttagtttccatgtgtttggatattttctgctattgattttaatttcattccattacggtca

SEQ ID NO: 171999 - DNA, 201 bp, Homo sapiens
agagttcaggtataaaaaacttgaaaggcagtaaaagcagcataaatcagaggattaggttgcccttgattgtgaaaattatcacaatcaagggtaatgtrgattctcatataagcaaagcatgatatctagaaaagtttgaagatagagggcaaagaagtttttgatttcatttttatattataaaagtaatacatgttt

SEQ ID NO: 172000 - DNA, 201 bp, Homo sapiens
tcaggtataaaaaacttgaaaggcagtaaaagcagcataaatcagaggattaggttgcccttgattgtgaaaattatcacaatcaagggtaatgtggattytcatataagcaaagcatgatatctagaaaagtttgaagatagagggcaaagaagtttttgatttcatttttatattataaaagtaatacatgtttgtttg

SEQ ID NO: 172001 - DNA, 201 bp, Homo sapiens
gcagcataaatcagaggattaggttgcccttgattgtgaaaattatcacaatcaagggtaatgtggattctcatataagcaaagcatgatatctagaaaartttgaagatagagggcaaagaagtttttgatttcatttttatattataaaagtaatacatgtttgtttgggggaacaactcttaatgatttaaaactgaa

SEQ ID NO: 172002 - DNA, 201 bp, Homo sapiens
agagcgagattccactcaaaaaaaaaaaaaaaaaaaaaaaaaagtagggttctccatttgttttctacaacagtccagtctctccatgctttttgcatgaygcctctgatgcacacgatgactgtaaggtaggtgttggtctccatgtcatgagtgaggaaagtgcggctcagagaagcccagtggcctgtgaaatcacag

SEQ ID NO: 172003 - DNA, 201 bp, Homo sapiens
aaaaaaaaaaaaaaaaaaaagtagggttctccatttgttttctacaacagtccagtctctccatgctttttgcatgacgcctctgatgcacacgatgactktaaggtaggtgttggtctccatgtcatgagtgaggaaagtgcggctcagagaagcccagtggcctgtgaaatcacagtgttcctcaggcagagccagccc

SEQ ID NO: 172004 - DNA, 201 bp, Homo sapiens
ccatttgttttctacaacagtccagtctctccatgctttttgcatgacgcctctgatgcacacgatgactgtaaggtaggtgttggtctccatgtcatgartgaggaaagtgcggctcagagaagcccagtggcctgtgaaatcacagtgttcctcaggcagagccagcccactcgctcagttatatgccagcatcctttc

SEQ ID NO: 172005 - DNA, 201 bp, Homo sapiens
tatttaataatgttttggtagatccgttatttgcatgggaggagaaaaaggggtttctgattattaagaaatgggctcagatgatggactaggtcagctcyatattttaaggataaagaagtgacctgttcagggttaaagagatgagtggcagagccacttgggtaatcgacttggactttgacacatgctgcgcaggta

SEQ ID NO: 172006 - DNA, 201 bp, Homo sapiens
cagctccatattttaaggataaagaagtgacctgttcagggttaaagagatgagtggcagagccacttgggtaatcgacttggactttgacacatgctgcrcaggtactctctaggagccaacataaggtgctgttggtcttgaagggaatgacagattgaatatggaagagctgtgccttgtaaggaagcatctgctggt

SEQ ID NO: 172007 - DNA, 201 bp, Homo sapiens
gcctgcggctgtagggtgcccccactgctgagtgggtgccggcacggctgcctttgctcacactgaagaccaaagagctgccgaactcgttcccaggggcrctccttgacgctgtccacatggaacttgcctgccagcctgccggctgcggtggaacttacacgggttaagttctgggcgcgggagccctgccgtccagtc

SEQ ID NO: 172008 - DNA, 201 bp, Homo sapiens
tcgacttggactttgacacatgctgcgcaggtactctctaggagccaacataaggtgctgttggtcttgaagggaatgacagattgaatatggaagagctrtgccttgtaaggaagcatctgctggtgtaaaccttcctgggcagggtgtcagggtaatccattgctttgctgcatcctcgcctcatctttctcactctct

SEQ ID NO: 172009 - DNA, 201 bp, Homo sapiens
ccatttgttaggttacaaaacaagtcttaaaacattctgaaaaaaactgaaataacatcaagcattttctctgaccacaatgccatataactagaaatcartaatgaggaattttggaaacacatggaaataaaacagtatgctcctgaatgaccagtgggtcagtgaggaagttaagaaatagaaaattttcttgaaaca

SEQ ID NO: 172010 - DNA, 201 bp, Homo sapiens
ttttttttgttgttgttgcctcactaagataagaatgactaacagctttacttcttcccgaggttatttacattttagactacaactttgaaaagtcttarcagtgaaattgtaattgctggctgagttaggatgttctgttatctgcctcaccatgactagattgattgagtcattcttttttttttttttttttaattt

SEQ ID NO: 172011 - DNA, 201 bp, Homo sapiens
ccggttaacatttaggcaaatggctctgatgtatgtgatcctctctcaagggctttggtttgggggccatgaatatactgcagttcctccctcagaagacrtcatcattcggtgaaggaaccaaatatgaaaacacacagttctgatataacatgcaaaatgatatgtgcagtggggtgggggcctggagtagacagtggt

SEQ ID NO: 172012 - DNA, 201 bp, Homo sapiens
gtgcacagtggttctagggagtggcaagtaatgaagtgtggccagatttcaggttggtctatggcatttgatggtagaatggggcatgaagacaggcaggrgccagtgaagagctgaaggtggctggaatcagatactatgcagaacgcaaagaaaggagggtggaaccctgtgaggccaccaaaacttgaaagcaagagt

SEQ ID NO: 172013 - DNA, 201 bp, Homo sapiens
actgaaagctacgccaactcagccgctctcccaagtctgtcaccaggtcatagggtggctgggaagcaccaggggaagtcgctttatgtggagagcacctycaactgccggacggtgtcttctgcttcccgttgggtggaatgcaacatggagagagactggaacagtgggtcactgacagccatgtcagacttgctaggt

SEQ ID NO: 172014 - DNA, 201 bp, Homo sapiens
atataagatcatgttgtctgcaaacgggaacagcttaacttcctccttcccgatttggatgccctttatttctgtgtcttgcctaattgctttggctaggmtaggacttccagtactatgttcagtaggagtggtgatagtaggcatccttgagttgttccagatcttagaggaaaagctttaaaatttcccccatttgat

SEQ ID NO: 172015 - DNA, 201 bp, Homo sapiens
ttttcacctatttcatttggcaggctttctgtgcttccttttttctcctcctggaactttcataacatgaacatttgtttgcttaatgatttcctgtaagwcttgtaggtgttctcatttcattttcattctcatttcttatttctttgagtaggtaattttgaaagacttatcttcaagttcagagatttgtgtcttatg

SEQ ID NO: 172016 - DNA, 201 bp, Homo sapiens
ggagtggctccatcttcatttggcaccatgctgaaaggtacagtagccgcttaaagctcggcttgaggatgttgggccactggtctagggtgtatcctcasgggaaaaggggggtttttgctgcttgctcctggagcaagacacactccagccatagttctaattccaggatagtgtagcgcaggccacagggagctgggc

SEQ ID NO: 172017 - DNA, 201 bp, Homo sapiens
atagctttctatcttaattccaaatatattggtaactaatggagaatcgtttaccataaagctcttaatctttttaattaattatatgttttttatttttdattttattgagtcctatcttatttccttttacaaataagtaaagtggtcgatttatgttgtatgttctcagttaattagcttgatttttttttaaccttt

SEQ ID NO: 172018 - DNA, 201 bp, Homo sapiens
aacagtattttcctcatttatgcattgagggtgatgatgcctatgttttggggttattgtaaagatcacacatataagccattaataccttgcttgtcacrtggtaagtcctacagaaatggtagctcctgatgctgttctttcctttactctcccttgttggccacaggtctggaattatgtgtcagctattttctggag

SEQ ID NO: 172019 - DNA, 201 bp, Homo sapiens
tacaggtgtaagccacggcgcccagccagctcttgcattcttgattggggtatttgtgagaagccaagtggttgtcaagaatctaggtggaaaatccagastcatgtctaaccctggccccagccctacagcattgaacacccccgcacatgagcttcggatcagtggccatcagcccaactgactctctgccatcttccc

SEQ ID NO: 172020 - DNA, 201 bp, Homo sapiens
tcaggccaggagttcaagaattgaactctctcccatctctgctttctgttgtgttgtcttccttctccagcaggcattctttttcatatgctgttttttttgacaacccttaagtactggatagagattctctacccaatactgaatcctagctgtgtcagtagcattgggctgggcctccatccttctgacccttagtac

SEQ ID NO: 172021 - DNA, 201 bp, Homo sapiens
gactggtggtagagcgaaagattaggtttcatgagtccagagatacaacaggaatgtagaagtcagtttaacttgggtgagccctaaggctttgaattgartagaacatagttgcaaataagaaattgactcaaacagcaggatttataggctttttaaactgagaagtttagtagcgcatttagcttcaggtaaagctgg

SEQ ID NO: 172022 - DNA, 201 bp, Homo sapiens
ccactattctatcctctacttgctatgggatcaacttttttagcttccacaagatatgtggtatttatctttctgtgtctggcttatcttacttaacatartgttctacaaaagcctcttcatgttgctgccagtgacagaatttcgttcttttttatagctaaacagtattccgttatgtatgtgtttgtgaatagtggt

SEQ ID NO: 172023 - DNA, 201 bp, Homo sapiens
ctcttgctttgttcttttttctcagaattgctttggctgttaaaggtcttttgcgggtccatatgaatattaggtttttttttctgtttctgtaaataatstcattggtattttgatagggattgcattgaatctgtagataaagatggaatgtgtttccattttttttgtgtgtgtcctaaagttttccttttagagagc

SEQ ID NO: 172024 - DNA, 201 bp, Homo sapiens
aacactgcatgttctcactcataggtgggaattgaacaatgagaacacttggacacagagtggggaacttcacacaccggggcctgtcatggggtgggggraatgacgagttaatgggtgcagcacaccagcatggcacacttatacatatataaccagcacgttgtgcacatgtaccctagaacttaaagtataatttaa

SEQ ID NO: 172025 - DNA, 201 bp, Homo sapiens
ttgtgttgaggtgtgttctttctatacctaacgtaagagtttttatcatgagggggttttgaaatttaaaaaaattttttttagagatagggtctgacttygttgcccacgctgaagtgcagtgatacaagcatagtttactgcaaccttgaactcctgggctcaagcaatctttccggcctggtctccctacaggtgttt

SEQ ID NO: 172026 - DNA, 201 bp, Homo sapiens
ggcttttgtattttttgtagagatggcggtctcgctttgttgcccaggctggtcgccaactcctgggcatgatcatcctcctgccttggcttcccaaagtkttgggattctaggcatgagccacagtacttagcctcctgtccttataaaaattgttttctggttgattcgtgtctcctttttttcttcccgtcttattgt

SEQ ID NO: 172027 - DNA, 201 bp, Homo sapiens
cccagctaattaaaaaaaaattttttagagatgttgtccaggctggagtttttgtgtttttgtttttgtttttccaatttaattttaagttctgggatacmtgtgcaggacgtgcaggtttgttacatagataaacatgtgccatggtggtttcctgcacccatccacccatcacctaggtattaagcccagggtgcatta

SEQ ID NO: 172028 - DNA, 201 bp, Homo sapiens
gggattctaggcatgagccacagtacttagcctcctgtccttataaaaattgttttctggttgattcgtgtctcctttttttcttcccgtcttattgtttrtcattgcagtttgatggttttctatagtgataaggtttgatttttttctctttgtcctttgtgtatttgttctaccagtgagttttatactttcatgttt

SEQ ID NO: 172029 - DNA, 201 bp, Homo sapiens
ttgttacatagataaacatgtgccatggtggtttcctgcacccatccacccatcacctaggtattaagcccagggtgcattagctatttatcctgatgctytcccttctgggttttctttattttaaaaaatcatttccaaaaaagtggtaaaggatagctaatcacagacccaaattataaaaacaaaaattcaagttgt

SEQ ID NO: 172030 - DNA, 201 bp, Homo sapiens
aatttcctcagtttttgcttgtctgggaaagacttcatttctgaaggatagcttttttgggtatagtgtttttggttgacgttttttttttctttcagcaktttgaatatatcatcttattctctcatggtctataaggtttctctggagaaatctgtttttagtgtaatggggatttccttgtattaacttgatgccttt

SEQ ID NO: 172031 - DNA, 201 bp, Homo sapiens
gttctgttggccttcccagttggtagtgtcagacctggggtgtacaggtggcaattttagtctgtgatgagtgggaatgcagcactgcagggcctgtgccyacccaggatctccattgtcccttactccagagtggacgagaagtagttggcacttgggtttccatgttcagatggtgctggcctgttctttagaagtgac

SEQ ID NO: 172032 - DNA, 201 bp, Homo sapiens
aagacttcatttctgaaggatagcttttttgggtatagtgtttttggttgacgttttttttttctttcagcattttgaatatatcatcttattctctcatsgtctataaggtttctctggagaaatctgtttttagtgtaatggggatttccttgtattaacttgatgcctttttctcttgctgtttttagaattctcttt

SEQ ID NO: 172033 - DNA, 201 bp, Homo sapiens
cagaggccaacttaaagacaaaagataatgaacgagcctggctaaaagatatgtgcctccgtgtgtctgttccctgaataccctgttactatggctgcgayagagcacttgggctgctgccggactccctgggggccatctaggcaactggtctccgtcttgggagaaaatgatgccccaaaggtaaggtcggctgctgct

SEQ ID NO: 172034 - DNA, 201 bp, Homo sapiens
ggatttgagtgtttttgtaggttgttaatgtagatgaagcaaagtaatgagctgattaaaagcccaggtgctggagtcagaaagacgtgggtgccgacgcyggctgcgccacttaccaatggaagcatttggccgtaagccttggttgcccgtatatctttagtcctgttataactgctgtgcgagactgtcatgaaggta

SEQ ID NO: 172035 - DNA, 201 bp, Homo sapiens
ccaacttaaagacaaaagataatgaacgagcctggctaaaagatatgtgcctccgtgtgtctgttccctgaataccctgttactatggctgcgatagagcrcttgggctgctgccggactccctgggggccatctaggcaactggtctccgtcttgggagaaaatgatgccccaaaggtaaggtcggctgctgcttcctgc

SEQ ID NO: 172036 - DNA, 201 bp, Homo sapiens
acttaccaatggaagcatttggccgtaagccttggttgcccgtatatctttagtcctgttataactgctgtgcgagactgtcatgaaggtaaaatgagatsgtagttgcacagtaggaggcactggtgtgtaagtagcattgggtaaatggttactactattctttttattcttacttgagaggggatggattcaaggcca

SEQ ID NO: 172037 - DNA, 201 bp, Homo sapiens
tggtcctaagctctgttttgaccaccctgctattttacccattcattagacaatgaaaggcatcgtgcctaagatctataagctttgaaggacctatgaartgcttgcaagaaaccaggaaaaataatcctggctgcaaatcatgcaaagaaaagagcaagaaaaatatctacaaaataaaacactgtacagcttaatttt

SEQ ID NO: 172038 - DNA, 201 bp, Homo sapiens
agtgctggttaagatagaagctcaaacttgggttgctgcctgaagttctttttaaggatcatcaaaaccacaggaatacataataacaaagccttcctggrttatggtctgttctctgcatggctgtcccccagcccatgtaagcgcccagccttgtgtgtaccaggagagaacaggcaaaaggagaaatggttcctttcc

SEQ ID NO: 172039 - DNA, 201 bp, Homo sapiens
taaaattataaatagcttttcagagatttggatagggctacattttttctttctttctttcctttcttaagtttttaaaaaatagagacagggttttgctrtgttctcaaattcctgggctcaaataatctgcccacctcagctgcccaaaatgttaggattactggcatgagctaccacacccggctgagctacatttta

SEQ ID NO: 172040 - DNA, 201 bp, Homo sapiens
tgtttttgaaaccaaatgtgccttttctacttgaattcattcttattaacagatgcattgtattccaccatatatagaacccaaaatcaaatcctgttgayggccattgagttgttttttgcttttcactgttgccaaatacactgcggttaatggctttaaccacaacatttttggcaatggtgaaaaaaagtgtaataa

SEQ ID NO: 172041 - DNA, 201 bp, Homo sapiens
tcccatgggagggctcagactgggagaaagaggcccactctcttgtgtgcatttgtggttttaactgaattacttccaaagtgcatcttttccctcttgcrttctacaagatgacctaccagccagggcccagagggagctggtgttggttcctgccagcagctgtgactacacagtagttaccttttacttaatgccacc

SEQ ID NO: 172042 - DNA, 201 bp, Homo sapiens
gggagccgtgagctctgtgggattatgtgctaggatggtgacatctcttgtgctttcctggggacagtgggcagcctcagacctcagaaggacagcacctrcttggtccaaagggtatgagattcaggactgtttgtctaagctgtctgtggtcaaaagtacattctggactgaagagatggtgatgtaactgggctgtgt

SEQ ID NO: 172043 - DNA, 201 bp, Homo sapiens
cctgtctaccctgagcgggcgccccgtcaaaatccgaaagattcgggccagagacgacaacccgggcctccgaggtaacttggtgtgggcggcgcgcggcrtgggcgcgggggctgaggggagaccgagctgatgccgtgggggcccgcgcggtgttggttgggcggctcggcgtccggcgagcgcgtcggggagggcagg

SEQ ID NO: 172044 - DNA, 201 bp, Homo sapiens
aatttggtcagtttggatgggtggaaggagttgatggtgcagagctgaagatggacacaactgagcaggctgggggctctaacaacaagatatgggaggaycaggagccaccgagagactgtcaccagcatgaggaagattggtcttttagtatgaagttcaggatgggtcaaaaaagggagctagataccagatcaggtc

SEQ ID NO: 172045 - DNA, 201 bp, Homo sapiens
ttttgattttattgagtcctatcttatttccttttacaaataagtaaagtggtcgatttatgttgtatgttctcagttaattagcttgatttttttttaaycttttttttttttcttttttgagacagggtctggctctgtcatccaggccacagtgcagtggctccatcatggctcacttcagcctcaacctcttgggct

SEQ ID NO: 172046 - DNA, 201 bp, Homo sapiens
ctagttctatttagagtttttctattgacaggtggcctccaatttaatatttaatgttccaaagtatgcttctccttctccccctccactgtatgtgagcrtctcttcaaagcatctcacacatatgagctcccgtttcttccaagaacagggcttggccacttggcactttcttgaaagggtgtcagacgctgatacctg

SEQ ID NO: 172047 - DNA, 201 bp, Homo sapiens
gataaatattttgccaaatttgcttcacttgtttgtgggttttgtttgtttttgttttttactgaatcatttcagtgtgaatgggcatcatttcacttcamatctgaggctttgcaggttgtgtctcctaaaaataagaatattagagtctggggttaactgttgtaggttaagaagtcaacttcttcttaagtgatgcca

SEQ ID NO: 172048 - DNA, 201 bp, Homo sapiens
gtaagtcctacagaaatggtagctcctgatgctgttctttcctttactctcccttgttggccacaggtctggaattatgtgtcagctattttctggagaarggggatttccgagggatgggggaggacagatagcagcagaagctgtctaaatggcttcatctcgatagtcccttctctgctttgcctctcgctttatcag

SEQ ID NO: 172049 - DNA, 201 bp, Homo sapiens
gatctatgaaactggaccctggtgccaaaaggttggagagtgctggtttagagaatctttgaattaaacagtgttactagtttgttgtttttttccccagrctttttctttttcataaataagcaaatatatgtacatatatgtacacttgttctttatccgcagaaatggtcactatcaatgtacactatctggtgatgg

SEQ ID NO: 172050 - DNA, 201 bp, Homo sapiens
agaaggacagacttgggctcagatcctggttttgccactttctggtcatatgatcagggcagtctgtttggcattcttgggtctcagtgtcatttgactasggcaatctagttggcattcttggatcctagccttttgtaaaatggcatcttaatccatttcgtgttgctataacaatgtcacaggcacagactgggtaat

SEQ ID NO: 172051 - DNA, 201 bp, Homo sapiens
tgtttggcattcttgggtctcagtgtcatttgactagggcaatctagttggcattcttggatcctagccttttgtaaaatggcatcttaatccatttcgtkttgctataacaatgtcacaggcacagactgggtaatttataaaagaaaagaaatttatcacagttctggaagccaagaaatccaatatcaaggtgctagt

SEQ ID NO: 172052 - DNA, 201 bp, Homo sapiens
ttcttccagtattttctcatgcattaaaaaaagaaggcagtaatactgtacattcaaacacccttttagtaaaataaaaaactgaactggttagatagttkaaatcagtaggatggtagaggatgggaaaagggagggatactttgctgaaaggcagagatagtgatctcttactgtctctgagactgaagggtggtcctc

SEQ ID NO: 172053 - DNA, 201 bp, Homo sapiens
agatcattttaaaaaataccgtgttccgatggaaagacccagttacctctctgtgatatgattttccagagacatacatgaagtctcccaatttgaagggygtacatttgatttaaggaagttagaagactgaaaatttcagcaaagtctctcctctttttttaacaataaatattttatacataatgtttacatgaaact

SEQ ID NO: 172054 - DNA, 201 bp, Homo sapiens
taactgctccccattgataaacatttaggttgtttctagcttttattttttctattagaaacttgtgtctacattgtatggaaaactgtggcaaacatcckttggctgactccattaactctctacctttccgcacacattccacaaataaatctctgaccttttccctatcttggctctcttaaggcaagcttgggttca

SEQ ID NO: 172055 - DNA, 201 bp, Homo sapiens
gacatgttgattgggaaggagcaacaggaggacctgctgaattacacattgccctcactgggcagctaagcctcaggggttttgttcttttaaaaaaaaawtaaattcttttttgagtcagggtctcacccaggctagagtgcagtggtgcagtcctagctcactgtaacctcaaactcctgtgctcaagtgatcctcttg

SEQ ID NO: 172056 - DNA, 201 bp, Homo sapiens; identical to SEQ ID NO: 30994

SEQ ID NO: 172057 - DNA, 201 bp, Homo sapiens; identical to SEQ ID NO: 30995

SEQ ID NO: 172058 - DNA, 201 bp, Homo sapiens
cggctgtaccgttttacattcccaccagcagtgtatgagggttctagtggttctgcctcctcacccacacttttgttattgtatgtctttttattatagcyatcctattggatatgaagtgatatttcacagtggttttgattttcacttccctaataaccagtgatgttgagcatcttttcatgtccttattggatattt

SEQ ID NO: 172059 - DNA, 201 bp, Homo sapiens
tcttcatttggcaccatgctgaaaggtacagtagccgcttaaagctcggcttgaggatgttgggccactggtctagggtgtatcctcaggggaaaaggggrgtttttgctgcttgctcctggagcaagacacactccagccatagttctaattccaggatagtgtagcgcaggccacagggagctgggcacggtgttgact

SEQ ID NO: 172060 - DNA, 201 bp, Homo sapiens
acattttattatggtctgcatttttttttcttgacctcagtataatttaggaaagatatttggttctttacattaaaatattttttatttatcacattgtrtataataatgcacatatagaaataaataaacatacatatttgcaagtgagtggatgtcttaatttattccaagaattgagtatgtgtttgcaatgtctac

SEQ ID NO: 172061 - DNA, 201 bp, Homo sapiens
taccaggtgatggagtcatatcttcactgttgccagggctccggaactagctctgagtctgcttctttgaagtgctgcttctgaagcaccggtttgccgtratcagggatggtcctgcctggagttctctttatgcccattctctttctacttttgttctgctgggcgtttctggttttgtttgtgtgtaagagtccgtgt

SEQ ID NO: 172062 - DNA, 201 bp, Homo sapiens
cagataatcattctctatgttaggtgttaaaatcctttacacaggagttgcatagagcccctactgcctagaatggttcttctgaaaagctgctatttgcrctgtgtgggtggttactcattgaggggcagagctgctctcggtgagcggtgggtctctctttgccctgggtgtgtggctgtgtggttgtgtctaggaagt

SEQ ID NO: 172063 - DNA, 201 bp, Homo sapiens
ctggcaagggccttcttgccacagcttcccatagcagaaagtggaagagcaagagagggagagcgagagtgactgagagagctggactcattttttttttyccccccagagatgggcatcttgctgtgttgtccagtctggccttcaactcgtggtcacaggtgatcctcccacctcagcctcctgagtggctgggactac

SEQ ID NO: 172064 - DNA, 201 bp, Homo sapiens
gggatgaaatccacggtgaggaccatcatggtgggggaatagtttattctaatggattcaagagctttggagaccaaactaacacatttatttttatgtgyagttaaagtcatagaaacctgttttgtgaaacctcagatttctaaagaaaaccagaagcaagaccttccttggtttaaaaaaaaaaaaagcatttcttca

SEQ ID NO: 172065 - DNA, 201 bp, Homo sapiens
ggctccaggcttctgagtcagagcactgtgctcagcctccaaattagggtctctttagggccagtgtagtgcttcccagaggaggttccatgatacactakcatcatggggtgctttccctgaaaagggcttatagaggttttgaaaatgcagcagtctccatcacagtgtacattaacagagcaaacactacaagaagcc

SEQ ID NO: 172066 - DNA, 201 bp, Homo sapiens
gtagtgagtcagcttttggagcgaagtgtgggctcttagcaagatggcatttcgagcactcttggatgcccttgtcaggctttccccttggaactcactgmcttcattacctttgtgacattttagtttttttcctgctgaatgtggctctttttcttctggtttaaggaacaaccttatattatcagcctggcctcctgt

SEQ ID NO: 172067 - DNA, 201 bp, Homo sapiens
tgttattatggataatatacaaatgcattttaaagcagtattgaattcatacttatttcattgtgtactttttgtttgtttgagacagggttgcactctgytgcccaggctggagtgcagtggcatgatcgctgctcactgcatacttggattcctgggctcaggcgatcctcctgcctcagcctcccgagtagctaggac

SEQ ID NO: 172068 - DNA, 201 bp, Homo sapiens
tcctggttgcaataaaggatcatgatcgtaaagatcattcccatttgacaaagggaagaggaaaattgcagtaggataatgagtgatgctttttattttgrtcctgttccctgggatgttggcagcctaaccatataaggatttccagttggcagttagaaattattgtctggagcctcagagacaggtcatcacgatctt

SEQ ID NO: 172069 - DNA, 201 bp, Homo sapiens
tttttattttggtcctgttccctgggatgttggcagcctaaccatataaggatttccagttggcagttagaaattattgtctggagcctcagagacaggtyatcacgatcttacctgctgatacttaagcctctaggagtatgagattgattaggctgaggttgaacactggtgggtttggctgaattcatctttcacgtg

SEQ ID NO: 172070 - DNA, 201 bp, Homo sapiens
gccacatctgggtgcatgccagctccaagagcccagcgcacttggacctcccgtaccaaatgagctaagaataggagaggcggtcaccaaggaaaatatgrcttctagtgccaaaagacaaagaaatggatgctgggcaggccaaagcaatgaatttgtactgaagaaatgttcctctagccccgaacacctggcagctta

SEQ ID NO: 172071 - DNA, 201 bp, Homo sapiens
ggtcagctagtaaactagtagcaactctatgaggttaatgcagccagaaagaagcctttgaacacagtgccgtcaaaaaaaatgtttgtcttctctttccrtttgctggtgagtggaaacctcacttggttaaacctactcagtgtttttgcctttgtatctccaggtctccgggctttgggttgtcactggttgctgaga

SEQ ID NO: 172072 - DNA, 201 bp, Homo sapiens
gtcttgaaaccataagccaggctgctcctctgtcaagaaactgtctaagcccaagacttactcagaagagtaccaatcaagaattaccaaacatctgagamaataataccgtgaaagaaagaaaaacaactcagcaaatgaaagtccttcctaaggaggcagtgtagatgggaggtagagggctgagccataccctccctt

SEQ ID NO: 172073 - DNA, 201 bp, Homo sapiens
aagaagcctttgaacacagtgccgtcaaaaaaaatgtttgtcttctctttccgtttgctggtgagtggaaacctcacttggttaaacctactcagtgtttktgcctttgtatctccaggtctccgggctttgggttgtcactggttgctgagaccaccagtggcaccttcctcagtgctgaactggcctccaacccccagg

SEQ ID NO: 172074 - DNA, 201 bp, Homo sapiens
tggtaaccagtggtggttgtgctgagcaaatgcttctgtgattggggaggtgctggcagggatgtaggcacacaaagatgctgtggatagtctggatttcytgctaacttggcctggggttttggagccttgggtccaggatgctcctggaagaagggtcagtctttgcagcccaaaccgtgaagttgaactcccaagtta

SEQ ID NO: 172075 - DNA, 201 bp, Homo sapiens
caggctagattttgcaatgcattctagagcacagaatctcagttaacagataagtattagaaaagaagaaaaaaatttaaaaaagcacagaataactaggraaggcaggcctgtggcacagcatagcagaagctttggaaaacctaagaacatggaacagagaaggggtaaactgatgttgaagacagactcaaccagttg

SEQ ID NO: 172076 - DNA, 201 bp, Homo sapiens
gggatgtccttaaggatagttgggcttcaagatctgacacacccttaagtggtatatccaaaactgaaatcaatgctcctcccaacccctaccccaaaaartctcagacccagaatgttattcctctcctccatagcaatctccatgaaagagtcatctttggtggccttggaggtaccaacctttcccatactggtgaag

SEQ ID NO: 172077 - DNA, 201 bp, Homo sapiens
gggcacatatgcatgcacacacttttactgtttcctcaaaataggtgaggtgacctaaagtaagggagaaatttggaaagatgatggcagaaagaataagwtacagtttcctaaaagatatattccctgagatcccctatacttggttagaagagggtcacaaatctgggtccaagatttctgttagtctgcaccgtcttt

SEQ ID NO: 172078 - DNA, 201 bp, Homo sapiens
gtcctaaatggctctatttaatgaccatctaattaaaaatggaagacagtggacctatagttttattttcaggagagtagctccagcccctctactcggcrttcacctgggaaatagtagaagaaggagatgaaatcttcctgaaggaggaggtattctttgacaagtcttgtgcagtcacgatctggcctcagatgtttt

SEQ ID NO: 172079 - DNA, 201 bp, Homo sapiens
tcacgatctggcctcagatgttttggtgctaaatcagtttacttttttatgctaaatttaataattttgtgaaaaatgggtagtaactaaaagtttggggkagatgatcaagaggttgccctgccagttacttaattcacgaagtttgtggtctacttatttgtaggggggcgggaaacagtgcatgcaatgtgtttccct

SEQ ID NO: 172080 - DNA, 201 bp, Homo sapiens
atcaagaggttgccctgccagttacttaattcacgaagtttgtggtctacttatttgtaggggggcgggaaacagtgcatgcaatgtgtttccctgggtcycttgttgtgcaggatttcttttcctggtcctatagtgtctggccgtggctggtcctgtagtggccttctctctaactatggggacacttccatgtctttc

SEQ ID NO: 172081 - DNA, 201 bp, Homo sapiens
ttctcctgccttagcctccccagtagctgggattacagttgcctgctgccatacctggctcattttttttttttttttagtagagacagggtgatctgtcrggtgatccatccacctcagccttccaaagtgttgggattacaggcatgagccacagtgcgtggcccaagtctattcttttctagtcatactggcaatgta

SEQ ID NO: 172082 - DNA, 201 bp, Homo sapiens; identical to SEQ ID NO: 30998

SEQ ID NO: 172083 - DNA, 201 bp, Homo sapiens
ttcttctttgtgtctcttgcttttcttttttctggagacagttctctcatggatgttttcctcctgggcatccatctcatcactgctgtcgatgatgtcayagggctcaccagccccagaaagagcttcctctgcaggaacctgagaggcttccaagccacaaagagattttacttcctgccgaacagcgttggctacggc

SEQ ID NO: 172084 - DNA, 201 bp, Homo sapiens
aaatctcaaaattgcctttgtgattctggaactgaaacagagggcaggttttgacttagttctatggtgattaaaagctaaatgcttctacctttgtttaycatcaacagctatatctctttctcatttttttatctgtcaaaattcaatgaaaatatgcaagttcctttctcactgagtctttttttttttcctgtgtgt

SEQ ID NO: 172085 - DNA, 201 bp, Homo sapiens
caatacatgtaagccactttgaagaatgcccagcagataataagcactcaataaacataaattattattgctatatttctttactaagatgaagagttttctgaggtcttttgtatacaagaactccgtcagaaatcatttaatcctcgtattcttttgctcactttagacgtctgtgaagaaacaggtagatacatctga

SEQ ID NO: 172086 - DNA, 201 bp, Homo sapiens
gtgggcggatcacctgaggtcaaaagttcaagatcagcctggccaacatggtgaaaccccatctctactaaaaatacaaaaaaattaagtgggtgtggtgrcacacttctgtaatcccagctacttgggaggctggggcaggagaagcgcttgaacgcaggaggcagaggttgcagtgaaccgagatagcacccctgcact

SEQ ID NO: 172087 - DNA, 201 bp, Homo sapiens
aggactcagaagaaaccaaccttgtcaacatcttgatcttggactcgtagcctccagaagagtaacaaaataaatttctgttgtttaagccacccagactrtagtattttgttatggcaggctgagcaaactaatacattcttcctaaaaagatcctccagtcttccctaataagatgtcatcttatctctctctctctct

SEQ ID NO: 172088 - DNA, 201 bp, Homo sapiens
atatgtatgaaatatatatataatagggtttatatatatgagaaatacatattttgtagggtttcatacatacatatatatacacacacacacgtatgtargatttcatatatgtatatgtatgtatgaaaacctaaaaaataatacaggcaaaataagagtaaatcttcatgatcttgggttaggcaataatatcttaga

SEQ ID NO: 172089 - DNA, 201 bp, Homo sapiens
taagcttcctgaggccttcccagctatgcttcctgtacagcctgtgaaactgtgagccaattaaacctcttttctttataaattacccagtctcaggtagktctttatagcagtgtgagaacagactaatacaatgtcatttaataatttgactttcacttcatcctaatttccagagaactttgctcctaaattacttac

SEQ ID NO: 172090 - DNA, 201 bp, Homo sapiens
caagaatctgggcaaagtcacagacaatgagacattacagtcaccatggataggtatccacctgggggctggctggaagccttgcaaaatctatctagagkggtagacgttaagtcagtgagtgtttaggggctgaggaacgtcaacggcagtagaaaactttctgggctgatggaaatgttctatattttgactgggggc

SEQ ID NO: 172091 - DNA, 201 bp, Homo sapiens
tgtggtggcacacttctgtaatcccagctacttgggaggctggggcaggagaagcgcttgaacgcaggaggcagaggttgcagtgaaccgagatagcaccyctgcactccagcctgggtgacagagtgagactctgtctaaaaaaggaaaagaaaactaataataggtatccatggcaatgcaaatgaattgtgtgtggta

SEQ ID NO: 172092 - DNA, 201 bp, Homo sapiens
atgagacattacagtcaccatggataggtatccacctgggggctggctggaagccttgcaaaatctatctagagtggtagacgttaagtcagtgagtgttyaggggctgaggaacgtcaacggcagtagaaaactttctgggctgatggaaatgttctatattttgactgggggcttggttacatggttatatacatttgc

SEQ ID NO: 172093 - DNA, 201 bp, Homo sapiens
tatagtatttaaatatctcaataaatctctttaaaagtaataaggtacatccaagaattataaattcaactgctatttacatactgctgaagtaaaataaratatagagatgaatgtctgaaattaaaatgttttttctgggaagaaagaattgcaatttggggcatgtatgcagactggctggtcttgagtatgacagaa

SEQ ID NO: 172094 - DNA, 201 bp, Homo sapiens
aaagattgcctgggatttgacaattcttgaagctctaagcatttttgaagcataagggttcattgcagttttctataccagaagaacgaatattacagctytaaaggttagtagaaaggatctactcttatatagattgaaaaaacaataagggaaagaactgcttcctggaactgataaaattttatagtatcagcatta

SEQ ID NO: 172095 - DNA, 201 bp, Homo sapiens
gggtctcatgtatctttctctgtggtctttatgcttccctatgtgatctttcttaaagatgatcacaacagtaaatgaggatgttacttcattgcttcaamgtgtttggctccttatatcctgacaaattgcaaaggcttagcagtgtattcaaatgcgatttaccatttgttttcccccacttgcctttccaaatccatc

SEQ ID NO: 172096 - DNA, 201 bp, Homo sapiens
actaactataattgaacttaacctagaaaagcattttgcatgtttagcttttaagtgtgtttgacagaaaaggagaaaggaacctgaaataagaaataatytagtgataaaattgttgatgttctccttcactgtaatccattccaaatatagtttattttgctacagagcatgttctgtaatgtaaatggaaataagatt

SEQ ID NO: 172097 - DNA, 201 bp, Homo sapiens
tgagtgtaaatttggagcagcacctatctgaagggtggtgtggtttccccaccagaattcaagaacctaaaataatggagtggtttaggattagggctggrgccaagtgtgatagctcacgttggtaatcacagcactttgggagcccaaggcaggaggatctgtagagtccaggagttcgagaccagccttggcaacata

SEQ ID NO: 172098 - DNA, 201 bp, Homo sapiens
tttgagaaaacctaaagtgttctagaatgctatattttaaagaagaattctcaaagtttatttatttattttttagcttattttctttatggctgccccayagccagccccctagcaactgtctgctcttcggcctgatgcaaaatgtcaggtcacttgctgggaacagagtttggagggcgggggtctggaaatgaattt

SEQ ID NO: 172099 - DNA, 201 bp, Homo sapiens
cattactgctctctttcttaatactctgctttattttcttcttagtgcttagcattattggaaattacaccatttatttatttgtttttttcttgtctgtytcttcttgatggaatataaactctatgaaggcaaggatcttctgtggctttttcaatatttgctatatcactctgcattttgaactgtgctgaatataat

SEQ ID NO: 172100 - DNA, 201 bp, Homo sapiens
agtagtctttagataaaactggcatcaggttacagttggcaggttcagcagccaggcttacagacaattacatttttggagcaatgttatgtgccctgagwgcttttccctgctggcttttcaactctgttttagttgggtgtgataagaataacccaatatgtattatcaactttcgcaataccaaagatgctcatagct

SEQ ID NO: 172101 - DNA, 201 bp, Homo sapiens
ttatctctattcattcagtctcagcctgtttctaagtaaagctgtattcaaatatgcaatttaaaaaatcttaatcttatatgtcttgagaagtgccttcygttcctcaagtaaagctggaagttcttacctttatcatcagagataactttaaaataatcctatgcaagtttagagttgtcctacatcctaatatttgcc

SEQ ID NO: 172102 - DNA, 201 bp, Homo sapiens
gatgtattgtgagggaaaaagactcagtagtgttggaaattggaaattattctataaattctttctctctatagtacacaaattcttcataaagttttctstcttttttgggggatagggtcttgctctgtctcccaaacttgagtgtaatggcactgtattagtccattctaactttgctgtaaagaaatatctgagact

SEQ ID NO: 172103 - DNA, 201 bp, Homo sapiens
aacctataagtaaaaaaattcgccacaaaattagaaatgttctgatttgcttagtcaactcctattaaatgtttctgtctttggtgttgaacaaaggttgyaaaagtaatgagataatatgagaatgtgctttgggaactgcgaatctggagtcactggtccatgaggaatctaggataagaagaaggaagctgtgaagaa

SEQ ID NO: 172104 - DNA, 201 bp, Homo sapiens
ggaggggtcagtggaagtgttaatgatggactccctgagatggagttggcagtggcactctgcaaatcaatccagagtcagaaggctaatgtatgcacacragtctattaagctcttctctataacaggctcagcattttcctttccatttttctacctggaaatactgttagtcagctaatgcaccttgctacaagaagc

SEQ ID NO: 172105 - DNA, 201 bp, Homo sapiens; identical to SEQ ID NO: 31000

SEQ ID NO: 172106 - DNA, 201 bp, Homo sapiens
ttttcttgttttcctctcacctctttatgaactcagtattagttgattctctatgttaatagcaatatagacactataaatacaaatctagagaaaatccyagacttaatatttgctgaaattgcccaagaaaatgagacatcaattctactagtcttgaatctgcttaaactttctcatctttaaggaaatattaagtta

SEQ ID NO: 172107 - DNA, 201 bp, Homo sapiens
cttatctctaaaatgtaaaaagatatcaacagatagcatcaacaaataggtatcagatggtgagataagagataacaaaagctgataaatgtaaaagcaarcaacagtgaaaatttgtgatatacaagtttcagttccaaagaaacaacggattaagcttttataaatagctaaaatgaataacaattcaagtgaatacct

SEQ ID NO: 172108 - DNA, 201 bp, Homo sapiens
attttctcatttacaaaattgttgttagcattaagtgtgttaatacttataaaatacttcatatttatatgtatgaagtattattactgctttaaaatacmattgactgatcacattattatacagtacatatcttctactgatatatgagttccttgaagtaagacctatgtcttattgctgttacatcttcaatgcatg

SEQ ID NO: 172109 - DNA, 201 bp, Homo sapiens
aggtaggcctcattcaactcattcaatcagttgaaggccttactggaaaaaaaaaaaaataaagactgacttccctagaagagcgaactctacctgtagtmtgtctttttattctttctttctttctttttttttttttttggatatggggtcttgctatgttgcccaggctggtctcaaactcctgggctcaagcaattt

SEQ ID NO: 172110 - DNA, 201 bp, Homo sapiens
gtaggttttaattagcaggaactttttgtaaattggacaaaaactttttttattatgactaggaaaactgctgttttctatttttgttttgctcttttaartgataccgaactttagttaatccctcagtcctaaattatggctgttgcgaatgagggctataatagttatcccattttattttaaattttgtattaatgt

SEQ ID NO: 172111 - DNA, 201 bp, Homo sapiens
tagagatgaaagaagaaaaatatttgcactcatgctgaaattgcaaaggaacatgtgtgaatgacctcttggatacttgttgcttggaaatgcgagcaatmgtttctttatttttattttattttagttttttgagacatggccttgctctgtcacccaggctggagtgtagtggtatgatcagggctcactgcagcctca

SEQ ID NO: 172112 - DNA, 201 bp, Homo sapiens
tttcctactcaggaataaccttttcttacttttcaaagaataaaagacatacagatttggcaacaagtaggttattagtaacattcaagcaaataatagcrcaactttttaatgatagtagatttaattataaagccttataaaggaaattgataatatattccaaatgagacatcttattcgaatgctctgtggatcatt

SEQ ID NO: 172113 - DNA, 201 bp, Homo sapiens
aaatgagacatcttattcgaatgctctgtggatcattaaaacacatttattactgttggtcaaggaacgcaaccctattccacttcatattaaggtgagarttatgaattaattccttagtattcataatgtttaaatagattaagatcaatttccttaaactccagtgtctctaaatacctttctaatttactgtttcca

SEQ ID NO: 172114 - DNA, 201 bp, Homo sapiens
ggatcatgggagctaatttctcccttgttgtccctgtgatagtgaatgagttctcatgagacctggttgtttaaaagtatgtagcaattcaccctttgctstctctcctgctggccatgtgaagaagtgcttgcttcccctttgccttctgccatgattgtaagcttcctgaggccttcccagctatgcttcctgtacagc

SEQ ID NO: 172115 - DNA, 201 bp, Homo sapiens
agaccataacctctgatattaagaaacgtgtgtaatctaacaaccgtagagtagtggaagcttccctctcccttatgctagaagctaagggctatttttgycctgaaggttgttgttacctaatcagagaaagaagtcaggataattaatatgttaatggtaaagcatcggtcctcctttcttgcagtttaatagaagttc

SEQ ID NO: 172116 - DNA, 201 bp, Homo sapiens
ctcccttgttgtccctgtgatagtgaatgagttctcatgagacctggttgtttaaaagtatgtagcaattcaccctttgctctctctcctgctggccatgygaagaagtgcttgcttcccctttgccttctgccatgattgtaagcttcctgaggccttcccagctatgcttcctgtacagcctgtgaaactgtgagccaa

SEQ ID NO: 172117 - DNA, 201 bp, Homo sapiens
ttgagtgtaaacttgatgatgtttggggaagatttttttctagagaagtgctagagatgtagtcaaaacttgctacatatgtggtgaattaataaatatcytgatttactcccaaacctgtcttttgtccagtattttttaaattttagttaattttacagctgtatatctagctgcctaagctagaaaacttggaggcat

SEQ ID NO: 172118 - DNA, 201 bp, Homo sapiens
aatccattgactgggagaaaagtatttgaaaattatatctctcataagagacttgtattcagaatttataaagaatacctatagataaataatgaaataawaatggacaagaattgaatagacatttttcaaagtgtatacacattaacacgtgaaaatttgttcagcaccattaatcattaggaaaatgcaaatcaaaac

SEQ ID NO: 172119 - DNA, 201 bp, Homo sapiens
attgctaatgggcagacatctggaatgctgttttcttaatgcaaaactagaggtttcaaactggtggtctctaagatgatgatgttaaagaaaaactaactgactacaaaactgggttactttacacacgtacaaaaaaattcttgtttttggttctctcaaaataatgattagaaatcggacagcactaacaccatagtt

SEQ ID NO: 172120 - DNA, 201 bp, Homo sapiens
tattgctaatgggcagacatctggaatgctgttttcttaatgcaaaactagaggtttcaaactggtggtctctaagatgatgatgttaaagaaaaactaactgactacaaaactgggttactttacacacgtacaaaaaaattcttgtttttggttctctcaaaataatgattagaaatcggacagcactaacaccatagt

SEQ ID NO: 172121 - DNA, 201 bp, Homo sapiens
tatgtatttttgaagaaactcattttttgtgcgtgtggtttgagaaaagcaaaatttgggaggaatttggaaaagaggattactcatcaaaaggtagatcwtgcttaaaaacaaaatgggaacgacgaccttaaaaatgggaacgactggggagaaaactgacaaggacacattagagctgcacttcactagcagcatgaa

SEQ ID NO: 172122 - DNA, 201 bp, Homo sapiens
atattgctaatgggcagacatctggaatgctgttttcttaatgcaaaactagaggtttcaaactggtggtctctaagatgatgatgttaaagaaaaactaactgactacaaaactgggttactttacacacgtacaaaaaaattcttgtttttggttctctcaaaataatgattagaaatcggacagcactaacaccatag

SEQ ID NO: 172123 - DNA, 201 bp, Homo sapiens
catattgctaatgggcagacatctggaatgctgttttcttaatgcaaaactagaggtttcaaactggtggtctctaagatgatgatgttaaagaaaaactaactgactacaaaactgggttactttacacacgtacaaaaaaattcttgtttttggttctctcaaaataatgattagaaatcggacagcactaacaccata

SEQ ID NO: 172124 - DNA, 201 bp, Homo sapiens
gaaaactgacaaggacacattagagctgcacttcactagcagcatgaatgtggtaatggtgaaaggagaacaatatctgaaaggaaatgaaggtcttatcrtaggagccacagagatttcatttttgtttttctgaaaattatcattatcagctgtgactgctgatgaaggaccacttagcattccccccaaggaataatt

SEQ ID NO: 172125 - DNA, 201 bp, Homo sapiens
caagcagagacttttactgggacaagtaaatcaagccttcagcaactcaaggaacaaacatacaagacaagctcaactcctcgttaagaccaaattaggayaacactacaagaaaataaattgttttatctggttgtggtgctttggggatagttaattgactactcaaataacaactttgatagtatatgaactgtgact

SEQ ID NO: 172126 - DNA, 201 bp, Homo sapiens
caatgattccattgtgaacttgttctgggaatgccatgatgattctctatcatgttcctcgtacactgcaccagcaccactgcttcccttcccagtgagawcccgatcaagctttatcatgcagcccagaagggtgggggaaagaaaaagaattaggagaaaatgtaagttgaaacagttgctgtactaacctgttgcatc

SEQ ID NO: 172127 - DNA, 201 bp, Homo sapiens
aacatttgttgctaaaattgtttaaaattcacttccatcaccttcttcatgaaagcagagaccaacttgactatcattgtttatgctgccctttgaaaacwtttctgtgatcaaagatgacaaaagcaatgcaacagcctacttctctgggaaaagctagccccagtgcctaagggaaaacattcactaactcttttcata

SEQ ID NO: 172128 - DNA, 201 bp, Homo sapiens
acactttgaagggtgagaaaaatggaatttattggaaaaaaggaaaaaaggggaaagagggaccctcagcagagtgagagtcctgctagtatatgcttccygcgtcacagattgaattccaggttccacccaggaagaagaggggccaggctcctccccagggcaaacagagtgaacttcctgaggctccaccccagtgtg

SEQ ID NO: 172129 - DNA, 201 bp, Homo sapiens
tctccagtgactcctttatatttggctgtctcgttacttctaaaatatttcatattcataaaataaaaatgttttaataatgttatatatttgtaaaggcrtttacaatcttcaaacttctgcatgaaaaatctctcagaagtcaaaaatggatttactgtcctgatgtaaaataacctgcaaatcttactttctaatttt

SEQ ID NO: 172130 - DNA, 201 bp, Homo sapiens
atatatgtgtaaaaagaaataaatcatctcatgaacaaaattaaaaaaaaaacaaaaactgagaagttgcggtgagttctgaggcagtacggtgtggcatragaatgcaggctctgaatctacagactgcctggttcaaatactagctctgccaaaaactagttacataaatggagcagattatttaacctctctttatgc

SEQ ID NO: 172131 - DNA, 201 bp, Homo sapiens
cagagtggcaagcagtgtgtgagcgagcatggggtccagccactgtgcacagccaggcatgccagctgcagtggggtgggcagctgcaggcactggaacakgtgccggctccctgcaaggctgcggctggaccaggcataccacaagtggctaccactgcaggcaccagggaatgtggtggcacccagaagcttggagttg

SEQ ID NO: 172132 - DNA, 201 bp, Homo sapiens
ccatatattttgccaaacacatcctgatgttgctttgaaggtgtcttttggatgagattatataaatcagttgactttgagtaaagcagataaccctccayaatacaggtaggcctcattcaactcattcaatcagttgaaggccttactggaaaaaaaaaaaaataaagactgacttccctagaagagcgaactctacct

SEQ ID NO: 172133 - DNA, 201 bp, Homo sapiens
aaccaaacacttcccattaaagatgatacactaaatttgctgtttgtttttctcactgcatgatatgtaatttactcttttgaaagtatagacatttgaarcacatcaggagtctaatacttcacttgctttcaaatttattttcacttaaagaatgaaagccacaattatgaatatgatttgctttatgtttcatgtacc

SEQ ID NO: 172134 - DNA, 201 bp, Homo sapiens
ctgcctcagcctcttgagtagctgggactacaggctcacgccaccatgcccaggtaatttttgtatttttagtagagacagggtttcaccatgttggcccrgattgtctcaaactcctgacttcgtgatctgcccacttgggcctcccaaagtaatttttaaataaaatttagttaaaacgaaaaccaaacacttcccatt

SEQ ID NO: 172135 - DNA, 201 bp, Homo sapiens
tgcccaagaaaatgagacatcaattctactagtcttgaatctgcttaaactttctcatctttaaggaaatattaagttaaagtatcaatttggaaaacttrcaaaataatttggggcagggtggcagggctggaggggtcagtggaagtgttaatgatggactccctgagatggagttggcagtggcactctgcaaatcaa

SEQ ID NO: 172136 - DNA, 201 bp, Homo sapiens
cattataccttttgctatggactggattgtgttctccttaaaattaatatgtgaagtcccaactcccaatacttcaacatgtaactgtacttgaaaatagrgcctttaaagaggccaatgggggggcctgaatctaatctgactgatgtccttatgaaaaaagaaaatttggacatacaaagagacacaagagatgcatgc

SEQ ID NO: 172137 - DNA, 201 bp, Homo sapiens
tatgtggtgaattaataaatatcctgatttactcccaaacctgtcttttgtccagtattttttaaattttagttaattttacagctgtatatctagctgcytaagctagaaaacttggaggcattctcaactcttcctgtacctcaccttccatgtcagatcaatcattaaattatcttaatctacattagaaaattatct

SEQ ID NO: 172138 - DNA, 201 bp, Homo sapiens
ctgtctttggtctcaagtggcaatatcaactcatctctgggtctccagcctgctggtctaccctgaagaatatggatttagcctccacaattgcattagcyaattccttaaataatctctctctcctctctctcttctctctctctctccctccctcctttctccaacttattgattatttttctctggagaaacaataca

SEQ ID NO: 172139 - DNA, 201 bp, Homo sapiens
ttttttttgagatgggggtctcactctgtcgccctggctggagtgcagtggcgcgatcttggcttactgcaacctccgcctcccaggttcaagtgattctmctgcctcagcctcttgagtagctgggactacaggctcacgccaccatgcccaggtaatttttgtatttttagtagagacagggtttcaccatgttggccc

SEQ ID NO: 172140 - DNA, 201 bp, Homo sapiens
aaaatttgtgatatacaagtttcagttccaaagaaacaacggattaagcttttataaatagctaaaatgaataacaattcaagtgaatacctcttaagatrtgctactcaacaaatgctttttgagccaaacactcttttggatgctgaggactcagaaaaagaaaaaaagtgcttttcctgaaagtcttctgatattatt

SEQ ID NO: 172141 - DNA, 201 bp, Homo sapiens
ccagattgggttctaacctttaaataatctctccaagcccgtcagctgtaaaaaagttgttaatgttccttcaaaatgtgaaattctagagcttaatatcyataaatagagctttcattgttatgcctcaaaattcaacagctttctcagttgacagacatttgtctcatattccttaagttaccttttcctactcaggaa

SEQ ID NO: 172142 - DNA, 201 bp, Homo sapiens
aaagccttataaaggaaattgataatatattccaaatgagacatcttattcgaatgctctgtggatcattaaaacacatttattactgttggtcaaggaaygcaaccctattccacttcatattaaggtgagagttatgaattaattccttagtattcataatgtttaaatagattaagatcaatttccttaaactccagt

SEQ ID NO: 172143 - DNA, 201 bp, Homo sapiens
cgtacactgcaccagcaccactgcttcccttcccagtgagaacccgatcaagctttatcatgcagcccagaagggtgggggaaagaaaaagaattaggagraaatgtaagttgaaacagttgctgtactaacctgttgcatccccaaatgatgaatcttatttttcctgcttctgtaatttctgccatctactctaaaata

SEQ ID NO: 172144 - DNA, 201 bp, Homo sapiens
cagctgttcattatattctgggaaggtgcccacatgaacttgaaaggagctattggccccttgtagatagggtagaagagagtctggactactttgaaaawctaagagatgtgtttggttagcaaaagaagatgaagctgcagtcagaggtacaaactggttcagttaaggaggaaaaataattgaatttgaaacaatata

SEQ ID NO: 172145 - DNA, 201 bp, Homo sapiens
ctctgtttcttcccttgaagccttgggatgtcttcctgttctatgagaaattccttgagacacactgggaatccctttcccttaaggaaaagcttttctgmaactttatgtgactcaatatgaattaacataatattaacaatggcaatgatagttgtgtcattggactagtggaattttaagatattaatatttaagata

SEQ ID NO: 172146 - DNA, 201 bp, Homo sapiens
tgtcaaacttctagtttccccatcagtatatatccctcataaaaatgttgtgcctattgatagggtgaccgaataacttattgtccaaactgggacacttkgagattgaaaggatgcactgttaataataatgcccatgtaataaacataaaccaggactatattttggcgcagctggattgtgtgctcatcctaccatta

SEQ ID NO: 172147 - DNA, 201 bp, Homo sapiens
tatgacctgagtaatttcttctggcaccggattggctccctctcacaaatcctcctctgtagatgactgatttgtttgttactttttttttttttttttttgagatggagttttgctcttgttgcccaggctgaagtgcaatggcgtgatcttggctcacggcaacttccgcctcctgggttcaagtgattctcctgcctc

SEQ ID NO: 172148 - DNA, 201 bp, Homo sapiens
aagagcagtgaaaagctgacataacatatgtcagtagagacttgtatttcccaaatctatcgaacattgaaaacttaaacatagtaatttattgaaggcaytcccatagaatcctatctgttgtgtactcagattaaaggaggtagtgaaaatgaactcagatgaattaagtgattgaaatttttgtttatatttaatatc

SEQ ID NO: 172149 - DNA, 201 bp, Homo sapiens
acatctattgccccataggtaatatttgccagaaacacatttgtcaagtagttgaatatatttttgtggttaatagtagtcaagaaagaaacagtatattstgacaagtctaatatatgagattcttttaatataagaacttggtagctgtacaatgcatttgaaagccatgtgcaactgagaaccaaaattgaattatca

SEQ ID NO: 172150 - DNA, 201 bp, Homo sapiens
tggggttttaccacgttagccaggctggtctcgaactcctgacctcagatgcttcaccctctttggcctcccaaagtgctgggattacaggtgtgagccacggcacctggcctaatttttgtattttttgtagagacaggatttctttatgttacccaggctggtctcgaactcatgggctcaagcgatctgcctccctcc

SEQ ID NO: 172151 - DNA, 201 bp, Homo sapiens
atggggttttaccacgttagccaggctggtctcgaactcctgacctcagatgcttcaccctctttggcctcccaaagtgctgggattacaggtgtgagccacggcacctggcctaatttttgtattttttgtagagacaggatttctttatgttacccaggctggtctcgaactcatgggctcaagcgatctgcctccctc

SEQ ID NO: 172152 - DNA, 201 bp, Homo sapiens
gtcaacctgcattacacattgttaaggcagatatcttctgatatctgttgtggaacagatgcactaagatgagtgggagtgtttatatcactgcagatctratgtttgcaaaaatcttctgtatatttatctgatatgggaagtttggagcatgtaaatgataaataagaaaagaagattgattaacagtggaggtgctga

SEQ ID NO: 172153 - DNA, 201 bp, Homo sapiens
agtgacaagagcaaaactccttctcaaaaaaaaaaagtaagaataagtagggacttactgagatcttgagataagatactcttcttttcttttttttttttcaattactttgtttttagaggggttttaggttcacagcaaaattaagaaggtatagaaatatcttatatacctccaacctctacacatgcatagcttctt

SEQ ID NO: 172154 - DNA, 201 bp, Homo sapiens
attcttacgtacttcttccattgataaggaaacaagtaaaacaaatccatgctaagtatcacagatagaaacattggtattatctatttggaagtttgtgyttattaacaagtaaatgctgaattgatagacttctaaacattgcagtaaagtacagtaaaaataattaaaccacgtaggatgacaattcgctgtgatata

SEQ ID NO: 172155 - DNA, 201 bp, Homo sapiens
  misc_feature (1)...(201): n = A,T,C or G
atggattgccttttttaaggtctaaggttttttattggctttatttgtaatggacataatatttgaattctagcagtattccattgtcactttttttttttctgtttttctaatcatgtatggcaagcttgtgtttctaaaacaaaagaacccatgaatcatgtttttaattaagatatttgtgtgtttnnnnnnnnnnnn

SEQ ID NO: 172156 - DNA, 201 bp, Homo sapiens
tcaagcaatctgcccgtctctgtttcccaaagtgctgtgattacaggtttgagcatccatgcccagccttactgagatttttttttttttttttttttttatataaatttgacttatgttgtattgttcttctggatgtattataaatctagcaatatactttgtatatttttatatgacagggaatcactatttaaaaag

SEQ ID NO: 172157 - DNA, 201 bp, Homo sapiens
gcgtttttgcatgatagaaactggagaggggcctaaaagctatgaaagcatttgggttattttaattattttttatacacaatattttatttaatttttawtttatattatttttttgagacaggatcttgctctgtcacccaagctggagtgcagtggtgtgatcacagctcactgctgccttgacttctttagcctcct

SEQ ID NO: 172158 - DNA, 201 bp, Homo sapiens
ccttccccatcagaacactgtggatgtattctctagaggggctaaacgagaggttctgggcttgagcctactaataccaggcatagttgagggtggaggtragactctacattaagaacaggattaagtaaaattctctatgctgaatggtgattccctcttcctaccacttcctctgtttaactgccagaatgccaatag

SEQ ID NO: 172159 - DNA, 201 bp, Homo sapiens
ctaatgagaattagatcagagatgatggattggtttaccctgatttatttatatttaaaaagcttatgtttaaaatgtgcttcaaagagaaataatacccrtaagatattcgtctaattccttataggcacttaggaacaaatactttaaaagatgcatttttagtaataatctgttagtctaagaaaagtggtaacagga

SEQ ID NO: 172160 - DNA, 201 bp, Homo sapiens
ttacccaggctgaagtgcagcggcacgattttggctcactgcaacctccacctcccaggttcaggtgatgctcctgcctcagcctctcgagtagctggaastacaggcggatgccaccacacctggctaatttttgtatttttagtacagaacgggtttcaccatgttgtccaggctggtctcgaactcctgacttcaggt

SEQ ID NO: 172161 - DNA, 201 bp, Homo sapiens
acttccagaagagttagtttccaggcatccatttccaggtaaaaattagaactgaattttgtttgattcatctttagaccttcatgttgaagaaaaatcarttcagacaattctgaaataatctgtcatctcagggaatatgtaacatgagagaaaggaaaggatggttagggaataattgaaatcttttgagtatctact

SEQ ID NO: 172162 - DNA, 201 bp, Homo sapiens
ttataattttggaacactagtatattttctaattgctttgtattctaatgagaattagatcagagatgatggattggtttaccctgatttatttatatttwaaaagcttatgtttaaaatgtgcttcaaagagaaataatacccataagatattcgtctaattccttataggcacttaggaacaaatactttaaaagatgc

SEQ ID NO: 172163 - DNA, 201 bp, Homo sapiens
agcaattctcctgcctcagcctcccaagtagctgggatcacaggcatgcaccaccacacccagataattttgtatttttagtagaaatggggttttaccaygttagccaggctggtctcgaactcctgacctcagatgcttcaccctctttggcctcccaaagtgctgggattacaggtgtgagccacggcacctggccta

SEQ ID NO: 172164 - DNA, 201 bp, Homo sapiens
ctcagtcacaaacacaacttgcagactagcacctgtttgtggatcacactttgagtagtactgagtttaagtcactaatattttaaaccttaataacttamacctatccctgcagaggggaataggttcattatataagattaatcagaaaccatcccatatacatggaggacaatagtgaaaatagtcaaattttaattt

SEQ ID NO: 172165 - DNA, 201 bp, Homo sapiens
agaagcatttagtatatactttcattcaaaatttccaaaaatccattaataatgtcaccatgcataagatatttttcaatgcatcttttcttttttttttwaaaaaaaaaaaaagctttgtcaagttaaactggtgtatcttttgactattaaaaattattgattatctttttattttcagggtgactgtcgttcctacag

SEQ ID NO: 172166 - DNA, 201 bp, Homo sapiens
cccaccaacagtgtaaaagtgttcctatttctccacatcctctccagcacctgttgtttcctgactttttaatgattgccattctaactggtgtgagatgrtatctcatagtggttttgatttgcatttctctgatggccagtgatgatgagcattttttcatgtgttttttggctgcataaatgtcttcttttgagaagt

SEQ ID NO: 172167 - DNA, 201 bp, Homo sapiens
ttttccacatcctcaccaagacttgttgttatctcttttcttattgtaaaaaacacataacataaagcttaccatcttaactctgatttttttttttttttgagacagagtctcactctattgcccaagctggagagcagtcatgcgacctcggctcactgcaacctctgcctcccggttcaagagattctgctgcctcag

SEQ ID NO: 172168 - DNA, 201 bp, Homo sapiens
gcaaattctttagtggtgatttgtgagattttggtgcacccatcacccgaacggtatacacaacacccagtatgtagtcttttatccctcacccgcttccyaccctttccccctgagtctccaaagtccattgtgtcattcttatgcctttgcatcctcacagcataggtgatcagcttttctttaaaaactttttattat

SEQ ID NO: 172169 - DNA, 201 bp, Homo sapiens
tctaaaggcattttatacatttgttacctaaaatgaacaactgtgtaactgtcagctatacctagaattttttatcagaagtattttagattttggatttyggagtatttgtattatacttactgtttgagtgccactaatccaaaaatccaaaatgtttcagatttttggattaaggatgtttaacctgtatatagaaag

SEQ ID NO: 172170 - DNA, 201 bp, Homo sapiens
aactgtagtttatgtccttaattggctcttaaactctaatattagatgtactatgcttctcccaaaatttaaaattttatttttcttaaaagaattgtctktccagtgtgaaagtggttaaaagaacttttaaagacttcacagacatgtgtgcattatcctgtgttttgttggttctgaagtagagtgaattagaaatta

SEQ ID NO: 172171 - DNA, 201 bp, Homo sapiens
ggtttcgccatgttggccagtctggtcttgaactcctgagctaaggtaatctgcccgtttcagcctcccaaagtgctgggattacaggcttgagccacccytcgcggcccacctatttttagaagcttgatctgcctgatacataaaattggtatttggaatgaattacggcttattgggccttgtgattgcaggttactt

SEQ ID NO: 172172 - DNA, 201 bp, Homo sapiens
agtgcttttccagttaccatacatatctttggtataaatagcacttttagataaagatttaagccaatagtgtttattttctttttgcttgttttgctcaktttgatttttcattttaccccgtaggttttactcagtggtggagtagactcaacagtttgtacagctttgctaaatcgtgctttgaaccaagaacaagtc

SEQ ID NO: 172173 - DNA, 201 bp, Homo sapiens
gttgtagtttgttctgtgatttcacttttctacggtgttgaatattcatatgaccagaaccttcatttctatgacctgagtaatttcttctggcaccggaytggctccctctcacaaatcctcctctgtagatgactgatttgtttgttactttttttttttttttttttgagatggagttttgctcttgttgcccaggct

SEQ ID NO: 172174 - DNA, 201 bp, Homo sapiens
agtcttttgcctttttttaatgtccaggagctaagaatgatttttacattattaaagggttataataaaatacagggactgtgtatgttgcacagagcccraactatttactctctagtcctttgcagaaagtttgctgacccatgctcttaaaccattttgttctctaattttttgaggaaggggaattgactttctggc

SEQ ID NO: 172175 - DNA, 201 bp, Homo sapiens
tttccccctgagtctccaaagtccattgtgtcattcttatgcctttgcatcctcacagcataggtgatcagcttttctttaaaaactttttattatggcargggtgtatttgacatagtaacttgagttttattaaggcagcattatcagagtaatgctttgggtgacttgtcaagtttcctactcttttcccctgtctaa

SEQ ID NO: 172176 - DNA, 201 bp, Homo sapiens
cctcccaggttcacaccattctcctgcctcagcctcctaagtggctgggactacaggtgcccaccaccatgcccggctaattttttgtatttttagtagaracagggttttgccatgttagccaggatggtctcgatctcctgacctcgtgatccacgcacctcggcctcccaaagtgctgggattacaggtgtgagccac

SEQ ID NO: 172177 - DNA, 201 bp, Homo sapiens
tattcatccaacaaacattcgagtacctattatgtgtcatgcacagttctaggtgtcaaggatttagcaatgaataaaataggccaggtgcggtggctctyacctataattccagcaccttgggagactggaaagtggatagcttgaggccaggagttcaatccagcctgggcaccatagtgagaccccatctctacataa

SEQ ID NO: 172178 - DNA, 201 bp, Homo sapiens
tctgcatcccgggttcaagcgattctcctgcttcagcctcccaagtagctgggattacaggcgtgtgccaccatgcccggctaattttgtatttttagtasagacagggtttctccatgttggtcaggctggtctcaaactcccaaccttaggtgatctgccctccttggcttcccaaagtgctggggttacaggcgtgag

SEQ ID NO: 172179 - DNA, 201 bp, Homo sapiens
ctggttatgtgcattttttcatgtgcttattggccatttctgtattttctttggagaaatgtctgttcaggtcttttttgcccttttttttttttttttttgaggcggagtctcgcactgttccccgggctggagtgcagtggtgtgatctcagctcactgcaacctccacctcctgggttcaagcaattctcctgcctca

SEQ ID NO: 172180 - DNA, 201 bp, Homo sapiens
tatgacagggaatcactatttaaaaagtgtgttgcagtccaaatttgtaagtaagtttttattagattttacaatgcctttttctttgaaatacagataartcagatttatctgcaaactcaaagtgagttagagagtaccttaaattgaataaagggcctaagtataccttcattgtgtgagtgggcatgtgtggcaaac

SEQ ID NO: 172181 - DNA, 201 bp, Homo sapiens
gcaacattttatatttttgtctgctgtgtggcagtttatgtcaggattctccagaaaaacagtaggctatagatagagaaatagataatagatatatatakagagagatatatgagaggaaatttgttaggggaattggctgacgcgattatggaggctgagaagtcccacgatagactgtctgcaggctggagaacctac

SEQ ID NO: 172182 - DNA, 201 bp, Homo sapiens
aagggacctgcagattcagtgcctggtgagggcccacttcctgggtcatagaagtgcttgatgctgtgtcctcaccttggggcctttttttttttttttttgagacagagtctcgctagtacagtggcgcgatctcagctcactgcaacctccacctcctggattcaagccattcttcttcttcagcctcccgagtagctg

SEQ ID NO: 172183 - DNA, 201 bp, Homo sapiens
tattttaaaccttaataacttacacctatccctgcagaggggaataggttcattatataagattaatcagaaaccatcccatatacatggaggacaatagygaaaatagtcaaattttaatttcaaattacaaatgtaagccctctaggactgctggacatgcagtggatgctgacttttctctataattttttttaatag

SEQ ID NO: 172184 - DNA, 201 bp, Homo sapiens
aatttattttctgtctctatagatttgcttattttgggcattttatataaatggaatggtacaatatgtggtcttttatgactggcttcttttacttaccrtaatgttttcaaggttcatccatgttgctgcatgtatcagaactttattcctatttattgccagataatattccatcttatgggtataatgcattgtatt

SEQ ID NO: 172185 - DNA, 201 bp, Homo sapiens
agccctttgattatctttcatctcttcataaaaactgtctcgtattttaaggtcatctttattagtacattgatagtatggggagacaaactgaagagaaygagtcagagtttgggtatccatctgtattgttttcatttcttcgcttctttgcaagatgcctttggttcttcatgcaaacaggctatacatgtgcacata

SEQ ID NO: 172186 - DNA, 201 bp, Homo sapiens
tctctacaaaaaatacaaaaattagccaggcatggtggtgtgtgcctgtagtcccagctactcgggaggctgaggcagaagaatggtgtgaacccgggagrcagagcttgcagtgagctgagattgcaccactgcactcaagcctgggcgacagagcgagacttcatctcaaaaaaaggaaaaagaaaaaaaaaagaatct

SEQ ID NO: 172187 - DNA, 201 bp, Homo sapiens
taatttattttctgtctctatagatttgcttattttgggcattttatataaatggaatggtacaatatgtggtcttttatgactggcttcttttacttacygtaatgttttcaaggttcatccatgttgctgcatgtatcagaactttattcctatttattgccagataatattccatcttatgggtataatgcattgtat

SEQ ID NO: 172188 - DNA, 201 bp, Homo sapiens
cagcttatcatagactttaattcattgattatctcaatggctaatttcaagctcttgaatggaatgttcacatacctttgtttttgtttttttttttttttggaggcggagttttgttcttgtcactcaggctggagtacaatggagcgatcttggctcacggcaactttcacctgctgggttcaagcgattctcctgcct

SEQ ID NO: 172189 - DNA, 201 bp, Homo sapiens
ggttttgccattttggccaggctggtctcacactgctgacctcaagtgatccacccaacttggcctcccaaagtgctggtattacaggtgtgagccaccgygccggccctaatcagcataatttgtgatgtcatggccctagatctaaatgccaggagattctcacagaaacaaaatttaatgagtgcctgtatctgaatt

SEQ ID NO: 172190 - DNA, 201 bp, Homo sapiens
tattttctgtctctatagatttgcttattttgggcattttatataaatggaatggtacaatatgtggtcttttatgactggcttcttttacttaccgtaaygttttcaaggttcatccatgttgctgcatgtatcagaactttattcctatttattgccagataatattccatcttatgggtataatgcattgtatttatc

SEQ ID NO: 172191 - DNA, 201 bp, Homo sapiens
acaggatcttgctctgtcacccaagctggagtgcagtggtgtgatcacagctcactgctgccttgacttctttagcctcctgagtagctggaagtacaggygtggatcaccccgccctgctaatttttattttttgtagagacagttctcgctgtgttgctcaggctggtctggaactcctgggctcaagctatcctccca

SEQ ID NO: 172192 - DNA, 201 bp, Homo sapiens
tatatttgtaaggactttcctgaaaccaacaatattttgaaaatagtagctgatttttctgcaagtgttaaaaaggtaatatttgatacagctaatcattrcaagaaattgaacggattcttattatataccagcatttataatgaattttttagggttttattatttgaaaatttggtgtaatataacctttgaaatgac

SEQ ID NO: 172193 - DNA, 201 bp, Homo sapiens
acagtgaatttggccatgcttatactctagtgtcaaacttctagtttccccatcagtatatatccctcataaaaatgttgtgcctattgatagggtgaccraataacttattgtccaaactgggacactttgagattgaaaggatgcactgttaataataatgcccatgtaataaacataaaccaggactatattttggcg

SEQ ID NO: 172194 - DNA, 201 bp, Homo sapiens
tctactaaaaatacaaaaattagctgggcatggtggtgcactcctgtaatcccagctacttgggaggttgaggcaggacaatcacttgaacctgggaggcrgaggttgcagtgagccaagatcgcaccactgcactccaccctgggcaacagagcgagactctgcctccagaaaaaaaaaaaaaagaaaaaaaaatcacga

SEQ ID NO: 172195 - DNA, 201 bp, Homo sapiens
ccagccaactgttttatgttttaataaacatgtttgcctacattgccaggctattattttaagaatagatgtctttaagagtagatgtattcagcttatcwtagactttaattcattgattatctcaatggctaatttcaagctcttgaatggaatgttcacatacctttgtttttgtttttttttttttttggaggcgga

SEQ ID NO: 172196 - DNA, 201 bp, Homo sapiens
atccatgaaggggtgtgtgtatgtgtatacattaatactaagggtaaaggtctgaaaggacaaagttgtagtttgttctgtgatttcacttttctacggtrttgaatattcatatgaccagaaccttcatttctatgacctgagtaatttcttctggcaccggattggctccctctcacaaatcctcctctgtagatgact

SEQ ID NO: 172197 - DNA, 201 bp, Homo sapiens
cactaccgcctcccaaagtgctggtattacaggctttagtcacagggacctggcctcccttttttttacttttagtaactttgtatgggatttaacttctrtactttgtttcctttttatgtgaatttagttttcctcaacttttagaaggaagctagtcaagataacgtttctaacttcatacaacttcctcttctgtta

SEQ ID NO: 172198 - DNA, 201 bp, Homo sapiens
ttacaggcatgggccactgcgcccagccaatttgttcttaaaaactctgatccctgaatgcttagggagactgatttgagcagtaataaaactctggtctmccacacagccggctctgtgtgaattactctctctctatggcaattcccatcttgatagattggctctgtctaggcagcgggcaaggtgaacccattgggc

SEQ ID NO: 172199 - DNA, 201 bp, Homo sapiens
tgaaaggatgcactgttaataataatgcccatgtaataaacataaaccaggactatattttggcgcagctggattgtgtgctcatcctaccattagatcaygcatgtaagatatatatacacatgatcactatattacatagtcaataagtggtaagatttattaagtttaagtgtttaatatatgcccatgcatggatat

SEQ ID NO: 172200 - DNA, 201 bp, Homo sapiens
atattaaaatcttccctttaaaaggggtattttgaattggtaactcagaaagtcctaagttttcattcctatgtgtttttggagctgacagtgatcattartttttttttaagtactgtagctttaattttcataattaagactttgtatttgtattgatatttgcagctggagaatgctggaggagaccttaaggatggc

SEQ ID NO: 172201 - DNA, 201 bp, Homo sapiens
ccagcatttgctataaaggaacaaggattccggtagacttttcactaatcttttcatgaggagattgaacttagattgtggaatattttattattaatttkcttgagcactgaatttttctacgaaaataagatatggaatggttttatgagaaatttcccatggctctgatttggggagaaaaaggaaaaatttaagctt

SEQ ID NO: 172202 - DNA, 201 bp, Homo sapiens
ggccagacacccaagaattgcctaaatgttctccctactaccaattccaactcaatttttgatccttctttgtcttcaccagaacattccaaaggagctayttgcataatagcaagtgaaaatcaaagtgagactctattagttgggccactgcctccagtgcactaacacgaggctgtcgtgatagctaggtagatgggt

SEQ ID NO: 172203 - DNA, 201 bp, Homo sapiens
tcactgatgtgatcaaattctgttttttgcatttgtgattaagtccatttaaaatgctctgcgagtagctgaaatcaatgcatgatgacagtcttaactaygctgtgtgtgtatatgtgatttcagatattgcctgggaggatttaattgaactgagttagagtgcttttctatggtgtggtgattggttctacatatacc

SEQ ID NO: 172204 - DNA, 201 bp, Homo sapiens
aaagagctactgattgtcagttcagtgttaatgaatctataataaatattaaatacagtgtcttaaatcagaaacacataaaacaaggttatatattaatyagttgatgaaaatattacaaccagaggcttgcaggaacctaaccctccatttcccctgggagaaatggttcagtattcgctaattcgttgtttgcagtgt

SEQ ID NO: 172205 - DNA, 201 bp, Homo sapiens
agtggtggcagcatagtccagtctgtctttgtgttcacatgaccctcattcccctgtgggtatctgtgtatccaaatttcccagcacttggaaggataccrgtcattggattagagcccatcctaatccagtattacttcattttaacttgattacatttgcaaagaccctttttctccccagagattctgggtgggcatg

SEQ ID NO: 172206 - DNA, 201 bp, Homo sapiens
atttccagtgcatgttagcatagtatattaatagtttctgaagtcttgtcataaagacacctatttttaaattttaattgtgtatttgtttcctaggactrcccataacaaatcaccacaaactaggaggcttaaaacaacagacatttattctctcacagtttaggaggccagaagtctgaattcagtgttggcagggtc

SEQ ID NO: 172207 - DNA, 201 bp, Homo sapiens
aaggaagtagtaggatactaagtcctatttcaatggcctttttaatgaagtgcaaatgagaatctctctagaatgattgtttctcaagtagagaaaaaaaratgagtttactaattttgggaaattcactgtagtttcctcttggagatttccagtgcatgttagcatagtatattaatagtttctgaagtcttgtcataa

SEQ ID NO: 172208 - DNA, 201 bp, Homo sapiens
acttactgtctatacgtgggacaaaaaccttgcttctgttgtagtatgtttggaaggagacaataaagtagttggtgataccggtggttttgtgctaatayggttttctattgtgtattttacctaagtacatattaagaaaagaagaaaaaacattaaactttaccatgatagtttccggggagatttattttctttgct

SEQ ID NO: 172209 - DNA, 201 bp, Homo sapiens
aaaatattcttccctgtttgccggtttttttcctaatttggataagggaatctttgtacagggagggactgttccagttttactgtcatatatagtgtggrtaaatacctgtcccagtacactctagtgattacttttgtttgtaagaaatgagaaggtgaaaagagcaggttcatggcattctcttaactttctcctgta

SEQ ID NO: 172210 - DNA, 201 bp, Homo sapiens
agtgcatagcacacacaactcaaggagataccaaatacaatccactgctaaaaaccagtaaaatacataagatagtagtagataataaaagagtgaatacyttatttcttaaaactgaaaaaatgcctctttggtttttctcagccacataccctattacagagagtcaaagcctgcacaacagaagaggatcaggagaag

SEQ ID NO: 172211 - DNA, 201 bp, Homo sapiens
tgaattggtaactcagaaagtcctaagttttcattcctatgtgtttttggagctgacagtgatcattaatttttttttaagtactgtagctttaattttcrtaattaagactttgtatttgtattgatatttgcagctggagaatgctggaggagaccttaaggatggccaccaccactatgaaggagctgttgtcattct

SEQ ID NO: 172212 - DNA, 201 bp, Homo sapiens
gatggattttaattttggaaaggttttatgttttgaaactagtggcatttttatattagatttttatattagaaatataacattaatgttaaatactattrttactcctacctttaggtcctggcctggcaatcagagtaatatgtgctgaagaaccttatatttgtaaggactttcctgaaaccaacaatattttgaaaa

SEQ ID NO: 172213 - DNA, 201 bp, Homo sapiens
aatggcatgatatcagctcactgcaacctccgcctccggggttcaagcgattctcctgcctcagcctccccagtagctgggattacagtgcccgccaccaygcccaactaattttttgtatttttagtagagacaggatttcaccatgttggccaggctggtcttgaactcgtgacctcaggtaatccacctgccttggcc

SEQ ID NO: 172214 - DNA, 201 bp, Homo sapiens
tgaagaatttcctttatgatatagctggatgcagtggaaccttcaccgtgcagaacagagaacttgagtgtattcgagagatcaaagagagagtaggcacrtcaaaagttttggtaagcaaattattatctggaagtctacaaatttatatcaataatattggaatccaggagttagagtcctcaacacagcccttaaatg

SEQ ID NO: 172215 - DNA, 201 bp, Homo sapiens
tttttaaattttaattgtgtatttgtttcctaggactacccataacaaatcaccacaaactaggaggcttaaaacaacagacatttattctctcacagttyaggaggccagaagtctgaattcagtgttggcagggtcatattctctctgaagactctaggggaggatccttccttgcttcttcctactatcgagtggtgg

SEQ ID NO: 172216 - DNA, 201 bp, Homo sapiens
aaaaatagaattgtggacaggttatttaattcttaaaagtttctgagttttaagtagatttgttatagagaacttcaacgtctgtgtgctaactgctgctrcaaagggagttgaaatagttccccactcttctttttagagaagtgttacaaaaaatagatacttgagataatctgatgaatgagtgatttctttcttgaa

SEQ ID NO: 172217 - DNA, 201 bp, Homo sapiens
tagttcaaaaattcacttattttgtactagattgctaattaaatgttcttacttcacagttattctctctgttcagttttcttcatgggtgttaggcagtyaacaaccaaaaagaattacttgaggtttcattttactcaaattgctgcagaaatcagaagcttaccttttaatgttaagctagcagagtctgtatagttc

SEQ ID NO: 172218 - DNA, 201 bp, Homo sapiens
agtttgagaccagcctgggcaacatggtgaaactccatctctacaaaaaatacaaaaattagccaggcatggtggtgtgtgcctgtagtcccagctactcsggaggctgaggcagaagaatggtgtgaacccgggagacagagcttgcagtgagctgagattgcaccactgcactcaagcctgggcgacagagcgagactt

SEQ ID NO: 172219 - DNA, 201 bp, Homo sapiens
cttagtttttagtttcttgtcattaaataaaaagccaaggattgttaaatgtatgttcataaatattagttttacaagacactagggtgtgattccaacarctttgactccgtttaggagccggtgcttttgacttctttggggctaagcttcttgctgtggcttctgcttgttgctctggtgaagcactgaagagaggga

SEQ ID NO: 172220 - DNA, 201 bp, Homo sapiens
gttggtcaggctggtctcaaactcccaaccttaggtgatctgccctccttggcttcccaaagtgctggggttacaggcgtgagccactgctcctggcttgwtattagttttttaaatgttacttaagctggtggtagaaacatcttcacaaaggcatatgatgatactaatttttaaaattgtactgtggcatttcagtta

SEQ ID NO: 172221 - DNA, 201 bp, Homo sapiens
ccctgatttatttatatttaaaaagcttatgtttaaaatgtgcttcaaagagaaataatacccataagatattcgtctaattccttataggcacttaggarcaaatactttaaaagatgcatttttagtaataatctgttagtctaagaaaagtggtaacaggaaaagccaataatttattacgctttgttttccatgtca

SEQ ID NO: 172222 - DNA, 201 bp, Homo sapiens
aaattaacttttaagctgatacttaaacacgttgataagtaaatgtttatgaattgtttttgtctcccacttaagaattctttatccactcaaaaaacacrggcagatcttgtctgccaaattataatttttcataattttattttatttttttgagatggggtcttactctgttgcccaggctagagtacagtggcatga

SEQ ID NO: 172223 - DNA, 201 bp, Homo sapiens
ctaccatcagagtgaacaggcaacctacaaaatggaagaaaattttcgcaacctacttatctgacaaagggctaatatccagaatctacagtgaactcaarcaaatttacaagaacaaaacaaacaaccccataaaattaacttttaagctgatacttaaacacgttgataagtaaatgtttatgaattgtttttgtctcc

SEQ ID NO: 172224 - DNA, 201 bp, Homo sapiens
gataaaaattgattgttgccaggcgcagtggttcatgcctgtaatcccagcactttgggaggctgaggcaggcggatcacctgaggttggaagttcaagascagcctgaccaacatgcagaaaccccatctctactaattagccgggtgtggtggtgcatgcctgtaatcccagctagtcgggaggctgaggcaggagaat

SEQ ID NO: 172225 - DNA, 201 bp, Homo sapiens
aaccctgagtctactaaaaatagaaaaattagccaggtgtggtggcatgtgcctgtaattctagctactcgggaggctgaggcaggagaatcgcttgaacycgggaggcagaggttgcagtgagacaagattacaccacagcactccaacctgggcaacagagcatgactccatcttaaaaaaaaaaaaaaaagaaaaaaa

SEQ ID NO: 172226 - DNA, 201 bp, Homo sapiens
tttgatacttttttaaggttaatgaattacattccaaaggatgttgtttgaagtaatgaataattatttgctacccagaataatcaaattttgctgttgtrgtacattcttaaactttgttttcttttttttttttttttttttttttgagacagagtctggctctgttgcccaggctggagtacagtggcatgatctcgg

SEQ ID NO: 172227 - DNA, 201 bp, Homo sapiens
tggtcacatacgtatattgtgtcaacaaaatagtattgccttaactttctggaaagacaagtcttaggataattgaaactcgaggggaaaattggcgttgwtttcaaaggttaaaaaatcagattagaaattgtggccctggaccaactttaaatttcccctcaaattagaagaaaaagataatagagaattgttctattt

SEQ ID NO: 172228 - DNA, 201 bp, Homo sapiens
atattcatttagagtggaagaactgctgcagacaaaaggaatggtttttagtgtagtgtgttcttagacctgaaaggttttgaaattcctccaggaatctyggatgacattgcctttagcgtgggccaacttgtcacttaaggaaaataattcagtcttttaagaatttttacaaaaagtatagacttgtcttatacttgt

SEQ ID NO: 172229 - DNA, 201 bp, Homo sapiens
ggaaaattggcgttgttttcaaaggttaaaaaatcagattagaaattgtggccctggaccaactttaaatttcccctcaaattagaagaaaaagataataragaattgttctattttcttacccctagtgttcataatgtgcagattacatacagtagaactgtattcagtttacctgagaagatagaattcatcaaccca

SEQ ID NO: 172230 - DNA, 201 bp, Homo sapiens
catctaagaaccataggaccaggaaataagcctgaaggttaactttggcagctttcagttgatgggactattattacattttcttctttcattcttctctytcttctcctgttttctttttctttcctaatttcctgaacttttatataagaaatgggtattactactactattttttatgagtgttttaacttgatttgg

SEQ ID NO: 172231 - DNA, 201 bp, Homo sapiens
ggtcaagatgttgccagaagtctggaattcactcaatgtgtaatgtagtttttgaagaaaagttaacattattttaaagatgataaagatgatagtcgctrttacattgattaatgtattatagtatttcccatcatcatcaaaggcaggacagccctttggctttttctataagatttcttttcttttttttttttgaga

SEQ ID NO: 172232 - DNA, 201 bp, Homo sapiens
ctttagaaaacagaggctcttcggttgcagtatcgctacttagacttgcgtagtttccaaatgcagtataacctgcgactgaggtcccagatggtcatgaraatgcgggaatatctctgtaatctgcatggtaagagaaatgcctggatgctctttggagctttgtagcatctcttctattttattcagcagttttattgt

SEQ ID NO: 172233 - DNA, 201 bp, Homo sapiens
catgaagttgggttccaaaattcacactcttatttttttttattttttatttttttttgagatggtctcactctgttgcccaggctggagtacagtggtgygatctcagctcactgcaacctctgcctcctcccgggttcaagcgattttcctgcctcagcctcccgagtagctaggattacaagtgcatgccaccacgcc

SEQ ID NO: 172234 - DNA, 201 bp, Homo sapiens
tcctcctgcccagcccagcttccagtcagcagttttcagcctttttcattcctctcattgtcaaacttttcaagagtcactaagaatacattacttttttytttttctcgctttgtcacccagactggagtgcagtggcgtgatcttggttcactgcaacctccgcctcccaggttgaagtgattctcctgccttagcctc

SEQ ID NO: 172235 - DNA, 201 bp, Homo sapiens
gataaactgaagtaacaacttctactagttagttatactttgggtttgtttttgttttttaataatctgtcttctctctctttctctctctttgaaagggkgccaaagagtttttagtaccatccagggaacctggaaagttttattctctccctcagagtcctcaacagtttaagcaacttctgatggttggcggtttag

SEQ ID NO: 172236 - DNA, 201 bp, Homo sapiens
taaagacagagctaaaatttttgaaaattcaaactctttctaaagataatacctttctaatattgaaaaatatttaaatataaaaatctttcaatttcttyagaaaacagaggctcttcggttgcagtatcgctacttagacttgcgtagtttccaaatgcagtataacctgcgactgaggtcccagatggtcatgaaaat

SEQ ID NO: 172237 - DNA, 201 bp, Homo sapiens
atttcacattcctatctactaagtgataatgtttctctctttttagggtttgtggatatagaaacccccacattgtttaagaggaccccaggggtatgtayattccttcaatcagtctattaataatgtcctattagttataaagctagactactttgcttttatattcacttggtccacttttatttactgcctcaggat

SEQ ID NO: 172238 - DNA, 201 bp, Homo sapiens
atttttatatttttagcagagagagggtttcaccatgttggccaggatggtcaccatctcttgacctcatgatctgcccatctcagcctcccaaagtgccrggattacaggcgtgagccaccgtgcctggccctttttttttttttttcaggacgggtcttgcagtattacccaggctggtcttgaactcctgggcttaag

SEQ ID NO: 172239 - DNA, 201 bp, Homo sapiens
ggaatctgtggtgcaagtgtctggtacagtcatttcccgtcctgcaggacaagagaatccagtaggtagtttcgaagatatctgtgtaatttttgcttgtwtgcatttgcaccatctgtgtacacattctggcaacacatgactggacattaggcactaaagttgaataaattctacaaatgaactgacagatttcaaaat

SEQ ID NO: 172240 - DNA, 201 bp, Homo sapiens
ccatctcttgacctcatgatctgcccatctcagcctcccaaagtgccaggattacaggcgtgagccaccgtgcctggccctttttttttttttttcaggaygggtcttgcagtattacccaggctggtcttgaactcctgggcttaagtgatcctcctgtctcagcctcccaagtatcagactgcaaggatatgccatgac

SEQ ID NO: 172241 - DNA, 201 bp, Homo sapiens
cttaagcttcacagcagtcttttggagttgatatttttatcccaattttacaatgaaaaagggtacagagaagttcgtaattagccacactgagattcagrcccaggtctatgaagtgctgatccctgtgttcttaatcaccgagttatcagtactcacccagttggttgagtgtgatgattgttctcaaccttgttgcaa

SEQ ID NO: 172242 - DNA, 201 bp, Homo sapiens
ttgcccaggctggagtgcagtggtaagatcttggctcactgcaacttcggcctcctgggttcaagcgattctcctgcctcagcctcccgagtagctgggaytacaggcgcataccaccacaccggctaatttttgtatttttagtagagatggaattttgccatgttggccaggctgacctcctgacctcaggtgatctgc

SEQ ID NO: 172243 - DNA, 201 bp, Homo sapiens
ataatgtcctattagttataaagctagactactttgcttttatattcacttggtccacttttatttactgcctcaggatggtcatattaactaggtttttytgaagaattgagaaaattatttgggtattttgagtcagaatcattttattccacataaattttctttcctttgagtttttttgttttttttttttttttt

SEQ ID NO: 172244 - DNA, 201 bp, Homo sapiens
tcatctatgacttgtctttttcccttactaacctgcaaatcacttaaggtaattttttctttacacttttccaataaacttttattattggttaagtcagktttagctgttttaaaactcaactttgtttcccctttatcatctaagcctagatggtggcacttagtggaccttcaaaatatatttaaactgaattatctt

SEQ ID NO: 172245 - DNA, 201 bp, Homo sapiens
gagtctggtcctaaaagatcgttttgtgggattaactgacaagtgtgaggtaggatggaaggagaactcagaccatgagatgactcctttagctttaagcyttcagagtccttaaagtttaagggcattgtgaaatctgttaacttttttttttttttttgagacagagtcttgctctgtcgcccaggctggagtgcagtg

SEQ ID NO: 172246 - DNA, 201 bp, Homo sapiens
ttttagttttgaaagacccaagtgtcattctcagtagacattttgaaagacccaaatgtcattctcagtaggtacatctcagtaacatctgttgaagggtrtaacaacgaagcttgatccaccagtggactgaaatgatactgggcttactaagactgaagagttcctataaccagtaattaaaaatgggccagcctccta

SEQ ID NO: 172247 - DNA, 201 bp, Homo sapiens
ggtccctcgatgctagagggcagtgccagtgtgggtgggtgaggcttcagagattagctccaagactaacagggtatcacccatctcttggctgtaggagragcagttgacagagtatagccagtcacagcatgtgctatcaaagtgtctgtcgaactcttaagtttatatgtatttttgaagtccagtagttgaggtcag

SEQ ID NO: 172248 - DNA, 201 bp, Homo sapiens
tatgtatttttgaagtccagtagttgaggtcagtaattcacacatgggagttatgataaggtttgaggtaacattcctggggggaagagggagttcactcraagttctcacataggggatctgataaaacatcatgctctcgaaaggagggggaatacaccccaaaacatcaaaccatgttaagtgtttggatcatttcaa

SEQ ID NO: 172249 - DNA, 201 bp, Homo sapiens
gcacgccacccacgcccagctaattttcgtatttttagtagagacagggtttcaccatgttggccaggctggtcttgaacgcctgacctcatgatctgccygccttggcctcccaaagtgctgggattataggtatgagccgccatgcccggcccttcttacgttttttaagtatcattgttttatagcttgcattgcttt

SEQ ID NO: 172250 - DNA, 201 bp, Homo sapiens
ccaggcatttttgtacatgttataatcatctatgacttgtctttttcccttactaacctgcaaatcacttaaggtaattttttctttacacttttccaatraacttttattattggttaagtcagttttagctgttttaaaactcaactttgtttcccctttatcatctaagcctagatggtggcacttagtggaccttca

SEQ ID NO: 172251 - DNA, 201 bp, Homo sapiens
acagtaaaagctgcatttactgaacaccaggcatttttgtacatgttataatcatctatgacttgtctttttcccttactaacctgcaaatcacttaaggwaattttttctttacacttttccaataaacttttattattggttaagtcagttttagctgttttaaaactcaactttgtttcccctttatcatctaagcct

SEQ ID NO: 172252 - DNA, 201 bp, Homo sapiens
cgccacacctggctaacttttgtatttttagtagagatgggggtttcactatgttggtcaggctggtctcaaactcctgaccgtgtgatccacccgcctcrgcctcccaaagtggtgggattacaggcatgaaccaccacgcccagccttcttttttcctttgagaaagtctcaccctggcacccaggctggagtgcagtg

SEQ ID NO: 172253 - DNA, 201 bp, Homo sapiens
tcaagttctttcttctaatctatattttcatttgtcattgtttcttccacagaaaaagtttcagagttcagcttcaaagctaaatgtaatcccccgtctcyccttcccctacaatagtaaaatgaagaaagctatttatttccaaattttattatgaatgcatttcttaaaaaagaacatgggattttgttcctaactaat

SEQ ID NO: 172254 - DNA, 201 bp, Homo sapiens
tttcaggaggatgtgaaaatgctctcccatctgctccaggctttagattatggggcaccccctcatggaggaattgccttaggtaaacaacttttcctttkataagataaactgaattccattgcactgtctcaaattcaggttctcagtttgtgttggtagaggtggaaggatgagtccaagagttccatgagaatgtaa

SEQ ID NO: 172255 - DNA, 201 bp, Homo sapiens; identical to SEQ ID NO: 31006

SEQ ID NO: 172256 - DNA, 201 bp, Homo sapiens
ctctcccatctgctccaggctttagattatggggcaccccctcatggaggaattgccttaggtaaacaacttttccttttataagataaactgaattccaytgcactgtctcaaattcaggttctcagtttgtgttggtagaggtggaaggatgagtccaagagttccatgagaatgtaagtttctgttgaaatttcagta

SEQ ID NO: 172257 - DNA, 201 bp, Homo sapiens
tgtctggtacagtcatttcccgtcctgcaggacaagagaatccagtaggtagtttcgaagatatctgtgtaatttttgcttgtatgcatttgcaccatctstgtacacattctggcaacacatgactggacattaggcactaaagttgaataaattctacaaatgaactgacagatttcaaaatcttgactataaacaaac

SEQ ID NO: 172258 - DNA, 201 bp, Homo sapiens
agccccagcctttatggtaattaagctgtgactattaacgttttttaaaccatctacttataattactgaagattcctgtaagttcatttgtttctcagarctcttttcccccttgttctgtagtcggcagcctctgtgaagaagattttatgtgaagcccctgtggaatctgtggtgcaagtgtctggtacagtcatttc

SEQ ID NO: 172259 - DNA, 201 bp, Homo sapiens
tttaatagatacaaggtttcaccatgttggccagactagtctgaaactcctgacctcaagtgctccccctgccttggcctcccaaagtgctgggattacargtgtaagccaccacatctggctggttactattttgtagtaaaattgaccatgagttagttttctttgtatttctaatacttaatgcttgttacagagtat

SEQ ID NO: 172260 - DNA, 201 bp, Homo sapiens
agcctcccaattagcgggactacaggcatgcgtcaccatgcctggctgatttttttgtattttttttttttttaaatagagacaaagttttgccatgttgyccagtctgctctcaaactcctgggctcaagatatccacctgggtttttctcccagagttctgggattataggggtgagccaccgtaccctgacgtatttt

SEQ ID NO: 172261 - DNA, 201 bp, Homo sapiens
tcatcagtattattgtaattctttggctgcaggatatttggcagctgttgcaccccactggcaaatcctattcatacttctttcccattcaccattgccaytggagaattgatttctctctcctctactctaacctttcccaattcattttggattgttcaatgtgaaacattttaatttcatatcatacagctattcagc

SEQ ID NO: 172262 - DNA, 201 bp, Homo sapiens
tatgtgagattaagtacaagatactaagtggataagaaagcacatttacatatttttgcttactattacattgtaaaatatttttattttgatcctactakaagagctgagggaaaggcagaatagcctgattattgctggagaatttctctgttccctaccatgattccagaagctcttgcacacttcatcagtattatt

SEQ ID NO: 172263 - DNA, 201 bp, Homo sapiens
gagtgtttgcctagaaccacttagctgtggcagccctgctgatggggcaaggtgctctgcaagtttctaggcaaggtttctggatccatgttgaaattgarcgcagatagcacaaccatattataacagctacttacaaaccagtcagcacatgtgtggtgagcatttctagagttgagttattgcttaggtcaattgtaa

SEQ ID NO: 172264 - DNA, 201 bp, Homo sapiens
gtttaaggtttttgaaatatgatcttaaccactgaaagatgagtggggtgagaaacatagaaaaaagtaaccgtgtgaaaataattcccaaggaaaagccrgtattgttgaacgggtacatactggctcttttactaagatgtcttctgaattaaaagagcatgtgaaattataacacatttatacgtcaatgaaaataaa

SEQ ID NO: 172265 - DNA, 201 bp, Homo sapiens
ttttttttttggagatggagtctcgctctgtcgcccaggctggagggcagtggtgtgatcttggttcactgcaacctccgcctcccgtgttcaagcagttytcctgcctcagcctcccaagtagctgggactacaggcacatgccaccacaccccactaatttttttgtattttttagtagagacggggtttcaccgtgtt

SEQ ID NO: 172266 - DNA, 201 bp, Homo sapiens
ttttagtaataaagtttttttttttggagatggagtctcgctctgtcgcccaggctggagggcagtggtgtgatcttggttcactgcaacctccgcctccygtgttcaagcagttctcctgcctcagcctcccaagtagctgggactacaggcacatgccaccacaccccactaatttttttgtattttttagtagagacg

SEQ ID NO: 172267 - DNA, 201 bp, Homo sapiens
gcacatggttctgcaggctgtgtaggaagcatagcagcatctgcttctggggaggtctcagggagcttccaatcacggtggaaggccaaagaggagcaggygcatcacatggtgagaaccacagtgagcgggggtggggatgtgccacacacttttaaatgaccagatttcactaaggagatggcccaagtcattcatgag

SEQ ID NO: 172268 - DNA, 201 bp, Homo sapiens
attaacaaaacaactctatatagcaccaaaaaatatacaatacttaaatgtaaattttaaacaagaaatgcaatacttgaacactgaaaactataaaatgttgttgaaataaagatgacctaaatgaaaaacaccctatgttttgaatcagaagacctaatattgatcaccaaactgatctacagattcagcacaatcctt

SEQ ID NO: 172269 - DNA, 201 bp, Homo sapiens
tcatactgtaattctggacacatttcattagatagttgtcaaaacccacagaatgtataacacagtgaaccttaatgtatggacttcagttaacagtaacgtattgatattggcttatcaattgtaacaaatacaccatacaaatgcaagatgttcataatagaggaattcatgtgggggaggatgtatgggaaattgaaa

SEQ ID NO: 172270 - DNA, 201 bp, Homo sapiens
catactgtaattctggacacatttcattagatagttgtcaaaacccacagaatgtataacacagtgaaccttaatgtatggacttcagttaacagtaacgtattgatattggcttatcaattgtaacaaatacaccatacaaatgcaagatgttcataatagaggaattcatgtgggggaggatgtatgggaaattgaaat

SEQ ID NO: 172271 - DNA, 201 bp, Homo sapiens
atagaggaattcatgtgggggaggatgtatgggaaattgaaattctgttgagtttttgtcaacctaaaactgctttaaaaaataatgtctttttttttttwaaaatctgctgaaggaaagacattgttaagaaaattcataagcaaaccacagaagagaatacttgcaatacataaatctgacaaaggccttgtatccaaa

SEQ ID NO: 172272 - DNA, 201 bp, Homo sapiens
caggagaagctcttcaactcagtgggcaaaggttgcagtaagctgagatcgtgccactgcactccattctaggtgacagagtgagaccctgtctcaaaaamaaaacaaaacaaaacaaaacaaaaaaaccagtagataacataggggaaaagcttcaaggtattggatttggcaatggtttcttagacatgacaccaaaag

SEQ ID NO: 172273 - DNA, 201 bp, Homo sapiens
cagctaatttttaaaaatctctttagaggtaggtttttcctatattgcccaggctggtcttgaactcctgacctcaaatgcctggactcaagtaatccttmcgcctcagccttccaagtagctgggattacaggcatgagctgccaagacaaaatattgttcaagacaaaattattgctagagacagaggggtattttata

SEQ ID NO: 172274 - DNA, 201 bp, Homo sapiens
ttccaattaggtggtcaatttttgaataagttccatgtggtgctgagaagaatgtatattctgttgatttggggtgtagagttctgtagatgtctgttagktctgcttggtccagagttgagttcaagtcctgaatatccttgttaattttctgtctcattgatctaatattgacagtggggttgttaaaatctcccacta

SEQ ID NO: 172275 - DNA, 201 bp, Homo sapiens
gtttgtgctacattttgttttctttataatgtttgttttggttgatgcaaaattgtttcatcttagatgcttgaggtggaaggagggaattgttttgtagyattcatatcattgaaattaccaccctatatttttctcctcaaagaaagaatatggtgatgaactaagaatagaaaataataactacatatggatgcataa

SEQ ID NO: 172276 - DNA, 201 bp, Homo sapiens
tgggactacagatgcctgccaccatgcctggctaattttttgtatttttagtacagacgtggtttcactgtgttagccaggatggtctccatctcctgacstcgtgatccacccgcctcggcttcccaaggtgctgggattacaggcgtgagccaccgcgcccagccctgtgtgctgctttatcaagtgacagaggcaaac

SEQ ID NO: 172277 - DNA, 201 bp, Homo sapiens
gggctgactccataacaagtgagaaggatacatctcttagatcatatctttttagtattttttgaattttgaaccctacatgtgtattacctatttttttwaaaaaacatttcaaaattgtgcagtggaagggtctgtaagatggagcagtgttgaaataatggagccttaattacctttcaagaaacttctgcagtgact

SEQ ID NO: 172278 - DNA, 201 bp, Homo sapiens
cctgttataacagttctatgtagtagtagaggtagaattctgaattgaaggtggttaggacttatagcaacatttctgggatgagtttttcagtattcccrgacttcaatttaattcagggtttcttttttgctctccacttatgaatatgtgataaatattttatgtagtcgtgtacttttgctatagaaaatcagtgga

SEQ ID NO: 172279 - DNA, 201 bp, Homo sapiens
caggcgtgagccactgcacccgggcttgaccaaagtcttttagtgtctgaaatatcatttgaagattttcttttggctacagaatatgtagatacccccaytgtgaatacattaacctactatgctttaacaaagtaattatagaacccgatcatatcagatgaattttgtagttccctggttgtaaacggttatactatt

SEQ ID NO: 172280 - DNA, 201 bp, Homo sapiens
aatgtattacaatctcacttgatcttagccaaaaggccgagaagtgatataaatgtattacaatctcatcagactatacaattaagatgtatagatgttaytggccaggtgcagtggctcatgcctgtagtcccacactttgggaggccaaggcggactgatcacatgaggccaggagttcgcgaccaacctggccaacat

SEQ ID NO: 172281 - DNA, 201 bp, Homo sapiens
agcaagtcaagacagaggaaaatactcaaggttcccaggtaaattgtgttctatttggatgatgatctgatgaaaccttctgaactcactggcttctagartcagcatgaaaatgggcttatgaaacctatgcctgtcttctttcaggtgaactttgacttatggacttagaataaaaaatgttgaggacagtatattagt

SEQ ID NO: 172282 - DNA, 201 bp, Homo sapiens
ggttcccaggtaaattgtgttctatttggatgatgatctgatgaaaccttctgaactcactggcttctagagtcagcatgaaaatgggcttatgaaacctwtgcctgtcttctttcaggtgaactttgacttatggacttagaataaaaaatgttgaggacagtatattagtaatatgggaggtttcttccaatattaaac

SEQ ID NO: 172283 - DNA, 201 bp, Homo sapiens
caagttgctcatactgtcccatttaatactctactatctgtatgtagtactctggtaaataaatagttttagatttgtggtgaagttacagagctgtcaarggatgtgttaacctatagaccctggagtatttgaatcctaccttgactcacaaccttcttgaagaattacgcaaattcttcaatcagtcactcaccccag

SEQ ID NO: 172284 - DNA, 201 bp, Homo sapiens
tgtttgaatccatggagggtcgactgtaaaagtagcaccttatggctgacgagccagcattcaagttgctcatactgtcccatttaatactctactatctrtatgtagtactctggtaaataaatagttttagatttgtggtgaagttacagagctgtcaagggatgtgttaacctatagaccctggagtatttgaatcct

SEQ ID NO: 172285 - DNA, 201 bp, Homo sapiens
tcaaagtgagatctgctgactggcagcatcggcatcaccctggagcttgttagaaatgcagattattaccccttgccctcataccttctaccagtcagtcygctggtgaagtgcacacagcatctttaatccaggtgattctgatgtttggtgaagtttgagaagcactggttctttttacactccagagagcttttgtga

SEQ ID NO: 172286 - DNA, 201 bp, Homo sapiens
ttaagaaagccttaggtattcttggaaagactcactgagattcagactggattaatttaaaaagtaactccactaggcatataaaaaacaaatactttttwaaatcttctaaaagaaaagaaagaagatgcaaggaatgtacagtgagattatgttcatactctataaactggaagttagaaatcttagaatagtgtctgc

SEQ ID NO: 172287 - DNA, 201 bp, Homo sapiens
ttaaaagttgtagtacgttttgaagtggacttaggacttccatgtttttatgtctgcctggcaattcagtgatggtgataagataggaaacagtgggcagraggagaaaacagggaaaaactacagagaacctttagaacaaacattatatgcatgtatgggtatttatatatatatacacacacacaaatacacatttat

SEQ ID NO: 172288 - DNA, 201 bp, Homo sapiens
atgaaaaaaaaaaaaatcttagccataatattgatgagaaaggattactttggatttttttttttttttttttttttgagacagagttttgctcttttgcycaggctggagtgtagtggcacagtcttggcttactgcaactctgccttccggtttcaagcgattctcctgccgcagcgtcccaagtagttgggattacag

SEQ ID NO: 172289 - DNA, 201 bp, Homo sapiens
ctctaaaaacactttaactgtttttttgttgttgttgcttgtttgtttgtttgttttgatacagagtctcactctgttgcccaggctagagtgaagtggcktgatcttgactcaccacaacctctgcctcctgggttcaagcgattctcctgcttcagcctcccgagtagctgggactacaggcgtgcaccaccatgcctg

SEQ ID NO: 172290 - DNA, 201 bp, Homo sapiens
ttttgatacagagtctcactctgttgcccaggctagagtgaagtggcgtgatcttgactcaccacaacctctgcctcctgggttcaagcgattctcctgcytcagcctcccgagtagctgggactacaggcgtgcaccaccatgcctggctaatttttgtatttttagtagagatggggtttcactatgttggtcaggctg

SEQ ID NO: 172291 - DNA, 201 bp, Homo sapiens
aataatattccactgtatggctatactatattttgtttacccatccatcagttgatggacatttgggttttttggctatcgtgaacattacatacaagctstgcagatatgagttcattttatatctcttgtttgttttttagtgtctttctcgagaagcaggtggaaacatgagcattcagtttcttggtacagtggtaa

SEQ ID NO: 172292 - DNA, 201 bp, Homo sapiens
gcaggaagagagaaacaaacatgctccaaaccttcatcacagtagtgtataccttacttaattattaaagtccgtaaacagttcaaaattggccgggtgcrgccgctcacgcctgtaatcccagcactttgggaggccaaggtgggcagatcacctgaggtcaggagttcgagaccagcctgaccaacacggagaaacccc

SEQ ID NO: 172293 - DNA, 201 bp, Homo sapiens
ctgaccaacacggagaaaccccatctctactaaaaatacaaaattagctgggtgtggtggcacatgcctataatcccagctactcaggaggctgaggtagsagaatcgcttgaaccgggaaggtggaggttgcagtgagctgagatcatgccattgcactccagcctggctgggcaacaagagtgaaactgtctccccacc

SEQ ID NO: 172294 - DNA, 201 bp, Homo sapiens
gatccttggtgaccaacttctattgtagcatgtatcactacttcattcctttttatggccaaataatattccactgtatggctatactatattttgtttasccatccatcagttgatggacatttgggttttttggctatcgtgaacattacatacaagctgtgcagatatgagttcattttatatctcttgtttgttttt

SEQ ID NO: 172295 - DNA, 201 bp, Homo sapiens
atgcctgtaatctcagcactttggaaggctcaggtgagaggattgcttgaggccaggagatcgagaccagcctgggcacatagtgagaccacacctctacaaaaaaaaaaaaaaaaattagccaggcatgatggcaaacatctgtaaccccagctactcaacccgctgatgtgggcaaattgcttgagcccagggggttga

SEQ ID NO: 172296 - DNA, 201 bp, Homo sapiens
ctcaagtactccgcccgcctcggcctcccaaaattctgggattagaggcgtgagccaccgtgcccagccaaatcatgtttttgaacttgttttaaatatckgtgtgtgtgtgtgtgtgtgtgtgtatgtatttttttttttatggagtcttgctctgttgcccagggtagagtgcaatggcacgatctcagctcactgcaa

SEQ ID NO: 172297 - DNA, 201 bp, Homo sapiens
tgaggtgggagaatcattggaacccaggcagtggaggttgtagtgagccaagatcatgccatcgtacttcagcctgggcaagagagtgagactccacctcaaaaaaaaaaaagaaaaaagaagaaaaaaaaggacagcagacaatggcactctgcaggtggaactgcttcatgtttcccactcctgtccctgttcttcaag

SEQ ID NO: 172298 - DNA, 201 bp, Homo sapiens
aaaaaaggacagcagacaatggcactctgcaggtggaactgcttcatgtttcccactcctgtccctgttcttcaagagccggcctccccttctctctgctccatccacatgggtttcaaagaagcttagctctttctcaccccagggtttttttctttctttttttttttaaatatgatattccttctagaatattcccac

SEQ ID NO: 172299 - DNA, 201 bp, Homo sapiens
cactttgggaggccgaggtgggtggatcacttgaggtcagaagttcgagaccagcctggccaacatggtgaaaccccatctctactaaaaatacaaaaatwagccaggtgtggtggtgggcgcctgtaatcccagctacttgggaggctgaggtaggagaattgcgtgaacctgggaggcggaggctgcagtgggccaaga

SEQ ID NO: 172300 - DNA, 201 bp, Homo sapiens
atcaccctggagcttgttagaaatgcagattattaccccttgccctcataccttctaccagtcagtctgctggtgaagtgcacacagcatctttaatccargtgattctgatgtttggtgaagtttgagaagcactggttctttttacactccagagagcttttgtgattatatatattgatatttaccacattataaatt

SEQ ID NO: 172301 - DNA, 201 bp, Homo sapiens
aaatgttactcaggtgaaagcctctacctacatttttaatgagctagtgaggtatgaaggttagatagtctgtcccatatttcaagtgttctttgtatccrttaaagtgttttaatgtaaaatgactcacattcatattaggagctatatatagattcaggtcaagttgatgtcgttgagttgttgggtgcatttataaag

SEQ ID NO: 172302 - DNA, 201 bp, Homo sapiens
aaagcaggttttaggagaaactagcagtctgtcacaataaactgtgtcttaaaaattgtttatatataattatatatatgtaactattgtgatatataatstgctaatcattaggtaaactattcagtctctctggattgcaattttcttttttttaattttttttttttcttttagagatagggtctctctctgtcaccc

SEQ ID NO: 172303 - DNA, 201 bp, Homo sapiens
aggaaacaaaggccttgtagttaattataggtgttttgcaattggttatttaaagaagatccccattccccatcacatctccttgattcatgagagatttytgattagtaccgctggattaggaataagacattttctaagaaatacttttcttttcccttctttttatttttcctttcccattagtatattctatgaaat

SEQ ID NO: 172304 - DNA, 201 bp, Homo sapiens
agtcagcctcatgaggtcattcaaagatacacacacccatcctgatgtgccactccgtttgaattgccaaagctgagtttctgccatgtcaggaaacccayagtaagacgagaagaaaggaagctcaagcaagcaatgagagagtcggaagttgcgtacatcactttagcttaccttcctttgtctaggaattagtttgtc

SEQ ID NO: 172305 - DNA, 201 bp, Homo sapiens
ctttgtaattgtggttgttgttttgagacagggtctcactctgtcacttaggctggagtgcagtgatgggcccagggctcattgcagtcttaacctccagkgttcagctgatcctcccacctcaacctccctggtagctgggactacaggcacaagccagcacacccagctaattttttgtatttattgtagagatgggat

SEQ ID NO: 172306 - DNA, 201 bp, Homo sapiens
tctttgtaattgtggttgttgttttgagacagggtctcactctgtcacttaggctggagtgcagtgatgggcccagggctcattgcagtcttaacctccarggttcagctgatcctcccacctcaacctccctggtagctgggactacaggcacaagccagcacacccagctaattttttgtatttattgtagagatggga

SEQ ID NO: 172307 - DNA, 201 bp, Homo sapiens
tttacagttaaagtataaattaaattcctcttatagttagcatggcctacacccaggaatgaacaggggcagcttggaggttaaaagcaagataaagttgrttaggtcggatttttctcagtgtcataatttttgcagtggccatttcattcctgcaaaaaagcacaataccatcattacacccaaggaaaattgacagca

SEQ ID NO: 172308 - DNA, 201 bp, Homo sapiens
caaaattgagatcgtctttcaggtctgtttgctctccacatcctaaggtcctaggtctgaatcagacttagttcttctgttgtggctgcttagcacatcargctcctaactgaatgattgtagtggtgttttactcggtctcctagcctcgtccttccccattctatgtatcttcagcatgacctcagaccaccgtctttc

SEQ ID NO: 172309 - DNA, 201 bp, Homo sapiens
caggcgtggtggtgggtgcccatagtcccagctactcaggaggctgaggcaggagaatcgcttgaacccaggaggtggaggttgcagtgagatgagatcgygccatcacactccagcctgggtgacagtgtaagactctgtctccaaaaaaataaaaataaaagccatgtgttataaatcacattatcaatccattagtca

SEQ ID NO: 172310 - DNA, 201 bp, Homo sapiens
tagattagttttggtcccaactagaagttatttatctactccatctggcttctgaaaggagtactcttttgtatttacatgaataccatttcatgttttayacttaaatgaacattttcccactaatttgcttactctatatatgtatatataggttcaccagttactacagtttttaagtgactaaaatacaaagtaggc

SEQ ID NO: 172311 - DNA, 201 bp, Homo sapiens
agaggccgaggtgggtggatcacgaggtcaggagatcgagaccatcctggctaacacagtgaaaccccatctccactaaaaatacaaaaaattagctgggygtggtggcgggcgcctgtagtcccagctgcgtgggaggctgaggcaggagaatggtgtgaacccaggaggcagaacttgcagtgagctgagatcgcgcca

SEQ ID NO: 172312 - DNA, 201 bp, Homo sapiens
acagaaataaaagcccttcaggtatgttatagtgttccttttacaaccttacaaagagaataatagtagtgtgaattttaagaaaatgaaactatcgcttstcttctgatgtcaccgtataataaagccatcattataccctcatgtggatatcctagacaagaggttctacatgtggtcccttgataattgcctaaatta

SEQ ID NO: 172313 - DNA, 201 bp, Homo sapiens
gggtggatcacgaggtcaggagatcgagaccatcctggctaacacagtgaaaccccatctccactaaaaatacaaaaaattagctgggtgtggtggcgggygcctgtagtcccagctgcgtgggaggctgaggcaggagaatggtgtgaacccaggaggcagaacttgcagtgagctgagatcgcgccactgcactccagc

SEQ ID NO: 172314 - DNA, 201 bp, Homo sapiens
ttaaccggggatggtggtgcacacctgcagtcccagctgctcaagaggctggacccctgcactccagcctgggcaacaaagcaagactccatctcaaaaawaaataaataaataaataaataaacaaacaaacagataactcgttatgccagcacaatttaatgatagtcgtgcttctcttcccttactaccttgccacca

SEQ ID NO: 172315 - DNA, 201 bp, Homo sapiens
accatgttggtcaggctggtctcaatctcctgaccttaggtgatccgcccgcctcggcctcccaaagtgctgggattacaggcgtgagccactgcacccarcccatgattttttatttctaacttaatacctccatactttctttttattctcttcttttctttcttttccttttctcttctcttttctttctttctttct

SEQ ID NO: 172316 - DNA, 201 bp, Homo sapiens
cttgaacccaggaggtggaggttgcagtgagctgagatcgagccattgcactccagcttaggcaacaagagcgaaactctgtctcaaataaaaaaaaaaagagagagagagaaagaaaatgaaactgtactccacagtgtgggagcgagcctgagcagtggctcaagggcccggataccgaatcttcttggttccaaatac

SEQ ID NO: 172317 - DNA, 201 bp, Homo sapiens
attaaagttttttgtgcagagttgcaggtagccaaattactttttgtattcctgtgccttagattcctcatctgtagagcaaaattgagatcgtctttcargtctgtttgctctccacatcctaaggtcctaggtctgaatcagacttagttcttctgttgtggctgcttagcacatcaggctcctaactgaatgattgta

SEQ ID NO: 172318 - DNA, 201 bp, Homo sapiens
gtgagccactgcacccaacccatgattttttatttctaacttaatacctccatactttctttttattctcttcttttctttcttttccttttctcttctcttttctttctttctttctttctttctttctttctttctttctttctttctttctttcttttctttctttctttctttttttttttttttttgacagcattt

SEQ ID NO: 172319 - DNA, 201 bp, Homo sapiens
gaaaaaatatttcttgtgtttctaattcacaggttgcttgagactttttttggaggtgctagtattttattggccacagagttttgaaggaaaatacaatkaaatcatgcttctgtcatttggggaaaaggaataacagattcattttttctttttttaaagatgagagagatagtatttggaatctatctttagattatt

SEQ ID NO: 172320 - DNA, 201 bp, Homo sapiens
tgaacccaggaggtggaggttgcagtgagctgagatcgagccattgcactccagcttaggcaacaagagcgaaactctgtctcaaataaaaaaaaaaagagagagagagaaagaaaatgaaactgtactccacagtgtgggagcgagcctgagcagtggctcaagggcccggataccgaatcttcttggttccaaatacct

SEQ ID NO: 172321 - DNA, 201 bp, Homo sapiens
tttcatgacccatgagaagtatgatgtcacattcagatcttattgatgataagcagttaactagaacatagccacattcattcatttttgtctgccatgtrtagctgcttttgcagtttttgtcgtatgaagctgaatgcacagactttcttgccacgcagcagttcagtgggttattgtgatttttttttttttaatctc

SEQ ID NO: 172322 - DNA, 201 bp, Homo sapiens
tactttctttttattctcttcttttctttcttttccttttctcttctcttttctttctttctttctttctttctttctttctttctttctttctttctttytttcttttctttctttctttctttttttttttttttttgacagcattttgctctgtcgtccagcctggagtgcagtggcaaaatcatggttcagtgtagc

SEQ ID NO: 172323 - DNA, 201 bp, Homo sapiens
gcctataaggttgcagaaagcagccaaccagaggctgaagtgaagttacaaaggtcacactcctgtgcaaacatgttgcaaagttatactcttatgcaaaygaagacttggctggcaatcagtctgattggttttggacagcaaccattcagagactggagtgaagttacaaagttgcaaagactggacccacagtcaatc

SEQ ID NO: 172324 - DNA, 201 bp, Homo sapiens
gcagtatggctcactgcagcctcaacctcccagactcaactgatcctcctgcctctgccttctgagtaggtgggactgcaggcctgtgccaccacatgcarttaattttgttgattttttgtagagatgagggcacactatgttgcccagaactcctggactccagtgatcatcccgcctctgcttcccaaagtgctggga

SEQ ID NO: 172325 - DNA, 201 bp, Homo sapiens
ctcattcctgcatggcaaggccaggtgggtttctctgtgtggctgtaccagcttatgtgcccatcagtagtgaagatgatagtcacaatgagaacaatgarctaaccttattctgtacttattatgcccggcactgactgttctaagcactttgtatgtatgaatgcccccaaaaacccaataaagtacgtactagtgtta

SEQ ID NO: 172326 - DNA, 201 bp, Homo sapiens
gagttgtgcttagggggagaggtgaattgagaatgaagggtgggagatgtctgatagtttcacagagtccactgtggtactgaagacagaaattttaattrtgctagaggtttctgagcagtggtttgagaatctcgtacagaggtgcttgggtgttttgttgtggttgttattgtttgtttttcttccttgtcttattaa

SEQ ID NO: 172327 - DNA, 201 bp, Homo sapiens
ctccatcgtgaccacttaccatagatgtgactctgtatttgctgttcattcattcaatatgtatttatttgccttgtatatagtatgtacttatatgggcrctggtcatagaaagaggaaactgaatggttcacttaacttttgaaattgtcttttcacctatcagggatgtgtgaatagtattgatgtaaagcacttggc

SEQ ID NO: 172328 - DNA, 201 bp, Homo sapiens
cagtttagacaggatatattgaataaaaatgtcacttaaaattttgttaatttaaaagaacattattttgataacaaaaaatttcagcattctctcaccayaccatatcttgagagcaatctcctatgccttctctattaaatgacagtgatgtattgaagaagtttgtgcatgtgtggaaggattttgtaaatttcaaag

SEQ ID NO: 172329 - DNA, 201 bp, Homo sapiens
gaccatcctttcaggctggaatagcaacaaactacaaagacagaggcctattatgccaaacacttatgaaactgaattttatgtaatgggacagtttcctyatatttcagtgggtaatcatactaaactactttgctaagttgaatccaacaagttctgcttacaaaagatagctttcgaaaaaacaagtctttgtaatac

SEQ ID NO: 172330 - DNA, 201 bp, Homo sapiens
actgctagggaagattgaaataaattccagttctgagtgaaattttatttctgtttttctttacatcaatcttttctttttccttttttcttttttttttwttttttatttttgagacagagtcttgctctgtcactcaggctgtagtgcaatggcatgatctcagctcactgcaacctccgcctcccaggtttaagcgat

SEQ ID NO: 172331 - DNA, 201 bp, Homo sapiens
catttttgtctgccatgtatagctgcttttgcagtttttgtcgtatgaagctgaatgcacagactttcttgccacgcagcagttcagtgggttattgtgatttttttttttttaatctcaggaccaagattaaagttttttgtgcagagttgcaggtagccaaattactttttgtattcctgtgccttagattcctcatct

SEQ ID NO: 172332 - DNA, 201 bp, Homo sapiens
gggaagtattcatttagggaagtaatgagagctaaacatggaaaaataggttggaggaccagatagtgaatgagagcctgaagaatctatgcttttcagtyagcagtggagatattacaactttttgcagagtacagtaacgtccatcaaaatgccattgtagaatattaatgtgtcctcataatagaggaggggttaagg

SEQ ID NO: 172333 - DNA, 201 bp, Homo sapiens
ggaaaggtacagtacaattgttgaaattctatgaaggctatacactctaatctcatcagggggaattctgcatcacagggaacctttatattccagaaagrttttagaaatttttttgtaacttgattttgccctttgccatttgtttaaaaattaagaattattgcaacctaaattctggtttataacaattaactataa

SEQ ID NO: 172334 - DNA, 201 bp, Homo sapiens
ctgggactacaggtgtgcaccaccacgcctggctaatttttgtatttttagtaaagacggggtttcaccatattggccaggctggtcttgaattcctcacmtcgtgatccgcctgcctcaacctcccagagtgctggaattacaggcatgagccaccgcgcctggcccaacagaccagttttgtaggtgagaattatctca

SEQ ID NO: 172335 - DNA, 201 bp, Homo sapiens
tccctcagtttttcctctctctgaaaatggcaacttgaactaatccttgattactttctctcctcttcctctctctcctcttcccctcctctcctctctcctctctctctctctctctctctcttctctccttcctctccctctctgtcctcttcctctcctctctgtcctcttcctctcctctctgtcctcttcctctcc

SEQ ID NO: 172336 - DNA, 201 bp, Homo sapiens
tgtaccacaaatgcagtgaaatgcttttaatggaatccagagtgataggtggattatgacatgtggggagatgccttcttgaaataggacataaatcatgrttttttttttttttctgagacggagtctcgctctgtcgcccaggctggagtgcagtggcatgatctcagctcactgcaacctccacctcccaggttcaag

SEQ ID NO: 172337 - DNA, 201 bp, Homo sapiens
ccctcagtttttcctctctctgaaaatggcaacttgaactaatccttgattactttctctcctcttcctctctctcctcttcccctcctctcctctctccyctctctctctctctctctctcttctctccttcctctccctctctgtcctcttcctctcctctctgtcctcttcctctcctctctgtcctcttcctctcct

SEQ ID NO: 172338 - DNA, 201 bp, Homo sapiens
cttctctttttactaaggtcttctgccatgggaagaaactctgaatgttagcaaccatctggatggtgttagttgtatgtctctctatgtatgttgaaaasaaaatgttgaagaattgaatttctcctgcttatgggttgtgtcacatttaatagcgttctttaagaaaaaaacacgattgctcaatatgattatatgagc

SEQ ID NO: 172339 - DNA, 201 bp, Homo sapiens
aggcacccaaaacatgctagcataaaaaaacacaagaaacaaaaacacaccacatgtacacacccctacttaaatggacaacaaaagtcaccggaaaaaaggaaaaaaagaatgtctttttgatttgttttgttttgtttttgtttttggagacagagtctcactcagttgcccaggctggagtgcagtggcgcgatctcg

SEQ ID NO: 172340 - DNA, 201 bp, Homo sapiens
acattttgttttctttataatgtttgttttggttgatgcaaaattgtttcatcttagatgcttgaggtggaaggagggaattgttttgtagtattcatatmattgaaattaccaccctatatttttctcctcaaagaaagaatatggtgatgaactaagaatagaaaataataactacatatggatgcataataagaaata

SEQ ID NO: 172341 - DNA, 201 bp, Homo sapiens
gaccagcctgggcaacagtgggaccccatctctacacacacacacacacacacacacacacacacacacacacacacacacacagtgggaccccatctctacacacacacacacacacacacacacgcacatatacacacagtgggaccccatctctgcgcgcacacacacacacacatacacacacacacacacacacac

SEQ ID NO: 172342 - DNA, 201 bp, Homo sapiens
accagcctgggcaacagtgggaccccatctctacacacacacacacacacacacacacacacacacacacacacacacacacagtgggaccccatctctacacacacacacacacacacacacacgcacatatacacacagtgggaccccatctctgcgcgcacacacacacacacatacacacacacacacacacacaca

SEQ ID NO: 172343 - DNA, 201 bp, Homo sapiens
tacacacacacacacacacacacacacgcacatatacacacagtgggaccccatctctgcgcgcacacacacacacacatacacacacacacacacacacmcacacacacacacacacacacacactagcggagtatggtgacgcccacctatagacccaggtactcagaaggctaaggagtaaagatggcttgagcccaa

SEQ ID NO: 172344 - DNA, 201 bp, Homo sapiens
tatattgggttttttgtttgcttgtttttagctaatcacatatggctctgatagaactgaggcactgaagagaatggcagatgcactggataactatgttrttcgaggtaaaaacaaagatttgcactcgttggttattgtatatggtgtccagttccagagaacagcctgggggtttaccaatgagaatatggcacagca

SEQ ID NO: 172345 - DNA, 201 bp, Homo sapiens
ccatgagggttagaatccagttcttcaaactcttgttcatgttgataatttggcctcttcccatgtgaattcaacacaaatgttcttaatagcatctagartggtgaagaaggttttcaatttactttgcccagatccatcagaggaaacactgtggcagctgtagtcttccaaatgtatttctgaaataataagacttaa

SEQ ID NO: 172346 - DNA, 201 bp, Homo sapiens
agcatcatactcttggaactttgaggccattgtgaagtcaaataatagttcctgccaggcacagtggctcacacctgtaatcccagcattttgggagtccraggcaggtggatcacttgagctcgggagtttgagactagcctgggcaacatggcaaaactctgcctctacaaaaaacacaaaaattcaccggtcacggtg

SEQ ID NO: 172347 - DNA, 201 bp, Homo sapiens
tccaaggcaggtggatcacttgagctcgggagtttgagactagcctgggcaacatggcaaaactctgcctctacaaaaaacacaaaaattcaccggtcacrgtggcacatacctgtagtcccagctactcggcaggctgaggtgggagcatggcttaagcccaggaggtggaggttacagcgagccaagatcatgccactg

SEQ ID NO: 172348 - DNA, 201 bp, Homo sapiens
ttaataaatactttacttcaaagaacctcactacaagaaaactggccgctttcctgctattcttgttctccggctcagtatgactataagtagctcatatccggtcctctgtggtctcaggtggtcgtttgtgtttatgatccttaagctgaaactgtaaggactgtgtccctattttaagtctttagcagatccaccgtg

SEQ ID NO: 172349 - DNA, 201 bp, Homo sapiens
ctacagcctcaaaactcctgggctcaagcgatcctcctatctcagttcactaagcagctgggactaccgaagcacaccaccacagcctgctaattaaaataaaaaaaaaatgtagaaacaaggtgccactatgttgcctgggctggtgttgaactcctaggctcaagtgatcctcctgcctctgtctcccaaagtgctggg

SEQ ID NO: 172350 - DNA, 201 bp, Homo sapiens
ggaggctgaggctggagggtcgcatgagctcaggagtttgagaccagcctgggcaacaacatagtggtatcctgtatctacaagttttgtttttttgtttwgttttttttttgttttttttttttaattagctggtgtggtggtgcatacctataatccagctactcaggaggctaaggcaggaggatcacttgagcccag

SEQ ID NO: 172351 - DNA, 201 bp, Homo sapiens
aacagcaagaagcagacccaaactttgtttgtatgcccctagtcataggcaaaaatggaaagggtaatttaccaaaaaagaagaaaatagataaaaaggaraagaatggaaagaaagtactgactcactgcaaacagctgcaaaatgttgcccttgggatagaggttaactcggttgtgaaataatggccaaagcggtgca

SEQ ID NO: 172352 - DNA, 201 bp, Homo sapiens
gaagaagccgcagtccctgccccacaggggctgcttagattgcttagatggattgtcatctctctctctttttttttttgggacggagtctcgctttgtcrtccaggctggagtgcagtggcatgatctcggctcactgcaagctccacctcccaggttcacgccattctcctgcccctgcctcccgagtagctgggacta

SEQ ID NO: 172353 - DNA, 201 bp, Homo sapiens
ggtaggattaacaagaaacagcacatcacagtcacaatgtgtgggaattaggcaaaggaaatacgtagccatttttatggacgtcttatagtccacttagrcaatagatgtattctgtggtggtaaaccaccagcttaggtaatgggatttattggaggacatcagtggtagcaaaatacatatgaaaagcaaaagcatac

SEQ ID NO: 172354 - DNA, 201 bp, Homo sapiens
agtctcgctttgtcgtccaggctggagtgcagtggcatgatctcggctcactgcaagctccacctcccaggttcacgccattctcctgcccctgcctcccragtagctgggactacaggtgcccgccaccatgcctggctaattttttgtatttttagtagagacagggtttcactgtgttagccaggatggtttcgatct

SEQ ID NO: 172355 - DNA, 201 bp, Homo sapiens
agaaaatgccagccagccaccccgggtgcccttggaccatgtgtccaagcctcagcagtggaggagggaggtagggagctgctgctctctggtccctcccraaaaaggaagaaaagggctatggaaaggtcgggttggttctcaacccctgggagcagcaggcggtgggggcacagtttcctccaccctcagaaatctcag

SEQ ID NO: 172356 - DNA, 201 bp, Homo sapiens
gaggctgaggcaggagaatgggtttaacccgggaggcggagtttgcggtgagccgagatcgcgctattgcactctagcctgggcaacaagagcaaaactcaaaaaaaaaaaaaaattttgtaattccttcaacacattataacatgacaagtgcttcttgccttatctactagtgaagactctgcccggcccgctggcttc

SEQ ID NO: 172357 - DNA, 201 bp, Homo sapiens
cgcctataatcccagctactcaggaggctgagggaggctgaggcaggagaatcgcctgaactgaggaggtggaggttgcagtgagccacgattgtgccackgccctctagcttgtgtgacagagcgagaccccgtctcaaaaaaaaaaaaagtaccttattttaattttcatttttctgtttattgctattgtatttgaat

SEQ ID NO: 172358 - DNA, 201 bp, Homo sapiens
aaaccatcggtttaaaagtaacaatttctaatgaatgtgttttttctctcttcagacttttgataaaattcttgttgctaatagaggagaaattgcatgtygggtgagtagaattttcgtcttattttccattttactctgaaattatttattaaacccctttaagtgtgaatcactattaatagacattaatatatttta

SEQ ID NO: 172359 - DNA, 201 bp, Homo sapiens
aatggcggatgaggctgtctgtgttggcccagctcccaccagtaaaagctacctcaacatggatgccatcatggaagccattaagaaaaccagggcccaarctgtgagtctgaatgaatctatctactgcagctgtttcatatgtagtgagcagaaagctagagtttgtatttaaaaaaaaaaataggaaagaatgattga

SEQ ID NO: 172360 - DNA, 201 bp, Homo sapiens
ggcctggacctagtccaggaaatgatccgtgttgctaagggctaccctctcaggcacaaacaagctgatattcgcatcaacggctgggcagttgaatgtcrggtttatgctgaggtaaaatgaatggtgttgggaggaaggatggtggttatgtccagagtcatgagacctggtatagccaaacaatgaggtaaagttagg

SEQ ID NO: 172361 - DNA, 201 bp, Homo sapiens
ttatatttcaaagactgtgcttcctttcctttgaactttcaggacccctacaagtcttttggtttaccatctattgggagattgtctcagtaccaagaacygttacatctacctggtgtaagtcattaagctgtaataccagctgaagggttaaaatcgtgatttatgtcatacttttatgttaaagcatgtcaacaccaa

SEQ ID NO: 172362 - DNA, 201 bp, Homo sapiens
tctgtgtaaccactgacttcaatttcaaagtaattactgcagatttttctcactaccctgaacatagcctacacgcttttaatcctacacttatttttttycccatctaaaaggaaaacttattttgattttgatactttttaattttttaaaacttattttgaaataacttagacttgggaaaagttgcaaaacaataat

SEQ ID NO: 172363 - DNA, 201 bp, Homo sapiens
caaccagctttctcaggaactaagagcttgaactcgccctcaaagagggcattaatctattcatgagggatccttcccaatgatccacacacccccattaygccccacctccaacactggggatcacatttcaacatgaggtttggaggagataaactttcaaactttcacacatgtacaacatgttttgaagtacacact

SEQ ID NO: 172364 - DNA, 201 bp, Homo sapiens
gttgcaaaacaataatacaaagaatgtccagataatttcacccagagtctgcaaatgttaacattttatcagggttgatttattgtgtattcctctctttytctctctctctcttcccacctccaccatctatatatgtaaataattggtatcttctgaaccatttcagcaaattgctaacaattcttaagtgtgtatttc

SEQ ID NO: 172365 - DNA, 201 bp, Homo sapiens
cttccatgtttttctcatgacagtgagttggttctcacaggatcttaagatcttacaagtgtttggaagttcctcctttgcactactctcccctgctgccytgtgaagaagggtcctgctttccttctgccatgattgtaagtttcctgaagtctccccagccatgcggaactgggagtcaattaaacctttgtttataaa

SEQ ID NO: 172366 - DNA, 201 bp, Homo sapiens
aaaataacataggagacgcaaaggaaaaaatatttcttgtgtttctaattcacaggttgcttgagactttttttggaggtgctagtattttattggccacagagttttgaaggaaaatacaattaaatcatgcttctgtcatttggggaaaaggaataacagattcattttttctttttttaaagatgagagagatagtat

SEQ ID NO: 172367 - DNA, 201 bp, Homo sapiens
gtcctaccaaaacaatggagttgggtttaacagaaaattacactgcttcagttttaaaattaacattaaatacaattgaaaatttaactcctcagtcacascagtcatatttcaagttctcagtagctacgtgtagctagtggttactgggttagaccactcacaggcaaaattttttgtaaaccagagagtgtttacaga

SEQ ID NO: 172368 - DNA, 201 bp, Homo sapiens
ctgtccccatccaaatctcatctcgacctgtaatccccatgtgttgagggagggaggtgattggatcatgggggcagtttcttccatgtttttctcatgayagtgagttggttctcacaggatcttaagatcttacaagtgtttggaagttcctcctttgcactactctcccctgctgccttgtgaagaagggtcctgctt

SEQ ID NO: 172369 - DNA, 201 bp, Homo sapiens
aaataacataggagacgcaaaggaaaaaatatttcttgtgtttctaattcacaggttgcttgagactttttttggaggtgctagtattttattggccacagagttttgaaggaaaatacaattaaatcatgcttctgtcatttggggaaaaggaataacagattcattttttctttttttaaagatgagagagatagtatt

SEQ ID NO: 172370 - DNA, 201 bp, Homo sapiens
gggctcccaaggacttgcccacagaggcgctttgctcaccaagcatggttctttcctgttggcctctgtttgctctgggtagcacctcggctgttttaggsccacagtatcacctattgacaagtgtagatagctattgatagtatcaataggtgtaggaaagggtctgcctcctgctattcctggttttctctttctcaa

SEQ ID NO: 172371 - DNA, 201 bp, Homo sapiens
tttctcttacataccaaggggctgtgtctgtagatatgatttcccttttgtaattatatttatggtatattgcctagaactacatttattgatcagacacrttcgctagaacctaactggaagaaatatcctgaaaaaatgttctaaagcccatcaagtatttgcaatttattttgctttcctttttttgtagcatgttct

SEQ ID NO: 172372 - DNA, 201 bp, Homo sapiens
aatcccagcactttgggaggccgaggcgggtggctcacgaggtcaggagtttgaggccagcctggccaacatagtgaaaccccgtctctactaaaaatacaaaaaaattagccgggcatggtggcgcatacctgtaatcccagctacttgggaggctgaggcaggaaaatcacttgaacccgggtggcggaggttgggctg

SEQ ID NO: 172373 - DNA, 201 bp, Homo sapiens
gggatgacggtcttatgacctgctactgttgtagagaagggtaggccagagaatttctttatgagcagctcttagaaaggcagggaggggttagagtcctstttctggtttcatagttgtctttgcgggagaggaattctgatgtctgtgactcatctcaggagagaatgaggggtgagagacaggaaggcagaaggtcag

SEQ ID NO: 172374 - DNA, 201 bp, Homo sapiens
agagtctccagttgcatgaccatttggagtttgatggcctgaaggcaagaacagacaaaccgggttgttagaaaacatgtatcaaaaggaaaccagaggamgggtaaagatagctaaaaaattaggccttttaccagtttgcacagggagaaggaggccaaaagcccgactggtcaggaaaacttcacacttttgctggca

SEQ ID NO: 172375 - DNA, 201 bp, Homo sapiens
agctgggactacaggtgtgtgccaccatgccccgctaatttttttgtgtgtgtttttagtagagacgggatttcgccattttggccagtctggtcgcaaamtcctgacctcaggtgatccacctgccttgacctcccaaagtgctaggattacaggcatgagccatggtgcccgactctttaaaaaatagttgtacaaatt

SEQ ID NO: 172376 - DNA, 201 bp, Homo sapiens
gctgaggcaggaaaatcacttgaacccgggtggcggaggttgggctgagctgagatcgtgccgctgcactccagcctgggcaacagagggacactccttcwaaataaataaataaataaataaataaataaataaataaataaaatgcacccaaacctgaattggaaactcaggtggggggcctagcggtctgtggtttta

SEQ ID NO: 172377 - DNA, 201 bp, Homo sapiens
aggggccgttgtcagagtctccagttgcatgaccatttggagtttgatggcctgaaggcaagaacagacaaaccgggttgttagaaaacatgtatcaaaasgaaaccagaggacgggtaaagatagctaaaaaattaggccttttaccagtttgcacagggagaaggaggccaaaagcccgactggtcaggaaaacttcac

SEQ ID NO: 172378 - DNA, 201 bp, Homo sapiens
gtcttgatctttaatagggacacagtaataatttcccgttcacagttccttcttgttcttggtcttttacttggtaaaggttttattttataaactatatstttttgtatcttttacctccacttttatacagagattacattttttaaattaattaaataattaattaattttttctgaggagtttcgctcttgttgccc

SEQ ID NO: 172379 - DNA, 201 bp, Homo sapiens
aatcacttgaacccgggtggcggaggttgggctgagctgagatcgtgccgctgcactccagcctgggcaacagagggacactccttctaaataaataaatmaataaataaataaataaataaataaataaaatgcacccaaacctgaattggaaactcaggtggggggcctagcggtctgtggttttactagccctccagg

SEQ ID NO: 172380 - DNA, 201 bp, Homo sapiens
atacggataaggacaaagaccgatcttaactgcttcctgctgacaggggatgctgttttggggaaacagcagtcagagatccctcaaaggcctatctaagsgttcccggcagaaggggccgttgtcagagtctccagttgcatgaccatttggagtttgatggcctgaaggcaagaacagacaaaccgggttgttagaaaa

SEQ ID NO: 172381 - DNA, 201 bp, Homo sapiens
gctagctaagcaggtacgaggaaaaataatttacctgaagttctttctggccgggcgcagtggctcacgcctgtaatcccaacactttgggaggccgaggygggtggatcacctgaggtcgggagttcaagaccagcctgaccaacatggagaaaccctgtctctactaaaaatacaaaattagttgggtgtggtggcgcg

SEQ ID NO: 172382 - DNA, 201 bp, Homo sapiens
tgttgctaggaaataccttacaaagaattttggactgggcgtgtagccagtttgttacatgcttaacaaaaacaacaaacgttaaaattctgtgtagaggkccaaattagcagacttctacaaacgttttccttcatttagaaaataaactttatgttgtggctttacacaaatggtctgagtgttgacctgattcttcat

SEQ ID NO: 172383 - DNA, 201 bp, Homo sapiens
tcagtcctggtaacttgaactagacttgctagtttcttgaaacattgttttattttcttgcaagttagtgtggtgttcatatttcacaacgctgaaagatacagtgtttctcaaatgtgcacttgccagtagacggatatgttaactgttaccgtgacgctgagaactggagctgctaactgaccctatgcgtttgttctc

SEQ ID NO: 172384 - DNA, 201 bp, Homo sapiens
taccattctaacagtctgtaatgttgctaccaggtaataaacaagccatactgtatttgggagaggagggtgtgtttcaaagtctagttcattgtaatatmaaaactggtaaaacctctcctctctaaactcagtttgacctcacactgagaaacctttactagtgcagaggagaatgttgctttcttcttgcttgcttta

SEQ ID NO: 172385 - DNA, 201 bp, Homo sapiens
ttgtgatccacctgcctcggcctctcaaagtgctgggattacaggcgtgagccactgtgcccagctggtgctatctaatcttaagaaaggatttttttccrgccactgcaaacaggatttgtttccctgtttgcagtggctggaaggcatgcatccagtttgtctaaaagcctaccatttcccccgctttttgtgtaagtt

SEQ ID NO: 172386 - DNA, 201 bp, Homo sapiens
cagtcctggtaacttgaactagacttgctagtttcttgaaacattgttttattttcttgcaagttagtgtggtgttcatatttcacaacgctgaaagatacagtgtttctcaaatgtgcacttgccagtagacggatatgttaactgttaccgtgacgctgagaactggagctgctaactgaccctatgcgtttgttctct

SEQ ID NO: 172387 - DNA, 201 bp, Homo sapiens
tttgttttactgaatttttctgtgtgtgttattagcaatagtagatcagtctgaaagggggaaagaaatagtttgaagatagtagtggtcctgttacaacmaatacagattgattcctagctagcatatgttgcttcagtcaaagatgtctaaagcaagtatagtttccaagacacacaggtcaggaatagcagcatgtcc

SEQ ID NO: 172388 - DNA, 201 bp, Homo sapiens
tttgtatttttcgtagagacagggtttcactgtgttagccaggatggtctcaatctcctgaccttgtgatccacctgcctcggcctctcaaagtgctgggwttacaggcgtgagccactgtgcccagctggtgctatctaatcttaagaaaggatttttttccagccactgcaaacaggatttgtttccctgtttgcagtg

SEQ ID NO: 172389 - DNA, 201 bp, Homo sapiens
caggtgggtttctctgtgtggctgtaccagcttatgtgcccatcagtagtgaagatgatagtcacaatgagaacaatgaactaaccttattctgtacttaytatgcccggcactgactgttctaagcactttgtatgtatgaatgcccccaaaaacccaataaagtacgtactagtgttatccctcattttgtatttggga

SEQ ID NO: 172390 - DNA, 201 bp, Homo sapiens
tccacccgcattgcaagcaaaatcattgatgtcaattcacgttattgtggaaaaccgtgagttgtgacaagtgaaagcttttcaccaagccacaaaactakgggcgtgtgcagtcaacacacggaacacaaggggtttgcttccgtggctcagcatagcactctctcactagttctaaaatattcatagcctttgctgttc

SEQ ID NO: 172391 - DNA, 201 bp, Homo sapiens
aaccctgcctctactgaaaatacaaaattagccaggcgtggtggtgcacgcctgtaatcccagctactcgggaggctgaggcaggagaatgggtttaaccygggaggcggagtttgcggtgagccgagatcgcgctattgcactctagcctgggcaacaagagcaaaactcaaaaaaaaaaaaaaattttgtaattccttc

SEQ ID NO: 172392 - DNA, 201 bp, Homo sapiens
ttagaggtgctcaaaatgactttcatgccacccttcatgcctgctgggttttaaggcataagagaaacagatgatttctgcattttactggaaaaaaaagwctaaaatgtacagctagtattgaattggggtaataatctgccacttttttgcccttcaatgctgtcgtgatcttttagggaagtgaggtcatggtagacc

SEQ ID NO: 172393 - DNA, 201 bp, Homo sapiens
tctgttggattcacatcctgaataaatgtttctacacaattagagtctataacagactaagccagcatagtggtggtgtgggttttttgttttgtgttttttttgttttgttttgttttgttttgttttgttttgtttttgtctaaaagaacaacttcaagccttgggaaagaatttgtttttgccctgtggatgggtcag

SEQ ID NO: 172394 - DNA, 201 bp, Homo sapiens
ctgttggattcacatcctgaataaatgtttctacacaattagagtctataacagactaagccagcatagtggtggtgtgggttttttgttttgtgttttttttgttttgttttgttttgttttgttttgttttgtttttgtctaaaagaacaacttcaagccttgggaaagaatttgtttttgccctgtggatgggtcaga

SEQ ID NO: 172395 - DNA, 201 bp, Homo sapiens
tgttggattcacatcctgaataaatgtttctacacaattagagtctataacagactaagccagcatagtggtggtgtgggttttttgttttgtgttttttttgttttgttttgttttgttttgttttgttttgtttttgtctaaaagaacaacttcaagccttgggaaagaatttgtttttgccctgtggatgggtcagaa

SEQ ID NO: 172396 - DNA, 201 bp, Homo sapiens
gttggattcacatcctgaataaatgtttctacacaattagagtctataacagactaagccagcatagtggtggtgtgggttttttgttttgtgttttttttgttttgttttgttttgttttgttttgttttgtttttgtctaaaagaacaacttcaagccttgggaaagaatttgtttttgccctgtggatgggtcagaaa

SEQ ID NO: 172397 - DNA, 201 bp, Homo sapiens
ttggattcacatcctgaataaatgtttctacacaattagagtctataacagactaagccagcatagtggtggtgtgggttttttgttttgtgttttttttgttttgttttgttttgttttgttttgttttgtttttgtctaaaagaacaacttcaagccttgggaaagaatttgtttttgccctgtggatgggtcagaaac

SEQ ID NO: 172398 - DNA, 201 bp, Homo sapiens
tggattcacatcctgaataaatgtttctacacaattagagtctataacagactaagccagcatagtggtggtgtgggttttttgttttgtgttttttttgktttgttttgttttgttttgttttgttttgtttttgtctaaaagaacaacttcaagccttgggaaagaatttgtttttgccctgtggatgggtcagaaaca

SEQ ID NO: 172399 - DNA, 201 bp, Homo sapiens
tggaagaaagccctctttaagactgtctaatgcccacgtgttaaggatttgggagaggccataagaaaaattacgtgtgtgtgtgtgtgtgtgtgtgtgtratgtgtgtaaaattcaggggaggacatcttccttctccagagttagggtcgtaagaggatagtctcgtggccttgacattaagaatcgttcacttgcacg

SEQ ID NO: 172400 - DNA, 201 bp, Homo sapiens
ggaagaaagccctctttaagactgtctaatgcccacgtgttaaggatttgggagaggccataagaaaaattacgtgtgtgtgtgtgtgtgtgtgtgtgtawtgtgtgtaaaattcaggggaggacatcttccttctccagagttagggtcgtaagaggatagtctcgtggccttgacattaagaatcgttcacttgcacgt

SEQ ID NO: 172401 - DNA, 201 bp, Homo sapiens
tttgtgtttccattgcattctttgacatttggtttgtacatttggttctccagctcaattttttccaaaggatgaaacatgttgaaattcaattaagctcktgtgtgtgtgtgtgtgtgtgtgtgtgtgtgtgtgtgtgtgtgtgtgtgtggtagaacatgtttctgttgagcaagatgtatctcactattttgtaaggca

SEQ ID NO: 172402 - DNA, 201 bp, Homo sapiens
gttctccagctcaattttttccaaaggatgaaacatgttgaaattcaattaagctcgtgtgtgtgtgtgtgtgtgtgtgtgtgtgtgtgtgtgtgtgtgtgtgtgtggtagaacatgtttctgttgagcaagatgtatctcactattttgtaaggcatgaaggaagtttttaaacaccatctcttagggatgaattaggga

SEQ ID NO: 172403 - DNA, 201 bp, Homo sapiens
gtggaaatatttcacacctaagagtaaagttttatttacctttaggagacaggatcctgggaactttctggttgccatagctgcttcctcaaggcaactargttagatgtggagtttctaattcctgttggaaattcagtgaataagaaaatactactgaaagttatactattttctgcatgttaatgatttgatattata

SEQ ID NO: 172404 - DNA, 201 bp, Homo sapiens
ataacatacagtcatttagcacgtatttggtatgttacatgattatatactgtattcctgcaataaagtaagctagagaaagtgttaggaaaatcataacracaaaatatatttattattcattaagtggaagtggatcatcttaaagatcttgatcttcattgtcttcacgttgagttggctgaggaggagggggcttga

SEQ ID NO: 172405 - DNA, 201 bp, Homo sapiens
caattaaatcatgcttctgtcatttggggaaaaggaataacagattcattttttctttttttaaagatgagagagatagtatttggaatctatctttagaytattctacctctgaatctaattgaagtaagaaattgggcaagaatggaatcttacttaccacccaggaaaaaagctaaacaattgtggctcagtccattt

SEQ ID NO: 172406 - DNA, 201 bp, Homo sapiens
gtttctaattcacaggttgcttgagactttttttggaggtgctagtattttattggccacagagttttgaaggaaaatacaattaaatcatgcttctgtcrtttggggaaaaggaataacagattcattttttctttttttaaagatgagagagatagtatttggaatctatctttagattattctacctctgaatctaat

SEQ ID NO: 172407 - DNA, 201 bp, Homo sapiens
tctttcacagttttcaaaataacataggagacgcaaaggaaaaaatatttcttgtgtttctaattcacaggttgcttgagactttttttggaggtgctagyattttattggccacagagttttgaaggaaaatacaattaaatcatgcttctgtcatttggggaaaaggaataacagattcattttttctttttttaaaga

SEQ ID NO: 172408 - DNA, 201 bp, Homo sapiens
tctccagctcaattttttccaaaggatgaaacatgttgaaattcaattaagctcgtgtgtgtgtgtgtgtgtgtgtgtgtgtgtgtgtgtgtgtgtgtgtgtgtggtagaacatgtttctgttgagcaagatgtatctcactattttgtaaggcatgaaggaagtttttaaacaccatctcttagggatgaattagggaaa

SEQ ID NO: 172409 - DNA, 201 bp, Homo sapiens
ctccagctcaattttttccaaaggatgaaacatgttgaaattcaattaagctcgtgtgtgtgtgtgtgtgtgtgtgtgtgtgtgtgtgtgtgtgtgtgtgtgtggtagaacatgtttctgttgagcaagatgtatctcactattttgtaaggcatgaaggaagtttttaaacaccatctcttagggatgaattagggaaaa

SEQ ID NO: 172410 - DNA, 201 bp, Homo sapiens
ccagctcaattttttccaaaggatgaaacatgttgaaattcaattaagctcgtgtgtgtgtgtgtgtgtgtgtgtgtgtgtgtgtgtgtgtgtgtgtgtgtggtagaacatgtttctgttgagcaagatgtatctcactattttgtaaggcatgaaggaagtttttaaacaccatctcttagggatgaattagggaaaacg

SEQ ID NO: 172411 - DNA, 201 bp, Homo sapiens
cagctcaattttttccaaaggatgaaacatgttgaaattcaattaagctcgtgtgtgtgtgtgtgtgtgtgtgtgtgtgtgtgtgtgtgtgtgtgtgtgtggtagaacatgtttctgttgagcaagatgtatctcactattttgtaaggcatgaaggaagtttttaaacaccatctcttagggatgaattagggaaaacgg

SEQ ID NO: 172412 - DNA, 201 bp, Homo sapiens
agatagattagattagattacataagatagatagatagataaaatagattagataggatagataggatagaccgagattctgtctctaaggatggatgatagatagatagatagatagatagatagatagatagatagatagacagacagacaggcagataagatagataggatagagctaaataagtagactagtagaca

SEQ ID NO: 172413 - DNA, 201 bp, Homo sapiens
atagattagattagattacataagatagatagatagataaaatagattagataggatagataggatagaccgagattctgtctctaaggatggatgatagatagatagatagatagatagatagatagatagatagatagacagacagacaggcagataagatagataggatagagctaaataagtagactagtagacacc

SEQ ID NO: 172414 - DNA, 201 bp, Homo sapiens
tcatgaggaatattttagggcctctctgtattgcctaggctggagtgcagtggcacaattatagctcactgcagccttgaattcctggattcaagtgatcyccctgcctctgactcctgagtagctgggactacagatgtgccaccctacgcggctaatttttaaattttttgtagagatagggtctttgttgtccaggct

SEQ ID NO: 172415 - DNA, 201 bp, Homo sapiens
tagattagattagattacataagatagatagatagataaaatagattagataggatagataggatagaccgagattctgtctctaaggatggatgatagatagatagatagatagatagatagatagatagatagatagacagacagacaggcagataagatagataggatagagctaaataagtagactagtagacacca

SEQ ID NO: 172416 - DNA, 201 bp, Homo sapiens
agattagattagattacataagatagatagatagataaaatagattagataggatagataggatagaccgagattctgtctctaaggatggatgatagatagatagatagatagatagatagatagatagatagatagacagacagacaggcagataagatagataggatagagctaaataagtagactagtagacaccac

SEQ ID NO: 172417 - DNA, 201 bp, Homo sapiens; identical to SEQ ID NO: 31020

SEQ ID NO: 172418 - DNA, 201 bp, Homo sapiens
tttttagaaagagcacattgctgttgggtaggaaaaacatatgaagccaggttctcaaatatttgtgtggtaaggatggagtaacaataagggaattccaytttgtattttgaatgtttttgaggcattgtttccaaaagtgtgttccatggacttggcaactcataaaggtactttgcaaaaggaggaggaagtgctgcg

SEQ ID NO: 172419 - DNA, 201 bp, Homo sapiens
cctcagtgaactttgcatacatctgaatgtaagcaagacaagtatatttgacattttaaaaaggttttttctttcacagttttcaaaataacataggagamgcaaaggaaaaaatatttcttgtgtttctaattcacaggttgcttgagactttttttggaggtgctagtattttattggccacagagttttgaaggaaaa

SEQ ID NO: 172420 - DNA, 201 bp, Homo sapiens
gcatatctagtagcgtgcaaagttttttttttcaggtctttatttgaagaacccaaattctcaagttttaccatatgtgaactgttttgagaagtaagaamaacaaatatctttagtataccacatttgttgttctaaacttgagtatgttttgatgtagggcctaggttattttattttttgcccaaggcattctaagaa

SEQ ID NO: 172421 - DNA, 201 bp, Homo sapiens
atgattcatctctgtcttgttagcatgcttgtttatggtagagagaaattttgtattctgccaccataccttgtcaaaaccttttaacaaggcattgattyggttctctggttctgagaacttggcagtggaagacaagacttccacccgcattgcaagcaaaatcattgatgtcaattcacgttattgtggaaaaccgtg

SEQ ID NO: 172422 - DNA, 201 bp, Homo sapiens
gccaggtgtggtagctcacgcctgcaatctcaaccctttgggaggccaaagtgggaggatttcttgagctcaggagtttgagaccagcctaggcaacatartgataccacccccacccccggctatctctacaaaataaaataaaataaaataaaaattagctgggtgtggtggcacgtgcctgtggttctaggtacttgg

SEQ ID NO: 172423 - DNA, 201 bp, Homo sapiens
gacagccagggtgccttgggagccagtaagtagatgtcacccaacctggtagctcagggaaggcttctggagttgatgacacctcaactgtgacttaaggkaatgattatgagtcagccaagccaaggaaaatggggaggatactgtagaaggacatgataccatgaacacagccatggagccacgaaacttcatggtgtg

SEQ ID NO: 172424 - DNA, 201 bp, Homo sapiens
tcaaatggctctcaatttggattcatttggtgtttcctcacagtcaggttgttactcatttttggcaggaacgtaacggtggtgctgctgcgttgtcctcrttgtcccctctcgggaggcgcatgttcacgtttctctttgtcccactgttaatggcatcactttgatcatttggttcaggtggtgtttgtccctttctcc

SEQ ID NO: 172425 - DNA, 201 bp, Homo sapiens
ttggtactcttcacttgttctctttacctagaaagaataggaagcttacagtgtatctttttaaaagttatgatttggtagctaccagggagagatgagargatatagaatatcagtaaatgactgaatgactggacggaggaggaaaatggtcaatagaaccgtgaatctgcttgtgcatctgtttaatatcttctttcc

SEQ ID NO: 172426 - DNA, 201 bp, Homo sapiens
ttgtgtattcctctctttctctctctctctcttcccacctccaccatctatatatgtaaataattggtatcttctgaaccatttcagcaaattgctaacarttcttaagtgtgtatttcatcgacacaggacaacattcccttatggaactgcaatgcagtactgttaccacaattaggaaactgacattgaaacagcacc

SEQ ID NO: 172427 - DNA, 201 bp, Homo sapiens
tggggctcattccaaaccagttcagacttgtcgtgggaatggttcacattggtagttgttctgttatagttgtgtttgcttgtacgagttctacttcttctttttttttttttgttgagacagtgtttcgctctttttgcccaggctggagtgcaacggtacaaacttggctcactgcaacctcggctcactgcaacctcc

SEQ ID NO: 172428 - DNA, 201 bp, Homo sapiens
gcactgggcaactctaagaggctttccaccacagcaggtgtgtttccatcaagttctgttggacagcatttgtctggagggatatgtgtgtaggagagaaygttgcttttgttttaaaacctgaatttcatattttttattcttttgataaatgcagtattcagatcctaattcctttaccttcagatgttatttggacct

SEQ ID NO: 172429 - DNA, 201 bp, Homo sapiens
tactttttaattttttaaaacttattttgaaataacttagacttgggaaaagttgcaaaacaataatacaaagaatgtccagataatttcacccagagtcygcaaatgttaacattttatcagggttgatttattgtgtattcctctctttctctctctctctcttcccacctccaccatctatatatgtaaataattggt

SEQ ID NO: 172430 - DNA, 201 bp, Homo sapiens
tgggcacagtggcacacatctgtaaccccagcactttgggaggccaaggtgggcggatcacttgaggtcaggagtttgagaccagcctggccaatgtggtrataccctatctgtactaaaaatacaaaaattagctgggcgtggtggtgcacacctgtattcccagctactcaggaggctgaggcagaagaatcgcttgaa

SEQ ID NO: 172431 - DNA, 201 bp, Homo sapiens
taaatttttggtcagatgacagcatctttcactagaaatgtacttcgttaaaggaaactgtatcattactatggtgagttgaagttctaagaccttttccytattgtcagagagttgttcataaaaatcttctttgagactattttgaatttaatggatctgtgtaattcttttctaaacatttagcacataattgtaggt

SEQ ID NO: 172432 - DNA, 201 bp, Homo sapiens
aacaaaactagtttcaaacttatgtcaagccagaaggaatctttgcaaattttgtttgtagaagagtgaacttacaaatagatttcacagtttcgactctkttttggtatttagaggtcttgcacagtgaagcctttttcctatatcctgttaacatatcaccctgaaagaaattgttagaaaaaggctgggtactgtgac

SEQ ID NO: 172433 - DNA, 201 bp, Homo sapiens
atcctcctctcactgccttagttctccctctgaaattccatagcatttcattttctcaacacagactcagagaaatttgctggtaggagggaccttagagstgcgattctcaaccggggcagtattgcccccgggcatattcggcaatgtctggagacatacttggttgtcacagctgggagggagtgctatggcatctag

SEQ ID NO: 172434 - DNA, 201 bp, Homo sapiens
taagtgtatctaaacacagaaaaggtacagtaaaaatatagtataaaagataaaaaatggtacacttgtatagggcacttactgtgaatggagcttgcagsactggaagctggtctggatgagtcagggagtgatcaaaggcctaggacattaccgtcactactatagacttcataaacactgtatacttaggctacacga

SEQ ID NO: 172435 - DNA, 201 bp, Homo sapiens
aagagcaaaactcaaaaaaaaaaaaaaattttgtaattccttcaacacattataacatgacaagtgcttcttgccttatctactagtgaagactctgcccrgcccgctggcttcctaacagtcctgtggcggtctgttctttcctgtgtacactccttaaattgtgacatccctacttctggaaagctcaccatttcctat

SEQ ID NO: 172436 - DNA, 201 bp, Homo sapiens
aaaaatagttttctttcttcaataataaattaaccttagcataccataacttttttaaattataaacttttaaattttgtctttactctttgactctttcttttttttttttttgagacagagtcttgctctgttggccaagctagagtgcagtggcgcagtcttggctcactgcaacctctgtctcccgggttcaagcca

SEQ ID NO: 172437 - DNA, 201 bp, Homo sapiens
ttagatttgaaattccggccgggtacggtggctcacgcctgtaatcccagcactttgggaggccgaggcaggtggatcacctgaggtcgggagtttgagamcagcctgaccaacatggagaaaccctgcctctactgaaaatacaaaattagccaggcgtggtggtgcacgcctgtaatcccagctactcgggaggctgag

SEQ ID NO: 172438 - DNA, 201 bp, Homo sapiens
aaattataaacttttaaattttgtctttactctttgactctttcttttttttttttttgagacagagtcttgctctgttggccaagctagagtgcagtggygcagtcttggctcactgcaacctctgtctcccgggttcaagccattctcctgcctcatcctctccagtagctgggattacgggcatgtgtcaccacgctc

SEQ ID NO: 172439 - DNA, 201 bp, Homo sapiens
tgaaataacaatacagtttctccataaagagatgcaacactaagaaagtcaccgcgtttggtgcattaatagttggttccgttgactggttttgttctcartctggtcacagtttatgtaactgaattacctttgctatcttcacatatttttgctttattttttttaagtcactggttttctgttgcttaaagataaaat

SEQ ID NO: 172440 - DNA, 201 bp, Homo sapiens
actagaatagtctcttgtacagcaacagagcctcttactacagtgagcttctcctggggctttcagagtacgtccgagctccacaccaagaagagagccarcccacgtggatgcagctcggttcttagggctgacttgaaacttgataagactgcctcaagcatgtgccacaaccccagttcttgcaaacccccacagagt

SEQ ID NO: 172441 - DNA, 201 bp, Homo sapiens
ccaagctagagtgcagtggcgcagtcttggctcactgcaacctctgtctcccgggttcaagccattctcctgcctcatcctctccagtagctgggattacrggcatgtgtcaccacgctcggctaatttttgtatttttagtagagacggggtttcaccatgttggccaggctggtcttgaactcctgacctcaggtaatc

SEQ ID NO: 172442 - DNA, 201 bp, Homo sapiens
agaccttcaaaggcctgttgggtggatgtggaggtgtgcgctgccccaccaagctgatgcctgatcaggggaggccactagaatagtctcttgtacagcawcagagcctcttactacagtgagcttctcctggggctttcagagtacgtccgagctccacaccaagaagagagccaacccacgtggatgcagctcggttct

SEQ ID NO: 172443 - DNA, 201 bp, Homo sapiens
ctgagaggagtcagggaactctcccatttcattctgacacaggtgggactcagcattctcagaccttcaaaggcctgttgggtggatgtggaggtgtgcgytgccccaccaagctgatgcctgatcaggggaggccactagaatagtctcttgtacagcaacagagcctcttactacagtgagcttctcctggggctttca

SEQ ID NO: 172444 - DNA, 201 bp, Homo sapiens
tcacaagtcctgagaggagtcagggaactctcccatttcattctgacacaggtgggactcagcattctcagaccttcaaaggcctgttgggtggatgtggrggtgtgcgctgccccaccaagctgatgcctgatcaggggaggccactagaatagtctcttgtacagcaacagagcctcttactacagtgagcttctcctg

SEQ ID NO: 172445 - DNA, 201 bp, Homo sapiens
cactgtgttagccaggatggtttcgatctcctgaccttgtgatccacctgcctcagcctcccaaagtgctaggattacaggcgtgagccgccgagcccggyggactgtcttctctctaagcagtaagagacagtgggaactgcagaagggtgtttgcagcctcatgcagttgactgaatgaattggccccagagtcacccc

SEQ ID NO: 172446 - DNA, 201 bp, Homo sapiens
aattagctggggcatggtgatgggcgcctgtagtcccagctccttgggaggctgaggcaggagaatggcatgaacccgggaggtggagcttgcagtgagcygagatcgccacactgcactccagcctgggcgatagagcgagactccgtctcaaaaaaaaaaaaaaaaaagtgttggcaaagaggtggagaaattgaaacc

SEQ ID NO: 172447 - DNA, 201 bp, Homo sapiens
cttttagtggaatttccaagataaaggcccatgtttttcctttatgtatccgaaagttatttttgatggtatagtgaacgtcctgcttactacacattttrtgtattagcctttggaagcaaattccttaagtttattgcaacgttgctgcttttgttgccattcttataattttatgtatttactgtttctctctctctc

SEQ ID NO: 172448 - DNA, 201 bp, Homo sapiens
gccagagcagtaaaatattcctctgctgggaccgtggagttccttgtggactctaagaagaatttttatttcttggaaatgaatacaagactccaggtaayaacaactgttatttattcctctccatgcctctgtactttacccttccttctccacccttttttgttttataaatgttaaaaaattaactccataaagtgt

SEQ ID NO: 172449 - DNA, 201 bp, Homo sapiens
gaaaaggttcatctacttggagaggagatggttcaatatgacttttagaagaagccgcagtccctgccccacaggggctgcttagattgcttagatggatwgtcatctctctctctttttttttttgggacggagtctcgctttgtcgtccaggctggagtgcagtggcatgatctcggctcactgcaagctccacctccc

SEQ ID NO: 172450 - DNA, 201 bp, Homo sapiens
tgacatgtattgaaaactgaactatcataaaatttcgagatatatttagaaatctgttatgaaatattttaatttttactaaaatgaatcatttaacatarttctaaatatatatatatattgggttttttgtttgcttgtttttagctaatcacatatggctctgatagaactgaggcactgaagagaatggcagatgca

SEQ ID NO: 172451 - DNA, 201 bp, Homo sapiens
acaagctcttttggatttgtaacacttttattttaaatctccaataaatgtaaatattttggtccctttttttctctattttttaaaataaaaatattttmgtgaatatgagttaaatgagaatcaagtggcttctgggcctccctgaaagatcaagtggaagcactggatgactctaatgatgccgaattgtaatccata

SEQ ID NO: 172452 - DNA, 201 bp, Homo sapiens
tctagccgtgccgcctctgggcggctggcgccgggagagcgctggctgggtccggctgcccccgcgccccggttccgcatcagctacaccgcttgctttcytccctcccggagttcgcgtggcagcgggctcaggaggcatccctcgttgcagctgttcctcgcggggatcctgcggagcagagaggcctagggcagaggc

SEQ ID NO: 172453 - DNA, 201 bp, Homo sapiens
gactgtaacaattaggcaattcaaattcatagatacatgatgattcttagagtaggtgtttaaaatgttcgcaaatacattcaatggcagttttagcctgygcattttatatcaaagggaaattagtttattgagaaataataatataaaattattaactctttttcttttcattctacttcagaatgcctgttattaaac

SEQ ID NO: 172454 - DNA, 201 bp, Homo sapiens
tgtgtaactttaatttgaaagaacatcacgtgactgctgttttcatttctgccttttaaaaagcagacagctattcagaacagcaagaagcagacccaaaytttgtttgtatgcccctagtcataggcaaaaatggaaagggtaatttaccaaaaaagaagaaaatagataaaaaggaaaagaatggaaagaaagtactga

SEQ ID NO: 172455 - DNA, 201 bp, Homo sapiens
aggtgtttaaaatgttcgcaaatacattcaatggcagttttagcctgtgcattttatatcaaagggaaattagtttattgagaaataataatataaaattrttaactctttttcttttcattctacttcagaatgcctgttattaaaccagacatagccaactgggagctctcagtaaaattgcatgataaagttcatacc

SEQ ID NO: 172456 - DNA, 201 bp, Homo sapiens
tcaacaaaatcagtaagtgttattaaataccccatggtgtgtggttctggcactgaaatggggctgtttcctaaggctctgtccatggccacctctgtctrtttctgcattctgtcttgcattgcttctgttgcctatatcctggtcagcacagtttatggtgaatcattgcttattgaaatagagacggcaataatgaag

SEQ ID NO: 172457 - DNA, 201 bp, Homo sapiens
tagaaggctgtttgttacttacggaaatcacttgaagcctcagtacccggaggcagctgttcacaggtccttcacctctccccagagatgactgggaagaygctgttgttggaccctgtctttcttggctggagcagtaaacatgacaggttgtttgggagccatctgtttaaaatggctgctgctttgtatgcagcaatg

SEQ ID NO: 172458 - DNA, 201 bp, Homo sapiens
agagagaggaagaactagggttttataaatgcaggtgaacaagggaggggtccaagaattacggggttcatgaagaagagtggaagtctatggggaaggtkgctttgcctccagccatttcctgggttaagaaagaggaggaagattctgtaactgtttctgtgttctaggagcacggggctcagggaaagttcagcattg

SEQ ID NO: 172459 - DNA, 201 bp, Homo sapiens
ggaggcagctgttcacaggtccttcacctctccccagagatgactgggaagacgctgttgttggaccctgtctttcttggctggagcagtaaacatgacargttgtttgggagccatctgtttaaaatggctgctgctttgtatgcagcaatgaacttgagatcagttttctgtctttcttcatggtaatggtcttatttg

SEQ ID NO: 172460 - DNA, 201 bp, Homo sapiens
ttttcatctgatgaggttcagctggtggcccagcatagcgtatcaggctccctgtgtatgacagtgccgctggagatgggtcattcttcgactagtaggtratttgatctcccctgatacatttatgttttttcacattttgggctctgattctcccccttacatgggcttcaattccaaggaaggtaggagttgagatac

SEQ ID NO: 172461 - DNA, 201 bp, Homo sapiens
tatttattgtgtcaaaaacaaaatgtaccagacaattaagataattttacccaggccactgcagtaggggtaacgtttattaatgagaaatgtctcagagagaggaagaactagggttttataaatgcaggtgaacaagggaggggtccaagaattacggggttcatgaagaagagtggaagtctatggggaaggttgctt

SEQ ID NO: 172462 - DNA, 201 bp, Homo sapiens
tatgacagaaacaaatatattttgatgtgtgcagcaattgagaaccatttgaatttaaggctcttactgtaatttgaatttaaaagctaaaaattgatttrgaatgaatgctacttttgaggaaaatttcatttaaactcatttatggtttggttttgtttttcccttaagtacaaggtgaatatcttaaccagacttgcc

SEQ ID NO: 172463 - DNA, 201 bp, Homo sapiens
tattcaattgtttattggagcactctttttttttttttttaaactggaacaatcttaatcacccagtaaaatatattaggctctgagctagttcttgatakgtttattttatttatttatttatttttttgagacagagtctcactctgttgcccaggctggagtgcagtggcgcaatctcggctcactgcaagctccgcc

SEQ ID NO: 172464 - DNA, 201 bp, Homo sapiens
aatataggtgtgtgtatgtgtgtgcacatatgtatactaaaatattgtaaaatgtcaagtgttgcaaataacattgttaactgaaagtgacggaatggccrgccaaatttatatttattgtgtcaaaaacaaaatgtaccagacaattaagataattttacccaggccactgcagtaggggtaacgtttattaatgagaaa

SEQ ID NO: 172465 - DNA, 201 bp, Homo sapiens
cttgcagtgagccgagattgcaccactgcactccagcctgggcgacagagcgagactccgtctcaaaaaaaaaaaagttttatcggaacacagccatgctyattcctgtatgtactgtcagtggctgctttcacgtgactgaagcggaactgacagtgtaacatgcaaaacaggtaagaaaagattgaccatctagcccat

SEQ ID NO: 172466 - DNA, 201 bp, Homo sapiens
ttaatttgaatttgtgaatgttttctaaacgtcttgaggcagttttgataaattgagaattggcctttataaaatttagatacatagcatctcttgagtcmggaacagaaatgctcaggattttccatatggttgtggatatggtctagtataaaaggatgcataggaaaatgcctgggagggtatacatgttaagctgtt

SEQ ID NO: 172467 - DNA, 201 bp, Homo sapiens
tgaagtattttatagcacgtattgcagtcctgtaaattgatgctattttttttaaagtttgttgaattgcagtatcctaaattcccaaacccatgtccacygacaacctagcacactcttttttttccccaagagaaactcgtttcttattaaattttgcattagtgtcaaatcggttgactgttttttttgttaaagcac

SEQ ID NO: 172468 - DNA, 201 bp, Homo sapiens
tacgagcttcaaagaggaaccaggagttacgggaggaacatgaaagtggacaaggagcgtgaccgttgaagcacagcatcacagggaggggtttaggactycagatgactgcgggcagactgggataatatccagcctcccacaagaagctggtggagcagagtgttccctgactcctccaaggaaaagagactccgtttc

SEQ ID NO: 172469 - DNA, 201 bp, Homo sapiens
cgagcttcaaagaggaaccaggagttacgggaggaacatgaaagtggacaaggagcgtgaccgttgaagcacagcatcacagggaggggtttaggactccrgatgactgcgggcagactgggataatatccagcctcccacaagaagctggtggagcagagtgttccctgactcctccaaggaaaagagactccgtttcgc

SEQ ID NO: 172470 - DNA, 201 bp, Homo sapiens
aaccaaaatgaaagcccattcatcacagggatgcctaatcttgtaatgagggaatcactgagtgtggcacagggaagactcctgagagattctgatggggwacaagtgtgctgaccaacgtcctagatacagtgggcccttgaacaatatgggggctagggatatcaaccctgtgcagtcagaaatctacggataccttct

SEQ ID NO: 172471 - DNA, 201 bp, Homo sapiens
gctgaggctggagggtcgcatgagctcaggagtttgagaccagcctgggcaacaacatagtggtatcctgtatctacaagttttgtttttttgttttgttktttttttgttttttttttttaattagctggtgtggtggtgcatacctataatccagctactcaggaggctaaggcaggaggatcacttgagcccaggagt

SEQ ID NO: 172472 - DNA, 201 bp, Homo sapiens
attgaagccatgaaaatgcagaatagtatgacagctgggaaaactggcacggtgagtccctaagtccccatcagcccaggccggccctgtgatggaggaaygcccacctttgaatcgtgggtggtttggctggaaagggccacagaggcgccctctccccctcgcttctacagaggaggacgttaggattgggagcttttg

SEQ ID NO: 172473 - DNA, 201 bp, Homo sapiens
ggattttttttttttccaacgaggactttatgagagagagaatggcttttctctactgttcctaaagatgagcttggaataggaaacattagagattgttkctgctgttcatagacacatattttggggcatttgacaaagaatttcttaatggcttcattcctaagtgttaatgcaaaattagaatgcttttaaaacttc

SEQ ID NO: 172474 - DNA, 201 bp, Homo sapiens
ctcatgtctcagcctcccgagtagctgggattacaggcatgcgccaccatgcacggctaattttgcatttttagtagagacagggtttctccatgttggtygggctggtcttgaagtcccgacctcaggtgatccacccgcctcggcttcccaaagtgctaggatttacaggtgtgagccggccgaccctatatatttttt

SEQ ID NO: 172475 - DNA, 201 bp, Homo sapiens; identical to SEQ ID NO: 31016

SEQ ID NO: 172476 - DNA, 201 bp, Homo sapiens
gtaacaatttctaatgaatgtgttttttctctcttcagacttttgataaaattcttgttgctaatagaggagaaattgcatgtcgggtgagtagaattttygtcttattttccattttactctgaaattatttattaaacccctttaagtgtgaatcactattaatagacattaatatattttaaaataggttattagaac

SEQ ID NO: 172477 - DNA, 201 bp, Homo sapiens
tgactctgaatttacatagaattctaagaatttcagttagttgattgtgtgtgtggtgtgatgtttaaaataagtttgggaaatgctgggttaaattaatrttttttatttcaggatgtctcaaaatctttactaagtggatgtctgttttgaatctccaagatggaatatagaatgcagcatttctcaaatggaatttga

SEQ ID NO: 172478 - DNA, 201 bp, Homo sapiens
agtgtccttcacaaaatttgtacaactgattctgatgttttactcgttgtatttgaaaggtgatatgaacactttttcctcaaatctttttgataaaaatrttttattgagctttggagtaataaatatagttttcctttgttaacatgaatcaaaataatgttttgagaggtatgtatatactatgaagtttgaatatta

SEQ ID NO: 172479 - DNA, 201 bp, Homo sapiens
ttactcacctaggtgttcaatggatcactgggtaatctgagggttgatgttcttctttagtctatcaaccaatcccagagatgggaggcagggcttacatracactgtaaatactgccacctgggatgacttctgcgggagaagtactgagacccaagtccaccatgggaactaactggataagtttccgaagatttatgt

SEQ ID NO: 172480 - DNA, 201 bp, Homo sapiens
aataatgttttgagaggtatgtatatactatgaagtttgaatattaaaaaccaagagatgttgcatgcggaaaatattaaccatcatctactttgtgggtstggttatatggtttttcaaatggtattgctctttcaggttctaggtgataaacatgggaatgctttatggcttaatgaaagagagtgctcaattcagaga

SEQ ID NO: 172481 - DNA, 201 bp, Homo sapiens
gaactcagaagaaactaatggagctctgaaagaaaccattgttttttccactataaatcttaactcaacagcatttagggtctgggtggagccagtcaccygggcagctgcttcacacccattttgaattagctgcccagtgcttctggtgagcacctcggtaggagccactgctgtgaactcttttgcaagttctggtgg

SEQ ID NO: 172482 - DNA, 201 bp, Homo sapiens
attgttttataagagctgtcaaatttcacttgctcagtcccctgattctcattttcttataaaatctcaggttcctcaaatatgaattcttctgccatgaraaattagcaacatagtcttaaagtctggggaaagattatagtcagatccacatagataggacaacgttccaagtcgggagaatgttcatatgagaattga

SEQ ID NO: 172483 - DNA, 201 bp, Homo sapiens
gtagccgggactacaggtgtgtgccaccatgcccagctaatttttgtgttttgtagagatggggttttgtcatgttgctcaggctggccttgaactcctgrcatcaaaagattagcccacctcagcctcccgaagtgctgggattataggtgtgggccactgctcccagccacatttctttttttatttgtttgctttatc

SEQ ID NO: 172484 - DNA, 201 bp, Homo sapiens
ttgacactttgacccatcttgaggaaaatgcttagatgctaaaagcagtgtgcatagggattacgtcctccaaaaatagaaaactctaaatttactaagcrgggagtagagaaactcatcagactgcacctcaagtttttgatgtgttctggtcgcctctgcactcccattctagacttctaaacaacacgttcaggatct

SEQ ID NO: 172485 - DNA, 201 bp, Homo sapiens
ggctggtactcagtattcctggtttctggattatacagatgcaagggaaatgtctcctagtcttatttcatgagttactgtgtagcattattgaattgcartggtaagagggttaggtaggcctttctcatttttgattagacagctatcatttacaaattagaccacagggaatcgaccttaacttctgtgactaaagct

SEQ ID NO: 172486 - DNA, 201 bp, Homo sapiens
gggtgccagagcgcaggccacagcgcaaatgctccggagagtagccctcaggccagccactgtgagggtgccgaggacagaggagacgggaaaggggaggrgtgagccacggccacggccaccatggcgcctccctgttcaccagggtcccttcgatgggctccggtggggtggcttgtccctgtgctgctgagcttgcag

SEQ ID NO: 172487 - DNA, 201 bp, Homo sapiens
aacatgggaatgctttatggcttaatgaaagagagtgctcaattcagagaagaaatcagaaggtggtggaggaagcaccaaggtaagtctcctaagaaacrtttataaagcggctgcttttatgcatttcattcattcattcattcattcatcattcactgacgcatgcattcagagacagggtctcactctgttgcccag

SEQ ID NO: 172488 - DNA, 201 bp, Homo sapiens
tatcaaagaaccactgactataatttagtgctcacactacagttaggaggtgtgtgagttccctttacaaacctatttctgattgtaaattcctaagatgktttacacatcagtatcttgtgagcttgataaaagtgaatccatctcgttcagagtgatgcattatgagtgtatagtggaagtctagcttctaagcctgtg

SEQ ID NO: 172489 - DNA, 201 bp, Homo sapiens
gttgagttgctaacgcactcacttgaagatcctgtaaaacagaagcaggagctgcctgcctgtctggcccgcagattctgagcaaggggatgggaggggaygtgtggtggaagggcacacctactggcagagagggtaggggctgtgccacccatgtgaagccaatgtacttggcggggggacggggctctggccagtcct

SEQ ID NO: 172490 - DNA, 201 bp, Homo sapiens
tcagcacacacttagccggagacaccttttggccaatgggccaggattcttccattgcatcttcagcatgtgaccgtttgtgctggctcattgggagttcygctgctcagtactccttccccaggcaaagactcttaagttaataattggttcagaagaataaactataccgccctcttggtcttcttttggacatttctt

SEQ ID NO: 172491 - DNA, 201 bp, Homo sapiens
ctaaaatattgaatatgaataataaaaataatatatgctttgtcttagaagcacctttttaatatgattgatgtgtattgatctgtttcttcattctaacrtgaacatttctgtaacagtcatttcccctgaaatatctaacctgtgggtacctgagacagcttgtcagttaggaagaacagtggtggcgatagccacgta

SEQ ID NO: 172492 - DNA, 201 bp, Homo sapiens
atacatgtatatatgtttaaaaaatcagtgtttttacatttatttatttatttatttgagatggagtcttgctcttgtcgcccaggctggagtgcaatgaygcaatctcggttcactgcaacctctgcctcctgggttcaagcgattctcctgcctcagcctcccgagtagctgggattgcaggtgcctgccaccatgccc

SEQ ID NO: 172493 - DNA, 201 bp, Homo sapiens
gaccatctgataggccacttttgttagaggagaaggtacccccttgcctacctgttcttttcttacttcatgggtcttgattcctgactcaggagcacccrttacagaaaagccctgggactagatctaattttatttaatgaaaaacctatggagcatttactcttgcttctaataaattaacaagtcagggctttcttc

SEQ ID NO: 172494 - DNA, 201 bp, Homo sapiens
acagaggcgccctctccccctcgcttctacagaggaggacgttaggattgggagcttttgccattctgccctgatgcatccctgcctcgtagagagcgtgscttccaaaaagtctgtgctttatgttcaggtagtcaaagaacaattgttcttcaccttaatgtctttctttcaaattaaggggtctttaatttttaatgt

SEQ ID NO: 172495 - DNA, 201 bp, Homo sapiens
aaggagaaaaagaagaactaggagaagggcctctgtgcttttttttttttgaaatggagtcttgctctgtcacccaggctggagtgcagtggcacgatctyggctcactgcaacctccacctcccgagttcaagtgaatctcctgcctcagcctcccaagtagctgggactacaggcgcacgccaccacgcccagctaatt

SEQ ID NO: 172496 - DNA, 201 bp, Homo sapiens
catttctgaccctgctctatccttttgaatgatcagaaaggctttcttcaaatttgcttggcccctcgacaattcttgttttgcttttctggagatcgttktgatgcttttggtttctcttacataccaaggggctgtgtctgtagatatgatttcccttttgtaattatatttatggtatattgcctagaactacattta

SEQ ID NO: 172497 - DNA, 201 bp, Homo sapiens
ggctgaggctggagggtcgcatgagctcaggagtttgagaccagcctgggcaacaacatagtggtatcctgtatctacaagttttgtttttttgttttgtwttttttttgttttttttttttaattagctggtgtggtggtgcatacctataatccagctactcaggaggctaaggcaggaggatcacttgagcccaggag

SEQ ID NO: 172498 - DNA, 201 bp, Homo sapiens
aggctgaggctggagggtcgcatgagctcaggagtttgagaccagcctgggcaacaacatagtggtatcctgtatctacaagttttgtttttttgttttgwtttttttttgttttttttttttaattagctggtgtggtggtgcatacctataatccagctactcaggaggctaaggcaggaggatcacttgagcccagga

SEQ ID NO: 172499 - DNA, 201 bp, Homo sapiens
ttggaggctgaggctggagggtcgcatgagctcaggagtttgagaccagcctgggcaacaacatagtggtatcctgtatctacaagttttgtttttttgtyttgttttttttttgttttttttttttaattagctggtgtggtggtgcatacctataatccagctactcaggaggctaaggcaggaggatcacttgagccc

SEQ ID NO: 172500 - DNA, 201 bp, Homo sapiens
aatatcttgggtttttagcaacagtttttcattggcagagtgcatatgccaattacaggtaattctgtcttttaaaaaatgtttagtgttctttaaaattrgtctacagtgtttttaagactaaagtcttttccttgataactatattctattttttttccccaagtagtttccaccagttatgatacaattttagtttgt

SEQ ID NO: 172501 - DNA, 201 bp, Homo sapiens
ttattattcattaagtggaagtggatcatcttaaagatcttgatcttcattgtcttcacgttgagttggctgaggaggagggggcttgatcttgctgtctyaagagcagcggagtcataagaaaatgcacatttaagtggccccatgcagttcaaatccatgttgctcaaggctcaactgtacaccgaactgaaaaatgat

SEQ ID NO: 172502 - DNA, 201 bp, Homo sapiens
aatgatgaggtagaatttacattccacttatggtattaattttacatttctctgaatgaaaagggttagaaggtagtaaaattgaacattaaatgaatcgraggagacagtagtgcaatatatgactgccctaaagacattgtgcaatgcctcatgggattaatgttgagtctcatttcctgcttttacaggatgcagaag

SEQ ID NO: 172503 - DNA, 201 bp, Homo sapiens
agtatagctctcagaaattcctaagaattttctatttcttaggttacactctctatagtacatacactcagacagaaaaatatatttcacgaagagagccytgaaaaatctcatctctagtcccagtgatgccttaaactggttgtgtgaccttcgtaaacctcagttttctttgttgtaaaatgaaaggtcggggtcggt

SEQ ID NO: 172504 - DNA, 201 bp, Homo sapiens
agatcatgccactgcattccaacctgagcaacagagtgagactcttaaaaaaaagaaaaaatgtgtcactcagagatttttctacctagaacaagagtcayacatactttttgaaattattttatctatgtaaacttacgaggtacaagtgtaaatttgtgacatgcatagattgaatagagaggaagtcaaggcttttag

SEQ ID NO: 172505 - DNA, 201 bp, Homo sapiens
agaaaaacctggccggctcaggacgctgacccatcggggcagagcgaagtgagcgcgcagcatggttttcagctgcagctcactcctgcagggaagcctcrcgcttaacgccagtgggcttaacccagctcagcctggctgcccctcaggatgaaaggcaagttctgaacgcagtctgagcaaaggcccgtgggcgctccc

SEQ ID NO: 172506 - DNA, 201 bp, Homo sapiens
ctggccctcggtggtcctgcagatctggtgttgattttgcagggtgtttggaaaggtacctgcgtattttcatttatggaagtgactgagtgccgacgagragaggttaatgcccttgagaggagaatttattacttcatcacctaagagaagggggcacacccctccatgcagggcacaggggaaccaccagtgtgggtc

SEQ ID NO: 172507 - DNA, 201 bp, Homo sapiens
ttgccctaggaacctggacttgcccgtttcaaagactgggaggccaaagaaaaacctggccggctcaggacgctgacccatcggggcagagcgaagtgagygcgcagcatggttttcagctgcagctcactcctgcagggaagcctcgcgcttaacgccagtgggcttaacccagctcagcctggctgcccctcaggatga

SEQ ID NO: 172508 - DNA, 201 bp, Homo sapiens
attcacaaagattttgtcatattaccagatctaatatgacaaaaattgtgaatcattaactcataatgatatgaatcaatgctatagaatgtcatgtccaygttcggcctgaaattgccccacttctcaccggtggtctgggccccacactgtgagaaaatatttcactaatacctgcgcttagcaaacgtcccaaggtct

SEQ ID NO: 172509 - DNA, 201 bp, Homo sapiens
agcttctcctggggctttcagagtacgtccgagctccacaccaagaagagagccaacccacgtggatgcagctcggttcttagggctgacttgaaacttgmtaagactgcctcaagcatgtgccacaaccccagttcttgcaaacccccacagagtcttgagaaatccctcttgtggtccaaattggggaaatatagaatt

SEQ ID NO: 172510 - DNA, 201 bp, Homo sapiens
caggcggacacttggagagtgagtggagtagaatgcactaagggaaaggaaaacttaaaggaagggtcttgaaagcagattgtggttctcccttcacagtkgaatacaagggcttttatatacctgctgatggggctgcgttccctatttctgtaagcgcgaattcctggcggctccacccgtccttccaatgcagacgtg

SEQ ID NO: 172511 - DNA, 201 bp, Homo sapiens
gcaagacagcttgcgccacacgggggggccagagggggacttggagatcatctggggatttcaggaaagaacattctctaggcgcttctgaggcattggaygaatatggccacagtggtgtgaggggccaggagccccatgccaggacacccacccacaccacatagccattgccctaggaacctggacttgcccgtttca

SEQ ID NO: 172512 - DNA, 201 bp, Homo sapiens
gccacatctgtctagagtaaaagttcaattcaatattgtgctatcaacttagcaacttgttgaagatgaactaacataagtacatgctgtgtgtgtgttcygtgtgcagacacaacacaggtgagctttccgtaagcctggatcttcccaatggcggtgcttctcgtgtgcaggccaactagggagaaggggacactgggg

SEQ ID NO: 172513 - DNA, 201 bp, Homo sapiens
taatttcaatactgttgtgtcttggggaatagggaggcccaaggagagggagagagatgggggattggccagatagtggagcagtcagaacacacacaacrtttattatagtttaccatcgtacatgggcacagtttgtggttccccaaaacaatttcaatggtaacatcaaagatcagcgatgacagatcaccacaacag

SEQ ID NO: 172514 - DNA, 201 bp, Homo sapiens
gtggtagaacatgtttctgttgagcaagatgtatctcactattttgtaaggcatgaaggaagtttttaaacaccatctcttagggatgaattagggaaaayggtctacaaaacagatggtgcaaaattaatagagaagtgtgctacttagtttttcatttacagctaaataatctaggctgggcacagtggcacacatctg

SEQ ID NO: 172515 - DNA, 201 bp, Homo sapiens
cgacagagtgagactctgtctcaaaaaataaaaataaaaaaacttttcatatcagcaacaaggctatttcactttcctatcatccatgtgttcactggagyagcacttttaattttcttcaagacatttttcctttgcatttacaacttgagtaactgcacaagagacctagcttttggcctgtttcagctttccacatgc

SEQ ID NO: 172516 - DNA, 201 bp, Homo sapiens
gtgtaccctacatgtactctacggtgtgcgacacattctgcaggagtcagcgctgctgggagtaaggctccaaagtcctaaggtgagagcccctgctcccragggccgagtgctggcattttgctgttgttggaaggagcccagctcaatgcccagccatccctggagcacgccctcgagtgtcagcctcttcccacagac

SEQ ID NO: 172517 - DNA, 201 bp, Homo sapiens
aggtgttgcttccattgggcccactgcccagctccctggtgtaccctacatgtactctacggtgtgcgacacattctgcaggagtcagcgctgctgggagyaaggctccaaagtcctaaggtgagagcccctgctcccgagggccgagtgctggcattttgctgttgttggaaggagcccagctcaatgcccagccatccc

SEQ ID NO: 172518 - DNA, 201 bp, Homo sapiens
gccttgcacttttatattatggagatagtttctttaaacctcatgaatcaacttctgctagcttcacacttttcttttgcagcttcctcgcctctctcatyctgtgtagaattgaagagagctagggccttgctctggagtaggctttggcttaagtgaatgttgtggctggtttgattgtctatggagaccactaaaact

SEQ ID NO: 172519 - DNA, 201 bp, Homo sapiens
gacaaggggtttctaattaaaatgctattacaataatgtttgagccttgtagggactagaagaagtgattggaaataaaatatggtttcatgccttcatgkcaatgaaggcatcgaagtgggcgggagttttggttaagaagggattgttcaaggtgagtgtcatcaaaatacaactgacaggaatgattatttgagaatg

SEQ ID NO: 172520 - DNA, 201 bp, Homo sapiens
gctcaagcgtctttgcagtatcacttgttatagtattttgggaaaataatctggtgttagatgttaaaataaaagtgcataccctctgacccagctattcmtcttttgtgaatctttcctatagagttaaaaaactgaattatgagcatgttcaccatgacatttacaacaacattgtttgtagtagccaaaatgctgacc

SEQ ID NO: 172521 - DNA, 201 bp, Homo sapiens
tttgtaaaacggagatattatcagaactgacttcgtgggattattatgctaaatattgtcatcatagccattacctgatagatgagataatgcacagaagrgattcatcacagtgcctgctgtatacaaaacgtgtcctaagtgtcggctgcttaatgtccttaactgaattttgcacatttggaaagcaagactcaaagc

SEQ ID NO: 172522 - DNA, 201 bp, Homo sapiens
gctaattttttgtatttttactagagacggggtttcaccatgttggccaggctggtcttgaactcctgacctcgtgattcacctgcctcagcctcccaaastgctaggattataggcatgagccaccatgcccggcctcattttaaccactctaatatggtttggaagtagtatctcattgtggttttaatttgcatttgc

SEQ ID NO: 172523 - DNA, 201 bp, Homo sapiens
gaatttgcggtatttgagagccactccagcctccattatttctaattctatgtcctctacccttctctgtcatctctccactgcctcccagccccttccamtgtgccccctgtattgcccactttcagaccaacagccttttgtatcagccttttctggaatgttccactaattacttaccctaactaaaaccttagggta

SEQ ID NO: 172524 - DNA, 201 bp, Homo sapiens
tttaagcatttcacctaaggaaatttagtgttatttaaactgattaacagtatttggcaaagtattttcattagcgttctaatattaaagctagcatttcyttaaaggagggaggctaaaattcatcccaaagcttgtttttgttaactcaaattttctcagtgttattgctgaacaagttactgaattttctctgggtat

SEQ ID NO: 172525 - DNA, 201 bp, Homo sapiens
tttctgaccttctctgaaccagatcctaagaccttcatgtgagagatgcccttcctgtatctggaagagaggagcatcctcatccccatagagaaaaggaygcagagtaatctgagtagtttcccccagtttatgatacttacctcttgctctccgtgctatcatttctccataactcaccagtcctcatcaaccctgtat

SEQ ID NO: 172526 - DNA, 201 bp, Homo sapiens
caatacttggtggcctcctcttcaggccaagggcagttcctctttggcctggtcttcaccagtggctctggctctcttctcagtcttgtgagaacattctygccatctgtactttgcatttggcacttcctgcttctgaggaaccagccagtggttagcattgttatgcgtttttctcctgttttgagtttgtgaaatgtt

SEQ ID NO: 172527 - DNA, 201 bp, Homo sapiens
atgcagaatagtatgacagctgggaaaactggcacggtgagtccctaagtccccatcagcccaggccggccctgtgatggaggaacgcccacctttgaatmgtgggtggtttggctggaaagggccacagaggcgccctctccccctcgcttctacagaggaggacgttaggattgggagcttttgccattctgccctgat

SEQ ID NO: 172528 - DNA, 201 bp, Homo sapiens
taacaaggtgcattgtcaatgagtagtaatatttttaaggaaatatttttttctgagcagtaggtctccacagcaggttttaaatattcagtaaaccatgycctaaacagatgtgctgtcatccaggctttgtttttgcgtcctagagtacaggtagggtagacttagcatcattcctaagggccctgggattttcagaat

SEQ ID NO: 172529 - DNA, 201 bp, Homo sapiens
tatcttcaggcattcatttatttaattagatgcactgaaaagcactctcgaggtgtggggacagggtgtggtgtatccaatggagagtttgtagaaattgttaagttgaggtacaactgcttataaatagtatttgaaaatgtcttattttgtaaacaactgagtatttagttgattgcaaatcttcctgtaaatcaatga

SEQ ID NO: 172530 - DNA, 201 bp, Homo sapiens
ggaaagtcaataccaaaagacacatgatattcctggccccatgagccaagcttaggagcagtgttctggatccttttcagaatgagaagataggacaaacrtttgattatttgtgctaattaacatgtactttcataatacatacttttttaaaatcagggagtgacatgataggatctaaagtataattaggtccatagt

SEQ ID NO: 172531 - DNA, 201 bp, Homo sapiens
tctgggatggggcttgacaatttgcatttgtaaaaagttcctgaatgctgctgctgctgctggtcagggaaccctgctttaagacctcctggtttatgcartttcaaacattgtaagaaatagtcactcatgtgattggtttgtgtgcttggtgtagactgtacgaggatttttcaaaagtaagtattgttcattctaaag

SEQ ID NO: 172532 - DNA, 201 bp, Homo sapiens
atgagagtcagtcagtcatcttacactggtgacagacactgaattctggcaattcaaaggaaacaaatatccctgcagtcattgggcccattgtcacctarggatagagaaatgtaaatgactgattaccgtgataagaacgctaacagaggtgtatacgaagtagagggattctggggctgaggtgaagaaagtggagaa

SEQ ID NO: 172533 - DNA, 201 bp, Homo sapiens
agccatttcctgggttaagaaagaggaggaagattctgtaactgtttctgtgttctaggagcacggggctcagggaaagttcagcattgtcagttgtcaasaaaatcagtaagtgttattaaataccccatggtgtgtggttctggcactgaaatggggctgtttcctaaggctctgtccatggccacctctgtctatttc

SEQ ID NO: 172534 - DNA, 201 bp, Homo sapiens
cttttggcatttctggccctctagacttgaaaatgactgagtggttacaatttacaaagttaagagagctttctgttgattggtgtgaatggtaggatatkagacagactcttaggagtaaaggacagggatttagggaaaatcctagtggagtcactgcagccaggcagagttgtctgttacatgcagataacaagtcac

SEQ ID NO: 172535 - DNA, 201 bp, Homo sapiens
agcaatgctgggtgacactcgggcccccacgacatgcgaaaatctgctgagtaaatgggccgaggtttctctcaagccttgtttggggcaaggccgactcytgcttaatgagtgccgctctgataatcggatgcgaacgtgaaccttgacctcgtgtcaaaggagaggacgcaataagctggatgaaagatacaggattca

SEQ ID NO: 172536 - DNA, 201 bp, Homo sapiens
gactcccatttgtttgaaatttaactaattaaaaaatgaaaagaattaagtttgttactgtttttctttatctgtactcttgagaaataagtgatgtcatrcatttttggttgtggatcatctcctaaacataaacttccagagaacttcttcagtcttccgtatctcataattccataagcagtccctcaactgacatgt

SEQ ID NO: 172537 - DNA, 201 bp, Homo sapiens
gggtcgcatgagctcaggagtttgagaccagcctgggcaacaacatagtggtatcctgtatctacaagttttgtttttttgttttgttttttttttgtttkttttttttaattagctggtgtggtggtgcatacctataatccagctactcaggaggctaaggcaggaggatcacttgagcccaggagtttgagcctgcag

SEQ ID NO: 172538 - DNA, 201 bp, Homo sapiens
ggattccctggtctttgcctgcctttgaagagagaaaaaaggctgtaaaatgccaactggagggagtgactgttctgacacccctgatgggggcctctgcrttgtctctgcgctgcccctcccatccccctgcaaacagccctcgaggctgattcttcgctctccctggaatgcagatgccacgtgaaaatgaatcaaaaa

SEQ ID NO: 172539 - DNA, 201 bp, Homo sapiens
ttgattcccatcactcacaattcatcatcagctggaggtgtctgcagctcttcagcacagagcaatgctgggtgacactcgggcccccacgacatgcgaamatctgctgagtaaatgggccgaggtttctctcaagccttgtttggggcaaggccgactcttgcttaatgagtgccgctctgataatcggatgcgaacgtg

SEQ ID NO: 172540 - DNA, 201 bp, Homo sapiens
taaaatcaaggtgtgggcagggttggcgcctccctagaggctcttagggagggtctgttctgtgcctctctcctggcttctagtagctcctggcagtcctygccttccttggcttgtggctatgtaattccagggtcttctgctgctgtcacatggccttcttccctatgactgtgtgtgttcattcacataaatccagca

SEQ ID NO: 172541 - DNA, 201 bp, Homo sapiens
tcctctgaaaataaatggaacttgatagatttccatatcatttataacttcccttaattacacttggaagacttgccagtaaaactggaaaattggcagcytatatccattagagtcattttgccgaccatggcaagcagctggctttacgggatttgattcccatcactcacaattcatcatcagctggaggtgtctgca

SEQ ID NO: 172542 - DNA, 201 bp, Homo sapiens
tctaaaatcaaggtgtgggcagggttggcgcctccctagaggctcttagggagggtctgttctgtgcctctctcctggcttctagtagctcctggcagtcsttgccttccttggcttgtggctatgtaattccagggtcttctgctgctgtcacatggccttcttccctatgactgtgtgtgttcattcacataaatccag

SEQ ID NO: 172543 - DNA, 201 bp, Homo sapiens
gagtcagtctccttggtgtattttcaaggaaaataaggaccctaaaacaactaagggccttacaagtattctgtttttctttgaaatgttactttttatcrtttaaattccagtaatctatcatgtttctgtttagcttagctgaagtaaaacttgaccaatcgtagaatggtgggcctggcaataagttctaaaaaaagt

SEQ ID NO: 172544 - DNA, 201 bp, Homo sapiens
gtgtctctctgcaggacatgctggtctccaacttccccttccaaagcgacggctaacggcacagcacgattcggctctttgcagttcttacttaaccgacsccccctaaacagcaaaatcgattgcgtgtgttgtcgacctgtttcacgtttgcattacgttggtgccaggaccctcagcgcttcccctcccaaatgatct

SEQ ID NO: 172545 - DNA, 201 bp, Homo sapiens
cgtgcgcacacatcctgcaggaacgggccccgcacatgggggcgtctgatggagacggaatggtggagggccctctctgcgcacccaattaatgcttggcytcccagccaccctgggcaatccggaaggtgttgcttccattgggcccactgcccagctccctggtgtaccctacatgtactctacggtgtgcgacacatt

SEQ ID NO: 172546 - DNA, 201 bp, Homo sapiens
gaatttcaagtctcattccactgaactgttttaactcatatctagtttttctctgcttttcagccacgccagtgtttttaaagatgcatcatttttgcatktcgcgctttccatcactttaaaaacactgacactgtttctccagctctgagttaggacagtagacctttaggggaatatttgagtgttgctctcactgcc

SEQ ID NO: 172547 - DNA, 201 bp, Homo sapiens
aggctggagggtcgcatgagctcaggagtttgagaccagcctgggcaacaacatagtggtatcctgtatctacaagttttgtttttttgttttgttttttktttgttttttttttttaattagctggtgtggtggtgcatacctataatccagctactcaggaggctaaggcaggaggatcacttgagcccaggagtttga

SEQ ID NO: 172548 - DNA, 201 bp, Homo sapiens
ttcacaaaagtgttggagaaacgtgcgcacacatcctgcaggaacgggccccgcacatgggggcgtctgatggagacggaatggtggagggccctctctgygcacccaattaatgcttggcctcccagccaccctgggcaatccggaaggtgttgcttccattgggcccactgcccagctccctggtgtaccctacatgta

SEQ ID NO: 172549 - DNA, 201 bp, Homo sapiens
ctgggctggtgttgaactcctaggctcaagtgatcctcctgcctctgtctcccaaagtgctgggattacaggtatggccactgtgcccagccatatatgtrtatatatatattttttaatgaagccacaagcattctgcctctgtgctttttatttatttatttatttatttttgagacggaggttcgctctggttgccca

SEQ ID NO: 172550 - DNA, 201 bp, Homo sapiens
caggctaatttccaaaggtattgtgaatgacatcagtttccactagttctctttgtaactgcaggctttggctctgattttgagctaacttagagggcagyagggagtcatatttttcttcattttaaggaattttaaaagaaactggacttgttttatatcggccacaagtctgtactcttacccttagccccttgggtg

SEQ ID NO: 172551 - DNA, 201 bp, Homo sapiens
ctctgtctcaaaaaaaaaagaattcacttactttccacagaagcaggcactgttatgatccacagttcataaagaaggaatctgagacatggaaagtcgamctttcccaagcttgtaagtggaacagtattctgactccagatcctaaacggtaaaccactactctctgctgcctcgcagcctggagattttctgtaagag

SEQ ID NO: 172552 - DNA, 201 bp, Homo sapiens
atagataggacaacgttccaagtcgggagaatgttcatatgagaattgaatagaaggccaaatttttaggctaagaatatgatcagaggacacttccagtrgagagagtcagcgtgaagagttgaggtgcatggctgttgtgcatctgagagcgtgtacgcgggcgtgagagcgatttagatccctgtgtgttgaattcga

SEQ ID NO: 172553 - DNA, 201 bp, Homo sapiens
gcagtgagctgtgatcacactactgcactccagcctgagtgacagagtgagatcctcaataataagcagtcttcagtgtttcattttacccaggctaaatrtatttgtagtatacatatatgtttatattttgatagattcatgtgagtaaaagatatacaataaaaattgacattaccgaaggggagtgggattagatgt

SEQ ID NO: 172554 - DNA, 201 bp, Homo sapiens
gagttttccatgtaacagtagagttatatgatatatgttatcacagcagattgaatgcaggaaccagatttgagaatccagctgtcttaagccacatgttraagagatttgtgaaaatgtaaaacatttctactctaatgaatttgtcataaaaatgttacttctaattgttaacattaaatgggctattcttttgaaata

SEQ ID NO: 172555 - DNA, 201 bp, Homo sapiens
aagaatgttatttgggctgcagaaatttttattttaatgaagttaaatgtgccaatttttaatggtttgtgcttttggtgttatatgtaaaaactcattgmtaaaccaaagtcacctagatgttcttctattttttctctagaaattttatagttctgcaatgtatatttaggtctgagatccattttgagttaatttttg

SEQ ID NO: 172556 - DNA, 201 bp, Homo sapiens
cattcttcagtccctctcccctttggagggtgggggtggggctgaaagttccaaccccttaatcacatggttggatcctctggccacctgctcccatcctmtaagagtcatctcattagcataaactcaggtatgattgaaaggagcttgttatgaataacagaagacattcctctctcaacagtcatttctatgatattc

SEQ ID NO: 172557 - DNA, 201 bp, Homo sapiens
agttcgagaccagcctgggcaacagcaaaaacgtgtctctacaaaaaatataaaaattagctgggtggccgggtgcagtggctcacgcctgtaatcctagyacttcgggaggccgaggcgggcagatcacgaggtcaggagatcgagaccaacctggccaacatgatgaaaccccgtctctagtaaaaatacaaaaattag

SEQ ID NO: 172558 - DNA, 201 bp, Homo sapiens
catgccacagatcctgctttcaaagagcttaaagccttctgtgtccagaattggtgggttcttggtctcactgacttcaagaatgaagccgcggaccctcrcggtgagtgttacagctcttaaggtggcgcgtctggagtttgttccttctgatgttgggatgtgttcggagtttcttccttctggtgggttcgtggtctt

SEQ ID NO: 172559 - DNA, 201 bp, Homo sapiens
gttatctttttttccatttgtttctggctcatttatctcaggttataagtttgttcaagtttgtaccatggttgtttctggtataaaacccgatagttgatttttttttttttttttaaacagagtctcactctgtcaccaggctggggtgcagtggcgtgatctcggcctgcaaacctccgcctcccgggttcaggcaat

SEQ ID NO: 172560 - DNA, 201 bp, Homo sapiens
ctataaaatacttgtttgaatgactagtaattctataggagagaagcacagatgttaaaataaatgattgattgattgattggttgattgatttccctcargacacatgctaaccaagagtgagaagaaccagttattggcaatagcatcatcattgtttgtggcattccagttaagagcacaacattttcaagaaaattc

SEQ ID NO: 172561 - DNA, 201 bp, Homo sapiens
tattttttgagacagggtctccctctgtcacccaggctggagtgcagtggcaggatcatagctcactacagcctcaaaactcctgggctcaagcgatcctyctatctcagttcactaagcagctgggactaccgaagcacaccaccacagcctgctaattaaaataaaaaaaaaatgtagaaacaaggtgccactatgttg

SEQ ID NO: 172562 - DNA, 201 bp, Homo sapiens
ggcctttaacgggttggatgaggcccacccactgtggagggtgatctgctaaactctaagtctactgatttcagtgttcgtctcatctaaaaatatcttcratgatacatctcagtgtttgacctaacatctgggtaccatggcctcgtcaggttgacacataaaattaaccatcacagaagtatatatcctatccctaga

SEQ ID NO: 172563 - DNA, 201 bp, Homo sapiens
ttgttattttctttcttttataaggaaaactattgccatcctagtgtgtgtgtagaataatatcttattgtagcagagggaagaatagattaaaaaaagtractcaactatatgctgtctataagaaactcactttagatgcagagacacaaataggttgaaagtgaaaggaaggaaaaagatatcccatgtaaatagtaa

SEQ ID NO: 172564 - DNA, 201 bp, Homo sapiens
aggctgagggaggctgaggcaggagaatcgcctgaactgaggaggtggaggttgcagtgagccacgattgtgccactgccctctagcttgtgtgacagagygagaccccgtctcaaaaaaaaaaaaagtaccttattttaattttcatttttctgtttattgctattgtatttgaatatttctccatgtattcattcacca

SEQ ID NO: 172565 - DNA, 201 bp, Homo sapiens
gtctttttttgcctttattaagttcaacatgtgtgtataaaagaataggaaaaacagataagtgaaaacgagagtcaactaatatttttgcctagaaatamgttttatgtgcactaattctagaatttttctgtaacataattttttacaaggcttattctgaacatattgttttgttcttcttgcccttagaaataaact

SEQ ID NO: 172566 - DNA, 201 bp, Homo sapiens
ggaaccatgtccaatactaggagaatggttaaataagttatggttcatctagattactagaaatactgggtagcagttaaaaattatgaggtagaattctaaaaaaaaaaaaaactgagtgataaaattagttgtagaataaaatgtagtgtgattcagtttataccaagaaaaatcttaaacatgaaataaaactctgca

SEQ ID NO: 172567 - DNA, 201 bp, Homo sapiens
agacaaatgtctgcaccctagaagccctttgcatgttcccttcaaatgatgctccttcctcccatcccaggaacactgtcctaactattatgggaatcatyttcttgcttctctttatactttcacctccttaatatgcatcctatgaccctggagtttagttttgcctatttttttgaactttctatagatagaatcata

SEQ ID NO: 172568 - DNA, 201 bp, Homo sapiens
tgattgtagtaaatgtggaaaataatacaaacagctgcactgcagaccgataagacaaatcccacagtaatggcctttaaaacatattaccaagttggaartcagtgaggggaaaaagaaaactattactatttcttcctcttactgttcagtgacattatttttaaaggtgaaattacctctggttttattatcctagga

SEQ ID NO: 172569 - DNA, 201 bp, Homo sapiens
tctaacaatttctgcatttgtgtgatgtgaagctattcatgctgtacctttgaagacttttttctttctatttctcatattcttgctcaaatattttcaaragaagataaatttattataaataacagtgcagagctgattgtagcaccactgcattctatattgaataggtctttgatattcagctaagtggaactaatt

SEQ ID NO: 172570 - DNA, 201 bp, Homo sapiens
atagacagtgataatttttatttttgccctagagcagggcagtgttatctgtttgggcagtattaacattttggacaattctctgttgtgggagactgccytatgcgtaataggatgtttagcagcatccttggcgtccaccaactagatgtcagaacatgtctccagatataacaactaaaattgtctccaaatattgcc

SEQ ID NO: 172571 - DNA, 201 bp, Homo sapiens
gaagccattaagaaaaccagggcccaagctgtgagtctgaatgaatctatctactgcagctgtttcatatgtagtgagcagaaagctagagtttgtatttaaaaaaaaaaataggaaagaatgattgaaaatgctgttgcagttagttcatgtcacatgagttaaatgtggtcgaattcgctactggaaatcaaaggcttt

SEQ ID NO: 172572 - DNA, 201 bp, Homo sapiens
acttggtccctacccttaagtagcacactggctggtgaagacagacaaactgataccatgcaaacatggtatcagtgctgagatgggtaatgcataggctyatatagtagcagagcgaattgtagatctgttagctttattatttgtttcttttattgataaacagtacagtccatagggcgtaggtctctggttaagaat

SEQ ID NO: 172573 - DNA, 201 bp, Homo sapiens
gaattgtctcctggtagtgatgtgtgtcacttttggtcagagatagctaagagcaagtgtgagccctctagtccctgccatgccccccttggaggttgtgkgtgacgctgatgctcctgtcagcatgagttccttctgaagagtggcagtgagcactgctacttgcaagctgtagtagactgggatctcagtgttgactta

SEQ ID NO: 172574 - DNA, 201 bp, Homo sapiens
caggaaggcagaaggtcagagatcttagttctgaggttacttctgaggccttctctttggggtatcattttctgagcctcaacaatacccttttctacttsagagctgctatattgggtctctcagaatttgcagtatggggtaaagatgagaagagcatggcaggaagaaccaggttttctggggcagaggcaacctggc

SEQ ID NO: 172575 - DNA, 201 bp, Homo sapiens
atctctaaaactggatggaaacatccaacaccagcaattaagcctggagcgcttcaattagcgctcacatttcttttgaaagaaatgttttagtaagatgmatgtttaaataaaaagcctaattcgtgaacccatattatagatgtttacagtttattagcacagttagtgaaggtaaaacactttaaccttttaactata

SEQ ID NO: 172576 - DNA, 201 bp, Homo sapiens
aacctccatagttgctgcaccattttacattcccattagcagtgcacaataatttcagtttcgtgccatctttgttaacacttgttattttctgttttgtyttgttttttaataatagccatcctattgggggtgaagtggtatctcattgtggagcaggacttatctagatagtaactgaagaaaaagcattccgaatac

SEQ ID NO: 172577 - DNA, 201 bp, Homo sapiens
gtaacactattgtaaactgggagcacttctgtaatcaaagttagcatgactcagctgtttcaaacttctacctttatgatactcttgaacagaaatgttaraaatatatatattttcagaataacggtagaatacatttttccacatgtcaaattagacttatagctgctgaatttattgcataattttcactttgacttt

SEQ ID NO: 172578 - DNA, 201 bp, Homo sapiens
ataaaagggtcaatccatcagaaagctataacaagtataaacatatatgtacctaataacacaattcccaaatatgtgaagcaaaactgagacaaagagaraaataggcaattccacaatacatcactttgaaaaatggatagaacaactagagagaatatcagcaaggaagtaaaagtgtcggacagccctatagaccaa

SEQ ID NO: 172579 - DNA, 201 bp, Homo sapiens
tgtgtgtgtgtgtgtgtgtgtgtgtttcaagtaagtgttttccttaaatccttttctaacacctgaatccaaaccggagtggagggagggcgggcagggakgagggagaccactcctgcctcaagcctggagggcaagagggtgagactgcagccctggcccctcacacggccctcaaggaggttgctcagaggcagtaaa

SEQ ID NO: 172580 - DNA, 201 bp, Homo sapiens
gcacagcacgattcggctctttgcagttcttacttaaccgaccccccctaaacagcaaaatcgattgcgtgtgttgtcgacctgtttcacgtttgcattaygttggtgccaggaccctcagcgcttcccctcccaaatgatctgggagtggagcagaaagaaggccagatgcattccatcattttgcaaatgcagtgtttt

SEQ ID NO: 172581 - DNA, 201 bp, Homo sapiens
tgtaaaatgccaactggagggagtgactgttctgacacccctgatgggggcctctgcattgtctctgcgctgcccctcccatccccctgcaaacagccctsgaggctgattcttcgctctccctggaatgcagatgccacgtgaaaatgaatcaaaaagggcagcgcgggcagcgcttccaggcccagctcctcagcgcgg

SEQ ID NO: 172582 - DNA, 201 bp, Homo sapiens
cctgaaaagagtgtatattctcaaattattatatgcaatgtcttatagaaaactcaagaggtcaaacctacctattgggatattcaaaacttctagtgagtttttttttttttttttaattaagacaatggagtctcactctgtcacccaggctagagtgcaatggtgcgatcttggctcaatgcaacctccgcctcccgg

SEQ ID NO: 172583 - DNA, 201 bp, Homo sapiens
gttctatttattcctttccagtctgtttactctttatttccttttcttaacatacttcataagctggaatctgcagtcagatgttgaataagagttgtaasaggggacattcttgtatttttcctgatttttgggagaaggcatccagtttcttgtcattaagtgtaatgttaactgtaggctttttgtgtatattcttta

SEQ ID NO: 172584 - DNA, 201 bp, Homo sapiens
accgcagaggctaaactaaatccaattggctaatttaaagagaatgacggggtgagtgctttggcgggagtcagggcagagcaggtagcaggtgatcggartgagttagggtggagtaggtaattgaaaaaggttgctttacgaggaacttaagtttaaaagtagaaggcaacgaattgaacatattgacatattaattct

SEQ ID NO: 172585 - DNA, 201 bp, Homo sapiens
ccctgggttcttcagaaatatcatggtcatgaagaactccccccgccatcagcacaaaacaacaaacacaaacccacactttcccttctggggaggctgagggggttcaaaaggcaagtgaactactttacattagaggagcacaaagaaacgaaacaaagcaatgcgtactatctatgtaattctcatgagcaactttca

SEQ ID NO: 172586 - DNA, 201 bp, Homo sapiens
tggcagtggtgatattaaatgcatatttagttttccaagatgagctggaaaactaaatttttagtttttagtgctgttggactatttaggaatagccagtrctcactttgatgtatagttctgatgttattggcaaaaataaacaaatcaaaagcacaaaacaggcaactgacaatgtcatgtctctgaagagcacatctg

SEQ ID NO: 172587 - DNA, 201 bp, Homo sapiens
gtcacttctgtgtctggggtgaggtaaggtagtagcagtaagcatcccatgagaggacctggaaggtgaggaaaaacttgggaagggcactagagcctgatttttttttttttttttaaagcagtctcttctactaggactttcacctccttttacgagtagaatttgtattttgttatgctctgtgtattagtccattct

SEQ ID NO: 172588 - DNA, 201 bp, Homo sapiens
cactgtacccaaggtgtagtcttttatcccccgcccccttcccaccctttcccccaagtccccaaagtccattgtatcattcctatacctttgcctcctcrtagcttagctcctacttatgggtgagaacatacgatgtttggttttccattcctgagttacttcacttagaataatggtctccactttgggaggccgagg

SEQ ID NO: 172589 - DNA, 201 bp, Homo sapiens
tggctccatatttttgcaattgcaaattgtgctgctataaacatgcatatgcaagtatcttttttgtataatgatttattttcctctgggtagacacccartaatgggattgctggatcacatggtagttctacttttagttctttaaggaatctccacactgttttccatagtggttgtactagcttacattcccaatag

SEQ ID NO: 172590 - DNA, 201 bp, Homo sapiens
gtgcaccactgcgcccaacctttattatatagtaaatttgggtgagaattatgaagattgttgaaggttcacttagatattttcatagtaatctctggctytcttttccctattcaagtttaaatgaagcgtatggcatgattgggaaactgattgtgtctatatttttgaatatccccactaagacttttggcattgtga

SEQ ID NO: 172591 - DNA, 201 bp, Homo sapiens
ctcaggaggcatccctcgttgcagctgttcctcgcggggatcctgcggagcagagaggcctagggcagaggcagttgggtgcccgcacgccctccgaggcrgctgatggctttgggcaggcatattgctcgaggtctgcttccagggccccgcggcattggctttgtcttaagctttccagggtgtctttttaggtgtcct

SEQ ID NO: 172592 - DNA, 201 bp, Homo sapiens
aaatgagttttttgcaatgttttgaaatttgtcttctagtcagttttacctgcagtgttgtacaaaaacaagcaaattagttgtgtgtgtgtgtgtgtgtktttttttttttttttgagatggagtctcgctctgttgtccaggctggagtgcagtggtgcgatctcggctcactgcaacctctgccttttgggttcaagc

SEQ ID NO: 172593 - DNA, 201 bp, Homo sapiens
tcctttgtctaggaattagtttgtcatgcctacctacaagctagatgggaaagtggagtctgtgtctgggtgtcttttgctcagctaaaattctattactrtggaaaaatgaaaagcaggttttaggagaaactagcagtctgtcacaataaactgtgtcttaaaaattgtttatatataattatatatatgtaactattg

SEQ ID NO: 172594 - DNA, 201 bp, Homo sapiens
tatactggcagataggtttcagtttatgatttggagtcatgatagcttccttgtttcagttgtgtagggaagttgcaaatttctactcatgactcattgtrtagatgatgaaatgtagtgtattttctatcacctatcatctttgtcagaggccctctacctttagtagtggatggtgggaagaaaaatttgtgagtaaac

SEQ ID NO: 172595 - DNA, 201 bp, Homo sapiens
gaatggaagtgactgtcaatgactctgaaggttctgagatttatgctacttgctggctgacaaatcagcctgcgacatttcatagatgctgatagaaaacrtgagactccaggatcagagatgaaggacagtttattacagcagcagcagtggtcaggataccattgtctttgtaccatttccctgaacccagattcctct

SEQ ID NO: 172596 - DNA, 201 bp, Homo sapiens
agggcctctctgtattgcctaggctggagtgcagtggcacaattatagctcactgcagccttgaattcctggattcaagtgatccccctgcctctgactcytgagtagctgggactacagatgtgccaccctacgcggctaatttttaaattttttgtagagatagggtctttgttgtccaggctggtcacaaactcctgg

SEQ ID NO: 172597 - DNA, 201 bp, Homo sapiens
gcctggcattatagtcactcactcatgaatacccttaactgctcactccttcattcttccatcagtctcaaacttagaggaactctgcctccaccttcccyatgcctgcgcatgagcaccttaccatggctggtgaacgtcccataccaagggcacagttaacatgcgtctgctggtcagggccagctgagcatcctacac

SEQ ID NO: 172598 - DNA, 201 bp, Homo sapiens
gaatgttccactaattacttaccctaactaaaaccttagggtagttttgttctcataccacacgcacctccaagacaggaggtgggattactttcctcctygtgtcattcaggacgactgctccgctctttcttgtaagccctttcttttttgaaatcacatcatcagtcttcactacctcatcttcctcttggcaacctt

SEQ ID NO: 172599 - DNA, 201 bp, Homo sapiens
ctcccagccccttccactgtgccccctgtattgcccactttcagaccaacagccttttgtatcagccttttctggaatgttccactaattacttaccctawctaaaaccttagggtagttttgttctcataccacacgcacctccaagacaggaggtgggattactttcctcctcgtgtcattcaggacgactgctccgct

SEQ ID NO: 172600 - DNA, 201 bp, Homo sapiens
acaggagcaggaactagttattcctttctgagaattagatataacttgaccaacaaatcggttttttatccttcatatcatcttcagaagtagaagcaagrtatatgatcaaagtctttttaaaaatagcagaataccggggtttttattttatattttcactctgcacaatgctaatctccttaacatttgatgacaaag

SEQ ID NO: 172601 - DNA, 201 bp, Homo sapiens
accaagagacacttcctcaaaccattttatcttttttctgtttggatagaccaaattgtggctcatagatttattcacggagaggataggaattctctttyttgaaatgttctgcttcactgaactgccctaaatatgcccgattgtttgagagccacctacagaaggtgccatgaatatacttgtctgtgcgtattttcc

SEQ ID NO: 172602 - DNA, 201 bp, Homo sapiens
ttggtattgactgagatggccaacagttgaggacatgaaagaacattaacagtcagtcaactgtacgtgtcctaattgttactggaagaatgacttataawtggaaactggaagtgagcccacttgaagaggaacggaggttgacagtggcactggaggctttgaaatcacagctgaaaactgtacagcaaactgcaagcg

SEQ ID NO: 172603 - DNA, 201 bp, Homo sapiens
atgtgtggaataaaaaggagataacaatcattaatgaatattgaattaatttatttgagtggtttgttgccaaaagcttgaggatgtcataagagttaggstaaacttaagaaaaagtattcattgaatttatggatgaaacaaaaggacgactgggacttgcttcttaatagtcttggagcaggtgggtgaatcagtggg

SEQ ID NO: 172604 - DNA, 201 bp, Homo sapiens
aacacagcttctgctcaaattcaaggggaggggactgagtcttcacttcttcatgagagcgtgggcaagattcttagaagagcacgtggaatgggagataytgttgtggccatctttggaaaagacaatctgccacagcccgttttgtgggaaagaatggtatcataaagaagtcgaatacaacttaatggttttgcaaga

SEQ ID NO: 172605 - DNA, 201 bp, Homo sapiens
gatgaagtgaccttttctaacaaacagaggagatgaatgttataggtgagagagcagtgtatgcaaaggtcctgtggccagagggaatgacaggttagaaraactgaaaaaagcctacagaggctctgatgcagagagtagatggtgttggggaagctggcaggagtcagaccatctggctcttatagatcacattatgag

SEQ ID NO: 172606 - DNA, 201 bp, Homo sapiens
gaatttaaggcgtaaccttatgatctggtggaggagaaattgtaactgtgcaaagcagttaaaatgagattgttgggtagatgagattatatgctaaaatytgcactaactactctcagagtttagattagaggagattcatcctaaattgaagtacttgggaaagatccagtggtagatgtgaaacttggagtccatctt

SEQ ID NO: 172607 - DNA, 201 bp, Homo sapiens
tgctctgcttttcctcaagtgataattgtgtaccctacaaagaatttaggagagtagaacgtggttgaatttcaagtctcattccactgaactgttttaaytcatatctagtttttctctgcttttcagccacgccagtgtttttaaagatgcatcatttttgcatttcgcgctttccatcactttaaaaacactgacact

SEQ ID NO: 172608 - DNA, 201 bp, Homo sapiens
tatttagttttttttaaaaacaaatattttttaggatctgttatttcctattaaattccttttacatgaaagatcataaattgatttttaaaaatgacttytaatgttaatagggctttgtcttttagacatatttgttaatgataaatttgtttctgtaatttttatgctttgtagctttaatttgggcccatacgtaaa

SEQ ID NO: 172609 - DNA, 201 bp, Homo sapiens
gcctttggtctcctgagcaactactgtgttgactctgaatgttctcactgggcatggtccctcataatgaccccgcctgcttttctcctgcacaatccacrtctggccacaggaaatagtaataagtccttgcctcaccaaaccaacaaagtacaagcttctcttcttggtctgtctctaagaattcgcatgaataagtga

SEQ ID NO: 172610 - DNA, 201 bp, Homo sapiens
taaagaaaatgactcctataaatgtagtaggtgagaggctgagggcatcctcttctaggttattctgctccttcctacctttgttgatgccccacagtcartgttggggaaaattaattaggatttatattccagtcttctctaatgtgttgtcaccattgcacagactcaggacttccagtgcagtgttgactagtacca

SEQ ID NO: 172611 - DNA, 201 bp, Homo sapiens
tgaatcctggaaagctgtgtgacccatctcagtgctaacctccggcctctctctaaacatacccattcctttggcttttatagtaatcatttttttttgcrtttaaaaataattttattgtccaaatgtgccaccttggacacaatatttaagtcttgtccatttatttttaaatttgataagtctttaaaatcttagtct

SEQ ID NO: 172612 - DNA, 201 bp, Homo sapiens
tcagattaagaaactttattaaatataaaaggaattaaagcacaaaaataagcaaattggatagttatttctaatattagtagatggaccatttgcctctkaaaggatcggaagaattggctttaatgttgtacattaaatacaggtatttaatcttcagattaagaaactttattaaatgtaaaggaattaaattttata

SEQ ID NO: 172613 - DNA, 201 bp, Homo sapiens
cctgctggctcaagtgattctcctgcctcagccttccgagtagctgggataacaggtgcacaccaccatgcctggctattttttatatttttagtagagayggggtttcaccatgttgaccaggctggtctcaaactcctgacctcaggtaatctgcccgcctcggcctcccaaagtgctgggattacaggagtgagccac

SEQ ID NO: 172614 - DNA, 201 bp, Homo sapiens
acaaaagaaacctatggcttaatgaactattatagggcgaactattttgaaatcatgaaataggtccagacgcagatgtttaccctgaatcctggaaagcygtgtgacccatctcagtgctaacctccggcctctctctaaacatacccattcctttggcttttatagtaatcatttttttttgcgtttaaaaataatttt

SEQ ID NO: 172615 - DNA, 201 bp, Homo sapiens
atattgattcttatttaaatatgtttatatagttatttgtatatatgtgtatgacagactgaggaaaggctgtgtgtgtgtgtgtgtgtgtgtgtgtgtgygcgcagtagtagagatgtggataaatcatagactccaacatatatatgtttactagttactggataattacagaccccaaatagtattgatgcaaatgtg

SEQ ID NO: 172616 - DNA, 201 bp, Homo sapiens
tctgggcacggtggctcacgcctgtaatcccagcactttgggaggccaaggcaggcggatcacctgaggtgaagcgttccagaccagcctggccaaagacrgtgaaaccctgtctccactacaaatacaaaaattagccgggtgtggtggcgggcgcctgtattcctagctacttgggaggccagggcaggagaatcactt

SEQ ID NO: 172617 - DNA, 201 bp, Homo sapiens
aggaggctgagacaggagaatcgcttgaacccgggaggtggacggaggttgcagtgagctgagattgcgagactgtgctgcagcctggtccacagagtgargcttaaaaaaaaaaaaaattaatgtactgtatgtatatatggtacaaagttcaaaaagtccaaatggatttgtggggaaaaacaagcctccctttcatac

SEQ ID NO: 172618 - DNA, 201 bp, Homo sapiens
aaaccaccagcttaggtaatgggatttattggaggacatcagtggtagcaaaatacatatgaaaagcaaaagcatactaataggaatctgatgaaattaasagaataaataatggaggagatattagtgaagaacaagaaaaattgaagaacagtaaaagtaggcatgcttggaaaaggagaaaaatagatctctaataat

SEQ ID NO: 172619 - DNA, 201 bp, Homo sapiens
caaggtgagaagctactttaacttttattgtatatgtcttcaagttaaacattttgtcaaaagtataagataaaatgtaactattgcttttttgggatatmcacacacacacacacatatgcacgcacatacatacatgtatatatgtttaaaaaatcagtgtttttacatttatttatttatttatttgagatggagtct

SEQ ID NO: 172620 - DNA, 201 bp, Homo sapiens
ctgtattcacatgtcccacgctcctgctgcagctgacactacttctgaatgtccctcttctctataccaccagggctctagatctgatcaccatgactttyagttttatttcctctaattcattgtccaagctatagcctgcatgatctttcaaaaatggacagtgtggctcacacctgtaatcgcagcactttgggaggc

SEQ ID NO: 172621 - DNA, 201 bp, Homo sapiens
ttattaggtgcaataaaaggacactggtaactgtaaatttaacagttaaaagtaaggtcatggcggtggcttacagctgatagtgccctgtatactctgtrcaagtgcatgctttattatgatcaacctaatggatagttagttttgtttttttttaaaccagggtcttccttgagatgtaatgggcacagagtaaacggc

SEQ ID NO: 172622 - DNA, 201 bp, Homo sapiens
taaagtgttttctaaaagagaaaaaacttaaaagttaactgttgacagggtaaagtaggaaaaaaacaacaacaaaacaacagcaggttaaaaaatgcctrggaaagaaccttttattctcatgcaagtggttctttcaccgaggagagaagcttaagcttaattactgtccgatggagttgaaacccttggctggggaag

SEQ ID NO: 172623 - DNA, 201 bp, Homo sapiens
tgatttacagtcaaagatagcacctgcccttgagttggtattgactgagatggccaacagttgaggacatgaaagaacattaacagtcagtcaactgtacrtgtcctaattgttactggaagaatgacttataaatggaaactggaagtgagcccacttgaagaggaacggaggttgacagtggcactggaggctttgaaa

SEQ ID NO: 172624 - DNA, 201 bp, Homo sapiens
aaccagagagggctcatcccctaaggcaggattgctaaacaaagccttgccactggagttagaagccatgccctcaggatgtaaaacaagatggaagcctratttcacaaccaacaccttgcagagaatacaaacagtgatagttccggggtgggggtctggcctagtaaagtgttttctaaaagagaaaaaacttaaaag

SEQ ID NO: 172625 - DNA, 201 bp, Homo sapiens
agagaagagagagcatcctctttcctttcttctatccttgcatccctgaatcccagcaaccttggtaggtgctgccatggctgtcaaatcaacttgcaccrgtgaagcagggggcctagggggtgagaatcatccactcttacccacgtaacgccctatctcccctgctgtcagtagctttgaattctgtatgccatggat

SEQ ID NO: 172626 - DNA, 201 bp, Homo sapiens
taacatcctattacactctcaaatgattgattctcattatctgcactaacgactatttctgaatttgtgacgccacagctgaacctgcaggttatagtttycagataagcatttacaaataatttttaaggaatgtccttttgtttccctgggaaatttttttttttttttttttttgagacggagtctcaccctggagtg

SEQ ID NO: 172627 - DNA, 201 bp, Homo sapiens
tttggggagatagatgagagagatgtcaggtaatagttgggggttgggaagggccaaacaaacaacactcagttattggcatgtgtgttaggccgtttctyacactgctgtaaagacatacctgagactgagtaatttataagaaaagaggttttagttggcacatggttctgcaggctgtgtaggaagcatagcagcatc

SEQ ID NO: 172628 - DNA, 201 bp, Homo sapiens
ctgaaaaagtgccaatcttattctcctttcagtttgggagcacagtttcacaaataatagaatagtcttactttgtttgcagaattagaaggatttatctracaacttgaatagataattttttttttgtagacgtgaaagtgaaaccttagtattgggatagaattttaagtagcattttaaatttgtttcaaaatcttt

SEQ ID NO: 172629 - DNA, 201 bp, Homo sapiens
tttggatatagggacacaagcaatcatagttttcctctgttatctttagtttgtaaaaatcaacctatctaccatcagcatttacccacaaggtttagttyggagttacctaaggggatggtagagaaacaataatttaacgttatgctgaaaacaatagtctctgaagatagagaaacctctgtcacttaccagttgtgt

SEQ ID NO: 172630 - DNA, 201 bp, Homo sapiens
ggctggagtgcagtggcatgatctcagctcactgcaacctccacctcccaggttcaagcagttctcagcctcttgagtagctgggattacaggtgcccacsaccatgcccatctaatttttatatttttagtagagagaaagtttcaccatgttggccaggctagtctcgaactgttgacctcaagtactccgcccgcctc

SEQ ID NO: 172631 - DNA, 201 bp, Homo sapiens
cgcaatggctcacgcctgtaatcccagcactttgggaggccgaggtgggcagatcacctgagatcaggagttggagaccaacctggccaacatggtgaaayccagtctctactaaagatgcaaaaattagccaggtgtggtggtggtcacctgtagtcccagctacttgggaggctgaggcggagaatcgtttgaacctgg

SEQ ID NO: 172632 - DNA, 201 bp, Homo sapiens
tggagcagactggctaatgaaaggaaattaaatttttctgacaacttcccctgccaacctccttattcaggggatgttattaggtactgaagaactttaargaagattttttttattagacataagtgaaccagttataaacatccccccccgcccccttctcggaggattctgacatggttgctctacattttaaacgta

SEQ ID NO: 172633 - DNA, 201 bp, Homo sapiens
ggccagaacagggccacgccgtccatacctccttatcttgtgctttgctgccacttccttactgtgtttcagctttagctgcctgatattctttccctatkaaattgcttcctcatctaggatttttatatgtgtggttccctctgtctaatgttctttctccctgatctttccatggtagctagctgtttatgtttatgt

SEQ ID NO: 172634 - DNA, 201 bp, Homo sapiens
taaggctgggcgagaaatcgagcgcagtgctggtgggctggcactgctgggtaacccagtacaccctctgcagctgctggccagggtgctaagtccctcaytgcccggggccggcagggccagccggctgctccgagtgcggggcctgccaagcccacgcccacccggaactccagctggcccgcaagcgcagctagcagc

SEQ ID NO: 172635 - DNA, 201 bp, Homo sapiens
agggtgctaagtccctcattgcccggggccggcagggccagccggctgctccgagtgcggggcctgccaagcccacgcccacccggaactccagctggccygcaagcgcagctagcagccctggttcccgctggcgcctctccctccacacctccgtggaagctgagggagctggctctggccttggccagcccagaaagg

SEQ ID NO: 172636 - DNA, 201 bp, Homo sapiens
gcctaatttttgtatttttttgtagtgggttttcaccatgttgcctcagttgatcttgaattcctgggctcaagtgatccacccacattggcctcccagartgctgggattatagacatgagccactgcacctggccttatctatttattcatctattgatggacatttgggttgtttttacctcttggctattgtaaatg

SEQ ID NO: 172637 - DNA, 201 bp, Homo sapiens
agctttaatctcctgggctctactaatcctcctgccttaccctcctgagtagctaggactacaggtgtgtgccactatgcctaatttttgtatttttttgyagtgggttttcaccatgttgcctcagttgatcttgaattcctgggctcaagtgatccacccacattggcctcccagagtgctgggattatagacatgagc

SEQ ID NO: 172638 - DNA, 201 bp, Homo sapiens
tgttagcttattctgtggatgtatgtgatgagtgggtctggggcatcagtttctatatctcacctttacctatcaaagaaattggacaaaccatgatagcraacaaatgaaaagaaaaaggagttttattgttcatgcttacaaaagaatcctgttaatcaatttgtaatccaccaattattttgggaataaaattgtagc

SEQ ID NO: 172639 - DNA, 201 bp, Homo sapiens
gccctggttcccgctggcgcctctccctccacacctccgtggaagctgagggagctggctctggccttggccagcccagaaaggggctcccacagtgcagsggtgggctgatcaggtccctcaagtgctgccaaagtgggagcgccaagagcgagcgagggctgtgaggactgccagcacgctgtcacctctcacttcttc

SEQ ID NO: 172640 - DNA, 201 bp, Homo sapiens
agcctaagtatcatgtcttcaagagaagattctctaatactgccacccagtcattctctgtcttataactattttctaaatttctgcatagtattcatgayttgcagattttttttattcataaacttttctccaagtattttattttgaaaaatttcaatcatacggcattttgaaataattgttacggtttatactcgt

SEQ ID NO: 172641 - DNA, 201 bp, Homo sapiens
ggctgagagcagagggagaggaagcagctcttgtgtctcttcttataagggcactgatgccatcaggagggctccacccccaccacctcattacctcccaraggtcctgtctcctcatactgtcatattgagagttaggcttttatcatatgaattttgaggggacacaaccattcagtccatagcacaaggaaaatcatg

SEQ ID NO: 172642 - DNA, 201 bp, Homo sapiens
agctgtgaatatttgttggtcttttttagttgttccaagttcgggcaagaggattcagcctttatacacctgtatcaactatctagggggtgtgggctgcmcctaggaaggggcatgaccttaggcagaaagccgaggacaagtcagcttttggttgacaatacttacaacagttggggcaatgtcctgaactagggatct

SEQ ID NO: 172643 - DNA, 201 bp, Homo sapiens
tccaccataaagggtatgctaaataccccagtcattgctttctctgcctggaattgaaataagtgtttgtcctaattcatatgctatctgatgtgaagtgrgcctgctttgtaccgcactacaccattaatctaattatagatagctgcaaatgaagtgctgtctgagctgggagattgaagaaaatagccttttgtcatt

SEQ ID NO: 172644 - DNA, 201 bp, Homo sapiens
ttttacaatgatagaaaagtgtactaaattttagaaagcttttttttttctttgagacgaagagtgtcgctcagtcacccaggctggagtgcagtggcgcsatcttggctcactgaaaagcaccaccttccggtttcaagtgattcttgtgcctcagcctctcaagtagctgagtttacaggtgtgggctgccacacctgg

SEQ ID NO: 172645 - DNA, 201 bp, Homo sapiens
agctgaatttgtgagaaggtccacagcactaatctgcgcctcagtgttgccttgctagtgagaaaacgtgagcatgtactcaggacacatgtacttgatgrtgaacttccaggggcacgtttatctgtggatcacggacggtttgacttgtgggacgtaacatttgatttctatatgtgcgcttttgagacactcgttttt

SEQ ID NO: 172646 - DNA, 201 bp, Homo sapiens
tggagggtcgcatgagctcaggagtttgagaccagcctgggcaacaacatagtggtatcctgtatctacaagttttgtttttttgttttgttttttttttkttttttttttttaattagctggtgtggtggtgcatacctataatccagctactcaggaggctaaggcaggaggatcacttgagcccaggagtttgagcct

SEQ ID NO: 172647 - DNA, 201 bp, Homo sapiens
tataccgtagaatgggtggcttaaacaacagtcatttattcctccagttctgtaggctgataagtccaaaatcaaggtgctggcagatccggtgtttggtraggacccacttcctggtttgcagatggccatctttcttgctgtgttcattcatggctgagagcagagggagaggaagcagctcttgtgtctcttcttata

SEQ ID NO: 172648 - DNA, 201 bp, Homo sapiens
ggctggagggtcgcatgagctcaggagtttgagaccagcctgggcaacaacatagtggtatcctgtatctacaagttttgtttttttgttttgtttttttkttgttttttttttttaattagctggtgtggtggtgcatacctataatccagctactcaggaggctaaggcaggaggatcacttgagcccaggagtttgag

SEQ ID NO: 172649 - DNA, 201 bp, Homo sapiens
tgcaggctgtaaggctctagtgtaaaaaggtctaaacaagtgattaatgcccaggaggcagggctttacactgtctccacatcttttctcctttctatttrtgttgccttaatgcttggggtggggggttcaggctatttattgtgctgacgttggtttccatcctgagagtccttgatgtttctttgtggattttgtttg

SEQ ID NO: 172650 - DNA, 201 bp, Homo sapiens
aatttttggcactatttttttttaagttgctcatcttaggacagtataactggaatgagccttgtgtttccagttacaaaaacaagacagaacaaaggatraggctagatttttgtattattgacaaccccatattcttccctccagaggagagatcatctttcggaagcaagcccgagatacacacagtcttacccattc

SEQ ID NO: 172651 - DNA, 201 bp, Homo sapiens
ctgttatgatccacagttcataaagaaggaatctgagacatggaaagtcgaactttcccaagcttgtaagtggaacagtattctgactccagatcctaaayggtaaaccactactctctgctgcctcgcagcctggagattttctgtaagagaggggctaaaataaaaaagcccacctcatattgatcacattcttagtaa

SEQ ID NO: 172652 - DNA, 201 bp, Homo sapiens
aataactttgcaggtttaataatcaaatcagtaattgtatacatttgacagaaatttgtacagatgagagaaattaggcaatgcttgtagggatcccagcrtcttctcagcattcctgtacgcctcagtccaagcatctcatcgtgccacacgaacatttctgtaggcctgttttctcactaagattatttagatctattt

SEQ ID NO: 172653 - DNA, 201 bp, Homo sapiens
tcacacttaccagctgtggtttcaaaacaatattgtcagtctttgtggtagtttagtttgtgtcactgaattacacaaacacacacacacacacacacacmccacacatacccacacacacgaaggaggcttagatttcaacattatctttattgttatttggggaaatgattcagcagtgtcctgtgttggatgtgttag

SEQ ID NO: 172654 - DNA, 201 bp, Homo sapiens
cccttctcggaggattctgacatggttgctctacattttaaacgtattagcttaaaagcttaaaaaacactgggcttcacttcagcattttagtcattttytaaaaattcagtcacacttaccagctgtggtttcaaaacaatattgtcagtctttgtggtagtttagtttgtgtcactgaattacacaaacacacacaca

SEQ ID NO: 172655 - DNA, 201 bp, Homo sapiens
taaagtttggagaatgtagggtcagcgaaaacagcaacgtgtaataaagcagtaaaccttgattttggaaggcatagggtgggagatatagatttatctckgacttgaaaacaattgttatttggaaaatctcattagcagatgtgactgcttggagtaaaaaaaaaaaaaacaacttaaaactgatgtcgctttcaggac

SEQ ID NO: 172656 - DNA, 201 bp, Homo sapiens
cttttaaaacttgcctgttagttctctcaagtgatgaactttttacaatagcagtttattttctctcatcacgttggaaagaaatgttaaaagttttcttytaggtttattataatccagtcttcatcagccatcactcttcctgtattttgttcaagaggcactaattgttcgcatttggcaggtttaacacttcctgac

SEQ ID NO: 172657 - DNA, 201 bp, Homo sapiens
gataagcttgctttgtggcatgctatagaagtgttggatttgtggcagtggaatttttaatttgctgtgtcagatatagatatggctttatgtatccatayacacccagctataacatgtatattcaaataagtgacaaaatatgtctaatgaatttttgaattaccttttaaaacttgcctgttagttctctcaagtgat

SEQ ID NO: 172658 - DNA, 201 bp, Homo sapiens
ttgagacgaagtcttgctctgtcgcccatactggagtgcagtggcactatcttggctcactgcaacctccgcctcctgagtagctgggattgcaggcatgygccaccacgcccggctaatttttttgttttttttttggtagagacggggtttcaccatattggccaggctggtcttgaattcctgacctcaggtgatccg

SEQ ID NO: 172659 - DNA, 201 bp, Homo sapiens
attttctcataattactaaccttaattgagtacctactgtgggccaggtgctgttctaatgtgtttcagccttgactaatttcatcttcttaataaccctrtgagatagatactgttattatgtccattttacagatgaggaaaccgaataccagagaggcactctagtaactcagtcacagtcacagaagcagtattgga

SEQ ID NO: 172660 - DNA, 201 bp, Homo sapiens
ttctatgttatctaggttcagaagatgagtaatgacacaggatataacaagtaaggccaggcagggaaggtaccaacatggtagtttggggtggcgggctrcccattttctcataattactaaccttaattgagtacctactgtgggccaggtgctgttctaatgtgtttcagccttgactaatttcatcttcttaataac

SEQ ID NO: 172661 - DNA, 201 bp, Homo sapiens
tgaggcaggagaatcgtttgaacctgggaggtggaggttgcaatgagcggggatcgctccattgcactccagcctgggtaacacagtgagactctttctcaaaaaaaaaaaaaaaaaagcacaaagtatatttagtaaaataaagtttaaccttttacatttttatgaaataaagtttgatatctatacattgaaatgagc

SEQ ID NO: 172662 - DNA, 201 bp, Homo sapiens
agactcttgctgatatcttcacaaaaatagctccttgcagtctttcatatcttagcctaagtatcatgtcttcaagagaagattctctaatactgccaccsagtcattctctgtcttataactattttctaaatttctgcatagtattcatgacttgcagattttttttattcataaacttttctccaagtattttatttt

SEQ ID NO: 172663 - DNA, 201 bp, Homo sapiens
gaattttggacttgcgagcattccctttgtgtaaatagcaggccgtggattgctttgcttcctttatgccttttcttccactttctttctttctttctttytttttttttttttttgagacagacttttcactcttgttgcccaggttggagtgcagtggtgcgatctctgctcactgcaacttctgcctcccgggttcag

SEQ ID NO: 172664 - DNA, 201 bp, Homo sapiens
ttgattttggaaggcatagggtgggagatatagatttatctctgacttgaaaacaattgttatttggaaaatctcattagcagatgtgactgcttggagtaaaaaaaaaaaaaacaacttaaaactgatgtcgctttcaggacccctttgaacttaacaagcacctatttgtggagcagactggctaatgaaaggaaatta

SEQ ID NO: 172665 - DNA, 201 bp, Homo sapiens
taaggtttgggaaattaactctttccagcttggaggatgcatctgaggtgagtgtatcatagtatagagacacaattacctatttgcaaagagagaactgmggaggagaaagaagaaaagaaggcgttttttttcaaaggagtcctgggggtcccggatgcattcaaaaggcgtacaaactgaagatgaatggctacctat

SEQ ID NO: 172666 - DNA, 201 bp, Homo sapiens
ggcccacagacaatttgaatggtgagtaagacagggttttattgggtgaaaaggaaaaaaaacgggggaacagggactcttcaaggccagagtcctgctasagtgcttcctgcctgcagcttgaatgtttggttccacacaggaagaggaggggccaggttcctccctgctgcaaacactgcgaacttcctgaggccccac

SEQ ID NO: 172667 - DNA, 201 bp, Homo sapiens
tttataagaaaagaggttttagttggcacatggttctgcaggctgtgtaggaagcatagcagcatctgcttctggggaggtctcagggagcttccaatcayggtggaaggccaaagaggagcaggtgcatcacatggtgagaaccacagtgagcgggggtggggatgtgccacacacttttaaatgaccagatttcactaa

SEQ ID NO: 172668 - DNA, 201 bp, Homo sapiens
gcgttgacactaataccactatcaaaatgtatgggtgtttagcatctgggaagaatgattcgaatgtgcctgtctttgttgtagtgttttctgcgcttccytgtgttttgccctgttcaccagcaataccgagttcgtagatcgtctgatccagtgcattataagagaggaagtacatgttttttccagtattgtagcgcc

SEQ ID NO: 172669 - DNA, 201 bp, Homo sapiens
cttcaaaagaccgtgtccaatatttacagtttcttttttttgtttttgttttttttgagacaagagtctctttctgtcacccaggctggagtgcagtggckcaatcttggctaactgcaacctccacctcccgggttgaagcagttctcctgcctcagcctcccaagtagctgggaccacatgtctgagccaccatgcctg

SEQ ID NO: 172670 - DNA, 201 bp, Homo sapiens
ggaggccgaggtgggtggatcatgaggtcaggagttcgagaccagcctggccagcatgatgaaaccccgtctctactaaaaatagaaaaattagctgggcrtggtggtgcgcacctgtaatcccagccactcgggaggctgagtaggagaatcgctggaccacaggaggtggagcttgcagtgagccgagatcatgccact

SEQ ID NO: 172671 - DNA, 201 bp, Homo sapiens
taggctctctgctgtatttttccttaggaccctacacttaactcatcacattttaaatcatttattcattcatctattcagtagatatttaccaagtgcaygcaatttgtctgacactgtttgaagtgctgttgatatagtagtgaacaaaagagactgaacatatttttatgccctcaaggagcttacactatagaagga

SEQ ID NO: 172672 - DNA, 201 bp, Homo sapiens
ttttttagatggaacctcgctctgttgccaggctggagtgcagtggtgcaatctcggctcactgcaacctctgcctcccgggttcaagcgattctcctgcytccggctccctggtatctgggactataggcatgcaccaccacgcccaactaatttttgctttgtttttagtagagacggggttttaccatgttggccatg

SEQ ID NO: 172673 - DNA, 201 bp, Homo sapiens
gtggcatagtcatggctcactgcaacgtcaacctcgtgggctcaagtgctcctcccacgtcagcttcttgaataggtgagactataggtgtgtgccaccayagctgcctacttttttatattttgtagagacgggggtctcactattttgcctagactggtctcaaattcctgggctcaagcagtccttcccctcggcctc

SEQ ID NO: 172674 - DNA, 201 bp, Homo sapiens
ctggagtgcagtggtgcaatcttggctcactgcaaactctacctcccaggttcaagcaattctcctgcctcaacctccagagtagttgggattacaggcgygcaccaccatgcctagctgatttttgtatttttagtagaggccactatgttggtcaggctggtctcaaactcctgacctcaggtgatctgcctgccttgg

SEQ ID NO: 172675 - DNA, 201 bp, Homo sapiens
gaacacaaatttcggaaagcaaaacttgataaagattgactgaaaccggtaggacaaaaaggcacagttccacccacccatggtgctggaaagggcgaccrcacagccccacctgccaaggactccatttcccttcagaaaatggaggtcaggccagggaggtcctcctcttactcagcagctgatctgactgtcgtgtgt

SEQ ID NO: 172676 - DNA, 201 bp, Homo sapiens
gagccccatgccaggacacccacccacaccacatagccattgccctaggaacctggacttgcccgtttcaaagactgggaggccaaagaaaaacctggcckgctcaggacgctgacccatcggggcagagcgaagtgagcgcgcagcatggttttcagctgcagctcactcctgcagggaagcctcgcgcttaacgccagt

SEQ ID NO: 172677 - DNA, 201 bp, Homo sapiens
aaatgcagaaattgaagtatgcaacttctccttttcccatgagaaattattctgtttttttctagttagaagagagtcctcatgtagagttttaaccttgmgatttgacttagcctgcaggaactcttcatttcagcatttcgtattgttacttttggcattctgtgttgggttgttcttcattgtgcaagatcatttcat

SEQ ID NO: 172678 - DNA, 201 bp, Homo sapiens
  misc_feature (1)...(201): n = A,T,C or G
tccctgttcttaacctttatactccactgcttctaattccttactttcttttatacaagaatataatttaaaatcctgcccaacacttgttttgtaagatnctagtggcatgggaagtgaggggttacagttggtgtcagtcatatttcaaatggctgggaataggggtgataacatacacccaaggaagtcacgctggct

SEQ ID NO: 172679 - DNA, 201 bp, Homo sapiens
cagtttcctagaacaaaaataaaccacagtacagacatccatagatagataacagattacatattgggtggaaatgcatacaatgtcatttcccaatcaayagacatttaataatgttaacatcaagcagatgtttgtaataaagctgcggtggcactcctcagcaacattgacatccagtgtttatccccttcactaaca

SEQ ID NO: 172680 - DNA, 201 bp, Homo sapiens
caaccctaatgtccttcaaatgatgaatgagtatataatagtaaataaaatgtgatacgttcatagaatggattatttttcagcaataaaaataaatgagstattgatattttctgcaacatggatgaattttgcaaaaatgctagatgaaataattcagtcaaagtagatcacaaattttcccagaataagcaaagctat

SEQ ID NO: 172681 - DNA, 201 bp, Homo sapiens
actcacgtattcaaatgaaatgcataagtttagcatttgctaaatttgagatattttatttcatattatttgtaaatatatttttgtttggcgtgaatttstaattcactaagtttcttgtagattaaatttttcttagttgtaaaacttcaggcttaaaaaaagtattattattgttacaatttacactataatggctaa

SEQ ID NO: 172682 - DNA, 201 bp, Homo sapiens
aagtaatacgatgtttatagttggggaaaaaaacccaaagagcgttcataatctggatattaccactattgaaatttctattttgattcagtgtttttttkgaaggtattcttatttttaagagagggaattataaaatatgccattttctaactcagtgtttaaaccttaaaaaaagagacatttcttgaaatgttaaac

SEQ ID NO: 172683 - DNA, 201 bp, Homo sapiens
aaaattacttgggggttggggcaaaaaagaatagagcaaaaggaaaaaaaatatgggaattgagatttccataatgttgtaagtatcaggagctccctttyctgccttttgagtgagatgaataggggttctcctggagttctctccatcagtgtccccatgcctactttgcatttcaggcttttccaaggtcggtcaggg

SEQ ID NO: 172684 - DNA, 201 bp, Homo sapiens
cattttctgatccaggtatgacctgttttgttgcatgtttcatgtgcacttgtaaagattgtgtcttctgttgttagacttcagtactgtataaatgtcartgagatacaactggtttgtggtattgtccagttcctctatatccatgccaattttctactacttgtctttcttttgagagtcttgatgtttccaacgatg

SEQ ID NO: 172685 - DNA, 201 bp, Homo sapiens
attgtattggggccaggcatggtggctcacgcctttaatcccagaactttgggaggccgaggcgggtggatcacttgaggtcaggatttcgagaccagctyggccaacatggtgaaaccctgtctctactaaaaatataaaaccatattagcccggcatggtggggggtgcctgtagtcccagctacttggaggctgaggc

SEQ ID NO: 172686 - DNA, 201 bp, Homo sapiens
tctctaagcactctaagtgcatctaatatttttttttatatattgtgttttcatttttgttaagaatgttttctgagacttccttttttgcacataggttrtttaaaattgtttaatttccaagcatttggagatttttctactgtctttctgttatttatttctaatactaattctctttgttcagagatcatattttgt

SEQ ID NO: 172687 - DNA, 201 bp, Homo sapiens
gggcgtggtggtgcgcgtctgtagtcccagctacttgggaggctgaggcaggagaattgcttgaacctgggaggtggaggttgcagtgagctgaggtcgcrccactgcactccagcctgggtgacagagtgagactccgtctcaaaaaaaaaaaaaaaaagaaatgagatgatagttttgatctattgtattggtatgttt

SEQ ID NO: 172688 - DNA, 201 bp, Homo sapiens
ttttattgatgctttagaataactagcttaggttgcattgatgtcttttttctctattttctcttttaaaaattattgatatctcctctgttgtgttcttycttctactttaggtttattttgcttttctttttctggtttgtaaggtaggagcttagattattgatttgagatatatcttcttatttaatactataattt

SEQ ID NO: 172689 - DNA, 201 bp, Homo sapiens
atttttagtagaggtggggtttctccatgttggtcaggctggtctcaaactcccaacctcaggtgatccacctgtcttggcctcccaaagtgctgggattrcaggtgtgagccacgcgcccggcctataaaattgttcagaattctccagtgaaaccatctgggcctggagatttcttcttcagaaggttttaaatgacgt

SEQ ID NO: 172690 - DNA, 201 bp, Homo sapiens
ttgctagaatttttcttggtatgttggtcatcctggaatgaatttctcctgtagtgtggtcttttaatatgtatttttagttcaagtaaattttcttgagytgtatttttaatatttgctcttttttttgctttggttctcttcaaggattcctattattcatatgttggatgttcttttttattttcaatatttctcatc

SEQ ID NO: 172691 - DNA, 201 bp, Homo sapiens
tgagcccaggagtttgcgactagactgggcaacctagtgagacctcatctctgcaaaaaattcaaaaagtacaataagccaggtgtgatgatacatgcccrtgaccccagctactcaagaggccgtggtggcaggatcgcttgagcccaggaagtcaaggctgcagtgagctgtgatcgtaccactgcactccagcttggg

SEQ ID NO: 172692 - DNA, 201 bp, Homo sapiens
tgtgttgagtcttccaatccatgaacatggcatgtctcttaatttatttaggttttctttgttggtggtggtattcttagacagggtcttgctctgttgcycaggctggagtgcagttgtgtgatcatagctcactgtaggcttgaccacctgggctcaaacctcccacctcagcctcctgagtagctgggattacaggct

SEQ ID NO: 172693 - DNA, 201 bp, Homo sapiens
aaaaatgtatttgtacataatcttcctgtaatattaaaaaaaaagttgtactatatctatattgtcagaaaatgtggctgttatctataaggttttatatrtatatctccttagctttcatttagttttagctctacaagtaaatcccgactctttttgttgatatctcttttgtcattttagtttcctgaagctcattct

SEQ ID NO: 172694 - DNA, 201 bp, Homo sapiens
tatttatttatttttgagacagagtctcactctgtcacccaggctggagtgcagtggcgcaatcttggctcactgcaagctctgcctcccgggttcacacygttctcctgcctcagcctcctgagtaggactgctggagcctgccaccatgcctggctaattttgtttttgtatttttagtatagatggggtttcaccatg

SEQ ID NO: 172695 - DNA, 201 bp, Homo sapiens
ctcattttactgacatgttaagtagtgatgaccatttatttcctgctgtttcttaggccccctcctttttgtgttttgaggaagagaagatataaaaaaaygcccttgagagctgtgaagtgtcatagatactacaatatcgttttagaatcaattgaagactttctaactttgtaaacaaatttgaatctgatgactgaa

SEQ ID NO: 172696 - DNA, 201 bp, Homo sapiens
ctactcaggaggctgaggcgggaggatcccttgagcttgggaggcagaggttgcagtgagctgagatcacgccactgcactccatagagccagaccctgtyttaaaaagaaaagaacggtttacagatcagtgagagaggtgttttcctaaatatttaaatgtttgcttgcccatgctacttttccaaatcctaattgtcc

SEQ ID NO: 172697 - DNA, 201 bp, Homo sapiens
cgcagcttactacgggtcacctccgtcctaagtgtcttacatttattaatcatatatcctcacagatagggaaactgaggcacacagcagccaaggaactygtccaaggccaaccaggtagtatatggtggaactggagtgaaggcaggctccacagtccctgttcttaacctttatactccactgcttctaattccttac

SEQ ID NO: 172698 - DNA, 201 bp, Homo sapiens
taaaaaagaaaaaaaaaaaaagatcatgtctttttgttattgcttagatagttcatagaaaaaacaaagctacacataatcctcataaaaatagcaatttkcaataattttaatgtgctgagctaacagattttatttccaagctgttttctattctgtattttccctgcaggcttcttttattatgagcattaaaggacc

SEQ ID NO: 172699 - DNA, 201 bp, Homo sapiens
aacagggaagatacagttaaaaatacagtattagaatctatggaaccactgtcatacgtgtggtgcctcattgaaatattctgtggagcataactgtactygtattctgttcttccacggattggaaattatttgtgaatgttgttattttctagatggaatttccacttaaaatctataactttaacttgaaacaattat

SEQ ID NO: 172700 - DNA, 201 bp, Homo sapiens
cagttctttgaaaattgtgacaagtgaagtggttttagtctgaaactcaactgtttatttgaagagtaattataaaaacagaaaagtttacaaaatcaccrttacactgaatgaatgatacctggtttattatatactgcatgatatttgaattaaagttaaaaacttcagatttttaactgtaaatatgttagggagttt

SEQ ID NO: 172701 - DNA, 201 bp, Homo sapiens
aatgtatttcaaattagttgtcatttcatgaggtgttgcccttcatttcttggcaggtcttaactagaatctagcctcctcttataatagttgaaaatgtstcatgactaattaatatgatacaatgagagcactgttttctgattaataaggtgggtggaccttatgaaatgttatctgaagatcacgcacgtaatcttt

SEQ ID NO: 172702 - DNA, 201 bp, Homo sapiens
agttttctctttgatttcagtcttaccattccatctagttaaaatagctttgaatcaatattttatcattctttttcagcattggttcatcattgaattargcaatcagtgtctttgtgtggcgttatacaagtatttagtaaaaatatccattagggaagggccaaaagtagagtagggctttttagttagacaaaaatg

SEQ ID NO: 172703 - DNA, 201 bp, Homo sapiens
taaagtatacataacataaaagtttaccattttaaccatttgttatcaaaagatgatgagatctgtggaggaaaaaatggagagctttattttctatagaraaaacttgcagactggggaggcatagttttcactagtgaaaatgttgctctaaagagaaaaaaaaaggggcttggcttaagtagggaaagttcttgccct

SEQ ID NO: 172704 - DNA, 201 bp, Homo sapiens
gttatttagctttaggccattcatggaaagtttaataccataaattctctgttaagtaggcagatatttataaatacagaaatggcttctaaggtgtctcygtaagatagctattcaactgttgcacgagcttatgatgactggaatcgtacgccctttcatcatatagaccagcatttggcaggctttttttctgtaaag

SEQ ID NO: 172705 - DNA, 201 bp, Homo sapiens
actatagtagttattgcttcctgatagataatttgtttgtttctctttctcctctgctgaaatacagcctacacaaccataggagttcctgtctcttgatkgttgctgtttcctcagtacctaggacagtgtctggctcatatatatttgtttaatgaacaaatgaataagagatgggttatttagctttaggccattcat

SEQ ID NO: 172706 - DNA, 201 bp, Homo sapiens
tgctcctgtcagcatgagttccttctgaagagtggcagtgagcactgctacttgcaagctgtagtagactgggatctcagtgttgacttattgctaatgcrtagcccagcttatcctgatacatagtctgggaacatgaaggaccaccttctgtttatagaaccccatgtctgcttatagatttcagattttatagagatt

SEQ ID NO: 172707 - DNA, 201 bp, Homo sapiens
atggcaagaaacttggtatcatctttgcccacctttgctgttaggccgtgtgctagtctgttcttgcattgctataaagaaatgcctgagactgggtaatytataagaaaagaggtttaattggctcacgattctacaggctgtacaagaagcgtggtgtcatctgcttctgaggaggcctcaggaaacttacagtcatgg

SEQ ID NO: 172708 - DNA, 201 bp, Homo sapiens
gtatctgaatcctcctgcagaagcacaagatgtaggaatttatgttcaccatcattctttctttcatttctcatttccaatttatgagcaagtccttttcrtaaataattttggaatctagtcacctatcttcacttcgttattgcttctttagcaaggtcttttaaaatcttctagtgaatcttttaatcttttagactg

SEQ ID NO: 172709 - DNA, 201 bp, Homo sapiens
tggctttttctgcccttttcctcaattcagcaaatggcaagaaacttggtatcatctttgcccacctttgctgttaggccgtgtgctagtctgttcttgcmttgctataaagaaatgcctgagactgggtaatttataagaaaagaggtttaattggctcacgattctacaggctgtacaagaagcgtggtgtcatctgct

SEQ ID NO: 172710 - DNA, 201 bp, Homo sapiens
agatcgcgccactgcacttcagcctgggcgacagagctagactccgtctcaaaaaacaaaaaacaaaaaaaaagatttgatatacagtttaccttattctrtgttccagtgtttctaaggccatgacttaactcatttttacagcctccctcattcagactccttagtggagggaaaggacatgattattccaaataatgc

SEQ ID NO: 172711 - DNA, 201 bp, Homo sapiens
tgaatttgtttataccattcaagctttccagaaaacccctgtgagctttgaaatgcttcaggggagcattctgtgtgaggctggctttttctgcccttttmctcaattcagcaaatggcaagaaacttggtatcatctttgcccacctttgctgttaggccgtgtgctagtctgttcttgcattgctataaagaaatgcct

SEQ ID NO: 172712 - DNA, 201 bp, Homo sapiens
cttctaatttatactttgcaaatcatttgcttttccgtaaaccccattcttgcctattggggttaatctaataccaagatccaagattcctcttcccacartggtttattttcctcaggctggattattcagtattgaaaaacagccccataagacaacccatgggaaccattgaccattcaggtcctaagaacagttaga

SEQ ID NO: 172713 - DNA, 201 bp, Homo sapiens
taataaagttaagtatttgtaccttgacataccctaacacaattaagtattgcttccataaataattttgatcttataataaacataccttacatactgaygaataatattaacacaaatgtatactcccttagaggtgctcaaaatgactttcatgccacccttcatgcctgctgggttttaaggcataagagaaacaga

SEQ ID NO: 172714 - DNA, 201 bp, Homo sapiens
ttaggtgaagctgggagaggacaatactagggcagaatagagcttggtaatttccagaaagttagatagggctaatgtactcttaaacaggaggcctgcaktgttgttcacaatgttcacctatatgtagttgtgtttgttttttaaatttttaaaaattatcctatagtaataggatacccatctttcatacccttctgt

SEQ ID NO: 172715 - DNA, 201 bp, Homo sapiens
tatttttctctaagcagctatttgggaaggatcagaagtcctatcttactgaaaaagcatacatataataaaagatttgagggccgggcgtggtggctcaygcccgtaatcccagcactttgggaggccgaggcaggcggatcatgaggtcaggagatcgagaccatcctggctaacacagtgaaaccccgtctctactaa

SEQ ID NO: 172716 - DNA, 201 bp, Homo sapiens
ttaaattaagaaaaaagtgaaatattgtattaatatatctttttggttttgtttattttataatttctggtaaacttaaacaacatggttttaaagggaayttatgtatttcagtgtaattagtacctgctgttatgaaaaagcacctaatcatggatttatttttctctaagcagctatttgggaaggatcagaagtcct

SEQ ID NO: 172717 - DNA, 201 bp, Homo sapiens
ttgtttgtttctatttatttacccttttctacacctactgactggcagaccttggccttgcaggttgagcatcctgtcacagaatgcattactggcctggrcctagtccaggaaatgatccgtgttgctaagggctaccctctcaggcacaaacaagctgatattcgcatcaacggctgggcagttgaatgtcgggtttat

SEQ ID NO: 172718 - DNA, 201 bp, Homo sapiens
tatttacccttttctacacctactgactggcagaccttggccttgcaggttgagcatcctgtcacagaatgcattactggcctggacctagtccaggaaawgatccgtgttgctaagggctaccctctcaggcacaaacaagctgatattcgcatcaacggctgggcagttgaatgtcgggtttatgctgaggtaaaatga

SEQ ID NO: 172719 - DNA, 201 bp, Homo sapiens
tttttttttatgtttcattttccaggccctaggaaagcacgcttattattctctgggaagatttgtggagaatagtttatgaagagaagacaattctagtkcaagaatgtaaccagctgggattttgattgatattgcattgtgtctgtagatcattttggagtgtatagctatctcaacgtttttaagtcttcctatcca

SEQ ID NO: 172720 - DNA, 201 bp, Homo sapiens
cctactgactggcagaccttggccttgcaggttgagcatcctgtcacagaatgcattactggcctggacctagtccaggaaatgatccgtgttgctaaggkctaccctctcaggcacaaacaagctgatattcgcatcaacggctgggcagttgaatgtcgggtttatgctgaggtaaaatgaatggtgttgggaggaagg

SEQ ID NO: 172721 - DNA, 201 bp, Homo sapiens
tttattatgttggcttttagatattttggctttgtatggaatctattttctcatgaatagattcagattaaatatttgacaagactacttcataagtgatrttctttctttttttcttttttttgtgacagagtctctctcagttgcccgggctggagtgcagtggtgagattataactcactgcagcctgacttcctggg

SEQ ID NO: 172722 - DNA, 201 bp, Homo sapiens
cagaaattttctttttgtagaaaaacttcatatattaaaatgaagcatttttggaacttgggatttgattacaagttacttcatgcatagatggtgtagcwttagaaaactcaggcctagctgtttttagaagaaaatgttataattctttatacattttaagtttaattatttacatgtgtataaaaatttgggtttatt

SEQ ID NO: 172723 - DNA, 201 bp, Homo sapiens
ttgtagcatttttcacaatagccaagatttggaggcaacttaagtatccatcaacagatgaatggataaagaaaatgtacatatgtacggtaccattcagscatagaaaagaatgagatcttgtcatttgcaatagcatggatggaactggtggaggacatgttaagtgaaataagccaggcacagaaagacaagttttgc

SEQ ID NO: 172724 - DNA, 201 bp, Homo sapiens
attgtggtgtttgggaaaatccagaaattttctttttgtagaaaaacttcatatattaaaatgaagcatttttggaacttgggatttgattacaagttacytcatgcatagatggtgtagctttagaaaactcaggcctagctgtttttagaagaaaatgttataattctttatacattttaagtttaattatttacatgt

SEQ ID NO: 172725 - DNA, 201 bp, Homo sapiens
taggtgtacacctagcaccagggaaatcagtatatggaggagatatctgcactcccatgtttattgtagcatttttcacaatagccaagatttggaggcarcttaagtatccatcaacagatgaatggataaagaaaatgtacatatgtacggtaccattcagccatagaaaagaatgagatcttgtcatttgcaatagca

SEQ ID NO: 172726 - DNA, 201 bp, Homo sapiens
ttaggaaactgtttgaaagtattgcaacttttagagaagttttgcaaatcttagccacatgtctactaatgttttgcacactatttttagttgatgaaatktaagcaatttatatttgtcttaactttccatctataaggtagtgagagtggtgacaggctgctctgttttgcagctagcatctttaattgatgttgaatt

SEQ ID NO: 172727 - DNA, 201 bp, Homo sapiens
cttttatccaaaagacataacgagtactggcgaggatgtagagaaagaaccctcatatgctgttggtgggaatgtaaattaatacaaccactataaagaayagtatggaggtttctcaaaaaactaaaactatcatatgatccggctgctagatgtacatctgcttctaggtgtacacctagcaccagggaaatcagtata

SEQ ID NO: 172728 - DNA, 201 bp, Homo sapiens
taaattacccagttgtgggtatttcttcatagcagtatgaaaatggactaatacataatgattcccttgtttggaggattgtcagatactatatgaaaagyggtttcacatgtgcttaaaaaaacctgtatatgtgccttatggtgtcattatttctaatttatagatgtagaaataataatatttagagaaataaaatgc

SEQ ID NO: 172729 - DNA, 201 bp, Homo sapiens
aaggatgaggacttcaggtttctagtaaacttaaatgtgatatggtttggctgtgtccccacccaaatctcatcttgaattgtagctcctctaatccccaygtgttgtgggaggaacctggtggaaggtaattgaatcatggggggcaggtttctcctgtgttgttcttgtgatagtgaatcagtttcatgaaatctgatg

SEQ ID NO: 172730 - DNA, 201 bp, Homo sapiens
aagacattaaccatctaaatacatctgaaataaaagggctttgtaaccacagaattatagatgtagcagagatatttgaccttgttagttcaggtctcttycagatgaggaagagagattatctgaaacacattgtaaaatttggtgttgtagttgaagtctgtaaatctacaaccagagaaatagaaattagtatccacc

SEQ ID NO: 172731 - DNA, 201 bp, Homo sapiens
ataaggtgcaaagcacagggaggaagaaagagaatagtggaagcagcagtggtgatctgtagtggtgtctacagtgtgctggttctggttgagttggtacrggcagccatgtcagcaaccaagtcttcacttgttggaggactcgctttttacatgctctggctgggatggttttagttactaggatgtaggggacaggaa

SEQ ID NO: 172732 - DNA, 201 bp, Homo sapiens
ctcataactaccggactatgctacctctgaagaagagattatacagcttgttgtggcacaacacaaaaccttaaaatgttttcagctcttttttttttacycatccttattttttccccatatgactattatttattcagccttttggtatctagcttgcagaatatttcagggtcccaaagggactatataaagagctgt

SEQ ID NO: 172733 - DNA, 201 bp, Homo sapiens; identical to SEQ ID NO: 31019

SEQ ID NO: 172734 - DNA, 201 bp, Homo sapiens
gggacctgagcatctgtagagtttagtattcacaggggtcctgggaccaatcccctggggagatggaaggaggactcaggggatgtgtgtgcacatgcacrtatgtgcattgctacttcttaagtttttaagtgcctttactgctttttgggcaaagttgtatttttctcctgtccttcagcagctctgtttcacttggtc

SEQ ID NO: 172735 - DNA, 201 bp, Homo sapiens
agcctctcgagtagctgggactacaggcgcctgccaccacgcccggctaattttttatatttttagtagagacagggtttcaccgtgttagccaggatggkctcgatctcctgaccttgtgatccacccgcctcagcctcccaaagtgttgggattacaggggtgagccactgcacctggccaccagcttccatcttttaa

SEQ ID NO: 172736 - DNA, 201 bp, Homo sapiens
tgaatcagttaggacaaagggagtgtggagaaagtaaatataagaggcagtttcttggaatttgattctgatcctagaaatgtgagttagaactgatcagwgtataagagaagtgtacttattcaagggctcttgaacagtaaatattaatacataaatgcactgtacattttgcttataaagcttttgcaatatgataaa

SEQ ID NO: 172737 - DNA, 201 bp, Homo sapiens
ttcgaggccggcctgaccaacatggggaaaccccatctctactaaaaatacaaagaaattagccgggcttggtggtgcgcacctgtaatcccagctattargaggctgaggcaggagaatatgttgaacctgggagacggaggttactgtgagctgagatcgtaccactgcactccagcctgggcgacagagtgagactcc

SEQ ID NO: 172738 - DNA, 201 bp, Homo sapiens
ccctcttcttccagtgtcacggcctttacacatgctgttcatgtgctcccttctctgtgtgtagcatcctgcacaaagccttattagagcatttaacacartttgttgtgtttgtgccatattttactttgaagttgccaaatgcacttgatatttacctgtaattgttgatgcagaggggcagttttaaggttgggttta

SEQ ID NO: 172739 - DNA, 201 bp, Homo sapiens
tccttgagaccgagagttccatatcaacctgggtaacagagcaaaaccccgtctcttaagaaaaaaaaaagtgatcttaggtgttattaataacatagtgwttagagcttgcattgttatactctgattacattatatcatgatatttctgacatgaatacctggatgtgaactctctgactttgccactagtgaactttg

SEQ ID NO: 172740 - DNA, 201 bp, Homo sapiens
aatgtgttgtatttcttaaccacaatatttgatttataaggaaatattttgataacagcatttatagtaatatatgctcttactgattagaatgccacaaytgatagaaaatatattggatgtaaattagttacatatttacataatctatacacaagtaacagcatattttgtcagcatagcgtacagtagccataaaat

SEQ ID NO: 172741 - DNA, 201 bp, Homo sapiens
ctcctgcctcagcctcctgagtagctgggattataggcgcccaccaccacaactggctagataatgaactcttaaaaatactttgtccacaccccctttcrtttactcccatgtattactaatcctgctgaggccgtcttggtgtgacctccttcctcaccactgaccccctcttttctctctcagaacttccttacttta

SEQ ID NO: 172742 - DNA, 201 bp, Homo sapiens
tatcccttcctctttgaattgccttggcacccttgcagaaaaagtaatgggacatacatgtgcgatctcggctctctgcaagctctgcctcccgggttcaygccattctcctgcctcagcctcctgagtagctgggattataggcgcccaccaccacaactggctagataatgaactcttaaaaatactttgtccacaccc

SEQ ID NO: 172743 - DNA, 201 bp, Homo sapiens
ctcctgggctcaagtaattcttgtgcctcagcttcccaagtagctgggattacaggtgtgcaccaccatgcccagctaatttttgtatttttagtagagaygggattttgtcatgttggccaggctggtttcgaactcctggcctcaagtgagctgcctgcctcagcctcccaaagtgctgggattacaggtgtgagccac

SEQ ID NO: 172744 - DNA, 201 bp, Homo sapiens
ttcgggggagggagggggaataaataggtggaacaggggacttgtaggcagtgaagctactctgtatcatactgtaattctggacacatttcattagatakttgtcaaaacccacagaatgtataacacagtgaaccttaatgtatggacttcagttaacagtaacgtattgatattggcttatcaattgtaacaaataca

SEQ ID NO: 172745 - DNA, 201 bp, Homo sapiens
aatcccatcactttgggaggccgagataggaggatcacttgaggccagaagtttgagggtgtagcgagctatgaatccagcctgggtgacagagcaagacyctgtctcaaaaaaataaataagtaaataagtacaataaaaaaataaaccagagttcattattcatttacagcttttccaagaaagccttattgaaatata

SEQ ID NO: 172746 - DNA, 201 bp, Homo sapiens
gcattctgtatgattccagcgctaagtgacattctgaaaaaggcaaacctatggagatggtagagatcagtgattgccaagcattcgggggagggaggggraataaataggtggaacaggggacttgtaggcagtgaagctactctgtatcatactgtaattctggacacatttcattagatagttgtcaaaacccacaga

SEQ ID NO: 172747 - DNA, 201 bp, Homo sapiens
aagcagagttcaggccaggtgtggtatcttacacctataatcccatcactttgggaggccgagataggaggatcacttgaggccagaagtttgagggtgtrgcgagctatgaatccagcctgggtgacagagcaagaccctgtctcaaaaaaataaataagtaaataagtacaataaaaaaataaaccagagttcattatt

SEQ ID NO: 172748 - DNA, 201 bp, Homo sapiens
ggctttgggaaggttttcttgtttgatgggattgtcagtagtaaaagaaatgggaaggaaaagagttcacattcagcttagaagttgagaacaaaatttgrggagatagatgagagagatgtcaggtaatagttgggggttgggaagggccaaacaaacaacactcagttattggcatgtgtgttaggccgtttctcacac

SEQ ID NO: 172749 - DNA, 201 bp, Homo sapiens
aagtcattcctgtgtctggagggttttccggaagctgccttgtgccttgttgtgggtactcgctgtgtcttgcagaggatgggacagtggtcctcgtggcrccagggccgagctgttcccagttccccgggactatagacagaaatatgtatatttggtggtggttttttttttttggtaacagctatactgagatgtaat

SEQ ID NO: 172750 - DNA, 201 bp, Homo sapiens
tactcatctatcaatctcattttcattttgcacgtcaacttaagttgtagataatagtacaattcactctcctgtacacttcagcatgcagtttttaaagmagagttcaggccaggtgtggtatcttacacctataatcccatcactttgggaggccgagataggaggatcacttgaggccagaagtttgagggtgtagcg

SEQ ID NO: 172751 - DNA, 201 bp, Homo sapiens
accaccaaatcatgcctttccttaatgcaagctctgggtaattagttgactcattggatatttgtaatgtccgctttacataagtttaagaggtttaattkgacagtatcttcctaaccaatatgtttatgcttgttagtctagtgttactgccagagacctattgcacagacttgtgggagtattaatattttttcccct

SEQ ID NO: 172752 - DNA, 201 bp, Homo sapiens
tctgtcaaatttaaaatatagagacaaatctctagattaaatattttatttgagaatcacagaattggaatttgagacatacacatggggtcttcagtatrtccaaggaacaaagagaaggttgaaggttttattagatagaaaaaaaatgttactgattattttgaaagaaagttcattggtacttgaaaagctttggga

SEQ ID NO: 172753 - DNA, 201 bp, Homo sapiens
caattaatgcttggcctcccagccaccctgggcaatccggaaggtgttgcttccattgggcccactgcccagctccctggtgtaccctacatgtactctayggtgtgcgacacattctgcaggagtcagcgctgctgggagtaaggctccaaagtcctaaggtgagagcccctgctcccgagggccgagtgctggcatttt

SEQ ID NO: 172754 - DNA, 201 bp, Homo sapiens
tgatcagaggacacttccagtggagagagtcagcgtgaagagttgaggtgcatggctgttgtgcatctgagagcgtgtacgcgggcgtgagagcgatttakatccctgtgtgttgaattcgagacccacccagacagcctccagtgtcttctcagtgactgtgcccaagatttctgtccatctgtggacatgttttaatga

SEQ ID NO: 172755 - DNA, 201 bp, Homo sapiens
gccaagaatcttctgcacaaaataataactttgtgttctcaaatagtaatataaagaatctgtaatgtatcttcattaagaatttatacatgcattttacmtcataatctcttttattctatgaatagagcataatactaaattatgaagttactggaatttttataggaacatgataagaatcatgtggttcttttaaag

SEQ ID NO: 172756 - DNA, 201 bp, Homo sapiens
aaattctttctctgccacttagtagctgtgtgatcttggacaggttgtttaatgtcggcctctgaagattgtgttttattcttactatttgcatgatatgyatttctccatctgtgattttatgttgaaaatactgtgtgtttcttgtagccaggatgtagttgtgtcatgcttttgaaataattctgatggtctctattt

SEQ ID NO: 172757 - DNA, 201 bp, Homo sapiens
ctacccttcccagcctctggcaatcatcattctactctctctcactgtgagttcaactatgttaatttttagctcccacagatgagtgagaacatgtcaartttgtctttctatgtctgacttagttcatttaacataatgtcctccagttccatctatgttgttgcaagtgacaggacctcattctttttggtggctgaa

SEQ ID NO: 172758 - DNA, 201 bp, Homo sapiens
ttgataagaactaatgaatgcaacttcataaaacccttattatgacagaatatcttttgaaatgtttgagaacgtttcctttcctatatgttggcttaagktcagcttttagaatatttgaagattttgaatgcgatgtggaatactaaatgctctaaagtgaatgcctgaaaaaggaaaactctccctttacagttaggg

SEQ ID NO: 172759 - DNA, 201 bp, Homo sapiens
gtaactgagtgagctttgctcagttaactgagtgccagagctacagcatagagatattgatgcctttaaccactcgttgatattcttaagtggaactaatraagtctccctggatttggaggagaaagttctgtgactcctttttccttttcataataattttataatatttttctagttgtgacttgtacatatgtgatg

SEQ ID NO: 172760 - DNA, 201 bp, Homo sapiens
tcctcacttggatttgctaacttactaagtaaggtaactgagtgagctttgctcagttaactgagtgccagagctacagcatagagatattgatgcctttwaccactcgttgatattcttaagtggaactaataaagtctccctggatttggaggagaaagttctgtgactcctttttccttttcataataattttataat

SEQ ID NO: 172761 - DNA, 201 bp, Homo sapiens
ttttcagtgttttttctaggattgcaatatccatcctaacatttcatattctagttagagctaatatgataccatttcaagtaaaatgtagaaattttgcgatcatatagtccatcctccttctcttcccatcactatcctctatgttatagttgtcatatgtatttcatctgcatgtattataaattctatgtgaaaatg

SEQ ID NO: 172762 - DNA, 201 bp, Homo sapiens
tttcagtgttttttctaggattgcaatatccatcctaacatttcatattctagttagagctaatatgataccatttcaagtaaaatgtagaaattttgcgatcatatagtccatcctccttctcttcccatcactatcctctatgttatagttgtcatatgtatttcatctgcatgtattataaattctatgtgaaaatgt

SEQ ID NO: 172763 - DNA, 201 bp, Homo sapiens
tcagtgttttttctaggattgcaatatccatcctaacatttcatattctagttagagctaatatgataccatttcaagtaaaatgtagaaattttgcgatcatatagtccatcctccttctcttcccatcactatcctctatgttatagttgtcatatgtatttcatctgcatgtattataaattctatgtgaaaatgtta

SEQ ID NO: 172764 - DNA, 201 bp, Homo sapiens
cagtgttttttctaggattgcaatatccatcctaacatttcatattctagttagagctaatatgataccatttcaagtaaaatgtagaaattttgcgatcatatagtccatcctccttctcttcccatcactatcctctatgttatagttgtcatatgtatttcatctgcatgtattataaattctatgtgaaaatgttat

SEQ ID NO: 172765 - DNA, 201 bp, Homo sapiens
gtgttttttctaggattgcaatatccatcctaacatttcatattctagttagagctaatatgataccatttcaagtaaaatgtagaaattttgcgatcatatagtccatcctccttctcttcccatcactatcctctatgttatagttgtcatatgtatttcatctgcatgtattataaattctatgtgaaaatgttataa

SEQ ID NO: 172766 - DNA, 201 bp, Homo sapiens
gttttttctaggattgcaatatccatcctaacatttcatattctagttagagctaatatgataccatttcaagtaaaatgtagaaattttgcgatcatatagtccatcctccttctcttcccatcactatcctctatgttatagttgtcatatgtatttcatctgcatgtattataaattctatgtgaaaatgttataatt

SEQ ID NO: 172767 - DNA, 201 bp, Homo sapiens
tttttctaggattgcaatatccatcctaacatttcatattctagttagagctaatatgataccatttcaagtaaaatgtagaaattttgcgatcatatagtccatcctccttctcttcccatcactatcctctatgttatagttgtcatatgtatttcatctgcatgtattataaattctatgtgaaaatgttataatttt

SEQ ID NO: 172768 - DNA, 201 bp, Homo sapiens
agtagagacggagtttcaccttgttgaccaggctggtctcaaactgctgacctcaggtgatcctcccacctcagcctccggaagtgctgggattataggcrtgagccaccacacccagcctgaactcatgctttttgattcttctgtatcactcaggctttctggaggtgcttattaactctttgctagattagataagtt

SEQ ID NO: 172769 - DNA, 201 bp, Homo sapiens
cttgagcccaggagatggaggctgcagtgagctgagattgcaccactacactccagcctgggtgacagagcaaaaccctgtctcaaaaaaaaaaaaaaaawttacctttcagtggaattatttatatacatttctacacatgagacaaacttttgaaggaagtttaatgtctttggtattcacatcaaactaatttgacat

SEQ ID NO: 172770 - DNA, 201 bp, Homo sapiens
gcttttataaattagttaagtattatcagtttacctcttaaatgagagcttgtttcttctctccctggccaaaagtgttttttgccttttgatctttgtgygatagtgaaaaatggtatattgttttcattgtttatcatgaatttttctttatagattcatttatatttctgtgaattgactattagatcctttgccctt

SEQ ID NO: 172771 - DNA, 201 bp, Homo sapiens
catagaacttttcttatataagaaaacagtggtccctaggcttttaaaaataagtatggaatacctacctgcaggtaagttatttaatctttatgacaacytatgatgtattcttatttttattcttggttttatggaagagagaacaatctctgaaagtttaaataaatgccttgtccagtgtcacatagctggtaaatg

SEQ ID NO: 172772 - DNA, 201 bp, Homo sapiens
catcaggatgctcagcgttgaaagcataggagggaactgtgctgagcgtgtgaggtttggcgattgtgctcttttatcttctttctttcttgagtttttarcaagataagacatgtaactactgtaaaatgagaggtaatttttaaaatagccactgggttaaccaaaaaccttttaaatagctgtggcatccagtgtggg

SEQ ID NO: 172773 - DNA, 201 bp, Homo sapiens
ttgaccaagattctgttattataaaaactatttgaatataatacttaaatttagatgtgtatgtgtgtatatatataatgtaatgtattacatttaagtcygtatagatgagaggtcggcacactacagtccacaggacaaatgcagcctgctgcctgtttttgtcaataaaattttattgaaacacagccatgctctttc

SEQ ID NO: 172774 - DNA, 201 bp, Homo sapiens
tataaacaaatttgttttcagttaaataaggattcagaactattttaccatatatactccttttgaggaaattgctaaagaaagtactttaaccagttttdaggtaagatgatagcttaaaaatatacatatttttccccctacccccaaatccactaacttgagttttttaaagacacaagcccactaggaagaagaaag

SEQ ID NO: 172775 - DNA, 201 bp, Homo sapiens
atccaggttatggattcctttcagaaaacaaagaatttgccagatgtttggtaagttggtaatgaaccagaaactgttcatttctttttcagaaagcagtrtggtagcatggctttgtaaatgtgggtagtgatggattatagaattttaattaacccagcagttctttgaaaattgtgacaagtgaagtggttttagtct

SEQ ID NO: 172776 - DNA, 201 bp, Homo sapiens
tttctggattatgatactggttcctttagaaatttgactctctttttagcagaattattttactagaagtatgttcaacactggctgatactgaagtggckaaatttatgtttggccagtctgggagagccaaaaattacttgattggatcaggctggtagattgtagcaatgtggcttgtgggtgaggatagtataaagt

SEQ ID NO: 172777 - DNA, 201 bp, Homo sapiens
ttaggagtaaaggacagggatttagggaaaatcctagtggagtcactgcagccaggcagagttgtctgttacatgcagataacaagtcacgctgttggggwtaattagaaaaagaggaaacaaagttgagaaaagaagagggaggcagagcagacggcagaggacaggaattttcagtgcagcgttgggaaaggttgtgga

SEQ ID NO: 172778 - DNA, 201 bp, Homo sapiens
agtctgaatgaatctatctactgcagctgtttcatatgtagtgagcagaaagctagagtttgtatttaaaaaaaaaaataggaaagaatgattgaaaatgytgttgcagttagttcatgtcacatgagttaaatgtggtcgaattcgctactggaaatcaaaggctttgtagcatctggcagtgttggttgctgatcctgc

SEQ ID NO: 172779 - DNA, 201 bp, Homo sapiens
caccatgcctggctaattttttttgtagttttagcagagactgggtttctccatgttggtcaggctggtctcgaactcctgacctcagataatccacccasctcggcctcccaaagtgctgggattacaggcgtgagccaccgtgcctggcctaatttttgtatttttcgtagagactgggttttgccctgctggccaggc

SEQ ID NO: 172780 - DNA, 201 bp, Homo sapiens
tgaggcaggagaatggcatgaacccgggaggtggagcttgcagtgagccgagatcgtgccactgcactccagcctgggtgacagagcgagactccttctcaaaaaaaaaaaaaaaatatatatatatatatatttgtgcttgtttggatgggcttttttaatcttgaattttatagaataataaagttaagtatttgtacc

SEQ ID NO: 172781 - DNA, 201 bp, Homo sapiens
ccttctaaataaataaataaataaataaataaataaataaataaataaaatgcacccaaacctgaattggaaactcaggtggggggcctagcggtctgtgkttttactagccctccaggcaagttttgatgctttggtgattgagaactgctgcttatgctgtcttggtggagagcacttcagccagtgcctcttctgctg

SEQ ID NO: 172782 - DNA, 201 bp, Homo sapiens
tagacttcaacggtgttccttaatgtgtgctccatagagcgctagtttgggggagtattaaaatgcattacttaagaaaatgtttctgtgtttaaataaaygtggaaaatcccttgttaagttagaaacctcttagagactgtcatacaggcacacctcatttcattgtcctttgctttattgcacttctcagatattgca

SEQ ID NO: 172783 - DNA, 201 bp, Homo sapiens
ggcatgaacccgggaggtggagcttgcagtgagccgagatcgtgccactgcactccagcctgggtgacagagcgagactccttctcaaaaaaaaaaaaaawatatatatatatatatatttgtgcttgtttggatgggcttttttaatcttgaattttatagaataataaagttaagtatttgtaccttgacataccctaa

SEQ ID NO: 172784 - DNA, 201 bp, Homo sapiens
catgaacccgggaggtggagcttgcagtgagccgagatcgtgccactgcactccagcctgggtgacagagcgagactccttctcaaaaaaaaaaaaaaaatatatatatatatatatttgtgcttgtttggatgggcttttttaatcttgaattttatagaataataaagttaagtatttgtaccttgacataccctaaca

SEQ ID NO: 172785 - DNA, 201 bp, Homo sapiens
caccctcctcccaccccgtcacccttctgagtctccattgtctactatcagaaaagccttctccagcagcgcattgtcagctgagtctaggagaagaaagscttctcatggacatgagctaaattccctgggaaaggccattccataatggagaaggccttctgttcacccacagtgtggtcctcagaccagcagcttcag

SEQ ID NO: 172786 - DNA, 201 bp, Homo sapiens
tgaacccgggaggtggagcttgcagtgagccgagatcgtgccactgcactccagcctgggtgacagagcgagactccttctcaaaaaaaaaaaaaaaatatatatatatatatatttgtgcttgtttggatgggcttttttaatcttgaattttatagaataataaagttaagtatttgtaccttgacataccctaacaca

SEQ ID NO: 172787 - DNA, 201 bp, Homo sapiens
ggaggttgcagtgagccgagatcgtgccactgcactccagcctggcgacagagcaagactctgtctcaaaaaaacaaaacaaaacaaaacaaaacaaaacaaaaacacaaagaaagaaagaaagaataatgaattccatctggattgctgcaaatgccattttttcattcctttttatggctgagtggtcgtattccatgg

SEQ ID NO: 172788 - DNA, 201 bp, Homo sapiens
tgcagtgagccgagatcgtgccactgcactccagcctggcgacagagcaagactctgtctcaaaaaaacaaaacaaaacaaaacaaaacaaaacaaaaacacaaagaaagaaagaaagaataatgaattccatctggattgctgcaaatgccattttttcattcctttttatggctgagtggtcgtattccatggtgtaga

SEQ ID NO: 172789 - DNA, 201 bp, Homo sapiens
tgagccgagatcgtgccactgcactccagcctggcgacagagcaagactctgtctcaaaaaaacaaaacaaaacaaaacaaaacaaaacaaaaacacaaavaaagaaagaaagaataatgaattccatctggattgctgcaaatgccattttttcattcctttttatggctgagtggtcgtattccatggtgtagatatac

SEQ ID NO: 172790 - DNA, 201 bp, Homo sapiens
ggcgacagagcaagactctgtctcaaaaaaacaaaacaaaacaaaacaaaacaaaacaaaaacacaaagaaagaaagaaagaataatgaattccatctggrttgctgcaaatgccattttttcattcctttttatggctgagtggtcgtattccatggtgtagatataccagtatttatctactcgtcaattgatgggtat

SEQ ID NO: 172791 - DNA, 201 bp, Homo sapiens
ttccctgatctttagtgagcatatattgaagtttgttggccatctgtatatcttcttttgagaattgtctgtacatgtccttagcccactttttttttttwaattatactttaagttctggggtacatgtgcagaatgtgcagttttgttatataggtatacatgtgccatggtggtttgctgcacccatcaacccgtcag

SEQ ID NO: 172792 - DNA, 201 bp, Homo sapiens
aaacagcctactgtacagtgtgccagggaaagcatcacatcggtgggcgtcggtggcaacaccacttacacttcaccctgattttgtttcctccttgcacrtgctcctttgacagggcaggctcccaagcaggtgtgcagtcagggccacaagacacaggcaccccatcccatctcagagtctgacgtcccctcctcccct

SEQ ID NO: 172793 - DNA, 201 bp, Homo sapiens
tttaatacaccaaacaaatgagaaacaaaccataagctgctatatactcatctgcatttctttctttcttaacaattagtgaaaccaggtgaaagaatagwttgaaattaagtacctgttgctgctttttcttgcgaattagcccattcgatattagacttcgggatattttggtggggctaagatgaaaagatccacctc

SEQ ID NO: 172794 - DNA, 201 bp, Homo sapiens
cagggcccaagctgtgagtctgaatgaatctatctactgcagctgtttcatatgtagtgagcagaaagctagagtttgtatttaaaaaaaaaaataggaargaatgattgaaaatgctgttgcagttagttcatgtcacatgagttaaatgtggtcgaattcgctactggaaatcaaaggctttgtagcatctggcagtgt

SEQ ID NO: 172795 - DNA, 201 bp, Homo sapiens
atctgaggacaataaaacaagtgtggatttaagtttaaacaaagacttaaatgtattctttttaaaggattgtgaagtactcaatttctttcttacagaaraaaactacaatcacaattacaacaacaaaattgacagtaacaggatctgaagtggacagagggcaatagggcaatagaggagggggcatcctggtctgag

SEQ ID NO: 172796 - DNA, 201 bp, Homo sapiens
gataggtttcaaaatatctctaggcatgaagaaacatttccaaacctgcttgtcttctctacctttctcagtatgtactagtttagaaggtattcaaaatstttcactgagaccattgagttttatgctaaatataacatctggcctagcactttttatcactcatatgcaatctatttgataaggacagggaccaaatag

SEQ ID NO: 172797 - DNA, 201 bp, Homo sapiens
attgttgtgcagccatcactataatctatctccagaactctcttcatattccaaactgaaactctgtacccatttaacagtaactccccattccaggctcsccacagtctctggcaaccactattctactttcaggataattttcattggttagtaatgtttggataatttgattagatttggtggatactgaagactggc

SEQ ID NO: 172798 - DNA, 201 bp, Homo sapiens
tttttaagtgtacagttcagtggcattaagtacattcacattgttgtgcagccatcactataatctatctccagaactctcttcatattccaaactgaaaytctgtacccatttaacagtaactccccattccaggctcgccacagtctctggcaaccactattctactttcaggataattttcattggttagtaatgttt

SEQ ID NO: 172799 - DNA, 201 bp, Homo sapiens
ttgtttacagagcttctgggatagactgctgcatgctgcatccgtacctctgttgcagaagcacatctgtcccattatgtctagtgacaaaaataagaccwacgcctcagtgaactttgcatacatctgaatgtaagcaagacaagtatatttgacattttaaaaaggttttttctttcacagttttcaaaataacatagg

SEQ ID NO: 172800 - DNA, 201 bp, Homo sapiens
caaggtgaatatcttaaccagacttgccgcagaattgaacaaatttatgctggaaaaagtgactgaggacacaagcagtgttctgcgttccccgatgcccrgagtggtggtggccgtctctgtcaagcctggagacgcggtaagggctgtgtgtgtctctctgcaggacatgctggtctccaacttccccttccaaagcga

SEQ ID NO: 172801 - DNA, 201 bp, Homo sapiens
atgagccaccatgcccggccccagatatttctgatgtctttaaatttcataccactgcttggtgaaaaatgactgtgctaaggaaaacttcttgagctccrtaactgcttttcatgattaccttcaatgtctgggagctaactataccaggaagcttttgagtggttgattttgctgctatttgtaatactcatctgatag

SEQ ID NO: 172802 - DNA, 201 bp, Homo sapiens
gtttattgagaaataataatataaaattattaactctttttcttttcattctacttcagaatgcctgttattaaaccagacatagccaactgggagctctsagtaaaattgcatgataaagttcataccgtagtagcatcaaacaatgggtcagtgttctcggtgagttttctttctttattttcttggtaatcttgatgt

SEQ ID NO: 172803 - DNA, 201 bp, Homo sapiens
tctttcctaagccagccagatgtttggacttggagaaaagttagattttgaaataaaagacaggtggattatagcccttcattcaaccattcagtttttcyttgcctattgctgctgccaggtagggtgtctttaacccgtctttatagtacctcttgtcacaaatttagttccagaaattaaaggactaactcctcctga

SEQ ID NO: 172804 - DNA, 201 bp, Homo sapiens
tcccttttctgccttttgagtgagatgaataggggttctcctggagttctctccatcagtgtccccatgcctactttgcatttcaggcttttccaaggtcrgtcagggagatcatgggaggaaaagaaaatgataaaactcaccacttgtttatagtaatttgaattcttttcttccttgatctgcctgctactgtttgct

SEQ ID NO: 172805 - DNA, 201 bp, Homo sapiens
aatggtatttggagatcacagttggggtactaggcatggtcattgctactgattggtcattttaagcctttttagttgcaggctaggaaaaaaaatatacrtatatattaacaggtttttaacatatacgttttatgttatatatgtatattgcttataatacaatatgttatcttaactatattatattaataaaatata

SEQ ID NO: 172806 - DNA, 201 bp, Homo sapiens
ggaatgaatttctcctgtagtgtggtcttttaatatgtatttttagttcaagtaaattttcttgagttgtatttttaatatttgctcttttttttgctttsgttctcttcaaggattcctattattcatatgttggatgttcttttttattttcaatatttctcatcttctgtattatttattcattttttatatttaaat

SEQ ID NO: 172807 - DNA, 201 bp, Homo sapiens
taagtctttgaaacatttgtagttatccagcatactactggctatttttcttttgtattgggtgggacaaaaaatagtcactaaatacttgatataagctttttttttttttttttttttgacaattttacatttttgggtgagtaattttcctcaaattagaatgcacaagaaaaatctggttaatcagtgttccaggtc

SEQ ID NO: 172808 - DNA, 201 bp, Homo sapiens
aagtctttgaaacatttgtagttatccagcatactactggctatttttcttttgtattgggtgggacaaaaaatagtcactaaatacttgatataagctttttttttttttttttttttgacaattttacatttttgggtgagtaattttcctcaaattagaatgcacaagaaaaatctggttaatcagtgttccaggtcg

SEQ ID NO: 172809 - DNA, 201 bp, Homo sapiens
gaggctgaggctggagggtcgcatgagctcaggagtttgagaccagcctgggcaacaacatagtggtatcctgtatctacaagttttgtttttttgttttbttttttttttgttttttttttttaattagctggtgtggtggtgcatacctataatccagctactcaggaggctaaggcaggaggatcacttgagcccagg

SEQ ID NO: 172810 - DNA, 201 bp, Homo sapiens
tttaacaatattgattcttccaacccatgaatgtagaatctctttgcatcttttgtgtccttttcaatttctcgcatcaacgttttatagttgtttttttktgtgtgtgtgtgtgtgtttttttttttagatggaacctcgctctgttgccaggctggagtgcagtggtgcaatctcggctcactgcaacctctgcctccc

SEQ ID NO: 172811 - DNA, 201 bp, Homo sapiens
ttatctttcttttagtcacatttattctatttttggttgcttcttaatgtggcttttatctcaataatgttatttttctctccattttttttctgagttcyatcagcttgactttcatttccttctgttgttgtataatctcttctttgaacctttgtttttcttctttgagctctttttttatttttatttttttaagag

SEQ ID NO: 172812 - DNA, 201 bp, Homo sapiens
tcaatacctggcttcagagcttcaaagaaccagctgactctcttggtaggggctaatgcaactgatgacttgaagtagaagccagtgctcatttaccattycataaaccctagggtctttaagaattatactaaatctattctccctgtgctctagaaatggaacaacaaagcctggatgacaaaatgtacatttacagca

SEQ ID NO: 172813 - DNA, 201 bp, Homo sapiens
tcacctcctcattaggctgagacgcatacacagtgattacgttcagacacagggactcctgtgtcttaagaccttgtgtgacccttgtaattaaagcattrcactttgcaaaggctgacagtggtataggggctgtctgaaactattcagccatagcctggtctctgctttctttttacaaatgggaggttggctaaggca

SEQ ID NO: 172814 - DNA, 201 bp, Homo sapiens
aagggagagttggtgacttattcacctgtgatggctgctgtgggggaagaggtgaggtgagactgggaggagttgattatggcattagaaattggaagtamgtggaatgttgttgaggctgggagcaagaattgacttaaacacaacagaagggctaggctaaccaagcttccatttgaagtcgtggagcaggagttgatg

SEQ ID NO: 172815 - DNA, 201 bp, Homo sapiens
aggtttgttcagtgggtatcgcactctacttttgaaacataggactaaattttcacaaaaatgtgaagatcctgcccgtgtactctggaaaattgcttgtytaattgggtgcacagctgcacctgtaccctcttgaatgactcagtcatggtgtgctcaagggccaagtaacttgttatggtgctaagtgaagaacaaaaa

SEQ ID NO: 172816 - DNA, 201 bp, Homo sapiens
agcctctgaataatttcatgcagaagagttaacatgacagaattgtggcattagaaaactcattttggtttgttgtgtggaaagtaaattggagcatggcmaaacttgaagttggtagacaaattaggatcctcttctaatccaggatagaaacggtagacccctaaaataaagtattgtatgcaacaaagtagatggtgt

SEQ ID NO: 172817 - DNA, 201 bp, Homo sapiens
atgttctttcttctactggcctcacttttaaagggatatcattttaggtaggctgtttcagggcactgtcatatgttactgtggactatcgatctcttgtrcctatgaattatttgattgtcactctttaatttatagtgagaaggaagtgggaatggcagctcttctcttatagaagaaaaatctgagtcagtggttctc

SEQ ID NO: 172818 - DNA, 201 bp, Homo sapiens
attggactcaaccaagcaaaatatagtatccatgttatagcatgtatcagtttttgtgtgtgtgtgtgtgtggctgagtgatattcagttgtatgaatatrcttcttaaaaaaatccacctgaggtcaggagttcaagaccagcctggccaacatggtgaaaccctgtctctactaaaaatacaaaaaaattagttgggcg

SEQ ID NO: 172819 - DNA, 201 bp, Homo sapiens
ttctgaatttgtgacgccacagctgaacctgcaggttatagtttccagataagcatttacaaataatttttaaggaatgtccttttgtttccctgggaaatttttttttttttttttttttgagacggagtctcaccctggagtgcagtggtgcgatctcagctcactgcaacctctgcatcccgggttcaagcaattctc

SEQ ID NO: 172820 - DNA, 201 bp, Homo sapiens
acctgcaggttatagtttccagataagcatttacaaataatttttaaggaatgtccttttgtttccctgggaaatttttttttttttttttttttgagacrgagtctcaccctggagtgcagtggtgcgatctcagctcactgcaacctctgcatcccgggttcaagcaattctcctgcctcagcctcccgagtaattggg

SEQ ID NO: 172821 - DNA, 201 bp, Homo sapiens
gctgattggtgtatttacaatccctgagctagacataaaggttctccatgtcctcaccagactcaggagcccagctggcttcacccagtggatcccgcacyggggctgcaggtggagctgcctgccagtcccgcgccgtgcgcccgcactcctcagcccttgggtggtcgatgggactgggcaccgtggagcagggggcgg

SEQ ID NO: 172822 - DNA, 201 bp, Homo sapiens
gcatatttgacttttcttccactttggggaggattattatgtaatgtgtcagaaattttcttttaataaattataggatattattgaacattatgttaacwgagtttattgttctaagccctttcatattttcatgtattgtgtgtcatgtaatcatagatgtgagagctgtcttaagaatattttaaagagtgttaagaa

SEQ ID NO: 172823 - DNA, 201 bp, Homo sapiens
tctagaacttatgtctttattctttttttttgagatggagtctcactcttgttgcccaggctggagtgcagtggcgcgagcttggctcactgcaacctccrcctcccgggttcaagtgatcctcctgcctcagcctcctgagtagctgggattatgggcacccgccaccacgcctggctaattttttttttttgtacttgt

SEQ ID NO: 172824 - DNA, 201 bp, Homo sapiens
tcatgctatgagaactgttcttctcaactgtatgttttgacaagactgagagcaaatttttgtaatacttcttatatagagtaattatgtaatcatatggkatgttttcatcactgcttaggtgtcaggggaaaatgaggaactttccaatgcccataagagtatggtttattaggctgttgtgaggatctagtatggaat

SEQ ID NO: 172825 - DNA, 201 bp, Homo sapiens
tcttcatttctgggtttctttctgtcagctattttccttctgatatgaatcacattttgcgtctttacctatctcttaattgttgattggattctagacaytgtaaatgttacattgtgtgtttggattttgttacctttatttaaaaggtatagatgtttagtctggcaggtacattaattttgtttaggttaaggcctt

SEQ ID NO: 172826 - DNA, 201 bp, Homo sapiens
ctctctacccgtcacacttcctgtcctttggttcataatttctatttcattatacgtctatggttttttcgtagtataatgtaaacccatgaaagatgtasgcaggagagagatataatagtatatataccttaagaaaatttcactgaccactatgtggcttggatgggggcaactgtagtagtggggagttctgctagt

SEQ ID NO: 172827 - DNA, 201 bp, Homo sapiens
tgcaattggttatttaaagaagatccccattccccatcacatctccttgattcatgagagatttctgattagtaccgctggattaggaataagacattttytaagaaatacttttcttttcccttctttttatttttcctttcccattagtatattctatgaaattttaattcaagaaattgtaggtgagaaaaccacata

SEQ ID NO: 172828 - DNA, 201 bp, Homo sapiens
tcccaggttcacaccattctcctgcctcagcctcctgagtagctgggactacagatgcctgccaccatgcctggctaattttttgtatttttagtacagaygtggtttcactgtgttagccaggatggtctccatctcctgacctcgtgatccacccgcctcggcttcccaaggtgctgggattacaggcgtgagccaccg

SEQ ID NO: 172829 - DNA, 201 bp, Homo sapiens
tgaaggaaatcatttaaaaaagaccctaaaaacaaaaaccaaaaaattggagacaagctgtgtctcagcaattagaaagtataacattaaacattagtgtrtttgtccctgctaaaccaagaataatcagttttcctgatgaagcctcaaaggttttatattttggaaaaaaagactcaattatttttactatgctgtttt

SEQ ID NO: 172830 - DNA, 201 bp, Homo sapiens
aaaaaaagaaagaaacaatagaaaagaaaaggtaatgcagattaccaaaaggattttttggaacaattcgtaattcctgtaggtactggaaattaactttyatatttctgcaaaatcgatcaactactcccaaacaatagagaatcaactccccctgctgacagaatctaggaaaacatgacacataatattggacagaaa

SEQ ID NO: 172831 - DNA, 201 bp, Homo sapiens
atatatgactgccctaaagacattgtgcaatgcctcatgggattaatgttgagtctcatttcctgcttttacaggatgcagaagaagctgtcagaattgcragggaaattggtaagtccttaaattaactttggtaggatttctgtgtctttcagcagatacggttgagtcaacaggtaataagtaattcccatagagcaa

SEQ ID NO: 172832 - DNA, 201 bp, Homo sapiens
taagtccttaaattaactttggtaggatttctgtgtctttcagcagatacggttgagtcaacaggtaataagtaattcccatagagcaaataatactttartagttttagattttgattacttgttgctctggaagaatgtatcagttgaattgccaaattctattattaaaggagactgtaaagagtaatttgaccttaa

SEQ ID NO: 172833 - DNA, 201 bp, Homo sapiens
tcggtgagttttctttctttattttcttggtaatcttgatgttatctatgaatatttaaagccatttttaacctgttcagtgactctcgtcttttgaattwgtagtacctctatgtatttttcatcttctttaggaagctgaatggaaatggaaatttttgttctcttatgcttattaggaaatacatttctagatttagc

SEQ ID NO: 172834 - DNA, 201 bp, Homo sapiens
gggggagggggtggggggggagggggtgttgagtcactgcaggcatgagctgggtcgagcttaagccttcctgcagtggttttctcacgtgcaccaagggrccgcttgtgggatttctgcatgcctgcttcatcctgagcttgagggcttgcctctgaccctgtgcttcatgggagccgtgtcttcatgcctgtgcctctt

SEQ ID NO: 172835 - DNA, 201 bp, Homo sapiens
acttagttcttctgttgtggctgcttagcacatcaggctcctaactgaatgattgtagtggtgttttactcggtctcctagcctcgtccttccccattctrtgtatcttcagcatgacctcagaccaccgtctttctaaaacatgagcatgtcacactccagttcttaactgtaagaactttgtcaggtatgagctctctt

SEQ ID NO: 172836 - DNA, 201 bp, Homo sapiens
caaggcccaggaacaggatgtaagaagggaggaagaagaaaagccaaagggaatcctcttcctgtgtctttaggaagatcctggaaggtgctgaagctaawtacttggtgttgatctgaagttagacacttagctagggagacttgttagtatctttttcttaagaaaccatgtgctgagctagaactagtactgtagtac

SEQ ID NO: 172837 - DNA, 201 bp, Homo sapiens
ctaatactcaataaatgtttgttattttgtgttaaataattacatacctagatcagctttttagtttattttatttagccatggcatacagcctgggtgayatttttaaacataagtgaaaatgcctcccagttaataggccacacagatgttctcatatctcatctatacttagaagggtttttaatttacttttcttta

SEQ ID NO: 172838 - DNA, 201 bp, Homo sapiens
ataagccgaaaagtacccaataacaaactgatttttattataattattttcatgattcccttctggattcccaggatgttttccatttctgtcttgctcartataacacaaaactggtcaaaatagtttttggccaggtacagtggtgcgcacctatagtccatccactcaggagaaaataagtttatgatgaattaaaat

SEQ ID NO: 172839 - DNA, 201 bp, Homo sapiens
tcttaacatggcaccaggcaagaagagaatgagtgccagcaggggaaataccagacacttacgaaaccatcagatctcatgagaactcactcactatcacraggacagtgtggggaaaaccgccctcatgattcagtcacctcccgccaggtccctcccacagcacatggggattattacatttcaagatgagatttgggt

SEQ ID NO: 172840 - DNA, 201 bp, Homo sapiens
taaatagcacattgattcaaaatatgtttataaaattaataaaaatacatgaataattttctacttaaaatattactctcttcagcttgataaataaaccrtctcagaaaacttgttgagatcaacacaggcgtgcctattagatttaataatacaagctcctcattttaagaagttgctctatgtcccttatttatttgg

SEQ ID NO: 172841 - DNA, 201 bp, Homo sapiens
tatccgcctcctgggttcaagtgattctcctgcctcagcctcccgagtagctgggactacagctgcacgccaccacacccagctaatttttgtatttttartagagacggggtttcaccatgttggccaggatggtctcgatctcttgacatcatgatctgcctgcctcggcctcccaaagtgctgggattacaggcgtgc

SEQ ID NO: 172842 - DNA, 201 bp, Homo sapiens
atgagttttttgcaatgttttgaaatttgtcttctagtcagttttacctgcagtgttgtacaaaaacaagcaaattagttgtgtgtgtgtgtgtgtgtttwtttttttttttttgagatggagtctcgctctgttgtccaggctggagtgcagtggtgcgatctcggctcactgcaacctctgccttttgggttcaagcga

SEQ ID NO: 172843 - DNA, 201 bp, Homo sapiens
gtctcaaatttttcacctctctgcacttgttcacaaaggaccatgaaagcgccttaagtattgattttggggttacaaataaatttcagcaagtaggcagmtttgtaaatatggactacatgagcaatgaggattgattgtgtatgttagatactagtaagttatttttctcccagtttttggctcgaagcaattctgaat

SEQ ID NO: 172844 - DNA, 201 bp, Homo sapiens
agtattgattttggggttacaaataaatttcagcaagtaggcagctttgtaaatatggactacatgagcaatgaggattgattgtgtatgttagatactartaagttatttttctcccagtttttggctcgaagcaattctgaatatatatgttaaatattagaagttgaagagtagttatatattttgtgaatggattga

SEQ ID NO: 172845 - DNA, 201 bp, Homo sapiens
tgatcattaactatagcttaacacaacagaaatttgttctcgtacacttcaggaggccagagtctatcatgcaggttccagccgagtgggttccttcctgrggggttggagggagaatccactccatgcctctctcctggttctggtgttgccgacagtccttggtgttccttggctttggcagcataactctaatccctg

SEQ ID NO: 172846 - DNA, 201 bp, Homo sapiens
atattttcatagggctacagggcaggtgctttctgagcaaagaccctggcagttgtgagaggtgacagcgtgctggcagtcctcagagccctcgctcgctytcggcgcctcctctgcctgggctccaactttggcggcacttgaggagccttcagcccaccgctgcactgtgggagcccctttctgggctggccaaggcca

SEQ ID NO: 172847 - DNA, 201 bp, Homo sapiens
agagattctcctgtctcagcctcctgagtagctgggattacaggtgcgccccaccacgcccgtctaatttttgtgtttgtagtagagacagggtttcaccrtgttggccaggctggtctcaaactcctgacctcaggtcatccgcctgcctcgagctcccaaagtgctgggattacaggcgtgagccactgtgcccggcct

SEQ ID NO: 172848 - DNA, 201 bp, Homo sapiens
tacttattttcctacacagttaaagatccctcttcaaaggtgaagcagagacacaataaatttggatcttgaaaccttcatagtaatatgctttttaaaagacatgtatacataattgtatagccattgcatatacttttatacatacatttctttcatatacattactgtcaggaagatcaggaagataatgtcatctct

SEQ ID NO: 172849 - DNA, 201 bp, Homo sapiens
tgggctccggtggggtggcttgtccctgtgctgctgagcttgcaggactgtgcatttttagaaatggattaggagcctgccgcctcttggttctggttacyaattcttactctcccctccccctgcatttttcaaaattcaaggtgaaatctgtgcactgtcaagctggagacacagttggagaaggggatctgctcgtgg

SEQ ID NO: 172850 - DNA, 201 bp, Homo sapiens
ggggtgtctttttcttgtaacatctttcctatgttttttggggggaagtagcatctatgacttgtcttggaatctgtaggacatctgaaagattttttttwaaaatgtaatggttttttttttttttttttttttgagacagagtctctctctgtcgcccaggctggagtgaagtagcacgatcttggctcactgcaatat

SEQ ID NO: 172851 - DNA, 201 bp, Homo sapiens
agtcctgctagggtaggctgtctgcttgtgctgtggtttggtgggtcatctggctgagttggctcttggcagttacctgcctacccaagctgcattggtcyccactttctctggaggggaaaagagaaacggatagaaagtatctggcatagaaaccagagcctttctagtctgtttaccctcaactccacagggcttcct

SEQ ID NO: 172852 - DNA, 201 bp, Homo sapiens
agatcacactctgcactctagcctgggtgacagagcgagaccaaaaacaaaaaagctagtctaacttgcatcagtttcttccttcctcccaacatttttcygtttggcttgtgagattttggtcagggaatcttgccttcctgggttacatgtattcacaggtctaatgctgtgatgccagcagcactgggagaccacaat

SEQ ID NO: 172853 - DNA, 201 bp, Homo sapiens
taagaagttgagtagaaaaccttactgttacattatttcagaatatagctcaatggttaaattaagagttagtatcagccaggttcagtggcttatgcctrtaatcccagcactttgggaggccaaagcgggaggattgcttaaggccaggagttccagaccaatgtgggcaatataatgagacccccatctttaaaaaaa

SEQ ID NO: 172854 - DNA, 201 bp, Homo sapiens
tggcatactttctgtgaggaaatttaatggatgccatcttaagtaatcaagctttatcagtttgggataaattgactttttattttacttttgatgcgatrgaagaactcgaggatacaatatcaactatgttgtatttaagatttgttaaacatcttgaatttaatgagtgaataatcaggtatattcaaattgtggaat

SEQ ID NO: 172855 - DNA, 201 bp, Homo sapiens
aaaggcttctggagtgtggttcttggaaattccttgaattatcagagccactttgggtacttctccagggcatctttcatgagtttggtgtatggggcctyatttctcatttgatgctaggttgctatttgtatatactctggtattctctttgttcttaaaaatcctcaggtgagtgttcctagtaatttttaattacca

SEQ ID NO: 172856 - DNA, 201 bp, Homo sapiens
ctgtaacttataatagtatttgtaacaactgttttaagagtcttcatttctgggtttctttctgtcagctattttccttctgatatgaatcacattttgcrtctttacctatctcttaattgttgattggattctagacattgtaaatgttacattgtgtgtttggattttgttacctttatttaaaaggtatagatgttt

SEQ ID NO: 172857 - DNA, 201 bp, Homo sapiens
gatctcttgagtttatgctataattaaggaacaatttgtgagggaggcaatattttccttgaaggatctgttagtgtgagaagcagagagatgagatgagratccaaagtttctataaagaaagaggtttcagttataggggaaagtaagaatataggccgagagccgggacaactactcataataaaagctatagcatgt

SEQ ID NO: 172858 - DNA, 201 bp, Homo sapiens
aggccagagccggctctctcagcttgcagggaggtgtggagggagaggcgcaagctggaactggggctgcgctcggcacttgcgggccagctggagttccrggtgggcgtgggcttggcgggccccacactcagagcagccgggcaatgaggggcttagcacccgggccagcggctgtggaggttgtactgggtcccccag

SEQ ID NO: 172859 - DNA, 201 bp, Homo sapiens
gctattggttatgtccccttcaagctgtagggggaggggaatttggcccaacccgggtacatgtccccttctccctctctgatttaaagcagatcaaggcmgacctggggaagttttcagatgatcctgataggtacatagatgtcctacaaggtctagggcaaaccttcgacctcgcttggagagatgtcatgctactgt

SEQ ID NO: 172860 - DNA, 201 bp, Homo sapiens
agcagatcaaggccgacctggggaagttttcagatgatcctgataggtacatagatgtcctacaaggtctagggcaaaccttcgacctcgcttggagagaygtcatgctactgtgagatcaaaccttggcctttaatgtaaagaatgcggctttagctgcagcccaagagtttggagatacctggtatcttagtcaagtaa

SEQ ID NO: 172861 - DNA, 201 bp, Homo sapiens
gcaacaccccaattctaggagtacaaaaactgaacggtcagtggagactagtggaagatcttagactcatcaatgaggcagtaattccactatatccagtkgtacccaacccctataccctgctctctcaagtaccagaggaagcagaatggttcacggttctggacctcaaggatgtcttcttctatatttccctgcact

SEQ ID NO: 172862 - DNA, 201 bp, Homo sapiens
ggcttcagtgagccatgattgcaccactgtactccagactgctaggctaaagggcaagatcctgtctcaaaaaaaaaaaaaaaaaaaaaaaaaaaaaaaargaaaagaaaaggaaaaaaagaaacgggctgtcattgaggaagtttgtggtattcgtcaatatatgttattggctattgctttagggaaattctgtgcctt

SEQ ID NO: 172863 - DNA, 201 bp, Homo sapiens
ttttgttagacttagtcagttgcttatgttgattggtacagtgcaggaggaatctacttttaccatggaaggaaaggtacagtacaattgttgaaattctrtgaaggctatacactctaatctcatcagggggaattctgcatcacagggaacctttatattccagaaaggttttagaaatttttttgtaacttgattttg

SEQ ID NO: 172864 - DNA, 201 bp, Homo sapiens
aggttcatagcccctgtcctgacgccatttaataattatgtgatttttggccaagcacggtggctcacacccgtaatcctagcactttgggaggctgaggygggtggattgtgaggtcaggagttcaagaccagctgggcaaagatggtgaaacccagtctctactaaaaatacaaaaattagtcaggcgtggtggtgggc

SEQ ID NO: 172865 - DNA, 201 bp, Homo sapiens
tgtggtggcacacatctgtagtcccagctacttggagactggggcaagaagcttgaacctgggaggtggaggttgctgtgagccaagatcgtgccactgcrctgtagcgtgggcgaccaggcgagactatgtccaaaggaaaataaaaaggggcaaaagatctgaatagtcatttctcaaaagaagacatacaaatcacaa

SEQ ID NO: 172866 - DNA, 201 bp, Homo sapiens
tatgaatatttttttcctgtgctgattgtgaacttttgttaagatagagaaactttgaagcaaaaatgtaattcggttaaaatgaatttcaaaatcctcakgaaataagagtgcttttggcctctgtttgatcctggcagcatgtctagctgatgtctgggcagtgttttggaaccagcaggcagtcaggggaaggccact

SEQ ID NO: 172867 - DNA, 201 bp, Homo sapiens
ggtggcacacatctgtagtcccagctacttggagactggggcaagaagcttgaacctgggaggtggaggttgctgtgagccaagatcgtgccactgcgctstagcgtgggcgaccaggcgagactatgtccaaaggaaaataaaaaggggcaaaagatctgaatagtcatttctcaaaagaagacatacaaatcacaaaca

SEQ ID NO: 172868 - DNA, 201 bp, Homo sapiens
tttgttgtccaggctggtcacaaactcctggcctcaagcagtcctcctccctcagcctcccaaagggctgggattacaggtgtgagctaaattcctccctaatgttaccatagccttagctacttatctttgggtccttctcatctttctgttttccttcccagccaggaaaatctgtgtaagtctcaaatactttcctct

SEQ ID NO: 172869 - DNA, 201 bp, Homo sapiens
gtccaaaggaaaataaaaaggggcaaaagatctgaatagtcatttctcaaaagaagacatacaaatcacaaacaggtatatgtaaaggtgctcgacattaytgatcattacggaaatgcaaatcaaaagtacaatgagataaaatcttaccccggttaaaacggcttttatccaaaagacataacgagtactggcgaggat

SEQ ID NO: 172870 - DNA, 201 bp, Homo sapiens
aaaggaaggtggaaggatataaagctggagaatgtattgccaaccaaggatggtttgataattttagaaagagatttggctttaaaatgtgaagacaaaaygtgaaggggaagctgtttctgccaactaagaggcagcattaagacaccattaagaaaatcattgaagagaaaggatatctgctgaacaggtttttaatgc

SEQ ID NO: 172871 - DNA, 201 bp, Homo sapiens
tatggaaacgatcgttgacactgtggaagagaaaaagtctggaaagattacaccactgaagatgcattgttgtcatataaaaagctgtgaaagccatcaarcccaaaatttgtgctggagaaaactttgtctggatgttgtgcatgacttcacaggatttatgaaagaggcaaccaaggaaatcatgaaagagattgtgga

SEQ ID NO: 172872 - DNA, 201 bp, Homo sapiens
ttttttaaaacttataaaagtatctttagatactttgaatgaaatagaaagagttctattctttttttttttagaaataggattttatctggttgtttgattttttttttttttttcagttattcaaatgaagattgatgcagttggctttcctttaaccttttagtctttcagggtaattttctttctttttttttttga

SEQ ID NO: 172873 - DNA, 201 bp, Homo sapiens
gggcgttttcggccaccacggcaaacacgaatcctatatataacgtaaccttgcttggcctcgcagcccagtcagcgcgctttatcaggctgggtggggcrgagagccctgtggagagcagagagctggcggtactgccagcagcggaccctcagaagaaagcgcatgacatcagactgctgctttctccgtagctcctgg

SEQ ID NO: 172874 - DNA, 201 bp, Homo sapiens
agatcacgttgaggaggattgatatcttaacaatattgaatcttcctatccatgtacattgattatctctacatttagattttcatccatttctttcgtcrgagttttgtagttttcctcatagatacactgtatgtattttaagattcatgcctattttatttctttagtgctaatgtaaatgtcactattttaatttca

SEQ ID NO: 172875 - DNA, 201 bp, Homo sapiens
aagtgttcatttgtttgttcattcattcatttattcttccaacaactgttggttgaataacaactgtgccaggcgtgtgctcgggatttgaaatacctaayttgaaccagctggacaagggtttctgtccttatggagcttacattttaatgggctagggaggtgcagagggtggacagtgcacatcataagtaagcagat

SEQ ID NO: 172876 - DNA, 201 bp, Homo sapiens
cctatatttgaaaaagtgattttccaatttttccttgctcgttaggttttgtccctgtttagataataggtgtattacagtgtatcgtgtttccttggctwtcaaaacataatgaccaatttttgttttcaagtctaattatgatattaatattcctaaacaagcttatttttgttttatccttgtatcattctttatctt

SEQ ID NO: 172877 - DNA, 201 bp, Homo sapiens
gctgggactacaggcgcctgccaccacacccggctaattttttgtatttttcgtagagacagggtttcactgtgttagccaggatggtctcaatctcctgwccttgtgatccacctgcctcggcctctcaaagtgctgggattacaggcgtgagccactgtgcccagctggtgctatctaatcttaagaaaggattttttt

SEQ ID NO: 172878 - DNA, 201 bp, Homo sapiens
ctgggctgcacttgtgagagccatgtgtgcacatctttataagccatcctctttgaagttggtagtttgtaatcagccatgaagaaagtatttactgtaargaaattggttgtaccctgcggcttttctccttcccccacaccccagttgtttgttaagcatttaccagcaaaccactgcctaactctttggcctgcatat

SEQ ID NO: 172879 - DNA, 201 bp, Homo sapiens
aagactaaatagtctatttgaaagaaaagctgtgcttccaggaaaaagccagacctaattaagtgtcttcagagaagggcatgggctctgttacaatgcaygatgaaataccgtgtcataatacatggataagaccttcacctggaattttagagatgaagcaagatgaagtaaactaatgtttactttgaccttggtgag

SEQ ID NO: 172880 - DNA, 201 bp, Homo sapiens
tagaggaattcatgtgggggaggatgtatgggaaattgaaattctgttgagtttttgtcaacctaaaactgctttaaaaaataatgtctttttttttttawaaatctgctgaaggaaagacattgttaagaaaattcataagcaaaccacagaagagaatacttgcaatacataaatctgacaaaggccttgtatccaaaa

SEQ ID NO: 172881 - DNA, 201 bp, Homo sapiens
cttgaatgcaggagttcaaggctgcagtgagctatgatcctatcactacacttcagtctgggcaacatagtgagatcctgtctcaaaaaaaaaaagtacartgaagctaggtgtggtggcagggatgtgtagtctcagctacttaggaggctgaggtgggaagatcatttaagcctaggagttagaggctgccatgggcta

SEQ ID NO: 172882 - DNA, 201 bp, Homo sapiens
agtccaagtagaagcaagtttcttagagctgtttttttttttaaaccctttatttcaacttctttccttcccatatataaaaccacataccattctaacartctgtaatgttgctaccaggtaataaacaagccatactgtatttgggagaggagggtgtgtttcaaagtctagttcattgtaatatcaaaactggtaaaa

SEQ ID NO: 172883 - DNA, 201 bp, Homo sapiens
ttcattggatttagggccatgacaagatctaggatgatttcatctcaagatccttcactttgttgtattggcaaagacactttatcacaggttccaggacrtggacacatcattttaggggctatcgttcaattcacctacacgtagtatgtgtcagacactacttagagctgggaatataattgtgactgtttctgctcc

SEQ ID NO: 172884 - DNA, 201 bp, Homo sapiens
tactgtgtgcggaggttatatgctttcattgcaccctgttcaaatacttctccagagaatttaccgtcactgtaaaattaaagtattaattgtgtaattamctgtgaaatgttgggttatcctataagattattaggcacatgaggacactgatgatctttatcttgtttgtatgcatattgctggtgcttagcagtgtct

SEQ ID NO: 172885 - DNA, 201 bp, Homo sapiens
atgccaagcctagtgatatatttctaaataactgaaaaaaaaatagttttttattattattgatttctaacttaattgctttgtggtcagagagtatcatstttttcatttaaaaatctttcagatttgatgaaaattgctttatggctaaggaataagtcactctgatacatattctgtatgttcctgaaaagagtgtat

SEQ ID NO: 172886 - DNA, 201 bp, Homo sapiens
caatgtcctgaactagggatctgggcagaaaactgtacttaataactttgagatatatttttcatgattgttcatttctaagtaatttcagatttctgctmtgattttgactcatatgttatttggtgatgtattttaattctttaattttttgagatagagtcttgctctgtcattgaggctggagtgcagtggtgtgat

SEQ ID NO: 172887 - DNA, 201 bp, Homo sapiens
agaatatttcttttcaaattgtaaaatatgtttctatgtctgctctcaatttagtgcaagagtagctcttgggggtagcaatatcaagtgttcctgggctrccacctggaaggtggaagtagtagatgtatgtgaacccgcgttcttccatcttttctttcctcttctgccttgaaatgcaagtgacataaaattaaaaca

SEQ ID NO: 172888 - DNA, 201 bp, Homo sapiens
cgttttaaagttgcttgtggggatggttgcataactctgtgactatactaaaaaccattaacttgtacacttcagatgggttaaatgtatgatatgtgaayttcatctcaaactgtttaaatgtatatagtctgttacacattttatatttaagaatttgttttcctaatggtataatagatgttcaaattttaggaatta

SEQ ID NO: 172889 - DNA, 201 bp, Homo sapiens
ttttttttttttttttgagatgttgtctagctccgtcgctgaggtgggagtgcagtggtgtgatcttggctcactgcaacctccacctcccaggttcaagygattctcctgcctcagcctcccaagtagcggggattacaggtgcctgccaccacgcccagctaatttttgtatttttagtagagatggggtttcactgtg

SEQ ID NO: 172890 - DNA, 201 bp, Homo sapiens
aggtactaagtatttgttgaattaatgaaaaaaaaaaaaatcttagccataatattgatgagaaaggattactttggatttttttttttttttttttttttgagacagagttttgctcttttgcccaggctggagtgtagtggcacagtcttggcttactgcaactctgccttccggtttcaagcgattctcctgccgcag

SEQ ID NO: 172891 - DNA, 201 bp, Homo sapiens
ggtactaagtatttgttgaattaatgaaaaaaaaaaaaatcttagccataatattgatgagaaaggattactttggatttttttttttttttttttttttgagacagagttttgctcttttgcccaggctggagtgtagtggcacagtcttggcttactgcaactctgccttccggtttcaagcgattctcctgccgcagc

SEQ ID NO: 172892 - DNA, 201 bp, Homo sapiens
cagcctcgttgacttcgcagtagaggctctaagcttgaatgttgtgaacgttccaaggctgggtttaagaaagccttagaactccatctagacctgtaacragtacaagtgacttgctcctctgaagagtgcttgaggctgcatgtgtcctgcatgtgaggctggagctctcagtccttctgcctcctcaccacctgtatt

SEQ ID NO: 172893 - DNA, 201 bp, Homo sapiens
cccgagtagctgggactacaggcgtccgccaccacgcctggctaattttttgtgtttttagtagaaacggggtttcaccatgttagccaggatggtctcgrtctcctgacctcgtgatccgcccacctcagcctcccaaagtgctgggattacaggcatgagccaccgcgcccggcctagttcttggtatgtttataaaac

SEQ ID NO: 172894 - DNA, 201 bp, Homo sapiens
ctctaggttacttataatgcgtagtacaatgtaaatgctgtgtaaatcattgttatactgcattgctttgaggaaaatgacaagaaaaaaaagcctgtacmtgttcagtacagacaacaatacattttttttctcaaatattttcaacctgcagttgtttgaatccatggagggtcgactgtaaaagtagcaccttatggc

SEQ ID NO: 172895 - DNA, 201 bp, Homo sapiens
gtgatgtggtgccagtattatacatttattcctatacagttaatacatttatttattttatatattatatataatattatatacagtttatgcattttttsagttattaaaaaaatgctgcctttttttttttttttttttttgagacatagccttgctctgtcacccaggctggaatgtagtggcatgatctcggctcac

SEQ ID NO: 172896 - DNA, 201 bp, Homo sapiens
ctgtgctctagaaatggaacaacaaagcctggatgacaaaatgtacatttacagcatcatttactgattattttgactccactgttgagacctacttctcaaaaaaaaaaaaaattttttttcaaatgattgctgctcattgacagtgcacctggtcacccaagagctctgatggagaagcacaaggagattaatgttgtt

SEQ ID NO: 172897 - DNA, 201 bp, Homo sapiens
aaaattaggatttctttccatctttgaaccttcgaaacaagaccccaatttaagtctttagaggtcaccactgttaccttctggagcatgtgtgtctgtakgtgtgtgtgtgtgtgtgtgtgtgtgtgtgtctgtctgtctgcgtgtgctagaattttgctatcatttgttttgtaagatactcttagttgcttaagtagg

SEQ ID NO: 172898 - DNA, 201 bp, Homo sapiens
atggaacaacaaagcctggatgacaaaatgtacatttacagcatcatttactgattattttgactccactgttgagacctacttctcaaaaaaaaaaaaawttttttttcaaatgattgctgctcattgacagtgcacctggtcacccaagagctctgatggagaagcacaaggagattaatgttgttttcacgcctgcta

SEQ ID NO: 172899 - DNA, 201 bp, Homo sapiens
ttatgatgtattcttatttttattcttggttttatggaagagagaacaatctctgaaagtttaaataaatgccttgtccagtgtcacatagctggtaaatgagagagtatggatccgttgtttagtatatgttccagactgactctcagatgcattggaactgggctgggccgttagtggtatttgtttttgatcgatagc

SEQ ID NO: 172900 - DNA, 201 bp, Homo sapiens
ctttctgggaaggattcaccattctagatccccttaagaacatttgtgcttcaatgggcaaaataaaagatcaacattaacaggagtttggaagaactggstttgaggtgttcaagatgtcattgaaggaaatagctacagttggggtggaaatagcaagaaaactagaagtggaacctgaagatgtgactcagttgctgc

SEQ ID NO: 172901 - DNA, 201 bp, Homo sapiens
tatgatgtattcttatttttattcttggttttatggaagagagaacaatctctgaaagtttaaataaatgccttgtccagtgtcacatagctggtaaatgagagagtatggatccgttgtttagtatatgttccagactgactctcagatgcattggaactgggctgggccgttagtggtatttgtttttgatcgatagct

SEQ ID NO: 172902 - DNA, 201 bp, Homo sapiens
agcaagaaaactagaagtggaacctgaagatgtgactcagttgctgcaatctcgtgatagaacttgaatggatgagagttgcttcttatggatgagcaaakaaattttgcttaaaaagcaaagtttttaagatggactctgcttctggtgaagatgctgtgaacattgttgaaaaggattttagaatattacattaactta

SEQ ID NO: 172903 - DNA, 201 bp, Homo sapiens
atctatttttcagtgttttttctaggattgcaatatccatcctaacatttcatattctagttagagctaatatgataccatttcaagtaaaatgtagaaattttgcgatcatatagtccatcctccttctcttcccatcactatcctctatgttatagttgtcatatgtatttcatctgcatgtattataaattctatgtg

SEQ ID NO: 172904 - DNA, 201 bp, Homo sapiens
tctatttttcagtgttttttctaggattgcaatatccatcctaacatttcatattctagttagagctaatatgataccatttcaagtaaaatgtagaaattttgcgatcatatagtccatcctccttctcttcccatcactatcctctatgttatagttgtcatatgtatttcatctgcatgtattataaattctatgtga

SEQ ID NO: 172905 - DNA, 201 bp, Homo sapiens
cgtcaatgaaaataaaacaacttatcataactcgtttcatactctcagataagccacttcactgtgacaatgaaggtgacgtgatacctaactatacaataaaaaaaaatagcactttaagtatatatttacaaacgtatgtatacactctttgtgtttggaaatagctacgttcatttgagcaaataaatcccctaaaag

SEQ ID NO: 172906 - DNA, 201 bp, Homo sapiens
aactggtgaaactaggagatagttttgtatcccggaagataatcattgttccattcaggtgttgggcagagagaaatggcttatctgcacatctgcaggaygtaagagattagtgaaatatttgtgattctgatgttgatgacttttaatgtttgacagagaaacttttgcaattattttcttctggtccaggcctcactc

SEQ ID NO: 172907 - DNA, 201 bp, Homo sapiens
ctatttttcagtgttttttctaggattgcaatatccatcctaacatttcatattctagttagagctaatatgataccatttcaagtaaaatgtagaaattttgcgatcatatagtccatcctccttctcttcccatcactatcctctatgttatagttgtcatatgtatttcatctgcatgtattataaattctatgtgaa

SEQ ID NO: 172908 - DNA, 201 bp, Homo sapiens
atttttcagtgttttttctaggattgcaatatccatcctaacatttcatattctagttagagctaatatgataccatttcaagtaaaatgtagaaattttgcgatcatatagtccatcctccttctcttcccatcactatcctctatgttatagttgtcatatgtatttcatctgcatgtattataaattctatgtgaaaa

SEQ ID NO: 172909 - DNA, 201 bp, Homo sapiens
tttttcagtgttttttctaggattgcaatatccatcctaacatttcatattctagttagagctaatatgataccatttcaagtaaaatgtagaaattttgcgatcatatagtccatcctccttctcttcccatcactatcctctatgttatagttgtcatatgtatttcatctgcatgtattataaattctatgtgaaaat

SEQ ID NO: 172910 - DNA, 201 bp, Homo sapiens
agcccaggagtttgagactagcctgagcaacatggtgaaaccctgtctctaccaaaaacacaaaacttagcctggcatggtgacatgcgcctgtagtcccrgctactcctgaggctgaggtgggaggagcgattcagtctgggaggtcgatgctgcagtgagccaagattgcgcccatgcactccagcctgggcaaaagag

SEQ ID NO: 172911 - DNA, 201 bp, Homo sapiens
ctgggttttacctgatttgcaagaatttttgtcactcaatcattagaatcaatcattttctcaaaaccaacaccaatattttgaattattttgtttggtayccccaaatttttatattctatgtatatgttattgtaatatttgagatcaatgaaaaatatgctttttttcgaaagtaagggaaagactgttgaaacagag

SEQ ID NO: 172912 - DNA, 201 bp, Homo sapiens
gttcttaacaaaataagaaggaaatactcatgacaattacagtcctcatttctgtagctggtcacgtggtcgtaggtggtattgatgactgccttcttctrctacccattctttattccctttgccttcagcaagcacctcagcaggtcatggttttttgcctggttgagtgacccaaatcttcattcctaaagagtctgg

SEQ ID NO: 172913 - DNA, 201 bp, Homo sapiens
taaaagtgtatacatgcacaaacatgttcttaacaaaataagaaggaaatactcatgacaattacagtcctcatttctgtagctggtcacgtggtcgtagstggtattgatgactgccttcttctactacccattctttattccctttgccttcagcaagcacctcagcaggtcatggttttttgcctggttgagtgaccc

SEQ ID NO: 172914 - DNA, 201 bp, Homo sapiens
gcaaactttcactaacatttctggtagttactagtagttaggtattgctcaagacagaaagaaacattttagaataaggaaaatattaagctgcaatcaasagaaattctttttaatctttgcatttcctggaacagactgagtcatgagatgaattgacagtaaacacttaacactggcacattagtcagagttagtcac

SEQ ID NO: 172915 - DNA, 201 bp, Homo sapiens
agaaacagaaagtagaatggtgattaccagaagctcggggtggggagaatagggagaagatggtcaaagaatagggaggagatggtgaaaggatgtaaagyctcaattagacaggaataataagggttctttttactatgagatatattgtaaaacatggtgaatatagtaaataaccatttattgtacatttcaaaattg

SEQ ID NO: 172916 - DNA, 201 bp, Homo sapiens
ttgctcattagctatatgaccttgggcttactagacgtgtgaacattttatacttcaattttgttatctgtaaagtggagataataatactacctacctcrtagtatggttgtgaggattcacaaccatatgcaaagcacctcatacagtatctgaagcaaagtatgtgtaccacagatgcaagctattaattatcatcat

SEQ ID NO: 172917 - DNA, 201 bp, Homo sapiens
tttgcagtcaaggaaaacttgcactgtgacagcatttggagtttggacttcccttgcctttcaggtgtattcattaggattacaaagatttaaggaaattytatggaattcttttaaaatagttaaaaatggaagagtggaaggacaaggcatgctaagtatttgagattagcaaattgattaagtagtttacaaagtaaa

SEQ ID NO: 172918 - DNA, 201 bp, Homo sapiens
taaccttagtgtaataaaagtgttaacttttattatgctttatttccccgatttgatttttaaattatttttcatgattattacagaagatttaaaacatmcaaaaaactaaaatcaaaagatgaccccaaagatacatagtcatcccactcaagtcatccacgtaatattgatgtagtacatttctttcctgtgcacgag

SEQ ID NO: 172919 - DNA, 201 bp, Homo sapiens
atgccctcaacgtatattttttaaaggtttcagtttcctttttaatcatgacattaatttcatctaatttggacatatgactgaacatttagggaagcctkttcattcttgttaatctttcacttgaaaaatacttagttaacaaacaagaacagacaattataaagacaattaaaaatatggaattccaaattgagtatc

SEQ ID NO: 172920 - DNA, 201 bp, Homo sapiens
gactcatagtaaatacagcgtttatttcaaattgagttatattaaattgagttataataaaagactcataatatggcatttagttcaaattagaaatgaayatggcagttatttcaaattaagtcaattacaaaattgaaatgagcttttttctaagacacataaaattactttaaaatttaagagcaagaggaaacagga

SEQ ID NO: 172921 - DNA, 201 bp, Homo sapiens
gtggtttaggtaggagctaaggcttatagaacgtggcagttgaataagggaaataaggtatagttgagaaacagacattctctagacccactcccttgccyttattcttcctttatcgctttggcaccaaaatggagaagacttctgttgaatgaattcaccaagattctgataagtctatctgtgatactatgttgatag

SEQ ID NO: 172922 - DNA, 201 bp, Homo sapiens
cagagcctttaacctcttggtcactagttcaaatctgccccaggtcaagagtgacagaaagtcattaccatctgatggcagttcaataggctatgtgaaaygaatgtgtgatttcaagacctagtggagacaaattcatgccatagacctgcagtagagtgagtacaaatggtagctgtggttttggtttgaagagaaatg

SEQ ID NO: 172923 - DNA, 201 bp, Homo sapiens
aagatgttttattaaacagataatcaatggataaattagctatttatttagaaaaaagtctaagtattaacttttcttcatactatgtatcaaaataaatwgtagactaaaattttaacaattgtactaaattaaactattaaaaaagaaaaaagataggtgtatgtttatcctatttgaaaatcatttcaccataaagac

SEQ ID NO: 172924 - DNA, 201 bp, Homo sapiens
aacatatggctttttaaataatttgatcatgtatctatcgagacatattattcttaaatagagtttatcatcagttttattcttttttttaggtgtagacrttggaaatccttgtttatctaaataaataaactggaaggagtttattatagtcattttacctaaatatttggacaccttctccattgtaagcctaaaatt

SEQ ID NO: 172925 - DNA, 201 bp, Homo sapiens
tcaaaatactgaaaacataaatgttggcaaagatattgagcagcttgaaaattcatacattgctaatgagtatataaaatggtacaactactttggaaaaytctccagcaatttcttgtaagacccaacaattctacttctaggtatctttccaggagaaatgaaagcacatatccataaggttttgaggtaattgaatct

SEQ ID NO: 172926 - DNA, 201 bp, Homo sapiens
atttcttgtaagacccaacaattctacttctaggtatctttccaggagaaatgaaagcacatatccataaggttttgaggtaattgaatctcacaaacatrtaaggaaaagaaaccagacacaaaagagcagttaccaaatgatttcatttatgtggagtttaaaatgggagtaacaaatccatattatttgaaatcaaga

SEQ ID NO: 172927 - DNA, 201 bp, Homo sapiens
ttgtgtgtgtgcatgtgtatgcatatttctatatgtggtatgtattatatagatattacatgtgtgtatatgtatggatatatttctctataaaatctccyctttgcagtcaaggaaaacttgcactgtgacagcatttggagtttggacttcccttgcctttcaggtgtattcattaggattacaaagatttaaggaaat

SEQ ID NO: 172928 - DNA, 201 bp, Homo sapiens
tctgtagtcattattttaaatagagcaacagaaaggcaaaaagaatgcttaggtcactttcagtcacaagtatcttataccacacaaaatgggaacgtttrtattttagcgccagtcacgtgatggagtgtcatgggcctaagcatgggcgtgcctgtttgtgcgcaggaggaatgtggtatgcactatgtgatggtgggt

SEQ ID NO: 172929 - DNA, 201 bp, Homo sapiens
tataaaatcgaaatctccttctccccactggctagagaccagagagcctacgaagaaagataacaccatcaccgatgcctacagttgtgacaatgagggcrgttcaaattctgtgggatggaaaacccactttcacctggatttcttaactgtttgtatcatggtcgtaaacacaaaaattctttttgctcatttgcgtcc

SEQ ID NO: 172930 - DNA, 201 bp, Homo sapiens
gcacttgcctactacattctaccacctctacttgttatcctgtccagagagaatcattgtttttaatgcttgggatttgattctgagttggcagagagcasattaagattttgctaatctgtgggcaagattgttgaacgttttacctctttcccagtgacctgtggcagtcagttgtagtagaaataatacaatacttac

SEQ ID NO: 172931 - DNA, 201 bp, Homo sapiens
atatgaaataaatactggaatcaatagtaagaatcagatttgagactccaactgtaattttaggtaaattaattattttactcttacttttttgtaaaatrggatttaaaatctcctaggatttatatgaggaactaggatatagaggagagaatgctttgtaatttatgaaaattaataaaaataagatataaaatataa

SEQ ID NO: 172932 - DNA, 201 bp, Homo sapiens
ttaatatttttaaataatcatcttagctgtcgtgtagataattaatttaggagggtcaagagtgaataaagaaagtattgcagtgaggcaagtgagagacyatgattgattccagttgcaagaagctgtggttatggcaacaaatagattcacgatatatacttgaagtagtgctacaagatttgctgagagattgaatgg

SEQ ID NO: 172933 - DNA, 201 bp, Homo sapiens
agagaaacaaaattgcttgtagaatattatctcaactgaatataaaaaatgcagagaaaaaataggaatgaaatgtggctattacatctggctggttggcrtaaagataattttttgaggcgtatgcttttccattctatattttctgtaatgggaatatattatgaataattagaaaaacagtgaaggaaaaatggagaa

SEQ ID NO: 172934 - DNA, 201 bp, Homo sapiens
aatataaactatgaattttaataatagcatatcaatattggtgctttaactgtaacagatgtaccatctaatgcaagatattaataatggggaaggtgccragtttgggggtggtgtgggcgtatgaaactctatgtactatctgcccaattattctgtaaatctaaaagtgtactaaaaagcaaagtctattaattattt

SEQ ID NO: 172935 - DNA, 201 bp, Homo sapiens
ttggaaaaaagctgaagtattgataaaggtctttaaaagaaatgttacctgaaaagaatgggttttgatacagatgaaagttttatttcatttagctagamcaatatagaggcaacaatattgattcttcattcatatctagtgcttaccaaaagcgctctcacatatttgatgaataatgaattgaatacatgtgcacac

SEQ ID NO: 172936 - DNA, 201 bp, Homo sapiens
tgtgtatatatacagatatataatatatttatatttacagatatatacacagatttacatatatttaaaataaatctgtgtgtgtgtatatatatatagakagagagagagaaacaaaattgcttgtagaatattatctcaactgaatataaaaaatgcagagaaaaaataggaatgaaatgtggctattacatctggctg

SEQ ID NO: 172937 - DNA, 201 bp, Homo sapiens
atacaagtgagcaaatatggcctatttcaggcatggcaagacatactgaacagaggtgagaatgataggaaatgaagagaaagacataggcagagatgaaycttgtggagtacttcaggtcatgataacgattttagatgttattctgcacttgaggagtgaagtgtctccaaagagtggcaaggtctttacattttcaca

SEQ ID NO: 172938 - DNA, 201 bp, Homo sapiens
gaactttttctctctaggcattatgacttctcctctgtgatcaaactctatctggtattttagtgaatgatatgataaatcaagttttcccagctgtgttkactctgttgaaaaagaaagattgcctaaaattaaggatttgagtcttctgacagctattgtttggatgtttagtttccttttcttaccccacttttatca

SEQ ID NO: 172939 - DNA, 201 bp, Homo sapiens
tactataggagatgtgaagatagcaaaagggactggggctcccctttaactagtggcaaaattcctgggtgacaagtagggccatcaaatttgaggaagcrtataattggctgtggtccaaaatgcatcattaccaagtttaactacaatagctccactaatcttcttgctctcaaccaatccaaattctttccatctttc

SEQ ID NO: 172940 - DNA, 201 bp, Homo sapiens
taaaggatataggtttgatgaaatgaagatatgcaggcatcatcagcatattgatgtaattctgattccaagtgtctttccagctcccttgtggcctcacrcacatgctaaataggatgctactgacaaactagcgcttctcagccatgggtccttagggaaaccagccaatcactcgacactatcctctaagaagatgag

SEQ ID NO: 172941 - DNA, 201 bp, Homo sapiens
aagatcacaaagctaataatagagctggatttaaatccagaatccattaaaccatactgccttttatgatattgtgttgtggtgggtatcaaatgtatggwgtgtggataaaagaagagagatcagttgaaagaagggatgatttgtttacagtgggggtgaattaaatgtggttgggcagagagctctgtgaagcagact

SEQ ID NO: 172942 - DNA, 201 bp, Homo sapiens
aggctctcttgcttttctggaaccttggtagtctactccaattctatgcaaaagaagatttatgaaacacctactatgtataaagtccctggctagccaaracaaagatgagtaatagggagcaatcagatatatgccaaactgagccatttctgaaggttcacaatattcacttgtaaatggatctttaatccagtgtag

SEQ ID NO: 172943 - DNA, 201 bp, Homo sapiens
cttctgtcttaggtagaactaagacacaaacaaactgagaccagataagaagagggtagcggtatgaatttatttattcattcattcattcatttattaamactacatttactgagcatctattatgtaccaggtattgttctgggcaacttagatacaacagtcagcaaaccagttagaatttcatgccctcatggaatt

SEQ ID NO: 172944 - DNA, 201 bp, Homo sapiens
gaagcattaaccagaaacatgaagggaagtaggacaagaggaataagaaatctgacctaatgattagtcaacaaatgcgttgggctcttagaactttaagrtatttagtgaaatatttctgaacaccaatgcagcaaagctttgttttggtaggatgcagtaacgctggtatacagactgggcagcaagtaagcaaaacac

SEQ ID NO: 172945 - DNA, 201 bp, Homo sapiens
gaaacatcacactgtatccaataaatatgtgcaactattatgtgccaattaaaaacaaacttattttaaaaaacttatgcaaatggggacaatcacaaaaktaaaagacatcaatgtactatattgccatatgtatgacagattttaaaaattgggaactcagtagataattggcaaactatgattaagtaacccttggaa

SEQ ID NO: 172946 - DNA, 201 bp, Homo sapiens
gcatagaaaccacaagattgactttaagaaacaggacttcaagtccaagctctttccattttacaagtaagaatattactccctctcctgactaagtcagstttgagtactgaaagaaataatgtatgtaaagaagattttgaagacgtaaatctccataaataggtaatttactgataatctagttaatctcattttatg

SEQ ID NO: 172947 - DNA, 201 bp, Homo sapiens
caaaaacatattcaagtcaaaattactgtactacctaacatatacatttcttttggggtggtgatatagggatgtaagaaatcagagacaccacaccaacrctctagcatgccaactgtttcaagtttagctaatgctgtgatgtgatgatgatgtatactaaaccttaagtttataaaactgtctttatggcagattaat

SEQ ID NO: 172948 - DNA, 201 bp, Homo sapiens
tgatttgcttacagatgttttcctctaagaatgacattatttcaaagattaaagttttcttttttgttttaatatctaataggaaaagcccctcctcctgytaatgatattttataaatttgattacttaggtttgccagaacccaataaagatgccatcttccaaggcctgacgcaggaccaggggttttatacatccaa

SEQ ID NO: 172949 - DNA, 201 bp, Homo sapiens
gcagatcttggaaatttgcaggttcttaattgtgtaccagtttcctataataaatctcatacacacacacacacacacacacacacacacacacacacacaccccacatacatcctattctttctgtgtctctggagaacttttgactccttgactaatgcagtgaacattcttttcttgatattggaggaaggcattcag

SEQ ID NO: 172950 - DNA, 201 bp, Homo sapiens
aatggagaggccagagtgaagctaaaccatgttcacacacatcacacatagatacacttactttcttagaaaactaatagtaaaaggtagatccataaccyggtaatagatgtaaaaccaaaactaaaaagtataatttgatatagaggagacaaggtagctcttattttataaagacataatttatacctagaaagccca

SEQ ID NO: 172951 - DNA, 201 bp, Homo sapiens
ttgcagatcttggaaatttgcaggttcttaattgtgtaccagtttcctataataaatctcatacacacacacacacacacacacacacacacacacacacacaccccacatacatcctattctttctgtgtctctggagaacttttgactccttgactaatgcagtgaacattcttttcttgatattggaggaaggcattc

SEQ ID NO: 172952 - DNA, 201 bp, Homo sapiens
gttacaaccttctctggaatatgctagctaaataaaacgttaaataaatacattaattgatgtagagagagagaaaaaaagaggattagtgaagatttggrttttcaggtgactgtgagatagctgaggttaactcgtgtaaatgtgcaataggcagagggaaaatacaatgcaacaactcaaggaaaagactgagagttg

SEQ ID NO: 172953 - DNA, 201 bp, Homo sapiens
caaagtgtattatgtggacatctctggttagtttacttttggtttctgttttggagagttgactttttgatattgagcaatatgatatatttaacaaatakttgttcatctgtgtgcaggataatagatacttgtctttttctatatttcatttagggtagtctattcctttttggtccttgtgactttgacttaactttt

SEQ ID NO: 172954 - DNA, 201 bp, Homo sapiens
gtttctgaacatatatgtgctctgtgatacagcagatgaaactttaaataactgaagtgaatacatttaaaaatactttagatgcatttattaaaagatamcaataacaacaagctttattttgatcatttaatttttcaataatgtgttaaatactttgtatggattatcttatttattcttaataacaatcctgtgagg

SEQ ID NO: 172955 - DNA, 201 bp, Homo sapiens
gttgtggtaatattatatgtagatgtctaattatctatttttttcctttctggaaagttattcaacacagagaataaagcagtgtccaaagaaatgtataratgtcaacagcaagacccttaccaaaagcataatgacagtttcaaaagaggatactataatttcctatttacaactttaaaagttttgtatcttctatgc

SEQ ID NO: 172956 - DNA, 201 bp, Homo sapiens
tatagtttactaaaaacagttgtttgaatccctggaacaataattaaaccataatttttcttaattttaaaattattgttatggaattgtctgttgactartgattgtctattgtttttcacttgttttttcagtaaaagaagccttgagccctataaaatttaacagatggggtctcccagaagtagatccagaaactat

SEQ ID NO: 172957 - DNA, 201 bp, Homo sapiens
tggtaatccagtcctcctaggaaaataaaattattcctgtgctactgtatataatctttattgagatacagagtaaggctggaatgccatctgactttgcrtgcttttggcatttgtggtagatattgctagtgctcgctaatattttctattctttgtcccctctggttttataagaggcaaacctccctgccccttgga

SEQ ID NO: 172958 - DNA, 201 bp, Homo sapiens
tttgtttagtcataataacacagactataatcttatgagtcagttcctttgtatagaaaatgaacaatcatacctaaagtcgaagatttttaggattggaratataaatattaagttccccagagagtgccttgtaaggaaaaggcattcatcacaagaagttatcaccattgactctaatcttcacaataaattgctgaa

SEQ ID NO: 172959 - DNA, 201 bp, Homo sapiens
ctaggttattctctgctaacttctgctggggagtggtctaagataaacttaagtgccaaaaacatcttgcatggtagaggactggactcagctccacctcatagaaagtttaataaaaaataggtgcaactgctgtacagagctgaggcttatagaaagctgcagaaaaaagtagagaaagctgtacagcaggtattgtgg

SEQ ID NO: 172960 - DNA, 201 bp, Homo sapiens
gagaagagtgtcctcctggccagagaaagagcaacagtataaatatcaaggcgtagttatacaagtgagcaaatatggcctatttcaggcatggcaagacrtactgaacagaggtgagaatgataggaaatgaagagaaagacataggcagagatgaatcttgtggagtacttcaggtcatgataacgattttagatgtta

SEQ ID NO: 172961 - DNA, 201 bp, Homo sapiens
gagagaagagtgtcctcctggccagagaaagagcaacagtataaatatcaaggcgtagttatacaagtgagcaaatatggcctatttcaggcatggcaagrcatactgaacagaggtgagaatgataggaaatgaagagaaagacataggcagagatgaatcttgtggagtacttcaggtcatgataacgattttagatgt

SEQ ID NO: 172962 - DNA, 201 bp, Homo sapiens
aaaatatggctatatctaactaagtaagggggcaaaagagatgacaacattggaggaggatgtgttaaaagaactagtgcctctgtgagcagccttcaaaygatgaatgatgcccccttcatgcaccaactgcctgaccactggggtaggatagctttgaggtgtgtgtcctacattggctcctagaatttttagcatgac

SEQ ID NO: 172963 - DNA, 201 bp, Homo sapiens
gccaaggttttagcaattttaagaagcattaaccagaaacatgaagggaagtaggacaagaggaataagaaatctgacctaatgattagtcaacaaatgcsttgggctcttagaactttaaggtatttagtgaaatatttctgaacaccaatgcagcaaagctttgttttggtaggatgcagtaacgctggtatacagact

SEQ ID NO: 172964 - DNA, 201 bp, Homo sapiens
aggttataaaaatcaatctctcacctcctaaatccttgaaattcttgatttactaattttttttcttctggatggtgttaaaactgttaacaattagacartcaaggttcaatttctaatgaatttgttatccacttaattcattatattttaattaatgtaagcaaattaaaactacattttctttttgcatacacagtg

SEQ ID NO: 172965 - DNA, 201 bp, Homo sapiens
atcatatgaaggaagtatcccgcaggccttcacagcttctaggagggtagcattaagcagcatgatttcatcacagctcatatggtaggcacccaataacrttttgtagaatcagtatttggttttggttttatgaatatgcttcaaaaccggttaaaacagatttccttacaatggaaaaacccacattaaaacaaacca

SEQ ID NO: 172966 - DNA, 201 bp, Homo sapiens
gcctttatttgttcatcagtttctaatttttccccatttatgatttaactgcaactgagcattttactgaaatgtttttgttagtaattctgcttaattcraaaagaacacaaaggtgattacaaaagtacagtacaataagttaatactctttttcctcaattccaagacatcactgatttaaaaattgcttttgtggga

SEQ ID NO: 172967 - DNA, 201 bp, Homo sapiens
aagaaaatatcaatgtgcaaagttcctactatcaaaaattctatcaggaaaattagtaggtttaatcttattggaagtaaaaattaaactactcattttgkaaaggtacgtaagtggtgtgacatttgccatatgattaagtatatctgaagtggtcccctccagcactcgtgtctcatggtggattccagggcttccagc

SEQ ID NO: 172968 - DNA, 201 bp, Homo sapiens
gtctccattatgggatttctgtaataatgtagttaaataatcaatacataataaaatttaaaactataatgcactatgaatatttaagatattattatgtrtactatagtgagttatgtttgaaagagacactattttttttcttttccatcacttaaaaccttttcactgtaccagtaattacaaacagcattttaatgg

SEQ ID NO: 172969 - DNA, 201 bp, Homo sapiens
gttttacaatgttggccaggttggtctcgaactcctgacctcaagtgatccacccgcctctgcctcccaaagtattgggattacaagcgtgagccaccacrcctggccaatttctgttattacttttcttaataagtggcacgattattcatattttaccaatcaggaaactaaatactttgctcagggccacaagtaagt

SEQ ID NO: 172970 - DNA, 201 bp, Homo sapiens
ttacatgcaatcgctcatctaactcacatgagatagatacttccattggcctcatttcatatatgaggaaaccaagactcaaagaacttaaggagcttatstggtcatgcccagtgtgcgtaaagattacctttattttctttccaatggatatacctacagtcaaagtagtaactagacatttctcctgcccttacggag

SEQ ID NO: 172971 - DNA, 201 bp, Homo sapiens
aaaaagaaagtgagaggataatactgccagtgtagtttcctccctgcttattaagccaagatatgtgtactgcctgtactctgaacttgcctctgctgagrtagcatctattgtcatgggaaccattattttattggaagcatgagagatttcagggaaaagctgatgctttctgttaccatgatattgggttagacttgg

SEQ ID NO: 172972 - DNA, 201 bp, Homo sapiens
ctcgtttcaaaacttacatattcaaataaaagatgggtaatgatgaagacaacttgtgtcaatgacataaatggaaactgatttggtaatagtttgaatcragattcagactttattttgttaagctcagctttcatcaaaatcgtaagtgtaattttcagcattatcattcgtttaaaaaaaggaagatttttctatgtg

SEQ ID NO: 172973 - DNA, 201 bp, Homo sapiens
ctactgcacccagcctcaatctcatagtctttaaatgataatggtaggaaataattacttacgtgtatcaagtatgtgctttgggctagcaaaacctagtygttaaaagcacagactcttgctcagtcacactgcctggctctgggtcctggcgctgttccttatcagctatatgactgtcaggtgtcattgccttggcgt

SEQ ID NO: 172974 - DNA, 201 bp, Homo sapiens
aacctcacagcatccttgtagcagaagattctaagtgcagagttattaaaattgtaaactatttgtttttaagtttgtgggaatcattacccatcatctcrtctgtattacatttgtttttgaataaagattaacatttttttccaagcctttttctatattgtaatcatagtggggaaatggtatttcagacctcagata

SEQ ID NO: 172975 - DNA, 201 bp, Homo sapiens
aaaagaattttgaggatattttttcaattatttaacaaatattgaaaatctattatgttccacttggaaaagaaagaattggtgggtaggagccaactaaratccaataaacttttgtctgtgacttaactcttctgaagttgtcagaacgttatgttccccagagttagttgttttggttgacagaaatctatgatatgc

SEQ ID NO: 172976 - DNA, 201 bp, Homo sapiens
cacttgggatctgcatgcatttccacatgctgttcccgacatctggaatggccttccagttctcaagcatcactttttgagctattccctgacctttgctrtagaattaatgtctccttcctttttgaaccttggctgtaaccagtatcacatcgcagttgtatttttgtaagtctgcttcctttactagaaaataacctc

SEQ ID NO: 172977 - DNA, 201 bp, Homo sapiens
atttttcacatcatgtattatacttaatcaccatagagggtataggttttcatcagtgtactactgattcccactatattttcttaagtgtaattgttttmatggttcaacccttaaataataaataataatggctatataagcttcaaaacctcacagcatccttgtagcagaagattctaagtgcagagttattaaaat

SEQ ID NO: 172978 - DNA, 201 bp, Homo sapiens
gatcaaggtctacatcctttccttaggtattttaagataactattgtcccgcagataaatggtagaaccaaatagtatttaagagccaacaaattcatggktacctggatattatatatattttcctttggttaaaaattaggaaaataaattaatgtctgttccagttcctaagaaaatatttgatagactttgtaaacc

SEQ ID NO: 172979 - DNA, 201 bp, Homo sapiens
gtgaatgaggaaaatacaaggaacaaggaaaggatatgtaatcagtgtaggaaatttgtcctcaagaaaaaaacaaattgaattataagaattaacttcawatgaagagatgattaaattctgccaaatttcgttatacataacattttagaacataccaggatgtcctgttttttaaaaaactagagatgaactgatgat

SEQ ID NO: 172980 - DNA, 201 bp, Homo sapiens
attgaggcaataggtagatttatctagctcttcagtatcattactgtcatttatttatgattctgatagagggttgctaaaatctccaactatgatttgartttggtcagtttttttctttcaggtctgacagtttacattttatgcttctcctgaaccctcattcattttgtttatttctgtattttggaagcttctagc

SEQ ID NO: 172981 - DNA, 201 bp, Homo sapiens
tcccgacatctggaatggccttccagttctcaagcatcactttttgagctattccctgacctttgctatagaattaatgtctccttcctttttgaaccttrgctgtaaccagtatcacatcgcagttgtatttttgtaagtctgcttcctttactagaaaataacctcacttttcttacccatctttgtatctaagttctc

SEQ ID NO: 172982 - DNA, 201 bp, Homo sapiens
ttattgatttctgaataattcataaaagatggcatttaagattttctgtttcagctcaaagttactcctctcatagaggttattacagaatccagtaaatsactgtgtatttctaaataagttataatggaatattccatgaatgttcttagagtctacaagtgaataatgaatgatttgaaatctagctgtgtgagatat

SEQ ID NO: 172983 - DNA, 201 bp, Homo sapiens
tatgtgaatgcataggtgtggctgtgttgatatggctgtgttccaataaaattttatttataaagacaggcagccatctggatttagcccttgtgttgtartttgcagacccctggttgagagcaaacatgacttaagtccattagaagaaatttcaaataatgtttggagaaatatattaagaatttgtgattttctctg

SEQ ID NO: 172984 - DNA, 201 bp, Homo sapiens
ctctatgtgttcatgtgttctcataatttagtttccacttctaagtgagaacatgcagtatttggttgtccgttcctgtattaccttgctaaggataatgrcctccagctccctccaggtccctgcaaatgacatgatctcattcctttttatggctgaatagtattccatggtgtacatgtaccacattttctttatcca

SEQ ID NO: 172985 - DNA, 201 bp, Homo sapiens
aagaaatgtataaatgtcaacagcaagacccttaccaaaagcataatgacagtttcaaaagaggatactataatttcctatttacaactttaaaagttttktatcttctatgccacttattttcccttattgaaatataaattacttggaggaaaaatacagaggtcttaaatgaaccatttgacaagttgtgacaaacac

SEQ ID NO: 172986 - DNA, 201 bp, Homo sapiens
ttatgtatcaacttatacaattacaacaatagaacacatttttttcagtattaagacataaactttattattgatttctgaataattcataaaagatggcwtttaagattttctgtttcagctcaaagttactcctctcatagaggttattacagaatccagtaaatcactgtgtatttctaaataagttataatggaata

SEQ ID NO: 172987 - DNA, 201 bp, Homo sapiens
tatttgatcagaatcaagaaaggctttttattagacattgaaaatttgtgggaaataaaactcatcatccacagagtgagaaaacaacaaatgttagtagycttaaaagttctgagcttgaatatttgagtagcataatttccaatatctttgtaaagaaagtgtatttatatttatttagcctataaaattaaaatatgt

SEQ ID NO: 172988 - DNA, 201 bp, Homo sapiens
tctgggctacataatttctgtcacaactattcaattgtgctgatgttgtacaaaggcatctgtagaccatatgtgaatgcataggtgtggctgtgttgatrtggctgtgttccaataaaattttatttataaagacaggcagccatctggatttagcccttgtgttgtagtttgcagacccctggttgagagcaaacatga

SEQ ID NO: 172989 - DNA, 201 bp, Homo sapiens
agttgccacctccacaccttctccatctccataggggcaatagagcaagccagagatttcatggcagaatgcaggaggctacacagagcagcaaggcttcycatggcctgcctaagcagaggctgatgatggcaggcatcagcttgtgggaggttaagcacttatccactctccccccacttttctgatttctcatttctt

SEQ ID NO: 172990 - DNA, 201 bp, Homo sapiens
atttagaatcttttccttcactttaaacttgaattagaattcaaaggtgagaaatattgattacataattatcaagcacaaatctggtgaaacagtagaamaaatgaaatcagttaataggctaacacaattaattgttattaattatttatttatgaaatacattataatactcattaatctaagcgttggtttgttcca

SEQ ID NO: 172991 - DNA, 201 bp, Homo sapiens
tcttaataatacccctaaaataataaaaattagaacattaaaaagtattcatatactttttaaaaataatgttgctcaacatgggcttagtactgtcagcrcattttagcataagaatttctcattcaggttttgtagtctgaattgacctagggaccaagctttttatatgactagactgtgaactgtgaactctctggt

SEQ ID NO: 172992 - DNA, 201 bp, Homo sapiens
ttcagacaaactagaatagccaaaacaatcttgaaaaaggagaacaaagtgggaagtgggagaatttgtactatctgccttcaagattttctataaatctrcagtaatcaagcaagtgtgtttgggtgtcagggtagacaaatagatcaatgtaatggatagaaagtccagaaatagacccacacatatacactcaattga

SEQ ID NO: 172993 - DNA, 201 bp, Homo sapiens
ccatgcagaaaacttctgttgcatcaaacagcagttaattcatgtatcatcacacagctgaatagtttattgggtttggagagaggaaaggaagaagaaawtctttgacttatttgattggaaaaaaaccctaatctcagtaacaattataaactccatccttgactgcgtgacccattatttttcccagtttaatttctt

SEQ ID NO: 172994 - DNA, 201 bp, Homo sapiens
ctgtcctgttgagggcttacgaacccactgtcttttcttaatacatttattcacccatgtgatcctgaaataaataagatcaggtaccaaaatgagtactrtcctcctggaaaaacaatacatgaggaaatctgagtaaaagtaaaatctcaattgaaaaacaaaatgaaatcaagggtatgaaaatctatgtcattacca

SEQ ID NO: 172995 - DNA, 201 bp, Homo sapiens
ccttcggctatgcttattactctgtatctaccagcaaatgtccattgcccttcatttcattgtaaaataaactcctgcctctctagaatgacccattggtrgaatgagtcttagtaataaaataaaactacatgttttcccctgcatttatggaattgagatgaattatttctctacttgccttggatggggtgactgcta

SEQ ID NO: 172996 - DNA, 201 bp, Homo sapiens
taaacaaatgccaacatatttccatatatttacacattgtttatgctgtctttagagtatcctggctttaaatcctcgaacacaaactcatgcaactctgygttccacttcggccaagaaattagacaagaaacattggaaaagaaatcctgataagaactgctttgtaagtaccactgatacactatttcatgctgaaaa

SEQ ID NO: 172997 - DNA, 201 bp, Homo sapiens
ccttgcattgagtgagttctcaccctgtaagttcacatgagacctggtttttaagaagagcccgacacttcctcctttctctcttgctctctctctcaccrtgtgacataccagctccccctcccttctgccacgattgtaagtctactgaggcctcactagaagccaaacagatatgagtgccatgttagtacagcctgc

SEQ ID NO: 172998 - DNA, 201 bp, Homo sapiens
tgtatggccctggacaaagctcctttctgaatattgagctcatcagtgagaaaacggctgcatattggtgtcaaagtgtcactgaactaaaggctgacttyccagacaacgtaagtgtgatttaacatctaaaacaagagaattggcataagttggtgaatgtttatttaaacatccaattcataggcttataaatattaa

SEQ ID NO: 172999 - DNA, 201 bp, Homo sapiens
aaatttttatatgatattaaaactaattgaccttgagcttcatgagagaaagggccatgatcatctctctgggtcacttttaccttccgcctgtttagcamcttgggtgctacctataaaagattcaaccaataattgtggaatgaatatttactggagggaatcagcaccgaaggctttctagcattacacgggctaata

SEQ ID NO: 173000 - DNA, 201 bp, Homo sapiens
ggcgctgcttcttacatgttctgtgatccttcagcgagttacttaatccctatatgcctcaatttcctcatatttaaaatgtggataataacatcagttgyctcatacaattattttgagaattaaaatgagttatataataatcacctgggggccaggcatttagagtagtgtctgtagtcaataaaagttaatttaaat

SEQ ID NO: 173001 - DNA, 201 bp, Homo sapiens
tgtctggggctcacagttctaggaactttttctgtgtaagtaggacaaaaatttttaatatcaattctgctcaagcaatgtaaactaggaaacataatttrctaaaaagtgatgttacatattggtgaattttctagcattttggttaaatctaaaaataattttaaaatatttataaaatataaatctatctataaactt

SEQ ID NO: 173002 - DNA, 201 bp, Homo sapiens
tcagtatccgagtttacaaatcactttagatccctcccatgcttcctcctgatcccagtcttgaggatgccctgagcctgtagccctggtgtgtaaaaagracgaggggttacaaccttctctggaatatgctagctaaataaaacgttaaataaatacattaattgatgtagagagagagaaaaaaagaggattagtgaa

SEQ ID NO: 173003 - DNA, 201 bp, Homo sapiens
aaagttgaatttttttaagaagtcatatattttaaaagtcaatttctgccattcagaagctcaagtttagtgtctgcaaagagctgtgggaaaaaaaaaawttttacgaaataccattgtcttagtaagagtgtaatatatatttatgtatatatgtgttagagtgtgcatatatatctacacacagttaaaattcataca

SEQ ID NO: 173004 - DNA, 201 bp, Homo sapiens
gtccattctttcctcacccaacattgtagccattcccagctcactattctatctttgacgtagtatctgtttgcaatagtggccctctatgggtccttcaratcagagaggcacacatgtctggggctcacagttctaggaactttttctgtgtaagtaggacaaaaatttttaatatcaattctgctcaagcaatgtaaa

SEQ ID NO: 173005 - DNA, 201 bp, Homo sapiens
gtattgctccattaaaaagttgaattatataccagatgatttcatagtgagaacagtataaaaggaaatcttgtttggtatccaaaaggaatattttttaycaaacaaggatggctgattcagctctccaccatataagtactctgtctaaaccattgattctaaataattctgtacctttctttggacagtatagatgta

SEQ ID NO: 173006 - DNA, 201 bp, Homo sapiens
tgttaaggtagttatatgatctaatttcaatttctaaataaatgggcaccatggctgttgtgtagcagacagactatacagcataagaatggggacagggyaattatttttaaagctaattcaggaatctaagcaagagacagttgtggtttagaccagtgtagtagcaatggaggaattggaggagggagaatgttgtgt

SEQ ID NO: 173007 - DNA, 201 bp, Homo sapiens
cattccagtttagtgaccaaggagaaaaaaaaaaaaagttttaactttcccagttccactgagggattttgatagaagcagagtacctaattcctatgatyagtgcaggtggggatactttctcatctttctgggcaagaagatagagtctgctttcaatggatagggaaaggagaacagggtagtgcttggctgctcaga

SEQ ID NO: 173008 - DNA, 201 bp, Homo sapiens
tattattttagtatcattaatcattatcctaagtagtgagacatgttagaggttgtttttacttttttttttctattgttgtttactggggtgctcattgytagcaggattgacagctcaaaatggaggtggaagctcgtgaattcaaacgtggaaataccttcttgtacagaaagatcttatagagatgagggaaattgt

SEQ ID NO: 173009 - DNA, 201 bp, Homo sapiens
actgttaaatcatagaaacaagaatgtaaaaatagaatttccttaagccaaagtgtggtatttattagtttaaatatgcagatatgttagtgaggcacccrgccttaaaagtggctgcaaaggggatctctctccatcctgtgtgtttgtctactttctcctgtctctgttttattttttcccagtgtagtaagctttggg

SEQ ID NO: 173010 - DNA, 201 bp, Homo sapiens
gggttatgtccttctttacttgagcattgtaaacttattcatggaaacatttaagtaaaaatcagatactcttctattgcagtagtggattttctattaastttgacaaatctcatcatttccttggtatgttggcaggaaaaacacagtcaagttgaaagaacctaaaatgattatctagttttggctctatttaaagag

SEQ ID NO: 173011 - DNA, 201 bp, Homo sapiens
aaacaataccaaggcctgaggtccattggtacttgaggtcagatctgactgattccaaggcttatactcttggacccagtgttccactgtacagtagacayacaaacaattgctttcctatacaccagcattcaaactagcaaaaacgaagtataaaacactcattcttaaataatatatgggactgaaagaaacaacata

SEQ ID NO: 173012 - DNA, 201 bp, Homo sapiens
ttactaccactgatattttcactgtctccacagtttttccttttccagaatgtcatatagttggaatcatatgctatctagccttttcaaattgaaagccstttaactttttgtttcttttcttatttaattattttattttattttttaatttaatttaattttaagttctggccattttttaaaggaaggctgtgtgtg

SEQ ID NO: 173013 - DNA, 201 bp, Homo sapiens
atttcagtaagaggaatcagatgttggggaaggataatcatacttctattaatgcatgaatccatgcatcttgtaattatgtgcatataagactctgcttmctaaccagacagcagtctcgcagtgttcctagggccaagccccatgcttagcacagttcaactgcttctcttttatgtgcatcatagtattttattaaaa

SEQ ID NO: 173014 - DNA, 201 bp, Homo sapiens
actttccaaaattaatatttttcttttttctttgtaattgagacaaagtctcattctgtcacctagactggagtgcggctcactgcaacctccactacccyctggcgcatgccaccacaactggctaatttttttttgtatttttagtagaggcggggtttcaccatgttggccaggctgacctcgaactcctgagctcag

SEQ ID NO: 173015 - DNA, 201 bp, Homo sapiens
cagatcctacagttttgcattcatactctccttccaggatcctggatgagccccaggtaaaacaggaaacgttctcttatccccctcacagggcatgcaayggtggtgtggcttgcttcttcattgtcccaaagctcaaacccctagggggagcatgcatatgggcaggtagtggggaatgtggaccccacggcagcatct

SEQ ID NO: 173016 - DNA, 201 bp, Homo sapiens
ggtaggtgttgcccacttcttgcattgtgctttcttggaggttgctgaaaaatcagaaggtcatgttgcaagagttttgtgccctttatgatcccaaattmttataactcatagctgatcaatattcctaatagttatgacagaacggattgaatatgaaagctcaagtgacagcacaggatgagagaatatcaagataag

SEQ ID NO: 173017 - DNA, 201 bp, Homo sapiens
ctgggtccctaagaagagacttgtcataggcacagagccactgcaaagagctattactagggcaatgcacagcagagtgcaggagtgagactactgcaggraatccccactttgacattacttagtagagccatgggagtgaggcagtccctggaccccagaactgtggtgccaccagcatgcaactgtagcctaggagaa

SEQ ID NO: 173018 - DNA, 201 bp, Homo sapiens
aagtgtgtggctaagcgactgtttgctaaagagattaatatggatagaagaaatccaggttttattcatcaagactatgggagaatgaccatggaggcatwtctgagatcttcaaggcaagttaggtaggacattgaaggcagggtttctagacaggggctcatatcggacctcagcattaggtgccctgcactatcttga

SEQ ID NO: 173019 - DNA, 201 bp, Homo sapiens
tgcataatggacattactgcagcaagtaatctgcattcctcagcattaccttttctagttgtgttgtcaccgttgtttgattttcataggaatctattccmgataagattagttgcaggcagacactgggctgtacctcatcaaaattttcaaataggccaaatttgcctctagcttgcttttatcaaaactcttctcagc

SEQ ID NO: 173020 - DNA, 201 bp, Homo sapiens
agggaagcttggttactaagtagatacctacactctcaactgttggtataaagcgctgagaaattggttttatttacactgtaagagtaattttttttttwaaaaaaggaaaagcatggcttatatctaaggaaacactgttgtttggagaggtaatgaatggcaattagcaggaatcgtcatgtctcccattttgctttt

SEQ ID NO: 173021 - DNA, 201 bp, Homo sapiens
ttcatgagagatctgcccccatggcccaaatataacccactgggccccacctctgacagcggggattacatttcaacctgagatttggaggggacaaatayacaaaccatatcatgttctaggttccttgaatttagatgtatatatccaaattcatatttattttctcatttttattctttaaaatgtaagctgctaaag

SEQ ID NO: 173022 - DNA, 201 bp, Homo sapiens
tgttgtatgcatttgtctcccctagattgtaaagtattttgctttatgtttttaaagaacagggatagcatattacatatctctaaatctgtattatccartatagtacctaaaacagttatctattatgttatcctggacccagtatactgtactctcaattttcctccaagtacatagaaataagaaagtcagtgtcaa

SEQ ID NO: 173023 - DNA, 201 bp, Homo sapiens
agcttctgatcatcggggaaaacaaagggagagcagatcagatgtgtcacatggcaagagagggcacaagagagatgccaggctcttttaaacaagcggcwcaggtgtgaaataatagattgctagaactcatgcattaccacagggatggtaccacacccttcatgagagatctgcccccatggcccaaatataacccac

SEQ ID NO: 173024 - DNA, 201 bp, Homo sapiens
cagtggtgatatcccctttatcattttttattgtttctatttgattcttctcttttttcttcattagtctacctattggtgtgtgtgtatatatatatatwtttttttttcaaaaaaccagctcccggattcattcatttttttgaaggatttttcgtgtctctatctccttcagttccgctcttggagttatatggcact

SEQ ID NO: 173025 - DNA, 201 bp, Homo sapiens
aaatgtatggtgtgtggataaaagaagagagatcagttgaaagaagggatgatttgtttacagtgggggtgaattaaatgtggttgggcagagagctctgkgaagcagactcattgtgcacagttaccagcttgtctgggtctggtgagacaaaacatgcttacatgcaacaagttgcatgaagcaggtttattacttaca

SEQ ID NO: 173026 - DNA, 201 bp, Homo sapiens
ttttgccaaatgggaagactataaggaaaaacaattttattttccaactcagcaatccttggcctctctatattccctctaaaatctgcttgcaaatgggkgagtgctgttttgattctctccttatcaatataccttatcacatgcaataaaaccaactgacattctgaatataatatctaaaaacttatcttaccatac

SEQ ID NO: 173027 - DNA, 201 bp, Homo sapiens
gtgtgtgtgtgtttgcaaaattatagagacaataagggcaaatacttgaatataacttcttaaactgttattggaaaaatagattctaaattttaggttasttgccagcatgtaatcagttatatgcctgattcttggatttaaaaatccttgtgaaaccatgtcaaaattattattttgttccaaatctaaaaataccct

SEQ ID NO: 173028 - DNA, 201 bp, Homo sapiens
tgactccctgaggccttggtaacaattgaacactgtgttcccaaatttatttcctgttattctgcagtgaattatgtttgctgaagactgaacatcctttktactttccataagagaacatttaacagcctgctctagctttatgagtaagattatgtgttttctcctttgtggggaaattcatgaggaatctttactggc

SEQ ID NO: 173029 - DNA, 201 bp, Homo sapiens
gtcacctctgtatatgcctatgtcctaatttcctcctgtttttagggcaccagtcatgttgaattagggcccactctaactaatgaccataattttaattmtttctttgaagatcttatctccaaatacagatgcattgtcaggtatttggagttaggacttcagcatatcaatttgaggggatactactcagttcacaac

SEQ ID NO: 173030 - DNA, 201 bp, Homo sapiens; identical to SEQ ID NO: 31060

SEQ ID NO: 173031 - DNA, 201 bp, Homo sapiens
caataccctctatttctgtttgcaggctatacagtttgatccagaaacccacctgcccaccataaccgacacttgtacaggctgtactctgtgtctcagtktttgccctattgtcgactgcatcaaaatggtttccaggacaacaccttatgaaccaaagagaggcgtacccttatctgtgaatccggtgtgttaaggtga

SEQ ID NO: 173032 - DNA, 201 bp, Homo sapiens
agaaaaactttagtaagattggggctcaaaattattgtacacagatcaacagcttttatatatgcaaacagtaacccatcagaagatgtagtaaggaaagmccatatttataagaacaacaaaagttaaattattttgttataaacctaacatatcattaagcctcatgaattaaaataatatagcattagatcatgaaaa

SEQ ID NO: 173033 - DNA, 201 bp, Homo sapiens
tttaattgaatacttcattaaacactagctcaaattttaaaggcaatggtgtccaatttctgactcaattgatataacgtcagccttaaatatctttcttktgaaaaactcaaaatggttctacttttaaaaagtctcctctattccctctaagaatgtacgactccatatcacgtcacattaacttgggattttgttgtt

SEQ ID NO: 173034 - DNA, 201 bp, Homo sapiens
cctattgatctggtggacattagtgtagaaatggccggattgaagtttataaatccttttggtcttgctagcgcaactccagccaccagcacatcaatgaktcgaagagcttttgaagctggatggggttttgccctcaccaaaactttctctcttgataaggtaagaaaatattattgaagtcatatagaaatgtctatc

SEQ ID NO: 173035 - DNA, 201 bp, Homo sapiens
gaggaacaccatttgcttttttatttcaacctcgcaacataggatgatctgggcaggtagcatgtcttctgctgtgtcctgttacttacattgggatggakgtttaatagccattcactcagtatactactagttggttgtactttccttaatttgaatgttcttcagattttcataataatttgtccttcattctactaa

SEQ ID NO: 173036 - DNA, 201 bp, Homo sapiens
tgcttccttaatgtaatagcagcagtgggcaaaaaaccgtgtcactcccgacagctcttttctgaccttggtctcccagccccacctactaaaaacatgakagcatctggatgagagctgattagagcctggaagctgaccttgtgtggggaccaggggagcatgacagcagtagttgccacctccacaccttctccatct

SEQ ID NO: 173037 - DNA, 201 bp, Homo sapiens
ttcaaactcagttggctcctggagcaagagctgctaatatcctgtatctccagcttattttggctccatggaagaggagatgcaaatgttttgtggttcaygatggaaagctggtatgcaattagaaattcttcattctttcattcaacatggtatttattgtctttcatgtaccaggctctttgctaggataaaagagta

SEQ ID NO: 173038 - DNA, 201 bp, Homo sapiens
tcaccagaaagagatgactgttgtattgttttctaaaatttccacttatagtgattttctaatcttaatgataccttcaaatgtgtatgtatcacttttttatagttttaaattaatttatttaatgacctcagactctttatctgtgattgataattaaagggtattaggctttataagaactatttatagctaagagtt

SEQ ID NO: 173039 - DNA, 201 bp, Homo sapiens
tctatgagatttttaaggcagagtttattttaactgtagctcacagcactatttttgtacataatatttaacaaatgtttggttagatttatgcatagagsgtgctcttaccacatggctctgaatgtttctggtacatccaataatttaacagtgatgaaatgagataatattttctaggtttatcactggccaaagtgg

SEQ ID NO: 173040 - DNA, 201 bp, Homo sapiens
tgtcattgattgcatctgtaagagacaaagaattggaatgagtattagcatctacactgattcctctggccatcctcccttgatggataattttgtcttgmggacacaaaggcatcatgtcctttatccatgggcatttgcacaattgcttccagagtcccacatcacaatagtgagtttgagcaagttctgaatcaaaag

SEQ ID NO: 173041 - DNA, 201 bp, Homo sapiens
aaataagaaacaaatgccaacacattcattatgctgtttaacgtctataccagaaaggttccaatcactttgaaaaaggtcctttcactacttctactctmaatcactttgtcatgcttctgagaagaaacattttgaactgaaatttgtaatgaagattaaaccctatgatgttttaaaaatgtgggaaacatttttggt

SEQ ID NO: 173042 - DNA, 201 bp, Homo sapiens
aaccttctccaaggcccacctgtgtacttccccataaagtgcagttttagcaagaaccctccattatcaatatctgatgacactttttatcccccaaatgmgagttaaactccaaatacagaatgcggaggtaggaagtaatagccaaggagtaggttgcgggttagtagataaaatattactgaaaggaaacatcaaggt

SEQ ID NO: 173043 - DNA, 201 bp, Homo sapiens
gaaggtatagatctttaggtaaacacaaatgtcagtcatttggccaggcagaaataagagtaggtttatgttggctcttgagataacaatcagaaaaaaaraagtgaaggtcatttttgtctgatctttaagacttccaatatcagaaaacttaccttttgatggatagtaccaacaaatatttaacttcataaacagata

SEQ ID NO: 173044 - DNA, 201 bp, Homo sapiens
atgaatgatattttattttatttttttttattttattttattttattttattttattgagacagagtcttgctctgtctcccaggctggaatgcagtgacrcaatctcggctcactgcagcctccacctcctgggtttaaaggattctcattcctcagcctcctgagtagctgggattacaggtatgtgttaccatgcctg

SEQ ID NO: 173045 - DNA, 201 bp, Homo sapiens
tttatttatttatttttattttttatttttttgagatggagtcttgcattgttgcctgggctggggtgcaatggcgtgatctcggctcactgcaacctccrtctcccatgttcacgcgattctcctgcctcagcttcctgagtagctgggattacaggcacacaccaccacacccggcttattttttgtgtttttatagag

SEQ ID NO: 173046 - DNA, 201 bp, Homo sapiens
actaaataatattcattctattctctctttctctttcttacctttcttccctgctacttccatgtgtgtgtgagtaggggacatgtctggcctcatttacrttcaatataatttttaaaataatattgtcacatacatcagtagaaatttcatttttattgctagtagtttacattctactgattgaccaaaatgtgttta

SEQ ID NO: 173047 - DNA, 201 bp, Homo sapiens
atggcatgaatcgtcacatatcttatatgatttgtatctacacaggcagaaagattgactgtcttctcttaaacagtaattttatgatgttaaaataaaakactttgatagacaccctatcactttatacaccccaagaagaaccacctgaatgaaggttgtaccttggtttggcctgaccagagtcattgtctttgggga

SEQ ID NO: 173048 - DNA, 201 bp, Homo sapiens
tctaaactacatcatgaaaaattgcttcaaggtaagcaagtccttaacaaacattggaagatgtttttcaaagaaatggcatgaatcgtcacatatcttayatgatttgtatctacacaggcagaaagattgactgtcttctcttaaacagtaattttatgatgttaaaataaaatactttgatagacaccctatcacttt

SEQ ID NO: 173049 - DNA, 201 bp, Homo sapiens
aatgttaatttttcataatagatataacacaatagattaataatgtactgtgatttacataatacatgctgtaagtatatgcagaagatactttgaaaagygattaacaaactactcataccttttgcatttaccagtaaaacttaaaatgaatcaataaaagagaaaacactcaaaaaaatattttgtggtttatattta

SEQ ID NO: 173050 - DNA, 201 bp, Homo sapiens
aaaaagagagaggctttgtttctgtttcaacatgccagcattttttcattagacattaaccacagattattactcttacccttgccagaaagcagacgtcygtcatcaggaagagaatccaaaccaagtgtgaggaccacagtgccccagatgtgctagaatttcccctgggaaataaagtcttccttcagcagctggctt

SEQ ID NO: 173051 - DNA, 201 bp, Homo sapiens
tattactccaaataccacccagagcaatactttgataattctttcacgatctgttctatgttcaaacttaatttgcataaaactgtatgtttttttttttwaaaaaaagagagaggctttgtttctgtttcaacatgccagcattttttcattagacattaaccacagattattactcttacccttgccagaaagcagacg

SEQ ID NO: 173052 - DNA, 201 bp, Homo sapiens
ttagactactaaaagatctggtgtttgatggtggggtagagttaccatgggaacagaaggatacaaatgagcatgcttggggtttgtagtttttctcattkgatcttcacaaccatccttccctatagatattgttatttctattttgaagtgacctctgggcaactacgctggttttctcttcacactctatcctcacct

SEQ ID NO: 173053 - DNA, 201 bp, Homo sapiens
atatgtggtaagaggccttgccttccatatggcaataaagaagagcaagatgcagcatgctccacaggacttctcaatgctagtcatataaccctcttggratgattttctttttcctgccatcagaaaacctaaagctgcttacttcttttccttgagttgatgacggggcatagtaaagcacagaattttgtgactgag

SEQ ID NO: 173054 - DNA, 201 bp, Homo sapiens
agcatgcttggggtttgtagtttttctcatttgatcttcacaaccatccttccctatagatattgttatttctattttgaagtgacctctgggcaactacrctggttttctcttcacactctatcctcaccttagtctatttcagagaattctccttctagaaatataagggttaataggttaacacaagagcaagtattg

SEQ ID NO: 173055 - DNA, 201 bp, Homo sapiens
agccttagttagattgttacctggataaggcaacaaatactcgtcaaaagcattaatcaatagatatttctgtttttctgttagctgagaatatttattgrtaaaaaattggcaccgcagcacaatgttatattgaaatcaaagtatttctgtccaattatgaaagaaatgggaaaaacatgtttattattattattattt

SEQ ID NO: 173056 - DNA, 201 bp, Homo sapiens
aaaacccttacatttcatacaactatttgcatatagagatttttttttctggattttgtcagtaacatttaatttttttaatatggcagcaggttttagtycagatcttccaagaaaccgttgccaagatgtgattaaacatgcatggatttgattaggtgaaataattgtgggagacaatatggagggtgttgaggagga

SEQ ID NO: 173057 - DNA, 201 bp, Homo sapiens
atatagccattatggaacctatccccattgttcaacacctaggttgtttccttatatctgttatttactaacactactggatgaatggaaaaatagtattktctgaaattgaaaatctaaataacatatttgttaggagggaatatgatgagataaaagagttgaggttaaagtgtaagagcaaagcatctacatccaaag

SEQ ID NO: 173058 - DNA, 201 bp, Homo sapiens
tcaacatacacaaatcaataaatgtgataacaccgcattaacagaatgatgggcaaaaaccatatgccaaaccaaagaaataaaaggcatccatatcagawaacaagaagaaaaattaactatttgcagaggacatgatcttatacatacaaaaccctgaaaactgcacacacacacacaaaaactggagatctaataaac

SEQ ID NO: 173059 - DNA, 201 bp, Homo sapiens
tggaatattgaccatttatagtaagcaaagtcacacctggaaatagatctcatagatccagtcagtcttttgaaaaaaaaaaaaataaaaaattcctaagyattgagacaaagtatgatacaatttatcgatggaaattcttctttataaaattagtttaatgaggatttcatttaaaaatggcagaccaaatgcaagtgt

SEQ ID NO: 173060 - DNA, 201 bp, Homo sapiens
atgaaatgactcttagcactttgaaagaaaaaggctacaaagctgctttcattggaataggtgagtagtttactcttaaatatatttatttataatgtatytttttatttcctagcaatatccagaagaatgactgccttcagacattttcgtgatgaaagttatatttgttcagggaataacagatagaaatgattggcc

SEQ ID NO: 173061 - DNA, 201 bp, Homo sapiens
tttgcagattttcaaagtatatttctaagcattagtcttaatttttatcagttacttcattgagtttccatttatataaaagggtacctaaggaagataartcgtttttactcatccaaacagcaccttaaaatgttgttttacaaaacatagcaccaatttgtgtggacagatattctcatgacttgctatagctatagt

SEQ ID NO: 173062 - DNA, 201 bp, Homo sapiens
gagagaaaaatccaactgaaaagagaaatgcacacaaaattaggaatactaggaaagcattatgctttaatacagaggaaagggaacagaactaccatttrtggccattactctgaaaggctatgattccttctgccaaaagagagttctcttccattcagtattgattaggcttttactacagtcagaaagaagcacttt

SEQ ID NO: 173063 - DNA, 201 bp, Homo sapiens
gagataccatctcacaccagttagaatggcgatcattaaaagtcaggaaaccacaggtgctggagaggatgtggagaaataggaacacttttacactgttsgtgggactgtaaactagttcaaccattgtggaaagtcagtgtggctattcctcagggatctagaactagaaataccatttgacccagccatcctattact

SEQ ID NO: 173064 - DNA, 201 bp, Homo sapiens
tgagacagagtttcactattgttgcccaggctggagtgcaatggcacgatcttggctcactgcaacctccgcctcccgggttcaagcgattctctggcctyagcctcccaagtagctgggattacaggcatatgccaccacgcccagttagttttgttggtcaggctggtcctgaacttttaaaaagtgattttagtctca

SEQ ID NO: 173065 - DNA, 201 bp, Homo sapiens
ctttagagacaatacagaatcgctggagtccacattcagtttcctctcttgttagcaccttacattagtatagtatgtttttgttacaattaatgaaccaraattaatacgttattattaactaaggtccacacatttgctagatttccttagtttttacccagggtcggttttacctagagtctatccaagatcccaagt

SEQ ID NO: 173066 - DNA, 201 bp, Homo sapiens
gtatatctcctaatgctatccctccccccctccccccaccccatgacaggccctggtgtgtgatgttccccttcctgtgtccaagtgttctcattgttcarttcccacctgtgggtgagaacatggagcatccctttttcttattagcttgatctctttagcagcccctaagtggctccaggtccccacagtggtgttctt

SEQ ID NO: 173067 - DNA, 201 bp, Homo sapiens
aaatatcattcggctttggttgcattcattccaaagaatcaaagttgtattacagcatgaaaaataaaatatgactcttcttccattccctcccaacaacmctctgaagccggttgagtttttgttccatttttcacaaggcagaggccctcgagtttcccaggtcaaagatttggtcagtggcttctagacctgcacttt

SEQ ID NO: 173068 - DNA, 201 bp, Homo sapiens
agtcctcctacctcagcctcccaaagtgctgggattacaggtgtaagccactgttctagtattacattttaatgcaacatgagaatggtatgaaatataawttcccaaatactgattcaatagtatctagataagctaatgtgtctgaaaaaaaaaattttcctggaaaataactcctaccaatggattgtcttaacttca

SEQ ID NO: 173069 - DNA, 201 bp, Homo sapiens
tctcagctaagcagttctctttattgaaagacacttctaaaaatgtgggaagataagacagaagaggatacttttaatgtatatacccaaaatggactttwtgaaaaatatataattttaattattgtagattcattttggtaatttcaaagattttaattataacaacatataactgtgtgtgtttgttaaaaggatctt

SEQ ID NO: 173070 - DNA, 201 bp, Homo sapiens
caaactagcaaaaacgaagtataaaacactcattcttaaataatatatgggactgaaagaaacaacataactacttcagcatagagaagcagctttgaatrtatgacaaaacacaatatgttcttatagtagaagactcatagtaaatacagcgtttatttcaaattgagttatattaaattgagttataataaaagactc

SEQ ID NO: 173071 - DNA, 201 bp, Homo sapiens
ccctgctttatcccttgctagctgtataaccctgggcaagctttatcttaatctcccctgtggttgtttcctcatttgtaaaataggaatacatatggttstcatgcagattaaatggttagacttcctagaaaaagtacctaacccagagtcactactcaatgttaactggtttactataattaatacacacacacacac

SEQ ID NO: 173072 - DNA, 201 bp, Homo sapiens
gacaatgagacaacccaaaatgaattcatgatgaagtagcaggatgggagtgggggagcagaataatgaatatacatttatattcataaatgaaattgatytaaaacttttatttgatgctttaaaaaattgactagcaattaattttatattaattgctgggaaattaaattcaacagcacattaaaagatatagccatc

SEQ ID NO: 173073 - DNA, 201 bp, Homo sapiens
tgaaagagaaggtgacaatgagacaacccaaaatgaattcatgatgaagtagcaggatgggagtgggggagcagaataatgaatatacatttatattcatraatgaaattgatctaaaacttttatttgatgctttaaaaaattgactagcaattaattttatattaattgctgggaaattaaattcaacagcacattaaa

SEQ ID NO: 173074 - DNA, 201 bp, Homo sapiens
cttttatacctactttaaggcaagcaggattgctcttgttctgatgccataggatagaacctacagtgaaggaagcctcttcatttctcttcgtttctgcragcaagcagttgttggaagcaatgcctaatgtttaagaggtctaattttcagaagccatgatcttcaagtagaatcagagacttcaagtttcctgtctat

SEQ ID NO: 173075 - DNA, 201 bp, Homo sapiens
ctgagggtatgtatatatgattgtatacatcaaagagcaattataaggatactgtaataagtggttcagattttattttttgtgtttgttttctaaactaygaatagataaaaatagagaaatgaagcacttggcacttttatacctactttaaggcaagcaggattgctcttgttctgatgccataggatagaacctaca

SEQ ID NO: 173076 - DNA, 201 bp, Homo sapiens
tgtataatgttggggaaattataataattagtcagtgaaaaaattttatattgaacaggtgattttaaaatattttaatttttacttcaagcttggaagcygtaaggatattgagctgttatgtttttcgtaacacactatgacaactccagccataaaataagtgatttgtagtaaattataatagtgggtataaatgca

SEQ ID NO: 173077 - DNA, 201 bp, Homo sapiens
ctatagtttggctcagagtccacaccatatatatatatatacacacacacacacacacacacaaactctctctttctactgtgtatagatggatgataaayagataatgtaggaaattagtaacagtgtatttcctatgtcactgccatcactaggatatttcattttataaccatttaggtgaggtggaataaactctgg

SEQ ID NO: 173078 - DNA, 201 bp, Homo sapiens
aactgctttccacagtggctgaactaatttacattctcaccaacagtgtataagcattcccttttctccacaacctcaccagtatctgttgtttgttgactttttttttttttttttgagacagagtcttgctgtgtcacatttgttgacttcttaatagccattctgactggtgtgagatggtaaccctttgtggttttg

SEQ ID NO: 173079 - DNA, 201 bp, Homo sapiens
aatttttcatctgggactcagctgccatattcatagatgcttacagctcatggacagactggagcaagggcaaaggtttaaagcatagatcaaggtctacrtcctttccttaggtattttaagataactattgtcccgcagataaatggtagaaccaaatagtatttaagagccaacaaattcatgggtacctggatatta

SEQ ID NO: 173080 - DNA, 201 bp, Homo sapiens
ggatgatggcctaaatttgtcactttttatctagacatttatgtggtatgtagacacagtcagagtatagtttatttatttaactgaattcaggaaggaaraaagaatgatatataaagtgcttatattatcttaaaaatcccattcttcttactattaaatactatgtacatcaccaaaaattgagtaaaatgttgaatc

SEQ ID NO: 173081 - DNA, 201 bp, Homo sapiens
tcgtcttttcacattcttcttccttgatcttgttaagctatacttgcaattactatgtttagatttgtaaattcatgcttccgaagagtatgactacactmcacttttttccaatttaaacattttctattgacttcctgttatacataactatcattagttttttctatattttacctgatttgttatgagtgtatatgt

SEQ ID NO: 173082 - DNA, 201 bp, Homo sapiens
gtcatttttagtattccaatttaaaagttgtattaatatatttggttttatttttctgtttattatctcataatagaatgtaaaacagataaaggaaaacsctttggtattattaactcactttttcaatagctgtgtaattctcagagtatggattatatacagtattatttgcttaaccattacttttttgatgaacac

SEQ ID NO: 173083 - DNA, 201 bp, Homo sapiens
ttccaaaattgttctgagtagtgcgaacatcttcccaggtgattattttgaaaagaccacttcattttgatgtatacactttgatatttgttttaaaattktttcaatgttttatagactttggtactaagttagagatctagaaaacctggactgtactgggaatttagagagctcttagaccatagcaaaatatattat

SEQ ID NO: 173084 - DNA, 201 bp, Homo sapiens
catagcaaaatatattataaagagtattaatgatctattgaatattatcttctattttttcaaaaagccttttccatatgttaatttatataattcttatraagctgtgggtatatcaataagcatttttaaccccatttatagatttgcatattcacagtttgtaatttccttgggttcattttatcagttgactttcca

SEQ ID NO: 173085 - DNA, 201 bp, Homo sapiens
gatactgtcaggagatgctgcacaacacactaccacaaatacaatttaaccacttttctgattgtgaggttaaaactttgggctggatcttcagttgcctrggcctagatcatgtactggttttttggttgcaagacagtagaaagagtaagaccctcttttcaaagacttgtgaaatggggatagttcctgtgtcctacc

SEQ ID NO: 173086 - DNA, 201 bp, Homo sapiens
aacaagaattcgtttgaaacattaaaaatatgtttgaggatgtaagctagtttcaaaattttaaccatgacaattgatttccccgtaggtattcaaagcartgagtatcccacagatcagaaatccttcgctgcctcccccagaaaaaatgtctgaagcctattctgcaaagattgctctttttggtgctgggcctgcaag

SEQ ID NO: 173087 - DNA, 201 bp, Homo sapiens
aaaaacgaaaaggctcagagaatgaacaccaagagttgtccagctaatacagcctctaccagggttgatatccaccactactgccatcatgggatactgtyaggagatgctgcacaacacactaccacaaatacaatttaaccacttttctgattgtgaggttaaaactttgggctggatcttcagttgcctaggcctaga

SEQ ID NO: 173088 - DNA, 201 bp, Homo sapiens
gagctcactttgtaaaggacagatacaaggaagggggcagggcagtctcgcctgcagggcacagccctttgactaatcagcgcaggccatcttcagtgaarctgtgtcatcaacaaagtgcaacagagaagatcagtctcacaaatgctcttctgaatagtagtcgagtgggtggcccatcatatgctgcctttgagaaaa

SEQ ID NO: 173089 - DNA, 201 bp, Homo sapiens
ttattggcaggatacaagatggcttatggaatcaaagaaggcaggaacagcaggcttagaaaatgggcaaaaaacgaaaaggctcagagaatgaacaccargagttgtccagctaatacagcctctaccagggttgatatccaccactactgccatcatgggatactgtcaggagatgctgcacaacacactaccacaaat

SEQ ID NO: 173090 - DNA, 201 bp, Homo sapiens
tttattgaaatcagaaacctgggttttacctgatttgcaagaatttttgtcactcaatcattagaatcaatcattttctcaaaaccaacaccaatattttgaattattttgtttggtatccccaaatttttatattctatgtatatgttattgtaatatttgagatcaatgaaaaatatgctttttttcgaaagtaaggga

SEQ ID NO: 173091 - DNA, 201 bp, Homo sapiens
tggtctcctgcttggactcttatactctcaccccatagacatatataagagttatgtttctaaaacatggattaaacatatggccttccatgttttcttawtgcctaaaggataaggcacaaaatctttcaaaaattgaccctaaactctagctgaaccatgtggacatgtctcctccctgcttccttcatatgcactagt

SEQ ID NO: 173092 - DNA, 201 bp, Homo sapiens
ttattgaaatcagaaacctgggttttacctgatttgcaagaatttttgtcactcaatcattagaatcaatcattttctcaaaaccaacaccaatattttgaattattttgtttggtatccccaaatttttatattctatgtatatgttattgtaatatttgagatcaatgaaaaatatgctttttttcgaaagtaagggaa

SEQ ID NO: 173093 - DNA, 201 bp, Homo sapiens
tgccctagtcccacctgagtttattttttggagtaggcttttgctatatgagcacatctgaatttactcagccattaagtgtcttaggtgcatcctttctrgagagttatttagccacataaagttttgcacagcctttggctgaatgagaatgccaaatgctaaaactttgcaatcagagatatcattaagctttctaaa

SEQ ID NO: 173094 - DNA, 201 bp, Homo sapiens
tattgaaatcagaaacctgggttttacctgatttgcaagaatttttgtcactcaatcattagaatcaatcattttctcaaaaccaacaccaatattttgaattattttgtttggtatccccaaatttttatattctatgtatatgttattgtaatatttgagatcaatgaaaaatatgctttttttcgaaagtaagggaaa

SEQ ID NO: 173095 - DNA, 201 bp, Homo sapiens
agtattcttttcccatctcaagtcaagattgtccctccacttgtttcacagtctgtgaatctcagaaccgaagtattttttagctacatggatagaaacarctacggaggttttaaatctattgattgctttgttaggggagaatgcaattcaatatttctctcttaccacaaatacgacaattattttgaaaatgttgcc

SEQ ID NO: 173096 - DNA, 201 bp, Homo sapiens
agtgtcactcagtcacccaagctggagttcagtggtgtgatctctgctcactgcaacctccacctcccgggttcgagcgattctcatgcctcagcttcccragtagctgggattacagactcacaccaccatgctggctaattgctaatttttgtatttttagtagagatagggttttgccatgttggccagtctggtctc

SEQ ID NO: 173097 - DNA, 201 bp, Homo sapiens
cttaaaggatacctggaatgggggctgagttagtattcttttcccatctcaagtcaagattgtccctccacttgtttcacagtctgtgaatctcagaaccraagtattttttagctacatggatagaaacaactacggaggttttaaatctattgattgctttgttaggggagaatgcaattcaatatttctctcttacca

SEQ ID NO: 173098 - DNA, 201 bp, Homo sapiens
tgtgtctgggtgtttgttccttgtacattatttgaaatcactctcaaagacctttctttagtttcaccctttttatataggcttgtgatatggtttggccrtgtccccacccaaatctcatcttgaactgtagttctcataatccccacatgtcatgggagggacccaatggcaggtaattgaatcatgggggcagttacc

SEQ ID NO: 173099 - DNA, 201 bp, Homo sapiens
aaatgagaaggattccttaaaggatacctggaatgggggctgagttagtattcttttcccatctcaagtcaagattgtccctccacttgtttcacagtctstgaatctcagaaccgaagtattttttagctacatggatagaaacaactacggaggttttaaatctattgattgctttgttaggggagaatgcaattcaat

SEQ ID NO: 173100 - DNA, 201 bp, Homo sapiens
gtccttgcaatagtttactgagaatgatgatttccaatttcatccatttccttacaaaggacatgaactcatcattttttatggctgcatagtattccatkgtgtatatgtgccacattttcttaatccagtctatcattgttggacatttgggttggttccaagtctttgctattgtgaatagtgccacaataaacatac

SEQ ID NO: 173101 - DNA, 201 bp, Homo sapiens
tgtttaaatatttagtgtttaaaaagtggaaaatgagggaagctgaaattatagcaactgtttagttttattgaggaaaatatcacattatgtgcttgacrggaagtaatatcataacaaatagtttttaaaagcgctgaagcagaattagctgatttcaaatgcagtgttctttattcattcctgatgccgatccagttt

SEQ ID NO: 173102 - DNA, 201 bp, Homo sapiens
tggttttgatttgcatttctctgatggccagtgatgatgagcattttttcatttgtctgatggctgcataaatgtcttcttttgagaagtgtctgttcatrtccttcgcccactttttgatggggttgtttggttttttcttgtaaatttgtttgagttcattgtagattctggatattagccctttgtcagatgagtagg

SEQ ID NO: 173103 - DNA, 201 bp, Homo sapiens
catgcctgtaaacttggtagcataataatacaaagattatgagaattagaggtaacaaatataaaacatatagagcagtgagtggccccttatgagcactsagtaaatatttggtgtgtgattgttgttgtggtggtggttgttatatagaccttaatttgagagagagagactatacctcacaagatagctgtgatgcag

SEQ ID NO: 173104 - DNA, 201 bp, Homo sapiens
ttagaatggagtacagttcagaacagagggcattggaggcccaacacacctggaagaagtttcatctgacctctcaatgaatgatattttattttattttwttttattttattttattttattttattttattgagacagagtcttgctctgtctcccaggctggaatgcagtgacgcaatctcggctcactgcagcctcc

SEQ ID NO: 173105 - DNA, 201 bp, Homo sapiens
ctgcagcctccacctcctgggtttaaaggattctcattcctcagcctcctgagtagctgggattacaggtatgtgttaccatgcctggttttttgtttttytgtttttttttttcttttttttacttttactagagacaaggatttgccatgtgggccagggtggtcttgaacgcctgacctcaagtgatccaccctcctc

SEQ ID NO: 173106 - DNA, 201 bp, Homo sapiens
cagcctccacctcctgggtttaaaggattctcattcctcagcctcctgagtagctgggattacaggtatgtgttaccatgcctggttttttgtttttttgtttttttttttcttttttttacttttactagagacaaggatttgccatgtgggccagggtggtcttgaacgcctgacctcaagtgatccaccctcctcagt

SEQ ID NO: 173107 - DNA, 201 bp, Homo sapiens
acacacccacaaataatgttttaccagctccctgggcatcatctcttaacccagtcaagatgatacataaaattaaccgttacaccatagaaccctttttyaattttctactataacagctttgaaaataatgatgaccttagaactcatctagttcactttcctaccactaccagaatcccatctccaacattctggatg

SEQ ID NO: 173108 - DNA, 201 bp, Homo sapiens
ccaaatgctaactgcttctggaaacactctgacaaacacacccacaaataatgttttaccagctccctgggcatcatctcttaacccagtcaagatgatayataaaattaaccgttacaccatagaaccctttttcaattttctactataacagctttgaaaataatgatgaccttagaactcatctagttcactttccta

SEQ ID NO: 173109 - DNA, 201 bp, Homo sapiens
agtctaaaacagtttatgaacccatccaaccttggaagtttgataaacatgatccatgatatccatatgttatagcctaatagactcagaatgttctatakttaagtaggatggaaagagttataatttatgactcaatctgatgtttcattcacagacaatgtgatgccacctaggcataaaccctaaggaattctaatt

SEQ ID NO: 173110 - DNA, 201 bp, Homo sapiens
gcagcagagaaaaatgttaacgctaaaatggggacattgttgacctttgtggtcagtgacatcaataccctctatttctgtttgcaggctatacagtttgwtccagaaacccacctgcccaccataaccgacacttgtacaggctgtactctgtgtctcagtgtttgccctattgtcgactgcatcaaaatggtttccagg

SEQ ID NO: 173111 - DNA, 201 bp, Homo sapiens
aaggatgtcctaatacatttttcctatctactgttggctctgccttctgggctactgattatctctgggctactgattttctcctctgagttttttttttkttgttgttgtttgtttgtttgttttgtaaatggctaatgatggcccctgttgacagctgagtagttttgtcagcctgttcctgcccaaataaagttatag

SEQ ID NO: 173112 - DNA, 201 bp, Homo sapiens
ccaagtagctgggactacaggtgcccgccactatgcccagctaattttttgtatttttagtagagacggggtttcaccatagccaggatggtctcgatctmctgacctcatgatccacgcacctcagcctcccaaagtgctgggattacaggtgtgagccaccacgcccgacatacatgcatatttttaattgcaatggag

SEQ ID NO: 173113 - DNA, 201 bp, Homo sapiens
ggtaaggatgtcctaatacatttttcctatctactgttggctctgccttctgggctactgattatctctgggctactgattttctcctctgagtttttttkttgttgttgttgtttgtttgtttgttttgtaaatggctaatgatggcccctgttgacagctgagtagttttgtcagcctgttcctgcccaaataaagtta

SEQ ID NO: 173114 - DNA, 201 bp, Homo sapiens
gagaagagggcttcttcagaggagaacccagagagagcccagtgcccacaagaaaatgcctgggtgagcttattatagttctggttgcccaagcaaattayattttacctacgtgaaaataatagtaatagtgagaaaaatgttcttgaacatttgaatggtgctttcattcattcatttattcatccatccagcaaatgt

SEQ ID NO: 173115 - DNA, 201 bp, Homo sapiens
tcagggtccatttatgctccttggtaaggatgtcctaatacatttttcctatctactgttggctctgccttctgggctactgattatctctgggctactgrttttctcctctgagttttttttttgttgttgttgtttgtttgtttgttttgtaaatggctaatgatggcccctgttgacagctgagtagttttgtcagcc

SEQ ID NO: 173116 - DNA, 201 bp, Homo sapiens
acaaatagttgaaacagcaaatgtttagtctatgactctcagagatttagattatttaatttcagcctcttttgtgtttttcaatgtatccatcaacaatrataaagaatttacttacttgactatgcattttgttcatttttccagagtttgtgatttacattactattcatactatgtcaggaatcaaaaaagtgcaat

SEQ ID NO: 173117 - DNA, 201 bp, Homo sapiens
ccgagaagggcggatcacaaggtcaggagatcaagaccatcctggccaacatggtgaaactccatctctagaactagctcagagactacaggaatagaccraatgtgcatcattataaagaagcagctctgactacagaccaccacttgcagagctgggcaagaagggtgtattactctggacagtagatctaggcccaga

SEQ ID NO: 173118 - DNA, 201 bp, Homo sapiens
aaacaggatagaaatgagtttttctttgctcagttttgttttaatggttgtttcattgtttgaagttgaaatataaattgggaagtatgttgaattcatgytgtaaattttgaatttgatgtaatgttgggccatgttggtgaagaggttctacaggaagttgtaaatgactctctggagtctacatgtgatatcaaaatt

SEQ ID NO: 173119 - DNA, 201 bp, Homo sapiens
gagtgcctctcctcctccaatggaacgcagttcctcaccagcaacgtaacaaagctgggcagagaatgactttgacgagttgagagaagaaggcttcagaygatcaaactactccgagctacaggaggaaattcaaaccaaaggcaaacaagttgaaaattttgaaaataatttagacgaatgtataactagaataaccaa

SEQ ID NO: 173120 - DNA, 201 bp, Homo sapiens
tacaaaaaaattagccaggcgtggtggcaggcacctgtaatcccggctactcgggaggctgaggcaggagaatggcttgaacctgggaggcggagattgcrgtgagctgagatcttgccattgcactccagcctgtacgacagtgtgagactccatctcaaaaaaaaaaaaaaaaaaaaaatcctaagacttagcaattgg

SEQ ID NO: 173121 - DNA, 201 bp, Homo sapiens
tttttctttgttggctgccattgccagacaccctgatatactaggtattcaacatctgggaaaacaggatagaaatgagtttttctttgctcagttttgtyttaatggttgtttcattgtttgaagttgaaatataaattgggaagtatgttgaattcatgttgtaaattttgaatttgatgtaatgttgggccatgttgg

SEQ ID NO: 173122 - DNA, 201 bp, Homo sapiens
tagagaaaaaagaataaaaagaaatgaacaaagcctccaagaaatatgggactatgtgaaacgaccaaatctacgtctgattggtgtacctgaaagtgacrgggagaatggaaccaagttggaaaacactctgcaggatattatccaggagaacttccccaatctagcaaggcaggccaacattcagattcaggaaataca

SEQ ID NO: 173123 - DNA, 201 bp, Homo sapiens
ataaaatgcagtaaagtgtaactgaaatatttaaatgatccctgtagacccctaatgagtctatagaaacagaactaaagtcgtttataatgctattaacrtaaattctgaattgagcactggctaaaacattttcaaatatcactttttcttgtttccatatagagcatatggtatgctcatttttgtctgagtcaccat

SEQ ID NO: 173124 - DNA, 201 bp, Homo sapiens
agcttcataagtgaaggagaaataaaatcctttacagacaagcaaatgctgagagattttctcaccaccaggcctgccctaaagagctcctgaaggaagcrctaaacatggaaaggaacaaccggttccagccactgcaaaatcatgccaaattgtaaagattatcgagactaggaagaaactgcatcaattaatgagcaa

SEQ ID NO: 173125 - DNA, 201 bp, Homo sapiens
cattctcctacatgcatgataaaaattgctttgattctgccaccctctcaatacacttgtctatttttcatcattccttcctttctggtcattcagaaaaytctttgcttccactctccaaactctttctgtctgtgctttctcctactctgctcaaaacactatcagaagtgtcaccagtcacgttttcacaatcatctc

SEQ ID NO: 173126 - DNA, 201 bp, Homo sapiens
tgggacttagtttgataacttcctgagatattctaagcattctgagaaactttagataaaatttgcatatttgaaaatgtttttattctatcctcatacttaataatttgattgggtataaaattttatattgaaaacaatttttaattaagtatttatagccaatattctagtttcttctatcagttatagagagggctg

SEQ ID NO: 173127 - DNA, 201 bp, Homo sapiens
acaaacttccctactcatatgcttaatctgagcctcatcaacttcttaaaaatcttactctctgttcagcttttacatttttcatttctgcctcttcatgrtccattcccattctcctacatgcatgataaaaattgctttgattctgccaccctctcaatacacttgtctatttttcatcattccttcctttctggtcat

SEQ ID NO: 173128 - DNA, 201 bp, Homo sapiens
gggacttagtttgataacttcctgagatattctaagcattctgagaaactttagataaaatttgcatatttgaaaatgtttttattctatcctcatacttaataatttgattgggtataaaattttatattgaaaacaatttttaattaagtatttatagccaatattctagtttcttctatcagttatagagagggctga

SEQ ID NO: 173129 - DNA, 201 bp, Homo sapiens
ttcgtttggacaggaagcataacacgaggtatttgatagagtcctgaggaattctgcttcctcccagctctgactcacctgggaatatttgtttctgctcrgcattgtactttaagctcagtatcagatagaagaacttctcctttcggagacaaacttccctactcatatgcttaatctgagcctcatcaacttcttaaa

SEQ ID NO: 173130 - DNA, 201 bp, Homo sapiens
ttaaatattgccaccaagtgtaaaggttttaccgtatacaattttttttattttcacctttattttgcttagattatctctaatgaatctaattttcccartgtctcagtaaaaatagctgtggggttaaagtggcaggtgaaaataatgacaccataatgtcttgatacttcatgtataaaactctgtaacaaatagact

SEQ ID NO: 173131 - DNA, 201 bp, Homo sapiens
gaacatattaatgagcactggccctttgcatttgcagttccttctgccaaaatgcccttcctctcagatctttcattgaatggctttttaatatcattcakgcttagtgtaaatactggcttcctatgcaaaagcctcactacctaatctaaaggatctcttcttctataaatcagtctccaagttttttgtttatttcac

SEQ ID NO: 173132 - DNA, 201 bp, Homo sapiens
ggacttagtttgataacttcctgagatattctaagcattctgagaaactttagataaaatttgcatatttgaaaatgtttttattctatcctcatacttaataatttgattgggtataaaattttatattgaaaacaatttttaattaagtatttatagccaatattctagtttcttctatcagttatagagagggctgat

SEQ ID NO: 173133 - DNA, 201 bp, Homo sapiens
ctcatctgttatctgctctttgatttaaattatatatatgcacatccatatatatatttatatattttctctctttcaaattgttttatccttttggtagkatctactctttatctcttgtgatctggttttcacaacctggattttccttttaatttcttgttttactctcagctcttttctatgtggaaaattttattt

SEQ ID NO: 173134 - DNA, 201 bp, Homo sapiens
cagccttccactagttttgatatctggagtatctctagtacacttctataaaaataaatttctgtctcacgcctgtaatcctaacaccttgggaggctgargtgggcggatcacctaaggtgaggagtttgagaccagcttggccaacatggtgaaaccccatctctactaaaaatacaaaaattagccaggcatggtcat

SEQ ID NO: 173135 - DNA, 201 bp, Homo sapiens
ccatagtcgttgtactagtttacattcctaccaacagtgcaaaagtgttcccttttcatcacatcacgatatccacgccaacatcttttttttttttttttgatcatggccattcttgcaggagtgaggtggttttgtgttatggttttgatttgcatttccctgataattaatgatgctgagcatttttccatatgcttg

SEQ ID NO: 173136 - DNA, 201 bp, Homo sapiens
ttggttttctgttcctgcgttaattcacttaggataatggcctccagatgcatccaggttgcttcaaaagacatgatcttattcttttttatggctgcatmgtattccatggtgtgtatgtaccagattttctttattcagttcaccattgatgggcacctgggttgtttccgtgtctttgctatggtgaatagtgctgtg

SEQ ID NO: 173137 - DNA, 201 bp, Homo sapiens
tatatacccagtaatgagattgctgcattaaatgctggttctgttttaagttctttgagaaatctccaaactgctttccacagtggctgaactaatttacmttctcaccaacagtgtataagcattcccttttctccacaacctcaccagtatctgttgtttgttgactttttttttttttttttgagacagagtcttgct

SEQ ID NO: 173138 - DNA, 201 bp, Homo sapiens
ttttttcattgttgcccacttgtatgtcttcttttgagaagtgcctgttcatgtcttttgccagctttttaatggagttatttatgttttgctggttgacytgtttaagtttcttatagattctggatattagacttttgttggacgcatagtttgcaaatatttcctcccattctgtaggctctctgtttaagctgttgg

SEQ ID NO: 173139 - DNA, 201 bp, Homo sapiens
tcaacccctcagtagctgggactacaggagtgcgctactatgcctggctaataacatggctaatggtttcgcctgttgaccaggctggtcttcaaccctggcctccagtaatgtacccacctcaacctcccaaagtgctgggattacagtcgtgagccactgtgcctggccccactgtatcattcttattcctttgcatca

SEQ ID NO: 173140 - DNA, 201 bp, Homo sapiens
acattatttgaaatcaatcaagttatttatttgtaccaactggaattatctagatcagtgctactcacaacatggtacccaaaccagcaacatcagcatchccagaggttgttgaaaaatgcagaatctcaggcccaactccacagctatggaatcacaatctgcattttaaaaagatccccaggtgattgatatgtaggt

SEQ ID NO: 173141 - DNA, 201 bp, Homo sapiens
gatttatagtcctttgggtatatacccagtaatgggatggctgggtcaaatggtatttctagttctaggtccctgaggaatcgccacactgacttccacartggttgaactagtttacagtcccaccaacagtgtaaaagtgtacctatttgtccacatcctctccagcacctgttgtttactgactttttaatgattgcc

SEQ ID NO: 173142 - DNA, 201 bp, Homo sapiens
tgtgtctttatagcagcatgatttatagtcctttgggtatatacccagtaatgggatggctgggtcaaatggtatttctagttctaggtccctgaggaatmgccacactgacttccacaatggttgaactagtttacagtcccaccaacagtgtaaaagtgtacctatttgtccacatcctctccagcacctgttgtttac

SEQ ID NO: 173143 - DNA, 201 bp, Homo sapiens
tccccttcctgtgtccatgtgttctcattgttcaattcccacctatgagtgagaatatgcggtgtttggttttttgttcttgcgatagtttactgagaatratgatttccaatttcatccatgtccctacaaaggacatgaactcatcattttttatggctgcatagtattccatggtgtatatgtgccacatttttttaa

SEQ ID NO: 173144 - DNA, 201 bp, Homo sapiens
gggatctctaaaactgtgtgcatgggcagaaaaggtgatgtgtgtatgagtgtgtgcaaacactaggtgatataacttattaccaagaaggggtttttttwattttattttattattattatactttaagttttagggtacatgtgcacaatgtgcaggttagttacatatgtatacatgtgccatgctggtgtgctgcac

SEQ ID NO: 173145 - DNA, 201 bp, Homo sapiens
attgtttatgtttaattctattgcactaaaagtgattacatattccctgaggaaggagatcatatctgttttattctccattatgtcttcaatggtcagcscatagcatgtactagacaaattgtaaatactcaacaaatacatctgaaagaaggagtctttcccaaggatgtagtttattaggtccttccctcagtatct

SEQ ID NO: 173146 - DNA, 201 bp, Homo sapiens
aaaaccctacaatcaaatgcagtgaagggtataattggtgcaatactacttgctatcagtgtacttttcagggtcatttttgttaactgaggaatgaagtwaaacatttttaagcacccagtacttcaacaagaatatatatggttaccctaagcagtcaagtccaaatatgtgatgcctgattattatagaagtacctat

SEQ ID NO: 173147 - DNA, 201 bp, Homo sapiens
acgttataccaagtcaaaagagaaagcaggtagattggttaggaggctattgcagtagcccaaggatgaggcaattgagccttggactagagccatatcartggaaatggtgaaaagtagagagatttggggtgtatgtactacccagcaaaggagacacttagaagtgacgtaggatgaaaaacagaatagtgggggttt

SEQ ID NO: 173148 - DNA, 201 bp, Homo sapiens
agatatacctaatgctaaatgacaagttaatgggtgcagcacaccagcatggcacatgtatacatatgtaactaacctgtacattgtgcacatgtaccctraaacttaaagtataataataataaaattaaattaaatttaaaaaagacttcatgttgaattaaaagtgaagtaggataatgtctctgtatattccaagta

SEQ ID NO: 173149 - DNA, 201 bp, Homo sapiens
aagaggtgggcaggggccagataaacctacagtcatggtgatgttttccaattttattctaagagcaatgaaatcattgaaggattttaagcagaggaatsatctgtcatagtttctatttaagacaacttctcaggctactataaggaggatacgttataccaagtcaaaagagaaagcaggtagattggttaggaggct

SEQ ID NO: 173150 - DNA, 201 bp, Homo sapiens
tcattagtcctcccgtgatcttgtacaggctgccttcatttgtcttttagctagcccaagaaaacctttagagagattcatgtattgcctctacttcttcmtattctattcactcaattcattctagcctgacttttgtcctgtcacttccctgaaacccctgttttaaaggttacgaatggtttttgtctcttcaaatcc

SEQ ID NO: 173151 - DNA, 201 bp, Homo sapiens; identical to SEQ ID NO: 31055

SEQ ID NO: 173152 - DNA, 201 bp, Homo sapiens
gtactttgcaacatccattccttgaacacctacattaaaattaagtgttatcatctataatttaaaagatttaacattgctttctccacatacatatctayatataaccatttccactaatcagggatggctacaccatactgctgaaccttcatacatccaaatgggtgtaataatgaattggaataatgaatatgggtt

SEQ ID NO: 173153 - DNA, 201 bp, Homo sapiens
agagaaaattcccccgctgcttctggcagggggaagagaagaagaaccatttcataatatggcagagcattctgtttttcttaacaagacctaaagagcargaatagactggagttaaatatttgaagtattaagagggccaggcacagtggctcacgcctgtaatcccaaagctttgggaggccaagatgggtggatcac

SEQ ID NO: 173154 - DNA, 201 bp, Homo sapiens
agccttgcgcctctttgagaaaaggatgtcacttgttttgtattgtgttaggcttctgtgattcagtggagtttaggccaatacttccattctttattttyttacaaactggattacagctctagttttgaaaggtacactcaattctattgtcccccctcagtcagtttttctctgtttggtttgtgcaggctgttgttt

SEQ ID NO: 173155 - DNA, 201 bp, Homo sapiens
aaacaagtaataaattgataataatgggatcttggaattctgtagtactttgcaacatccattccttgaacacctacattaaaattaagtgttatcatctrtaatttaaaagatttaacattgctttctccacatacatatctacatataaccatttccactaatcagggatggctacaccatactgctgaaccttcatac

SEQ ID NO: 173156 - DNA, 201 bp, Homo sapiens
gactcaatgagccttgcgcctctttgagaaaaggatgtcacttgttttgtattgtgttaggcttctgtgattcagtggagtttaggccaatacttccattytttattttcttacaaactggattacagctctagttttgaaaggtacactcaattctattgtcccccctcagtcagtttttctctgtttggtttgtgcagg

SEQ ID NO: 173157 - DNA, 201 bp, Homo sapiens
agtctgtgtcttgcaaggggctagggagttccctttcctagtcaaagaaaggggtgacagatggcacctggaaaatcaggtcactcccaccctaatactgmgagtttccgacaggcttaaaaaatggcgcaccaggagattatatcctgcacctggctcggagggtcctacacccacagattctcactgatggctagcaca

SEQ ID NO: 173158 - DNA, 201 bp, Homo sapiens
aatgtccatactcattccacctgttgtcatttctaggcagatgctgtgccctgtcaaaaaacaaaatagtagctgatagtggcgaggttttcggggaagcragcattttcagtttttataaatgcagttatctctttagaaaattagagattaaatttgttataacaaataactgtattataaatataaaactgtgtattt

SEQ ID NO: 173159 - DNA, 201 bp, Homo sapiens
ctcatagaggtctactttttttgtttccttatctggttcctaattagtgattaaatttgtgaatatataattacatcgtatgtgcttatttcttatttctrtgctttcctattgatgaaatgttggtagtatacaactcagtagtatgaacatacttatttccccacagccttttactaaagacgtctattaaaatattac

SEQ ID NO: 173160 - DNA, 201 bp, Homo sapiens
cattttttaataaatatgtattgagaccctactatatattcttagcattgttgtagaaatttagagtatttctgtgaattaaaaaaaaaaacaactaaagwctgttaccttattgggcttacattcttgtgagcagagacagaaaaatatacaataaatgttaaatgtaagtgtattatatttaacataagataagtgctg

SEQ ID NO: 173161 - DNA, 201 bp, Homo sapiens
aaaaacaaaatagtagctgatagtggcgaggttttcggggaagcgagcattttcagtttttataaatgcagttatctctttagaaaattagagattaaatytgttataacaaataactgtattataaatataaaactgtgtatttatatttatattatactataaaactgtgtgtgtgtatatatgtatatatatacatat

SEQ ID NO: 173162 - DNA, 201 bp, Homo sapiens
taggagcacttgcctttattaggatcaccagcagaaataaatgtggaagctaacttccttctaaacctccaatttgaatttaatctatcaatttagaagtstgtgatgctggttcaaaaggggagttatgaacaaatggaaattaaatttggcacatgaaatgtaaccatgcggggttttttggaaaccctattttactta

SEQ ID NO: 173163 - DNA, 201 bp, Homo sapiens
caagtattggtttgtattttgcagtcacaatatggagcttccgtttctgccaagcctgaactacccctcttttacactcctattgatctggtggacattartgtagaaatggccggattgaagtttataaatccttttggtcttgctagcgcaactccagccaccagcacatcaatgattcgaagagcttttgaagctgga

SEQ ID NO: 173164 - DNA, 201 bp, Homo sapiens
gtagctactctcttttttttttacctcctctctttgattttagaactgtgaaaatcattattgttagttcaagtaattattatttttattttctaattgtrtctctttgagaatactcattacattgaaactaacattctcctctgtctcattcattagctcttccttaatagtagctacctgttcaagcttgacctccct

SEQ ID NO: 173165 - DNA, 201 bp, Homo sapiens
caatttcaagctaccaacctgatgtcactcaacatggaatcgactccaggacaacactgaaacagttaggctttctctaggaaagacttgattctgcagcyactgttagcatgactagaacactaacagtagaaaaggatgtgctaatcttccttaaggagaaaaacagagtgataaaatggctgaccagaaagtcagctg

SEQ ID NO: 173166 - DNA, 201 bp, Homo sapiens
attctgaacattctttccacgtgctgagtaaagaaaactttgagatttctagaagactggctactctggggctcctgggctctacttgggggaagcacagmaatccatttgatcacatttttggataacatgaaatttggagtaaacttggggtaaagagtaaatcacaaagtagactcagaaaaatcagaagatgcatgt

SEQ ID NO: 173167 - DNA, 201 bp, Homo sapiens
gctcagttttgactttgtttttaattttcttattcttctggacatttggggaatgtaaattaaggggtttcagttcaagtttccatacatgactttgataygcatatttgtcaactctgaacctactactagttataattggctgtacattgattaattccactaagaacataagtcgactttgcttagcactgtgaagct

SEQ ID NO: 173168 - DNA, 201 bp, Homo sapiens
aacgaatgtggtattggagacttgagtaaaaagctatccttgtgcagttgcaaaaaaaaatgtggtagaattgtgtctatgttctaggatttcgtggaagrcagaacttaagaagaactatctaaacaacatctggcaggataaatatctaagcaacaaagcattcaaggtgctatatggtggcagcttacagtaaaatga

SEQ ID NO: 173169 - DNA, 201 bp, Homo sapiens
attcagatttttaaaaatggatagacaatttaaagaagcaaaattaccaatggccggtaaacgtgaaaagatatccaacccagctggtcagaatggaaatrcgaattaaaccaacacagatattatatttttcatcaactaatttggcaaagagtgattaccattagtgctatagagagtgtggggaagcagtcactttca

SEQ ID NO: 173170 - DNA, 201 bp, Homo sapiens
cgccaaattgtgagagctgctgagtgtactgaacccatcaaagccataaacagggctgcccaatccctaggggcccaacccctgccccagtgtgtccaggwggtgggacatagagtcaaaacatattattctctagctttaaaatttaatgttcccttcttgtggtttggacttacatgaaacaagttactccttttttct

SEQ ID NO: 173171 - DNA, 201 bp, Homo sapiens
ggtatttattgtctttcatgtaccaggctctttgctaggataaaagagtaaaatacatcccctaaaagactaatagtctagtagaaagaaattgattatgraacagagaagatgactataaaacactgtgataaatgcagtaataaagaaacattataggagcactaaagaggcagtcatttactaatccatcctatgctg

SEQ ID NO: 173172 - DNA, 201 bp, Homo sapiens
gatataatgtcagattgacaaaggaagttgctgaagaataaggaagaatattatttcatgtatatggaagataaaaacatttaatactaaattatatgttytttggagatataaatgtatatggtaaaacttttaaaagcaaaggaatgagaaataaaaacttactttacctaatatatgtattataaatattcttttgca

SEQ ID NO: 173173 - DNA, 201 bp, Homo sapiens
tatacatatatacacacacatatacatatgcacactatatagagatatggtatatgtatatttacataactcacgtgctctctctctcttctctctctctmtatatatatatatatatacgtatgtatatgtacttttactttagtaccagtagtaaatatcaaaatatgctctcagaaaatacatttcaggtgtcactta

SEQ ID NO: 173174 - DNA, 201 bp, Homo sapiens
ccactgatttatatatttatatggatgtttaaaaggccccaaatcaccaaggcattcaataataataataaaataaaatattttatatagcatttatgctrgacattgttctaagcacttaacatatattaacttggtcataaccactttcaacaattcttataaagctatatctcttaagataggggttttgacacacag

SEQ ID NO: 173175 - DNA, 201 bp, Homo sapiens
gagaaacacttgtttacacttgcctgtttcttgtaaatgatattacaaaggatacagatgaagagatgcatagggtgagctacggaagaaggggtgtggarcttccatgccctcgggaacaccaccctccatgaaactgtatgtggtcagctatgtagaagctctctgaatcctctcgttttgggtttttatggaggcttc

SEQ ID NO: 173176 - DNA, 201 bp, Homo sapiens
tacatatatacacacacatatacatatgcacactatatagagatatggtatatgtatatttacataactcacgtgctctctctctcttctctctctctctmtatatatatatatatacgtatgtatatgtacttttactttagtaccagtagtaaatatcaaaatatgctctcagaaaatacatttcaggtgtcacttata

SEQ ID NO: 173177 - DNA, 201 bp, Homo sapiens
agtttcccctggttagattactcagccactctagatttgttttcccatctgaaaaaaaaaaaacggcgaaaataaaaatacctacccctctgtattagtcygttttcatattgctgataaagacatacccaagattggacaatttacaaaagaaggaggtttaatggacttacagttccacgtggctggggaagcctcaca

SEQ ID NO: 173178 - DNA, 201 bp, Homo sapiens
acatggacacaggaaggggaacatcacactctggggactgttgtggggtggggggaggggggagggatagcattaggagatatacctaatgctaaatgacragttaatgggtgcagcacaccagcatggcacatgtatacatatgtaactaacctgtacattgtgcacatgtaccctaaaacttaaagtataataataata

SEQ ID NO: 173179 - DNA, 201 bp, Homo sapiens
gaaatgtataaatgtcaacagcaagacccttaccaaaagcataatgacagtttcaaaagaggatactataatttcctatttacaactttaaaagttttgtrtcttctatgccacttattttcccttattgaaatataaattacttggaggaaaaatacagaggtcttaaatgaaccatttgacaagttgtgacaaacacat

SEQ ID NO: 173180 - DNA, 201 bp, Homo sapiens
tatacaccatggaatactatgtagccataaaaaatggtgagttcatgtcctttgtagggacatggatgaaattggaaatcatcattctcagtaaactatcrcaaggacaaaaaaccaaacaccccatgttctcactcataggtgggaattgaacaatgagaacacatggacacaggaaggggaacatcacactctggggac

SEQ ID NO: 173181 - DNA, 201 bp, Homo sapiens
gctggagaggatgtggacaaataggaacacttttacactgttggtgggactgtaaactagttcaaccactgtggaagtcagtgtggcgattcctcagggayctagaactagaaataccatttgacccagccatcccattactgggtatatacccaaaggactataaatcatgctgctataaagacacatgcacacgtatgt

SEQ ID NO: 173182 - DNA, 201 bp, Homo sapiens
ttgaagtcaggtagcatgatgcctccagctttgttcttttggcttaggattgacttggtgatgcgggctcttttttggttccatatgaactttaaagtagwtttttccaattctgtgaagaaagtcattggtagcttgatggggatggcattgaatctataaattaccttgggcagtatggccattttcatgatactaatt

SEQ ID NO: 173183 - DNA, 201 bp, Homo sapiens
gagaattctaataattagcgtaaatgtaagtaatagtttggaacactaaaactagaagacaatgagactgaaaaaagattgtcgtaaaatatcatgacaamgaaaatctgatgagatttgatataatccaggcttcaatacagctaaagaggagatcaaaatggaggattggccaatttatttttctgcctctcagctgta

SEQ ID NO: 173184 - DNA, 201 bp, Homo sapiens
tgtctgttcatgtccttcacccactttttgatggggttgtttgtttttttcttgtaaatttgttggagttcattgtagattctggatattagccctttgtmagataagtaggttgcgaaaattttctcccattttgtaggtcgcctgtttactctgatggtagtttcttttgctgtgcagaagctctttagtttaattaga

SEQ ID NO: 173185 - DNA, 201 bp, Homo sapiens
cacacacacacacacacatttttttgtcccttgaatactggtattcccttgttccatctctggctctcatattgttgtatggtcatttgacccctgaagcmaatattcctctctttattgttatcttccaaatctgtactctcaccaaagacctccctgtggaccctacacattcctatattcagctttctggtggacttt

SEQ ID NO: 173186 - DNA, 201 bp, Homo sapiens
atctgccccactctccatctagccttgtctccttcctctccctcctaatccatctttactctaggccctacgacacacctaacattccagccagatctttmtccttttgctcatgcagttatctgtgattccctccattccttctctgcattcaaaatgctagttatcctttaagacatagttcatatttcatcttcaagt

SEQ ID NO: 173187 - DNA, 201 bp, Homo sapiens
gaaacaaccgttcgtacctagtatttgctggtcattatagatgcaaacattaacagtaatataattgtgcccttaaaaggatcacagactgtgtggaaatwgaacgcttaaacagttattaataatatagtgtgataattgcaattatagagatatacacagacaacaggggatgagtttcagaatgttttcctagataac

SEQ ID NO: 173188 - DNA, 201 bp, Homo sapiens
ttgaattcatgccctacctttccttctatgatctctacacaatcagtggacatttatagcaaaccagttagctttgttcccaatcctcattttatggagtraagaaaatacctctctgcaattttgagctatgcccctgatactcttcctgagaaaaacatgtatttgttatatctcccgttaagcccatctgctcacttg

SEQ ID NO: 173189 - DNA, 201 bp, Homo sapiens
aggtcatatgatcttataagacttgtcaagaatagcaagaacaatatggctggagtgtagtgaataaaggggacagtggttaaaatatattgaagaggtgrgcaggggccagataaacctacagtcatggtgatgttttccaattttattctaagagcaatgaaatcattgaaggattttaagcagaggaatcatctgtca

SEQ ID NO: 173190 - DNA, 201 bp, Homo sapiens
tgtcagaagacatttcttgagccctcaatgaggggaggaaaaaattataattcttagtcttttcagcttgtcactacatcaataattaactttaaaaaaaagagaggcagtataaaaagattctttaaggaagcatttaataattcaaatgaatcttaacttgaagcaggtcacatgaaaaagaatggaaaacaaaagccc

SEQ ID NO: 173191 - DNA, 201 bp, Homo sapiens
tgtattgaaattgataaaggaattatgggcctatgctggaggatataaaggagaaagagctgacatttccaacgcccactgtgttccagacccaagatagmagctgcacatgtattttcttatttcttacttaacctaatactctatgaagaagtagggagttctggaggaacaaatgtgaagaagtgatcaaagaaagag

SEQ ID NO: 173192 - DNA, 201 bp, Homo sapiens
attttaaaaacatataaggtaacaattgtgaccataataatgattgtaattttcttcctgcataggtttttataaccatttctgttagtgtgacttttaakacaatacttttaagaacattttcctcattataaaagtagtgtgtgctcactgtagaaaattaggaaaatacataagtataataaaaactatattaggatc

SEQ ID NO: 173193 - DNA, 201 bp, Homo sapiens
gcattctttgaaaggctaggaaaatgttgatataatctaatagtaaaaattaagaagaaacctatttgtttagaagaaatttttttttgcagtcagcatttcagttgagatgagattcacccctgccagtgcttaagactttgctgttctaagtgtggtccagcagcagcagcagcatcccccgaaaatttggccaatgca

SEQ ID NO: 173194 - DNA, 201 bp, Homo sapiens
tttctaaatagagtgatttttagcatgcctggctaattcaagagttacgatttagaggtatagtctagccgtaatacctgtctttatatgctcatcatttkgtactccatgtgtccttattcttagtaactagtgatttatcactgacaatgtgtgtgtgtgtatgtgtatgtttgtgtgtacgtgcttatatgtgatata

SEQ ID NO: 173195 - DNA, 201 bp, Homo sapiens
agcaccccactctactggtaccaatttactgtattagtccattacatgctgctaataaatacacacccaagactgggcaatttacaaaataatgaggtttmatgtacttacagtttcacatggctagggaggcctcacaatcatggcagaaggcaaggaggacaaagtcacatcttacatggatggcagcaggcaaagaga

SEQ ID NO: 173196 - DNA, 201 bp, Homo sapiens
gcatatgcaatcaatgaaattccacctctagttggcaacagttgtcaaattcatccatgtatgtttcttaatttgtccaataatctttaatgtgcaaccastatgttccggtactatagcagtcattggcacaatccagtagtgaaaatcccagctctcatggagctcacagtttagtagggagaaacagacaatgacaaa

SEQ ID NO: 173197 - DNA, 201 bp, Homo sapiens
ccagaattatagaatgcactgccatatggcttttttttcaaataaatattgttctgtttgagctctgttatgtcactggaagtcacaataaatcacacacytagtatgctttctaatgaatgcttgttgttcaaaattcccaatacctgaaggaaagaaccttctgtccccaaagtctgtgaaaaaaaatgagggattttc

SEQ ID NO: 173198 - DNA, 201 bp, Homo sapiens
gtgttatccagggactagagagtccttgagaaccagaaatctttgctagacaacatacatcctgattctcctagccccttgaaagtaaaaaaaaaaaaaamaaacaaacaaaatggcctcagaggccctccgtcctacccctgggaatgatctggggccctggggacagcctggcatctgcatgatttcccttttatcaac

SEQ ID NO: 173199 - DNA, 201 bp, Homo sapiens
actggttaatataattgacagttaaagtagcttccactttccatctttttttccccttattcagaaagtgtggtcatcaggggcaatttgacccagttctrttagaaacatggtgtaatagcaaatctaaaaatagagttttggagttacaggcaacttccaaagaatagctagttatataggttctttgccgttggaaga

SEQ ID NO: 173200 - DNA, 201 bp, Homo sapiens
aggcctaataatttccttaatattcttattaacaatcattgtggcaactggttaatataattgacagttaaagtagcttccactttccatctttttttccscttattcagaaagtgtggtcatcaggggcaatttgacccagttctgttagaaacatggtgtaatagcaaatctaaaaatagagttttggagttacaggca

SEQ ID NO: 173201 - DNA, 201 bp, Homo sapiens
aaaaatatgaaggcctaataatttccttaatattcttattaacaatcattgtggcaactggttaatataattgacagttaaagtagcttccactttccatmtttttttccccttattcagaaagtgtggtcatcaggggcaatttgacccagttctgttagaaacatggtgtaatagcaaatctaaaaatagagttttgga

SEQ ID NO: 173202 - DNA, 201 bp, Homo sapiens
ccagactatgaaccagacagaaaatgagcttagaggttgtgtggttactcaaagacttgaataaaatcaagaattcagtgctgttcagctccatcttcaagtcaaagaaaatgggcatatgggcagcataggagagctggagcattttctacctcatccctagtaaaatcattacaatatgatttctcttgctaggaccaa

SEQ ID NO: 173203 - DNA, 201 bp, Homo sapiens
gaccagggagaaaaattctaaaattattcccttttgtatttgaatctcagtatgttttaaatacagttgtttgttgatttaattgattttatttctgctartactcttcatactgcctttgaaattaaaaggccatattatatgaattcagttcactgctcactgactttttgccagtttttttcattgtaaacagactgt

SEQ ID NO: 173204 - DNA, 201 bp, Homo sapiens
ataacacagaagaaaacctagatgatcttgaatatgttgatgacacatgtgtttttaaatacaactccaaaggcaatattcatgaaagaaattattgataygctgggtttcattaaaataaaaaactctggctgggcgcagtggctcacacctgtaatcccagcaatttgggaggccaaggcagatagatcacctgaggtc

SEQ ID NO: 173205 - DNA, 201 bp, Homo sapiens
aactgcatgttcacatgcaacaaaaaattaatctagacacacccttcaccaaaattaactctaaatggatcatacatctaaatgtaaagcacaaaaatatraaattcctacaagataacacagaagaaaacctagatgatcttgaatatgttgatgacacatgtgtttttaaatacaactccaaaggcaatattcatgaaa

SEQ ID NO: 173206 - DNA, 201 bp, Homo sapiens
gtgtttttatcaattatagattaactatcacaccaactactgaattgtgaatgctttcagaggtagtcaggactatttgagatgttattttcatgttaacwaatgtttctcattgtaggtgagttgttctttttttttttttttttttttttttggaatgtgaatgtctgcttagttattgagtgaccacataactttcat

SEQ ID NO: 173207 - DNA, 201 bp, Homo sapiens
cactttaattattacctctttctcaaaatgaattgatttttgtcattgtagatctgtgctttaaacaaatgagtagtgcttagaagatacttttacaagaygccatttaagtttaagtgggtgtggcttacctaaaatcattccaaaatgtagtgtaggtgggatgataggtaagtaattacctactaatctttaaagcat

SEQ ID NO: 173208 - DNA, 201 bp, Homo sapiens
attaacataaacatataaacatgtatacgcacatatgcattataagcatatagattatatatatatatatatatatatatatatatatatatatatatatatataaaatctccctgttttcacatgaaagccagttgccttcgtagtagtggtcagaacagaaagcaggactgcactgtggttacaagaaaggatcctgtg

SEQ ID NO: 173209 - DNA, 201 bp, Homo sapiens
cattaacataaacatataaacatgtatacgcacatatgcattataagcatatagattatatatatatatatatatatatatatatatatatatatatatatatataaaatctccctgttttcacatgaaagccagttgccttcgtagtagtggtcagaacagaaagcaggactgcactgtggttacaagaaaggatcctgt

SEQ ID NO: 173210 - DNA, 201 bp, Homo sapiens
ttagattaaatcactgatcacagagcataggtgtggcacgtgagcaatgtgattagatgccttaattaatatgtcagaacaggatacatctgtttgatgamgttgggggggatggtaaatagcatttaaattttatatttgattattgactatcaccgatgaaactcttatctttggaaaaccaccgtatattggacttat

SEQ ID NO: 173211 - DNA, 201 bp, Homo sapiens
acattaacataaacatataaacatgtatacgcacatatgcattataagcatatagattatatatatatatatatatatatatatatatatatatatatatatatataaaatctccctgttttcacatgaaagccagttgccttcgtagtagtggtcagaacagaaagcaggactgcactgtggttacaagaaaggatcctg

SEQ ID NO: 173212 - DNA, 201 bp, Homo sapiens
tacattaacataaacatataaacatgtatacgcacatatgcattataagcatatagattatatatatatatatatatatatatatatatatatatatatatatatataaaatctccctgttttcacatgaaagccagttgccttcgtagtagtggtcagaacagaaagcaggactgcactgtggttacaagaaaggatcct

SEQ ID NO: 173213 - DNA, 201 bp, Homo sapiens
catacattaacataaacatataaacatgtatacgcacatatgcattataagcatatagattatatatatatatatatatatatatatatatatatatatatatatatataaaatctccctgttttcacatgaaagccagttgccttcgtagtagtggtcagaacagaaagcaggactgcactgtggttacaagaaaggatc

SEQ ID NO: 173214 - DNA, 201 bp, Homo sapiens
atatgtatgtgtatgcataaacctaaaaacatatacacacatacatataaaacatacattaacataaacatataaacatgtatacgcacatatgcattatmagcatatagattatatatatatatatatatatatatatatatatatatatatatatatataaaatctccctgttttcacatgaaagccagttgccttcgt

SEQ ID NO: 173215 - DNA, 201 bp, Homo sapiens
tttcaaaccatatgtcttttaaggggttaatatttaaaatatataaggagctctcacaattcaaaagcaaaaaaaaaaaaaaaacaacctgatttcaaaawtttttactcaggatctttgaagaaaaaaaatgtgaaatcatagaaaaatgaatgagagttatgtgtcttgagtgtagacgttaatattctttgaataaag

SEQ ID NO: 173216 - DNA, 201 bp, Homo sapiens
ggtccacctcacagttgataaactgaaatgtctcttagggtttcagattacattttattgggcaattattgcttttctttctttctttttttctttctttcttttttttttttttttttttttttttgagatagagtctcactctgttgccaggctggagcgcagtggccgtggcacgatctcggctcactgcaatctcca

SEQ ID NO: 173217 - DNA, 201 bp, Homo sapiens
gtcaggtgtagtgcctaatcacgttaaattcatttttatcaaagggtgaaaatgtgaattctgaaaatttctgaatattaaagttcaatttggtcatctaraatatatctaaactcattggttaaaaaaatctaaataaggaaaagtagcagtgttcctctggaagcaagatttgtctaaagcaatgtatgtgaataggga

SEQ ID NO: 173218 - DNA, 201 bp, Homo sapiens
gattgatatggcttggctctgtgtgagattacaattcaaatctcaccttgaattgtaataatccccatatgttgtgggagggacctggtgggaggtagttraatcatgggggcaggtctttcctgtgctttcctgacagtgagtaagtctcactagatctggtggttttataaaggggagttcccctgcacatgctctctt

SEQ ID NO: 173219 - DNA, 201 bp, Homo sapiens
tcagaaaagcacaggaggctagaagtgacaagagtgattttgtgagagggctgaaactgtcaggatgaagtcagaggggtcagtagttcctgagctgacckttttaaacaaatcctgagaagaccttttactggatcctcacagcagttgcacattcatgccagaaaggttgcccctccttctagatattgagaatcctaa

SEQ ID NO: 173220 - DNA, 201 bp, Homo sapiens
aaagaaatgctccttctaagacaaaatgtaaagagaatgccaatttgtaaacatttggagttggaaagaaaagaatacattatggattactgatatcatcrgtaaatattgactttttagaacactctgaagaaaatggtaatgattagaccattccatagagaagtaaatgtaaaactgtaaaatgtttataggtaacac

SEQ ID NO: 173221 - DNA, 201 bp, Homo sapiens
gcacactggtggacatgtcttgtcttgtggaaagctgcttctgccctggccctgttttagctaggtctcaattgggtctggtgtctgaaccctgcctccasagttgagtcctgcctcctacctcagtgttacctagttataggcatgattcttctgacttagcacttgtaggttcacagtaatttgaggtaagcttatgaa

SEQ ID NO: 173222 - DNA, 201 bp, Homo sapiens
cataggtagattcagatgttttctgatttgcaatcagttaaggaagagaagctttgttttgaaatttgtggtgagcaaaaagaatgttagctctggctctygggtttgactttctctaggtacctcagaaagaaatgcagaacaaagaactttggtcaaagttcagcccttagttctcccttatctgaggcctgcttgcag

SEQ ID NO: 173223 - DNA, 201 bp, Homo sapiens
tgccaagcatggtacctatgctataatggccctcattgaattactttgcttacagcatgctggactaatagctgaagccttttttcgagcccaaaccaacwaggtttattttttatttcagccacacataagtcccaggatctgactctgtttataagcccacctttgggctaattccttaccctggatttggagtttggc

SEQ ID NO: 173224 - DNA, 201 bp, Homo sapiens
aaatatttatctattccttagttatttattgagtgtcacaaggtataaataccatggttggggtgaagtgagatgaggcagtagaagggatgcaggtggakatggagagctccaaggatgtttctgagtgattccagtgtcatgagcatagaatgtcaacaatccaaggcagagcataagtgtgcatacagcaagagttac

SEQ ID NO: 173225 - DNA, 201 bp, Homo sapiens
gtagacttgcttagtatcatcaggcatgtaacaggctgacttttcgcaatgccatgtggtaattatctgcgtacatatatgaggaaataagatgaaattgkttataattaagttaaagagatttcatttgaagaattcttaaccattcagattaagaatactagaaagaataaggagcaaaattgcaaagtctctgatggg

SEQ ID NO: 173226 - DNA, 201 bp, Homo sapiens
gtttcccattatgatattgactcctagtgttattgataagtagaaaaagtaaaaatatgaaggcctaataatttccttaatattcttattaacaatcattktggcaactggttaatataattgacagttaaagtagcttccactttccatctttttttccccttattcagaaagtgtggtcatcaggggcaatttgaccca

SEQ ID NO: 173227 - DNA, 201 bp, Homo sapiens
aaactgctatgaatttcatttgaacatcaagcatggttatgcccagtgttatccagggactagagagtccttgagaaccagaaatctttgctagacaacawacatcctgattctcctagccccttgaaagtaaaaaaaaaaaaaaaaaacaaacaaaatggcctcagaggccctccgtcctacccctgggaatgatctggg

SEQ ID NO: 173228 - DNA, 201 bp, Homo sapiens
cacctttttcaataaatagtgctgggatgattggattgccatatgcataaaaattgaattatacttctacctctaaccatatttaaaaatcccctcaaaayccatcaaagacttaaatgtaagatctgaaactataaaagtactagaaaaaaatctaaggaaaactcttctggacatgagtctaggcaaaaataattatga

SEQ ID NO: 173229 - DNA, 201 bp, Homo sapiens
ctctacaaccagtgtccacgttagaaattggcgctgcttcttacatgttctgtgatccttcagcgagttacttaatccctatatgcctcaatttcctcatrtttaaaatgtggataataacatcagttgcctcatacaattattttgagaattaaaatgagttatataataatcacctgggggccaggcatttagagtagt

SEQ ID NO: 173230 - DNA, 201 bp, Homo sapiens
ttagtgtaaagacagtttctcttttaaccacttggaaagctttatccctgtaatttaaaaaattcagaatacgaaaatataatatttagtgttcttaaccrtcaacttcatctccagaattatttgtttttataatttacgtataaaatccattctttaaagtgtaacttttcatggtttttagtatattcacaaatgtgt

SEQ ID NO: 173231 - DNA, 201 bp, Homo sapiens; identical to SEQ ID NO: 31072

SEQ ID NO: 173232 - DNA, 201 bp, Homo sapiens
ggagaaaataatcacaaaacaaaaatgctgacaagagaagcagccagtcctttctctgtcactagattggaacctggctgcagacacatcctgtgaggtaygcatatctgcagccttgtagagaaacttaatacatacatgttgaatgattactttagataggactggttatgtagcttcacattataacctggcctagtt

SEQ ID NO: 173233 - DNA, 201 bp, Homo sapiens
tatcttattaagtattataatatgaaaagagaaaaacaagcttgcatgcagaaggctagagaggcacaatatactcttaagttttaaattatggttttcayagtgaatcatactagttattattgaaacgttacagttgtctccctttgttttgagaaaagtgttgagggttacctcttctgtaagtaatttgactgttaa

SEQ ID NO: 173234 - DNA, 201 bp, Homo sapiens
ttatttgagacacagtcttgctctgtcacccaggctggagtgcagtggcacgttctcggctcactgcaaccctgcctctcagattcaagcgattctcatgsctgagcctccccagtagctgggattacaggcgtctgccaccacgcccagctaatttttgtatttttagtagagacagcgttcctccatgttgtccaggct

SEQ ID NO: 173235 - DNA, 201 bp, Homo sapiens
tatctgggttttgcagcacaatagtgacacaataaaattagtaaggactcagttaagggacgactatatttatccaatgtgtagtacaactctcatttggwtaaatgtttctttatgttcaagattcttcaactttaaaaaacttaaaatgaaaacattctatatgtgaatgaagcctgtaataccataccaggtactaaa

SEQ ID NO: 173236 - DNA, 201 bp, Homo sapiens
taataaaagggggatttaatttaccaaaaaaaaaagtcaaacaaaacaaaccataattaaatttatttttagcttcaagatgatatggatattgaacagcrttaccaaaaccctgggagcttaggaaggataggtgaggatatcttcagttgccctgaataattggcagtctcacacttaaccaaatcagtttagacattc

SEQ ID NO: 173237 - DNA, 201 bp, Homo sapiens
tttctttcaagattagcttatatagcaccttttccatgctgtcctttcttttttttttttttttttttttgagacaggatcttgctgtgtcaccaaggccrgaatgcagtggcgtgatcacagctcattgcaatctgaaacatctgggctctacagatcctcccacctcagccttccaagtagctgggactacaggcagat

SEQ ID NO: 173238 - DNA, 201 bp, Homo sapiens
taaaattagcgtccttataaaagggaccccagagagatcccttgccccttccaccatgtgaagatacagtgagaagttgccatctgtatggaagcaggccrcccccagataccaaatctcccagcgtctcaatcttgaacttcccagcgtccagaatggtgagaaataaatgtatgttgtttataagccaccaagtttatg

SEQ ID NO: 173239 - DNA, 201 bp, Homo sapiens
aatatcaatacttcatcaggaactttggaggctctgtcaacatgactttgtaaataagtgaagcagatgctcatacattcatgatttttttaatgagaaawtgttcaatatatttggttagtttttttcctgaaaaaaagattgaacagtctgtaactgtattatatatttttaaactattatcaattctaatgtttttca

SEQ ID NO: 173240 - DNA, 201 bp, Homo sapiens
tcaaatacatttctagtgttttaatatatgcattgacattttgtcttgtaatagcattattattaatggataataaaattataacatttatagaactgaaracaaaacacttgaggttgaatttccattcactctgggtacactttgtgcattttgtagggcattagtattgcaaattggaaaagagtcaaaactgtactt

SEQ ID NO: 173241 - DNA, 201 bp, Homo sapiens
ttttgttggtaactatcttgaattgtattcatgcccaagcatgaagacagagtacttggcttggagcagatgaagatgcttctaggacacaaaactcaacraaatcatcaagccttcaaactcagaattcctagttcaataatttgcctatagtaatgctattcctagttctactttaatattactaccatccttattata

SEQ ID NO: 173242 - DNA, 201 bp, Homo sapiens
tagtcatgcgaagtacatctctgcctccttttcaccaataaacttgagttcagatattgtaattaaaatccatggacattttgcttctcaaaaaaaaaaaatcttaaatatattgatgtcagccttttgaggctttttttcctttggggtcaaagtaatcttcatcaacattatgacactgctaaatgacagctgttagga

SEQ ID NO: 173243 - DNA, 201 bp, Homo sapiens
attctcagaggaccctaatccatgtgtaaagatgttatttttaaataggtgtgtcccatgtatttattagtatattaacttcattaacattgtacacttaattttagtaaagcataaatttgttggtggttcatttatatgtaggttataaaaatcaatctctcacctcctaaatccttgaaattcttgatttactaattt

SEQ ID NO: 173244 - DNA, 201 bp, Homo sapiens
gcaaattacacttaaaaatctaataaagatttattcacacagatacacacatttactaccatagactcaagctatgaatattcataattttgaaaccaatkaaataatatatgggttacaaaaggaaccccaaatgttatatctaggaatgaatattaacaacccttaaaaattaagtgtttatccttatatgtgttatag

SEQ ID NO: 173245 - DNA, 201 bp, Homo sapiens
cacgttgcaaattacacttaaaaatctaataaagatttattcacacagatacacacatttactaccatagactcaagctatgaatattcataattttgaarccaatgaaataatatatgggttacaaaaggaaccccaaatgttatatctaggaatgaatattaacaacccttaaaaattaagtgtttatccttatatgtg

SEQ ID NO: 173246 - DNA, 201 bp, Homo sapiens
taactttgtgtctaagcactaatggaacagattcttcaaaaaagacttagaagatatatatatatatatatatatatatatatatatatatatatatacamgcacacacacgttgcaaattacacttaaaaatctaataaagatttattcacacagatacacacatttactaccatagactcaagctatgaatattcataa

SEQ ID NO: 173247 - DNA, 201 bp, Homo sapiens
tatgtaactttgtgtctaagcactaatggaacagattcttcaaaaaagacttagaagatatatatatatatatatatatatatatatatatatatatatayacacgcacacacacgttgcaaattacacttaaaaatctaataaagatttattcacacagatacacacatttactaccatagactcaagctatgaatattc

SEQ ID NO: 173248 - DNA, 201 bp, Homo sapiens
cccagagatgatacctgtgaacagtatgaaattcaacattatatgcatttacatgcacacatactaaatgtaatcacatacttttttgccaacaatgggarcataccatatatattgctctgctacttgtgattaactcttaacattataaattagagctatttgcgtgtcaattttaaaggttttctggaatatcatatc

SEQ ID NO: 173249 - DNA, 201 bp, Homo sapiens
aagagttaagtaataatgcaaagatattaatgtataaatgatgcaatgagtgatatagagtgcagcaaaagttgagagaaaagtattctcttgtggattgrtgtgagttcttaattatgatatattcgtataattggagagaaaaatgtattctggacagggaatgaaagggaattgtgtttgtcactgactgatactatt

SEQ ID NO: 173250 - DNA, 201 bp, Homo sapiens
cgtgtagataattaatttaggagggtcaagagtgaataaagaaagtattgcagtgaggcaagtgagagaccatgattgattccagttgcaagaagctgtgsttatggcaacaaatagattcacgatatatacttgaagtagtgctacaagatttgctgagagattgaatggttgtggacatgaaaagaaagggacagagat

SEQ ID NO: 173251 - DNA, 201 bp, Homo sapiens
aataaaatctaagaacgttgcttcttggtgaccaaacttaatgcttagggaaactcagaaaaatggtggattaagctgtcttttaggctgattttttaaartatcaattatctccaaaacactttttaaataaaaaaaatatatatataagaccccacctggaaagagtaacccactaggtactgttcacctttgcgtaaa

SEQ ID NO: 173252 - DNA, 201 bp, Homo sapiens
gttaaatgagatcttttatagggttcttaattatacattccttcagttagtgttaaaggggactatcataagagaaaacataatcaaatgacaattgctgrtaagactcaggcatccagactgggaacaccagagatgcaaaaatctatacacaggctttgtccagtttgtctgtgacaaatagtactttgaatatgaaga

SEQ ID NO: 173253 - DNA, 201 bp, Homo sapiens
taagacaatctataaaacccaatttcatgttttcagtaatataaaggggactgtaatctgtgttccaactttgtaaatcaacttgtcctttgatttttacdaatcatatttttcataaatattatcaacactgattaaatatctgcctttttgacctcataatcataccatgttctagtaaatttgctttccctttctttt

SEQ ID NO: 173254 - DNA, 201 bp, Homo sapiens
tgttaaattggaattcatagaaagcacagaactgagaagcaataatgaggaaaataactgggttttataaatcagtattaataacagaatataaaaaagcmatgggatcaactgattaaactgctatgaatttcatttgaacatcaagcatggttatgcccagtgttatccagggactagagagtccttgagaaccagaaa

SEQ ID NO: 173255 - DNA, 201 bp, Homo sapiens
aaagcattgtggggttgtgtggcactgtgttagctggtccatgcatcattgaggcccgtgtctggtgtaatcagctctgggaagacactgtattcttagcrttcccggaaggcctgctgttccacagcaacaaaagacacaagcacggcacagtaccacagcaccagccgatgaacaataaacctggttcagattgaacta

SEQ ID NO: 173256 - DNA, 201 bp, Homo sapiens
tgttaatgtctgagaatattttctctttcccatacacaataagaaaaatcactgtgtatactgagtggtgtctaggaatgtgatacgtattattcaaagtwtgagttgccttgaaatcaaggtatagggaggaatgatgaggacacatgggaagaatttagaaataggtccttacagcaaaaagtccatctggtccctaga

SEQ ID NO: 173257 - DNA, 201 bp, Homo sapiens
tattcaaacatacttgtaataacctgcagccatgggaccttaaatccaatacataatccctggatcaagcagatagtgacatcaaaatggtaaactcattyttttgttaaattggaattcatagaaagcacagaactgagaagcaataatgaggaaaataactgggttttataaatcagtattaataacagaatataaaaa

SEQ ID NO: 173258 - DNA, 201 bp, Homo sapiens
ttgggcccttaagcactgtcctctgctgtctctcatgaaacatagaaataagaaagaaaaggaaggtggcatttcaagcaaatcagtatgtttgcaaagcmcagtattcaaacatacttgtaataacctgcagccatgggaccttaaatccaatacataatccctggatcaagcagatagtgacatcaaaatggtaaactc

SEQ ID NO: 173259 - DNA, 201 bp, Homo sapiens
acaggggaaaatgtgttccagactgctgcagatgttctcaaatcaaatcttatttctgtgaaatgccatatagaatattcagctgttgaaagatgcaacaygaaaggacagttcaattgatttgcactgtatttaaaaattttatgtagcctaaattatatgaaatggtttttcccacttttgaatcaattaataagagat

SEQ ID NO: 173260 - DNA, 201 bp, Homo sapiens
atatacatcttaaacagagataaagtaatttgaaatttgtccagtgacgctgtcatcacatcatagtaatagaagtaatataagacagtatactcaagtgrtcagtgtgctaaccattgattattctgattttgtgtagggacagcaatcagacctattgctttgagagctgtgacctccattgctcgtgctctgcctgga

SEQ ID NO: 173261 - DNA, 201 bp, Homo sapiens
actttttaaaaataatgttgctcaacatgggcttagtactgtcagcacattttagcataagaatttctcattcaggttttgtagtctgaattgacctaggkaccaagctttttatatgactagactgtgaactgtgaactctctggtaatactccattaataatgacttctcactacttagcattgatggtaattggaaag

SEQ ID NO: 173262 - DNA, 201 bp, Homo sapiens
tctcagacacctgagacctgccctcaggaagcttgcatgctagaagctccctcacaagagtgatgtcttagtccattttctgttacttagaatactcaaakctgggcaatttttaaagaaagggaatgtatttcttacagttatggatgctgagaggtccaaggttgaggggctgcatctggtgtgagttttcttgctggc

SEQ ID NO: 173263 - DNA, 201 bp, Homo sapiens
actatatcccaggcagagctcaagcatcaaggatacaaggatattctcagacacctgagacctgccctcaggaagcttgcatgctagaagctccctcacargagtgatgtcttagtccattttctgttacttagaatactcaaagctgggcaatttttaaagaaagggaatgtatttcttacagttatggatgctgagagg

SEQ ID NO: 173264 - DNA, 201 bp, Homo sapiens
ctcctgaggtatagacaatgtaggaccaggtgagttatcttaaatcattttcatatcaaggcagaggaaggacaagtcagaggtctatttggatggatagrtaagtatttagatagatagatgattgataggtagatagataaagtatttagatagatagtatacacctttatagtatttactacattccagaagtcattt

SEQ ID NO: 173265 - DNA, 201 bp, Homo sapiens
cttgaaatacattggcatatccaaagaagagttaagtaataatgcaaagatattaatgtataaatgatgcaatgagtgatatagagtgcagcaaaagttgrgagaaaagtattctcttgtggattgatgtgagttcttaattatgatatattcgtataattggagagaaaaatgtattctggacagggaatgaaagggaat

SEQ ID NO: 173266 - DNA, 201 bp, Homo sapiens
catttatagatttgcatattcacagtttgtaatttccttgggttcattttatcagttgactttccagtaggactaggaaccatgttacctgatttctattmtataatttgtctctgcatcccccaccctccctgttactgtactcaagaaatgtgctagcaaaatgaaagaggaattcaaaataataaacgtgtgaaagct

SEQ ID NO: 173267 - DNA, 201 bp, Homo sapiens
aaccccatttatagatttgcatattcacagtttgtaatttccttgggttcattttatcagttgactttccagtaggactaggaaccatgttacctgatttmtattctataatttgtctctgcatcccccaccctccctgttactgtactcaagaaatgtgctagcaaaatgaaagaggaattcaaaataataaacgtgtga

SEQ ID NO: 173268 - DNA, 201 bp, Homo sapiens
tatataactctgaaatgattaacaaaatactacttaagtatactttgtaaaagtaaacctatattttatgtaatctgaccatttttcccttttctagtagkatatagttctgttatcttttctaactaatgtgtcttttggatacctataacactattgatacttttcaaataattttatcatagtatccagttatataac

SEQ ID NO: 173269 - DNA, 201 bp, Homo sapiens
gtagaaatgatgatatatcctacctcttagagttgctgtgaagataaagtaagataaaacatacaaaggacatagtaaagtatctggcatattgtaaatgytcaattaatgtaagctattattgtgtaatatggtagctaggtgtaagtttgaaatgaaatatgcataatgtaaatatgtataaaattattatgcaaagcc

SEQ ID NO: 173270 - DNA, 201 bp, Homo sapiens
ggcatttcacccctgaagtctctttctactgggattacctctccttggcagggctttcaatgtagttatattgcagcagctttccagagtgtccccaaaamaaactcctgtctctgtcatcataagcaaacacctctactggccctactatcagggaaccctcacaaccaacctctgacatacaggcctttctcagcagta

SEQ ID NO: 173271 - DNA, 201 bp, Homo sapiens
tatttcagaccacatctagatgatgtggctgtgtgatttttcagtccacgttgatattaacggccacattccctttaaagtcattttctgtctgcacatgmatcagacattgcttcttgtccttttattgtggttgttattgctgttttttagcacacacccaggcacgccatgtaattgctgctacatgattacttcagt

SEQ ID NO: 173272 - DNA, 201 bp, Homo sapiens
ttatatcttcccatttttctcttctctgagctaacatgcttccttatttgtgtgttttccttttagaaactgccaagttttggaccttatctggaacagcrcaagaaaatcatagcagaaaacaagattagactgaaagaacaaaatgtagctttttcaccacttaagagaaactgttttatccccaaaaggcctattcct

SEQ ID NO: 173273 - DNA, 201 bp, Homo sapiens
atcacaggacctgtaagacgggaatattagtaatacgcaagtcttccatgcccactcaaagcttacatgttcaggctatagcttacctcttagagtcaagwttctatgaagagaagaaaagtgaaatcatagaaaactaaacgagagttatgtgtcctgggtgtagatgtgtgctcagggtgcagatcctagtatgtaaat

SEQ ID NO: 173274 - DNA, 201 bp, Homo sapiens
gccaggctagtctcaaactcctgacctcaggtgatccacccacctcagcctcccaaagtgctaggattacaggcgtgagccactgatgctcaaatattctwtgcaatcttttacacattactgtatatccaattgtaatatgcatgtaatatgtgtgcacagagaattctgtgtttgctatacctacttgtataacatgtc

SEQ ID NO: 173275 - DNA, 201 bp, Homo sapiens
gaggaatgccatgtgaaaaggtgattttatttatatctctacagaggaaagaattgccttcaagaataagtattttatatagatggatttttttttttttttgagacagagtctcacttgttgcccaggctggagagcagtggcgtgatcttggcacaatgcaagatccaccttccgggttcacgccattctcctgcctca

SEQ ID NO: 173276 - DNA, 201 bp, Homo sapiens
ttaatcctccctgctatgattttaataccatagatatactgtataactgtttacatactttagctcttcttgaagggacaagaccattatgatatctgagratttttttctttcccccaagaattaatttttgctccctaggggcaatattcctgtctttgaaaatgcatcatagagaacaagtgctgagccagtcagcta

SEQ ID NO: 173277 - DNA, 201 bp, Homo sapiens
aatattatttaattttctagtcttattttatgctcagattacaagtatagaagaatgtgaacacagtcttttaaagaaatgcgtaaaatggaatcattattttgtagaaacttctgaagcctcaaatcagaaaagattttatatcagaaggaaattttattatgaataataatttctcaaaatggagaatgaaatctgttt

SEQ ID NO: 173278 - DNA, 201 bp, Homo sapiens
cacatcctctccagcacctgttgtttactgactttttaatgattgccattctaactggtgtgggatggtatctcattgtggttttgatttgcatttctcckatggccagtgatggtgagcattttttcatgtgctttttggctgcataaatgtcttcttttgagaagtgtctgttcatgtcctttgcccactttttgatgg

SEQ ID NO: 173279 - DNA, 201 bp, Homo sapiens
taatattatttaattttctagtcttattttatgctcagattacaagtatagaagaatgtgaacacagtcttttaaagaaatgcgtaaaatggaatcattattttgtagaaacttctgaagcctcaaatcagaaaagattttatatcagaaggaaattttattatgaataataatttctcaaaatggagaatgaaatctgtt

SEQ ID NO: 173280 - DNA, 201 bp, Homo sapiens
ttaatattatttaattttctagtcttattttatgctcagattacaagtatagaagaatgtgaacacagtcttttaaagaaatgcgtaaaatggaatcattattttgtagaaacttctgaagcctcaaatcagaaaagattttatatcagaaggaaattttattatgaataataatttctcaaaatggagaatgaaatctgt

SEQ ID NO: 173281 - DNA, 201 bp, Homo sapiens
ttaaaaattttccatcactaaaaatataaacattttatttaaaacattatttgaaatcaatcaagttatttatttgtaccaactggaattatctagatcartgctactcacaacatggtacccaaaccagcaacatcagcatcaccagaggttgttgaaaaatgcagaatctcaggcccaactccacagctatggaatcac

SEQ ID NO: 173282 - DNA, 201 bp, Homo sapiens
aacatattactgtagttcagtgatatggtttagatctgtgtctccaccaaatctcatgttgaattgtaatccccagtgctggaggtgcggcatggtggggrgtgattgaatcatgggggcaggattagagtatctctcaggacaaactaaaacaaaaacacaaaataccaaaagactaataaaaaaaaacttaatgcaaga

SEQ ID NO: 173283 - DNA, 201 bp, Homo sapiens
atctgatccaatacgtagggaatctaaccttagttcatgttgatggagtattaaggaaattaaccactgcagtatcaattggtccaaatagagtagaagtrttatgcatcccatgccaaattttcagcgctctaatgcatggggtctgctgggtctaatggcaatgtagcacaataaaacaaaacacccaaaatctttagt

SEQ ID NO: 173284 - DNA, 201 bp, Homo sapiens
cttcagctaatatttttaaataattattatgcatcagatacttgacactttttctattaacaattatattcctaataatgtgaaggtttttgtttgtaaakgagaatttattttttgtaacatccatatgttctaaaaggaagtcaaggaaaaaatgagcaatgaggctgtacctaatggagctatcaaaacaaaactgtc

SEQ ID NO: 173285 - DNA, 201 bp, Homo sapiens
agaaaactaggtttatgccgtgatttggggccaagaggtgcacatccattgctaatgaggtacaattcagcatcactaaattgacttttttttttttttttgagacagagtttcactattgttgcccaggctggagtgcaatggcacgatcttggctcactgcaacctccgcctcccgggttcaagcgattctctggcctc

SEQ ID NO: 173286 - DNA, 201 bp, Homo sapiens
tatcccacagatcagaaatccttcgctgcctcccccagaaaaaatgtctgaagcctattctgcaaagattgctctttttggtgctgggcctgcaagtatamgttgtgcttcctttttggctcgattggggtactctgacatcactatatttgaaaaacaagaatatgttggtggtttaaggtaatgcctacatttatttca

SEQ ID NO: 173287 - DNA, 201 bp, Homo sapiens
tattttcagagtaatttcacagttttttttaataataacaaaggatttattatcatttgcagatgaaataaatgcaccatcccatacttgaaaggtttcartaagccttaacatttttcaggttgtaccaaggcactgccactgcctagttatattatgcacccatttctagagtaaaaaaactacacctccctcaacatc

SEQ ID NO: 173288 - DNA, 201 bp, Homo sapiens
gactgaggtgggaggattacttaagcccagaagttggaggctatagtgagctatgatcacaccactgcactctagcctgggtgacagagtgagacctcatstttaaacaacaacaacaacaacaaaacaacgagagagaaagagagagaaaggagcctgtggattttgcaaagagacaaagctttgattcaggaaatagca

SEQ ID NO: 173289 - DNA, 201 bp, Homo sapiens
catgcacctctgtcacaggaaatcattttgttgcttcagagctttctttggtgatcacattgaatagcaaaagggttaacaggtattgaagaacatgctcacacacacacacacacacacacacacacacacaagacaagcaactactgtgacagagattgcaaatcatgttcagggagaagcattaatgcctttagaaag

SEQ ID NO: 173290 - DNA, 201 bp, Homo sapiens
ggagtcttgctctttcccaggctggagtgcagtggtgcgatctcagcttactgcaagctgcgcctcctgggttcacgccattctcctgcctcagcctcctkagtagctgggactacaggcgcccaccaccatgcccggctaatttttgtatttttagtagagacggagtttcactgtgttagccaggatgatctcgatctc

SEQ ID NO: 173291 - DNA, 201 bp, Homo sapiens
tagctcctcttgttgaattgatccctttaccattatgtaatggccttctttgtcccttttgatctttgttggtttacaatctgttttatcagagactaggmttgcaacccctgcctttttttcttttccatttgcttggtagatcttcctccatccttttattttgagcctatgtgtgtctctgcatgtgagatgggtttc

SEQ ID NO: 173292 - DNA, 201 bp, Homo sapiens
taatctcagtaacaattataaactccatccttgactgcgtgacccattatttttcccagtttaatttctttttttcttgttttagtttgaaattttgacctttttttctgacttcattcccaaataatgagggcatcttaagatagcccccaaatcagtgattactatcacctatataaatggtgttatccagctgtggtg

SEQ ID NO: 173293 - DNA, 201 bp, Homo sapiens
tatatatacgtatacatatatacacacacatatacatatgcacactatatagagatatggtatatgtatatttacataactcacgtgctctctctctcttytctctctctctatatatatatatatatacgtatgtatatgtacttttactttagtaccagtagtaaatatcaaaatatgctctcagaaaatacatttcag

SEQ ID NO: 173294 - DNA, 201 bp, Homo sapiens
gaataaataacaccactgtgcttttttatatttatcatcacccatttaaaaattcataaacatgctctaacaaatagtgggaagttttgcctcttttttcytccttaaactcatattttaaaacaatttctccatcaaattttatcctatttttatgttttttttaaaatttgaacatcttaaggatcctctttggaagta

SEQ ID NO: 173295 - DNA, 201 bp, Homo sapiens
gcttgttgaattaacacagctcaagtcttgcattgacactataacccaacactgagaactgttatcttaccccatttattttggctttgtaggtgatactktatacttgaattagggatttgcactgtatcttaaatgctagaattgtggattaatttgatttgagaatatactagcccttatcatgttcacagtggaaat

SEQ ID NO: 173296 - DNA, 201 bp, Homo sapiens
ttacgtgatctgactggcctagaatattggaagaactggtggacaagactgagtcatgtattagaagccacaaatgactcgagagtaaaggagactgcatwtcaggctaaaaagcaatattggaccagaaaactagtaagtactcagcggctgagagtagagacaacagagttcaagataaggcaagagagaagataagga

SEQ ID NO: 173297 - DNA, 201 bp, Homo sapiens
catttttaaccccatttatagatttgcatattcacagtttgtaatttccttgggttcattttatcagttgactttccagtaggactaggaaccatgttacmtgatttctattctataatttgtctctgcatcccccaccctccctgttactgtactcaagaaatgtgctagcaaaatgaaagaggaattcaaaataataaa

SEQ ID NO: 173298 - DNA, 201 bp, Homo sapiens
attttattgaaatcagaaacctgggttttacctgatttgcaagaatttttgtcactcaatcattagaatcaatcattttctcaaaaccaacaccaatattttgaattattttgtttggtatccccaaatttttatattctatgtatatgttattgtaatatttgagatcaatgaaaaatatgctttttttcgaaagtaagg

SEQ ID NO: 173299 - DNA, 201 bp, Homo sapiens
ttttattgaaatcagaaacctgggttttacctgatttgcaagaatttttgtcactcaatcattagaatcaatcattttctcaaaaccaacaccaatattttgaattattttgtttggtatccccaaatttttatattctatgtatatgttattgtaatatttgagatcaatgaaaaatatgctttttttcgaaagtaaggg

SEQ ID NO: 173300 - DNA, 201 bp, Homo sapiens
agataaggcaagagagaagataaggaataagacaaattaaacgaaggtatcagaggcaccaccttcacaaagaccttaaaattaaggtacttctaccgcaragagaaatttgtacacgcttcctgctgaggtagtcagtcttttatggtgcagtcagtttaaggtttccaactgcgataggtgagctgtcaggaaggaggc

SEQ ID NO: 173301 - DNA, 201 bp, Homo sapiens
tcaacctaagtgtctatcagcagatgaatggataaagaaaatatggtatatatacacaatggactactattcagccttaaaaaagaaagaaattgtgtcayttggaacaatatgactggaactagagaacatgttacgtgaaggaaggcaggcctagagagacaaatattgcatattctcttacatgtggactctaaaaca

SEQ ID NO: 173302 - DNA, 201 bp, Homo sapiens
agatagtggttatcaagtcatttttgtgggttaattcacttagaagttcaaataatttgctctgagtggtcagatgttctcagtcctaaatactcttgccrttgaacatttcagtgtgcctaaagcagatgtcaagatgccctacaggattccaatatagccattctagcaagaaggaattccaaaacacaccttgttcca

SEQ ID NO: 173303 - DNA, 201 bp, Homo sapiens
gagttcaagaccagcctgggcaacatggcaagacctcatctctactaaaaattagaaacaaaaaacataaaacaaaaaaatactagccaggcatggtggcrtgtgcctataatcccagctatttgagagggtgaggcaggaagatcgcttgagcccaagaatttgaggctgcaatgagttctgcacttcagcctgggcaac

SEQ ID NO: 173304 - DNA, 201 bp, Homo sapiens
gccatttgaagtagaaaaggataaaacataaggcttaggatcattgggagagatatttttttctcctcctttttcccttttctctcccaggaattcttcartagactcaattgaagccttgagtttgaggttttgtattctcagatggtaagcacacctattaaaaaagcaatgtattcatgttaactccctggcaccagc

SEQ ID NO: 173305 - DNA, 201 bp, Homo sapiens
aagattttttgtacatcacaatgacacaaattctaccacattcaaactcccacaggtgggactgataaagacaaatgttattcttaaaacaattcttgtargatatattacatctagatgttaaaatgctctgattcaattatttatccattaaacatatatttgtaaaagagcctaccatatgccaggtgctgttctaaa

SEQ ID NO: 173306 - DNA, 201 bp, Homo sapiens
cgtggtaagcctgtgcctaattcaacagatttttgaataaggtagtgagaaatttagtctgtgtcttacatcctagattaaggtggcagcattgcccagggtagagtgggaaaggaagaatgtgaggatgaaacttatcaagtagtctcttacaattgcattaaaattaatgagaaattcattaataatgtttaaagatgg

SEQ ID NO: 173307 - DNA, 201 bp, Homo sapiens
ttagttccatataatagatattggccatcaaaaaaaatttttaagaaagaggatatggaggagagagggcaaggaagggaggaaaaggggaaaaggtgagraagaggaagaaagagagatcacgtcctcacatttggttaggaaagaagaaggaaggattaaggaaatcttcatgaagtagtggcattcgagatgtctttg

SEQ ID NO: 173308 - DNA, 201 bp, Homo sapiens
gtttgtgcatgtcgtcctctacttatttctccttacaatgacgtatgtaagccacatgtcagctgactttacccagtcctgtccttctggaaattgctacmaaatccccagagattctgttctctaggttgcttctggctataaattccagctgtcattgaattctgaatctccctcaaacctccctcctgttggtttcta

SEQ ID NO: 173309 - DNA, 201 bp, Homo sapiens
gtttttgaaggatacttatttgcagaagttgtacaaagtgcagacagtcctgacctacaatggtttatcttatgatttttttttattttacaatggttcayattaagaacttaacaatggttcatcttatgatttttctttctactttacgatagtgtgacttacaatggttcatcttatgacttttgttttactttaaga

SEQ ID NO: 173310 - DNA, 201 bp, Homo sapiens
aatgactattacaacagaaccagatgtaacaccgtggcctagaaataagattcaaaaccgattacaggcttgccttcctgggtaaatgctcttataagttmttcagtcaacccaactgacttctaatttatttaagtgaacttcagtgtctttgaaatccctgattttttaatcttatttgacaggatttcattagttaga

SEQ ID NO: 173311 - DNA, 201 bp, Homo sapiens
aacttatcctttagtctgtcagttgtatagacacacacacacacacacgaaataggtataaaggagatagatagatagatagatagatagatagatagatdgataatagatttcaggtttatactgaataagatacatatatacatatatatatatatatatatatatatatatatatatatatgatactgagtgatatat

SEQ ID NO: 173312 - DNA, 201 bp, Homo sapiens
caaaattttttactcaggatctttgaagaaaaaaaatgtgaaatcatagaaaaatgaatgagagttatgtgtcttgagtgtagacgttaatattctttgartaaagaacccgagtaaatatctttgagtaaagaacctgagtaaataatggaccaaaggagacataaatggcacagatatttgaatagatgcttaacatca

SEQ ID NO: 173313 - DNA, 201 bp, Homo sapiens
caggggtctggagttgcattttttttttatggagtcctgctctgttgtccaggctggaatgcagtggtgtgatctctgctcactgcaacctctgcctccakggttcaagcgattctcttacctcagcctcctgagtagctgggattacagatacacaccactatgcctggctaatttttttttttttttttttgtattttt

SEQ ID NO: 173314 - DNA, 201 bp, Homo sapiens
tatggatttggaaaaatattttcaaaccatatgtcttttaaggggttaatatttaaaatatataaggagctctcacaattcaaaagcaaaaaaaaaaaaamaacaacctgatttcaaaattttttactcaggatctttgaagaaaaaaaatgtgaaatcatagaaaaatgaatgagagttatgtgtcttgagtgtagacgt

SEQ ID NO: 173315 - DNA, 201 bp, Homo sapiens
agaccagcctggccaacatggtgaaaccctgtctatactaaaaaatacaaaaaattagctgggtgtggtggcacgtgcctgtagtcccagctacttgcaargctgaggcaggagaatctcttgaactgggaggtggaggttgcagtgatccaaaatcatgccattgcactccatcctgggtgacagagcaagactccataa

SEQ ID NO: 173316 - DNA, 201 bp, Homo sapiens
tgagtatatgagaaaaatacatgtgctatgtatgttgctacataatttcacaattatctattaaatcaagcaagttaattgtatcactcaacttatctacrtatttactgttttcaatctgactgatcagtcaaaatctaacagatacctattaaaatttcccattgttgtgtttttattttcttttattttttgagatag

SEQ ID NO: 173317 - DNA, 201 bp, Homo sapiens
tactcctccttcaatttctcttggtaactagcctttactgtcactttcctgcaaatataagcagttgataaaggggtgaggtaggtcatctgttggtttakatttagatttattaaattctagtcaaagaacccaatgtataaaacagctattttgggggaaattgccaaggtattcttgtggccaactgtatgtcaagta

SEQ ID NO: 173318 - DNA, 201 bp, Homo sapiens
taagagcatttctatttggtatataataagcatatatacaatatgtcacgtacatacttggatacaaattttaaaatgtagactaggtagtagaactgttkagttgattaaaaattgggccaggcgggcatgccacctaatgcctataatcccagcaattttggaggctgaagcgggaggatgcttgagcccggtgttcaa

SEQ ID NO: 173319 - DNA, 201 bp, Homo sapiens
gaaaataaataagcaaatgtgataacggggacacttgcttccttagaggatgtcacagggaaattatttatagtggctgaataggagatacaaagttcagmaaacctcccacagattctttcctgaaggccacgacttcctgtagccaattgcatcaaacatagtggcttttctataagttcaccatatagagtttcattc

SEQ ID NO: 173320 - DNA, 201 bp, Homo sapiens
aaaacctgagtatgatagcattgacccatctactcattcattcattcatccatcaatccaattgagtgtcctctgctccaaaaactgtagtgtgctctgtrgaacacaggcaagcagtgtggacaaattgctgttctcatggaacctatgatcttgtgggaaaaacacaatcaacagtaaaccctcaataattttctacaa

SEQ ID NO: 173321 - DNA, 201 bp, Homo sapiens
agtagaagattttaaaataaaaacctgagtatgatagcattgacccatctactcattcattcattcatccatcaatccaattgagtgtcctctgctccaaraactgtagtgtgctctgtggaacacaggcaagcagtgtggacaaattgctgttctcatggaacctatgatcttgtgggaaaaacacaatcaacagtaaac

SEQ ID NO: 173322 - DNA, 201 bp, Homo sapiens
agcggaggtcatgccactgcactccagactgggcggcagagtgagactcctcaaaaaaaaaaaaaaaaaaaagaaaagaaaaagggaatagaaaattttckcaacctactcatctgacaaagggctaatatccagaatctacaatgaactcaaacaaatttacaagaaaaaaacaaacagccccatcaaaaagtgggcgaa

SEQ ID NO: 173323 - DNA, 201 bp, Homo sapiens
acaaaaaaattagcggggtgtggtggcgggcgcctgtagtcccagctactcgggaggctgagacaggagaatggcgtgaacccgggaggcagagctcgcartgagtggagatcacacccctgcactccagcctgggcgacagagtcagactccatctcaaaaaacaaacaacaacaacaaaaaatcaaccctttacttgtt

SEQ ID NO: 173324 - DNA, 201 bp, Homo sapiens
aatagtgtttaaaaatactctttttggtcaggcgcagtggttcacgcctgtaatcccagcactttgggaagccggggcgggtggatcacgaggtcaggagytcgagaccatcctggctaacacagtgaaaccccgtctctactaaaaatacaaaaaaattagcggggtgtggtggcgggcgcctgtagtcccagctactcg

SEQ ID NO: 173325 - DNA, 201 bp, Homo sapiens
ataggcatgggcaaggacttcatgtctaaaacactaaaaacaatggcaacaaaagccaaaattgacaaataggatctaattaaactaaagagcttctgcamagcaaaagaaaccaccatcagagtgaacaggcaacctacagaatgggagaaaatttttgcaacctactcatctgacaaagggctaatatccagaatctac

SEQ ID NO: 173326 - DNA, 201 bp, Homo sapiens
ttaagaaatctttactaatcttctatatatatttttttcacagcatatatatatatatatatatatatatatatatatatatatatatatatatatattawgtatgtatgtattttcacagataagcccacagattcattaaaagtgaacgttttttacctggtgtgtcactgtcaggccttatttaataacaacaagttg

SEQ ID NO: 173327 - DNA, 201 bp, Homo sapiens
gtttccaaatgtcaagtgtcatctttccagctgttagatgaatgggtagccaagaggcatttatttgggtgtgcagcccctgtgaaatctgggtgaggcargagaaaaggctataatttggtgtttagtttaccagcatcagtatagttgcaaatctcctagccaggcaaaggatttcattttgtagtttaatgattgaca

SEQ ID NO: 173328 - DNA, 201 bp, Homo sapiens
tttaagaaatctttactaatcttctatatatatttttttcacagcatatatatatatatatatatatatatatatatatatatatatatatatatatattatgtatgtatgtattttcacagataagcccacagattcattaaaagtgaacgttttttacctggtgtgtcactgtcaggccttatttaataacaacaagtt

SEQ ID NO: 173329 - DNA, 201 bp, Homo sapiens
gaatgggtagccaagaggcatttatttgggtgtgcagcccctgtgaaatctgggtgaggcaggagaaaaggctataatttggtgtttagtttaccagcatmagtatagttgcaaatctcctagccaggcaaaggatttcattttgtagtttaatgattgacagccagctgcagtgttcttgcacttaaagaataaaaatgc

SEQ ID NO: 173330 - DNA, 201 bp, Homo sapiens
aaagaataaaaatgcctgaagaaagggcatcatcgatatgtcatactaatttttgaatcctctactgcttcagataaaaacaatcttatcaacagagctgmcttcttcttctctaaacctttccaactgagaagaggtaggcttttgaaatgacaactgtattaaaatcttgagacttactgaaaaagtgtccttcagttt

SEQ ID NO: 173331 - DNA, 201 bp, Homo sapiens
cattgggaaactgggcctttagacttaactagtaccagaaatgtatgtgatctcacctttatctctcgcaatggcaagtagtaaagtcaaatttgcttacrgtcatagaaaaatgaagtcttcttcagttgcttataaataaacatacattaaaccctatagtactctccacataattttcctctttgatagtacattcag

SEQ ID NO: 173332 - DNA, 201 bp, Homo sapiens
aagagttacaaatctgttggataattaattccttctcccgatagggcacaggcttcattcttagtttgtgcttttgggtgtcgttgtcatttagcataaakcctatcaaatctttgtgagtttcgcttttacatttccttcatctgtgacgagaagattctattagcaaccctggcaccttccattaaagtctacaacttc

SEQ ID NO: 173333 - DNA, 201 bp, Homo sapiens
gctatgtacatgcaaaataattaaattggaatgttttctttcaccacagacaaaaattaactcacaattaattaaagactaaaatgtaagacctgcaactstaaaactccttagaaggaagcatatgggaaaagcttcatgacattggttttggcaataatttcatggatatgacaccaaaagtgcagtcaacaaaagcaa

SEQ ID NO: 173334 - DNA, 201 bp, Homo sapiens
tgtgagtttcgcttttacatttccttcatctgtgacgagaagattctattagcaaccctggcaccttccattaaagtctacaacttccaactgccaggaarggataatgaagtgataaatttaatttgataccaaaatatggaaggcagagatatctaagtgaatttatagcattagctatgtctttcttcttagcattaa

SEQ ID NO: 173335 - DNA, 201 bp, Homo sapiens
ttcaatcaaaccatcatgaataactttttaggttagtttcttgttttgaggacattaataatttagaaaattcatgtttatgtaagatgggggcagcagcygggcatggtggctcacgcctgtaatcccagcactttgggaggccaaggcgggcagatcacgaggtcaggaaatcaagaccatcctggccaacatggtgaa

SEQ ID NO: 173336 - DNA, 201 bp, Homo sapiens
gacattaataatttagaaaattcatgtttatgtaagatgggggcagcagccgggcatggtggctcacgcctgtaatcccagcactttgggaggccaaggcrggcagatcacgaggtcaggaaatcaagaccatcctggccaacatggtgaaaccctgtctctacaaaaaatacaaaaattagctgggcgtggtggcaggcg

SEQ ID NO: 173337 - DNA, 201 bp, Homo sapiens
tcaccaggaactgaatcagccagcacctcaaccaccgacttcccagcctttggaactataagaaataaatctctgttcattataaattacccagtctttgktattctgttaaaacactataaaatggactaagacaggaaattggtaccgagaagtgtgactgctgctataacaaatatctgaaaatgtggaaatgacttt

SEQ ID NO: 173338 - DNA, 201 bp, Homo sapiens
tattgtaaatattggcccacattatgtagccatactcaagtatgtcttttcctacaaacatgtgcatattttttgtctcaattttaaaagtttccagttgrgcacttgatcccacaaacacaggagatttacacctggactcatgctagcaaattgaccatgaattttgatctggaaacacaagatcctttatagtttttc

SEQ ID NO: 173339 - DNA, 201 bp, Homo sapiens
tctctaattacccagggcaattacttactcttcccactagatggctcttggagagactggcctaaaatcagcaatcttccagagcttcaatgccactctaygttagaatcatagaataatgggcttttatagatttggaataaagctaatgattatttcatctaaactgattatcaccttactggaaactaatttgaaaaa

SEQ ID NO: 173340 - DNA, 201 bp, Homo sapiens
gactcctaatgggaaattgttagtgattctattgctttctttactacttttcttgcctcctctcttcctttaacaaatagagtgctttctatatgccactstgctggaatggcatgaaggaaacatacatggccccaggccttcgtggtgcttataacctatgtccctccgaaaagcacctgaaatatggaagagtttaca

SEQ ID NO: 173341 - DNA, 201 bp, Homo sapiens
cctcttagaaatggtgaaaattggaccacatttttttgtttagtgtaaggatcattcatttgtattttaagacaagaaaggcacttttgaattttcaactragtttgagattttaaatgcttgaaaattatgggattacataactaagattaaaaacccatgttttgggaaggaagatgttaggatgaatggtgagggact

SEQ ID NO: 173342 - DNA, 201 bp, Homo sapiens
gggaaactcagaaaaatggtggattaagctgtcttttaggctgattttttaaaatatcaattatctccaaaacactttttaaataaaaaaaatatatatawaagaccccacctggaaagagtaacccactaggtactgttcacctttgcgtaaattattttatcagatctttttctatttaaactcccaacactgaggtac

SEQ ID NO: 173343 - DNA, 201 bp, Homo sapiens
atgtaagggattctttcatctggcattcaaggctgtttgtgatctccctgcaacctattttgccagttttttgtttgtttgttcgtttgtttgtttgtttkttttttgagacagagtctcactctgtcaccaggctggagtcagtggcgcgatctcagctcactgcaatctctgcctcctgagttcaggcgattcttctcc

SEQ ID NO: 173344 - DNA, 201 bp, Homo sapiens
gtgatacttcttgaccaacaaatgtaagggattctttcatctggcattcaaggctgtttgtgatctccctgcaacctattttgccagttttttgtttgttygttcgtttgtttgtttgtttgttttttgagacagagtctcactctgtcaccaggctggagtcagtggcgcgatctcagctcactgcaatctctgcctcct

SEQ ID NO: 173345 - DNA, 201 bp, Homo sapiens
tatggaactttcatcagggaaaagcctagtttgatgatgaaatttcaaagcagatatcccaaaagaacacacacaccccccccacacacacacacacaccctacacatacaccaaacagaagaacacatgggcaatggagggatataccagtgccccagagacagagacctctggcactaaagagctgttcttgtcatgca

SEQ ID NO: 173346 - DNA, 201 bp, Homo sapiens
tagtatggaactttcatcagggaaaagcctagtttgatgatgaaatttcaaagcagatatcccaaaagaacacacacaccccccccacacacacacacacaccctacacatacaccaaacagaagaacacatgggcaatggagggatataccagtgccccagagacagagacctctggcactaaagagctgttcttgtcat

SEQ ID NO: 173347 - DNA, 201 bp, Homo sapiens
aaagttcttttaaaatcatttatgagcaaatgctatggaaaaggagattcaggggatgctggatggggaagaaaaatgtttggtttaatctgaagagacartggtggtttattgctgattacaggcaacccacagaaaccttcagctttcagatcagatatggcacccaccttatctcatatgacaaaagtcatccttcgg

SEQ ID NO: 173348 - DNA, 201 bp, Homo sapiens
ctaaacattgtcatactgtagcgaagaagagagactggtccttgttctcttggagattacaagctaatcatggacagaaactattttagttttttttttttaagatacagtgtgtactaaacatttgcaggaggaaaaggcatgcttagaagaaaaatagagaatgtggagctactttaatttgggtatcagggaagcgtt

SEQ ID NO: 173349 - DNA, 201 bp, Homo sapiens
cagaatacaaaataacccaattgtccattcattcccagctcttgaactcttaaatctcgtttagatatggtttaaaccaggaaataaattagccacatccrtagaaactttggctataattgcctagtgtatttttccactagtagtgtttgaaatgcttcctatgaagtaaatgctttacaaaggtagcagaaggagatt

SEQ ID NO: 173350 - DNA, 201 bp, Homo sapiens
tgacctcgtgatccgcccacctcggcctcccaaagtgctgggattacagacaggcatgagccaccgcacccagcctcaaattctttcttgcagttagttcraatctttttcatacagctcaaagcccttagcctcttgatcatcatcctcccatttctctcatatcatcctttcattgcctctcattgcccaaccgaattc

SEQ ID NO: 173351 - DNA, 201 bp, Homo sapiens
gcatgataagccatgtgcagtgagatagctatgcacatgtctatgcctcaaggagagaggaagctaacaggaagctgacttatcatggaaaagaactgaargaagatttcctggaaagaggaaggattgagataaattaatcttcaaggttttaggcttataaataattggcaaactattatccacctcttctagaatcta

SEQ ID NO: 173352 - DNA, 201 bp, Homo sapiens
gattggaacctggctgcagacacatcctgtgaggtacgcatatctgcagccttgtagagaaacttaatacatacatgttgaatgattactttagataggaytggttatgtagcttcacattataacctggcctagttataaccttaaacatgaaaaaggcagccattttgaactcataacatagactctacaaccagtgtc

SEQ ID NO: 173353 - DNA, 201 bp, Homo sapiens
ttagaataatactcttatgtggctacatcctttcattttagccaaagatgctaagtttcgtggactgtgatactacctatccaatactgaccacttaaatrtgtaataatataaactgtgtatatcatggattagatgatcatttaacttatatgtactcaaacgtatcatttcattaagtcaaacaaaggctttaaggaa

SEQ ID NO: 173354 - DNA, 201 bp, Homo sapiens
ggtccctgcaaatgacatgatctcattcctttttatggctgaatagtattccatggtgtacatgtaccacattttctttatccagtctatcattgatgggmatttaggttgattccatgtctttgctattgtgaatagtgctgcagtgaacatacatatgcatgtgtctttataatgggatgatttatattcctttgtgta

SEQ ID NO: 173355 - DNA, 201 bp, Homo sapiens
ttccaggggttatctgagggtatggggggtggtgtgacttgacaatattttgctgtttttaagggataagaactatgaggcctgataacatctgggacagktatagtttaaatttgtcaaatgaagatttatacttttttgagctggcagaatccttcatgtagaaataatgaatgaaaatttgatagttgatttaacata

SEQ ID NO: 173356 - DNA, 201 bp, Homo sapiens
gtagcttctggacattagtccttcgttggatgtatagatcatgaagattttctcccattctgtgggttgtctgttaactctgctgattatttcttttgctrtacaggaagtttttagtctaattaagtctcatctattatctttgtttttgttgcatttgcttttgggtgcttggtcatgaagtctttgcctaagccaatg

SEQ ID NO: 173357 - DNA, 201 bp, Homo sapiens
cttcaagtagtgaaagttacagggtaataaagatggtctttggggaaaaaatttagcaaagttgatagtagagattatgaatattgctgttcattctttcmagaccaccaaagcaggaacagattgttaatataactgaaatgtcaaaatgaacttttcgtgtagaatgaccagagaacttgtagttctttccatttgggg

SEQ ID NO: 173358 - DNA, 201 bp, Homo sapiens
ttttaagaaatctttactaatcttctatatatatttttttcacagcatatatatatatatatatatatatatatatatatatatatatatatatatatattatgtatgtatgtattttcacagataagcccacagattcattaaaagtgaacgttttttacctggtgtgtcactgtcaggccttatttaataacaacaagt

SEQ ID NO: 173359 - DNA, 201 bp, Homo sapiens
cagcgattcttgtgcctcagcctctggaatagctgggattacaggcatgagccagcacgcccggctaattttttttttttttttttttttttttttttttkgtggagatgggtttttgtcatgttggtcaggctgatctcgaattcctgacctcaagtgatccacccaccttggcctcacaaagtgctgggattacaggca

SEQ ID NO: 173360 - DNA, 201 bp, Homo sapiens
gaattggtgttcctgtagagttcagtatactagagcattgtccatttgtttttgtttttgtttttgtttttttgagacagagtctcactctgtcacccagsctggagtgcagtggtgcgatctcagctcactgcaacctctgcctcccaggtgcagcgattcttgtgcctcagcctctggaatagctgggattacaggcat

SEQ ID NO: 173361 - DNA, 201 bp, Homo sapiens
gcttgaacccgggaggcggaggttgcagtgaaccgagatcatgccactgcactccagcatgtgtgacagagccagactccatctagaaaaaaaaaaaaaaagaaaaaaaatccttgacagaataattacatgtctaatgaatcaagtaataaaatgtcaggacatgctatgcctgtgattttttttgtcaatttctgtttc

SEQ ID NO: 173362 - DNA, 201 bp, Homo sapiens
ttatttttcagctctgccattagcttgagtcagatttttaactcagccagaacatgtttttttaaccaatattagctaaagtatgaattaaaatcagtatwtatatatatatatatatatatatatatatatatatatatacttaggatggtcataaggtgggaaatatttgaatttataattttagtttggtagttcagt

SEQ ID NO: 173363 - DNA, 201 bp, Homo sapiens
tagtgaaagagtgtgttcaagttcacacagctaggatggagtaaaagtgggattcaaacctatagtttggctcagagtccacaccatatatatatatatayacacacacacacacacacacaaactctctctttctactgtgtatagatggatgataaatagataatgtaggaaattagtaacagtgtatttcctatgtca

SEQ ID NO: 173364 - DNA, 201 bp, Homo sapiens
agtagtgaaagagtgtgttcaagttcacacagctaggatggagtaaaagtgggattcaaacctatagtttggctcagagtccacaccatatatatatatayacacacacacacacacacacacaaactctctctttctactgtgtatagatggatgataaatagataatgtaggaaattagtaacagtgtatttcctatgt

SEQ ID NO: 173365 - DNA, 201 bp, Homo sapiens
aaagacactaagtacccaaggtcactagtctaatacattcagtaaatatgttgagtatctctctgccaagtcttatgctaggtgctgaaattaaatcaagygggagatagcatatatgtaagcaaataagtacagagtacgattaggaagcagctttgcttgtgggaagctgaggaggtttttttttctttctttcttttc

SEQ ID NO: 173366 - DNA, 201 bp, Homo sapiens
ttccaaaaaaaattgcaatggaacataaagaaaataacaaaacattttgaattttatttaaaagaagaaaacttaatcttgtattaccatgagtgttttgraaaccataaagcataagcctcagaacaaaataagaaaaaataggaaatagaaagtgagttgacaaaatataaaagaagatgtgcgttcaaacaacataat

SEQ ID NO: 173367 - DNA, 201 bp, Homo sapiens
attttgtttttttttttttaagaaaaaattttctaaaaatctatgcatattgcttatcagtttcgccacagggtaactagtatctaatagctaattttttyttcttcttcagtctgtatctctgtatccgtctctgcccttgaagttctagcaataagcctcagggctctgcccattccccagttgatttttcctttcaaa

SEQ ID NO: 173368 - DNA, 201 bp, Homo sapiens
ctggaaaccataatctgtcctctatctctaaaattttctaatttcaaaaatattgtataaatagatttatacaagtgtaatcttttgaaattggcttttawaaaaaataagcatcatacccttgagatgcatccaagattttgcctatgtcaatagctagttccttttttttttgctgatttgtattccatgctatgtata

SEQ ID NO: 173369 - DNA, 201 bp, Homo sapiens
atcaacactgattaaatatctgcctttttgacctcataatcataccatgttctagtaaatttgctttccctttcttttctttcttcgttttttttttttttcaaagacaaaatctcattctgtcgcccaggctgtagtgcagaggtacaatcatggctcactgaagcctcaaaactcctgggctcaagccattctcctgcc

SEQ ID NO: 173370 - DNA, 201 bp, Homo sapiens
attgcaaagacttgaaaccaacccaaatgcccatcagagatagactagataaagaaaatgtggctcatatataccatggaatactacgcagcctccaaaakggattagttcatgtgctttgcagggacatggatgaagctggaaaccaccattctcagcaaactaacacaggaacagagaaccaaacaccacatattatca

SEQ ID NO: 173371 - DNA, 201 bp, Homo sapiens
gagtgagagagatgggagaggaaaatgactgtgcttggtgaccaactaggggcaacagcaaagaagtcagaggtcacacgaagctttctagtctctgcagytgtgttactatatatcaatgatcgtgacaaggaagaccaagatggaatatatgaggcaactgaaaatttgaatctagcactcagcaaatgaccattttaa

SEQ ID NO: 173372 - DNA, 201 bp, Homo sapiens
ataagccaacaagacagcaaactatatattttattgtggctttaccagtaactgagcaacttacagatattcatttagcctcctttggcttttgttttctstttgtaaaataaagcttttaaagtagatagtctctttgattgttctagctctacataataatacatagaactgaaaaagttgattcaggacactctatgg

SEQ ID NO: 173373 - DNA, 201 bp, Homo sapiens
ctttttttttttttgccaaataagcatctgcacattgtttttcacctttgagataccttttagagagaaagaaatatgcaaaatttgattagtaaattatyatactttgcattttatatgcttcaaaatgttaatgtctcatagaaattagatgtttacaaaaagtgtatacattttcttaagttgtattaattagtcaaa

SEQ ID NO: 173374 - DNA, 201 bp, Homo sapiens
taggagggaatatgatgagataaaagagttgaggttaaagtgtaagagcaaagcatctacatccaaaggccttgatgtctcttggaaatctgagtttggakattgcaattgaggtttgggaggaattaaccttgtgatgggagctgaaagtagatatgcttgagttctctgagcaagggtacagagggggaacaggctttt

SEQ ID NO: 173375 - DNA, 201 bp, Homo sapiens; identical to SEQ ID NO: 31066
  misc_feature (1)...(201): n = A,T,C or G

SEQ ID NO: 173376 - DNA, 201 bp, Homo sapiens
  misc_feature (1)...(201): n = A,T,C or G
ttcgaagagcttttgaagctggatggggttttgccctcaccaaaactttctctcttgataaggtaagaaaatattattgaagtcatatagaaatgtctatngtatattttaattaaggtataaacattataatggattttttttactaagaaatactacttattaaactatttgacaagacctatcattacacattaatct

SEQ ID NO: 173377 - DNA, 201 bp, Homo sapiens
aagatagtaaagtcatatttaaaatatagttatgaaatcatttttctatacaaatgtatatcggctccaagtttaaattttgaaaggtgggagagaaatcratctgtcaagcttgattaaagctaaattatcatgacaaaacagagaagtgatctgtttaagagggaatattagaaatggtttggacttcacataaaataa

SEQ ID NO: 173378 - DNA, 201 bp, Homo sapiens
aagacatgttttctatcttccatatacccaacacaaaacgatacagtcaagagaaccacagtagataaaatctcctttagaaactggagaaatggaaggcacatagcaatcacttgtccatagcaattttgaaattcagtttggcacatattttcagggcctcttgctccagggatggagaatcagggtccatttatgctc

SEQ ID NO: 173379 - DNA, 201 bp, Homo sapiens
tcccttcaatgcgtatataaatctctatatcttctgcctcattattcatttatttattttgattatttgttttggtttctctagttcatgtaaaaaaaaaracttctgaaatgtctggagattcaagacatcctcaatttagtttttaagtgtgagatattaaaaagttgattggaagccttgagtatgtgagtgaaattt

SEQ ID NO: 173380 - DNA, 201 bp, Homo sapiens
attccaggggttatctgagggtatggggggtggtgtgacttgacaatattttgctgtttttaagggataagaactatgaggcctgataacatctgggacakttatagtttaaatttgtcaaatgaagatttatacttttttgagctggcagaatccttcatgtagaaataatgaatgaaaatttgatagttgatttaacat

SEQ ID NO: 173381 - DNA, 201 bp, Homo sapiens
attttgtaagcagctaatcatgatttgagcaaacaatgaattctttaattgcttaaaaataggattttcacatgaagaagttgggcaaaaaattgtaatckttatagagaaatctgaaatctgagatacaaaaatctgattccatctgaaatcatgtactgaaatcactatggagtctgtttctgtagttatttgatcata

SEQ ID NO: 173382 - DNA, 201 bp, Homo sapiens
atatagttcattttaagcacctgcaagaataagtcagttgccctgtcagcttccagatgcagtggaatgttcatgttagatcttacatatttcaaacttcyaatttttaattactctcttctcggtttggagaagagggaggaacagatataaagagctatgaagttttgaaagagagataataaactgaaaataaataag

SEQ ID NO: 173383 - DNA, 201 bp, Homo sapiens
gactctttctgaaggagacttgattacagccatatgatgggtctgtgagttacctttttataaaccaatacaacacaagattatataaaaggaaaagaccratgtttgcagtgtaaagtgcctccaaattcttgcttactgtggtgatgactggcattcttcccagtgggagtctggagatttctttatgctttctggaaa

SEQ ID NO: 173384 - DNA, 201 bp, Homo sapiens
atctcactccacagaatacaaaataacccaattgtccattcattcccagctcttgaactcttaaatctcgtttagatatggtttaaaccaggaaataaatyagccacatccgtagaaactttggctataattgcctagtgtatttttccactagtagtgtttgaaatgcttcctatgaagtaaatgctttacaaaggtagc

SEQ ID NO: 173385 - DNA, 201 bp, Homo sapiens
cacctagatttaatactgacattgactgcaaatctcactccacagaatacaaaataacccaattgtccattcattcccagctcttgaactcttaaatctcrtttagatatggtttaaaccaggaaataaattagccacatccgtagaaactttggctataattgcctagtgtatttttccactagtagtgtttgaaatgct

SEQ ID NO: 173386 - DNA, 201 bp, Homo sapiens
ccagcttggccaacatggtgaaaccccatctctactaaaaatacaaaaattagccaggcatggtcatgcacacctgttgtcccagctactcggaggctgargcaggagaatcgctcgaactccggaggcggaggttgcggtgacccaagatcgcaccactgcactccagcctgagttacagagccagactccatctcaagt

SEQ ID NO: 173387 - DNA, 201 bp, Homo sapiens
ttgggagatttctttgatatcatacctgtaacttattttttattgatcattatattttaacttttgtacaactctttctgcttttgatagtttttaaaatratgttgtatttataatcgaacaataattgtatttttatggggtgtgtagtgatgttccagtgcacgaatacattgtataatgatcaaatcggggtaatta

SEQ ID NO: 173388 - DNA, 201 bp, Homo sapiens
aacccttgttttaatagcaagcttatactagatgagggtgtggtaatattttgtagaaatagtgtgtgtgtgtgtgtgtgtgtgtgctcgcgcgtgtgcgygcgcgtgcacgcatgtgtgtttgtgtctgggtgtttgttccttgtacattatttgaaatcactctcaaagacctttctttagtttcaccctttttatata

SEQ ID NO: 173389 - DNA, 201 bp, Homo sapiens
ttggttgtggtaatattatatgtagatgtctaattatctatttttttcctttctggaaagttattcaacacagagaataaagcagtgtccaaagaaatgtrtaaatgtcaacagcaagacccttaccaaaagcataatgacagtttcaaaagaggatactataatttcctatttacaactttaaaagttttgtatcttcta

SEQ ID NO: 173390 - DNA, 201 bp, Homo sapiens
taccatgagcttgggaatttaagaaacaacaagtatcagtgaggcaggagtctgataaacaaggtgaaagtggtatgatgtaatttataacgaggattccyagtatctaataatggcactgtccacggatgaacgggacagtcttgctattactatctattggggtaaaattgaagggacaaggcaaaatataactgaaaa

SEQ ID NO: 173391 - DNA, 201 bp, Homo sapiens
ttgcctgcctcggcctcccaaagtactgggattacaggtgtgagccactgtgccccgcttctctcacacacttaaaaataaaaattatcttgtaataaacygtttactcatattttaaaagtttgctcttggaaagaaaaacacgtcatcaatgttctccaagtaaaatgcttttaggggaaacttttgaatgttttactg

SEQ ID NO: 173392 - DNA, 201 bp, Homo sapiens
tgtcaaaacaaaaaaagttgaccattaaatttgattcttttatttaaaatttcaaaggatgacaatggaagccatatagcactactttttttttttttgcyaaataagcatctgcacattgtttttcacctttgagataccttttagagagaaagaaatatgcaaaatttgattagtaaattatcatactttgcattttat

SEQ ID NO: 173393 - DNA, 201 bp, Homo sapiens
caatgtgttttaaaaagcatagacctgaagtcaatgggaatttgacaagacagcctgcatgttattgtaagccattgcaagttttatgttgttcttcaccytaatttttaatgtgtaaactttaatgaaattcagtttttaaaagctacttaataaaataattttatttattccctaaggaaatggaattgtcaaaacaaa

SEQ ID NO: 173394 - DNA, 201 bp, Homo sapiens
ttttcctcatcaatgtaatcccagtagtcttaggaatgattttgttgaattgtttgacaaaacctaacttggctgcttgtaatttatagttgttcaccccygtcactttgcagtttttccctactaaaaaatttagattgtcttgaagctgaattgttgactggatttcctatgtagttcacagtatggttacagaatacc

SEQ ID NO: 173395 - DNA, 201 bp, Homo sapiens
taaaaaaggatgagtccatgtcctttgtagggacatggatgaagctggaaaccatcattctgagcaaactatcccaaggacagaaaaccaaacaccgcatrttctcactcataggtgggaactgaacaatgagaacacttggacacaaggtagggaacatcacacaccggggcctgttgtggggtggggggagtggggagg

SEQ ID NO: 173396 - DNA, 201 bp, Homo sapiens
cattgtggaagacagtgtggcagttcctcaaggatctagaactagaaataccatttgacccagtgatcccattactgagtatatacccaaaggattataartcatgctgctataaagacacatacacacatatgtttattgtggcactattcacaatagcagacttggaaccaacccaaatgtccatcaatgatagactgg

SEQ ID NO: 173397 - DNA, 201 bp, Homo sapiens
cactgttggtgggactgtaaactaattcaaccattgtggaagacagtgtggcagttcctcaaggatctagaactagaaataccatttgacccagtgatccmattactgagtatatacccaaaggattataaatcatgctgctataaagacacatacacacatatgtttattgtggcactattcacaatagcagacttggaa

SEQ ID NO: 173398 - DNA, 201 bp, Homo sapiens
ttaaacctctacaacagtttgttcaccattcttccagcctttactaagatcttactcttggtttttcaaggctctgcctgcctcacaatgccaaagccagrgccacatgttttatattttgttatgctagcaaacataacctatttcagcatcacgtacctattgctgcatatcagacaaccttaccaaaagcagcaacac

SEQ ID NO: 173399 - DNA, 201 bp, Homo sapiens
aaacgggatctaattaaactaaagagcttctgcacagcaaaagaaactaccgtcagagtgaacaggcaacctacagaatgggagaaaatttttacaatctrctcatctgacaaagggctaatatccagaatctacaaagaacttaaacaaatttacaagaaaaaatcaaacaaccccatcaaaaagtgggtgaaggatatg

SEQ ID NO: 173400 - DNA, 201 bp, Homo sapiens
ccaaaagcagcaacacgttttctgctcttgtttcgacagtttggcagtatggccaaggctcagctgggttgacttgcctttgcttcacatgatattagttyttctcactcatggatttgcaatcagttgacagactgtttggtggctggctgatggccggtcctggatgatttcattcacatgcctgggtcctcagctgac

SEQ ID NO: 173401 - DNA, 201 bp, Homo sapiens
cttcatgactaaaacacgaaaagcaatggcaacaaaaaccaaaattgacaaacgggatctaattaaactaaagagcttctgcacagcaaaagaaactaccrtcagagtgaacaggcaacctacagaatgggagaaaatttttacaatctgctcatctgacaaagggctaatatccagaatctacaaagaacttaaacaaat

SEQ ID NO: 173402 - DNA, 201 bp, Homo sapiens
catcagaagccaattttttgccagccacactggccccctttctagttctccaacatggcaacttcctccctgtcttaggaccattttgcttggtgtttgayctgcctggaatgctcttctctcagatatttatatgactggctcttttttcttaatcagttctcagatcaaaagttacctcctcagagaagctcttgttaa

SEQ ID NO: 173403 - DNA, 201 bp, Homo sapiens
cattatcttaattgagaggaagttgctcctgcgtttgcacaaattgcacaaattgccagcacctatcaacgagatgagaactgaggaataacattgtcagkactgtaaatgctaaagataatatttaaagttgaaaatttcacaaacatgtcatgtaataatattttagagcctgggtaattctctatggattacaataca

SEQ ID NO: 173404 - DNA, 201 bp, Homo sapiens
atgatttgtatggtctctattttttttgagacttttaagtttttctgcacccaaaattcatttctaaagagaaactgtagcatagaaaaaaaaaaaaaaaacagaatgcagttttccagttattaatgttaattgtccaagtcagattttatgtttaaaatccatcttttggtggttgtttactttgacatgacccctgcc

SEQ ID NO: 173405 - DNA, 201 bp, Homo sapiens
acctagctaggttcttataacttagacgtattttattgaaattcataaaatcaactcatcctccaattataaagaattagtttattaaatggctacagttyacatatagtactcctatgggacatttcatccaagtgttcacttcaagactatttagcaagctcttctatgacgtaaccctcatttcttcatcaacaaaag

SEQ ID NO: 173406 - DNA, 201 bp, Homo sapiens
tatgctatgatgttctaaggattagagataagtcatgtgaaattctaaacatagtactcagcatatgcaagtacacagcatgtaatagttcttattgtggwacttagtaaaagtggcatcagttagcttttcctatataacaaaatacctcaaatttgggattgaaacaattattaatttagttcttgattcaggatgtta

SEQ ID NO: 173407 - DNA, 201 bp, Homo sapiens
aaattagcttaaaatgtcattaaagaaagtaccatttttaggtatctgggcaagatttgatgtattttgagagctcttataatgtccttttatatatactrtttttcgagtgtgtgtttgtgtgtgtgtatatgtgtgtaatgtatggtattcactttagacaacttaaactgtagttcagaaaatatatacaccaaaaga

SEQ ID NO: 173408 - DNA, 201 bp, Homo sapiens
ttaggtatctgggcaagatttgatgtattttgagagctcttataatgtccttttatatatactatttttcgagtgtgtgtttgtgtgtgtgtatatgtgtrtaatgtatggtattcactttagacaacttaaactgtagttcagaaaatatatacaccaaaagatgtaagatgacttaaggccacaggaattcttagacta

SEQ ID NO: 173409 - DNA, 201 bp, Homo sapiens
tttaaaattattgttatggaattgtctgttgactagtgattgtctattgtttttcacttgttttttcagtaaaagaagccttgagccctataaaatttaayagatggggtctcccagaagtagatccagaaactatgcaaactagtgaagcatgggtatttgcaggtggtgatgtcgttggtttggctaacactacagtgg

SEQ ID NO: 173410 - DNA, 201 bp, Homo sapiens
ttcacttctctcctcatacaaactctcttttctgacaaaactggttttatcaccaggtttatgtttgcatcgtctataccttaattttaccattctttatyggtaaggagacatttattgttcttcaaatattaaaaggccaatgaccacccaagtcccctggagctacattaatcaatggttatcttctctccattgtct

SEQ ID NO: 173411 - DNA, 201 bp, Homo sapiens
gtgaggtgtaaagttaagtcagtgcccttcaaatgtgttgttaactccaatatttcgttagcttttcatttttatagtttactaaaaacagttgtttgaawccctggaacaataattaaaccataatttttcttaattttaaaattattgttatggaattgtctgttgactagtgattgtctattgtttttcacttgtttt

SEQ ID NO: 173412 - DNA, 201 bp, Homo sapiens
aaacatatagagcagtgagtggccccttatgagcactgagtaaatatttggtgtgtgattgttgttgtggtggtggttgttatatagaccttaatttgagrgagagagactatacctcacaagatagctgtgatgcagaaaacagaatagttaacacttgacaaatgtgacttgtgttatcaacggtgaaagcctattggt

SEQ ID NO: 173413 - DNA, 201 bp, Homo sapiens
aaggtgaggatcactgctgagttctgttcgctttttgatactgattaggtatgtgctcctgagacatcttctgcaggttcttgattcttctcattccttgkgacttaagcctctatgagctatgtatgtggagaattatcctgaatgtgatgtttagttatgccggaatcagcatggacacatgtaggtttgggctagaga

SEQ ID NO: 173414 - DNA, 201 bp, Homo sapiens
ttatacaagatctatttgtatatcaaggaattaatgatttaaataagaaggattcctattaagtaattaagacaaaactatcaatacttcctatttcttaracaaactgtttttaagtatgataatgttgattttctgttaaaaacattttacattttgcttattcattctagctagcctactacatttttgtttgtatgc

SEQ ID NO: 173415 - DNA, 201 bp, Homo sapiens
aaaatttattaaagattttagtgacatgtccactctttttttctcatcattttcagagagttatgattgatttttatgagcacactgaacaaagagtgtgmtaaaggaaatattttccttaggaaagagggttcccagacttaaactcaattgactattaaccaccaaaattatcttttgactgtacaaatagactttaca

SEQ ID NO: 173416 - DNA, 201 bp, Homo sapiens
gcctataataacttttaaaagtgttttgtttattcttcatgttctttacagaagacttcccacgaattctaagattctcaaagtattccaagaatacttaraatgaattatgttgttcatttatacaagatctatttgtatatcaaggaattaatgatttaaataagaaggattcctattaagtaattaagacaaaactat

SEQ ID NO: 173417 - DNA, 201 bp, Homo sapiens
cggtagctgctatataaaatttttcagttacttgaatatcaactcaatgagagaaattgctgagattacaagtaagatccatccctccccctggctcttcrtgagccagataattagataaaaggatgagctagtaaaggaaattcaaagactgttataatattgtatgtatgcacaaaggaaaataacatggtagaactg

SEQ ID NO: 173418 - DNA, 201 bp, Homo sapiens
tagattttagtcactaagaattgtaaaattttctagactgcagtttcctcagtgctaaaatgagacaatgatatttcatggtatccaatgtctcttcaacmtgtaacattaaataatcctgtacattcatacttaaagattttaaaatacatattgaaaagtgtgcatcttgatgggtggggaggatgtatagttgattta

SEQ ID NO: 173419 - DNA, 201 bp, Homo sapiens
catcgcaattaacatactcatcaaaagatacaattaagaaaataaaaactcaagtcacagattgggagaaaatattcctatacttgtatctcatgaagaasttgtgcccagaataaatgtatataatattttcaaaatgtaaactgtaataattagaaaatttaattttattgatgagtatatagaatcttaaaatggaaa

SEQ ID NO: 173420 - DNA, 201 bp, Homo sapiens
tagacagatgaatggataaatgaagactgagtaaggaacctgattgtcataatacattaatacacatatatcaatatataatattatagccaatgatagcrtttctgaaattgtatttaaaatgatatctgacaaatgagagttcattttcttaagaaaaatacttttcatcaaaatcagattgattaacttaattcaaaa

SEQ ID NO: 173421 - DNA, 201 bp, Homo sapiens
gttaaattcatttttatcaaagggtgaaaatgtgaattctgaaaatttctgaatattaaagttcaatttggtcatctagaatatatctaaactcattggtyaaaaaaatctaaataaggaaaagtagcagtgttcctctggaagcaagatttgtctaaagcaatgtatgtgaatagggatagggagaatgaaaattcaatg

SEQ ID NO: 173422 - DNA, 201 bp, Homo sapiens
ttttttttttttggtacagataatcatgacttaggaataaaaaataagcaaacaatttgggcacacatttattttgatggtatttaattgtgactagctgmaaataatgattgtaaaagaaattacagtaaaatatcaaagttcttacaggcctgaaaacacttagaaatcacaactatgtctcttatttagaaatacaga

SEQ ID NO: 173423 - DNA, 201 bp, Homo sapiens
ttgtaatgtaaccctgttgttagttttaacatttttcaaaaatctcagttcatcctaagcttgaagattctttacagtatttgtgtgctatcattatgtakacagatgtggttctgttgtcatgtatactatggtagttaagagaaggagctttgaagttttataatactttgctcaacatttactagctggataaatttg

SEQ ID NO: 173424 - DNA, 201 bp, Homo sapiens
aaaagggaggaagacaatgttagacagtagctagacgggaatgactccagctctagaccaaaaatataaccaagctctgagaacctctgtataaaggcggrtgggtagctcttattagtgagatgaaattaaagctgaattgctctaccttatacctgtatatacctaataccaagtatgtttttggtcattttttgtttt

SEQ ID NO: 173425 - DNA, 201 bp, Homo sapiens
gcaaatcaaagaggtgggactgaactttggtaaacaaaaaaagtaagaggtgtggggaacacaaatttaatatgtaatggcattcagtttgaaatcactaytagatagcacagtaaagataccacgtaggcagctgaaagtaaacttttggatgtctgtaaagaagccgtagctggagatagaaattgaggaattattgac

SEQ ID NO: 173426 - DNA, 201 bp, Homo sapiens
acccatagaatgtgtaacagcaagagtgaactctgatgtaaactgtggatttgtatgatgatgctgtgtcaatataggttcatatacatataagacatacyatatatatatctgtcatacatatgtgacagctgctactactactacatgactacataactactacagtctacacagtagtagtcatgatcttttatacat

SEQ ID NO: 173427 - DNA, 201 bp, Homo sapiens
taaatatcaagccatgaaaacatggaggaagcttgaatgcatgttactaactgaaagaagccataatgaaaaagctatatactgtgtgattccaattatakgacattctggaaaagacaaaactatggtgacagtaaagaaatcagtgataggcaggagggttgggtggggtgaggaagaatgaataggtggagcacagaa

SEQ ID NO: 173428 - DNA, 201 bp, Homo sapiens
tggatgtttacagcagctttattcataattgcccaaactgggaagtaaccaaaatatccttcagtaggtgaattataaactttggtacatacagacagtgrtatattatttagtgctaaaatggtataaatatcaagccatgaaaacatggaggaagcttgaatgcatgttactaactgaaagaagccataatgaaaaagc

SEQ ID NO: 173429 - DNA, 201 bp, Homo sapiens
aggcaataccattcaggacataggcatggacaaggacttcatgtctaaaacaccaaaagcaatggcaacaaaagacaaaattgacaaatgggatctaattwaactaaagagcttctgcacagcaaaagaaactaccatcagagtgaacaggcaacctacagaatgggagaaaagttttgcaatctactcatctgacaaagg

SEQ ID NO: 173430 - DNA, 201 bp, Homo sapiens
aattagtcaaaatgaaagtcaaaactattaaatactccaatttaaaagtattttctacgaagcagaattcactaaaagaatggcttttcaggagcatatcraattttaatgacttaagcactaaaaagcatcttgataagatgggtctcaactctaagacaatctataaaacccaatttcatgttttcagtaatataaagg

SEQ ID NO: 173431 - DNA, 201 bp, Homo sapiens
gaaaactggctagccatatgtagaaagctgaaactggaccccttccttacaccttatacaaaaattaattcaagaccgattaaagacttacatgttagacytaaaaccataaaaaccctagacaaaaacctaggcaataccattcaggacataggcatggacaaggacttcatgtctaaaacaccaaaagcaatggcaaca

SEQ ID NO: 173432 - DNA, 201 bp, Homo sapiens
tccctaactcatttaatgaggccagcatcatcctgataccaaagtctggcagagacacaacagaaaaagataattttagaccaatatccgtgatgaacatygatgcaaaaatcctcaataaaatactggcaaactgaatccagcaacacatcaaaaagcttatccaccatgatcaagtgagcttcatccctgggatgcaag

SEQ ID NO: 173433 - DNA, 201 bp, Homo sapiens
agaattacatactacttatatatgcatattattaacaattttctgtgatctggaccatctttttcaaaatattttatctttggaactcaaaaatcattttgtttaagaatgagcattttttgcattttgcgttttactataggagtttggaggatgaaagatgtcaaaacagctgactgtgacttccttttacacatctgt

SEQ ID NO: 173434 - DNA, 201 bp, Homo sapiens
gtttactttcactggaaggatgatgtagtgagaataagaattagaatggaaccacataataaaggcccttgtttgatcatcaaagagagtttgaactttakcttaaaggataatgaactatatgcaaagaaggataagacaggcttggatgtgcattttagagaggattatctgataatagtgtagaaaatagtcacaaga

SEQ ID NO: 173435 - DNA, 201 bp, Homo sapiens
ctccactgcatggataaactgagctttaataatttcgaattcctctcttctgtctgtccctacagtcatatctcagttccttgaacacagcagatactcarcaaagactgagttgccctcttctatcttgttagagttttttgcttccagatggaaatgatgtgatttatcacattatagaaatcgatcaataatatttgt

SEQ ID NO: 173436 - DNA, 201 bp, Homo sapiens
tatcatgaggacagtaccaagaggatgatactaaaccatttatgagaaattctcccccatgatgcaatcaatcatttccaccaggccccacctccaacacwgaggattacatttcaacatgagatttgggtggggtatacatccaaactatatcaaagcccaaaccactggtctgttcagcagcagaatgcagccagcaat

SEQ ID NO: 173437 - DNA, 201 bp, Homo sapiens
agagttttcattattttattattaacctcttttttattcctatgttacattttaatactacattaattattaacctttttaatttagaaaggtagtttatkaaatgaatatttgttaaagcctctgaaaggaagtttataattggaatataaatgcataataacacattttaaatcaagctctttatgtgccattgaaaag

SEQ ID NO: 173438 - DNA, 201 bp, Homo sapiens
accaaatggcgaacggttctggattacaaatgccctaatgtcccatcatgctttgttgagagcaggtacaacacctgacacctgccgtgctttttgtttascaggctctcacccaagggctaattcatttaattctcacagcaattctatgatatatttactattattgttcccattttacagatgaaggaactcagaaag

SEQ ID NO: 173439 - DNA, 201 bp, Homo sapiens
tttgtgccagttttatttaaaatgctaagtttgttttcttatttgtaaaattattataatgaaataggaatattgtaatttactgagttcatgcatgtgtyaagtactcttgtagcatgtaacagaagtaaaactttagcaagtactcagggcatagtaagtactcaacaaaggctatcattgttaatgtagtttttcatc

SEQ ID NO: 173440 - DNA, 201 bp, Homo sapiens
ctcgagttcaagaccagcctgggcaacgtggtgaaaccctgtctctacaaaaacaacacaaaaaattaggcaggtgtggtggcatgggcctgtagtgtccrtagtcccagctacttgggaggctgaagtgggaggatcccttgagccagggaggcagaagttgcagtgagccgagatcaagccactgcactccagcctggg

SEQ ID NO: 173441 - DNA, 201 bp, Homo sapiens
ccatctggctcaagagcctgtgctcctgtccctcagacatgactgcctctcaaagaagaattttaaagaagtaatccctggctttatcaatcacagaaatyattgatagatatcttgatgatgcatttcagtttgaagacagtgctatttgtggaagttatgaaagttcctctatataaatactaccgaaaagtccagttt

SEQ ID NO: 173442 - DNA, 201 bp, Homo sapiens
aagtactcagggcatagtaagtactcaacaaaggctatcattgttaatgtagtttttcatccttattttaataggacaggagtaaccaggacaataaccayaggtcaaggctgtggtgtgtcctggtgtaagtgtaccatgtgtattgtctaccacaaatattgatgttgataaaatttgccaatcttatgaaaattttcc

SEQ ID NO: 173443 - DNA, 201 bp, Homo sapiens
attggaattttgcactttagttgaatttggaaaatgttgaatttctatgatgctaacaaattcctttcagatagttaacccattctacaacagtaggcatytgtaatttgagaagttataaaggaccttttatctttggttgaattaaggaatgagaaaattgacctgtttaaataaacattctctattataaatcaacac

SEQ ID NO: 173444 - DNA, 201 bp, Homo sapiens
ctgatctaggggtataattacgagtagcttgagggagaaattgaaagacaaaaactagcttgtaatcccagcactttgggaggctgaggtgggaggattgyttgagctcgagttcaagaccagcctgggcaacgtggtgaaaccctgtctctacaaaaacaacacaaaaaattaggcaggtgtggtggcatgggcctgtag

SEQ ID NO: 173445 - DNA, 201 bp, Homo sapiens
acagctcgttgtggagcagggctaccccatagagagtgtgcccagagcagcagctgagaggcagttctgcagtcatatttatacccacttttgattacatscaaattaagtggcagattatgccgaaatttccaagaaaagggtggtaactcctggattgttgggttgttgccatggaaaggggcggtaacctttggctgt

SEQ ID NO: 173446 - DNA, 201 bp, Homo sapiens
ataaaatttttattaccgatttattactggatgaatacattggaattttgcactttagttgaatttggaaaatgttgaatttctatgatgctaacaaattyctttcagatagttaacccattctacaacagtaggcatctgtaatttgagaagttataaaggaccttttatctttggttgaattaaggaatgagaaaattg

SEQ ID NO: 173447 - DNA, 201 bp, Homo sapiens
ggatctggagcaaaggagctctcattcgttgctggtgggaatgcaaaatgatttgatcacgttagaagacagcatgtgatctcaacaaaattgatagagcrctagcaagactaataaagaagaaaagagagaagaatcaaatagacacaatacaaaatgataaaggggtatcaccacccatcccacagaaatacaaactac

SEQ ID NO: 173448 - DNA, 201 bp, Homo sapiens
tttttactcattaattaatgcttgctattttaataatgctatttagtgactttgaaaaataaacaagttgataacttatggagagaaattctgtatttatrtttagaaatagcttatataaaaaagaaaactttactcaattctaggatttttcagtagcctagtgttttaaaaactgagttataaacccatataataaat

SEQ ID NO: 173449 - DNA, 201 bp, Homo sapiens
tgggaaagaaaatctagaataaaatttttattaccgatttattactggatgaatacattggaattttgcactttagttgaatttggaaaatgttgaatttytatgatgctaacaaattcctttcagatagttaacccattctacaacagtaggcatctgtaatttgagaagttataaaggaccttttatctttggttgaat

SEQ ID NO: 173450 - DNA, 201 bp, Homo sapiens
tgatataaattctatactctctacccataatctccatggcttaagttctgtattatttttccagtcattagaaccatgaaacttatgaacgatctgtcatwaagttttggaggccccaactttcaacaacaacaaaaatgtgcgtctgttatttcatacgtaatggagtatagtacaaatgaaaaattgagtgttctcttc

SEQ ID NO: 173451 - DNA, 201 bp, Homo sapiens
gctttcattggtactgccaagaagtgagctctcaatctgctttttatttttgtgagtagtctttttttcctctggttattttttaattcttccctttcttrtatactacaatgtatctagatatcaattctttaaaaaacgtattttcctcagtttgttgttgtctggaatctaagaattggtgtccttcatcaattctat

SEQ ID NO: 173452 - DNA, 201 bp, Homo sapiens
aggttgaaaattttctaagcttttatgctctgtttttcttttaaaactgagtgcctttaacaccacccaagtcacctcttgaatgctttgctgcttagaamtttcttctgccagataccctaaatcatctctctcaagttcagagttccacagatctctagggcaggggcaaaatgctgccagtctctttgctaaaacaac

SEQ ID NO: 173453 - DNA, 201 bp, Homo sapiens
aggtctgatgggattaaaatctgatggcacaccttggccagcagtggggattgcaaagcgaactacatatggaggagtgtctggtaggtgttgcccacttmttgcattgtgctttcttggaggttgctgaaaaatcagaaggtcatgttgcaagagttttgtgccctttatgatcccaaattcttataactcatagctgat

SEQ ID NO: 173454 - DNA, 201 bp, Homo sapiens
tttttctgggatgtgagggtttgaatgggttttaactatcgtgtcttataagagctgcatgaaaatgttgatgtgtcttgcataggtggtgccaatggcgktacagccaccaacactgtctcaggtctgatgggattaaaatctgatggcacaccttggccagcagtggggattgcaaagcgaactacatatggaggagtg

SEQ ID NO: 173455 - DNA, 201 bp, Homo sapiens
ggaatttccaacaatataaaatgagaagatgtccccagaaatgaagaacatggtggccacaaaggcacaatgaaataagaaagacccgcaccaatatttaycatcttcagatttctaaacatggatttaggaagatcctagaaaattctagagtgaaaataagcaagccatctataaagaaagcaaaaacccaaaaaagca

SEQ ID NO: 173456 - DNA, 201 bp, Homo sapiens
tttattatgttgtgccaaattcgactccttaagcctgacatataataaactgtagctatttaaactatacaacttaataagttttggaacatgtatatacytgtgacaccattaccattgcaagtttatgaaaaatgttcattgtccctggaaatttccttgtgttctttgcagtccattcctccccaccacccccatctc

SEQ ID NO: 173457 - DNA, 201 bp, Homo sapiens
tcactttgacaggctcagtggaggttgtgacacaacccactctcatctggagggagtctgtgagagcggacagttactataggagatgtgaagatagcaamagggactggggctcccctttaactagtggcaaaattcctgggtgacaagtagggccatcaaatttgaggaagcgtataattggctgtggtccaaaatgca

SEQ ID NO: 173458 - DNA, 201 bp, Homo sapiens
tggaagatctggtgccctctttgatagttctccctgatcttttttctaactggagaatagggcatagcatccctgagctcttagatcacttggaaagggcrgaaagcatctctaactgaagctgtgtaattacatggtgccccttttatacttgcaaatgaagcttggagtatgacttctcacttttttagcccctaggga

SEQ ID NO: 173459 - DNA, 201 bp, Homo sapiens
taaaattattttttggtcatctttatttctcagaaatagaatgctaccacatattttcacaaaccatcctctggctttagataaggatatttagaatcctkagaccatttcacatttttaaaataaatataaagtcatttttcctgaaatttaattgatttaaaaaattgctttgaaaatttcttcaaaacatgacaactt

SEQ ID NO: 173460 - DNA, 201 bp, Homo sapiens
ctaagaattccaatgtaaatataattttatttaagccaaatagctttttaaattactaacttacaaatatgagtaggacaggctgactagtctgacacagmcactgttgcttagtgttttgtaactcttgtaaaaatatatttgcctgaaatcagtagtccctagccaattacctttatttaggcatggatagttgagtgt

SEQ ID NO: 173461 - DNA, 201 bp, Homo sapiens
ataggacatgagggtaggagacaaataaacaattatgggtcatatacccgaggttaagaagtttacagagtttagatttatcctagagacagtgaaaaagyatctgagtttcttgattgatatcataggaaactgccttaggcctaccatgctcaggatcttcaccatataaaatactgcaatagaaatgtccctcaccct

SEQ ID NO: 173462 - DNA, 201 bp, Homo sapiens
taatttgtgaagcatttattcagcacctcctgtgtacaattcactgtgctcaagtgaagattcaaattttatgaggcctgaagtgtatacaatttgagagytcttctttaagaaaagaaaaattcatagatttgaaattaggcgcagggctttgaaagagtcccatgcaagtgagggaccctacttaagcttcagtaactt

SEQ ID NO: 173463 - DNA, 201 bp, Homo sapiens
actggattcaaattattaacttgaaataacctactacaatgataagacctggtgttttgtgagtcaagcgtagatatatagttaggacacaaactgatgamccaggaaaaaaaaagccataggtgcttaaaaaatattttgtggatagacagatgaatggataaatgaagactgagtaaggaacctgattgtcataataca

SEQ ID NO: 173464 - DNA, 201 bp, Homo sapiens
atatacaatagaaatgcccatgagcagaagagtgcttttgaattcacaaataaatgcccctagggtggcttatgatgttggtgctaaatattttaagaaayataaagttacttattaaactcagagtaacatttcctgactacttatggaccgagtttgtgacaggtggagtgttaaagtgaattgttctatgtacatttt

SEQ ID NO: 173465 - DNA, 201 bp, Homo sapiens
tggacaggataccaaaaaaacactaaccatacaagaaaaaatagatgaattatgcttcatcgcaattaacatactcatcaaaagatacaattaagaaaatraaaactcaagtcacagattgggagaaaatattcctatacttgtatctcatgaagaacttgtgcccagaataaatgtatataatattttcaaaatgtaaac

SEQ ID NO: 173466 - DNA, 201 bp, Homo sapiens
actgtattagtccattacatgctgctaataaatacacacccaagactgggcaatttacaaaataatgaggtttaatgtacttacagtttcacatggctagrgaggcctcacaatcatggcagaaggcaaggaggacaaagtcacatcttacatggatggcagcaggcaaagagagagtgcagggaaactcctctttataaa

SEQ ID NO: 173467 - DNA, 201 bp, Homo sapiens
gtttaaggatacataataacacaatgcatatacaatagaaatgcccatgagcagaagagtgcttttgaattcacaaataaatgcccctagggtggcttatratgttggtgctaaatattttaagaaacataaagttacttattaaactcagagtaacatttcctgactacttatggaccgagtttgtgacaggtggagtgt

SEQ ID NO: 173468 - DNA, 201 bp, Homo sapiens
aaagccctttcaacaaatagtactggaattattggatacctatattaaaaaataaacctcatgtctacctcacacaggacaaaaaagtaattttaaatatrtgatataaaaaagtaaacagtaaggtaagactataagactttctttttagagttttagattcacagcaaaattgaacagaaggcatatactccttgcctt

SEQ ID NO: 173469 - DNA, 201 bp, Homo sapiens
ttgcgtgtcaattttaaaggttttctggaatatcatatcttggtgaactataatttatttaatagagtaactactcatgatcctttagattgttttctacrgtttttctatagaaagtaatacttccaggaacattgttgtatatgtaactttgtgtctaagcactaatggaacagattcttcaaaaaagacttagaagat

SEQ ID NO: 173470 - DNA, 201 bp, Homo sapiens
tgtaatcccagcactttgggaggctaaggtgggtggatcacctgagctcaggagttcgagaccagcctggccaacatggcaaaacctcatctctactaaamatagaaaaattaaccaggcatcgtggtgcactcctgtagtcccagctactctggaggctgaggcatgaaaattgcttgaacccgggaggtggaggttgca

SEQ ID NO: 173471 - DNA, 201 bp, Homo sapiens
tgtccacgttaaggtgtttgataatgttttgattatttcatttatgaatctatattatttcttccaatttgtcaacccccctctgaaactaacttgtgagrcagaattattttagaatagatacacaagacacacacacaaatattctggaatgatactgaatctaaaatacattccttaaccctgtaagctcatgaagca

SEQ ID NO: 173472 - DNA, 201 bp, Homo sapiens
taataaagtcttgttaattcttcctccaagagtcagtgattctcattatattaggcataggtatagtaaagagctgataataagaagactaagatgtccascttttttatggttccacagagataaagaaaaataaaagataatgagttaaggttttgatgttagtgttttaggtttgaggggagtttggggtgtagcatg

SEQ ID NO: 173473 - DNA, 201 bp, Homo sapiens
ttggcctcccaaagtgctgggattacaggcgtgagccactgtgcccggcctataataacttttaaaagtgttttgtttattcttcatgttctttacagaaracttcccacgaattctaagattctcaaagtattccaagaatacttagaatgaattatgttgttcatttatacaagatctatttgtatatcaaggaattaa

SEQ ID NO: 173474 - DNA, 201 bp, Homo sapiens
tttgtgcattttacagagtgctgattggtatgtttttacagagcactgattgatgcattttacaatcctagttacagagtgctgattggtgcattttacartcctcttgtaagaaaagttctccaagtcccactggacccaggaagtccagctggcttcacctctcaataggaattctcccagctttctctctcttcttaa

SEQ ID NO: 173475 - DNA, 201 bp, Homo sapiens
gagattaaaatatgcccaggatattctaaaccactgggcagggagggtaatcggtaaaggagattacttaggtgttatgaagactgagctgaaactaaatrgcctaattggcatgtaccaggtgaaaaagacaagatggggtattctggcagaggggatgcatgagcaaacatggaaacacagagcacagtacacaatgca

SEQ ID NO: 173476 - DNA, 201 bp, Homo sapiens
gggggagtttcttcgtctagattataaggtatatgcgaaataatagagtaagggtggaaaaacatatcattgctaattcatgaaatgtttttagtgtttarctatgtgaattttattccagaattgtggtactggaaatctaaagaggcacgtagattaaatatgtttgctacacacatatagggaccatgtagttaaata

SEQ ID NO: 173477 - DNA, 201 bp, Homo sapiens
caaacgcaggagagaattaaatagtgaaaaggtgttatatataattatttggtcagaaaatctagagagaggagtaatttcttgtcaaataaaaactactmaaattgattatgtagtcaataatcatccatagaattggaagcaaattttaaaatttattattaaaaagatatcaggcacaagtgatttcacatctgacta

SEQ ID NO: 173478 - DNA, 201 bp, Homo sapiens
gggttccttctttagaaattacattacagcactactgaaaaatttaaatacaaggccttagaaggggtctatatgggccaggcgtggtgggtcatgccttwaatcctagcattttgggaggccgaggcaggcggatcacaaggtcaaatcaagaccatcttggccaacatggtaaaaccccatctctactaaaaataaaaa

SEQ ID NO: 173479 - DNA, 201 bp, Homo sapiens
atatttcaaaccctactcagatgaatttttactgtttttcttatatttatttgatagcataataccaatttcagaggacaataaagaacaaagtctcaatraactagttaaatttaaccttaatgttagaagcagagtttattagaaaaaaataaattttgtctacaggaagtgtggtaaactgtttgtgtgtatatctta

SEQ ID NO: 173480 - DNA, 201 bp, Homo sapiens
cagtcctctgataactcaataaaggtgtctgccgaaacacagcagcaactatagaggaaattggatatttcagatgttgtaatgaagctaacaacaacaamaaaaaatctgttaaagattagatagactataaaataaatttgggaaagataaatgagagaattaaaaccaaaagtaaatgttgatatgcattcatatata

SEQ ID NO: 173481 - DNA, 201 bp, Homo sapiens
actgataacttcccaaaagaagtggcttatttcttccccacttgttagtttatctaaaaagaatcctttaagccttttaaaaaggtttcaaaattaaattracattctaaaaaaagagttttgaagttgcagttttactgtattaattcagtccctccagatgctattcagggtgaacctagagtttttctttcataccca

SEQ ID NO: 173482 - DNA, 201 bp, Homo sapiens
tataaattatttctaaactaaaccgaattaaccattttaaactatcttaaaagtacctattcatataaaaataattttttgcttagtagtttagactgctwtgtcaaaatattataaatcaggcttataaaccacagaaatttattccaaaatataggtgctagcaggtttggtgtctggtgagggcctattatctggttc

SEQ ID NO: 173483 - DNA, 201 bp, Homo sapiens
cccaagatccacagctagtaaatgtgaaagcccatgctcttttactagattatatggcctctcttgtagggtttagggaaatatgttcatttttaaataawtaataatgtgccttaattagtaataattttaaaaaggaacatatttctccagctagcaagcaggggaaatagtagtcagacttcactatatctggctcca

SEQ ID NO: 173484 - DNA, 201 bp, Homo sapiens
atagcaaagacttggaaccaacccaaatgtccaacaacgatagactggattaagaaaatgtggcacatatacaccatggaatactatgcagccataaaaawtgatgagttcatgtcctttgcagggacatggatgaacctggaagccatcattctcagcaaactatcacaaggacaaaaaaccaaacaccgcattttctca

SEQ ID NO: 173485 - DNA, 201 bp, Homo sapiens
aatattggttgagtgcttttaagttttcactttaaaatacagatataaaagaagcaatggagatagagatagcaatagagacagagatataaatagacaartaaacaaatagaaatgctttaaaaaccaactcaacaattcactaagacaactcttattaacctcatgttacagctgaagagactgagggtcacagaggtt

SEQ ID NO: 173486 - DNA, 201 bp, Homo sapiens
attgaaatttacatatttggttgattatttgaatgcaagacatatataataattttagataattacaggggcagaggaagtagctaatattggttgagtgyttttaagttttcactttaaaatacagatataaaagaagcaatggagatagagatagcaatagagacagagatataaatagacaaataaacaaatagaaat

SEQ ID NO: 173487 - DNA, 201 bp, Homo sapiens
tattagaactgttttttaaaaaatcaactacaaccaaaaaggtttctgaggaaatactggcattttatttatttgtcttttttttttttttttttttttttgcaattttagcttcccttagagctattttagctaacaagttggaattctggaaggctgcagtgtatataaatcactcattctttagcctttggttatcag

SEQ ID NO: 173488 - DNA, 201 bp, Homo sapiens
aatcacttgaacctgagaggtagaggttgcagtgagccaaggtcgcaccattgcactccagcctgggtgacagagactccatctcaaaaaaaaaaaaaaaatcatcttatatctatctcaattagaactagaggcaattttaatgcaaaacaacaaaagtaagctgtgttttgaagaaagcttgccaaagcaagtagtgga

SEQ ID NO: 173489 - DNA, 201 bp, Homo sapiens
atattagaactgttttttaaaaaatcaactacaaccaaaaaggtttctgaggaaatactggcattttatttatttgtcttttttttttttttttttttttttgcaattttagcttcccttagagctattttagctaacaagttggaattctggaaggctgcagtgtatataaatcactcattctttagcctttggttatca

SEQ ID NO: 173490 - DNA, 201 bp, Homo sapiens
ctggcattaccagcagagtgatgcagtacctttgaagtttgagaaaatatttcacaaccgggaactacaaatggctctgtactgcctgagtgctgaatacrgatgggagaatagcagacatgatggttggaaagagatccctagaccgcaggagcccagttacgaagggccgtttatgcttgcctaggagtttcagcttta

SEQ ID NO: 173491 - DNA, 201 bp, Homo sapiens
aatattagaactgttttttaaaaaatcaactacaaccaaaaaggtttctgaggaaatactggcattttatttatttgtcttttttttttttttttttttttttgcaattttagcttcccttagagctattttagctaacaagttggaattctggaaggctgcagtgtatataaatcactcattctttagcctttggttatc

SEQ ID NO: 173492 - DNA, 201 bp, Homo sapiens
taatattagaactgttttttaaaaaatcaactacaaccaaaaaggtttctgaggaaatactggcattttatttatttgtcttttttttttttttttttttttttgcaattttagcttcccttagagctattttagctaacaagttggaattctggaaggctgcagtgtatataaatcactcattctttagcctttggttat

SEQ ID NO: 173493 - DNA, 201 bp, Homo sapiens
ataatctaatgatgtcagtcaatacttatagaattgtagcaatcttaaactctagtggaaaaagaaaaatacaggtgtttatgatgtgacattgattttarcagttcatccttagtggaaaatgtaattgaatatgtgttcagatggataacaccactttaaaggaggaataagacagtttaatgcaatgggaagaactgg

SEQ ID NO: 173494 - DNA, 201 bp, Homo sapiens
actcttgtattctctggattaggcaataaataaaaactgaccaaaaacccatccttacgtttctcaaacacccaaagtttctaggcaatcacttttgttgwtgttgttgttgttttgttttgttttttgctcagaaattttaagcttgataacctcacgagtcttagtgtgaggccccaaaacttttcacgtttctcttgg

SEQ ID NO: 173495 - DNA, 201 bp, Homo sapiens
tgttggataggcaatgaaaagtaactgttgaatttggtttcaccataatttatatgactaataccttattccaaacatacctcacaaacataccttgtttyattgtgctttgctttgttgcacttcacatgtattttttcttcttttacaaattgaaggtttgtggcaacctttcttcgagcaagtctgttgatgtcattc

SEQ ID NO: 173496 - DNA, 201 bp, Homo sapiens
aaatctgtaatttgtgggattgttgatgttatgggggaaaatcatggagcacattaaaataaatggttaaatactgtaccatgatcttgaagaactagagmctttcatggctgtgtcaccaactatatgaacttgggcaagtcatagctcatctataaacaaagaggttgggcaaggtcactctcctagagatactacact

SEQ ID NO: 173497 - DNA, 201 bp, Homo sapiens
gtaatattagaactgttttttaaaaaatcaactacaaccaaaaaggtttctgaggaaatactggcattttatttatttgtcttttttttttttttttttttttttgcaattttagcttcccttagagctattttagctaacaagttggaattctggaaggctgcagtgtatataaatcactcattctttagcctttggtta

SEQ ID NO: 173498 - DNA, 201 bp, Homo sapiens
taattccaaaagtcaatgataggagtttatgtctgaattgcattttattaattatagaattctatataaaagttagatcaaacatttgctataattataayatatatctcattcagattaaataaaattgggaagaatattcaaaatgccaaaattaaatatctacatgcattttctacattatatgccaccacaagtttg

SEQ ID NO: 173499 - DNA, 201 bp, Homo sapiens
cagctgctatgtttacctattcaagcctcagcaatggcagatgcccctccacctgccaggctgctgcctcataggttgatctcagactgctgcgctagccrtaagcaaggctccttgggcttggaatccactgagccaggcgcaggatataatctcctggtgtgccatttgctaagaccattggaaaagcacagtatttgg

SEQ ID NO: 173500 - DNA, 201 bp, Homo sapiens
tcagattaaataaaattgggaagaatattcaaaatgccaaaattaaatatctacatgcattttctacattatatgccaccacaagtttgttcttaaatagraataacacatagcttctgtgtttatcatttattttttgtttctttattaatcttaaactgtgacagaaaaactgaaccttaagttgttattaaatgaatt

SEQ ID NO: 173501 - DNA, 201 bp, Homo sapiens
gagactatggggttttctaaatatacaatcatgtcatctgcaaacaaggacaatttgacttcctcttttcctaattgaatgccctttatttctttctcttrcctgatggccctggccagaacttccaacactatgtgtaataggagtggtgagagagggcatccctgtcttgtgccagttttcaaagggaatgcttccagt

SEQ ID NO: 173502 - DNA, 201 bp, Homo sapiens
ccagctgctatgtttacctattcaagcctcagcaatggcagatgcccctccacctgccaggctgctgcctcataggttgatctcagactgctgcgctagcmataagcaaggctccttgggcttggaatccactgagccaggcgcaggatataatctcctggtgtgccatttgctaagaccattggaaaagcacagtatttg

SEQ ID NO: 173503 - DNA, 201 bp, Homo sapiens
tacaaggcgaagcagcaagtgctgatgtagaagctgcagtgagctatcccgatccagctaagagaactgatgaaggtaactacattagataacagattttygatgtagacaaaacagccttatattggaagaagatgccatctaggacttttacagctaaacaagaggagtgaatgaatgacttcaaaagacatgctaact

SEQ ID NO: 173504 - DNA, 201 bp, Homo sapiens
ttctacattatatgccaccacaagtttgttcttaaatagaaataacacatagcttctgtgtttatcatttattttttgtttctttattaatcttaaactgkgacagaaaaactgaaccttaagttgttattaaatgaattattaataagtatattcagaacatctaatatataattactaggagtaatattaatctgtaag

SEQ ID NO: 173505 - DNA, 201 bp, Homo sapiens
ttctatccttacatattttacaagtaaatcacaactgaactgttatccatgaactttataaatttcaaaaacaagcatttaaaaagattatactttaattagtcactggatagacaataacaatgttatgatgtgcctctttaaaattatgaattgtcacataatctgggtatttggggttgtgcattagtagtaaaatcc

SEQ ID NO: 173506 - DNA, 201 bp, Homo sapiens
aagttacatgttaatttgttaaagtaagtccattgctctggtccatcacaacatctttttggatcttgattctgtatccaagatatttggtctccttccckgactctttgtttttgtttttcgggttttttttattccctgtcctgggacccccatctttgtttttataatttccctattgacccctttaaaacatattga

SEQ ID NO: 173507 - DNA, 201 bp, Homo sapiens
attctatccttacatattttacaagtaaatcacaactgaactgttatccatgaactttataaatttcaaaaacaagcatttaaaaagattatactttaattagtcactggatagacaataacaatgttatgatgtgcctctttaaaattatgaattgtcacataatctgggtatttggggttgtgcattagtagtaaaatc

SEQ ID NO: 173508 - DNA, 201 bp, Homo sapiens
tctattggagatgcaggtcaaaagtttgctttgttgatggagtacatgatcaaataattttagagaccattgacctacgtaaatacatcagaagcctgctyacctggctcagcaaggacaaacactgacaacctgatagcagcgagagagagtgaagcatttattgcagggcaccaagcaaagaagatcaggcaactcaca

SEQ ID NO: 173509 - DNA, 201 bp, Homo sapiens
gattctatccttacatattttacaagtaaatcacaactgaactgttatccatgaactttataaatttcaaaaacaagcatttaaaaagattatactttaattagtcactggatagacaataacaatgttatgatgtgcctctttaaaattatgaattgtcacataatctgggtatttggggttgtgcattagtagtaaaat

SEQ ID NO: 173510 - DNA, 201 bp, Homo sapiens
actccttaagcctgacatataataaactgtagctatttaaactatacaacttaataagttttggaacatgtatatacctgtgacaccattaccattgcaaktttatgaaaaatgttcattgtccctggaaatttccttgtgttctttgcagtccattcctccccaccacccccatctccagacggctactgatccatcatg

SEQ ID NO: 173511 - DNA, 201 bp, Homo sapiens
aaattaggcaggtaggtttagtactggatgcctgatggcctttaatatgcttagatgccttgtgaatcaccagaaggaggtctctttggtgtttccccaaratagcgtggtcacataacttcccatttagccccaaatatttcaaagaacatttttgaaaaaggttctctcatttcataggatgtttcagaatgttaaatt

SEQ ID NO: 173512 - DNA, 201 bp, Homo sapiens
agcctgacatataataaactgtagctatttaaactatacaacttaataagttttggaacatgtatatacctgtgacaccattaccattgcaagtttatgawaaatgttcattgtccctggaaatttccttgtgttctttgcagtccattcctccccaccacccccatctccagacggctactgatccatcatgcctcaaac

SEQ ID NO: 173513 - DNA, 201 bp, Homo sapiens
ttatcaaataaatattaaattatgtccagtgtccttttactgttaatgtcttttagcctgactcttttaaaaattgctttctcttttaataaaaagtaaawttattttttggtcatctttatttctcagaaatagaatgctaccacatattttcacaaaccatcctctggctttagataaggatatttagaatccttagac

SEQ ID NO: 173514 - DNA, 201 bp, Homo sapiens
gaagactactgcactggcctcaaagccctgctttatctgaaaagcattgaagaactacaagactgggatggacagagtccagctactgtgagtcaccagaragggaaaccagttccacgtatagctgaactcatggacaaggtatgtgcttaaatctcctgtgttattcttgagaactcagccttggtttctatttcagat

SEQ ID NO: 173515 - DNA, 201 bp, Homo sapiens
cctcccaaagtgctggtgttacaggcatgagccaccatgcccagctaggttgaaaattttctaagcttttatgctctgtttttcttttaaaactgagtgcytttaacaccacccaagtcacctcttgaatgctttgctgcttagaaatttcttctgccagataccctaaatcatctctctcaagttcagagttccacagat

SEQ ID NO: 173516 - DNA, 201 bp, Homo sapiens
aaaatactgaagggcttcctaattatcaaataaatattaaattatgtccagtgtccttttactgttaatgtcttttagcctgactcttttaaaaattgctwtctcttttaataaaaagtaaaattattttttggtcatctttatttctcagaaatagaatgctaccacatattttcacaaaccatcctctggctttagata

SEQ ID NO: 173517 - DNA, 201 bp, Homo sapiens
gctcactgaagcctcaaaactcctgggctcaagccattctcctgcctcagcctcctgagtagctgggattacaggcatatgagccaccatgcttggcccayttttagagactatttcacattttatctcttcctcatagtcacaaacccataactagttctctttactctcagtaagagaccttacaccctagttcataaa

SEQ ID NO: 173518 - DNA, 201 bp, Homo sapiens
agagaatggcttctgatagtagggagagttccttagtggtattaaaaaggaagagagagagagcgaaggtatagatccagtaggtttgtagttttgctgakgggaagaaaagagagttcccatgtgatggcttttatattctctgtgaattgtgggacaaggccttctcctgacagtgggggcaagagaaaggagtcaagt

SEQ ID NO: 173519 - DNA, 201 bp, Homo sapiens
gtaatcccagcactttgggaggccaaggcaggaggatcacctgaggttaggagttcgagaccagcctggccaacatggtgaaaccctgtctatactaaaaratacaaaaaattagctgggtgtggtggcacgtgcctgtagtcccagctacttgcaaggctgaggcaggagaatctcttgaactgggaggtggaggttgca

SEQ ID NO: 173520 - DNA, 201 bp, Homo sapiens
gaccaactaggggcaacagcaaagaagtcagaggtcacacgaagctttctagtctctgcagctgtgttactatatatcaatgatcgtgacaaggaagaccragatggaatatatgaggcaactgaaaatttgaatctagcactcagcaaatgaccattttaagaatacagcaggaccgggtgtggtggctcacacctgtaa

SEQ ID NO: 173521 - DNA, 201 bp, Homo sapiens
acatgaaaaagatggaagaaggacctataagaatgatagaatttatgatagaatttttagagtgctaaatttatgtagtagttgttgtttacatttctccmtttgtcaaatgttctatagttattattgttatatttgaaaaatataaagacaaaatgtttatgcacaattcctattttatattagaaatatggagctgtg

SEQ ID NO: 173522 - DNA, 201 bp, Homo sapiens
tacagtggcgtgatctcagctcactgcaacctccacctcccgggtttcagcgattcccccacctcagcctcctgagtagctgggactacaggcgcatgccrtaacacctggctaattttttgtatttttagtagagacgggatttcaccatgttggccaggctggtctcgaactcctgacttcaagtgatctgcccacctc

SEQ ID NO: 173523 - DNA, 201 bp, Homo sapiens
acaccttaacagtctctacctaatataattagaatatatatatatatatatatatatatattttttttttttttttttttgaaacagagtctggctctgtsacccaggctggagtacagtggcgtgatctcagctcactgcaacctccacctcccgggtttcagcgattcccccacctcagcctcctgagtagctgggact

SEQ ID NO: 173524 - DNA, 201 bp, Homo sapiens
attttatttgccaaatttgttctattttcaccaaaggaaaggaaattcttgttcttaacttcaaattttgaatgcttgtttgaagttattcattatgtatsaacttatacaattacaacaatagaacacatttttttcagtattaagacataaactttattattgatttctgaataattcataaaagatggcatttaagat

SEQ ID NO: 173525 - DNA, 201 bp, Homo sapiens
acattagggtgaaccatggtatcaccctgatgataccaccacctgatatccagggaatactttctcagtcctgactcctacagacaaaagtaacaaaggastttgaccatttattctgtcaaaggtatcaaaggaaaataatttactctttataaatgatttaagacatttgattaatactattaaagatagaagggattg

SEQ ID NO: 173526 - DNA, 201 bp, Homo sapiens
cttcctccccaaacttggtaaaatggcataaatgttaattcaattcatttaattcttatcacaactgcaagaaatcatgactattattaccatcctgtcaygtatgaggaaagtagcatacaaaggtggtatataatttgccaaactatccagcctgtcggtagcagaccagagagctagactcaggcaatctgtttcaga

SEQ ID NO: 173527 - DNA, 201 bp, Homo sapiens
tattatgttttattcttcagtttaaagatgggaaaactgaattttggaaaactaccagctctgtgatgttgaggaggttacttcaactgtctagtcctcartttcctcatttataaaatgaggatgaaagtaatatatactaatattagtaataacagtaaataataactcttatgtatgtgactccttaggtctggcaca

SEQ ID NO: 173528 - DNA, 201 bp, Homo sapiens
ctgttaataccattatgagaaagctcatggaaagttattttattaagtgtttgtgttattaaaacctattcccctgtctgaaatttaatgctacacaatgyactaaatagtcaggtttcaagagagatgataaacctggaagaattacattactacccaaagtattggtcattgtacagggatttaaaatttaacaaccac

SEQ ID NO: 173529 - DNA, 201 bp, Homo sapiens
ctaataaagatatacctgaggccgggcacagtgggtcacgcctgtaatcccagcactttgggaggctgaggcgggtggatcacaaagtcaagagattgagrccatcctagccagcatggtgaaaccccgttcctactaaaaatacaaaaattagctggacatggtggtgtgtccctgtagtcccagctactcgagaggcag

SEQ ID NO: 173530 - DNA, 201 bp, Homo sapiens
aatataaatttgcactgtcttctagctcctaaatgtcttaactgaacctccttcctttcagaaaattttgggtgccattgtcattagtatctgtctgtatkatcttaattacaatattatatttattgtgtatatcaaaagtaggaaggaggcaagatctgatattttccctgggttctatttttaggcatactatatttg

SEQ ID NO: 173531 - DNA, 201 bp, Homo sapiens
tccaattctggcagacttctttttcgaaaggaccaaactcaatgacaaaattttagaattcctgaaaagagttaactggaattaccttggtgttttatttrataggtaatatttactacccacaagcctttgttatgagggtggaatacatctacccaagtcagtcatgtgactggaatcagtgaaagctcgtcactggtg

SEQ ID NO: 173532 - DNA, 201 bp, Homo sapiens
cataaagcattcatggtttctctgttgggaagcataaactgcgttggatttgcatctcctaggcttggccagtgctcctccttctcttaataaacttttcrttctgtggccatggacatctcaccctgctcatgatgggcacaagaatctcctgaccctgtaccctcttttgtttgtatttggctggtcttgaatgtacat

SEQ ID NO: 173533 - DNA, 201 bp, Homo sapiens
gtttacagatctattagacgtatgatccactcagctcacacttacatttggcttcatgtcatcacacaaaaattaattacttgattattgggaaaaaacartattatagtgtaccaaatgagctgcactttcaaaacaagccagaaacatctttattctcttaaaacccactaagctcctcttcttggctatggataaaat

SEQ ID NO: 173534 - DNA, 201 bp, Homo sapiens
tacggctccatgtagccaagtattttcttgacataggacattcgtagttctttaaaataaaatgttagtgcatcctagatggaaatggagactggatttamcctcccaatggaaacaacaacaaaaatcttagaatatacatgaaacaacagcttttaagacctggaacatcaggcaataaaggagagtggtcactgagag

SEQ ID NO: 173535 - DNA, 201 bp, Homo sapiens
ctataatagaatcacctggcccctgagatatgcaggaggctgaggtgatgggcttagctgatgggatcaaggtcttgtcatacccataaagcattcatggkttctctgttgggaagcataaactgcgttggatttgcatctcctaggcttggccagtgctcctccttctcttaataaacttttcattctgtggccatggac

SEQ ID NO: 173536 - DNA, 201 bp, Homo sapiens
actcattttttctgaagttctatgatgtagggagtgcatctaacaaaggatttagctgtgtgacacagtgctgtactctgtaacagtatctcaaataatamcggtgataatggtgatgatgaagacaatgaggatggtggatagtgaaccaggctgtttataataactaaattagttgatgaacaactctatgaagcaaat

SEQ ID NO: 173537 - DNA, 201 bp, Homo sapiens
gaatttatcatgaatgatgatcatctcctgccctctatccagcaagttctcaaatgaaggctgttggagtggggagagatggcagagtaagttcctatttkggatgggaaagattatagaaaggtaggcgagggcaggcaatgccagaggaaccccatgttgggaagctgggacattacttgcgtgatcctaaaactgagt

SEQ ID NO: 173538 - DNA, 201 bp, Homo sapiens
tgatccttgttctgcttatcttataatgttgttgtttggaagaaataagttaagaacaaatgcaaatgtaagctgttactatcatgaagttgcttaacttmcagatatgcacagtccttatatgaagggaaaagatgtttgttatcaaatatggaaaagaaccaggtagataattttttaaaacccacactaaaaattaaa

SEQ ID NO: 173539 - DNA, 201 bp, Homo sapiens
agattctatccttacatattttacaagtaaatcacaactgaactgttatccatgaactttataaatttcaaaaacaagcatttaaaaagattatactttaattagtcactggatagacaataacaatgttatgatgtgcctctttaaaattatgaattgtcacataatctgggtatttggggttgtgcattagtagtaaaa

SEQ ID NO: 173540 - DNA, 201 bp, Homo sapiens
ataatagacaatagatcactggaacagaatagagagcccagaaatagacacacgtaaatatagccaacttatctttgacaaaagagcaaaggcaatataakggagaagggatagtcctttcaacgaatgatatttataccaccctacttccatatgtaaaaaagtgaatctagaaacaaaccttacacccattaaaaatta

SEQ ID NO: 173541 - DNA, 201 bp, Homo sapiens
agttgcttactgcagaagagcaaatgtagtaaaataagtatttagtgaaaggtgtagccatcttctaagcttgaaaatcagttttttggttttttttttttagcattacatttcagggcaatagtattacaaagtctgaatcttaatttattcagagaagaaattaagttgaggaattccacctgattgcagatattaacc

SEQ ID NO: 173542 - DNA, 201 bp, Homo sapiens
taggtaataacattctgacatgcatttctgctattttatttacaccatttgcctatatcattgtaatgcagtacctttctgatttggtgcagtaaatgcaytctgtaatatctattatggcatggtcaaaggataatttattgtcaaatagaaaaataggtcaacactaatgtcacttgatgatcaacccccaccgctcaa

SEQ ID NO: 173543 - DNA, 201 bp, Homo sapiens
tcctcaggagccggcttagatgtgacccaccctggaagctttcttttatcttaaaattatgtgtgtgtgtgcgtatgtgtgtgtgtgtgtgtgtgtgtgtkttttcttttttgagacaaactttcactctgtcatccaggctggagtgcagttgcatgattacagctcactgtagcctgatctcctgggctcaagagatcc

SEQ ID NO: 173544 - DNA, 201 bp, Homo sapiens
caaagtttttatgattggaatctctagaataaagttgaaagtagacagatttaacaggagaaagggcatacaaatttatcaacttcatatatacggaagtyccacaaaatatgagactctaaggagtgccaaattgtggaagcataaataatattttgagctacagaatgaagtaggggattggggcttctgaggggaggt

SEQ ID NO: 173545 - DNA, 201 bp, Homo sapiens
gcacttgtgcatgcattgtgctcgtatctgaagagctctgcccagtattttgacttttgagaatacaattcatcctcaggagccggcttagatgtgacccmccctggaagctttcttttatcttaaaattatgtgtgtgtgtgcgtatgtgtgtgtgtgtgtgtgtgtgtgtgttttcttttttgagacaaactttcactc

SEQ ID NO: 173546 - DNA, 201 bp, Homo sapiens
tctaagttaattaccgtttggcagagtgtatccaaaacctcttatctgaacagtgaacccaataatttaatcagtctgtctgttgattaatcacgttctawtccatctgatatcagcactaaaaaagcccttcatctgtttcttgtaaaacttatctccgtgaatgcacagctgctgtgagctattggtattaataacttg

SEQ ID NO: 173547 - DNA, 201 bp, Homo sapiens
attctgtatatcatgattttatgcaatcatctgttgagaacttcatgtaatactttactttggcttttaaataagtacacacacacacacacacacacacagagaaagagagagagaggcaaagtactgtgtgtgtatatttagtgtaaagacagtttctcttttaaccacttggaaagctttatccctgtaatttaaaaa

SEQ ID NO: 173548 - DNA, 201 bp, Homo sapiens
atatgtgacacactatccaagaggtgaggaacatttggtgttgggtgagcactggagaatatgtgagtaaaactccttccttggcatatagcagacattcrgtctggtcagttttcatttattattcccgtcttttaagcctaatcaggtcgtacattttttcttattcattttagaacaatgtgctcttctttgttcttc

SEQ ID NO: 173549 - DNA, 201 bp, Homo sapiens
aaagcacctcaactacatatagtttaaacttcatgttgaaaagtgtctgttcatgtccttcacccactttttgatggggttgtttgtttttttcttgtaamtttgttggagttcattgtagattctggatattagccctttgtcagataagtaggttgcgaaaattttctcccattttgtaggtcgcctgtttactctgat

SEQ ID NO: 173550 - DNA, 201 bp, Homo sapiens
catctaaaaccctgattctgagatgtaattctcctagcatgttgatgtttatcttttgtgattgatggataaacagaaacgtacagcaaaatagatatatrtgtttttccaccaaaaacttggaatttacatataatattataatattaactcacagttttactttgtacataataaaccctctttcatgtcaataaatta

SEQ ID NO: 173551 - DNA, 201 bp, Homo sapiens
aattctgtatatcatgattttatgcaatcatctgttgagaacttcatgtaatactttactttggcttttaaataagtacacacacacacacacacacacacagagaaagagagagagaggcaaagtactgtgtgtgtatatttagtgtaaagacagtttctcttttaaccacttggaaagctttatccctgtaatttaaaa

SEQ ID NO: 173552 - DNA, 201 bp, Homo sapiens
gccagacatagttcattaaacaagggatgactaactaatgcagcttaagcccgttagggcctctgtcaccaggggttaaaatctggcctaagagattacargtttggaggagtgtctttccctacaacttgtagacttgggacttgtcagagagctatattctatcatatgaactgagacagagaaagccctctgtggaga

SEQ ID NO: 173553 - DNA, 201 bp, Homo sapiens
tacaccaaaagatgtaagatgacttaaggccacaggaattcttagactaaaatgttacttaatactaaaatgttacttaatatgcaatattttattttttwaattattttataattttaattttttaataattttttattttcaatattttatttttttattttcttcacatttgaactgtctttattctagggagaaggg

SEQ ID NO: 173554 - DNA, 201 bp, Homo sapiens
aagactgatatatgtgacagatttgtgctatacatatctaaaatattattatttctacaatgtcagtgctacaacttctctgataatttatcttttatttstaggataatagtgctatttttgcttattgtgttttccatgtagataggtctgaagttcctgatgacaaaagggcaaattctgtcactaattcagatattg

SEQ ID NO: 173555 - DNA, 201 bp, Homo sapiens
taaacacatatacatagtagcacttttgtgaataaaagaaaaaatatataagaagctgtatttctcatttgaaagaattgtgtctgtgtgtgtgtgtgtgkattttattattgtttgctttgttgtgtttggtttttgttttgttttgaagcttaaggaaaatcttgcaaaatgtgtccaaatcattttctttctaagtat

SEQ ID NO: 173556 - DNA, 201 bp, Homo sapiens
gtaggattttattaggaaagtgatatattttaggaaacagttggtcatgaagtacatttaatttttgaactcctagtttataaaaccaaataattaaaacrtttttgacaaaatatttacagcagaatcttggaagttaagaaaacaaaacaaatgtttcttcgatttcagttacaggttttcaagtaaactgataaaacc

SEQ ID NO: 173557 - DNA, 201 bp, Homo sapiens
tatatagatggatttttttttttttttgagacagagtctcacttgttgcccaggctggagagcagtggcgtgatcttggcacaatgcaagatccaccttcygggttcacgccattctcctgcctcagcctcccaagtagctgggactacaggtgcccgccactatgcccagctaattttttgtatttttagtagagacggg

SEQ ID NO: 173558 - DNA, 201 bp, Homo sapiens
actcatagcgatatacactatactactgcataactcattgaacagatttctcattctgccacatttctgcagttcaagagtaaagcttctttataattatrtatcactagtactttcagaaagccctccttgctctaccatttccaatttctcctccagcatctacctactccaagaggtaacttctatcttgaattattt

SEQ ID NO: 173559 - DNA, 201 bp, Homo sapiens
atctttgtgtaggtggatgcaatttatatgccactgaagagggacccattaatattggtggattgcagcaatttgctactgaggtatgtatgatatacacrtgacatccccccactaccatcaccatgcacaaatatcttaaaataactttaatccttggtgctctgttgatacccaacatttttagtgtgacacacagct

SEQ ID NO: 173560 - DNA, 201 bp, Homo sapiens
aggaatgccatgtgaaaaggtgattttatttatatctctacagaggaaagaattgccttcaagaataagtattttatatagatggatttttttttttttttgagacagagtctcacttgttgcccaggctggagagcagtggcgtgatcttggcacaatgcaagatccaccttccgggttcacgccattctcctgcctcag

SEQ ID NO: 173561 - DNA, 201 bp, Homo sapiens
aactcaaagaataatactaaagtaaaattgtggaatagtaaataaaaaagaggtaactacttcagaaaagtgtataggtggtagtaaggaaatgtcccaasaagtatatgcttgaatgaatcagttgagtttggaaggattatgaagagtttaacgcatgagtaaagtcttagatttatttgtattttaggcaggtaaaat

SEQ ID NO: 173562 - DNA, 201 bp, Homo sapiens
  misc_feature (1)...(201): n = A,T,C or G
ctataggaagcatagcagcatctgctaatgtggaggcctcagaaagcttccaatcaaggcagaaggggaagggggagcagtcacatcatatgacaaatcangagcaagagaaagaggggagagatgctacacacttttaaagggccacatcttacaagaactcactcattatcatgaggacagtaccaagaggatgatact

SEQ ID NO: 173563 - DNA, 201 bp, Homo sapiens
atatttattttctactaatccataaagacatgttacctttttttaagattggtcaaagattggtcatttttctactgatgcctgtttttctttctcctttyttttcagtacttctgaaattcctcagttccggctgccgtatgatgtagtgaattttgagattgagctaatgaaggaccttggtgtaaaggtaaatgaaaa

SEQ ID NO: 173564 - DNA, 201 bp, Homo sapiens
aaacatatactagattccccttatatgccaattatatgctagatgctggggggaagtagctgacttaaataagttatctgaacttaggagtagtagaggtraaacaaatacttgaaataaagtcacatagtgcctagcgtaacagaaagtcgttagtggttaattcactagaaagggggggaaaaaggtttcattggaaag

SEQ ID NO: 173565 - DNA, 201 bp, Homo sapiens
tgttacctttttttaagattggtcaaagattggtcatttttctactgatgcctgtttttctttctcctttcttttcagtacttctgaaattcctcagttcyggctgccgtatgatgtagtgaattttgagattgagctaatgaaggaccttggtgtaaaggtaaatgaaaaaaacacctatctgtgtactgctcaaaaaga

SEQ ID NO: 173566 - DNA, 201 bp, Homo sapiens
tttcttctgcatttagcccttaatagaacatgttcctgttctatttatatactattttgtgtatgtaaacctatatactaaaagacaaaaatgttgtcacrttttatatggaatctcatagaatttttggctgacttttcattctttttgatgttaaatattaagattttaattaatcatatgccaaattttcttatgcaa

SEQ ID NO: 173567 - DNA, 201 bp, Homo sapiens
ttcccatatatttacttcaaggacactgacctcctggaggagatctcttccaggtaaaatgaaatccaatgttcaaggagttcagcgtcttaaatagatakaattatttcagagacataagcagatcaaggtgaagtgcttggactattttaattctgaattggtttgttggtcagtttaggaagtggaaatgaaacttcc

SEQ ID NO: 173568 - DNA, 201 bp, Homo sapiens
caattaatattatttaattttctagtcttattttatgctcagattacaagtatagaagaatgtgaacacagtcttttaaagaaatgcgtaaaatggaatcattattttgtagaaacttctgaagcctcaaatcagaaaagattttatatcagaaggaaattttattatgaataataatttctcaaaatggagaatgaaatc

SEQ ID NO: 173569 - DNA, 201 bp, Homo sapiens
tggtatttatgaaggtgatgaccttaggaagaaattgtaaactataaatcattttaaatataaacctgaggcagaagcagcatatcttcctatgaagtctrtattttttcagtgggaaataatttattaaataattttaacactcctatactaaattagtcaactatcttttataaaatcttttttttctcttaaagaacc

SEQ ID NO: 173570 - DNA, 201 bp, Homo sapiens
ttaggtggcttcacctattcacttccatatatcagaagataatagaaaaattttgtctgcagaattttaaaagaaattatgttgtgggctaacagtttcaygtagaggcaagatagttaatgtatgttggtatataaatatattcttagacattcaggggttcagaaaatataccatttatctaacctattaggaaaaaaa

SEQ ID NO: 173571 - DNA, 201 bp, Homo sapiens
tctaaaaaatatggtgttgtggtttatccagctttttctagattttagcagagagaacattcactggcctcctgtgacttactacattatgcctagaaggygaaattcctttctgtgtctacctcagcacattgttttggtaatcaaagtcatggattgattgaatataagcaactacatatcattatgtttaaaggaaga

SEQ ID NO: 173572 - DNA, 201 bp, Homo sapiens
ccctcaaggcatggaaaccatgctctagctctgcctctgtaactagatttaacatatctgtgatgcccaatgcccaaatctgaatggtcgaatgctgtttrgaattattatacacaatttaagcatttggacgatgagacacttatgtcaacaatataaattggaaaaaaacaagaaagagcatctacgaatgtggaaaaa

SEQ ID NO: 173573 - DNA, 201 bp, Homo sapiens
tatgacatgttttttccagattcttgacaaaaagcaatttaatatcaaattctgacaaatgagaactgaaacatcaatggttcttaagcattaatattatwggatttctcttgctagatatgtcatctccttcatcttttttattgtaagacaggtattattgaatagttaccttatctactaatcaggagtacgactcat

SEQ ID NO: 173574 - DNA, 201 bp, Homo sapiens
tgagatttatctagagaagcttgacaaacttctcaaagtgagtattagagaaaattcccccgctgcttctggcagggggaagagaagaagaaccatttcawaatatggcagagcattctgtttttcttaacaagacctaaagagcaagaatagactggagttaaatatttgaagtattaagagggccaggcacagtggctc

SEQ ID NO: 173575 - DNA, 201 bp, Homo sapiens
ctgcttcaggctgatgagtttctggccacagggacatgatgagctagaagacatagcccatgtcctctaggagtttgccatccgttgcctaagacacagtrccactaatgtacacgccaggattatctaattgaacatgcattaaacatgcaatcatagttaatgagagcaaagagctaaatctcataaaattattaaaat

SEQ ID NO: 173576 - DNA, 201 bp, Homo sapiens
taactatcacaagtccaccccttgtcaacatgaacccatacacatctcctgaaatcatacataatctccaaataaagacaataataaggtcataattacasagctattctttgcacaaccagaagtgcattaatccttaccctaattgctattacataaagttaacacttaaattcttatatgaagtcaataaatcttaca

SEQ ID NO: 173577 - DNA, 201 bp, Homo sapiens
gaaatgatggctttgttagagaaattaataaggaagaacaattgatatgtaaatatacatctattacaatacacctcatttctgtaaaaaacacttcctcrgttaattactgagagatcagcattgtacacattgggttcaaagtgattccaaagaagttgatctacatcagcactcctgaaggtgctttactgacaaata

SEQ ID NO: 173578 - DNA, 201 bp, Homo sapiens
ccaacctattatttttttaattatgtcacttttttgttgagtacattccataattttataataatttagttttcttctttcaaatgccaaatgttctaatmaaaaaaactcagaatttttctttccattgtggtatgttaaaagcacattgttttttgtatgtcacagtgcactgagtcttctgatttctttttaccaatt

SEQ ID NO: 173579 - DNA, 201 bp, Homo sapiens
agaataattctctttgcccaaattctggtcaaatgaaatttgaaagatgagatataagaaatggccttacgaagatgggctgtaaaatccattttcaaaaygcttttttgtttaaagttgactcacctcagacactaaaagtgtgaggtaataaatagctaagtagcctggcaatatggcaatttcttgtgactcagagct

SEQ ID NO: 173580 - DNA, 201 bp, Homo sapiens
gtgtattcactgctagcagtggacaccatgccaggagaacctgactcctggtgcaaaaggattaggaaaaaaaaaaaagtcaaacaatgccaaaaaaaaaraaaaaaacccacacaattcttttctgtactctgtggtttgttttacttaggaaaacggcctggttataccctgcagcacgcattcattacagtgatcttt

SEQ ID NO: 173581 - DNA, 201 bp, Homo sapiens
ttcatacaagtagagaactgttgtgtcagttgagtcctccaggaatcagacacagagagggagttaggagggccaaaggtttattggagagaaatgcttgygaaaggaaaaaagtggaagcaaaattggaaaaggggagccattggaccctgatacagacacaagaaaagtctttgctagcccagtagggagcttcaggac

SEQ ID NO: 173582 - DNA, 201 bp, Homo sapiens
tacagtaaaagagagctattactcgctccacaatcactgagcctgacatgatgcacagaagagtttaacatgaaaataagatggactgatgggctaaggaygtagaggacattgagaagattttatacaacttgagaaatatgtgtaagtcttacagttgggatatttaggaaaaggaaggagcattttggatagtcttat

SEQ ID NO: 173583 - DNA, 201 bp, Homo sapiens
aacttatgataatcaacacatattacatccatttagtaaatactagttttcaaaagattgctaatttttgtcatcttctgttagtgcatctgcatgttatrtatgtacaatagagattaattccaaagggcgtgaaacatttacctttacctttccatttcattaatatctatcaagcccaaagcgtacaaaagactctgt

SEQ ID NO: 173584 - DNA, 201 bp, Homo sapiens
tatgtagctaatactgtctactatagaaatcgagttgcaagatgatgttataaactaggataatgacactggagaaagacaaaagttatcagctggacgcrgtgagtcaggcttgtaatcctagcactttgggaggctgagatgggcagatcacctgaggtcaggagtttgaggccagcctggccaacatggtgaaaccct

SEQ ID NO: 173585 - DNA, 201 bp, Homo sapiens
gctttgtgggtatgcaatctgtgccatagcacaaagcttccctctcagaaggtcctgctcttggattaatgctctgacaactccatcttgaaattcataayaatttttaaactgggaggcttggatttttacttttcattgggtccccaaattatgtagctaatactgtctactatagaaatcgagttgcaagatgatgtt

SEQ ID NO: 173586 - DNA, 201 bp, Homo sapiens
agaccaggaggtagtagtggagatgagaaacgtaatatatttggaaaaagggacaatagatttttctgacagactggctgtaaggtgtaaaagaaaaggcrcaaatgattgtaaggtttttggccaaaggtattggaaggatacagttgccattcattgaaatgggcaaggctgtagaagaagcaggtttgatggcagaaa

SEQ ID NO: 173587 - DNA, 201 bp, Homo sapiens
ccgttcagtttttttgtgctagagcttacgtagtgattttctgatattcatgaattctagagtcaatatatacttacatcccatcctcctttctttgccamaattcgggacaaattttaactcagattatctagtgacattattttgtggacatttaaaaatattcttctaatttacaaaaaaagagaatatatcataata

SEQ ID NO: 173588 - DNA, 201 bp, Homo sapiens
ggttttatacaaaatacttcatttcagaaatagttaccaatttaaaaattaaacactaactcactaaatatgtttttcagtgattccttcaatttgagttsattatatgtcctatatcatgtaagtttttggactccttgtttaatgttttatttattatactcccctgctttaatatcattcattcattttacttcacag

SEQ ID NO: 173589 - DNA, 201 bp, Homo sapiens
ctacatttttacctttaaaaactaaaaaaagagcagattgaacccaaagtaaataaaataaatgatataataaagatcagagtggaaaagaaatgaaattrgaaaaagaaaaaaaatagagaacatcaatgaaggtaaagctggttccttgcggagacgaaaaaaattgaccaaactttagccagactgatcaggaaacaa

SEQ ID NO: 173590 - DNA, 201 bp, Homo sapiens
tacctttcagaaatgtaaaatagagggaatacttctcaacacattctatggggccaacaccctgataccacaattagagaaagagtacaaggaactccagrtaggaactccagatagggttaatatttgaaagtagcatagttcatatgttataaactaaatagtgataatcacacaaaatatattatctcaataaaccca

SEQ ID NO: 173591 - DNA, 201 bp, Homo sapiens
taacatttggacaatgtgttgatgcttgtcagagctgacactttattagcagatgagaggtccacatgagcaccttttagactatcttccgaacttaaacrgtctgttctcttgaacagacccccagtagccacgtagttgaataaaatagacacctaacacaatattggccaagcctgaatctcttacttgataattagg

SEQ ID NO: 173592 - DNA, 201 bp, Homo sapiens
taatgagatagtctggtgttggcataaagataggcaaatagattaatgtggcagaatagtaagtcctacaaacaacccacaaattatttatatgaacaacygatttttgacaaagatgcaaaaaggcaattcagtggacaaaatatagtctttcagcaaatatgctggaaaaattgggtgttcttatgcaacaagaaagta

SEQ ID NO: 173593 - DNA, 201 bp, Homo sapiens
ttaaaaatcgtgattaaaaaatacctatcactggatctggtataaatattacttgcaaatggacaactgtcttgttgattttaagaataaaatagaaaaamattttaactgtcctatttttacagtagaccttaacatttggacaatgtgttgatgcttgtcagagctgacactttattagcagatgagaggtccacatga

SEQ ID NO: 173594 - DNA, 201 bp, Homo sapiens
catatatctgatacagtactttggtgggtttattttagaaatttaaacatatacccatcatatgacccagatattttacttttagatatctacccaagagraaacaaaacatatatctatacaaagacttgtacgggaatgttcatagaagttttatttgtaacaacaacaacaacaaaaaacctgggactaactcatatt

SEQ ID NO: 173595 - DNA, 201 bp, Homo sapiens
cacaaaactaactggtttgttacatcattagagttatttttgccgtgtcattattcttttattaagaattgttttcaattctctatattttagatgcaacrtttaaaaagccacagtatttattaccagtagtggaagggaacaactaaatgtacatgttgctgctacaaaagcagttgtggtagaaatatatatatattg

SEQ ID NO: 173596 - DNA, 201 bp, Homo sapiens
gccttttccccaaaacaaactgattcttaaggaaagtagaagaaacaagaattgacaaaggggttttacaaattgaaaacataacagtttcttagttttgwatagccatttataggatacagatgtgtatttctctgaatcgatttcacaataacctcacaaaaaagatatgaatatcatcctgattgcatgataagactg

SEQ ID NO: 173597 - DNA, 201 bp, Homo sapiens
ggactttcctatggatagtttttaaatagtaagtgatagaatttcaaattgaacacagaacatctgaccacacagtccccactgttctgctaagaaactgyattttcttaaataaaactatgcatatatacttacgcacaataaaaagattgttttttaaagccaaacatcagattatttagaattatctatgaatgattt

SEQ ID NO: 173598 - DNA, 201 bp, Homo sapiens
tttaacgtttgtaacttttttttaattttcaaagtgttgaaaaacaaattcctttataatcagaaatgcccatgtataagggtatattttaactacttgaraagtttgagcagtgagattggattcagaagcaatgtttcaactcttttctattttaatcatttctaaaattctatcttaattatgtttttccaagttttc

SEQ ID NO: 173599 - DNA, 201 bp, Homo sapiens
gttcagaaagttggttactggattaacaataagtaaagagattctagagtctttctgggactcaagtcccaagtcctgctgaagagaaggttctgctctcracacatttgaaggcaatgaagaaccgaatctaactaaagcagcggcacaacccagactctgcttaactgtagacttaatccactcagtctcctaattagc

SEQ ID NO: 173600 - DNA, 201 bp, Homo sapiens
ctaagtatatttcaagtcacacactagaattctccaagggtacgacttcattctcatagttgtaactaaggaactactacacatctcctgcgattttctgrtttatgttcagatttactcccagccatcactggaacaggacagtcttaatgatagtaggaaaaatgtgagttgccattatttagcattctcaataaacgt

SEQ ID NO: 173601 - DNA, 201 bp, Homo sapiens
gtgatttatttgatcccaagttgcagtgccttcatctgaggtctaggtgtgtatctccaaatgcttctgtggatttttcaggcattttccaactacatatrtagttaatttctagtgaggtttaaatcctaagggtgtgaccttggtaacttatctcaatctcacattcctcaactataaaattgagttatacctattttg

SEQ ID NO: 173602 - DNA, 201 bp, Homo sapiens
acagtccttaactcaataaatattcaccaaatggatgaatgagtgaagagatgaataaatggttgaatgaaaagaatgaagtgacttattctaaatgtctktactgaaaattaacagtaagggcaaaatcatgtgaaagtgttgtatttgtgaggtgtcatgaaggccagccagccctccttctgttcagggaatggtcag

SEQ ID NO: 173603 - DNA, 201 bp, Homo sapiens
cttatttatatttctgaatgtgctagaaggaccttagagatcatatattctaatcccctcacttcacaggtttttaaataacgtatggtggctagtgcagrctctttttaaagatacgtttcagggataaagtagtgaaaagagaaatgcaaactttgcctccaagaatgcacattttaacaggggaggctcagaattaca

SEQ ID NO: 173604 - DNA, 201 bp, Homo sapiens
gtgtagtttcttataaacagccttagttctatttgaagctaaagaagaacaggatggttagtttcaatatgttaacagctccttctctttaagtaaaatasaaaatggaaaagagaaggacctagaaagaagcatgtctcactccatccagaagtcatgaaagcagatgatgcagtgatgtacctagctctgaggtcctct

SEQ ID NO: 173605 - DNA, 201 bp, Homo sapiens
ttaatggacaaatggttaaatacagtttttttttcagaaatctaaaaaagtgtcagcaaagaccagagttgacagttaaatgctttcgtaactagaacagyttttactagaaaatgtcaggatttttcctttcgtttttagaattaatagcaacttgttgcagggttatttttgagcattcatacaaataagtatatatat

SEQ ID NO: 173606 - DNA, 201 bp, Homo sapiens
taaacatgtttcatgtagttcaagttagcaccatttttaataacacaactggagacaaatgtccatccttaaagaacgttgagtaacttatggcatgtacrcaatgggatactctgtcactataaaaaacagtgagatagatctctatgtcttaatgaaagggaaaaagtaaagcaattttcgcatatatcaatgtagtgt

SEQ ID NO: 173607 - DNA, 201 bp, Homo sapiens
tatggaattgagatgaattatttctctacttgccttggatggggtgactgctataagattttcttcatttacactttggaaaaaatttagtctgccatttrttttcctttcaaagttttggtaagaatttactaatttatagttgatatatgtacaatgtagaaaatttggaaaataaggaaataataaaaattggaatat

SEQ ID NO: 173608 - DNA, 201 bp, Homo sapiens
gtaaggaccttgacagctgccactaagtatgtcagtgtgacataacaggcccccgtatggatagttactataccttaggcaaggagatgcatggatcagaygactggctagagacttccaggtctgcattgtttaaatatttagtgtttaaaaagtggaaaatgagggaagctgaaattatagcaactgtttagttttatt

SEQ ID NO: 173609 - DNA, 201 bp, Homo sapiens
atgatgaacagtttaccacaaccacagagcttttaccaggtgttaagcatcaaacctcctcttccaccttctgatctgaacttccacataccaaagctctrgcatcaaaacttcggttttatcttctgcgtcttggcctcttgacatacacttagcaagtgagatcttttcttcttgttttgggtaagtcttctgaagtag

SEQ ID NO: 173610 - DNA, 201 bp, Homo sapiens
atgataacccatatggcactattgtcccttagaagtaagacataaatcctttgagtgatctttaagtgacagatgaaacactttataatccattgtggaaytgcgacatgcttagttagacacttgaaaggaatattttacttccatattgtaatctcaactgcttgggcttgaatcaggaatagcttatcttctctaata

SEQ ID NO: 173611 - DNA, 201 bp, Homo sapiens
atgtctacccttggtgtatagtttaattttcttaaatatttttctttttatagagaagttacaattttattcttttaatttgcagtttaatgacttaatgragttaatatttttagtgcttataggtgatttatattttttcttctcccaatttttattattctttatgtttccattgaaaagctaatatgttccttactg

SEQ ID NO: 173612 - DNA, 201 bp, Homo sapiens
acaggcccccgtatggatagttactataccttaggcaaggagatgcatggatcagatgactggctagagacttccaggtctgcattgtttaaatatttagygtttaaaaagtggaaaatgagggaagctgaaattatagcaactgtttagttttattgaggaaaatatcacattatgtgcttgacaggaagtaatatcata

SEQ ID NO: 173613 - DNA, 201 bp, Homo sapiens
atgatttaattacctcccactgggtccctcccacaacatgtgggaatacaagatgaaatttgggtgggaacacagctaaaccatatcaccctcctaaacaytgtgaagattaaattacttaatatttgtataacacttacactagagcttgtcatataggaagtgctgtataagtgtatgcacttatgcttatgaaactgg

SEQ ID NO: 173614 - DNA, 201 bp, Homo sapiens
ttctttagtggtgatttctgagatgttggtgtgtccatcacccaagcagtgtacacttaccaatgtgtacccaacgtgtagtcatttatccctcacccccstctcaccccttcccctaagcccacattatatcaatcttttttttttttttttgagatggagtctcactttgttgcccaggagggcagtggcgcaatcttt

SEQ ID NO: 173615 - DNA, 201 bp, Homo sapiens
tttactggtgattaacactttagtaatacttttgatattacatttttaaaggggtcttcttccttctacggaatgtgtgtttatggtggcagctttaatgmtgtttcctactgtgcagttcaatagagtatgtttttaggtggttggttgagggtttttttccgttatgtatgtcgatggagataagtgttttaattactt

SEQ ID NO: 173616 - DNA, 201 bp, Homo sapiens
ataaatcattttactataaagacacatgcacacgtatgtttattgcagcactatttacatagcgaagacttggaaccaacccaaatgcccatcaatgatasagtggataaagaaaatatgttgctgtttttaaaaacactaacatttctttagcctgcattaaggcagtattttacttagtgattcttgtttttactaatg

SEQ ID NO: 173617 - DNA, 201 bp, Homo sapiens
catgatttaattacctcccactgggtccctcccacaacatgtgggaatacaagatgaaatttgggtgggaacacagctaaaccatatcaccctcctaaacwctgtgaagattaaattacttaatatttgtataacacttacactagagcttgtcatataggaagtgctgtataagtgtatgcacttatgcttatgaaactg

SEQ ID NO: 173618 - DNA, 201 bp, Homo sapiens
gtgtattaggataataaaaacaactaatgcaatttggggcttcctatccagagacaaatcatggaagagtcagataatagttcttttttaatgactcgagkgaaaattcagagagaatatttggacacaaaagcagaagagctctggtttcatacagaatccagggaacaacaggttataacatttgatagatgaaaagaa

SEQ ID NO: 173619 - DNA, 201 bp, Homo sapiens
agccaagagctcattagagagatcttatccttctgaactgagcagctctccatcgtttcacatatatgcctggagaaaatcacatagatgtagaaaacaarttccagcagctaagagagtcacaagcgcgtttgctacatgttctttattttaaagcctgccacttgcttcctcagtcttgcattgtttcactttgcagag

SEQ ID NO: 173620 - DNA, 201 bp, Homo sapiens
atgattttctttttcctgccatcagaaaacctaaagctgcttacttcttttccttgagttgatgacggggcatagtaaagcacagaattttgtgactgagragaaccttaaagattttccaattcatctcccttatatacaggataggaattaaggaccagaaaagtgcttaatctgccttagcctaaggtaaccaagtag

SEQ ID NO: 173621 - DNA, 201 bp, Homo sapiens
ttgaaataataatctggataaattctatctgcattacatggaaaaaggatttaacatcactgtattcaatagtgattgtgtacacttacacataaccatamctttatatatatatgcacaaaagaacaaaaaaatgaaatattaatattgattatattttttggcacttttgtatatttcaggtcttctgtaatgagtatt

SEQ ID NO: 173622 - DNA, 201 bp, Homo sapiens
attctcagaaaaaagataactagcacaaaagaatctaaagaggttacaaagaagaaagaagaaatgaaatgaaacttgggtaaatgtaagatatgaatctktgaaataataatatcaaataaggcatttaatagacacaatttagaaagcagtattatcaggagacctagggctgggatgaaagtgaagaacaaattatag

SEQ ID NO: 173623 - DNA, 201 bp, Homo sapiens
tgcctgaaaatgaaatgatgaacttgacttctcaagcccacatgacttctagagcatgagatagtctgctgttctgctgctgaaagtcagcaacctagcayagggataaggaacgtggactctggcgctaactgcttggggtaaaatcctggtgccaccacttaccagtttcccctggttagattactcagccactctaga

SEQ ID NO: 173624 - DNA, 201 bp, Homo sapiens
ttaagtttgagaagtactagaatagataatacaataaaataaaatctcaatgtaagaagcatctcatctgtcttatttagtgagaccgttggaaagtgagrtcaaaagaacactaaggaaatttgtagttggctataatttgggaactactttcaattctcagaaaaaagataactagcacaaaagaatctaaagaggtta

SEQ ID NO: 173625 - DNA, 201 bp, Homo sapiens
aatgcctatagtacttattagctgactatttctattattaccattttacaagcaagtgccattcttgaaactgattgatgtttaggaataaagcacatttrttacatgttgccaacttcagaagagcaatcttataacctacagcgctttttgagaagtgatgataccttatatttctggaactaatcactgctaaagaaa

SEQ ID NO: 173626 - DNA, 201 bp, Homo sapiens
gaatctcaggcccaactccacagctatggaatcacaatctgcattttaaaaagatccccaggtgattgatatgtaggtttaagtttgagaagtactagaayagataatacaataaaataaaatctcaatgtaagaagcatctcatctgtcttatttagtgagaccgttggaaagtgaggtcaaaagaacactaaggaaatt

SEQ ID NO: 173627 - DNA, 201 bp, Homo sapiens
cccattttttcatatctccttagctacagttttctacaaacataccacaaattcagtctcaaaattgccccctgaatagtttctgcaacttacttcctacrtattattaaaatgttagaaacctttatttatctaccttaagcttctgtgggtttcttaaactggtaaatgtatggtttgtgggtttatttttttaccaag

SEQ ID NO: 173628 - DNA, 201 bp, Homo sapiens
aaaaaaaaaagagtaagttaaccaattctgtcaaaaataaaagatcttagtaataaaatatatataattgaaaaggtgaatgtgattaaaatgaacatgtktatatatttatatattagtatataaatatgaaaatatataaatattaaatgatctcattttacctccctaattctataagctggttatttctatgttttt

SEQ ID NO: 173629 - DNA, 201 bp, Homo sapiens
ggagtaggtaatgtggtaggaattgttcatgtatagaaatgatatggtagtgtcagatctggtattaatgtgaagaaaagcgttttccagtttgtcagaawttcccttcttaagtgtcattctgttataatattaaatttacttttttagttacttctactaataattcaatatgacttcaccttaattgtttataatgtg

SEQ ID NO: 173630 - DNA, 201 bp, Homo sapiens
ttaatagtttgagatgaatgtttaacattatctctgtatgattattaagactacataataatttgtgttgtaatttataatactccccaaatacaaattcrtgtctaatgttcatttctaaaaatgcccacactattttactacttaagctcttaaattttcctgaactgatattttgattttatttgaatccttataaaa

SEQ ID NO: 173631 - DNA, 201 bp, Homo sapiens
aaatggaagctctgaatatagagattatataggaaaaatgagagagagaaagttcagtaattataccaggagtagaacatgatgagattgcctagctaggrtttcaatttggagtaggtaatgtggtaggaattgttcatgtatagaaatgatatggtagtgtcagatctggtattaatgtgaagaaaagcgttttccagt

SEQ ID NO: 173632 - DNA, 201 bp, Homo sapiens
tttaaatccatttatagattttaaattaaaatgaataaacaatgcttaaatatatttatgattgtagtttggtggtgtttcacaatatcattctaaaggamtcttaatgttttttttttttctgttcatttcactgttgtcttgtaacttcctgaatctaataaatgtgtactggaaaaaaaaagaaattattttacttcc

SEQ ID NO: 173633 - DNA, 201 bp, Homo sapiens
ttggacaaagtctgtttgcaaaatgtcagatgtacttttctggctattgaagttcaactatagatgtaggatcccaaccatatatgaatcattatagatgmcttcgtagacatctgtttctataaaagaccttttctaaatttccctctggagtaatgaagtgctgggtcagtaaaggagactaacattttgaaaagttat

SEQ ID NO: 173634 - DNA, 201 bp, Homo sapiens
aaaggtaatgtgagaagctgacaatggtcagtttaagaacttttaattgcttgggtttatatgttgtggaaaactctgagaaaaaattaaccttcaataaracagcattcagaaaaggatttttttcagttcactgtgggcagaagaatccaaaatataatatttaaagggttcatactagctcagatgctagtatcggtt

SEQ ID NO: 173635 - DNA, 201 bp, Homo sapiens
tttctgtgctcccatcctcaggggctagcgctttatatgcctgactatttcactcgtaccatttcagaaactcacctctgccagaaaatccccccatatcrgtttttggaaacattcttcctaatgctcttgccatggagtctttgaagctgagaattttccaccagagataatagtctttaagatgctcagagtgttgct

SEQ ID NO: 173636 - DNA, 201 bp, Homo sapiens
tttttaatcttacctcctgctgtgtaactctctaatctgtacctccaacagggcactctcttgcataatccagcagtccactgaatatcttcccttgtgtytctaatctacttttcatattcaccaaacatcttcatgtaaatgtctttcctacatttcagattcactgcttttaagtcaaacatttcttcccaacttgct

SEQ ID NO: 173637 - DNA, 201 bp, Homo sapiens
tctcaccttgggccacagtactgatccatattgataagcagctgtgtcccaaactaaagcacatacaatacattcttccaacaaatatttattgtcacctrttatgggataggcactcttgtattctctggattaggcaataaataaaaactgaccaaaaacccatccttacgtttctcaaacacccaaagtttctaggca

SEQ ID NO: 173638 - DNA, 201 bp, Homo sapiens
aaattttaaaactttaaaaagttatacatcaaaagggactaggctaggcaaagaaagaaagaaagaaaaagaacacaatttaaacagagacagacactggraaacccaaaggagacaagttggtgagtggttcaggctccagtctttgcagtgactgaaggatagatagcagcactatgctttaccaagtgtttattgcct

SEQ ID NO: 173639 - DNA, 201 bp, Homo sapiens
acaaatggctctgtactgcctgagtgctgaatacagatgggagaatagcagacatgatggttggaaagagatccctagaccgcaggagcccagttacgaarggccgtttatgcttgcctaggagtttcagctttaccctggagaggtggagaactagtgagagattttatgcagagaaattatatgatcctgcttgcattt

SEQ ID NO: 173640 - DNA, 201 bp, Homo sapiens
gtaactagaacagcttttactagaaaatgtcaggatttttcctttcgtttttagaattaatagcaacttgttgcagggttatttttgagcattcatacaartaagtatatatataaaaagtatatgtacagtgcaatgcctagagccaataggtacatacaaatatcaacttattgaaggaaggcaaaatgtttgtgaaaa

SEQ ID NO: 173641 - DNA, 201 bp, Homo sapiens
caattaaaatttcactcagtggataaaattgccaacataggtataaacccatgtttactgtggtattttttaatgtagtccaagttgcagaactgtatgcwtaatattatctttttggtataaaaaatatatttttataaagatacacaacattaatagtgttcacatatgtggaaaaggcctggaggcagagggtggggt

SEQ ID NO: 173642 - DNA, 201 bp, Homo sapiens
catgtttactgtggtattttttaatgtagtccaagttgcagaactgtatgcttaatattatctttttggtataaaaaatatatttttataaagatacacarcattaatagtgttcacatatgtggaaaaggcctggaggcagagggtggggttataggtagattttgtctcatcgtattcaattcttctaaactgtttcaa

SEQ ID NO: 173643 - DNA, 201 bp, Homo sapiens
gcttggggtaaaatcctggtgccaccacttaccagtttcccctggttagattactcagccactctagatttgttttcccatctgaaaaaaaaaaaacggcraaaataaaaatacctacccctctgtattagtctgttttcatattgctgataaagacatacccaagattggacaatttacaaaagaaggaggtttaatgga

SEQ ID NO: 173644 - DNA, 201 bp, Homo sapiens
gtcaatactaatttcttatagaaatagcattaattcttttcatctaggagatcttgtttataaaggagagaaattgtcacccatttgggctagccctgccygaaaatgaaatgatgaacttgacttctcaagcccacatgacttctagagcatgagatagtctgctgttctgctgctgaaagtcagcaacctagcataggg

SEQ ID NO: 173645 - DNA, 201 bp, Homo sapiens
aaattgaatactaatttgagaaactatcataattcatcaaattttcactgttgcatgcattttaataaacaaatatttacaatgaagtttcaaagaacagrttaaagaatactgcattatattgctaattaggatacctttttgactaatggcaaaacattagaggaagggacttattaaggattaatataagtaagaatg

SEQ ID NO: 173646 - DNA, 201 bp, Homo sapiens
ggaactgccatctcaaactattttctttaaataaaatagtcatttggcacaatttccctttgaattttcctgcttggcaagttaggagagagacacaaatygttcttttttaaaaaaaaaaaaaaaaaaaaaaagatgcatagtcttttatcattttctcaaagaaagtcatcataacttcatccacactagcaagtgtca

SEQ ID NO: 173647 - DNA, 201 bp, Homo sapiens
ctaattggaaaattgaaaggagattacatttttaatgtcagttttttctgaaatattccacaatctttgtaagtttctaaatttgtttcacaatggagaaygtaaaataacttttttagtgttatacacctaatatatctgtaataaatattccctatcataaaatgataagtgcctcaacagcttatagaaaagataagt

SEQ ID NO: 173648 - DNA, 201 bp, Homo sapiens
ttgttcattttctctccttatcgtatttatttcttcagtgaaatgaatgtcttgttcattctttcatttatccattcatacgtgcattcattcctcaagayatataaatgaacttctctgtgccagacagtggctagacttacagtaggcactatttcctttttgtgtaaaaatgactcttaaatctagttttccactccc

SEQ ID NO: 173649 - DNA, 201 bp, Homo sapiens
agattattttgcctatctgtgggctaatgtaagtgtcctgagcatatgattttggataagtttcttataactaaactataaacacttaacgttttcatctmtatttggtcagttttaaccactctattcaattggtttatcaaatatccaatataacctttgtttagtcataataacacagactataatcttatgagtcag

SEQ ID NO: 173650 - DNA, 201 bp, Homo sapiens
atgtaagacgagactttgctcaccatttgccttccacatgattgtgaggcttccccagccatgtggaactgtgagtcaattagacctctttcctttataawttacccagtcttaggtgtgtctttaatagcagtcacatgactagcaatggagccagaattcccatctagagtttcacagccacaaagcaaatactcttcc

SEQ ID NO: 173651 - DNA, 201 bp, Homo sapiens
cagaattctcacctcctcccagcagtaaccaggagccatgcccctcgggtgtccaagaaagccaagtaagatacctgggcttctatctggcattaaggagstggcattctccacttcccctgccagactgacaccaaggaaagctagcagaaacaaagtttaaataaaatcaagagtctcttaatattataccaaaattgt

SEQ ID NO: 173652 - DNA, 201 bp, Homo sapiens
attgccttcctgatatggctcttggcttggctgttgttggtgtgtaggaatgcttgtgatttttgtgcattaattttgtattccaaaactttgcagaagakgtttatcagctgaaggaacttttggggcaagactatgaggttttctagatatagaatcatgtcatctgcaaacagtgatagtttcacttcctctcttccc

SEQ ID NO: 173653 - DNA, 201 bp, Homo sapiens
atatgtaaaactgatgatataagaagactgaaaggtgaagagaaggcagattggctagggatctcaagacccgagaaacaacacagtggtgagtttcctgsgatttttttcctcacatatctcatctcacacttggagccaaagaagctcaacaacccagaaacaacaataggcacagatgaaaagcctgctctctctagc

SEQ ID NO: 173654 - DNA, 201 bp, Homo sapiens
catctggcaagtttggcaattcttgcttatgtctggagaactcataacataaaatataatttctggcacataaaagcatttatacctctgaattaagagamggggaagtgtggaaggaataggtagctgtgtcggtcagctgccaagggctgaagggaaggtaaagataaaccattagttgtcttaaggaaatcttaaaag

SEQ ID NO: 173655 - DNA, 201 bp, Homo sapiens
ctctcttgggtcaactaaataagggaggaaaaaaaccaatatttctttattacttcaaagtagtgtgtatgtaaagaagccattgggttggtatgtattgrctatgccagttatattatgcagagatagctgtgtgtctatcaaaaagtttgttacagctttccttaaaaaatgctttcctttaacttttgttatgtagat

SEQ ID NO: 173656 - DNA, 201 bp, Homo sapiens
ccctcttttcaaagacttgtgaaatggggatagttcctgtgtcctaccaatgcttcatatgatttaaatttcctgcaaataggaagggaagtcaaatttcwgacagccaaaatataaagaacgctatttgtactgagtgttgttctctgtggatttgtttttaaatatattatatatatatgtatatatatgtgtgtgtgt

SEQ ID NO: 173657 - DNA, 201 bp, Homo sapiens
cgttagtgcatttttgctgtagacttttgtagaatatagaaagcatcctactccctgtggatataatttgatctcagttatatagtcattttctcattctrtctgcctctaccaggaatttttcattagttgcttactgatcttactctagagactcaaagtaattatgtccaagaattgtacagtgtcaagaagtggtaa

SEQ ID NO: 173658 - DNA, 201 bp, Homo sapiens
aatataaagaacgctatttgtactgagtgttgttctctgtggatttgtttttaaatatattatatatatatgtatatatatgtgtgtgtgtatatatataygtgtatatatacacatatattatatatatgatatgtatatatacgtgtatatatacacatatatgtatatatgatatgtatatatacgtgtatatataca

SEQ ID NO: 173659 - DNA, 201 bp, Homo sapiens
gtttctgaaattgtatttaaaatgatatctgacaaatgagagttcattttcttaagaaaaatacttttcatcaaaatcagattgattaacttaattcaaartctctggcttactaaaatgtttttctgaaacatgaatcaattcaagaatgttctgtgtagtttatctaagacaatctatgaattcaacacactgatttgt

SEQ ID NO: 173660 - DNA, 201 bp, Homo sapiens
atatatgatatgtatatatacgtgtatatatacacatatatgtatatatgatatgtatatatacgtgtatatatacacatatatgtatatatatgatatgwatatatgtgtatatatacacatatgtacatatgatatgtatatatacgtgtatatatacacatatatgtatatatgatatgtatatacgtgtacatatac

SEQ ID NO: 173661 - DNA, 201 bp, Homo sapiens
ttcttcatttgagacaaacatttttctcccaaactctaccttatgtagcaattgtttatatatgaaatattttctggccccacacttgcagcagagcttascagccccatgttttaccctctcacagcctttagagcacaggtccatatgaatggggaatggtgtaaatgttgtagttaatgatctttcacagaaaatgtg

SEQ ID NO: 173662 - DNA, 201 bp, Homo sapiens
atgatatgtatatatacgtgtatatatacacatatatgtatatatgatatgtatatacgtgtacatatacacatatgtatacatacgtgtacatatacacwtgtatacatacgtgtacatatacacatgtatacatacgtgtacatatacacatatgtatatatacgtgtacatatacacatatgtatatatacgtgtaca

SEQ ID NO: 173663 - DNA, 201 bp, Homo sapiens
taattcagtggctatttttaggatgtaataggaaaagcactgcagtaccttggaacatttggtgaattgagcaacgtagagcaagttgtggctatgattgwtgaagaaatgtgtatcaactgtggtaaatgctacatgacctgtaatgattctggctaccaggtaagaatcctgctggaattagaatgctatgagacatgt

SEQ ID NO: 173664 - DNA, 201 bp, Homo sapiens; identical to SEQ ID NO: 31053

SEQ ID NO: 173665 - DNA, 201 bp, Homo sapiens
gctcattcctaagaacgtttctatccttagctttccctgcctgcccccaggctcagctgtgctccagtcagagggaactgttctactctctaatgcaccaygctccccacactccgtgccttatctcttgtctggggaaatcccagcttccttcaatgtgccaacaaaccttctctatgaattctttagctgaatttgatg

SEQ ID NO: 173666 - DNA, 201 bp, Homo sapiens
tacacatatatgtatatatgatatgtatatacgtgtacatatacacatatgtatacatacgtgtacatatacacatgtatacatacgtgtacatatacacwtgtatacatacgtgtacatatacacatatgtatatatacgtgtacatatacacatatgtatatatacgtgtacatatacacatatgtatatatgtatata

SEQ ID NO: 173667 - DNA, 201 bp, Homo sapiens
taagaggacaggtgaggctttgataagtattgccatatctgattgatctctaaagcccaaagaacctacttgcttaaagtttttctgagctggtccttttygtctaattccacaagattatctctgggaatactgcaattaacttcttcctgattttattttatttctctcccttctgtccattctctacactacatttaa

SEQ ID NO: 173668 - DNA, 201 bp, Homo sapiens
tacatatacacatatgtatacatacgtgtacatatacacatgtatacatacgtgtacatatacacatgtatacatacgtgtacatatacacatatgtatayatacgtgtacatatacacatatgtatatatacgtgtacatatacacatatgtatatatgtatataaatgtgtatacatatatacatatgtatgtatacac

SEQ ID NO: 173669 - DNA, 201 bp, Homo sapiens
tacatatacacatgtatacatacgtgtacatatacacatgtatacatacgtgtacatatacacatatgtatatatacgtgtacatatacacatatgtatayatacgtgtacatatacacatatgtatatatgtatataaatgtgtatacatatatacatatgtatgtatacacatatgtggatatatatacgtgtatatat

SEQ ID NO: 173670 - DNA, 201 bp, Homo sapiens; identical to SEQ ID NO: 31067

SEQ ID NO: 173671 - DNA, 201 bp, Homo sapiens
gtatttccttagtattattatttcctttagtatttagttttgagtatttacctcaaaaagggatatcagtccacagagctggcaaaaacaagcaagcaaamaaacaaacaaacaaaatggcctagatatttctttccagctcctacagcagcagtgggaagaaatttttttttcccttcctaattccttttatttatttat

SEQ ID NO: 173672 - DNA, 201 bp, Homo sapiens
  misc_feature (1)...(201): n = A,T,C or G
ttttttcctcctctgtcagctcaactgttgctatagttgcaccatagagctggacgtagttgtctcatagtgtggctcctctgcagcagagaaaaatgttnacgctaaaatggggacattgttgacctttgtggtcagtgacatcaataccctctatttctgtttgcaggctatacagtttgatccagaaacccacctgcc

SEQ ID NO: 173673 - DNA, 201 bp, Homo sapiens
ttcatgtatatggaagataaaaacatttaatactaaattatatgttctttggagatataaatgtatatggtaaaacttttaaaagcaaaggaatgagaaakaaaaacttactttacctaatatatgtattataaatattcttttgcatttactgcattaaacaaaattttaaacctatttttacagttcttgcaacatgtt

SEQ ID NO: 173674 - DNA, 201 bp, Homo sapiens
aattttctcccatgttgtaggttgcctgttcactctgatggtagtttcttttgctgtgcagaagctctttagtttaattagatcccatttgtcaattttgrcttttgttgccattgcttttggtgttttggacatgaagtccttgcccacgcctatgtcctgaatggtaatgcctaggttttcttctagggtttttatggt

SEQ ID NO: 173675 - DNA, 201 bp, Homo sapiens
acctacaatggtttatcttatgatttttttttattttacaatggttcatattaagaacttaacaatggttcatcttatgatttttctttctactttacgayagtgtgacttacaatggttcatcttatgacttttgttttactttaagatagggcgagagccataggcatgcagtagaaactgatatgatacatgctaatc

SEQ ID NO: 173676 - DNA, 201 bp, Homo sapiens
gatacatgctaatcaaatatgaagacttgaagctagaaagaacagctaacatgctagataatcacagtttgaaaatacttccatcagctattaaaaatagrccaaaactaataaattaatattagtcgtaataaattcagaatgaaacatcagggacggaatcagggctgtctagttcctcactctttggccttaaacttt

SEQ ID NO: 173677 - DNA, 201 bp, Homo sapiens
tatatttcattgatatatttatgttgataatttttactttttcttgtcatattttctcatgggaaaacgtgtgatacttttaatataagaaatcatcttargctgggtgcagtgactcacgcctttaatcccagcagtttgggagtctgaggagggtggatcacctgaggtcaggagttcgaaaccagtctgactaacatg

SEQ ID NO: 173678 - DNA, 201 bp, Homo sapiens
gggagatgccaaatctaaaattttaaaactttaaaaagttatacatcaaaagggactaggctaggcaaagaaagaaagaaagaaaaagaacacaatttaarcagagacagacactggaaaacccaaaggagacaagttggtgagtggttcaggctccagtctttgcagtgactgaaggatagatagcagcactatgcttta

SEQ ID NO: 173679 - DNA, 201 bp, Homo sapiens
ttcttaacccctttcagtaattgtttatatcatttgatgacataattgagcatttaaaaaattttgtttgctgagaagtatacaaaaaatatttcaatacsctattttttcactatctcataattatcaagaaatattaagcacccaaatgtgcatagaattataatgattatggtccaaaccagattaaaggatgatcta

SEQ ID NO: 173680 - DNA, 201 bp, Homo sapiens
tagaagatataaagatgaaaattttggacttaaaaatgcaatcacttaaatataaaactcagctgatgtgctcaatagtaaaataagagaacagaagaaaraatcagtgaactagaagatagagcaatagaaattggcaatagaaattggccaatatgaaaaacagagagaaaaaaagactgaagaaaagaatgaaaacag

SEQ ID NO: 173681 - DNA, 201 bp, Homo sapiens
tgagccctggtggcggaggctgcagtgagccgagactgcaccactgcactccagcctgggtgacagtgtgagtctctaataataataatataattgtagaygaagtgttatttcattgaggctggagattgtgaaaaagatcctgattcatttagataggatcaatgactgtgctacaacagttgcttaaattaagaaagt

SEQ ID NO: 173682 - DNA, 201 bp, Homo sapiens
aaacaatttagtttttaacaatttaggatacagaatgtgaaatgatgagatgtgaagctgagcatactttgccacaacgactgtggtcttgaggaagaaargtgtaactaccagatctcagtagcttactttccgactaaatgctttgttttctttttgttctgtgatttaattaaatgtagatacagttacctcatttat

SEQ ID NO: 173683 - DNA, 201 bp, Homo sapiens
taatttctaagacaaaggtatgcttatacatttatattttaaacagacttccaaattgacaaatttttatggtataaaaaatgcataatctgctcttagargactataaccccataaagttacttcattttgaaaggatacgtttctcctattcgttttgtaagtttcaaagatcatgtgattatgtgtgggagaagggag

SEQ ID NO: 173684 - DNA, 201 bp, Homo sapiens
tgctaatacataatcatacccattgttgtctatttatcttatttctgtcatgtcctttgtgcctaaaaatctgtacattaggattcattttattacttaarcgctatattcatgctctagctctttccatttataattttaattagtaaatatatattgaacaaatgaacaaatttaaacacatattggcagatcatgcgt

SEQ ID NO: 173685 - DNA, 201 bp, Homo sapiens
ctagggatctcaagacccgagaaacaacacagtggtgagtttcctgggatttttttcctcacatatctcatctcacacttggagccaaagaagctcaacarcccagaaacaacaataggcacagatgaaaagcctgctctctctagccaaagaaccaggaaaggggcagtctagcaagagagagaacttttagacataact

SEQ ID NO: 173686 - DNA, 201 bp, Homo sapiens
ggtaaagaacatgattcctagttttgaccccaccgtccattctttcctcacccaacattgtagccattcccagctcactattctatctttgacgtagtatstgtttgcaatagtggccctctatgggtccttcaaatcagagaggcacacatgtctggggctcacagttctaggaactttttctgtgtaagtaggacaaaa

SEQ ID NO: 173687 - DNA, 201 bp, Homo sapiens
tctcatatagaaagtttaatttgtaaacttctgagtaaaggaatcaaatttagaccaaaatagagtgatggggttttcttagaaacttagtcatctaagtrgagagtatcaaaattttctaacttatgagtagatagagtacatgtttgaaattgagcatgttagtcagagacctggaatgattaaagaaaaaattgtatt

SEQ ID NO: 173688 - DNA, 201 bp, Homo sapiens
gggagtcaaattgtattcagaaagttgctatatgagcatcagatcagttgaatttgagtaagacgaaaaatagttggcattatacaaagcagtttaacaayggaaatcactgataaaaatgcagtgttcattgctcaatggctacactccacttgtacaatttggataacatcatcattaatacaataagaattactgtaa

SEQ ID NO: 173689 - DNA, 201 bp, Homo sapiens
cttttttgagacagattgttgctctaccacccaggctggagtgcagtggagccatctcagctcactgcaaccttcacctccccggttcaagcaattcttcygccttagctgggattacaggtgagcaccaccatacccagctaatttttgtatttttagtagagatagggtttcaccattttggccaggctggtctcaaac

SEQ ID NO: 173690 - DNA, 201 bp, Homo sapiens
ggcattgatatatgtattttctttaaaccaacagttttatttttatcttgaacctattattacttcatttctgtcattttaaaactaaaaataaattctayatagcaatttagaaagatctttttatataccttcattttccttctagaaaccgttcttagtggatgaagtcattcttaagaactattccccataaaaatg

SEQ ID NO: 173691 - DNA, 201 bp, Homo sapiens
tgaaacagtagaacaaatgaaatcagttaataggctaacacaattaattgttattaattatttatttatgaaatacattataatactcattaatctaagcrttggtttgttccacctggtgcctagtaggtactaggtgacatttgttcaaacatagtatttgcagaaaatatcaaattaatattgcaagtgatagtttga

SEQ ID NO: 173692 - DNA, 201 bp, Homo sapiens
ttcaacataccatcagcattgctacccttcttcataaacactgaggtccagtcaggctttgatctgtagtttccatgttctgttttcctctttgtcacaarcatcatctcacggcttggaatgtcttttctctttatgctgtaatgtccagactttgcatatgctgtcaggccttgttcgtgtccaagaaggcctgcctta

SEQ ID NO: 173693 - DNA, 201 bp, Homo sapiens
gaacctgaaccagaaactccacatcagtgggagagttgagcccaaaggaggtctgcagcatctgccaatgccagagataccaggagaaactcagttttgcrcttatggaggacctcctatgtcaggagggagtggtctgttggaaggaccctgcttatgcagtcctgagcctgggctgggtagtgggtggcatccggtcca

SEQ ID NO: 173694 - DNA, 201 bp, Homo sapiens
tatagatccatacttcgtagacataaatgtccgctctgaaacattgaccaaatctgtggtctttaattcctgtatgtgaggtgtaaagttaagtcagtgcmcttcaaatgtgttgttaactccaatatttcgttagcttttcatttttatagtttactaaaaacagttgtttgaatccctggaacaataattaaaccataa

SEQ ID NO: 173695 - DNA, 201 bp, Homo sapiens
atttataaatacagaattctttcaatttagaatcttttccttcactttaaacttgaattagaattcaaaggtgagaaatattgattacataattatcaagyacaaatctggtgaaacagtagaacaaatgaaatcagttaataggctaacacaattaattgttattaattatttatttatgaaatacattataatactcat

SEQ ID NO: 173696 - DNA, 201 bp, Homo sapiens
tgatataaatatacttcagggagaagaacagagtgaatgtcaaatcatcagggaacatgcttgagatcaattattcaaagtgtggaagtccttccatttgratattgtgattcaatagttcaccaagtgggagaaaggagaatgcagctatttgaggatgtggtaaggtacaaaacagtagtgagtagggactaaattgaa

SEQ ID NO: 173697 - DNA, 201 bp, Homo sapiens
tagtactttaatgtagctgaaactgacttatttatgatatgaggcaagaatataacctgattttccctgtaatgttatatatgtttatgtgtgtatatacrtatgtttccatatatttataggtatacattaatgtgtgatttacgatgtgtacttggttatatattaaagatatacataatatactctgagatccgttag

SEQ ID NO: 173698 - DNA, 201 bp, Homo sapiens
aaaactgtagtgtgctctgtggaacacaggcaagcagtgtggacaaattgctgttctcatggaacctatgatcttgtgggaaaaacacaatcaacagtaamccctcaataattttctacaactctaacattctttaagtagaaagctacaaatatataccagtgtttattttatttctatttttttcctctattttactca

SEQ ID NO: 173699 - DNA, 201 bp, Homo sapiens
catgcttgtgctctctgccacatttttgtttgtttttattcatgaggccagaaaatatgttttaaaatatagaggaagttggagaaaaagtagagaaaaartaaacaagactgtgagttttattttcctaggacttggctgagtgtcaaattgaatggagacctttcacaggcgttcaaaacttgtgtttttaaaagagaa

SEQ ID NO: 173700 - DNA, 201 bp, Homo sapiens
ttcatgatttattgtgcatgctcattctgtgatcaactggcaaaataaatcttcatttagaaacaaaagcattttaaaataatggaaaagatactatgatytgcatacgtggaacgtcaatagtccaattgatagctagtttactgtaataaagcatgcaagggtggttctataagaatggattttaatgaagttcctcaa

SEQ ID NO: 173701 - DNA, 201 bp, Homo sapiens
ctgaaaataaagaccagtgataggccacatcctacttatctgatctcagagacaccttataatagaaagttcagggttctgattgttcaatattctaaagsagtcattcatgtaagttccatcagaaagatatgaaatagcttgtagtaacgtatcttttcctcagtcaaaaagaaaaaaagcttgaactgagtgaagatc

SEQ ID NO: 173702 - DNA, 201 bp, Homo sapiens
agatgaagagctagtctgtgcctcaaacatattttatataattctgcattgattttctgcattccttttttgcaaagattttaggatcagaaaatattgcrtttcacccttggccttgttgggcccatggcaaactatattttgaaaggcctgaacagttagagaattatgtttctaaaatttatctttttgctggatact

SEQ ID NO: 173703 - DNA, 201 bp, Homo sapiens
atttcaacctgagatttggaggggacaaatatacaaaccatatcatgttctaggttccttgaatttagatgtatatatccaaattcatatttattttctcrtttttattctttaaaatgtaagctgctaaagtaaatattgccttaactttatgttgtataaaatctcctatttagcacaataggcatcaaagaataattc

SEQ ID NO: 173704 - DNA, 201 bp, Homo sapiens
agctgcatattgacttaatatcataagctttagcatgtgtaattcaattagaaatcaaatactgtgtggaataagaaacattttcaagtttcttctctgtyctgttttgttttagatggaacttgctaaggaagaaaagtgtgaatttctgccattcctgtccccacggaaggttatagtaaaaggtgggagaattgttgc

SEQ ID NO: 173705 - DNA, 201 bp, Homo sapiens
actcaataggatttaaaatcttaatagtttcaaagtcagaaaactgtcatgtgcacacatatatgtaaaataaaatgaaaagcattttattggaagcaagwtgtccatttgggtaagaagagaagatattcatgttaatcctcttctaccataaattcttccccatcctaacactatgtcatgtcatttctggatggtacc

SEQ ID NO: 173706 - DNA, 201 bp, Homo sapiens
ttttgttttagatggaacttgctaaggaagaaaagtgtgaatttctgccattcctgtccccacggaaggttatagtaaaaggtgggagaattgttgctatrcagtttgttcggacagagcaagatgaaactggaaaatggaatgaagatgaagatcagatggtccatctgaaagccgatgtggtcatcagtgcctttggtt

SEQ ID NO: 173707 - DNA, 201 bp, Homo sapiens; identical to SEQ ID NO: 31057

SEQ ID NO: 173708 - DNA, 201 bp, Homo sapiens
tattaatctttggacaagcagtttactttctttgggcctcactttcctcatcttcaataggagaataatgcataccttaaaaatcgtgattaaaaaatacytatcactggatctggtataaatattacttgcaaatggacaactgtcttgttgattttaagaataaaatagaaaaaaattttaactgtcctatttttacag

SEQ ID NO: 173709 - DNA, 201 bp, Homo sapiens
aaatattttagatcatgggacaaatggggtttaggaagcatattttacaagttcacttggctcattggtgatactacctcaggttgctaaagagctggtaygtggcagtgggagaagagtttacaaggaaatagaagtatggaaaaagaatacatcagaaagagaaaatagcaagtgtaaatgtccagttaaaggcagagt

SEQ ID NO: 173710 - DNA, 201 bp, Homo sapiens
tcaatagttcaccaagtgggagaaaggagaatgcagctatttgaggatgtggtaaggtacaaaacagtagtgagtagggactaaattgaaaatgatctatrtatttatgccctagtaatttcttttaatctgcattagcaaaacatgcttttatggggttttcaaaatataatatcggcagaatgtggagaatatgcagat

SEQ ID NO: 173711 - DNA, 201 bp, Homo sapiens
caactgtggtaaatgctacatgacctgtaatgattctggctaccaggtaagaatcctgctggaattagaatgctatgagacatgtttcttcttgtttttayggcagaaagcattttctgttgctatgtgtgaaatttaaaccagtggtgccaaatattgctcttctgcaacagtacatctttctgtcctgtcacccttata

SEQ ID NO: 173712 - DNA, 201 bp, Homo sapiens
tctgtttgggggtttaataaaaccaccaggtatttggcataattgcagctctgatctgtgactttttaaatctaggcattgagttaagaacattaagaaayattgaactatcacagcttagtcatgtgccggcacattatcaacaacaatggcacatctctttccctgtccatttactttctgtagtttctggttgttctg

SEQ ID NO: 173713 - DNA, 201 bp, Homo sapiens
gacaggtgagtattctatcacagcactttttaaattaaaatctaaaatcctcatgcagtgaaataaatgcataacattcacactcgtattcccttcattawgagcaatctaaacttttctagcatagtgtattaccctttgtcactttgtattacttttggtccttcaaggtccaaaaatgagaaaaagttagccataaca

SEQ ID NO: 173714 - DNA, 201 bp, Homo sapiens
agtacctcctttcttttcttttcttatgagaattttaaacagtaattttaaagacgttttcagattgctcctttttcactttgtaataaatttgtttcttrtaattggcagtcttctttggtattagtttttccttgtatcattttagaaattttgtgaatttgtgcatctacggtgattgttgtgtttatttgtttttat

SEQ ID NO: 173715 - DNA, 201 bp, Homo sapiens
taacttttaaaaattagattatcaaaaacacagatttgttatagactggcgcattacttttggcttttctggtactttcttatgagatgaagcccctgagwaggcaaactttcactaacatttctggtagttactagtagttaggtattgctcaagacagaaagaaacattttagaataaggaaaatattaagctgcaatc

SEQ ID NO: 173716 - DNA, 201 bp, Homo sapiens
gaagacatcgttctttaagattcatcccaaaagccactttctatgggacatttatcttgtttcttcccattcctttctgcgtgtttttagagtcttttgcrcatgcttttagtttatcacgtcccatatatccataaatggatatttaagtatttgctgtccaataatatggttattgtgtaagttatggatcacattctg

SEQ ID NO: 173717 - DNA, 201 bp, Homo sapiens
ttaacaagagcaacaccaccataaaaattgctctcactgggtcatctaagttgacattgatttaccttacatgatgtactgtagatgatgatcttcagtcycattcacctttaaaatataagctcacagattcattttttttctttttttctttctttttttttttttttttttttagacagagtttcactcttgttggcc

SEQ ID NO: 173718 - DNA, 201 bp, Homo sapiens
catgagcatggaatgttcttccatttgtttgtgtcctcttttatttccttgagcagtggtttgtagttctccttgaagaggtccttcacatcccttgtaarttggattcctaggtattttattctctttgaagcaattgtgaatgggagttcactcatgatttggctctctgtttgtctgttgttggtgtataagaatgct

SEQ ID NO: 173719 - DNA, 201 bp, Homo sapiens
agtgctgatgatcgtggtatttaaagtcaggcaacactggttctcaatccctgcttcatcatttacttaattgggtactttaaatctcagtcacatcatcractattaaatgcatgaggtttaagtgagaaaatgtgtaaaacatatggcactggcctgaaatatattaagaactcaaaaggtatctgttgtcattagttc

SEQ ID NO: 173720 - DNA, 201 bp, Homo sapiens
tcctcttttcctagttgaataccctttatttctttctcctgcctgattgccctggccagaacttccaacactatgttgaataggagcggtgagagagggcrtccctgtcttgtgccagttttcaaagggaatgcttccagtttttgcccattcagtatgatattggctgtgggtttgtcatagatagctcttattattttg

SEQ ID NO: 173721 - DNA, 201 bp, Homo sapiens
taatttgcatttaaggaatgcattagtgtattcacatatacagtttcatcattggatggttaacaggaatatatggtatttgtttgtgattttattgaatrtgatgggttttttttcatcattcagggaaaatctgctttcctcagactattggctgccataaccaccatcagccattaaatgacgtagtgatgctgtatt

SEQ ID NO: 173722 - DNA, 201 bp, Homo sapiens
cgaatgctgtttggaattattatacacaatttaagcatttggacgatgagacacttatgtcaacaatataaattggaaaaaaacaagaaagagcatctacraatgtggaaaaatatatgcatcacattttgcttagatatgtgcattagacacagactatatatcctttccccaccaagttggtcctgacaataggctgtc

SEQ ID NO: 173723 - DNA, 201 bp, Homo sapiens
tacacaatgggatactctgtcactataaaaaacagtgagatagatctctatgtcttaatgaaagggaaaaagtaaagcaattttcgcatatatcaatgtaktgtgtgtgtgtgtgtgtggtgacatatatagattatatataatgtaaagagaaaaaaattgaatgttaaaataacaataatacatgtattatataaagat

SEQ ID NO: 173724 - DNA, 201 bp, Homo sapiens
agtaaaatagctattacttcatcccactatgtgcctactaccatattataggtttagtgtatagatatataaaatttatatttatgttaacaaatatttgmgtacccattgtgtttcaatgatctccagaaacaggatacaccacatgagatacacagatgaattaaagcttactaagagaccacaacatgggaagctaaa

SEQ ID NO: 173725 - DNA, 201 bp, Homo sapiens
ccactaagtctgtcataggtgagaataatttcttggctggggaaatatgtcttttttaaatagttcttctatttatacttataggtaaacctttaaaattrtaggcaaaaagcattgccagaagctcttatttggagagattgaggcatgtgttaatctggaaataaagaaaagtcctcacattcaaacccggcagtgaat

SEQ ID NO: 173726 - DNA, 201 bp, Homo sapiens
cagatagtgacctcttgaatttattattttaaaatagtactgggaaatattacacatatccagatactttgactatgattattttgtatttaaaatactcrtatcaataaaaatgttcagtaaaatagctattacttcatcccactatgtgcctactaccatattataggtttagtgtatagatatataaaatttatattt

SEQ ID NO: 173727 - DNA, 201 bp, Homo sapiens; identical to SEQ ID NO: 31065

SEQ ID NO: 173728 - DNA, 201 bp, Homo sapiens
gcctggcttatttcacttaacgtaataccctgcaggttcatccatgttgccacaaatgaaaggatttcattctgttttatggctgaatagtattccattgygtacataccacattttctttatttatctatagatggccatttagtttgattccatatcttggctgttgtgaatagtgctgcaataaacatgggagcacag

SEQ ID NO: 173729 - DNA, 201 bp, Homo sapiens
aaaaaattattttctatcacatataaatgggcttttacagccagatagtgacctcttgaatttattattttaaaatagtactgggaaatattacacatatycagatactttgactatgattattttgtatttaaaatactcgtatcaataaaaatgttcagtaaaatagctattacttcatcccactatgtgcctactacc

SEQ ID NO: 173730 - DNA, 201 bp, Homo sapiens
tctttgtctactaaacttttcttatcaaaatgccatttctaagaccatgcctgtcagcccctttatttaggcaaaaaattatggaaagcaatataaatttrcactgtcttctagctcctaaatgtcttaactgaacctccttcctttcagaaaattttgggtgccattgtcattagtatctgtctgtatgatcttaattac

SEQ ID NO: 173731 - DNA, 201 bp, Homo sapiens
ttatgggttagattttcttatttgtcttccctcaagagtttatttataggtatctttgattgccctatgactgaagtattttgtgatgggagatgtctatraatgagataatcaaaaaggggcaggcgctccatttctcaggcagtgcgtattatgagaattcagtagtgcagacaaaagaaatggttagcgccaagctgc

SEQ ID NO: 173732 - DNA, 201 bp, Homo sapiens
atattctgtacctattttagcccctgtgataaatcctgaacagtaaagggaaggatggggccacttttaacattgtgttgtatttttttttttttttttttgaggtggagtttcagtcttgttgtccaggctggagtgcattgttgcggtctcggctcactgcaacttccgcctcccaggttgaagagattctcctgcctc

SEQ ID NO: 173733 - DNA, 201 bp, Homo sapiens
gctttcattataatcctaatagatgcacgtaatatttacaattttattatgatctctttggttacacagtttatttttattcaacatactacttcccttcygtgttcccccttggttggcttgggagattgagacatttttcatcatgttttctagttaacatttattgagcagctactataaatatgatgttggtgcttg

SEQ ID NO: 173734 - DNA, 201 bp, Homo sapiens
agtatataaaatctgtgtatatatacagatatataatatatttatatttacagatatatacacagatttacatatatttaaaataaatctgtgtgtgtgtrtatatatatagagagagagagagaaacaaaattgcttgtagaatattatctcaactgaatataaaaaatgcagagaaaaaataggaatgaaatgtggcta

SEQ ID NO: 173735 - DNA, 201 bp, Homo sapiens
gatagataataaaataagtaaattataaagtgatattgaaagtcagaagtgccaagaggggaaaaagtcatggaagggatatagtgaaggccaatgagtgrcaggaggcagggaagaattttaatgtcaatgggatgattaggaaagttcccactgagaatgtgatatttgaataaaggcttgaagaaacaatttcttgac

SEQ ID NO: 173736 - DNA, 201 bp, Homo sapiens
gcaggttagttacatatgtatacatgcgccatgttggtgtgctgcacccattaactcgtcattcacattaggtatatctcctaatgctatccctccccccctccccccaccccatgacaggccctggtgtgtgatgttccccttcctgtgtccaagtgttctcattgttcaattcccacctgtgggtgagaacatggagca

SEQ ID NO: 173737 - DNA, 201 bp, Homo sapiens
cttagaaactctcactttgatttcttcacgtagtccgttacattactgctaaatgcaatatatagggacatcatgactttgatgttgtacagctccaacaratagaaactaatatgatagaacaactaagatttgtggttttatgtgaatatacaaatacatccccatctagttccctatttactatgtatctccaggggc

SEQ ID NO: 173738 - DNA, 201 bp, Homo sapiens
tggcccacttctctcagagttaaatttctgctttatgagcaaagtactaggtataggcaatagcctctagtcctctcagcttgctcttccttgtgtgcaawctctacccagtaagtgaggtgaggcaaggataatcagggccctggtgttattggcatgatattcctgaggtagaaccttggctctatgagtgggggctgg

SEQ ID NO: 173739 - DNA, 201 bp, Homo sapiens
agacaaagcagtagtctggataatttaagtgagaatttaattttatggcatgaaatgtacttgtttgcttaagttatacattttacttacacacacacacmgacacacattattggtaatgtctggattcattaaacacagtggaataatttagtaattaatagcatacaacaatttagtatatggtgggtcaggtgcttt

SEQ ID NO: 173740 - DNA, 201 bp, Homo sapiens
tcatgtttatataggcctatttacaattagtctcatgtttggtcaccatattttcaatgtgttcacaacaaactagaccctctgatgttatcttcttctcrgaaagcccactcatcacttttgatttggcatatcattattttattcttgttttccttttttccttgtgttgatgtacttctgatttcttctgagtttatt

SEQ ID NO: 173741 - DNA, 201 bp, Homo sapiens
tcatggcagaaggggaagcaaacacatccttcttcacatgacagcaggaagaagtgcttagcaaagacggaaaagtcacttataaaaccatcacatatcgygagaactcactcactatcatgagaacagcagcatgggggtaactggccccatgattcaattatctcccaccgggtccctcccatgaccacatggggatta

SEQ ID NO: 173742 - DNA, 201 bp, Homo sapiens
tgtttttatttttccgttaaatgcagcaaatgggaattttatatgaaacatttttcttaacccctttcagtaattgtttatatcatttgatgacataattsagcatttaaaaaattttgtttgctgagaagtatacaaaaaatatttcaatacgctattttttcactatctcataattatcaagaaatattaagcacccaa

SEQ ID NO: 173743 - DNA, 201 bp, Homo sapiens
ctatttattttgaagtaaatacatagacaaacaggaagacaaagagggtggcaactcttatgctttgaataaaagaactgaagaccaaaagacagaaagaactgaaaagaggcaatgtgaatgaaaaatgatgtgaatgaggaaaatacaaggaacaaggaaaggatatgtaatcagtgtaggaaatttgtcctcaagaaa

SEQ ID NO: 173744 - DNA, 201 bp, Homo sapiens
atatatatatatatatatatatatatatatacacgcacacacacgttgcaaattacacttaaaaatctaataaagatttattcacacagatacacacattyactaccatagactcaagctatgaatattcataattttgaaaccaatgaaataatatatgggttacaaaaggaaccccaaatgttatatctaggaatgaat

SEQ ID NO: 173745 - DNA, 201 bp, Homo sapiens
attaacagtaagggcaaaatcatgtgaaagtgttgtatttgtgaggtgtcatgaaggccagccagccctccttctgttcagggaatggtcagacgctggaygctttctctttgcattgagaatggtttcctaagactggtcatcctgcttctactctcacttccatataatcctaccagaatgagcttctaaacagagatt

SEQ ID NO: 173746 - DNA, 201 bp, Homo sapiens
tctatttattttgaagtaaatacatagacaaacaggaagacaaagagggtggcaactcttatgctttgaataaaagaactgaagaccaaaagacagaaagaactgaaaagaggcaatgtgaatgaaaaatgatgtgaatgaggaaaatacaaggaacaaggaaaggatatgtaatcagtgtaggaaatttgtcctcaagaa

SEQ ID NO: 173747 - DNA, 201 bp, Homo sapiens
tagttgaggattgggtaggaattaggagaacagagacagggattgaaagcccattccagttatagtaaacaggctggatgaatacatgggggagtttcttygtctagattataaggtatatgcgaaataatagagtaagggtggaaaaacatatcattgctaattcatgaaatgtttttagtgtttaactatgtgaatttt

SEQ ID NO: 173748 - DNA, 201 bp, Homo sapiens
atctatttattttgaagtaaatacatagacaaacaggaagacaaagagggtggcaactcttatgctttgaataaaagaactgaagaccaaaagacagaaagaactgaaaagaggcaatgtgaatgaaaaatgatgtgaatgaggaaaatacaaggaacaaggaaaggatatgtaatcagtgtaggaaatttgtcctcaaga

SEQ ID NO: 173749 - DNA, 201 bp, Homo sapiens
ataagacataccatatatatatctgtcatacatatgtgacagctgctactactactacatgactacataactactacagtctacacagtagtagtcatgaycttttatacatgcgtatatattagtcatggtagtttcctgcatgcacttttgcttgtagcaagtattacaatcttcatagggatgaaacggaaggtttaa

SEQ ID NO: 173750 - DNA, 201 bp, Homo sapiens
tatctatttattttgaagtaaatacatagacaaacaggaagacaaagagggtggcaactcttatgctttgaataaaagaactgaagaccaaaagacagaaagaactgaaaagaggcaatgtgaatgaaaaatgatgtgaatgaggaaaatacaaggaacaaggaaaggatatgtaatcagtgtaggaaatttgtcctcaag

SEQ ID NO: 173751 - DNA, 201 bp, Homo sapiens
agaaggaccaatatgaggaaaagaatggacatctaaaagtacatgtggcatgcggtaggcagtatatataagaggttcagtttgatatgtcaagataaggrgcagcaaggtgatttggagccagattataaagggccaatactaccctatcatcagcccttaacatgcagtaatggtcaggaagctgtgaatcatcccatt

SEQ ID NO: 173752 - DNA, 201 bp, Homo sapiens
aatatataaaaaatgtaaaataatttttaaaatgtagctggcttccattaatatatagccatcacaagagtgaattctgtatatcatgattttatgcaatyatctgttgagaacttcatgtaatactttactttggcttttaaataagtacacacacacacacacacacacacagagaaagagagagagaggcaaagtact

SEQ ID NO: 173753 - DNA, 201 bp, Homo sapiens
tagaaaaagtacctaacccagagtcactactcaatgttaactggtttactataattaatacacacacacacacacacacacacacacacacacacacacamaatacattatatattaaagctataatgtgtaccatggttgctgatacaaattgttccgaattttcagttttctaccaattaattagagctaacctgtgcc

SEQ ID NO: 173754 - DNA, 201 bp, Homo sapiens
atagcaaatagagaaaggatacttcattacaaatccaccatagacttgacataactatgagccaaatattccttaaagatttgtctgggaagttaagtttrtgactacaaggttttaataggaataacacccttgagtgactcctctctcgttttggagaggtaaagatatactcaaataccaatttgggcataaagtgca

SEQ ID NO: 173755 - DNA, 201 bp, Homo sapiens
ctcttattagccatgcaactgtgagtagttatttaacttcttgaagttttttttttcctgtctgtaaagtggggctaataacttctatgctatgatgttcwaaggattagagataagtcatgtgaaattctaaacatagtactcagcatatgcaagtacacagcatgtaatagttcttattgtggtacttagtaaaagtgg

SEQ ID NO: 173756 - DNA, 201 bp, Homo sapiens
gttgtctccctttgttttgagaaaagtgttgagggttacctcttctgtaagtaatttgactgttaataaattagttaacttatctaaacttccacatgttsaattacaaaatagaccataatacctgctctgcctttttacagtattctagtgaggcttagattgaattttttttaaataaatatattaaaatgattcgta

SEQ ID NO: 173757 - DNA, 201 bp, Homo sapiens
caatttgacaagagcctgaaatttcatcagaaaacattaaagattgaaaaaatagcaaatagagaaaggatacttcattacaaatccaccatagacttgamataactatgagccaaatattccttaaagatttgtctgggaagttaagtttatgactacaaggttttaataggaataacacccttgagtgactcctctctc

SEQ ID NO: 173758 - DNA, 201 bp, Homo sapiens
gggattgaaacaattattaatttagttcttgattcaggatgttagcaatttgcttaactgggctatgctgcatggttcttctggcctcacttggtcttatkccatctgtggtcaagttccaggtgggctagggactggctaatctaggtcagcctcagctggatggcttgtctgtgtgtcatgtggtctgtcatccttcag

SEQ ID NO: 173759 - DNA, 201 bp, Homo sapiens
ctgccctatcacacaccaattaccttttcttaccccactgcctcatctgcttctttcacttcagctaagcccattgcccttttcatcctgccctgctttcytcatttgcatgtttttctacaatatctcatgtgtctgaaacagtttctcacttctatcctgccaaatttaccctctatttatgtgaaaaattagcttaaa

SEQ ID NO: 173760 - DNA, 201 bp, Homo sapiens
ctgctgtacagcctgtgtttcagtagactctgagggacacagccttatcacagagcatagagattaacacatgtaattctttgtaaagtgaaagagaatgygttgctgagagtgaaaggaatggttttacagtacagcaagtgctgccatggacaccctggccatagaaccacccacagagtaaacagagcacaggatttc

SEQ ID NO: 173761 - DNA, 201 bp, Homo sapiens
cctgagatttcttaaacacagcatattccttaaatacaccatcctttgcttttgatcttgctgctcactctacctggagtactctacctccttggattttkaaatcaatttccaatacagacatacctcattttattgcaatattgctttttttacaaattgaaggtttgtggcaatcctgcttctaacaagtctattggt

SEQ ID NO: 173762 - DNA, 201 bp, Homo sapiens
gatgaggtagataattttataccctactcgtgatattgcactttgttatacatcatgggggaaaaaattaaaattattccctgtgtgtcctaattgatgtyatttagggatgttccttagcttatgtgtgttaaaccctctatttctggatcccatacatttctcacccttagtatatttacttatttttctgggacttag

SEQ ID NO: 173763 - DNA, 201 bp, Homo sapiens
agcaatggtgagctatttttgagtatcaaattggtaaaatatttaaaggcaatatataattcaaagataatgatgaggtagataattttataccctactcrtgatattgcactttgttatacatcatgggggaaaaaattaaaattattccctgtgtgtcctaattgatgtcatttagggatgttccttagcttatgtgtg

SEQ ID NO: 173764 - DNA, 201 bp, Homo sapiens
aatcaatctagcaaactttattgtcttattttaagaaattgctacagcacccaggaattcgatgccacggtaagctataatcccaccactgccctccagcrtaggtgacggagcaagaccctatctagaaaaaaaaaagaaggaaaaaaaagagtgagaaagaaaatgctacagctttcagtaataaccagcctgatcaat

SEQ ID NO: 173765 - DNA, 201 bp, Homo sapiens
actgtaaatgctaaagataatatttaaagttgaaaatttcacaaacatgtcatgtaataatattttagagcctgggtaattctctatggattacaatacaraacatcacaatttatttttgaaactcattttggaaaccttgttagaaataaagatctggattttttaaaaagattaaataaaactgatttacttatttat

SEQ ID NO: 173766 - DNA, 201 bp, Homo sapiens
gatcaatcagcagctatcaccatcaagacaagacattcctttagcaaaaagattatgattcaccaaaggctcagttgattgtagtgaaaacataacttttrtgcactgggaaaccaaaatatttgtgtgacttgctttattgtgatattagttttagtgctgtcatctggaatcaaacctgcaatatcttcgaggtatacc

SEQ ID NO: 173767 - DNA, 201 bp, Homo sapiens
tagaagtgttatgcatcccatgccaaattttcagcgctctaatgcatggggtctgctgggtctaatggcaatgtagcacaataaaacaaaacacccaaaayctttagtttgctgtggagaatttaaatacaaaataacctagttagaaattttgaccagaattgtgttcttctgaattcagtgatttagtaaagttgaatc

SEQ ID NO: 173768 - DNA, 201 bp, Homo sapiens
ttgtctttaattttttatatatcaaaaaaagaacaaaattagaagacgaatatgaaacagtgttcataagacaacaataatgcaattgcttcagaatcaavgtctatgacttctcactcagagagtatgatgtcataaaatagctgtatcctcaacaaaagctttgtagtcaacacagtaacaccagtgggttttctctta

SEQ ID NO: 173769 - DNA, 201 bp, Homo sapiens
cttttcttactgtacagtactcctgtctgccttctgctcagagggcatatatagaatatccagaataaggcacctgctatatttttaagtgcttttgtaasagatcactataccacactgatgaaaaataaatgttgctccaggttctttcccaaagaaaaaggtggatgttgtaggggaagtagggaaaagatggaaaca

SEQ ID NO: 173770 - DNA, 201 bp, Homo sapiens
aagtaactgtcaacagatggtagtgatgatctgttatgcaacagggaacaaatgataaagatctcttttcatgtgacctttaaaaacattagaaaaatttycttaaaatgcctttctgctttgaaaataattacatgaatatttaattttcctctcaatgaaagacgaaaaaacaaatagaaacagtagaagattttaaaa

SEQ ID NO: 173771 - DNA, 201 bp, Homo sapiens
atgtaacaaacctgcacatgtaccccttgaacctaaaataaatgttggcaagaaaaaagttgaattttattttaaaaattttatactagtaaattagcttstgtctagtcaaataaactagtgtatctagaaaatatatgattttctgcttttgtctattagagtcataaaataatattaatgtatttcctaatattaaac

SEQ ID NO: 173772 - DNA, 201 bp, Homo sapiens
tgggatcaactgattaaactgctatgaatttcatttgaacatcaagcatggttatgcccagtgttatccagggactagagagtccttgagaaccagaaatytttgctagacaacatacatcctgattctcctagccccttgaaagtaaaaaaaaaaaaaaaaaacaaacaaaatggcctcagaggccctccgtcctacccc

SEQ ID NO: 173773 - DNA, 201 bp, Homo sapiens
ctgtgaaacatgagataaatgtaaaaaaaaatgctttgatctcctagtgataaaattttgaatttcttatctttttattaattatctttatttcagatctsttgtaggccaaagttttggaaacataagatcatttctgatagaacagaattcatttttaccccttgccactatttataaagctcattacatatatcattc

SEQ ID NO: 173774 - DNA, 201 bp, Homo sapiens
gactgaaagaaacaacataactacttcagcatagagaagcagctttgaatatatgacaaaacacaatatgttcttatagtagaagactcatagtaaatacrgcgtttatttcaaattgagttatattaaattgagttataataaaagactcataatatggcatttagttcaaattagaaatgaatatggcagttatttcaa

SEQ ID NO: 173775 - DNA, 201 bp, Homo sapiens
acgaagtataaaacactcattcttaaataatatatgggactgaaagaaacaacataactacttcagcatagagaagcagctttgaatatatgacaaaacayaatatgttcttatagtagaagactcatagtaaatacagcgtttatttcaaattgagttatattaaattgagttataataaaagactcataatatggcatt

SEQ ID NO: 173776 - DNA, 201 bp, Homo sapiens
aatgtggtggtacatccatacaatgagatattattcagcaataaaatagactgacaccataatagcacagaatattttgacatgtataaaaacatgctaartgaagataaaaagacacaaaatactaatatttgttattataaaattccatttttatgaaatgattggatgtgacaaaattatgaggacaacgaatcagta

SEQ ID NO: 173777 - DNA, 201 bp, Homo sapiens
cataatggacattactgcagcaagtaatctgcattcctcagcattaccttttctagttgtgttgtcaccgttgtttgattttcataggaatctattcccgwtaagattagttgcaggcagacactgggctgtacctcatcaaaattttcaaataggccaaatttgcctctagcttgcttttatcaaaactcttctcagcac

SEQ ID NO: 173778 - DNA, 201 bp, Homo sapiens
gcataatggacattactgcagcaagtaatctgcattcctcagcattaccttttctagttgtgttgtcaccgttgtttgattttcataggaatctattccckataagattagttgcaggcagacactgggctgtacctcatcaaaattttcaaataggccaaatttgcctctagcttgcttttatcaaaactcttctcagca

SEQ ID NO: 173779 - DNA, 201 bp, Homo sapiens
agataactcagtgaattttatttaaaatcctcagcgttctgaaatctccttgtatattattttctttcatgtgactgttggtgttctacttgtttcattayacttttatagaatccttaacacagatgagatataaaacactatgaaatctatcacagttgaaactctagaccttccctcaacccatggggattcatttgg

SEQ ID NO: 173780 - DNA, 201 bp, Homo sapiens
gatgggcttcaggagctgtattggcccactgaaattgtatatagcatagcatattgtgtacttgtgcatatgtacttttgtgaaaatgtaattttttaagkaaaaggatcatggttttcattatactctcataggagtcttatgaccaaaaagtttaaaaaaatccataaagactttcttttactttattattcataaaaa

SEQ ID NO: 173781 - DNA, 201 bp, Homo sapiens
agttcctatagtccctgttgttctagcattggccctgttcatttgatgtgattgaaaagtttatgttaacttcagtagtaatactcaagttcttttatttwtttatttatttttttttttgagacggagtctcgctctgtcgcccaggccggactgcggactgcagtggcgcaatctcggctcactgcaagctccgcctcc

SEQ ID NO: 173782 - DNA, 201 bp, Homo sapiens; identical to SEQ ID NO: 31074

SEQ ID NO: 173783 - DNA, 201 bp, Homo sapiens
aataataatgcaaatttttattctacatataatatattttttatttattccttgaacttctagaatgggtcagactctgtttaagcccttcagatacagtrgtgaatgaaatacaggaaaatttcttgtctcctagagattgcattctattttaataaaattaataataaaaacaaacaaaaaataagcataatgttgagt

SEQ ID NO: 173784 - DNA, 201 bp, Homo sapiens; identical to SEQ ID NO: 31075

SEQ ID NO: 173785 - DNA, 201 bp, Homo sapiens
gtaaatgccgttatgagaagctgacccagtaacattttcagtatcaggggcgactgagaacctatgctcagatgggcagctctcaagttataggtttgacyagggtggattatatatgccttatttcttcttccagattcactaatttggattctattttagtgttttggagagaggcgagaaaggtacaatgcgacaccc

SEQ ID NO: 173786 - DNA, 201 bp, Homo sapiens
taactttgttcatttaaaataatatgcaaatgttttgcataatcttgtattatactacacattatttaagtgacttcagtatcacaataatatggtaattyggttatctaatgctctagagctaatcattaaatttttatacagggctttttttgtttgttttgttttttgctatcataaccaatgcctcaattggtgtaa

SEQ ID NO: 173787 - DNA, 201 bp, Homo sapiens
ggaatgtgtacattaagagagatttgcacaaagtaaaaaaaaaaaagttcaccttatcagatttacctaaaacagatcttttctcaaattcactattattrcaaatggtaccattagtactccccatagccaaagttcaaaattttaccccagttcaaatttctaattataatatttattaaatgtaccaatgttatctta

SEQ ID NO: 173788 - DNA, 201 bp, Homo sapiens
atctgacctcatcataagcaatactttccacttacttatttgaataagagtattaaataaagggcaacagaagtgacatatatatatatatatatatatawggtaattagacaatgataatttatgttccaaaattataaattgttagaaacttatcatagtgtataaaagtctaaatgaaaatgtccttccctatatatt

SEQ ID NO: 173789 - DNA, 201 bp, Homo sapiens
acagaaaggatcatggtcagcctgggtcctcaggtgggttctcgtggacttctaggccacagtaggagacagttctctccaagtattttagctcactgatrgagagcatcaaaagactgttttcaaactcagttggctcctggagcaagagctgctaatatcctgtatctccagcttattttggctccatggaagaggaga

SEQ ID NO: 173790 - DNA, 201 bp, Homo sapiens
tatcaccatatgaaattgccatgctcttggacatctatttctgttttagccacttgaagtaagctctgtaagtagagagatattgtctttcttgctcactrcagcatgcccagtgccaagaacaatgtctggcagatagaaaggacgcaatacatacttgttagatgaatgaataattatagtattctaatttgaaccaca

SEQ ID NO: 173791 - DNA, 201 bp, Homo sapiens
ctactaaaaaaaagcgtagtaatacattatctttctacctctcaggactattgtcagaattaaaatgaaataatgtaaaagacttggaaacaaaactagarcatattcttgtttgtgacactctattaccttgctgcttcttttaactattcctttccaagcctatcactgactgcttttcttcctctagctttttacttt

SEQ ID NO: 173792 - DNA, 201 bp, Homo sapiens
gtcccacagtaagctaattttatgtttttctcttttatactttttagtacaaatatggtttgcatctctttgtaattgttttcccgtagtaagtaagatatgtttaaatgtgatctcaaaaaatgtttagaattttatttatctgtgtagagacagggtcttgttcttgggctcaagtgatcctcccatctcagcttctgg

SEQ ID NO: 173793 - DNA, 201 bp, Homo sapiens
tcccatcaaaacactgaaatccaccacgtcaggatttgaaccaaggtctatttgatacaaatccctgcaatttccactatatcatgcttttacataatgtrtcctctctggaccatattactttatgtctaaaatgaaggcagtttgactgcactcatgtcttcagagacttagagttcagcctgagcatttacactgagg

SEQ ID NO: 173794 - DNA, 201 bp, Homo sapiens
tgtcccacagtaagctaattttatgtttttctcttttatactttttagtacaaatatggtttgcatctctttgtaattgttttcccgtagtaagtaagatatgtttaaatgtgatctcaaaaaatgtttagaattttatttatctgtgtagagacagggtcttgttcttgggctcaagtgatcctcccatctcagcttctg

SEQ ID NO: 173795 - DNA, 201 bp, Homo sapiens
caagtcatatcacacagtgtgcacagtgtagataaggaagatgaacaataaagaaataaacaaatagacaaaattttagatactggtgaatataaaatagrgagaagtaagagttgttgactggtcagggaatttaggttggatagtctccaaagaggtatcttttgtcatacttgggtagtatattattgtggcttttct

SEQ ID NO: 173796 - DNA, 201 bp, Homo sapiens
gtgtctctatctccttcagttccgctcttggagttatatggcacttactctcaaatcgatcacataattggaagtaaaacactcctcagcaaatgcaaaayaactgaaataataactaacagtctcttaggccacagcacaatcaaattagaactcaagattaagaaactcactcagaaccacgcaattggaaattgaaca

SEQ ID NO: 173797 - DNA, 201 bp, Homo sapiens
  misc_feature (1)...(201): n = A,T,C or G
tcgaagagcttttgaagctggatggggttttgccctcaccaaaactttctctcttgataaggtaagaaaatattattgaagtcatatagaaatgtctatcntatattttaattaaggtataaacattataatggattttttttactaagaaatactacttattaaactatttgacaagacctatcattacacattaatctt

SEQ ID NO: 173798 - DNA, 201 bp, Homo sapiens
ataagaattttattcttgacttggaataattttcaatctcattatcctaaattacattttgatccttggatatttaaaaagaaagggatgatttactcacwtatgtgtggaacctttcttttatgatgctgagaaaagtgtgacaataaataaaaaatgaacaaatgaaaactgaatttaccattccttcattagactaac

SEQ ID NO: 173799 - DNA, 201 bp, Homo sapiens
actatcaataagctttgtcatgattaatgttaaccttgatttcatgactaacatagtgtatgtcaggtttctccactaaaaaattactcttttatgactcyttgcatatcatgttctttggaagaaagccactatgagcaggccacacctaatgagtggggaattatgctccacttccttgagaatagagtatctacataa

SEQ ID NO: 173800 - DNA, 201 bp, Homo sapiens
ccatgcacctctgtcacaggaaatcattttgttgcttcagagctttctttggtgatcacattgaatagcaaaagggttaacaggtattgaagaacatgctmacacacacacacacacacacacacacacacacaagacaagcaactactgtgacagagattgcaaatcatgttcagggagaagcattaatgcctttagaaa

SEQ ID NO: 173801 - DNA, 201 bp, Homo sapiens
cctcagctcaaagatagggacacaattgatttggtttgcacaaaattctggaattcaatttatgttgaaaagaatctcagtgtaacttattggtattggtrataagatagattctttataaatttggaatacagaaacctttctcaaaaacaaataccctgagtttcatttaacattatgactttgtacttaaccagaagt

SEQ ID NO: 173802 - DNA, 201 bp, Homo sapiens
ttagggtttttgtagtttagaaaacatgttgtatcatgcatttcatttattctttacttctgattcaggtgttgccctattttgcatgtgaggaaatcaaagatcaaaaagatcaatggtttactcaaagttataagagtactaggaattaaaaattatatttatgatttttgaattactattttacaggaataagcatat

SEQ ID NO: 173803 - DNA, 201 bp, Homo sapiens
tgtgtatatcaaaagtaggaaggaggcaagatctgatattttccctgggttctatttttaggcatactatatttgactttagctttacttttcaacattayatttgtattgataatttaatgtaaagaaattgggcaggtgtctgtaagttccaattactctcaataaacacatgatcaaaaatgcttggtcagtaataag

SEQ ID NO: 173804 - DNA, 201 bp, Homo sapiens
cacataattctgtcttgggattttgtataaatttatacatatgttcaactttttgcaaatgcaagatattccaacgtgtattttcatagttacacattttytacatactggttttaatttaaatatgtaatatatggatgctttgccacattatattaaattgaaaatagtttataattaaagtaatgaaattttaaaata

SEQ ID NO: 173805 - DNA, 201 bp, Homo sapiens
aaatgccatttctaagaccatgcctgtcagcccctttatttaggcaaaaaattatggaaagcaatataaatttgcactgtcttctagctcctaaatgtctyaactgaacctccttcctttcagaaaattttgggtgccattgtcattagtatctgtctgtatgatcttaattacaatattatatttattgtgtatatcaaa

SEQ ID NO: 173806 - DNA, 201 bp, Homo sapiens
ttaaaataggtgaatcatgtgtaagtgaattatatctcaataaagctattgtaaaaaagtaatactttacctatgaagaaaaaaataaagtcacttaaatrtgagacggggagaagtaaaacctaacaatgcacaaagaatgttgggtaacatgcacatcatcggtgagacttgacaagagcatttgcagtagtggtagga

SEQ ID NO: 173807 - DNA, 201 bp, Homo sapiens
aactttctgaggctcaatttctttatctactaaaaaaaagcgtagtaatacattatctttctacctctcaggactattgtcagaattaaaatgaaataatrtaaaagacttggaaacaaaactagagcatattcttgtttgtgacactctattaccttgctgcttcttttaactattcctttccaagcctatcactgactg

SEQ ID NO: 173808 - DNA, 201 bp, Homo sapiens
aggaatttatagaattattattaaataaatcaaccaaatactttattgaacttaaaagtattgaaattgcttttggccagttttatatttatcattttctrttgctgtaatttagttatttttatatcagtttctactgtatcttcactccacgtaacatgtttatatcaataagaatgtagatgtcctcatgcatatctt

SEQ ID NO: 173809 - DNA, 201 bp, Homo sapiens
atcttggaaatttgcaggttcttaattgtgtaccagtttcctataataaatctcatacacacacacacacacacacacacacacacacacacacacaccccacatacatcctattctttctgtgtctctggagaacttttgactccttgactaatgcagtgaacattcttttcttgatattggaggaaggcattcagtttt

SEQ ID NO: 173810 - DNA, 201 bp, Homo sapiens
gatcttggaaatttgcaggttcttaattgtgtaccagtttcctataataaatctcatacacacacacacacacacacacacacacacacacacacacaccccacatacatcctattctttctgtgtctctggagaacttttgactccttgactaatgcagtgaacattcttttcttgatattggaggaaggcattcagttt

SEQ ID NO: 173811 - DNA, 201 bp, Homo sapiens
tcattttatgtgcaatcttgaagctaatttggggcccatgaaacaatcaatattcttgtggaaagatacttaagtgtttaattggattatgttttttttttctgtgcttccttaccccaagtatccttaaaagtggtctaccaattgcagatcacatttttttgcatgatactgtttttatattacaaggacacttctaat

SEQ ID NO: 173812 - DNA, 201 bp, Homo sapiens
agtttattgggtttggagagaggaaaggaagaagaaattctttgacttatttgattggaaaaaaaccctaatctcagtaacaattataaactccatccttractgcgtgacccattatttttcccagtttaatttctttttttcttgttttagtttgaaattttgacctttttttctgacttcattcccaaataatgaggg

SEQ ID NO: 173813 - DNA, 201 bp, Homo sapiens
gctagttaacatccccatcacctcaaatcttaacttttttgtggtaagaacatatgaacttaatatcttaggaattttgaaatgtacagtattctgttatyaactatattcactgtgctgtgcagtataactcaaaaaaaagaaaaaagcacacacttatggtctgagattttaccctttgaccatcatcaccccattccc

SEQ ID NO: 173814 - DNA, 201 bp, Homo sapiens
aaaaatcagtgttctaaattaattggtgtacatatgctatgtagattatatcttaataaagccctacacacacacacacacacacacacacacacacacamaaatgcacacacacacacccccacctctatctctgttatattcctagagggtacacaagccataatcctgcagagttgctgagttgagtatgccatgtga

SEQ ID NO: 173815 - DNA, 201 bp, Homo sapiens
cactcgtattcccttcattaagagcaatctaaacttttctagcatagtgtattaccctttgtcactttgtattacttttggtccttcaaggtccaaaaatragaaaaagttagccataacaactcacacgggtgtcatttattctttctgtccacagaaatgctgttttaaattatccagtcaaaaacctattgaatgcag

SEQ ID NO: 173816 - DNA, 201 bp, Homo sapiens
ttcaggaaggaaaaaagaatgatatataaagtgcttatattatcttaaaaatcccattcttcttactattaaatactatgtacatcaccaaaaattgagtraaatgttgaatcatgtttaactagcaattctgttgattatttgcctatccaaaaaggttagcttaactatttaaatttgtgttccataattgacaatcct

SEQ ID NO: 173817 - DNA, 201 bp, Homo sapiens
cattgcctctccgtagttgaagatcttgaaacctgctagaagcaaatgtctgattacataagaagaaatcagattcttaatttatgggatttaagatttayatttatgagtcttttatggatcaggattcatctatgttagtaaagaaaaatatttttatttaacttgtaaactgtagccaatttttgcatatcaacatcc

SEQ ID NO: 173818 - DNA, 201 bp, Homo sapiens
actagaagcatagcatcaccttaggcatttgttagacatgcaaatcctcagtccccacttaaccctccaaagttagaaactctgaaaatgggcctgcgcastctggtttaattagccttccaggtgattgtgatgcatggcactagctctggataggttgttgaaagatgggcccatggcttgattacagcattgagttaa

SEQ ID NO: 173819 - DNA, 201 bp, Homo sapiens
ggctgaggtgggaggagcgattcagtctgggaggtcgatgctgcagtgagccaagattgcgcccatgcactccagcctgggcaaaagagtgagaccctataaaaaaaaaaagttatttatagatttataaatctcagtatttaagttaatatgtgctctttttggtatttggaaatttatgttgacagacttttgtattgc

SEQ ID NO: 173820 - DNA, 201 bp, Homo sapiens
tggaaaatctagctatcgagctaaatagcagaagtggtgtgatttatgtctgctgcttaatagtctagttctacatgtactagtgagtgaagaaaatctcyaaagtttcaaaagcaaaaatgcagatgaatctctgtggggtccagtgctcatgccatccccagtgcactgtcggataattggtaagaatgccagatattt

SEQ ID NO: 173821 - DNA, 201 bp, Homo sapiens
aacatcctgtgagaatgtagccttcaaatacatttttaatcagttttgttctctgttgtatccctagaacagtggttaccttattgttggtggttggccartgaaatgcctgccatatgtaggcacttaataaatacaattgaaacaatgggtaggttttggaaatgttttagattatgaggacaccgagtttaggaaatg

SEQ ID NO: 173822 - DNA, 201 bp, Homo sapiens
tggctatattttaaaagaattgttgaaattaggaaaggtatttagctccagatttaacaaagtttcagtaaattcatatatagtatgaatcaaattcataytatatatgaatattacatgtgcttagagtctactacatgtacaaggaaatgatcctaaccatttgatattccagttgtgatagtcattcttggtgcttag

SEQ ID NO: 173823 - DNA, 201 bp, Homo sapiens
gggcaattttttttgaatgaaaaaagaaaaagaaacagagaaacaatgttacatgaaaagatcccatagtcacttaattacagacatggattttgaattcmgtttttcttgttccagttttgggagctttgttttctatcatgatgcttctagtagaggtctctaaaaggaaaccagtgtgattcagattgttcaaggaat

SEQ ID NO: 173824 - DNA, 201 bp, Homo sapiens
agggaaatagacctgggaatatacaccataggtaaagaaaaacattataaggcagaaaggaatggctgcccctaagtgacagacaagtcatggatcaattwtgggtgcaaggtaggcaactttaggtcaattcaggcaggcatagaggctcagagggatccaatccagaaagaagtgaacaatggataaagtctagaaatg

SEQ ID NO: 173825 - DNA, 201 bp, Homo sapiens
ggtgacagatggcacctggaaaatcaggtcactcccaccctaatactgagagtttccgacaggcttaaaaaatggcgcaccaggagattatatcctgcacmtggctcggagggtcctacacccacagattctcactgatggctagcacagcagtctgagatcaaactgcaaggcggcagcgaggctgggggaggggtgctc

SEQ ID NO: 173826 - DNA, 201 bp, Homo sapiens
taaataaccctgggaggtggataccattgggcccattctgcagacttagagactcaagtctagatacttaagaaacttgccagagtttacataaccaggayatgtcatagtctgggttcatactcagatctttctccaaaatgaacttttaggcatttttattaatatcagagattaacatctgtcatatctgtctaaata

SEQ ID NO: 173827 - DNA, 201 bp, Homo sapiens
cacaatagtgacacaataaaattagtaaggactcagttaagggacgactatatttatccaatgtgtagtacaactctcatttggttaaatgtttctttatrttcaagattcttcaactttaaaaaacttaaaatgaaaacattctatatgtgaatgaagcctgtaataccataccaggtactaaaagaaggaatgtcaatt

SEQ ID NO: 173828 - DNA, 201 bp, Homo sapiens
gattgatgaattcaacttggtatctgactcaacatatagtgcagcccttgattcaaggtggcagaccagtgaggcatgttgaattagccaatatattaaargcattgaaaacttcataggaagactttaagttaatatgaaattttcaaaatatataattttacgtatgtacatacaactcaaaattatttctgatagctt

SEQ ID NO: 173829 - DNA, 201 bp, Homo sapiens
ttctacatatggctagccagttttcccagaaccatttattaaatagggaatcctttccctatttcttgtttttgtcaggtttctcaaagatcagatagttktagatatgcggtgttatttctgagggctctgttctgttccattgatctatatctctgttttggtaccagtaccatgctgttttggttactgtagccttgt

SEQ ID NO: 173830 - DNA, 201 bp, Homo sapiens
atgcaaagttttcaggattgattctcttaccaggggtaataccatgtaaggactgggaacttttggcattcatagaagtttcagtgttaatcctttatggycattgcttggttttgtatacatcaaaagaggagccaaaatattgcagtgctaacactcatgaaactggaaagtcaggagagtacaggtccaatatcatta

SEQ ID NO: 173831 - DNA, 201 bp, Homo sapiens
aaatgcctttctttttgtaatctcatatggaaaaccaaatgaaattttcacttttaaatttaatactcgagttttttatgtgtttttttctttattttgtrgagatttttttattatatcgtggttaatattataaatataattttatttcccatttattttattgccaaaatatgacaaatatttattgtatcttaaaat

SEQ ID NO: 173832 - DNA, 201 bp, Homo sapiens
gtggtcttcccctggagttgggcagctcagtggctgggctcttctccaaccaccctcagccaaattccatgtaatccgcttcgttctgccatctatggccrtgtcgttctgccatcgatggcaaacacagtgtctgtcagtgtgtttttctgctggtgtgttccactcaatgtccagctgcctgtgtctgtgtgcctcctc

SEQ ID NO: 173833 - DNA, 201 bp, Homo sapiens
attatctggacttttctccatccaatctaccctttttagacttttttataaaatccaaggtagtttttatgatcataggtttcttttttttttttcctggratacagtcttaggcaataattagtgtaatcatggtttttttttacacatagaaagaaacattttgatctttgtattcctgtgcatagcacaggacctggc

SEQ ID NO: 173834 - DNA, 201 bp, Homo sapiens
tgttactgtactgctaccacagtcacaatcacaaggcccattccttgaatgatcagttagtgaatgttaaagggttataaacttaattcacatttaccctraatgaaaaagggattttagtccattgtccacaaaatcaaatgcattttaagtcaaacagaaatggtttcggaattactgatactgtgacttctattcatt

SEQ ID NO: 173835 - DNA, 201 bp, Homo sapiens
ataatttcaggggaggaaatagaaaagaaagcaagataaatgtattacatttttgtatttcctccttgcatttttttaaagataagactctgttgtaaaawataaactggcaatttgatcattacttgttattcatttgaactagttcagtcaacagataatggacagtgaacagagagacctcttttggtaagccatgta

SEQ ID NO: 173836 - DNA, 201 bp, Homo sapiens
ggactgaatgttttaaagtgtccatagttttcattgttgttaaagttgtttttatggtgttttatataataattgtgttaaatatcaaggaagaaaaaatrtcaagaaaggtatgcatatgaaaataatagattttttaagctttaagtacatcaagatcagttcatctgttaacattttccatatgccagtcagtatgct

SEQ ID NO: 173837 - DNA, 201 bp, Homo sapiens
ccagtttaatttctttttttcttgttttagtttgaaattttgacctttttttctgacttcattcccaaataatgagggcatcttaagatagcccccaaatyagtgattactatcacctatataaatggtgttatccagctgtggtgtgacattttcacatgaaatcctccctgtgggtaagattctttcagagctggttaa

SEQ ID NO: 173838 - DNA, 201 bp, Homo sapiens
cagctaatagaaggatttggtttctttaatcatgttttttcatgcaagttgtgtgcactctgaaacattagtatttcacaatttggaacataatttcttayggagatttattttatttgttatattcatcatgtcagtagtgtgaatgtgataatcctttctcaacacaagcagtaaatcagtgggatagaaagcaacagc

SEQ ID NO: 173839 - DNA, 201 bp, Homo sapiens
atttttctgggatgtgagggtttgaatgggttttaactatcgtgtcttataagagctgcatgaaaatgttgatgtgtcttgcataggtggtgccaatggcrttacagccaccaacactgtctcaggtctgatgggattaaaatctgatggcacaccttggccagcagtggggattgcaaagcgaactacatatggaggagt

SEQ ID NO: 173840 - DNA, 201 bp, Homo sapiens
atatctgccccactctccatctagccttgtctccttcctctccctcctaatccatctttactctaggccctacgacacacctaacattccagccagatctktatccttttgctcatgcagttatctgtgattccctccattccttctctgcattcaaaatgctagttatcctttaagacatagttcatatttcatcttcaa

SEQ ID NO: 173841 - DNA, 201 bp, Homo sapiens
ttttctaattattattataaccaaataatatattaactcttccttccctcccttcctccctccctccctccctctctctctctctctctctctctctctctctttctttctttctttctttttttttttttttttttgacagggtcttactctgttgcccagattggagttcagtggcggagccttgactcactgcaatct

SEQ ID NO: 173842 - DNA, 201 bp, Homo sapiens
gtatttatgtttacagtcttttttcaattttagtctttattttccctgtactttcttcaaatctaagctattgcagcttgtaagtctttgtgtgtgtgtgkatgtgtgtgtgtgtgtttgcaaaattatagagacaataagggcaaatacttgaatataacttcttaaactgttattggaaaaatagattctaaattttag

SEQ ID NO: 173843 - DNA, 201 bp, Homo sapiens
tgaaagatgagtagaagcagtgagctggcaaagctggcctctgcctctggttgttaagctgttggcagctcaggatgcatgacctttcaaatatacgcttytaattcaggacttcttatgatgtcatgtagttatgttcttcccttttagtgtattctctcttcaaaattctgtgctgaaaaaggaaaaaaaagaaatgta

SEQ ID NO: 173844 - DNA, 201 bp, Homo sapiens
gtatgctattttatttatgataaattaatatcaaaatcaagctcagcagcacattgttcagctctcacacccaaccttgcctaagacccaaatgtaaaatkaaaaaaaaaaaggccgggtataacagtttgccagaatcatctgtttgttcattcttccaataaagtatcatcgtaaggaattttcactgtaatatatatg

SEQ ID NO: 173845 - DNA, 201 bp, Homo sapiens
tttatgagccggaagttacacaaatcaattcttctttcatctcattgtctgttacctgatcatataagcatggcaacagcagagggtgctgggaagtattrccttttgctgggtggacataatccccatcaaacgtctagaatcatagggaaaggggatgacagatattgagagaggatagaaatgaaagtctctgttaca

SEQ ID NO: 173846 - DNA, 201 bp, Homo sapiens
ttttttctttcaggtctgacagtttacattttatgcttctcctgaaccctcattcattttgtttatttctgtattttggaagcttctagcctctcttttttagcctcccacaaacctcttgaattcagtatgtgtccagtggggaaacagatgtgtttgttctcttaattttccaattataacacccctccgcctgtgccg

SEQ ID NO: 173847 - DNA, 201 bp, Homo sapiens
agaatttgaacccagactcattcctcttgcagaactcattacctctcagaaaattttaggggtgtgtgtgtgtgtgtgtgtgtgtgtgtgtgtgtgtgtgkctgtgtgtttcctatctaggccatgggataaaagtactttgtcagtacactttatgcacatattagagaaagcttcattaaaggaatacaggaataaaat

SEQ ID NO: 173848 - DNA, 201 bp, Homo sapiens
tcctttccttttccttttccctttcccttttcctttcctttctctctttgtctttctttctttctctcctttctttctttctttctttcctctctctttcytttttttttttttttttgagacagggtctcactctgtcgcgtaggctgtagtgcagtggcacgatctcagctcactgcatcctccccatcccagattcaa

SEQ ID NO: 173849 - DNA, 201 bp, Homo sapiens
ccttcctcctttccttttccttttccctttcccttttcctttcctttctctctttgtctttctttctttctctcctttctttctttctttctttcctctctctttcttttttttttttttttttgagacagggtctcactctgtcgcgtaggctgtagtgcagtggcacgatctcagctcactgcatcctccccatcccag

SEQ ID NO: 173850 - DNA, 201 bp, Homo sapiens
ttgtactgttttatacattaaatacaaagagaaattcagcatgtatcagattttcaaaatgatataataatactcagtaatccacttggttctggacttaytgttatgtgctggtgtacaaaaagaatcttgtgtaatggaaaaaaatactatttaaatggtgtctccattcataacatttttaaaaatgttcttgttatt

SEQ ID NO: 173851 - DNA, 201 bp, Homo sapiens
tccttcctcctttccttttccttttccctttcccttttcctttcctttctctctttgtctttctttctttctctcctttctttctttctttctttcctctctctttcttttttttttttttttttgagacagggtctcactctgtcgcgtaggctgtagtgcagtggcacgatctcagctcactgcatcctccccatccca

SEQ ID NO: 173852 - DNA, 201 bp, Homo sapiens
taatacattcattgctttgttataaagaatatgttcacatcctttctcacctgtagatattctaaattgaagtctgatataagttctaacatgaagttagrtgaagtaattacattggcacgatagaatttgtgtgttttctacatgaagtatagaagccaattgaaatactataacttcataaaaattatttgattattt

SEQ ID NO: 173853 - DNA, 201 bp, Homo sapiens
ttccttcctcctttccttttccttttccctttcccttttcctttcctttctctctttgtctttctttctttctctcctttctttctttctttctttcctctctctttcttttttttttttttttttgagacagggtctcactctgtcgcgtaggctgtagtgcagtggcacgatctcagctcactgcatcctccccatccc

SEQ ID NO: 173854 - DNA, 201 bp, Homo sapiens
ctgttgcaaatttgttttctttgtaagcctggaagatttattttgtaatataactgttcctttttagtattttattattaatgatttctttactttgggayatagtgtacttacacagtcctaaacagtaatttcctaacactatctaagaactccaatcattaagaaaaaaaatctttgcctgaggcgtattgtttgaga

SEQ ID NO: 173855 - DNA, 201 bp, Homo sapiens
ggtttcaatatttttatgctactatttagcattttagggtagtaataaaaatgtgatggataacattcattctagattattcaaaactctataataatcartaagaaaatttcaaaattagatataaactcttaatgaaaaaacatccatgtagtgttgtcctggccttgattatctcagtatttcagagaagcacatgct

SEQ ID NO: 173856 - DNA, 201 bp, Homo sapiens
atctagccttgtctccttcctctccctcctaatccatctttactctaggccctacgacacacctaacattccagccagatctttatccttttgctcatgcmgttatctgtgattccctccattccttctctgcattcaaaatgctagttatcctttaagacatagttcatatttcatcttcaagtaaagatgacccaacta

SEQ ID NO: 173857 - DNA, 201 bp, Homo sapiens
tacagaaaatcaatgataagcttaaagtttacaaatagtagtgaaggaaattactgtcagactatctctccatttcaggtgatttctagaccacagttcakaaaccagatttaggatgaatgacctctgtctaaacagggagcatgatcaagtacaacactgaaatacaaacgtgtgttaatttccaccagatagaataat

SEQ ID NO: 173858 - DNA, 201 bp, Homo sapiens
aagatatacttgtaccatatatatacacatatacatacacaaatatatatatacgtatacatatatacacacacatatacatatgcacactatatagagayatggtatatgtatatttacataactcacgtgctctctctctcttctctctctctctatatatatatatatatacgtatgtatatgtacttttactttagt

SEQ ID NO: 173859 - DNA, 201 bp, Homo sapiens
aaaattgaaattctttaaagaactataccaacttgttatggatgagttctccttagtcggaaccattcattgccaagggattgcagtttttctctgatagkttatttaaaattgcctcaatagtaattctttcttgcttggatttcataacattcccaggacagaagcgtgacttccctagactctcttcatcctaaatgt

SEQ ID NO: 173860 - DNA, 201 bp, Homo sapiens
atgattttaactaagagtcaaacctccttgaacatggaccttgaattcaaacaagattctcatgttaatagttaaaaacaaaagcaaaaatcttgacagcwtgctaatttgacattgctacattcttttgttttgttttatgaagcaaaatgtttcttattgttgatgaaacatagtctgtgcttcacatattaggcacac

SEQ ID NO: 173861 - DNA, 201 bp, Homo sapiens
cttccttcctcctttccttttccttttccctttcccttttcctttcctttctctctttgtctttctttctttctctcctttctttctttctttctttcctctctctttcttttttttttttttttttgagacagggtctcactctgtcgcgtaggctgtagtgcagtggcacgatctcagctcactgcatcctccccatcc

SEQ ID NO: 173862 - DNA, 201 bp, Homo sapiens
ccttccttcctcctttccttttccttttccctttcccttttcctttcctttctctctttgtctttctttctttctctcctttctttctttctttctttcctctctctttcttttttttttttttttttgagacagggtctcactctgtcgcgtaggctgtagtgcagtggcacgatctcagctcactgcatcctccccatc

SEQ ID NO: 173863 - DNA, 201 bp, Homo sapiens
tcctaacatactatatagtgactggttttcgctgcatgccatgatttatatgtattatataggctattgtctctttcttaattatttagaaataaccatgyctataatatagtagcattactgttttatttcttaagaggcatctctatggtgtataaggtttaggcaattctattatgaataacctaggctcagattata

SEQ ID NO: 173864 - DNA, 201 bp, Homo sapiens
ccttccttccttcctcctttccttttccttttccctttcccttttcctttcctttctctctttgtctttctttctttctctcctttctttctttctttctytcctctctctttcttttttttttttttttttgagacagggtctcactctgtcgcgtaggctgtagtgcagtggcacgatctcagctcactgcatcctccc

SEQ ID NO: 173865 - DNA, 201 bp, Homo sapiens
ttagaaataaccatgtctataatatagtagcattactgttttatttcttaagaggcatctctatggtgtataaggtttaggcaattctattatgaataacmtaggctcagattatacattgtggacaaatcgaattatgcatgtgctatctgagaggagatctgtatgtgagcaagacatagaagccctgtatactctact

SEQ ID NO: 173866 - DNA, 201 bp, Homo sapiens
gtgatatctggatctggacttcttttcttttctcttctcttctcttttctcttctcttctcttttctttcttctcttttctttctttctttctccctctttctctctctctccttccttccttcctcctttccttttccttttccctttcccttttcctttcctttctctctttgtctttctttctttctctcctttcttt

SEQ ID NO: 173867 - DNA, 201 bp, Homo sapiens
aaggtgatatctggatctggacttcttttcttttctcttctcttctcttttctcttctcttctcttttctttcttctcttttctttctttctttctccctctttctctctctctccttccttccttcctcctttccttttccttttccctttcccttttcctttcctttctctctttgtctttctttctttctctcctttc

SEQ ID NO: 173868 - DNA, 201 bp, Homo sapiens
actcagtatgccccagatttctagatgtcgcatttaaggactttttgtgagtgaaaccacccaatagtttatgtaaaacagatgataaatatgaggatgcrgaagagtaaaaaatttattaaagattttagtgacatgtccactctttttttctcatcattttcagagagttatgattgatttttatgagcacactgaaca

SEQ ID NO: 173869 - DNA, 201 bp, Homo sapiens
caaaggtgatatctggatctggacttcttttcttttctcttctcttctcttttctcttctcttctcttttctttcttctcttttctttctttctttctccctctttctctctctctccttccttccttcctcctttccttttccttttccctttcccttttcctttcctttctctctttgtctttctttctttctctcctt

SEQ ID NO: 173870 - DNA, 201 bp, Homo sapiens
agaaaatgaagaatcgcattttggacatcttgaatttgttgtgttactagcccaaccagtggaagatgttcagtaagcagttggacaactggatatatggrtttatgaatttttatttttgtaaacaagaattgtgtcttactcatggttagagaccttagcagtgttatgcaagtttccaaatgtgtgctaactttaatc

SEQ ID NO: 173871 - DNA, 201 bp, Homo sapiens
caagggaagggaatgaaggtcccaagtctctgttaatgtgcctcctctgtagctttgtttcttccccaaagctgccccacgtcctgcacatacctcatggrttgctgttgcagctctctatatatcttcatgggataaatatcacggacatacagggatgggagggtttattggcaccatctttgaagtaaagctgccact

SEQ ID NO: 173872 - DNA, 201 bp, Homo sapiens
ccaaaggtgatatctggatctggacttcttttcttttctcttctcttctcttttctcttctcttctcttttctttcttctcttttctttctttctttctccctctttctctctctctccttccttccttcctcctttccttttccttttccctttcccttttcctttcctttctctctttgtctttctttctttctctcct

SEQ ID NO: 173873 - DNA, 201 bp, Homo sapiens
gttcaaaactggtgcagcatcacttctgccatcattttataggtcattggaactcacaaagtagtccagattcaagggaagggaatgaaggtcccaagtcyctgttaatgtgcctcctctgtagctttgtttcttccccaaagctgccccacgtcctgcacatacctcatggattgctgttgcagctctctatatatcttc

SEQ ID NO: 173874 - DNA, 201 bp, Homo sapiens
atatccaaaggtgatatctggatctggacttcttttcttttctcttctcttctcttttctcttctcttctcttttctttcttctcttttctttctttctttctccctctttctctctctctccttccttccttcctcctttccttttccttttccctttcccttttcctttcctttctctctttgtctttctttctttctc

SEQ ID NO: 173875 - DNA, 201 bp, Homo sapiens
tagtagattaattttatactcaaattagggctgttatgtggacattagccagattctgggtcactatgaatttattattgaatgaaggtactaatgtgtaycccagtgcaggttatttcttgggttaaggttttattcagccacaggtgtttgcattaaacagcttgttcccagcactttgggaagcctaggtgggcggta

SEQ ID NO: 173876 - DNA, 201 bp, Homo sapiens
catatccaaaggtgatatctggatctggacttcttttcttttctcttctcttctcttttctcttctcttctcttttctttcttctcttttctttctttctttctccctctttctctctctctccttccttccttcctcctttccttttccttttccctttcccttttcctttcctttctctctttgtctttctttctttct

SEQ ID NO: 173877 - DNA, 201 bp, Homo sapiens
actttccattttgtaaggactttaaatttttttctcagcatggtagttttttaaaacatattttaaaacttaggaatagttttagggttacagaaaaatarcagagacagtacactatatagagatttcccacctacaccaagtcagtttcctttatctttaacatcttatataaatgtgctttgtcaaattaatgaacca

SEQ ID NO: 173878 - DNA, 201 bp, Homo sapiens
acatatccaaaggtgatatctggatctggacttcttttcttttctcttctcttctcttttctcttctcttctcttttctttcttctcttttctttctttctttctccctctttctctctctctccttccttccttcctcctttccttttccttttccctttcccttttcctttcctttctctctttgtctttctttctttc

SEQ ID NO: 173879 - DNA, 201 bp, Homo sapiens
gtttggtggagggagatgaattacaagactatacaggactcgtttccttgccatagaaaggaatatgaattttaatttaatgataagaagcaagtagagaygtaatgtctacccctttttataggtataaaatggagattcagaaaggttccataatttgaagatgggagtctcataagtggcaaggctggactttatact

SEQ ID NO: 173880 - DNA, 201 bp, Homo sapiens
aaataagagaagtcaataataataatagctataatttgttgctcacctactatgtgcaaacaacttttctaaatattttacatatatttactcaattcttrtgacactcctatgaagtaggtattattacttaaatttaaactaccattattactctaattttacagttaatatgaagacatctacctttatacaaaaaat

SEQ ID NO: 173881 - DNA, 201 bp, Homo sapiens
ggagatggaatctagttacacttgtggggattcctgtttactgggaggagggtcagaaacagcatcatgataacagacagaaaaaaagacagtggcagttwcaaataggtccacagagatggtggcagcactatttgggagtgccacttgaaaactttgttttgtcacagaagtagaaagaaaggttatctggtgaggaag

SEQ ID NO: 173882 - DNA, 201 bp, Homo sapiens
cttctaaaatattaaaaggagatatgttaagtttgtatgaaaattagacactactagtcaaataataaaataaataatctttatcacattttaaattaaamaattgagacaagaactacagaaattggaaaaaaacatgctaagcagtgaatagttactgcacatggttgaaatttcaataagggagaggaggcaaaccat

SEQ ID NO: 173883 - DNA, 201 bp, Homo sapiens
ttattatttcttctatctacactgccttcgattttatgtggtgagctcaccaaaactccatattaagctatgggcaaggaaccccgtgcccttcattaatmtgtgatggtggcttggttgaaactgttggttttgaagcctgattgcctggattaaaatcctacgtttatttctgaagtgtggctacctgaattcaaattc

SEQ ID NO: 173884 - DNA, 201 bp, Homo sapiens
taacatatccaaaggtgatatctggatctggacttcttttcttttctcttctcttctcttttctcttctcttctcttttctttcttctcttttctttctttctttctccctctttctctctctctccttccttccttcctcctttccttttccttttccctttcccttttcctttcctttctctctttgtctttctttctt

SEQ ID NO: 173885 - DNA, 201 bp, Homo sapiens
ttaacatatccaaaggtgatatctggatctggacttcttttcttttctcttctcttctcttttctcttctcttctcttttctttcttctcttttctttctttctttctccctctttctctctctctccttccttccttcctcctttccttttccttttccctttcccttttcctttcctttctctctttgtctttctttct

SEQ ID NO: 173886 - DNA, 201 bp, Homo sapiens
tttaacatatccaaaggtgatatctggatctggacttcttttcttttctcttctcttctcttttctcttctcttctcttttctttcttctcttttctttctttctttctccctctttctctctctctccttccttccttcctcctttccttttccttttccctttcccttttcctttcctttctctctttgtctttctttc

SEQ ID NO: 173887 - DNA, 201 bp, Homo sapiens
aatttaacatatccaaaggtgatatctggatctggacttcttttcttttctcttctcttctcttttctcttctcttctcttttctttcttctcttttctttctttctttctccctctttctctctctctccttccttccttcctcctttccttttccttttccctttcccttttcctttcctttctctctttgtctttctt

SEQ ID NO: 173888 - DNA, 201 bp, Homo sapiens
atgtaggaccagttggatgttaagtctctgaacagggacagtaacaggacagaatggaatcacaggagatagacacgcagctggagatgagagatagtaaytgactttacatccagtggggcccaagccaagagtgttttacctgtcccaggtctatctcagagaggtttaagatcccagagaactttaactccagttttg

SEQ ID NO: 173889 - DNA, 201 bp, Homo sapiens
aaatttaacatatccaaaggtgatatctggatctggacttcttttcttttctcttctcttctcttttctcttctcttctcttttctttcttctcttttctttctttctttctccctctttctctctctctccttccttccttcctcctttccttttccttttccctttcccttttcctttcctttctctctttgtctttct

SEQ ID NO: 173890 - DNA, 201 bp, Homo sapiens
accatgtgtcagccactgttctagacacttgggatttatccatttaaaaaaggaacctacccttgtagaacttatatttaagtaaaagagataaaaatgarcaaacagtaaagataataaatgatagtatattcggtgataagggctatgtaaacaggaagggtggagaaggcaagggagctcaaaagtatggaagtcagg

SEQ ID NO: 173891 - DNA, 201 bp, Homo sapiens
atgcagagaatttttgagaaaacagggcaagtatcacacaatattaagaagatacgtaaaaatcggctggcctaacttctaactgcatgtattggtagtcytgagagaagaaatgtaacctgttcttgaatgcttttagtgacaaggaatatactacatctttaaggcaatataacctgtatgactgtagaaagatctgtt

SEQ ID NO: 173892 - DNA, 201 bp, Homo sapiens
gagaactgggacttctatactaagggaggataagatctcaaaagtcaggtgtctcttgacagtgaatcttgaaaagatatagttgggagtcttggtaaaakaaatatctgagggatagatctgaggccccaaaaggaaaattgtgctttgagtagtacaagctgcttctgactctgtggttccttatatatttcttattgt

SEQ ID NO: 173893 - DNA, 201 bp, Homo sapiens
cccaaatttaacatatccaaaggtgatatctggatctggacttcttttcttttctcttctcttctcttttctcttctcttctcttttctttcttctcttttctttctttctttctccctctttctctctctctccttccttccttcctcctttccttttccttttccctttcccttttcctttcctttctctctttgtctt

SEQ ID NO: 173894 - DNA, 201 bp, Homo sapiens
agtttctttttcttttctaatgttacatgaagttttctataaaatatatttgtcagaattttcaagttggcttttcacatttaaaagcagaaatgcttgcsaaagtctaactgaagatagatttacttatccctaatgtacaatatgattatttgcaccataaaaggcccaatactctttgagtgcaagttgacttgaaga

SEQ ID NO: 173895 - DNA, 201 bp, Homo sapiens
tttaaacgaatcaaaatgtagctagattgcttgttttaacaaaatattttatcaagtgcaaaattagtatttatcttttttataaaaccataatagaattkcagctacctcatatgtaaatgaaataatttattactttggtaagaattagttattaattggtctagttaaataataattaaggataactttgtcctgtca

SEQ ID NO: 173896 - DNA, 201 bp, Homo sapiens
taacaacccaaatttaacatatccaaaggtgatatctggatctggacttcttttcttttctcttctcttctcttttctcttctcttctcttttctttcttctcttttctttctttctttctccctctttctctctctctccttccttccttcctcctttccttttccttttccctttcccttttcctttcctttctctctt

SEQ ID NO: 173897 - DNA, 201 bp, Homo sapiens
ttaaacgttttgctgatttctccttagcccattttaagaaagttctcctctcttaggaacttttgtttgtctacttctccttgctttctcagatctcttakgcctctaaaaaatatggtgttgtggtttatccagctttttctagattttagcagagagaacattcactggcctcctgtgacttactacattatgcctaga

SEQ ID NO: 173898 - DNA, 201 bp, Homo sapiens
acttcagtatgtaaataacaacccaaatttaacatatccaaaggtgatatctggatctggacttcttttcttttctcttctcttctcttttctcttctcttctcttttctttcttctcttttctttctttctttctccctctttctctctctctccttccttccttcctcctttccttttccttttccctttcccttttcc

SEQ ID NO: 173899 - DNA, 201 bp, Homo sapiens
ctgaccagtgctttttggcatcatactggcagcactagctaatgtgatgagaaagaaaagaaaataaaggtgtacagtttgggaagaaataaatgaaactrcatttgtccacagatgacatgattgtccatgtaggaaatcctaaaaattgaccaaaaaatttcctagaactaatcaacaattattagttccttactaata

SEQ ID NO: 173900 - DNA, 201 bp, Homo sapiens
ccacttcagtatgtaaataacaacccaaatttaacatatccaaaggtgatatctggatctggacttcttttcttttctcttctcttctcttttctcttctcttctcttttctttcttctcttttctttctttctttctccctctttctctctctctccttccttccttcctcctttccttttccttttccctttccctttt

SEQ ID NO: 173901 - DNA, 201 bp, Homo sapiens
gagatcttccataacatcaatttttagtggaaatgggtgtttgtcattggaccacagaggtaatactcttagttgatatctgtgctatgtttacaaaccarttatcttgctagcatctttctctatctttcaggagagtttagagtaattcttttttttcttttagatggggaaagaaaaatgatttacaataaggttaaa

SEQ ID NO: 173902 - DNA, 201 bp, Homo sapiens
cttagccacttcagtatgtaaataacaacccaaatttaacatatccaaaggtgatatctggatctggacttcttttcttttctcttctcttctcttttctcttctcttctcttttctttcttctcttttctttctttctttctccctctttctctctctctccttccttccttcctcctttccttttccttttccctttcc

SEQ ID NO: 173903 - DNA, 201 bp, Homo sapiens
gaaattatatacagatatttaaagatcagtcttcctaatgtttcccaaggggtctaggaaatttagtttaatttagtatgttttctaacttcaggcttatmgctctgtcccactttaagggacattattttggctggggaatagaagtaatagtagtaattttatttagagatcttccataacatcaatttttagtggaaa

SEQ ID NO: 173904 - DNA, 201 bp, Homo sapiens
tgaagtagtatattagttggttctcacgctgctatgaagaaatacccaagactggataatttataaaggatagaggtttaattgactcacagtttcacatwgctggggaggcctcaggaaacttacagtatggcagaaggcaaaggagaagcaagcaccttactcacagggtagcaggacggagtgagtgccagcagggga

SEQ ID NO: 173905 - DNA, 201 bp, Homo sapiens
ttttattgtgttcacgtacattttttctacacctaatgattacagtatttgtataatgaaaggatattcagttttgtccaatgttttttcctgcatcaatwgagatgatcctatggtttttgtcctttattctattaatgtggtatatcacacttattgatttgtgtatgttgaaccatccttgcatcctgggggtaaata

SEQ ID NO: 173906 - DNA, 201 bp, Homo sapiens
atagcatatactgactatattagttatgctattaaaaaacatatatgtaaaccgaaataggtggctaattgggcacaggtgaagaattatagctgaaaaawagaggtgtttgctgctttgaatttgatgttttcttcgcttgcaataattgaattctgattaatcagagacatcagtctttacactgttggtgacatgcat

SEQ ID NO: 173907 - DNA, 201 bp, Homo sapiens
aatcgcttggacccggcaggctgaggttacagtgagccaagattgtgccactgctctccagcctgggcgacagagcaaaactgtctcaaaaaaaaaaaaaaggaaagtgggacgatcacatcccatactaatttactgtgaaaatactcatttctgtcttgactatattgaaatataagctccatggtgttttattaatgt

SEQ ID NO: 173908 - DNA, 201 bp, Homo sapiens
atttcatttgaacatcaagcatggttatgcccagtgttatccagggactagagagtccttgagaaccagaaatctttgctagacaacatacatcctgattytcctagccccttgaaagtaaaaaaaaaaaaaaaaaacaaacaaaatggcctcagaggccctccgtcctacccctgggaatgatctggggccctggggaca

SEQ ID NO: 173909 - DNA, 201 bp, Homo sapiens
cactttctaaccatggggcctggagcaagtcatttaactttcctaagactcactttcctcacctgtaaaatggggctgaaaattaaacctatcttttaggkttatcttgaggactaaagaagataatatatttaaaagtgctaacaaagtgcctggcccctaagaagagcccgcatcatgttagatattgcattgttttat

SEQ ID NO: 173910 - DNA, 201 bp, Homo sapiens
tgttccaaatgaatctatgtttgtaaattaagccatatgactgacattaagaagagtaatgacatttcaagaatggaaagctaatttttttcataagttgyataagtgtgatagcgcataccttctttattgctttatatgcatcacagagaataattcattcattcattttttaataaatatgtattgagaccctactat

SEQ ID NO: 173911 - DNA, 201 bp, Homo sapiens
cctatagtcacaagcatcttttgaaaatgtacatcagattattttatcaccctcctttaaacctttctgcggcctcccattacaccaacaataaaacccartctcccacagggttcagagctcccagagatctggctattgcctgcttctctcattttctttcatactattcctgtcctctcatgaatctacaaccacaaa

SEQ ID NO: 173912 - DNA, 201 bp, Homo sapiens
gctgcagatgttctcaaatcaaatcttatttctgtgaaatgccatatagaatattcagctgttgaaagatgcaacacgaaaggacagttcaattgatttgyactgtatttaaaaattttatgtagcctaaattatatgaaatggtttttcccacttttgaatcaattaataagagatgcacttgattctaatgagcttcaa

SEQ ID NO: 173913 - DNA, 201 bp, Homo sapiens
tgacccaaatcttcattcctaaagagtctgggccatttatagtccagcctggattgggttgttgtagtttcccattgacgttaatcatagggcatggtaayagtaagagatgccctaagggatctcctgtattccatgcataatcttccttatctccgttgtggagtagtagactgatttcatcttgataggctgggtcaa

SEQ ID NO: 173914 - DNA, 201 bp, Homo sapiens
agctatgggttgtctcttcaactacattttttgtactcaaatagtggtgatgatgcaggtcaggcaagcccccaaattggggctcagcccgggagggttcytggctttgcctaggaatgaattcaagggcaagccagaggtgttagcaacttttactgaagcggcagcatacacagcagcagaggtacagctcgttgtgga

SEQ ID NO: 173915 - DNA, 201 bp, Homo sapiens
gtgtgtgtatatttagtgtaaagacagtttctcttttaaccacttggaaagctttatccctgtaatttaaaaaattcagaatacgaaaatataatatttartgttcttaaccgtcaacttcatctccagaattatttgtttttataatttacgtataaaatccattctttaaagtgtaacttttcatggtttttagtatat

SEQ ID NO: 173916 - DNA, 201 bp, Homo sapiens
aaatcttacatttcctttcccctgacaaattctaggaatataggctagttgctgtacagttgcatctcttttagctcatcttttagcaacagacaactcasaccttttcgatatatcaagcagagtgggacactgtatacggtgcaccaacctccaaaaaagaaaataaaactgcggggaacacatataaagtgctctgaa

SEQ ID NO: 173917 - DNA, 201 bp, Homo sapiens
tatctattattttgtttaatgttactttagattctaaattatatgtcgttttttaacaagcatttattctattatatttatctaattaattttttaatagmttacttataaaaactgatggtcatcatttaaagttatttccctgctaaccaattttatagcctgcgaatttcaggtgtttacctatgtaaaaaacttaag

SEQ ID NO: 173918 - DNA, 201 bp, Homo sapiens
actcacagggcagcagagttggagctcagagaaacttcccttcagctttacgcttccacagtagattttctctgccaaggagttcacctaaaagcctgttrgttaaagtggctctggcctagtcagggtctgggtgggagttgcagcccggccagtttctagatcacgaatgtttatgaggatggccaaacctgcccttcc

SEQ ID NO: 173919 - DNA, 201 bp, Homo sapiens
tatcaacgtgtgtgtgtaaagtaaccacgactgaactcatgtagcaccagcgcgggcacagatgggtagagcacattagaagagagagccagaaacagacyccacatattccaattagggcttctaatgtttacagaattgttgcaatccaatatgacaagataagcaatctaacagaaaaatgaacaaaaaattctttat

SEQ ID NO: 173920 - DNA, 201 bp, Homo sapiens
agtgttgaattttgtcaaacacttttctgtatctatttacataatcatgagattcttgtccttcagcctgttgaaatgatagattatattaatttattttyctatgttgaatcagccttccatcctggaatagatctcacttggttctgatatataattttttttacattgttggattcaatttgctaatattttgttgag

SEQ ID NO: 173921 - DNA, 201 bp, Homo sapiens
gtaacccccaatgtcaataaatatcaatactcatggtgcttttgagaccactcagggacgtacatatgtgtagcgtagtggagaatgtgcttgtctgatgygtatgttcccagctgaggctgaacaaagggacacactaccttcttgcgtcagctctcataatgtaaacatgtccttctctctgtctattcagtgccacat

SEQ ID NO: 173922 - DNA, 201 bp, Homo sapiens
gcactgtctcacctttctggatggaactaatgtacttctttcaaattgattgatgtctcctgtctccctaaaatgtataaaaccaagcttggccacatgtyataaggacttcctgaggctgtgtcacgggtgtgtcctcaaccttggcaaaataaactttctaaattaactgagacctgtctcaaattttcggtgttcaca

SEQ ID NO: 173923 - DNA, 201 bp, Homo sapiens
gttattaatgaagtgctataagcatttgtgtgcaggtttttgtgtgtacataagttttcaactcatttgggtaaataccaaggatcacaattgctggatcrtatggtaagagtgtgcttaaagttttataaggaaaggctgaactgtgtttcaaagagactgtaccattttgcattcccacaatgaatgttagtgtaggtt

SEQ ID NO: 173924 - DNA, 201 bp, Homo sapiens
attaataataatgaaatggtttgaaatattacaaaagtttctgaaatgtaacacagagtcattgagtgagcacatgcttttggaaacattgtgcctatagwcttgctggattcagggttgtcacaaaccttctatttgtaaaaaatgcaataaaacggggtgtacctatactattattgtcacgatttttgttgccagtta

SEQ ID NO: 173925 - DNA, 201 bp, Homo sapiens
cacatcctcattccaactatttgaattgtctacggtcaggactaaaatggaataatatcaatcagtttcatgtccttggcattcttttttgtctttggaarttgctcaagttatgaatttttccagccagcattaactaaggtcacagcatggttacagagatatgagtggaagtagcatctttccatgggaggaaaactg

SEQ ID NO: 173926 - DNA, 201 bp, Homo sapiens
ccaagctcctctggcccaagggggaagagcttagccaagtctcctccttggccttctgagcacaactttgatgtccaatcaggctcatgtgcttccacttytggtatctcatccagagttcctttttcccctccacccttgatacttacccaagttcctcttagtaattttccacccagggaccctctcacctgaccgttg

SEQ ID NO: 173927 - DNA, 201 bp, Homo sapiens
cgcaacagaccttcactttctctagtgggggtgtgtgttcaggagaggagggtctccctttcccgcttctgcagctggggcactcacagtacttagggtgyctcctgagacctgcaggagcatttcacttccttcacagagtctgtgggtcctctcgggattgctggtttgttcttgcagtcaacctggagctaaaattca

SEQ ID NO: 173928 - DNA, 201 bp, Homo sapiens
ctcagctcctctagaagagccaggggcagcgggaagaccagatgcatgtttgtggcttgactgaagaaacctcgaaaatccagagcttggttttttttttktttgtttgtttgtttttaatggagactttattttttagagtagttttaggaaaactaagcttttggcacaaagagatcagccttggggcagcgccttcac

SEQ ID NO: 173929 - DNA, 201 bp, Homo sapiens
gtctctagccaggtcggggaaattttcctcaattactcccccaaatatgttttccaagcttttagaattctcttcttcctcgggaacactgattattcttrggttcaacataatcccagacttcttggaggctttgttcatattttcttattcttttttctttatctttgttggattgcgttaattcaaagaccttgtctt

SEQ ID NO: 173930 - DNA, 201 bp, Homo sapiens
ctcgggaacactgattattcttaggttcaacataatcccagacttcttggaggctttgttcatattttcttattcttttttctttatctttgttggattgsgttaattcaaagaccttgtcttcgagctctgaatttctttcttctacttgttcaattctattgctgagactttccagagcatttcacatttctaaaagtg

SEQ ID NO: 173931 - DNA, 201 bp, Homo sapiens
gtaagatgtacattggtttggtctggaaaggtgggacaattcaaagcagggagggggctttcaggtcataggtagataagagacaattggttgcattcttytgagtttctgattagcctttccaaaggaggccatcagatgtgcagctatctcagtgggcagaggggtgactttgagttctgtctgtccttcatccaaaag

SEQ ID NO: 173932 - DNA, 201 bp, Homo sapiens
tttttcttctactgtatgttagttattgtgggccacgtcactctttttcagggacttcaattttccacagattgggtacctcttccatgatttctctcttyctttcgatatttcccttttttgttatcttctatattttaggaagcttttcatggttttctccacatgattatgtgattatggacctggtgtggtggctca

SEQ ID NO: 173933 - DNA, 201 bp, Homo sapiens
agcaggactgcagcatgttgtcataatcctcacctgatgtcttgcgcaggatcacttgtattaatagaaactcccgtctctgagcctgcatccagggttcyttcttctttatggtcctgggatttgctgctttaggcatgaggggaggctcaaaagcaaatcatccatttttcataaccaatgtggagccaatgattcctg

SEQ ID NO: 173934 - DNA, 201 bp, Homo sapiens
cataatcctcacctgatgtcttgcgcaggatcacttgtattaatagaaactcccgtctctgagcctgcatccagggttctttcttctttatggtcctgggrtttgctgctttaggcatgaggggaggctcaaaagcaaatcatccatttttcataaccaatgtggagccaatgattcctggatgttaaaactgactcagca

SEQ ID NO: 173935 - DNA, 201 bp, Homo sapiens
agaaaatgcattttagaagaaaatgcgtctctagtcttggggttttgtctggtctcttgtgactaagacagtttatttctagacaggtcccacgtggttargaaagctcatttttagcaggttgtaaagtctcatgacccatgaaggaaaaaaataggtggaggaagagagagagaaacaaacaaacaaacaaacaaaaat

SEQ ID NO: 173936 - DNA, 201 bp, Homo sapiens
attcctctggaaggaaaaggcccttctgccctgggctgctgtgtgcctggggctgcactggtggtggcagtgggagagtgagggaggagtcagggaacagmaaaagctcccaggtggggccagtcatctcagcagcctagtctcaaatgcattggtcctctctcgtttttatttgaaacaagtgttgaatgaggcatactt

SEQ ID NO: 173937 - DNA, 201 bp, Homo sapiens
tgtccttcagcctgttgaaatgatagattatattaatttattttcctatgttgaatcagccttccatcctggaatagatctcacttggttctgatatatawttttttttacattgttggattcaatttgctaatattttgttgagaatttttgcatctctatttatgagagatattgttctatagttttccttcttgcaat

SEQ ID NO: 173938 - DNA, 201 bp, Homo sapiens
gcaaagcaacatacgttttacaaatacaaatacaaacaaaaagatgcacatagaacccactgggatcacttcttatggatatagaagctggagaatgagasctgttttttggtgtaaatgagccaaaatcagggtcacttttgttcaagctgttattgacttggttttcactgtaaacactggaagtagtctcgaatttta

SEQ ID NO: 173939 - DNA, 201 bp, Homo sapiens
gtccttcagcctgttgaaatgatagattatattaatttattttcctatgttgaatcagccttccatcctggaatagatctcacttggttctgatatataawtttttttacattgttggattcaatttgctaatattttgttgagaatttttgcatctctatttatgagagatattgttctatagttttccttcttgcaatg

SEQ ID NO: 173940 - DNA, 201 bp, Homo sapiens
ttttactaatggttagtccataatttaacataaacactttggttgtactctttaaatactgaaatagacaaaataattgaagtttctgaaactggcaatcrttataagcacagtaaatacattttataatgaaataattattctgttcataagcttcttattgttcatttgatattctgaatcttttatctgtaaatgtga

SEQ ID NO: 173941 - DNA, 201 bp, Homo sapiens
ccaccccctgcccgcgaggcgccgcgtttccgcaggtcctccccagcacctgcaacatgggggccctgctgtatccgcgggcttagaatgagcaaggcacsggcctacgccacggagggctccttctcctaggatcacatgctgtctgaatagcttctgagttctataactatttggaagtgaaataaggtcagtgtgata

SEQ ID NO: 173942 - DNA, 201 bp, Homo sapiens
tatttatgagagatattgttctatagttttccttcttgcaatgtctttgtaatactggtctcatagaatgagtcagaaagtattccttttgcttctatttkctgtaagtaatccttacttccttaaatgtttggcagaactcagcagtgaattcaattggcatggtttctttgttttagaaggtttttaattattgatcta

SEQ ID NO: 173943 - DNA, 201 bp, Homo sapiens
tcatttgacttgggccagtgtatctggctaattaatggtaggcattgaactagaaccaaaataaatagaatttttttgataactgaaaattctgtcacaaygctggtgaggaggtaaagtggttacactagtcatgtaggctttgaagatgtattccttattattaaagatgtacatttggaaaatagagtcaacgctggg

SEQ ID NO: 173944 - DNA, 201 bp, Homo sapiens
tacaaacgacattgcagctggttctcatggcactgaaactaaaattgcaataccttctccactcctccacagccttagtaagtacagaaaatctacacagwatcccatgttatatggtataattatttccctgttatttaactacttccctgggaaagtcccttgctttcctaaatgactatgcagtgggcatctggcaca

SEQ ID NO: 173945 - DNA, 201 bp, Homo sapiens
cctcagacagtttctaccgttcaccaagaatcacagatctgtactggcacccgcctgcaggaccacgaaggtggcagggcttgcctgaggcttccccagcytgttcttctgctccatccagggccttccagtcctcagggctcactccttcttcccaaccctaggttcttcatcctactccctccaccaccagtccctgac

SEQ ID NO: 173946 - DNA, 201 bp, Homo sapiens
cagtgccatttctacctcctacagacatggagggaaagcgccccttacttgggatccaagtggcctccagggcatgcagtcactgcccaggtgtccctacscacggcttgcttggtatccccgccttccagttcagaggttgcaaaatttgctcactgaatcattttctttctgcagttttcacctctgacagagcccaga

SEQ ID NO: 173947 - DNA, 201 bp, Homo sapiens
actgaatgcctgagtcagaggttgggtccctgtttcccttttgacttgagaagctcctgcagaaccatggctctgggcccttgagctacttctcttgtgtycagaagcagttgccacctgttcattccacccacactttattttatttatttatttattttgagatggagtcttactctattgcccaggcttgagtgcaat

SEQ ID NO: 173948 - DNA, 201 bp, Homo sapiens
tggggtcagtgtcattgtcaaggggctgccagtcagagtgtggcactgccactccacctactatgtccttttgcctcacctgactcttggagctctgaggmgaggaggagctgcagccgtgggaaagcctgcaggtagcagagcaggagaggagacttgagcccttggaagagcacaaagtgatgagacctgggaggtgca

SEQ ID NO: 173949 - DNA, 201 bp, Homo sapiens
ggagaggagacttgagcccttggaagagcacaaagtgatgagacctgggaggtgcacagaggaccgagagggcaagacacgctctggatgtttgtgggagragcctcagtccatccatgtccaggatgtgtctagtcaaccaaccttagtgttggcatcgtgcttattagactcatctgctgtcaagcagttgttttcatt

SEQ ID NO: 173950 - DNA, 201 bp, Homo sapiens
aagtgatgagacctgggaggtgcacagaggaccgagagggcaagacacgctctggatgtttgtgggaggagcctcagtccatccatgtccaggatgtgtcyagtcaaccaaccttagtgttggcatcgtgcttattagactcatctgctgtcaagcagttgttttcattcttgtttttgttgacagttttcttctaggact

SEQ ID NO: 173951 - DNA, 201 bp, Homo sapiens
tttcattcttgtttttgttgacagttttcttctaggacttttatattctatttttttaacagttctattgagatataattcactttgttcatttaaagttwacatttgggctgggcgtggtggctcacgcctgtaatcccagcattttgggaggccgaggaggccagatcacttgaggtcaggagttcgagaacagcctga

SEQ ID NO: 173952 - DNA, 201 bp, Homo sapiens
ttcatttaaagttaacatttgggctgggcgtggtggctcacgcctgtaatcccagcattttgggaggccgaggaggccagatcacttgaggtcaggagttygagaacagcctgaccaacatggtgaaacctcgtctctactacaaatacaaaaattagtcaggagtggtggcacatgcttgtaatcccagctactcgggag

SEQ ID NO: 173953 - DNA, 201 bp, Homo sapiens
ctatggccaggtgccaacatccagcaggtgctcgtctgaggtggttccatgcagtggatagaactctctccttcccactcatcctccctgcttctccactytgaagacagggccacgaagtgcagtcctgtgaggtttgggtgactaggatgcagtgtcccacattcagttccttctatttaagactccatggcttagaag

SEQ ID NO: 173954 - DNA, 201 bp, Homo sapiens
taactaaggtcacagcatggttacagagatatgagtggaagtagcatctttccatgggaggaaaactgaaaaccaagacaaacttctctatggctcctttycacggataattgttggccaagaatctactttgacagagcattgtttattaaacagggaatgaataagaaacagctgcacaaagctccttcctccttcatg

SEQ ID NO: 173955 - DNA, 201 bp, Homo sapiens
  misc_feature (1)...(201): n = A,T,C or G
ttctgaatggagtggaggtaggtgcacccttcgctctccctaaggctgttttcacagtgctctgttattgacctctcccttcatgaggagctgacgtccantctcttgctattgaggtttgtttcagccaattatgtttgaaccaattccgacttcctcagaataggggctgagagccttccccagccatatagcctgtcc

SEQ ID NO: 173956 - DNA, 201 bp, Homo sapiens
gcaaaaataaataagttgaggaccctgcttggagaagcccaccattagcaaagggtgttattgaaatgttgcattacaacaaaataaccccacaggtcaakcaggaggtctgagggagttcaggggagtccatctcttcttgaagcgtgtggggctggagatgagctctgactgttgctgatgcaaaaagacattgagcca

SEQ ID NO: 173957 - DNA, 201 bp, Homo sapiens
ctgtgcttctgatgctgtgacacctttgggtcttgctgaccctggagggactgcccttctcagggagaggggtttcctagagctcttaaaggactcacttrcaagttcacctttcttttcttttcttttttattataagttctagggtacatgtgcacaacgtgcaggtttgtacatatgtatacatgtgccaggttggtg

SEQ ID NO: 173958 - DNA, 201 bp, Homo sapiens
cggctgctggagggagctgcttatgcacaggctgagaccaggatcccctcacttgtaccacctgccaggtccccgccctgcagcccctgcactcatggcaygttctgctgcctggaaggccgctgcctctgtcccagttccatggggatctctgctctagaggggtagcttcttccttgaaaagatgctgcttaaagtcag

SEQ ID NO: 173959 - DNA, 201 bp, Homo sapiens
  misc_feature (1)...(201): n = A,T,C or G
tgacgtccaatctcttgctattgaggtttgtttcagccaattatgtttgaaccaattccgacttcctcagaataggggctgagagccttccccagccatanagcctgtcctcctgaaatactcctgacacttacagttccatttcaatctacacaaatcccaaacagaaagaataaatgttagcttataaaactgtgggaa

SEQ ID NO: 173960 - DNA, 201 bp, Homo sapiens
gcctctgtcccagttccatggggatctctgctctagaggggtagcttcttccttgaaaagatgctgcttaaagtcagaggatggatggctctccttggggmatttctagctctggactgtgccacaagccctggatgtggtatgtgtatgtgtgtgtatgcatgcacttaggtatgtgtgtgtgtgcatgtgtgtgtggta

SEQ ID NO: 173961 - DNA, 201 bp, Homo sapiens
aactcgtcatttacattaggtgtatctcctaatgctatccctccccactcctgccaccccatgacaggccccggtgtgtggaactcaaacaaatttgtaaraaaaaagcaaattcacctttgaaatgcaaaatcatcagtacagagctcctaccccagcatctcctctgtggggctctcacactctgggctactatcctcc

SEQ ID NO: 173962 - DNA, 201 bp, Homo sapiens
cacttgaaccactggcagccactaatctttttggctgtctccatcatttgttcttttttagaatgtcatacagatagaatcatacaatatgtagccttttyagattgacttatttcactaacatgtatttaagtttcctccatgtctttttgtactagtttatttctttttattgttgaatgctgttttctgatatgaaca

SEQ ID NO: 173963 - DNA, 201 bp, Homo sapiens
ttgtccttcagcctgttgaaatgatagattatattaatttattttcctatgttgaatcagccttccatcctggaatagatctcacttggttctgatatataattttttttacattgttggattcaatttgctaatattttgttgagaatttttgcatctctatttatgagagatattgttctatagttttccttcttgcaa

SEQ ID NO: 173964 - DNA, 201 bp, Homo sapiens
ctccttagagttctatcactaataatatagtaactgtgaaaagtagattctcgcccatcttcaggatttactggtttttgtttgtttgtttgtttgtttgtttttgttttgattgttgtagactacctctgtgctgaaaattggccttaggtgtaaactttttttcccccataagttattagggtacaggtggtatttggt

SEQ ID NO: 173965 - DNA, 201 bp, Homo sapiens
aaactttttttcccccataagttattagggtacaggtggtatttggttacatgagtaaattcctttagtggtgatttgtgagattttggtgcacccataamctgagcagtatacactgcaccacatttgtagtcttttattcctcacccccgctcccactcttccccccaagtccccaaagcccattgtatcattctcatg

SEQ ID NO: 173966 - DNA, 201 bp, Homo sapiens
taccctgctgactgttccttttgccatgcaaatgctctttagtttaattaggtcccagccatttatctctgtttttattgcatttgcttttgggttcttgktcatgaaatccttgcctaagccaatgtctacaagggtttttccaatgttatcttctagaatttttatagtttcaggtcttaggtttaagtcctcaatcca

SEQ ID NO: 173967 - DNA, 201 bp, Homo sapiens
cagcagtgtagaagtgttcctggatcaccacatccatgccaacatctaatgtttttgattttttgattatggctattcttgcaggagtaaggtggtattgyattgtggttttgatttgcatttccctgattattagtgatgttgagcatttttttatatgtttgttggccatttgtatatcttcttttgagaattgtctat

SEQ ID NO: 173968 - DNA, 201 bp, Homo sapiens
atgtttttgattttttgattatggctattcttgcaggagtaaggtggtattgtattgtggttttgatttgcatttccctgattattagtgatgttgagcatttttttatatgtttgttggccatttgtatatcttcttttgagaattgtctattcatgtccttagcccagtttttgatgggattgtttgtttatcgtgtta

SEQ ID NO: 173969 - DNA, 201 bp, Homo sapiens
aatacattttataatgaaataattattctgttcataagcttcttattgttcatttgatattctgaatcttttatctgtaaatgtgagccattctgtccagwgcttattgcctctttaatatcagatctccaaagaaagactcaaattccatacacacgaaaggcatatattatccacatttaaaagatggcctgttttttt

SEQ ID NO: 173970 - DNA, 201 bp, Homo sapiens
aattgatggtacttttccattcaattatatccttacctattttctgactgctggacctgtccatttctgacaaaggggtgacaaagtctccaactataagrgtgagtttatctgtttctccttagagttctatcactaataatatagtaactgtgaaaagtagattctcgcccatcttcaggatttactggtttttgtttg

SEQ ID NO: 173971 - DNA, 201 bp, Homo sapiens
caggaggtcatacaaatgagtgagcaagagccctgcgcatgaatgaatgtgaaactcataggtctattttggggtaagaaagcaaattatagaaacatgcrtggaattataaaatttaagataatacatcttaagtttatggtacagtatgtttagcagtgtgcaaaataatatagattgcttagggatttggagagaaaa

SEQ ID NO: 173972 - DNA, 201 bp, Homo sapiens
ttagagttctatcactaataatatagtaactgtgaaaagtagattctcgcccatcttcaggatttactggtttttgtttgtttgtttgtttgtttgttttkgttttgattgttgtagactacctctgtgctgaaaattggccttaggtgtaaactttttttcccccataagttattagggtacaggtggtatttggttaca

SEQ ID NO: 173973 - DNA, 201 bp, Homo sapiens
gctgtatttcttaccagtcttgttcaatgcattgttcgctttgttttaactctgcaccacttaccaattaccaatatacaagctgcccttcccacatgtayctcatgaagttttacatcttatgaggcacataagacctattaagtagtccacagttcaagtaaaaccattgtcagaggaaactactggctaagaggtttg

SEQ ID NO: 173974 - DNA, 201 bp, Homo sapiens
aagtgctgggattataggcataagccacagcacccggcctacttacattctttcttgtagtaattggtgcacttaaaaattttattcatttacttatttamttatctataatagcttatgtaaacaaagtaaataagtaagatacataagtggccaggtgcggtggctcacacctgtaatctcagcactttgggaggccaa

SEQ ID NO: 173975 - DNA, 201 bp, Homo sapiens
gctggcagagacgaaatgtgaatgtagcccgtttgcacttggtgctgtcgggcagccaagcaatccagtgtgtaggtccagggcgacaagcgctgctcccrtggctggggtaagtccctccagcattcagccttgctccctgtgcttatctggatgcggtgtaggatgaagatgaccctatagaactctaccctggaagtc

SEQ ID NO: 173976 - DNA, 201 bp, Homo sapiens
tgctggcttctggctccccctggatggtgacgcttgggcagctcccatcttgccctctgtgcagatggggcctaatctccttactgcctccattgtccacrtggctgctgcctgcaggtccctgcacggctgctggagggagctgcttatgcacaggctgagaccaggatcccctcacttgtaccacctgccaggtccccg

SEQ ID NO: 173977 - DNA, 201 bp, Homo sapiens
gtgaccacatataagatcggaaagtgggtctccacttttaaggacacatatgattggattgggtccatccaggcaatctgagataatctctcaagtcaagkttcttaacttaatcacatcagcaaagtcaccttttccctggaagggaaacagtcacagattctggggaccaagacctgaaatctctgggaatgagggtgc

SEQ ID NO: 173978 - DNA, 201 bp, Homo sapiens
acagattctggggaccaagacctgaaatctctgggaatgagggtgcattaatgtgcctaccacatccagtgtgcttcagagtcatggagggaacttgcttrtaatgcctattcctagactctgggccaaaaaatgtgaacgctaattcatccggatgacacccagattcctgaataggccacatgccgggactgatgactg

SEQ ID NO: 173979 - DNA, 201 bp, Homo sapiens
agcaaagggtgttattgaaatgttgcattacaacaaaataaccccacaggtcaatcaggaggtctgagggagttcaggggagtccatctcttcttgaagcrtgtggggctggagatgagctctgactgttgctgatgcaaaaagacattgagccagaagtccagggaggcagccagctcaccgtgcacaggcaatgcacca

SEQ ID NO: 173980 - DNA, 201 bp, Homo sapiens
cttggttaggtatattcctaaggtttttttttttttttttttttagctattataaaagggttcttgatttgattctcagtttggttgctgttggtgtataraagagctactgacttgtgtacattaatcttgtatccagaaactttgctgaattcttttatcagttttaggagctttctggaggagtctttaggattttca

SEQ ID NO: 173981 - DNA, 201 bp, Homo sapiens
tccatcttgattttgtttttgagccagtgctcattcaggtgcagtttatttaatttccatgtatttgcatggttttgaaagttcctcttggagataatttycagttttattccactgtggtctgagagagtgcctgatataatttcagttttcttaagtttattgatgtttgttttatggcctattatatggtctatcttg

SEQ ID NO: 173982 - DNA, 201 bp, Homo sapiens
attttcttttttttttttttttttttttgtctttttgtcccatttggtggaagaatctgtgatccctccttagggtctgcttctctttctctctctccctmtcctttttgcaatggctcgttcattataacccgtgggggatttagaatctgtggatcatgtaatgcatttcctgattgcctacaatttttatcttctttg

SEQ ID NO: 173983 - DNA, 201 bp, Homo sapiens
tgagaaatctgctgttaatctgataggttttctttgtaggtaacctggtgcttctgtctcacagcttttaagattctttctttcatcttaactttggatartctgatgtgcctaggtgaagatctttttgccatgaatttcctaagggttgtttgtgcttcttgtatttggatggctgggtctctagccaggtcggggaaa

SEQ ID NO: 173984 - DNA, 201 bp, Homo sapiens
atttcctaagggttgtttgtgcttcttgtatttggatggctgggtctctagccaggtcggggaaattttcctcaattactcccccaaatatgttttccaascttttagaattctcttcttcctcgggaacactgattattcttaggttcaacataatcccagacttcttggaggctttgttcatattttcttattcttttt

SEQ ID NO: 173985 - DNA, 201 bp, Homo sapiens
aaagacctggggtctgaggaagaactgctgacccagagcaactccaaagtggtatctcaagcatctctggaaggtagtggggagaggcttatatgttgaasttattccattgctctcagcataagactatgtgaggggagggaaagtaccgctgtaagctctgtacgaaacaaatccctatcaggcaaacgctcccgactc

SEQ ID NO: 173986 - DNA, 201 bp, Homo sapiens
catttgtgtaggctctgtcagggggaatatctagggctgaagactgttgttcagattcttttgtcccacagggtgttcccttgatgtagtactctcccctytttcctatggatgtggcttcctgtgagctgaactgcagtgattgttgtctcttttctgggtctggccacccaggcagtctacccagctctgggctggtac

SEQ ID NO: 173987 - DNA, 201 bp, Homo sapiens
gctgaactgcagtgattgttgtctcttttctgggtctggccacccaggcagtctacccagctctgggctggtaccaggggttatctgcacagagtccttcrgtgtgaactatttatgggtctctcagccatggataccagcacctgttctggtggaggtgagttggggagggggtgcaatggactccgtgagggttcttag

SEQ ID NO: 173988 - DNA, 201 bp, Homo sapiens
cagcataagactatgtgaggggagggaaagtaccgctgtaagctctgtacgaaacaaatccctatcaggcaaacgctcccgactcgcatttctgcaacccmacgtttgcatctatctcataagcatgtatcatatcaggatcttattgacatacgcccagaagaacatatgtggagagtgtagctctgaaaatttatcagc

SEQ ID NO: 173989 - DNA, 201 bp, Homo sapiens
ttctggtggaggtgagttggggagggggtgcaatggactccgtgagggttcttagcgttggtggtttaatgctctgattttgtgctggttggccttctgcrggaggtagtgctttccagagagcatcagctgtagtagtatggagagggcccagtggtgggcagggccctacaactcccaagattatatgccctttgtctt

SEQ ID NO: 173990 - DNA, 201 bp, Homo sapiens
aagccagcagtcacagccctcacccagctcccacacaaaccgaagggcctgtctccctcccaccgtgcccctgccaagagccccaagtctgtttctgggcrtgggcgagaggggcttaaaaacttgccccaggctacctacttcccagctatgaaagaaaagggcttggtttttcccctccctctggagcctgcacaccgg

SEQ ID NO: 173991 - DNA, 201 bp, Homo sapiens
tttggatgccctttatttctttctcttgtctgattgctgtggctaggatttccagtactatgttgtaaagaagtggtgagagtgggtaaccttgtcatgtwccagttctcagagggaatgctttcaacttttccccattcagtattatgttggctgtgggtttgctgtagatggattttattatattaaggtatgtccctt

SEQ ID NO: 173992 - DNA, 201 bp, Homo sapiens
ctttctttacatcaaatattacaagcatttttttcaggtcattatatattatataaaagtataattttgttaaaaaaagtcgcatagtactctattatatstctatctttcccagctatctctctcatatatacatatatgtacacacatacatataacataaataaatataaatgtaatttatttaataggaattcacat

SEQ ID NO: 173993 - DNA, 201 bp, Homo sapiens
gggctgagaggcagcaaccatggaagccacatttatttctcccctactcagtgctggggtcctggcaagcacattgtaaatattcccttgctcatcccttrggcctatgggtactatttcatctccatcttcctgggaggagagtgaggcttggagaagtagatagggccccttggctggggagcaactggaagcaggagt

SEQ ID NO: 173994 - DNA, 201 bp, Homo sapiens
ataaggtgaatttctttgaacctatagtgtcaatattaagactcagaatactctgtctagggaaaaataaatctgtcaaaacacactcttttaggtttcargaatgaaaacaatgcaggaaacatcacttaaaatgttaagatcgtattttacaaaaatttcaaaactcatgaaataaaaagacaaatgctggcaagaacc

SEQ ID NO: 173995 - DNA, 201 bp, Homo sapiens
caatgcaggaaacatcacttaaaatgttaagatcgtattttacaaaaatttcaaaactcatgaaataaaaagacaaatgctggcaagaaccacttatagcrtatgtcgtaaagtaaatcttaaaaagaaggcttacatatcagtaagcaaaaaggcaacattccagtgggaaaacatgcgaaatatatgaagtcggtttca

SEQ ID NO: 173996 - DNA, 201 bp, Homo sapiens
aatcaacaatcaacaatcaaagtgcagactcccaatatttggaggacagttccctttttctcactttggctcttgcaagctctgtgcaagctgctccaggracacatgctcagctatgtgccatgggcctgggggtggtggatgggtaggtactactgtactagagctaaaattgaccaaaattaactgtattttcctgtc

SEQ ID NO: 173997 - DNA, 201 bp, Homo sapiens
gctctgtaggtcacccttattttctcaaggcaatctgaaaatgtcattccaatcaaagccttggtaaaataaccaatgacagaacaggatcacacagaggycattgtaaaatcagtcattcatttagccaaagcgataactcaaagatttcacaacctttattctttgagagaagagacttacttttctaaacaataaact

SEQ ID NO: 173998 - DNA, 201 bp, Homo sapiens
tgaaagaggacccctgtctgcagcccagggcatcctggccttctcactcattagcccttgggattttcaccccacacacacttactgatgccagcagggcyagtcactgtgctgtccctggaaagagagagaggagcaaatgctaacctctgtggttttccctcttgacaccaattctccaactctgcagacaccagctgg

SEQ ID NO: 173999 - DNA, 201 bp, Homo sapiens
aaatggctattggtgaattttgactgttctgccatgtggtaagtttccctgctcacagatgtcagttgcctgtccgaggtgacagtgaaagaagctggcarggaagatgccagagccaaaggggtgcaatagtcacttagctcactgcttgctgccttttctgaacccttgatggaattattgctaattcttagcctcact

SEQ ID NO: 174000 - DNA, 201 bp, Homo sapiens
ctgctgtgcatgccgcaaacacctgttgagtgaaaacaatgaacatcactggctcccaggtcaacagtccccatctgtgttcctttctcttggagatttgyaaagaaagcctctgcccacatcaccgagggccctgccatccaagacaggccatggcaatgggagcagggtggccaccagggaatcggctgcctccaagag

SEQ ID NO: 174001 - DNA, 201 bp, Homo sapiens
ttgtcatttctttatgttaacagtaaagaattgtgcaaggaagcttctaactgggccagttctttactcgtccataaggaagtagattcacggagaagcarataggaacttgcactaattagacaccgtatctgaattcttctactgaaagcctccagtttttctttcctgtagaagtttctgcaatgagggaaatttata

SEQ ID NO: 174002 - DNA, 201 bp, Homo sapiens
caaaccttcatcagctcagccaagcaacttggagtcctctgactcagatgtcaggctaagaactgaatgtcctggccagtagctggctgatgtaattcccyagggctatcggatttaaagggccgaggtcttctgctggatagagcccacatggcctgctgtcccctgggccaagtgtgggctgcccgctggaccatggag

SEQ ID NO: 174003 - DNA, 201 bp, Homo sapiens
  misc_feature (1)...(201): n = A,T,C or G
cccatctgtgttcctttctcttggagatttgcaaagaaagcctctgcccacatcaccgagggccctgccatccaagacaggccatggcaatgggagcaggntggccaccagggaatcggctgcctccaagagaaataggcgagccggtgagccgaaaaggaagccagcttttaatatcttcctcactgatggtctgtttca

SEQ ID NO: 174004 - DNA, 201 bp, Homo sapiens
ttgtaaatacaatgtaggcactcctgtgcagtggatgaagtgcagggtggggcgtgggttgtattaggtggacagcttgtcccagctgagcatggtcaggkcctgctatggccctgccacagcccctgttgactgcggaagtaggggacactgatgtgcctggtccagcccacattcgtggatctactcccagagcacgag

SEQ ID NO: 174005 - DNA, 201 bp, Homo sapiens
tggcatggttcttggtggggaagacaggtatgttcccatctccacgccatttgatgagaacaatgcatatatacatgggtagagggcgcaaataaacttcytagaggggatttggaaagcctgttgctgagagagaacacaggagctgtgtcaggggatatccaggcaggtacttctgggcatgctgcctttcttgttgga

SEQ ID NO: 174006 - DNA, 201 bp, Homo sapiens
cagcgtgtgtcacctgccagtcacagtcccctggatggatccagctcaggccttcctgctatctggggccccctcttctttgtagaggctggaggctgtgsacagagcttgatttatgatttgtttggtttgaaacactgaggttgcttttggggttgtgcagaaggagctgacatgggtgaatgccaaaaccctttcatc

SEQ ID NO: 174007 - DNA, 201 bp, Homo sapiens
tttcagactcatattttaagaaaactatggacacaaaacaatatgtcttccaatagtgtaggtaccaatgccttcgctatgtttgggatttcatttggacyttctcttgaatttagggaagtgccagtgaagccaccctggtggccctgctggccgctcggaccaaagtgatccatcggctgcaggcagcgtccccagagc

SEQ ID NO: 174008 - DNA, 201 bp, Homo sapiens
atctgtgttcctttctcttggagatttgcaaagaaagcctctgcccacatcaccgagggccctgccatccaagacaggccatggcaatgggagcagggtgrccaccagggaatcggctgcctccaagagaaataggcgagccggtgagccgaaaaggaagccagcttttaatatcttcctcactgatggtctgtttcatgt

SEQ ID NO: 174009 - DNA, 201 bp, Homo sapiens
gcatgttgtcataatcctcacctgatgtcttgcgcaggatcacttgtattaatagaaactcccgtctctgagcctgcatccagggttctttcttctttatkgtcctgggatttgctgctttaggcatgaggggaggctcaaaagcaaatcatccatttttcataaccaatgtggagccaatgattcctggatgttaaaact

SEQ ID NO: 174010 - DNA, 201 bp, Homo sapiens
gacatgtgattttcatagaagaggggtctgggaccatcaagacccactccctcaatgtagacagaatgccaaggccctgtgaaggcataaggtcagacaargttacagtccactgatcatgggttgagactaggcctcaggccctggacctcagggactggtttctcagtagctgagcgcctctctcaccacactgctcac

SEQ ID NO: 174011 - DNA, 201 bp, Homo sapiens
ggggagctgtggcactggccaagaaagaaatgctttctgccaaggggcaggaggtgtcgtgagacctcacccatgtgtgatggcagatgaagggcacagtyctctgcattagactccttggtttgaatcctagatttatccttaagactagctgtgtacccttgggcgagttagatatcctccctatcctccagaaaatag

SEQ ID NO: 174012 - DNA, 201 bp, Homo sapiens
aactactggctaagaggtttgtcatttctttatgttaacagtaaagaattgtgcaaggaagcttctaactgggccagttctttactcgtccataaggaagyagattcacggagaagcaaataggaacttgcactaattagacaccgtatctgaattcttctactgaaagcctccagtttttctttcctgtagaagtttctg

SEQ ID NO: 174013 - DNA, 201 bp, Homo sapiens
  misc_feature (1)...(201): n = A,T,C or G
ccccagagctcacacaggccgctatcatggagaagctggtggcttactcatccgatcaggtgagtgtgttgtgggggtatcagccaagacttcaagacccnaatgtttggttttatgtcaaattcaaaccaaaccaaacagcatccttccaaatctaagaacagttcctcaggtatcactaaatagagacctgaactacag

SEQ ID NO: 174014 - DNA, 201 bp, Homo sapiens
acatttgcttaaaggttaactcacttgagggagcttgtgtggtgctttctcttctgctgcaggctggcaggggtttttgttcagtgggggctgtgcacttkgtggctctccatgcacacacagtcactccagtgacacatgtttgataggtgctgggaatgatttcatgactggctcagtagcaaatgcgggccagatgtg

SEQ ID NO: 174015 - DNA, 201 bp, Homo sapiens
ccagcattgacagaaaacaaatgcaagtacacacttctaattcagtagcttgtgttttcattcttagattcgtaaccagtcttagtgtaatgctaagtttwagcaatctgagtccaaatgcttaaaagtatttgctaaggccgggcacagtggctcacacctgtaatcccagccctttgggaggccgaggtgggtggatca

SEQ ID NO: 174016 - DNA, 201 bp, Homo sapiens; identical to SEQ ID NO: 31092

SEQ ID NO: 174017 - DNA, 201 bp, Homo sapiens
gctcaagctgttttctctgaatgcaaatccaccattctttctattcttcatgaggaggaggaggaggaggactgtcctgtggaattgtagtgctgaaagcwtagctccacttgattgtggcagttccattttccaacgcagaccaatctcgccaaggaggccagctgggcggagtgggacttaggacccagtgcaaagtcc

SEQ ID NO: 174018 - DNA, 201 bp, Homo sapiens
actgcaggaattcaactgtggcctcatctgactacagcaggtgtggagtcttggttcagttgtgcagcctctctgcgcctcggtcttctcatctgttaaasggagtaatagtagtcctgacaaggttcttatgaagattaaatacgagaaccaggcaaagagcttaacgtggttcttggcacatgtaagttcatatcaatg

SEQ ID NO: 174019 - DNA, 201 bp, Homo sapiens
catatcaatgttaactattttttagaccaatgagagagtgcctatttaaacaagaacacccgggtttacataaaaatagtggtacaagtgtaagacagtcrcaagtgtgtgtgcgtatgtgtgtgtgtggtgccctggctttattgtgtcaattataagtagagacactttggcctacaggatgaaggaaacaggggttct

SEQ ID NO: 174020 - DNA, 201 bp, Homo sapiens
agcattgttaactttgggaaaaaggggcttccttttcagatattgtctttcacaaggctctgagaattggtgaaggcccattcagtggatgaggacagtgwggcacacactggagaacacctttgtgcagagcacatggccagtgtggccacgcgaaactagcaagcaagtctctccacttccagtcctgagaatgagcaa

SEQ ID NO: 174021 - DNA, 201 bp, Homo sapiens
attagagatggggtttcaccatattggccaggctggtctcagactcctgacctcagatgatatgcccgcctcagcctcccagtgtgatggaattacaggcrtaacccactgtgtccggccaacatttccatttttattgatggtgttatattactaactgttggtggtaccttaacaattaagtcagcacccttttaccta

SEQ ID NO: 174022 - DNA, 201 bp, Homo sapiens
ggtgaatccatggatccctacaaatgcatatgctgaccctgacacctaccccacggtaccctgacactggtatccaccctgtgaggtgagggtggctcgcrccctctctgtggtccttcacccttcaactcttactctcctgggtgcctagggctgagaggcagcaaccatggaagccacatttatttctcccctactcag

SEQ ID NO: 174023 - DNA, 201 bp, Homo sapiens
cttaagactagctgtgtacccttgggcgagttagatatcctccctatcctccagaaaatagatttcataagaatacatccggtgtgggattgtcgccaggrgtagatgagttaatcatgttttaagggcttaaaaacagtgcctggcagacagtaaatactgaaattgcattaggtgcttttgtgattttctactacgtct

SEQ ID NO: 174024 - DNA, 201 bp, Homo sapiens
tgacagcttcctctgcttgcatgtcaggtttgctaatcactattctaattacaactttgaattctcataatgctgtaataccagaaaagagggtaccagakgtatagaatacaaatgtccccatctttggaaagaataatcctcttactactaatcaatgaagtagtattctggtttatgtctgcatcacaatcattcact

SEQ ID NO: 174025 - DNA, 201 bp, Homo sapiens
acccttgatggaattattgctaattcttagcctcactggaaacttttatctagggaatatcattgcaacatactggcataagaaatgagaagcctaaaaakgacaattttttatttgatttatccagcattgacagaaaacaaatgcaagtacacacttctaattcagtagcttgtgttttcattcttagattcgtaacca

SEQ ID NO: 174026 - DNA, 201 bp, Homo sapiens
gtggctcacacctgtaatcccagccctttgggaggccgaggtgggtggatcacctgaggtccggagttcaagaccagcctggccaacatggtaaaaccccrtgtctactaaaaatacaaaaaattagctgggtgtggtagtgcatgcctgtaatcccagctactcaggaggctgaggcaggagaatcgcttgaacctggga

SEQ ID NO: 174027 - DNA, 201 bp, Homo sapiens
acccatgaaggaaaaaaataggtggaggaagagagagagaaacaaacaaacaaacaaacaaaaataaagggagaacaatcctggaaaactgacataaaccrtattactctgaagtccctatgtcagtaggcaggtatgaaagtgatttacgtatataaataggttcctgttattttcttccaaagttgacgttgtctagct

SEQ ID NO: 174028 - DNA, 201 bp, Homo sapiens
agtgagctgagatcatgccattgcactgcagcctgggcaacagagcgagactctgtctccaaaaaaaaaaagaaaagaaatgttctgatgttttgtgtttrtctggtgcttgttggcatttctggaggaagacattcagggagcccagaggcacctcgtgggcatatgggacagcgatgggcacaggacctcgtagaaaag

SEQ ID NO: 174029 - DNA, 201 bp, Homo sapiens
accttatctctactacaaatacaaaaattagccaggtgtggtggcacgtgtctgtaatcccagctatcctggaggctgaggcacaagaattgctggaaccygggaggcagaggctgcagtgagctgagatggtgccactgcactccagcctgggtgacagagcaagactccatctcaaaaacaaacaaacaaacaagcaaa

SEQ ID NO: 174030 - DNA, 201 bp, Homo sapiens
cttagaggccattgcagtgttactaactgacctaatttcaattttgtcacatcttagagaacagggaggcccaaggaaaggaagaaagacaggcgaataaygggtcagtggttcagtcagacacaaatttattaagttgaccatcatgtgggtgtggtccatgctgtcccaaaacaattacaatagtaacatcaaagattg

SEQ ID NO: 174031 - DNA, 201 bp, Homo sapiens
aactgagagaggacgtgcagctggaggggcagccaggcctgccgcaagttcctgggaagtctcagaaggaaagagtcactgacagcaggaagctggagggktgtgaggctgtcccattcctccccactgaggcagccttgcctcagggctaggtgtgcccctggtgcatgcaacttctcaagctctggccgagggtctctg

SEQ ID NO: 174032 - DNA, 201 bp, Homo sapiens
aggctgtcccattcctccccactgaggcagccttgcctcagggctaggtgtgcccctggtgcatgcaacttctcaagctctggccgagggtctctgtgtcygcctggttcctagatgggccgtgctatgcagtgtgtgctgttagtggatcacatatgagatgcagaatgcagaatgcagaggcatgcccacagctccatg

SEQ ID NO: 174033 - DNA, 201 bp, Homo sapiens
aaatattgaagaggcgactaccacaggcccattagaaacatgggccaatgaataaagtataatgggaagctgcaaatactgagaattgaacaaaaagaaasatgcaaccaaacttgccacacacagctaaagcagcacctacaaaacagacatcaattgaaaagaggaaagccagaaaatcataagctaagtatcaaaatt

SEQ ID NO: 174034 - DNA, 201 bp, Homo sapiens
tctcttggagatttgcaaagaaagcctctgcccacatcaccgagggccctgccatccaagacaggccatggcaatgggagcagggtggccaccagggaatyggctgcctccaagagaaataggcgagccggtgagccgaaaaggaagccagcttttaatatcttcctcactgatggtctgtttcatgtttcatttcagcat

SEQ ID NO: 174035 - DNA, 201 bp, Homo sapiens
gagacagagtttcactcttgtcccccaggctggagtgcaatggcacaatctcagctcactgcaacctctgcctcctgggttcaagcgaatctcctgccttrgcctcctgagtagctaggattacaggcatgcgccatcatgcccagctaatttttgtattttaagtagagattgggtttcaccatgttggtcaggctgatc

SEQ ID NO: 174036 - DNA, 201 bp, Homo sapiens
aagagctggcggccgacgtgctgcgagcagagagggagtaggagtgaagccagctgcaggtaggctgccctgggctcattttctgcctgtctccttgtccygtggcaagagtgtcctcctggagtccagacccagctacaggcccagcccggccactcaatgctgccagagtgcatttccctcaccttaaaataaggaaga

SEQ ID NO: 174037 - DNA, 201 bp, Homo sapiens
agtgccaaaaaaatccacttggttccatgtcacctcagggacaagtttgtcctgcgctttgccatctgttctcgcacggtggaatctgcccatgtgcagcrggcctgggaacacatcaaagagctggcggccgacgtgctgcgagcagagagggagtaggagtgaagccagctgcaggtaggctgccctgggctcattttc

SEQ ID NO: 174038 - DNA, 201 bp, Homo sapiens
gtatgtaattaagtgaataacttttcactttcctcctaagcatgaggaaagcagcttttatacaaaacaactaatgtcagctctcaaggttaccaaaatayccgtttgaccttttcctgttttttttttaaggctaaccacatttctagtcctttacttgtatacaaatcaaattattttttgtcagtctttttccccaaa

SEQ ID NO: 174039 - DNA, 201 bp, Homo sapiens
ggttcaatatgacagtcatgttctgcccatacatctgaacatgatattcactttaaccaatattgaacgagaagctaccaatgcatttaaatgcccctagrcagtcttctggaaattgtaaagcatgatctttaatgctaagtgaaatgcctgcttcttttgagaagtagcaatcaaaattattgaccagcactccgcttc

SEQ ID NO: 174040 - DNA, 201 bp, Homo sapiens
ccagcagttgcaaaacagtggatttccagtttgtaaacagatgagtttgagagctgtggaagagaaatacaagtgaagataatgtgtcctagaaagggagraaggaaggagctgaggaagccggcctcaaaagcctcaaaatgaggccacttctgcccagttaataattttattttttacttaaagaaaattaatagactt

SEQ ID NO: 174041 - DNA, 201 bp, Homo sapiens
acttttcactttcctcctaagcatgaggaaagcagcttttatacaaaacaactaatgtcagctctcaaggttaccaaaatacccgtttgaccttttcctgttttttttttaaggctaaccacatttctagtcctttacttgtatacaaatcaaattattttttgtcagtctttttccccaaacttctgctatataatttta

SEQ ID NO: 174042 - DNA, 201 bp, Homo sapiens
ccctcaggagccagacacgtttgaggacatcatcaacgacgttgagaagataatcatgcctggggtaagtgtgtatccaaggtcagaaaacaggagggctrgaactcacatagcacctacttggctctgagcaattcacatactttgtttcaaggaatccctatggcagtcaggttggagagaaattttgtcatttctatt

SEQ ID NO: 174043 - DNA, 201 bp, Homo sapiens
tgcatggagaatagcgcagcatggagaatagtgtggggtagagaatagtgtggagaatagtgtcgtgtgcagctgctggaacactgggcagattatgtcarcagaagctatttcaagggcctggagaggcataagccacagcctttatcataggctaagtcttccagctaatatttacacagcttgggggcataaaatatc

SEQ ID NO: 174044 - DNA, 201 bp, Homo sapiens
ctggcagctgggagccatgggggtacctgggtcccccgctctcttgaggcctggctttcctcactcctcagcagctgctctgtcctcccatgcaggtgacrcactggcacagcccctacttcttcgcctacttccccactgccagctcgtacccggccatgcttgcggacatgctgtgcggggccattggctgcatcggct

SEQ ID NO: 174045 - DNA, 201 bp, Homo sapiens
agcctaggcgacagagtgaggccccgtctcaaaaaaaaaaaaaaaaaaagtacaacggaatcattaaggctggttaaacttaaaatggatattcaagcccrgtgattgtatggtaaaatgagcattcttatacatgttttaggggaaaatttggcaatatattttcaagacactaaaaatatttatctctagaagaatttg

SEQ ID NO: 174046 - DNA, 201 bp, Homo sapiens
gttcagccaccagcctgtgaggggaaatttgacaaagtggaggtgatgtagggaagagacacaggacacacagggatgaggccaggccatttggaaaaggscatttggaaaatttccttgtagaaggaattaaacgtaagccctaagacacaagagaggcctgcggtgtctggaagtctgccacaagagaagggtgatggg

SEQ ID NO: 174047 - DNA, 201 bp, Homo sapiens
gtaaacaagaggttgcacattttaggattatttggaaaagctaatagctgacatttattgagtgctaatttgttaccatttatttatttagttgttacacraagttcttcaaggtattacgggcatacctcttgtgaaaggaaaatatcttaggccctttcaagctgggaaccactcagggaaaatctgtctcccattcta

SEQ ID NO: 174048 - DNA, 201 bp, Homo sapiens
tttgaatgagaaagctggagaagggggaggagtgatccaggtaaggtgggagctgtgagggccacttttgggatgcatgggctctgcacaggactgtagcygcaggtggggaaagaggcactcatgcttcttgttagttcctcaaatttctcctggagaataaacaaaaccgagctcttgggaaaatgctggctttgggat

SEQ ID NO: 174049 - DNA, 201 bp, Homo sapiens
ttcagccaccagcctgtgaggggaaatttgacaaagtggaggtgatgtagggaagagacacaggacacacagggatgaggccaggccatttggaaaaggcmatttggaaaatttccttgtagaaggaattaaacgtaagccctaagacacaagagaggcctgcggtgtctggaagtctgccacaagagaagggtgatgggg

SEQ ID NO: 174050 - DNA, 201 bp, Homo sapiens
catttgtaacccccaatgtcaataaatatcaatactcatggtgcttttgagaccactcagggacgtacatatgtgtagcgtagtggagaatgtgcttgtcygatgcgtatgttcccagctgaggctgaacaaagggacacactaccttcttgcgtcagctctcataatgtaaacatgtccttctctctgtctattcagtgc

SEQ ID NO: 174051 - DNA, 201 bp, Homo sapiens
ccagacaggagttacagtgctgttggctgtgagtccaatgttaatgaatcaatatatattaaataaagtgtctcttaaaaacacatgaaaagtttatgtaytgatttgttgacaaaaatgttgggatcacgcttcaggaaattgtatttcccctagaagaaatggttcagtattcactaattcagagtttatggccatggc

SEQ ID NO: 174052 - DNA, 201 bp, Homo sapiens
cagccaccagcctgtgaggggaaatttgacaaagtggaggtgatgtagggaagagacacaggacacacagggatgaggccaggccatttggaaaaggccakttggaaaatttccttgtagaaggaattaaacgtaagccctaagacacaagagaggcctgcggtgtctggaagtctgccacaagagaagggtgatggggtt

SEQ ID NO: 174053 - DNA, 201 bp, Homo sapiens
aaagttggaatcgatcatgaaaataaacgtgtgcttctagtctattgaaataaagcgacgttgtgttgttcccagttgaatagctggtgaagaggagaagsagcttttgcctcagtcccaaatccagtgccatttctacctcctacagacatggagggaaagcgccccttacttgggatccaagtggcctccagggcatgc

SEQ ID NO: 174054 - DNA, 201 bp, Homo sapiens
agccaccagcctgtgaggggaaatttgacaaagtggaggtgatgtagggaagagacacaggacacacagggatgaggccaggccatttggaaaaggccatwtggaaaatttccttgtagaaggaattaaacgtaagccctaagacacaagagaggcctgcggtgtctggaagtctgccacaagagaagggtgatggggtta

SEQ ID NO: 174055 - DNA, 201 bp, Homo sapiens
cagacatggagggaaagcgccccttacttgggatccaagtggcctccagggcatgcagtcactgcccaggtgtccctacccacggcttgcttggtatcccygccttccagttcagaggttgcaaaatttgctcactgaatcattttctttctgcagttttcacctctgacagagcccagacaccatgaacgcaagtgaatt

SEQ ID NO: 174056 - DNA, 201 bp, Homo sapiens
tgaggatggccaaacctgcccttccatgcaacaatgtgcagagtccaggcagggaaaatctccgtgggctccactggttgatcactgccgcgacccagcaygtctgtggttgtaaggcctatgagcaacgacatgtgattttcatagaagaggggtctgggaccatcaagacccactccctcaatgtagacagaatgccaa

SEQ ID NO: 174057 - DNA, 201 bp, Homo sapiens
ctttgggagaggtgtggctaaatgtcaggcagtggggagtacaggagagtaagggaggatttgaagtctttctgcttccttctatgggggcattcactgckcagagctgagctgggaaatgcacaggcgttgggcaaggtccctgggtgggagctgcagcccacgaactgctggctgtgtgatcgcaggaaaccaggtgag

SEQ ID NO: 174058 - DNA, 201 bp, Homo sapiens
cactccctcaatgtagacagaatgccaaggccctgtgaaggcataaggtcagacaaggttacagtccactgatcatgggttgagactaggcctcaggcccyggacctcagggactggtttctcagtagctgagcgcctctctcaccacactgctcacatttcttcttccaggggattctcacttggcatttatgctttgag

SEQ ID NO: 174059 - DNA, 201 bp, Homo sapiens
gagggaaggcctcagctcctctagaagagccaggggcagcgggaagaccagatgcatgtttgtggcttgactgaagaaacctcgaaaatccagagcttggttttttttttgtttgtttgtttgtttttaatggagactttattttttagagtagttttaggaaaactaagcttttggcacaaagagatcagccttggggca

SEQ ID NO: 174060 - DNA, 201 bp, Homo sapiens
cattcattgggatctcggctcatggccccaggttggaccatggggcagcagttgcttgtgtggaggttacagcggtgactggcacctggggaataaaaggytgtctgctttttaccctctagatggttgccaccctggggaccacaacatgctgctcctttgacaatctcttagaagtcggtcctatctgtaagtatccga

SEQ ID NO: 174061 - DNA, 201 bp, Homo sapiens
ttatggtctttgaacccacagagaaaatgtccatcaagaaacaagtcaggctgggtacggtggttcacacctgtaatcccagcactttgggaggccaaggyaggcagatcatgaggtcaggagttcaagaccatcctgaccaataaggtaaaaccccatctctactaaaaatacaaaaattagccaggtgtggtgacgcac

SEQ ID NO: 174062 - DNA, 201 bp, Homo sapiens
atacccaaattattattcttttttttttttttgagatggaatcttgctctgtcgcccaggctggagtgcagtagcgcgatcttggctcactgcaagctccrcctcccaggttcacaccattctcctgcctcagcctccccagcagctgggactacaggtgcccgccgccacgcccagctaattttttttgtatttttagta

SEQ ID NO: 174063 - DNA, 201 bp, Homo sapiens
atttcttctctagtttgcccttaggatactttatttgctacaaaattgctttgtgatggtgtcaccacactgccaatgaagcagagcaatggcaattaccrtaaagcacaggcccttcaaaggccagcccagtgagagtttgggtccgagttctgcagaatgactaccagtgtgagtgctctgtgtgcagacaggtgaaag

SEQ ID NO: 174064 - DNA, 201 bp, Homo sapiens
accttaacaattaagtcagcacccttttacctactttccctctcctgctaccattttcctatcaccagatatttagcattctccaactccaagcgggactrttctgagatcctgagctgaccttattctatatatgattagaataatctaacataattcagataagttattcacccaccatcatttgacaaagaaaacaaa

SEQ ID NO: 174065 - DNA, 201 bp, Homo sapiens
tggtttaactatctgtattcactgtgcctttttactatctgtgcttctgatgctgtgacacctttgggtcttgctgaccctggagggactgcccttctcarggagaggggtttcctagagctcttaaaggactcacttgcaagttcacctttcttttcttttcttttttattataagttctagggtacatgtgcacaacgt

SEQ ID NO: 174066 - DNA, 201 bp, Homo sapiens
aaattgctttgtgatggtgtcaccacactgccaatgaagcagagcaatggcaattaccataaagcacaggcccttcaaaggccagcccagtgagagtttgsgtccgagttctgcagaatgactaccagtgtgagtgctctgtgtgcagacaggtgaaagaggacccctgtctgcagcccagggcatcctggccttctcact

SEQ ID NO: 174067 - DNA, 201 bp, Homo sapiens
tcaccagatatttagcattctccaactccaagcgggactgttctgagatcctgagctgaccttattctatatatgattagaataatctaacataattcagwtaagttattcacccaccatcatttgacaaagaaaacaaatcagaagatggttttcttccaattgctgccttaggaaagacattttctttttattgcattt

SEQ ID NO: 174068 - DNA, 201 bp, Homo sapiens
ccacattcgtggatctactcccagagcacgagactcccttttccaccgatctgtgcagcaggactgcagcatgttgtcataatcctcacctgatgtcttgygcaggatcacttgtattaatagaaactcccgtctctgagcctgcatccagggttctttcttctttatggtcctgggatttgctgctttaggcatgagggg

SEQ ID NO: 174069 - DNA, 201 bp, Homo sapiens
ttgtgtttatctggtgcttgttggcatttctggaggaagacattcagggagcccagaggcacctcgtgggcatatgggacagcgatgggcacaggacctcrtagaaaaggttagaatcccactgtgttgagagacagcagagggtcctggtcttctggtttgtacagaggcaagtgtgaaagccatttctgagctgtgcgg

SEQ ID NO: 174070 - DNA, 201 bp, Homo sapiens
tgaggcaggagaatcattggaacctgggaggcagaggttgcagtgagccgagatcatgccactgcactccagcctgggtgacagagtgaaactctgtctcaaaaaaaaaaaaatgacctgtgtccacgtgtggtgggcaccagacatcatcaaagcagaggctgccatttcccgacagaggtgtgtgtctaagtgcgtttg

SEQ ID NO: 174071 - DNA, 201 bp, Homo sapiens
ttgcatctatctcataagcatgtatcatatcaggatcttattgacatacgcccagaagaacatatgtggagagtgtagctctgaaaatttatcagcaaagstgtgtttccgataggagtctcagttcctctggagtcattatatttgctgtagattcaaaaggtaaaaatgaaattcaatttttaaaaagatatgtgatac

SEQ ID NO: 174072 - DNA, 201 bp, Homo sapiens
acgtggttcttggcacatgtaagttcatatcaatgttaactattttttagaccaatgagagagtgcctatttaaacaagaacacccgggtttacataaaartagtggtacaagtgtaagacagtcgcaagtgtgtgtgcgtatgtgtgtgtgtggtgccctggctttattgtgtcaattataagtagagacactttggcct

SEQ ID NO: 174073 - DNA, 201 bp, Homo sapiens
ggcagaagaatcacttgaacctgggaggcagaggttgcaatgagcagagattgtgccactgcactaaagcctgagtgacaaagcaagactccgtctcaccaaaaaaaaaaaaaaaaaaaaaatgaggaaactgagtcctgaatatgagcctggatctgcctagagccacccgtttagccagctgcagaaggcctgctgctg

SEQ ID NO: 174074 - DNA, 201 bp, Homo sapiens
gtagattcaaaaggtaaaaatgaaattcaatttttaaaaagatatgtgatacaatagtaagtcctaatgcatgtatgttgttttggacagattagaacaayaaaaatcttaatatcttgattttacttgtacttatttgagtttattacacatattcatgtggtcatagctctgagagaaagtaggaactattcttatttt

SEQ ID NO: 174075 - DNA, 201 bp, Homo sapiens
gtggcagctttgcacggacagcctggatcctggttccaggagcacagtctctcccatctctccatccgagggatgggagtgcatcatattggccatagagkttacctgagcttcctcggttacctaaggtcacccagctaataagccttggagataagacgcaagccgagttctctggatccagagtccacccttctcccc

SEQ ID NO: 174076 - DNA, 201 bp, Homo sapiens
gggagatggaggtgaagtgtcagaagaccggctgctatggaagcagggcccaggcaggacagcaagggcttcccattggcttattgataccaggcttccawctctagtgtagtgggaggggtggggcctctgcgcctaccccaggctggtgggccgtgcttgtctggagaggcaccagtggttgctcggtcctgtggttca

SEQ ID NO: 174077 - DNA, 201 bp, Homo sapiens
cactgaatcattttctttctgcagttttcacctctgacagagcccagacaccatgaacgcaagtgaattccgaaggagagggaaggagatggtggattacrtggccaactacatggaaggcattgagggacgccaggtctaccctgacgtggagcccgggtacctgcggccgctgatccctgccgctgcccctcaggagcc

SEQ ID NO: 174078 - DNA, 201 bp, Homo sapiens
gctgaggcaggagaatcgcatgaacctgggaggcggaggttgccgtgagccgagatcgcgccactgcgttacagcctggcgataatgcaggactcagtccaaaaaaaaaaaaaaaaaaaaacaagaagaagagaaaaccatgttaattctggagaagtagaaggaatgatacattgtaataattcttttaaaacttagatt

SEQ ID NO: 174079 - DNA, 201 bp, Homo sapiens
gtttcattggagaaattatacgttcgttctttatattcaaataagaagtacatgcaattcttattctttatttttttaatttttatttttttatttatttwtttttttattgatcattcttgggtgtttctcacagagggggatttggcagggtcataggacaatagtggagggagggtcagcagataaacaagtgaacaa

SEQ ID NO: 174080 - DNA, 201 bp, Homo sapiens
agactcatattttaagaaaactatggacacaaaacaatatgtcttccaatagtgtaggtaccaatgccttcgctatgtttgggatttcatttggaccttcycttgaatttagggaagtgccagtgaagccaccctggtggccctgctggccgctcggaccaaagtgatccatcggctgcaggcagcgtccccagagctcac

SEQ ID NO: 174081 - DNA, 201 bp, Homo sapiens
ctgttttcacagtgctctgttattgacctctcccttcatgaggagctgacgtccaatctcttgctattgaggtttgtttcagccaattatgtttgaaccarttccgacttcctcagaataggggctgagagccttccccagccatatagcctgtcctcctgaaatactcctgacacttacagttccatttcaatctacaca

SEQ ID NO: 174082 - DNA, 201 bp, Homo sapiens
gcaggcagagtggtgttcagggctgggagcaggtgcctgagctgaggcaggtggggagaggggagaggtggtccagtctagggtacttggttatcagccckttcatttgttctctaaaaccagggtgaaaaagagaacagacttaacgggagcctttagactggaccccacttacctgaagcacagccatcaggattcagg

SEQ ID NO: 174083 - DNA, 201 bp, Homo sapiens
ccagcctgtgaggggaaatttgacaaagtggaggtgatgtagggaagagacacaggacacacagggatgaggccaggccatttggaaaaggccatttggamaatttccttgtagaaggaattaaacgtaagccctaagacacaagagaggcctgcggtgtctggaagtctgccacaagagaagggtgatggggttagttcc

SEQ ID NO: 174084 - DNA, 201 bp, Homo sapiens
attacagatacttcagagatttccgaaaatagtaagggagcattatgagtaacatcatgccaagaattgcccataaacacatatattcaataactacaacmaaacatgataccaaaactgactcaagagtaaatagaaaacctgaaaaatcttattgttaatacaacatgtcaatagtaaaattttcttacagcagaaata

SEQ ID NO: 174085 - DNA, 201 bp, Homo sapiens
tgtgaaggcataaggtcagacaaggttacagtccactgatcatgggttgagactaggcctcaggccctggacctcagggactggtttctcagtagctgagygcctctctcaccacactgctcacatttcttcttccaggggattctcacttggcatttatgctttgagcaaagaacaggattcaggttcttctagaaattg

SEQ ID NO: 174086 - DNA, 201 bp, Homo sapiens
cattgagactaggatgctgtgttttcaaaaggtgaatgtgaatgagcagctctgtttctagagtttcacctttgacatgtagctctgggaactcagcaggycttgaagctgcttctgtggacagaagaaccctcgtagggcagggacactggctcagggggctccccctttctctgtccctctaggatgggaatgttctga

SEQ ID NO: 174087 - DNA, 201 bp, Homo sapiens
ggtattcagattggtctgcttggatggatcagttgtctggcaggttttactgagaagatggaatacaaaaagtggatagttgaagtcagttaggttgccgrtggggaagtggggaaactgaggacgagggtatgggctgagttggggaggccatctcaaggtgtgaggaagggaatagcacagggcaggcagccaaagctg

SEQ ID NO: 174088 - DNA, 201 bp, Homo sapiens
gctttgctaaaaactccgtattgactaacaagtcctctgggaaccaaagtccttttagataaacttggcactgtctttcaaaggcctggggcacaatcccyagcaatgctggcttatgttacattgcccaagacaaaaaccagcccagctctgcccgcatctagcagctcagggaacatgatctcctcagacagtttctac

SEQ ID NO: 174089 - DNA, 201 bp, Homo sapiens
atctgtattcactgtgcctttttactatctgtgcttctgatgctgtgacacctttgggtcttgctgaccctggagggactgcccttctcagggagaggggkttcctagagctcttaaaggactcacttgcaagttcacctttcttttcttttcttttttattataagttctagggtacatgtgcacaacgtgcaggtttgt

SEQ ID NO: 174090 - DNA, 201 bp, Homo sapiens
attggcaggatctggattaggatcccagtgctgtctttcactcgcttccccagggcagggcactcagttccccaggcccctagctatggtaggtagcacarccgctatctcacagcaggtgcgtggaagtaacaactacagcaactatcgtttgtgtggggttccccatcgccggccactgtgcctaagcattttccaggc

SEQ ID NO: 174091 - DNA, 201 bp, Homo sapiens
ggctttcaggtcataggtagataagagacaattggttgcattcttctgagtttctgattagcctttccaaaggaggccatcagatgtgcagctatctcagkgggcagaggggtgactttgagttctgtctgtccttcatccaaaaggaaattccttatgagggaggcatgtagctttttatcttagtagctatctctttta

SEQ ID NO: 174092 - DNA, 201 bp, Homo sapiens
tctggaaggtagtggggagaggcttatatgttgaagttattccattgctctcagcataagactatgtgaggggagggaaagtaccgctgtaagctctgtaygaaacaaatccctatcaggcaaacgctcccgactcgcatttctgcaaccccacgtttgcatctatctcataagcatgtatcatatcaggatcttattgac

SEQ ID NO: 174093 - DNA, 201 bp, Homo sapiens
acaattggttgcattcttctgagtttctgattagcctttccaaaggaggccatcagatgtgcagctatctcagtgggcagaggggtgactttgagttctgyctgtccttcatccaaaaggaaattccttatgagggaggcatgtagctttttatcttagtagctatctcttttaggaatagaatgggaggcaggtttggcc

SEQ ID NO: 174094 - DNA, 201 bp, Homo sapiens
tgtgaggggagggaaagtaccgctgtaagctctgtacgaaacaaatccctatcaggcaaacgctcccgactcgcatttctgcaaccccacgtttgcatctrtctcataagcatgtatcatatcaggatcttattgacatacgcccagaagaacatatgtggagagtgtagctctgaaaatttatcagcaaaggtgtgtttc

SEQ ID NO: 174095 - DNA, 201 bp, Homo sapiens
gagagacagacatgtgtgtggggacaacacagtcaggctgtgccagtgcgatcgtggcaccacaaggtcctcagagctcgggagaggccgcagtgactccyagcccgtattttctgggttgtgtgactgacagcactcaatgctttctcagaacatcccttttaaaattattttcaatgtcagcagtgttttctcatgacc

SEQ ID NO: 174096 - DNA, 201 bp, Homo sapiens
tcatggatgaggatattgagtcccagaaagttagtagaacatgcatagcagcaaaagtgaattaaagccaaggctagtaggaaagacaaccagagttatgrctgttacaccagctcatccctgaccataggcttgggttggtgtccagagatgtgcatgctactatgggctgcattttcgtttcattaaagacaacctcat

SEQ ID NO: 174097 - DNA, 201 bp, Homo sapiens
tgctaagttttagcaatctgagtccaaatgcttaaaagtatttgctaaggccgggcacagtggctcacacctgtaatcccagccctttgggaggccgaggygggtggatcacctgaggtccggagttcaagaccagcctggccaacatggtaaaaccccatgtctactaaaaatacaaaaaattagctgggtgtggtagtg

SEQ ID NO: 174098 - DNA, 201 bp, Homo sapiens
cctcctctgcctcccaaagtgctgggattataggcaaatttcatattatcagaaacatgtcagattggattagagcccagccatgtgaccccattttcttytaattacctctctaaaaagcctatctccaaatatggtcacatctgaggtcctgggggttagggcttcaacacatgaatttttggggacacaattcagccc

SEQ ID NO: 174099 - DNA, 201 bp, Homo sapiens
ggaaataaagtacccattttagatgctgaattaagagacgcatatatctgtatatttgaacccatccattagtgctacagaaacatgaataaatgtatttrtctttcaatattactgtcccaccaaaggatgtgggttggctcaaaagaataagtaaaagtagtgtcaaggcaaagtcaaaatgagaaatcagggtcaatg

SEQ ID NO: 174100 - DNA, 201 bp, Homo sapiens
ctccatccgagggatgggagtgcatcatattggccatagaggttacctgagcttcctcggttacctaaggtcacccagctaataagccttggagataagaygcaagccgagttctctggatccagagtccacccttctcccccgcagtgccatgctgcctcccagaacactttatgttgctttttacccatgtgaggaagt

SEQ ID NO: 174101 - DNA, 201 bp, Homo sapiens
ctttctaatgtcctttcatactggtcggtagatgggtttcttctacgacttacttaagagggaaggtgctcgctgcccctacctttctaggcccatggcaccctaaaaagcgcaggcgtgggctcactcctaaccgtgccctacctagctgctgatttggggcaagttagtgaacctctctgcacatctgtttccccacct

SEQ ID NO: 174102 - DNA, 201 bp, Homo sapiens
atgctggtgccctgggccgttctcctctgatagagacaggagcagtcgtcctaggccaggctgggggcagtccatgaggagaagctctcacaatacctggygcagggaagtggtcagaaatgttagctgctgctgttacacaaaatagacccaccaatggcaaactcataccaacagctgaagtggtggtctcaggtgtca

SEQ ID NO: 174103 - DNA, 201 bp, Homo sapiens
gatcaagttaagaaggaaataaatgtgtggagacatcaccgcgactggctctgtcaccttttctaccagtgcggacttctgttgtgattatctggccttcygagcaccattgcagagaaactagatatggggatcaaagtcctcggccctaactgcagctttgttattctgtgatctcaggcccctgggtagcgtcaagca

SEQ ID NO: 174104 - DNA, 201 bp, Homo sapiens
aggagaggggctctaaggggcaagcttgtctctttcaaaggcaggtaagggcagaggcaggacttggaccagtgtttgtcattaaagttggaatcgatcawgaaaataaacgtgtgcttctagtctattgaaataaagcgacgttgtgttgttcccagttgaatagctggtgaagaggagaagcagcttttgcctcagtcc

SEQ ID NO: 174105 - DNA, 201 bp, Homo sapiens
tggatcagttgtctggcaggttttactgagaagatggaatacaaaaagtggatagttgaagtcagttaggttgccggtggggaagtggggaaactgaggaygagggtatgggctgagttggggaggccatctcaaggtgtgaggaagggaatagcacagggcaggcagccaaagctgcatcctgaggtgccagcataactg

SEQ ID NO: 174106 - DNA, 201 bp, Homo sapiens
gttgaatgctgttttctgatatgaacacgccacaattcatttatgcatttatctattgaaggacatcttgtttgcttccaagttttgacagttattaatgmagtgctataagcatttgtgtgcaggtttttgtgtgtacataagttttcaactcatttgggtaaataccaaggatcacaattgctggatcgtatggtaaga

SEQ ID NO: 174107 - DNA, 201 bp, Homo sapiens
ctgtagctcagatcagcggtaaggttgagaaaaacctcagatcacatcataagataggtgtaaatttgaagcttgctgtagtctgaacgtttgtgtccccygcaaagcccatttgctgaaattctaacctaaggtgatggtattggaggtggggccttccagtggtaatgaggtcagcacagtggagccctcctgattgga

SEQ ID NO: 174108 - DNA, 201 bp, Homo sapiens
tcgtatggtaagagtgtgcttaaagttttataaggaaaggctgaactgtgtttcaaagagactgtaccattttgcattcccacaatgaatgttagtgtagktttttcaatatctttgtcagctgttaatttttttcagtgttttttattttatccattctaatagatgtgtagtggtatcttattgttattttacttgaaa

SEQ ID NO: 174109 - DNA, 201 bp, Homo sapiens
tgagcttcctcggttacctaaggtcacccagctaataagccttggagataagacgcaagccgagttctctggatccagagtccacccttctcccccgcagygccatgctgcctcccagaacactttatgttgctttttacccatgtgaggaagtctgtgatgtttctctctctgtagttgagaaaactcatgtgctaaggg

SEQ ID NO: 174110 - DNA, 201 bp, Homo sapiens
aggaatatttcttttggtgtatgtggtatgtgtctgcttgttgtgtttttttattccagagccacatgctttggcctggtgctgtgacttaaagctgatayccccagaagctgagcgtctttctgaatctttcccagctaccccttctgagtcttcagcttgctgcctcacatgtgtggccccccaggagggcaaatagat

SEQ ID NO: 174111 - DNA, 201 bp, Homo sapiens
  misc_feature (1)...(201): n = A,T,C or G
gagggggtgtgctgccccaggctctgagctgaggctcgtgtgcattgtgtgactgtgccttcatgccctcctgagaggtcagcatcacagtcttcatttcncagatgaggagaggggctctaaggggcaagcttgtctctttcaaaggcaggtaagggcagaggcaggacttggaccagtgtttgtcattaaagttggaat

SEQ ID NO: 174112 - DNA, 201 bp, Homo sapiens
ttcaccatgttcgccagcatcttcttgatctcctgaacttgtgatccgcccatctcagcctcccaaagtgctgggattacaagtgtgagccaccaggcccrgccccgtctatgatttctttcagcaatgttttgtagttctcctggtagaggtcttcaactccttggttaggtatattcctaaggtttttttttttttttt

SEQ ID NO: 174113 - DNA, 201 bp, Homo sapiens
aagccagtaggcctggggtacacagagggcagaaatcagcgggactggctgctgtctccgatactcactcacagggcagcagagttggagctcagagaaamttcccttcagctttacgcttccacagtagattttctctgccaaggagttcacctaaaagcctgttggttaaagtggctctggcctagtcagggtctgggt

SEQ ID NO: 174114 - DNA, 201 bp, Homo sapiens
gcacacacctgtacaaatccaactctgctgtcttctttccaggcacactcctcagtggaaagagctgggttaattggtggagtgaaattaaaagccatccyctcagatggcaacttcgccatgcgtgcgtctgccctgcaggaagccctggagagagacaaagcggctggcctgattcctttctttgtaagttcggcagca

SEQ ID NO: 174115 - DNA, 201 bp, Homo sapiens
taactgagagaggacgtgcagctggaggggcagccaggcctgccgcaagttcctgggaagtctcagaaggaaagagtcactgacagcaggaagctggaggrttgtgaggctgtcccattcctccccactgaggcagccttgcctcagggctaggtgtgcccctggtgcatgcaacttctcaagctctggccgagggtctct

SEQ ID NO: 174116 - DNA, 201 bp, Homo sapiens
aactctgctgtcttctttccaggcacactcctcagtggaaagagctgggttaattggtggagtgaaattaaaagccatcccctcagatggcaacttcgccrtgcgtgcgtctgccctgcaggaagccctggagagagacaaagcggctggcctgattcctttctttgtaagttcggcagcacttgtggctcctggccaata

SEQ ID NO: 174117 - DNA, 201 bp, Homo sapiens
cagctggaggggcagccaggcctgccgcaagttcctgggaagtctcagaaggaaagagtcactgacagcaggaagctggagggttgtgaggctgtcccatycctccccactgaggcagccttgcctcagggctaggtgtgcccctggtgcatgcaacttctcaagctctggccgagggtctctgtgtctgcctggttccta

SEQ ID NO: 174118 - DNA, 201 bp, Homo sapiens
agtagagacacggtttcaccgtgttagccgggatggcctcaatctcctgaccttgtgatctgcctgcctcggcctcccaaagtgttggccaggctagtctsgaaatcctgacctcaagtgatccatctgccttggcctcccaaagtgttggggttacaagcatgagccaccatgcctagtcagattttctttctttacatc

SEQ ID NO: 174119 - DNA, 201 bp, Homo sapiens
ataggagtagtaagaacagacatccttgcctcattcctgatcttcgtaggaaaacatctagtttttcatcatcaagtatgatgttaagagtaggtttttcrttcatcaagtatgatgttaagagtagatgtcattcatcaagttgaggatgttctgctcgaatcctagtttgctaggagtttttattatgaacaagtgttg

SEQ ID NO: 174120 - DNA, 201 bp, Homo sapiens
catcctcagggctactaatctgttttctgtctctgtaggtttgtctattctggacatttgtataaatgaaaacatacaacatattgccttttatgactgtyttcttcacttagcataatgtcgtcaaggttatggcttttattttatttgcataatttgtagatgccaccaaacccatctgtgtactggtttctgtccatt

SEQ ID NO: 174121 - DNA, 201 bp, Homo sapiens
tttgccctaaagaccaaaattccagaacattctgctgatagaagccacagatgtgggccaattgtaggtatcggatcagagaggagaatcacttttttgcygtagactgccccatgcaccggcaccgtaccagccctggaggtgtgtggcgagccatggtccctttcctcatggcatggttcttggtggggaagacaggta

SEQ ID NO: 174122 - DNA, 201 bp, Homo sapiens
aaccccacacccagtcatgccactttccccatcctcagggctactaatctgttttctgtctctgtaggtttgtctattctggacatttgtataaatgaaawcatacaacatattgccttttatgactgttttcttcacttagcataatgtcgtcaaggttatggcttttattttatttgcataatttgtagatgccaccaa

SEQ ID NO: 174123 - DNA, 201 bp, Homo sapiens
atgtgggccaattgtaggtatcggatcagagaggagaatcacttttttgccgtagactgccccatgcaccggcaccgtaccagccctggaggtgtgtggcragccatggtccctttcctcatggcatggttcttggtggggaagacaggtatgttcccatctccacgccatttgatgagaacaatgcatatatacatgggt

SEQ ID NO: 174124 - DNA, 201 bp, Homo sapiens
tgggaggcggaggttgcagtgagctgagattgtgctactgcgctccagcctgggcgacagagcaagactctgtctcaaaaaaaaaggctacgtttgagtakttttagtatatctacagaattgtgcagccatcaccacaatctaattctagaacattttcatccccctaaaagaaaccccacacccagtcatgccactttc

SEQ ID NO: 174125 - DNA, 201 bp, Homo sapiens
ggcgcaaataaacttcctagaggggatttggaaagcctgttgctgagagagaacacaggagctgtgtcaggggatatccaggcaggtacttctgggcatgstgcctttcttgttggagggaagagggctgcagcgtacagagatcagaaaagcacaggacattccaggaaatgcaccttgtttgttgtctttaactggcag

SEQ ID NO: 174126 - DNA, 201 bp, Homo sapiens
ggcaccacaaggtcctcagagctcgggagaggccgcagtgactcctagcccgtattttctgggttgtgtgactgacagcactcaatgctttctcagaacawcccttttaaaattattttcaatgtcagcagtgttttctcatgacctcctgaggatttaattaatctttgggaacagtatcattcagaaagagaaaggcag

SEQ ID NO: 174127 - DNA, 201 bp, Homo sapiens
tatgtatatttactaaagtagaatataggtatcattgtccaggtggtagattgcttcatgtctgccccaaggcaccctggaaaatcttttgcaacttcccrgtttctaacctcagagcttagttttctgtctgcaaatctgtttctcttaacctgttatgatgctttcacccaaagattcaatgtgcatccatgggcttac

SEQ ID NO: 174128 - DNA, 201 bp, Homo sapiens
tgggtcccccgctctcttgaggcctggctttcctcactcctcagcagctgctctgtcctcccatgcaggtgacgcactggcacagcccctacttcttcgcytacttccccactgccagctcgtacccggccatgcttgcggacatgctgtgcggggccattggctgcatcggcttctcctgggtgagggtccggatgcacc

SEQ ID NO: 174129 - DNA, 201 bp, Homo sapiens
tgaaaaggattagcgtgtgatcaacaaacctgtctaacgatttcttttttctttttctttctcttttctccagggcttatcactgactaccgggtaagtgrgagattccactgtaatctcaaatgctagtggagtgctggggggtacgccacagctgtcacacatctcctcccccactctcatgatcagcacgcactggtg

SEQ ID NO: 174130 - DNA, 201 bp, Homo sapiens
tgcctcctgggttcaagtgattctcctgcctcagctttctgagtagctgggatcacaggcacatgccatcatgcctggctaatttttgtatttttattagrgatggggtttcaccatattggccaggctggtctcagactcctgacctcagatgatatgcccgcctcagcctcccagtgtgatggaattacaggcgtaacc

SEQ ID NO: 174131 - DNA, 201 bp, Homo sapiens
atgttcgccagcatcttcttgatctcctgaacttgtgatccgcccatctcagcctcccaaagtgctgggattacaagtgtgagccaccaggcccggccccrtctatgatttctttcagcaatgttttgtagttctcctggtagaggtcttcaactccttggttaggtatattcctaaggttttttttttttttttttttta

SEQ ID NO: 174132 - DNA, 201 bp, Homo sapiens
gatctgtgcagcaggactgcagcatgttgtcataatcctcacctgatgtcttgcgcaggatcacttgtattaatagaaactcccgtctctgagcctgcatycagggttctttcttctttatggtcctgggatttgctgctttaggcatgaggggaggctcaaaagcaaatcatccatttttcataaccaatgtggagccaa

SEQ ID NO: 174133 - DNA, 201 bp, Homo sapiens
attgcttgaacccgggaggcggaggttgcagtgagctgagatcatgccattgcactgcagcctgggcaacagagcgagactctgtctccaaaaaaaaaaaraaaagaaatgttctgatgttttgtgtttatctggtgcttgttggcatttctggaggaagacattcagggagcccagaggcacctcgtgggcatatgggac

SEQ ID NO: 174134 - DNA, 201 bp, Homo sapiens
ggaataatatcaatcagtttcatgtccttggcattcttttttgtctttggaaattgctcaagttatgaatttttccagccagcattaactaaggtcacagmatggttacagagatatgagtggaagtagcatctttccatgggaggaaaactgaaaaccaagacaaacttctctatggctcctttccacggataattgttg

SEQ ID NO: 174135 - DNA, 201 bp, Homo sapiens
tctttatggtcttgcttggaagcatttctcctactgaatatttttatggtctttgaacccacagagaaaatgtccatcaagaaacaagtcaggctgggtayggtggttcacacctgtaatcccagcactttgggaggccaaggcaggcagatcatgaggtcaggagttcaagaccatcctgaccaataaggtaaaacccca

SEQ ID NO: 174136 - DNA, 201 bp, Homo sapiens
ttgtcacgatttttgttgccagttaaagaaaatgaggtttagcatggcagcaatttacgctgggttgtacagctaatacatgctgttataatagctaatayatgcgattatgatagctaatacatagaatcagggtgtgactcgcagtcctttctttggctctcggtctcggagtgtggccactgggatacaccaatgctt

SEQ ID NO: 174137 - DNA, 201 bp, Homo sapiens
atgtgcaaaattaaaaaaaaacagtcacttcaaactaaaaactaatttcaaagcctgcaggccccaaggaattgtaagctggctgctttagcacatggccwtgatgttttgctggtgaacaggacactccttggtcgttggcttaagaagcacaaaggtgcaacagaacttcagacagtcattgtggttgttctcatgctt

SEQ ID NO: 174138 - DNA, 201 bp, Homo sapiens
ggaggctgaggcaggagaatcacttgaacctgggaggcggaggttgcagtgagctgagattgtgctactgcgctccagcctgggcgacagagcaagactcygtctcaaaaaaaaaggctacgtttgagtatttttagtatatctacagaattgtgcagccatcaccacaatctaattctagaacattttcatccccctaaa

SEQ ID NO: 174139 - DNA, 201 bp, Homo sapiens
attcaataattacttgttgagtacttaatacaacctaggacttacatgatggatccttgggggtaaatggagcttccaaagacctatgtacgcactggagrgagggtatagtatatgagaagttctcataatgtgatgccagtacccagctgatatagttcattgccggtagctagtttggtgcgtgtttggtgctgggaa

SEQ ID NO: 174140 - DNA, 201 bp, Homo sapiens
gcttttaagattctttctttcatcttaactttggatagtctgatgtgcctaggtgaagatctttttgccatgaatttcctaagggttgtttgtgcttcttktatttggatggctgggtctctagccaggtcggggaaattttcctcaattactcccccaaatatgttttccaagcttttagaattctcttcttcctcggga

SEQ ID NO: 174141 - DNA, 201 bp, Homo sapiens
cttctggtatctcatccagagttcctttttcccctccacccttgatacttacccaagttcctcttagtaattttccacccagggaccctctcacctgaccrttggctgtaagtccctatgtgcccctgttgtttttggaattgagttcagcccctccccttttgcaacattctatccctattgcagtggtcttgagtaaaa

SEQ ID NO: 174142 - DNA, 201 bp, Homo sapiens
tagtaataaaatttcctctttcccactgtttatcatgacacgtgtagtctgagaactttgctagctcagcaagtggaaggaacttcaagcatgaagtattycacaggccaaatcagtacaattcctgtacgttgtgcttgtgaaggacaattctgatttttccaaatattccagtaatttaaaatataatatggatacatt

SEQ ID NO: 174143 - DNA, 201 bp, Homo sapiens
tgttgcagggaggagaaaggattcagcccagagagagtgcctctgagaaagtagcgattgagaacagagaaagtctcaacaactcaaagcccattctgcasaggctgtgttggaagcacttggtatgaactaacatcatggtctggggcccagagtttctgcagctcgaacctgggaatctgcatttctccaagcagctca

SEQ ID NO: 174144 - DNA, 201 bp, Homo sapiens
catttctccaagcagctcagagaatttctatatcctccaaagcttgagaaccgcgactgcccctgtctcattccttctgttctccaccagggctgctgccyggggagaggctccaaccagcctatcagatgtgtccagagccttggagcaggggggtctctggaaaagggcctagctcctgcctgcaaaccaccagtccca

SEQ ID NO: 174145 - DNA, 201 bp, Homo sapiens
gggaccatcaagacccactccctcaatgtagacagaatgccaaggccctgtgaaggcataaggtcagacaaggttacagtccactgatcatgggttgagamtaggcctcaggccctggacctcagggactggtttctcagtagctgagcgcctctctcaccacactgctcacatttcttcttccaggggattctcacttgg

SEQ ID NO: 174146 - DNA, 201 bp, Homo sapiens
ggtcctgctatggccctgccacagcccctgttgactgcggaagtaggggacactgatgtgcctggtccagcccacattcgtggatctactcccagagcacragactcccttttccaccgatctgtgcagcaggactgcagcatgttgtcataatcctcacctgatgtcttgcgcaggatcacttgtattaatagaaactcc

SEQ ID NO: 174147 - DNA, 201 bp, Homo sapiens
gactgcagcatgttgtcataatcctcacctgatgtcttgcgcaggatcacttgtattaatagaaactcccgtctctgagcctgcatccagggttctttctyctttatggtcctgggatttgctgctttaggcatgaggggaggctcaaaagcaaatcatccatttttcataaccaatgtggagccaatgattcctggatgt

SEQ ID NO: 174148 - DNA, 201 bp, Homo sapiens
cagcagatattcactgagtgtctgctctgtcccagatactgaactaagatctgctaagatccacggatacagagatgaataatcccaccaagagtttcatyctcctttttaaaatattctaatcactccgtatatcacaaattcaccttcccatgcatgaatgaatgaatgatgaacgatttacgtgatctgaatgctaac

SEQ ID NO: 174149 - DNA, 201 bp, Homo sapiens
tgtatgccaccatcccagcatcatgaagcatttaccaacccagagctctccaatcctgccacttaggagtttttaacggagtttcattcagtagggatgaytgcttaaatcactggccaactcatctccagccccctaccctccctggagattggaagccatcgaggagaccccagctgccagctatcttattaacatgca

SEQ ID NO: 174150 - DNA, 201 bp, Homo sapiens
catttccaatttgtgttttgggcatcctgttctcgggacacacccttagaatatgttaccctgggaagtgccgcaaagaacacccagacccagcctttggscagttttatttctggcttagaagacacaagaaatttacctggaaaatgaaaaggattagcgtgtgatcaacaaacctgtctaacgatttcttttttcttt

SEQ ID NO: 174151 - DNA, 201 bp, Homo sapiens
agaaagcaccatttatgacagctcagggaaaatgcagagtgtcctcctctgccactcttggtggtttaaacctcttattttctccttgaaaataaggtagmccctaacactgatgcatgcagccagagccggttgttcacagtttttacccaggatcttccagctacgggagcctgtagctgttaggaatacaatgaactt

SEQ ID NO: 174152 - DNA, 201 bp, Homo sapiens
actctcatgatcagcacgcactggtgggcaccttctaactgggtcctaactgacaaattaggggggtcctgccaggtggcgggcagctctgctgaaccccycagtcagaggtctcaggttaggagggggaaacctggaccctggactttgctcctggggaggagaaaggagcttctgcccctcattcctctggaaggaaaa

SEQ ID NO: 174153 - DNA, 201 bp, Homo sapiens
aacactgatgcatgcagccagagccggttgttcacagtttttacccaggatcttccagctacgggagcctgtagctgttaggaatacaatgaactttaaarataaaggagctggtcggggtgcagtggctcacacctgtaatcccagtactttgggaggctgaggcaagaggacggcttaagcccaagagttcgagatcag

SEQ ID NO: 174154 - DNA, 201 bp, Homo sapiens
atcatcttgaccaaaatatataatttccataaatcattttataaccttttataattttttaattaaagaatgggttaatgtcccaagaaaaccttgttaawctggcatagggacacagatgctggtcttgcatcagtgtacctttgatattagtgtttaatttatagagaaactaagctaattttatctgtcaatattagc

SEQ ID NO: 174155 - DNA, 201 bp, Homo sapiens
gtggcgggcagctctgctgaaccccccagtcagaggtctcaggttaggagggggaaacctggaccctggactttgctcctggggaggagaaaggagcttckgcccctcattcctctggaaggaaaaggcccttctgccctgggctgctgtgtgcctggggctgcactggtggtggcagtgggagagtgagggaggagtcag

SEQ ID NO: 174156 - DNA, 201 bp, Homo sapiens
ctctaaggggcaagcttgtctctttcaaaggcaggtaagggcagaggcaggacttggaccagtgtttgtcattaaagttggaatcgatcatgaaaataaaygtgtgcttctagtctattgaaataaagcgacgttgtgttgttcccagttgaatagctggtgaagaggagaagcagcttttgcctcagtcccaaatccagt

SEQ ID NO: 174157 - DNA, 201 bp, Homo sapiens
tggtggttcagtgtagtccctgccctgcctgacacatcttcacgatggagaaaaagagaggccactgaatcctggccttcatctttcctgaccctggatgraaagtcaaatcctggtcacctccgagctgtggtcttgtggatggttttgttttctttttaatatttttattgttattccatatttcataataaggaaata

SEQ ID NO: 174158 - DNA, 201 bp, Homo sapiens
ggcagggagtaggtaagagtgactctcaggtttctggtgtggccagctggatggctggtcctgaaccagagctcagagcattagatttggcaaggggtggygatgagctgattttgaaatgtcaatttgaaggatatgagggacattctggtgcaggtggccaggaggctgttgaggtgtccaggcctacagctctgaagg

SEQ ID NO: 174159 - DNA, 201 bp, Homo sapiens
tcaagcaacttcctgtccctgcaggaaatccagactgcatactctaaatttaaacagctatttctgataggtgagaagaatactgagcaaaaacttttgtrttatatggggaaagacatgccatgcagatcaggtgaaagttggtgccttttccctgggttccttacgttagtacgcagagcccagggctgtgatgtcatg

SEQ ID NO: 174160 - DNA, 201 bp, Homo sapiens
tgaacccaggaggcagaggttgcagtgagccaagatcacgccactgcatttcagcctggcgacagagtgagactccatctcaaaaaaaaaaagaagataarggtaggaaggggtgagaaggcaatgtatttttaagtatataggttttgccaggtaatcatattacgggaaatgcaggtgagcaacatcgaggcatggctt

SEQ ID NO: 174161 - DNA, 201 bp, Homo sapiens
ggattacaggcgtgagccaccgcgcctggccaaaaaaaaaaaaaaattttttttttttgagacaggatctcattctgttgccaaggctggtgtgcagtggygtgaccacagctcactacagccttgacttccattttgtagaaatggaatctcactatgttgcccaggccggtcttgaacttctgagcttgagtgatcctc

SEQ ID NO: 174162 - DNA, 201 bp, Homo sapiens
gcatgaaggttgaggggaggctttcactctgtgaacttgaaattggttgtaatcccatattctttgattagaacgtgaaaagtaatttgataaagcatgcstgtgtatcatcttggcacatgctacctttaatacttcaattcataatgtttttattcctggagccactaaatggtgggaggtggtaaaccaggtcagtag

SEQ ID NO: 174163 - DNA, 201 bp, Homo sapiens
gcccccagccccaccccagcttgcctagtttagcttcaagttcacttgccctacaaatctttttctttctttttttgagatggagtcttgctctgttaccyagctgcagtgcagtggcgagatctcggctcactgcatcctccacctcccaggctcaagcgattctcctgcctcagccttctgagtagttgggactacagg

SEQ ID NO: 174164 - DNA, 201 bp, Homo sapiens
aagagaagtggctgctttttctctttttgttttaatgatcactttctgctacctgctgaataaagatgatctatgctaaaagggtgacaggaagaacctgrtgtacctataagtagtacctgaggagcgcagtaagtatggcagatgtaatctgggtggcagacagagagggggtatgggagctctggggtgcatgagaga

SEQ ID NO: 174165 - DNA, 201 bp, Homo sapiens
gtgtgataccttgtggaagcaaaaagcgatcaaggtctcttcaaataagattatgacacaaagccagagagttgatatgtccctgaggtaggacagtgaakgtatattgttggtcttgccagctgaaggcaaattgcttctggtgggcctcatggacaggaatggagaaaaagccatttgccaagtcaatggctgtatacc

SEQ ID NO: 174166 - DNA, 201 bp, Homo sapiens
ataaatctttcccagctaaggtattaataaaaggggagtattttgttgtgattgttgccatgttgtcatgccaggaaagttccttgtgtggtaactctttyttagaaaattttttgctatctctaaaagtttcttttccttgttcctttatacatttgcgaatgatttggttatatttaaaattccaatgtaatgagaaca

SEQ ID NO: 174167 - DNA, 201 bp, Homo sapiens
tttaatctgaacctagtagcagtagccttgtgaaatttgttcctattcatgaagaatgagcaatcaggtaaggagagaactgcccataccactaggagagyaccatatgttagtggaaacccaaccaaggcacatcctggccccaatgtgccaactgtcccagatcacccttgttttttaaacagcagcaccagtactgcc

SEQ ID NO: 174168 - DNA, 201 bp, Homo sapiens
acctctcagtccatacccacttgtgcatgtgagcacgtgtactggggatgctggggtttaccagccttggggctgccagcacttcgccctgcagtcattgygaaggagcctggattggttaaatatttttgaggtagaggacagtgactttagcttaagttaagttttagtcatttccatgttcaggagtagtaactactt

SEQ ID NO: 174169 - DNA, 201 bp, Homo sapiens
ccacttcctcatgtaacttgtgccttcaagatctgctcgagcccagtcatgtgtataccacttccatttgatgatggaatgttgctgtgcacgacccactktatggctagatggtcagaaagtgcccaattcatgatgggcagttcaggtcgcatggtgacttgacccatagtcaaacattcagtttctaccaaagcccag

SEQ ID NO: 174170 - DNA, 201 bp, Homo sapiens
gtggtggtgtgtgcctgtagttagtcccagttactcgggaggctcaggcaggagaatcccttgaacccaggaggcagaggttgcagtgagccaagatcacrccactgcatttcagcctggcgacagagtgagactccatctcaaaaaaaaaaagaagataaaggtaggaaggggtgagaaggcaatgtatttttaagtata

SEQ ID NO: 174171 - DNA, 201 bp, Homo sapiens
ggcaaaatgatcctactgaaagcccttggcttttgttctagagtttgttttcagtccaagaacaatccagaaatatcttagggactccctagaagagtctsttaaaggtcattgggacagagttctaaagttttcacaaatgcacttgagtttttagaagagacatgaacagagctttaagaggatcatagatctgtctgg

SEQ ID NO: 174172 - DNA, 201 bp, Homo sapiens
agaagagaagtggctgctttttctctttttgttttaatgatcactttctgctacctgctgaataaagatgatctatgctaaaagggtgacaggaagaaccwgatgtacctataagtagtacctgaggagcgcagtaagtatggcagatgtaatctgggtggcagacagagagggggtatgggagctctggggtgcatgaga

SEQ ID NO: 174173 - DNA, 201 bp, Homo sapiens; identical to SEQ ID NO: 31100

SEQ ID NO: 174174 - DNA, 201 bp, Homo sapiens
ctggaggcatatacagagtgtggtttgggtatctagcaaaggggcacctcagtgttctgatggagagagttttgaccacagaaagcctcacaggacctgamctgtgtggacagtggatttgacagtgagttggatggacaggagtggagacagtgggttgggtggtcccagaggatgcagtaggggccagttggaggcagt

SEQ ID NO: 174175 - DNA, 201 bp, Homo sapiens
gggagacttgaccaagaagagcccgagaaagtgagtgttagcctgtattaggattccctagagggatagaactaataggatatatatctcctatatatatytggagtttattaagtattaacttacatgatcacagggtcccacaacaggctgtctgcaagtctgaggagcaaggagagccagtcagagtctcaaaactga

SEQ ID NO: 174176 - DNA, 201 bp, Homo sapiens
ccactagctctagtttttgcttacgttgcatgaaggttgaggggaggctttcactctgtgaacttgaaattggttgtaatcccatattctttgattagaaygtgaaaagtaatttgataaagcatgcgtgtgtatcatcttggcacatgctacctttaatacttcaattcataatgtttttattcctggagccactaaatg

SEQ ID NO: 174177 - DNA, 201 bp, Homo sapiens
gttgaaacacctttgagtgagagagctcatccagggaacacagggtttgtgaggaagtaagaggaccctgcccagaagggagacttgaccaagaagagccygagaaagtgagtgttagcctgtattaggattccctagagggatagaactaataggatatatatctcctatatatatctggagtttattaagtattaactt

SEQ ID NO: 174178 - DNA, 201 bp, Homo sapiens
ttcttagaaaattttttgctatctctaaaagtttcttttccttgttcctttatacatttgcgaatgatttggttatatttaaaattccaatgtaatgagarcacttagttattgacttttttcattattaacatttggcctttgacattttgctagtttcattgtgtggacttatttttcttccctcttccctaatttttt

SEQ ID NO: 174179 - DNA, 201 bp, Homo sapiens
cttaactgttttgggattcgttcagtgacatttattgagtttccattgaacaaggggtcttcaaaaagttcatggaaaatgtatattatgaaaaaactacrcatgaattccaaaacttttttaccccaaaataactcatactaacttactataacatgcctgagcaggatctggtttgaggagctaagaagggtaagaaat

SEQ ID NO: 174180 - DNA, 201 bp, Homo sapiens
gtatcacatttaagcaatgtggtcaatttctctttgtgtctttttaaaacatttaaacatttaaaaaatttttgtgggtatagtaggtgtatatatttaaygggatacatgaaatatttgggctgggcatggtggctgacacctgtaatcccagcactttgggccggctgaggtgggtggatcacctgaggtcagaagttg

SEQ ID NO: 174181 - DNA, 201 bp, Homo sapiens
agaaggaaaagccccatttgtatttagagggggacctgcgtcagtttgggtaagaacaaggaactgtctacttcactttcccacaaggtcagagctggctrttctggtaccacaggtctcttccttctctttttcattctcctcctaacaaacctttctcccatcccacttccctgtaaacgcataggatggtatgtggcc

SEQ ID NO: 174182 - DNA, 201 bp, Homo sapiens
ctctccatctctctccaggctttccctccccgcctccttattgtggcagtgatcacacggccaccctcctcttctccccttcctcagcataccatttgccyagtggtgagcattttggtttcttcctttaaaagtttttgaactatgtagtatttatatttgttgacttgcagtaatttataaagtgaataatgttcgttt

SEQ ID NO: 174183 - DNA, 201 bp, Homo sapiens
caccctgttgtgctatcacttactagatcttattctaactgtgtttttgtacccattaaacatccccacttccctttcccctgctacccttcccagctttkggtaaccatcattctgtctccatgagttcaaatgttttaatttttagctcccacaaataagtgaggacgtgcaaagtttgtctttctgcgcctggcgtag

SEQ ID NO: 174184 - DNA, 201 bp, Homo sapiens
ttaaatactttggtgaattacatggttggtaaattatatctttttttttttttttttagacggagtctcgctctgtcacccaggctggagtgcagtggcgygatctcggctcactgcaagctccgcctcccaggttcacaccattctcctgcctcagcctcccaagtagctgggactacaggcgcccgccatcacgcccag

SEQ ID NO: 174185 - DNA, 201 bp, Homo sapiens
atgagagatctgatcagggactgcttccgtaaagaccacctggggcctgaggcatttgcatatgtatctttaaattcaagatatgtgtgttttctccaggrgaaagtgctcttaaaatgggtcttatttttagtcctagttgtaaaatacaaaccatttcctctgttagcacttgatgtggagtcagggtcatcttaaagt

SEQ ID NO: 174186 - DNA, 201 bp, Homo sapiens
gggaggctgatcacaaggtcaggagatcaagaccatcctggctaacatggtgaaaccccgtctctactaaaaatacaaaaaaattagccatgcgtggtggygggcgcctgaaatcccagctacttgggaggctgaggcaagagaatagcatgaacctgggaggcggagcttgcagtgagcagagatcacaccactgcactc

SEQ ID NO: 174187 - DNA, 201 bp, Homo sapiens
tgcagtgctcttcgtctctgtacagccttctctgctcggtgatggatgggatatttgccaatacatttggttctgacttttttttttttttttttttttgkgaaagaccatctataagaaaactcaccgatgaactaacagtgtaaaatattcaacctcactagttggggaagacatggaaattttttaaaaccatggggc

SEQ ID NO: 174188 - DNA, 201 bp, Homo sapiens
ctggggatgacacttaactctgttaaaataagaaaacctctgctttcttattttaaaaatagcagcaataagtcttgtgagaattataaattgttagtggrtggcacataaggtgcagtcattaattgggaattaattaagagtaaaactgcatattattgaggacagattatgcttagagaattacactgacataaaata

SEQ ID NO: 174189 - DNA, 201 bp, Homo sapiens
cggctcaattttttatattttatatgactacaaaaaacttatatctacattttatttatatttgtatttttatatttttagtagcgagggggattttgccrtgttgcccaggctggtcttgaactcctgaactcaggtgatattacaatgtgagctaccatgcccagtccaagttttttgttgttgtttgtttgtttgttt

SEQ ID NO: 174190 - DNA, 201 bp, Homo sapiens
gtgaagaatacagtgagcatcagtacagttgggtggccctgccttgattggtactgtcaccagcaattttaccaccactgcttttgtaccaaaagtcaccwcggtacatatgacaaattatatcttagcgttattatgaaaatagctgtggcctctcagaccacctgaaaggatcttgagacctcccagcgtagtgtatac

SEQ ID NO: 174191 - DNA, 201 bp, Homo sapiens
aaatgaattggtatatattagagatgggtcattttgcaactctgagtaaccagatacacaacttaaatattgactcaggcccattggagacctgtgattttgggccactcctcagaaacatagttctgagaagcgattaggttggcaacttttttgatgctagaccagctgtgtgatatgggttccagcaggtgtgtctcc

SEQ ID NO: 174192 - DNA, 201 bp, Homo sapiens
acgttttttagcactttgcttttgagaaattagactatgttttaaaattttccctagaaattcagagttcttagaaaacctgacacactgggctgggcacrgtggccaatgcctgcaatctcagcactttgggaggccgaggtgggtggatcacctgaggtcaggagttcgagaccagcctgaccaacatggcgaaaccct

SEQ ID NO: 174193 - DNA, 201 bp, Homo sapiens
catgatctttttgtgttatataaattaactcatggtcagatgactagaaatggagctataaattacttttccaaggaatggaactcagttcctacaatgtraaaagacagctggcctggcgcgatggctcactcctgtaatcccagcactttgggcacctgaggcaggtggatcacttgaggtcaggagtttgaggccaac

SEQ ID NO: 174194 - DNA, 201 bp, Homo sapiens
ttcatctatagattttcaagccatcatatttttcttgcaatatgttgaagaaacttgactgacagttttccacagcctgggttttgatgatcacatccccrtggtgatatttatttgttgccccatctcctatgaactgatctacatcacacatgcagcatgcatacaaatgccattgattattttccattgtaacttaac

SEQ ID NO: 174195 - DNA, 201 bp, Homo sapiens
ttttttttttttttgagacggagtttcactcttgttgcccaggctggagtgcaatggcgcaatctcggctcaccacagcctccgcctcccgggttcaagcrattctcctgcctcagcctcccgagtagctgggattagaggcatgcaccactacactctgctaattttgtatttttagtagagacaggatttctccacgtt

SEQ ID NO: 174196 - DNA, 201 bp, Homo sapiens
accatgcctgtctaatttttctgctttttgtagagatggggtttcaccatgttgcccaggctggttttgaactcctgggctcaagcgatcctctcacctcrgccttccaaacttctaggattacaggcatgagccatcatgcctggccatgaataatattgatatgaacattcaattataaatttttgtgtagatgtatgt

SEQ ID NO: 174197 - DNA, 201 bp, Homo sapiens
ttcacagaatctttaaaaattgtggtaaaatacacataacataaaacttcccatagtgacatttagtatattctcagtgttgtgcaaacattaccacagtytgttccagaacatttccacatctccatgctgtctaccctggcttttcacccagtctgttcttccctgccttcacttcttttcaaggaagacctgtataat

SEQ ID NO: 174198 - DNA, 201 bp, Homo sapiens
tgtaattgtgacttcaaaaggctattacaccattctgtcaatccagctgcttcaggatgatagggaacatggtaagaccagtgaattccatgagtacgaayccactgccgcacttctttagccgcaaagagagtgccttggtcagaggcaatgctgtgtggaataccatgatggtggataaggcattccgtgagtccatgg

SEQ ID NO: 174199 - DNA, 201 bp, Homo sapiens
ttgaccaggaactttgtttttttctatttactgtttcacgcagagaatagtaagggagttggcccttcacgcctcagatgagatgagacagttatgattargagttattacatgtgccccagatggaaaatgagttatagttggatatcaccaagggactatgctttctgcccttctgctccagaagaggagataaaaagg

SEQ ID NO: 174200 - DNA, 201 bp, Homo sapiens
cctctgggagctaataaatgaggcttgtggatttgtaaagatgcattttgaaaacattttgaaactcactttcactgcttctcccttgtctcccatccccrttgtcttctgggccctcactgcggggtggacaggaggcttctccttccacgttggtctccaagatcaaaccctgtcagttagtgtgtgggcaggtgggga

SEQ ID NO: 174201 - DNA, 201 bp, Homo sapiens
ttgagtttccaagtagccctctgaaatgaatacaggttgagtatttctaatctgaaaatccaaaatcccttgagtgtcatgtttggattaagaatactcarcttgtccattttagggctgagaactgatttgcataacgcgtaaacagcagaatactgaaagaccaggtaccaggttgaatttgtgtatgtggtttgttac

SEQ ID NO: 174202 - DNA, 201 bp, Homo sapiens
gcgctttctaaatgataaagcacactagaaactactctccctgctcatcaagggctcgcctctgggagctaataaatgaggcttgtggatttgtaaagatrcattttgaaaacattttgaaactcactttcactgcttctcccttgtctcccatccccgttgtcttctgggccctcactgcggggtggacaggaggcttct

SEQ ID NO: 174203 - DNA, 201 bp, Homo sapiens
ttgagacctcccagcgtagtgtatactacacttcgaaaacggatgctttagaggaatgaaaatgagagtctctatctttcagtctttcatagaggggtctrgaaaagaggatatgctctgtgggaagaaacagaggtgaactgttcacatatgtaggaataggctgcttctccatccctgcagtatatgaaatgtagatac

SEQ ID NO: 174204 - DNA, 201 bp, Homo sapiens
ctttttgctgcacattgaacatgatagttagtggaataagtgaggaatgttacctcgtgtttcacagctgcagaagtaaggttgtcaacatctactaactrggtagttggtagggagtgtcagagttaaaggcgcagaggcttaagggcaactctagacccttctgtaaaactagtttatggtttaagaagctcccaccac

SEQ ID NO: 174205 - DNA, 201 bp, Homo sapiens
acaaaagaagccttagtctgctctgcccttggagtagccattctttattcctttacttgaaaaaaaaaaaaggagccttagtaggtgaacaagtaggcatagctgtgttccagtgtttacgagaacaggcgccaggccagatttggccggaggggtggccagtttgctgacctatgctatgagccacaaatgtcagaaagt

SEQ ID NO: 174206 - DNA, 201 bp, Homo sapiens
tctgatttaatagttcttggatggagcctggacattggtaatcttttaatcttcccacttgatttgaatgagcagcctgagtttaagagcagttgatctgyggagaggtttttacttcaatgactacacctgaaaaagggatgccttaccagtcacccattcagtcagacttataagaaaatatttcaagtacttcagaac

SEQ ID NO: 174207 - DNA, 201 bp, Homo sapiens
atcagttttgtggtaagagtttcctttacaagcaatggatgctacattgattttctcttttgcaatgggaaactggagaccatgtttgttagaattggtasatagcagcgaagaatgtaggctctgagttcaatggagcttgcagatccttggttagtaacttttttttttgagacacggttttgctctgtttctcaggct

SEQ ID NO: 174208 - DNA, 201 bp, Homo sapiens
aagtttggggggaatagcacagttgtaaaatagctctgttgtcttttttcccccagctactcagttactccacttcccatcatccccaccctccccaccaycccacataaatacacacaaaggacggagtccttctcatcactggcctgctctctgtcgttcagggtctcctttccgtggcaggaccgttaagaaatttct

SEQ ID NO: 174209 - DNA, 201 bp, Homo sapiens
gcaaggggtggcgatgagctgattttgaaatgtcaatttgaaggatatgagggacattctggtgcaggtggccaggaggctgttgaggtgtccaggcctasagctctgaaggcagatctggagtgaagtaccacttggggatcatcagcctatactgttgaaacacctttgagtgagagagctcatccagggaacacaggg

SEQ ID NO: 174210 - DNA, 201 bp, Homo sapiens
cacaggccaaataggagagttgaacagggatgtgggaatcactacccctgcgtctttcaagtccttgatggtggcattaatctctgcagtccctccagggwtgtgatactgttttcgatttactatttttctaggtagaggcagctctaacggcttctgtttagccttttccaccataatagccctcaccctaccagttag

SEQ ID NO: 174211 - DNA, 201 bp, Homo sapiens
cggggctggcctggtcttggggagagcctcaccattaaaagtatttcaccattaaaagtattgggaggtgaaagcacaggaagccttgcttacatgtcttyccccatggacttggcagagacactttttctgggactattttaaaccctaatgaggccctgtcttcattatttccttcaaactgtgatctcttgagaggct

SEQ ID NO: 174212 - DNA, 201 bp, Homo sapiens
ggaggcagaggttgcagtgagctgagatcgtgccactgcactccagcctggcaacagagtgagactccatctcaaaaaaaaaaaaaaaaaaaaaaaaaaaaagtagcttgtaacataaacgaaaagctcctgagggtatgtgatattttagtgtgtattctgaaagcatggcttaatgttattcattttaaacccttaaac

SEQ ID NO: 174213 - DNA, 201 bp, Homo sapiens
gggaggcagaggttgcagtgagctgagatcgtgccactgcactccagcctggcaacagagtgagactccatctcaaaaaaaaaaaaaaaaaaaaaaaaaaaaagtagcttgtaacataaacgaaaagctcctgagggtatgtgatattttagtgtgtattctgaaagcatggcttaatgttattcattttaaacccttaaa

SEQ ID NO: 174214 - DNA, 201 bp, Homo sapiens
ggagtctggggatggaaacaaggtgccatagcattgtggaagagactttgattttgcaaagttctgatccaggctcagccacttggtggtgaccttagacrtgtaacttcacctatccgagacttccttttcttacctgtaacgtgaataggtgtcttccctgcaggctgatttagaggatgagaagaaataaaccatata

SEQ ID NO: 174215 - DNA, 201 bp, Homo sapiens
aggagatgtactctacagacaaggcattgaaaaaacacagaaagagtgtgacaacccagaattattattgaggcagcagtgctggcctccagggaggaaaytgagggtgagaacaggagtgatactgacttttcactgaataccttttttaatcttgtgtcttacgcatatattatctgtgtttttaaaaaccatgattaa

SEQ ID NO: 174216 - DNA, 201 bp, Homo sapiens
ggtaggaagggtgctgagagcacagggagccccatccagctgaggaccctttctgtggatgcccccacctccaggctctaccctgtgggtctgtttttggwgcgagtggtgagctcagacttggtgcttcagaactaccacatcccagctggggtgagtgagccccacacccctcgagctgagaacctccctccccagtca

SEQ ID NO: 174217 - DNA, 201 bp, Homo sapiens
gcttctcaagttaggggaggtttggctgggctcagcaggtgcaaggaagcacttcctacgacctgggcttcccatggatctgggacctctgcggggtcttsggtaggaagggtgctgagagcacagggagccccatccagctgaggaccctttctgtggatgcccccacctccaggctctaccctgtgggtctgtttttgg

SEQ ID NO: 174218 - DNA, 201 bp, Homo sapiens
aaccgattgcggctgaacccagatgtgctgtcgcccaaggccgtgcagaggttcctcccgatggtggatgcagtggccagggacttctcccaggccctgargaagaaggtgctgcagaacgcccgggggagcctgaccctggacgtccagcccagcatcttccactacaccatagaaggtgtgggccatgcgggaaggtcc

SEQ ID NO: 174219 - DNA, 201 bp, Homo sapiens
tggggattaacgtggggcatgtccttctgcgcttggggcttctcaagttaggggaggtttggctgggctcagcaggtgcaaggaagcacttcctacgaccygggcttcccatggatctgggacctctgcggggtcttcggtaggaagggtgctgagagcacagggagccccatccagctgaggaccctttctgtggatgcc

SEQ ID NO: 174220 - DNA, 201 bp, Homo sapiens
ttcctccccctcaaggacagggagctcttcttcctctggaatccctcttcaacaccctggggattaacgtggggcatgtccttctgcgcttggggcttctyaagttaggggaggtttggctgggctcagcaggtgcaaggaagcacttcctacgacctgggcttcccatggatctgggacctctgcggggtcttcggtagg

SEQ ID NO: 174221 - DNA, 201 bp, Homo sapiens
cagtcagctccctgcaggccgattccccttggggacaaggaggatgggatacgggtcagggcctgtgtcttgctggggcggcctcacaagctctgccctgscctctgtaggaatgggcctgaatggcgcttcaaccgattgcggctgaacccagatgtgctgtcgcccaaggccgtgcagaggttcctcccgatggtggat

SEQ ID NO: 174222 - DNA, 201 bp, Homo sapiens
ctcttcctccccctcaaggacagggagctcttcttcctctggaatccctcttcaacaccctggggattaacgtggggcatgtccttctgcgcttggggctkctcaagttaggggaggtttggctgggctcagcaggtgcaaggaagcacttcctacgacctgggcttcccatggatctgggacctctgcggggtcttcggt

SEQ ID NO: 174223 - DNA, 201 bp, Homo sapiens
gaggctggcctatagatgacatctgggagagagtcaggacccaggaaggcaggtccaggaggctgggtgcgcataatggaaggaaggggagcgctcctgtmtgtgtgtgtgtcttgcatctgtgcacatgctgtgtgtttctctgtacctgcatttgcacatgtgtagtgtgtgcacgtgtctgtgtgtgaatgtatgtgt

SEQ ID NO: 174224 - DNA, 201 bp, Homo sapiens
gagcagggagatttgggtgtcggggcagtctgggcaggaggaggacactgaaggatgcttcccagcaccaagatctgagggctgtcccctgctccctggayaggtgacaactgtatccagaaaatctaccaggaactggccttcaaccgccctcaacactacacaggcatcgtggcagagctcctgttgaaggcggaactg

SEQ ID NO: 174225 - DNA, 201 bp, Homo sapiens
gagggtggacaggagacactttggattgggactgcagggtggggccacgagggacatgaccctgtccagcagggcctcctgcttggccccacaggtacaayttgggaggaccacgcatggtgtgtgtgatgctgccggaggatgtggagaagctgcaacaggtggacagcctgcatccctgcaggatgatcctggagccct

SEQ ID NO: 174226 - DNA, 201 bp, Homo sapiens
gcacctgctcttcctccccctcaaggacagggagctcttcttcctctggaatccctcttcaacaccctggggattaacgtggggcatgtccttctgcgctyggggcttctcaagttaggggaggtttggctgggctcagcaggtgcaaggaagcacttcctacgacctgggcttcccatggatctgggacctctgcggggt

SEQ ID NO: 174227 - DNA, 201 bp, Homo sapiens; identical to SEQ ID NO: 31112

SEQ ID NO: 174228 - DNA, 201 bp, Homo sapiens; identical to SEQ ID NO: 31113

SEQ ID NO: 174229 - DNA, 201 bp, Homo sapiens
gggagcattggaatggcactcagggcaaaggcagaggtgtgcgtggcagcgccctggctgtccctgcaaagggcacgggcactgggcactagagccgctcrggcccctaggacggtgctgccgtttgaagccatgccccagcatccaggcaacaggtggctgaggctgctgcagatctggagggagcagggttatgagcac

SEQ ID NO: 174230 - DNA, 201 bp, Homo sapiens
tggagggagcattggaatggcactcagggcaaaggcagaggtgtgcgtggcagcgccctggctgtccctgcaaagggcacgggcactgggcactagagccrctcgggcccctaggacggtgctgccgtttgaagccatgccccagcatccaggcaacaggtggctgaggctgctgcagatctggagggagcagggttatga

SEQ ID NO: 174231 - DNA, 201 bp, Homo sapiens
attggtacaggttttcctctactcgctgggtcgcaatgccgccttgttcccgaggcctgagcggtataatccccagcgctggctagacatcaggggctccrgcaggaacttccaccacgtgccctttggctttggcatgcgccagtgcctcgggcggcgcctggcagaggcagagatgctgctgctgctgcaccacgtaag

SEQ ID NO: 174232 - DNA, 201 bp, Homo sapiens
tgctggggcggcctcacaagctctgccctggcctctgtaggaatgggcctgaatggcgcttcaaccgattgcggctgaacccagatgtgctgtcgcccaasgccgtgcagaggttcctcccgatggtggatgcagtggccagggacttctcccaggccctgaagaagaaggtgctgcagaacgcccgggggagcctgaccc

SEQ ID NO: 174233 - DNA, 201 bp, Homo sapiens; identical to SEQ ID NO: 31119

SEQ ID NO: 174234 - DNA, 201 bp, Homo sapiens
tctgggcaggaggaggacactgaaggatgcttcccagcaccaagatctgagggctgtcccctgctccctggacaggtgacaactgtatccagaaaatctaycaggaactggccttcaaccgccctcaacactacacaggcatcgtggcagagctcctgttgaaggcggaactgtcactagaagccatcaaggccaactcta

SEQ ID NO: 174235 - DNA, 201 bp, Homo sapiens
cactgaaggatgcttcccagcaccaagatctgagggctgtcccctgctccctggacaggtgacaactgtatccagaaaatctaccaggaactggccttcarccgccctcaacactacacaggcatcgtggcagagctcctgttgaaggcggaactgtcactagaagccatcaaggccaactctatggaactcactgcaggg

SEQ ID NO: 174236 - DNA, 201 bp, Homo sapiens
gagggctgtcccctgctccctggacaggtgacaactgtatccagaaaatctaccaggaactggccttcaaccgccctcaacactacacaggcatcgtggcrgagctcctgttgaaggcggaactgtcactagaagccatcaaggccaactctatggaactcactgcagggagcgtggacacggtcaggccagcaaccagcc

SEQ ID NO: 174237 - DNA, 201 bp, Homo sapiens
tcagggcctgtgtcttgctggggcggcctcacaagctctgccctggcctctgtaggaatgggcctgaatggcgcttcaaccgattgcggctgaacccagawgtgctgtcgcccaaggccgtgcagaggttcctcccgatggtggatgcagtggccagggacttctcccaggccctgaagaagaaggtgctgcagaacgccc

SEQ ID NO: 174238 - DNA, 201 bp, Homo sapiens
cctggacaggtgacaactgtatccagaaaatctaccaggaactggccttcaaccgccctcaacactacacaggcatcgtggcagagctcctgttgaaggcrgaactgtcactagaagccatcaaggccaactctatggaactcactgcagggagcgtggacacggtcaggccagcaaccagccccacccagagagggtgat

SEQ ID NO: 174239 - DNA, 201 bp, Homo sapiens
cctgtgcaaggtctgaccctgcagacatggcttctgtagacagcgtttcccttgctgatgacgctctttgagctggctcggaaccccgacgtgcagcagaycctgcgccaggagagcctggccgccgcagccagcatcagtgaacatccccagaaggcaaccaccgagctgcccttgctgcgggcggccctcaaggagacc

SEQ ID NO: 174240 - DNA, 201 bp, Homo sapiens
gaacttcctccatgccctggaggtcatgttcaaatccaccgtccagctcatgttcatgcccaggagcctgtctcgctggatcagccccaaggtgtggaagkagcactttgaggcctgggactgcatcttccagtacggtgaggccagggacccgggcagtgctatggggaagggacaccatgggggcccaatttctccttc

SEQ ID NO: 174241 - DNA, 201 bp, Homo sapiens
tctaaacattgaaatggggactaggggagtggggtggagcctgtacagaataatggggcttgggcaagacctgggcaggattcagtctgggcctggtccgyaaggtggggctggtcagaaatgggataggttggggcccaggctgctgctcccccttcagcataattgttgcacctgggacgatgggaggaagctgcccca

SEQ ID NO: 174242 - DNA, 201 bp, Homo sapiens; identical to SEQ ID NO: 31129

SEQ ID NO: 174243 - DNA, 201 bp, Homo sapiens
ctaggggagtggggtggagcctgtacagaataatggggcttgggcaagacctgggcaggattcagtctgggcctggtccgcaaggtggggctggtcagaartgggataggttggggcccaggctgctgctcccccttcagcataattgttgcacctgggacgatgggaggaagctgccccaggtccatgggctactgacca

SEQ ID NO: 174244 - DNA, 201 bp, Homo sapiens
aggagcactttgaggcctgggactgcatcttccagtacggtgaggccagggacccgggcagtgctatggggaagggacaccatgggggcccaatttctccytctccaccacccagtggggaatggaggccacagggaggggtcggggattcctcaccttcctgccagggagattggtgtgaggctggggctgggctgggct

SEQ ID NO: 174245 - DNA, 201 bp, Homo sapiens
caagcctgcctcccaggcactgcctgccaatgccacacggcacccacgttccccatccccaggctacaggccccacatttctgttgccctcagccttcccyctcctttgttaagggatgagatttgcaggggaggggaaatgtgagctccccctcacatgagactgagtttgcagttacctgtgtggggatccatgctcca

SEQ ID NO: 174246 - DNA, 201 bp, Homo sapiens
gggaggggtcggggattcctcaccttcctgccagggagattggtgtgaggctggggctgggctgggctgatccggagaatttgggatgagagcagggagayttgggtgtcggggcagtctgggcaggaggaggacactgaaggatgcttcccagcaccaagatctgagggctgtcccctgctccctggacaggtgacaact

SEQ ID NO: 174247 - DNA, 201 bp, Homo sapiens
aatgccacacggcacccacgttccccatccccaggctacaggccccacatttctgttgccctcagccttccccctcctttgttaagggatgagatttgcargggaggggaaatgtgagctccccctcacatgagactgagtttgcagttacctgtgtggggatccatgctccaggctggaagaaagttggatgaggccctg

SEQ ID NO: 174248 - DNA, 201 bp, Homo sapiens
aggtgtgggccatgcgggaaggtccagccccagagaccctggagtggccagggatggggatggaggactgaagggagtgtggggaggcagccaggaggccyggggctgccttgtgctcagcagtgcatcctccccgcagccagcaacttagctctttttggagagcggctgggcctggttggccacagccccagttctgcc

SEQ ID NO: 174249 - DNA, 201 bp, Homo sapiens; identical to SEQ ID NO: 31103

SEQ ID NO: 174250 - DNA, 201 bp, Homo sapiens
gaggctggggctgggctgggctgatccggagaatttgggatgagagcagggagatttgggtgtcggggcagtctgggcaggaggaggacactgaaggatgyttcccagcaccaagatctgagggctgtcccctgctccctggacaggtgacaactgtatccagaaaatctaccaggaactggccttcaaccgccctcaaca

SEQ ID NO: 174251 - DNA, 201 bp, Homo sapiens
gaaggtgtgggccatgcgggaaggtccagccccagagaccctggagtggccagggatggggatggaggactgaagggagtgtggggaggcagccaggaggyctggggctgccttgtgctcagcagtgcatcctccccgcagccagcaacttagctctttttggagagcggctgggcctggttggccacagccccagttctg

SEQ ID NO: 174252 - DNA, 201 bp, Homo sapiens; identical to SEQ ID NO: 31105

SEQ ID NO: 174253 - DNA, 201 bp, Homo sapiens
gattgacacctgggaacagtggatggggccttggttggttgaggtcggcgtgaccagggaggatctgtgctgagcaagacagggtaggatctgggtgaggytgcttctaaacattgaaatggggactaggggagtggggtggagcctgtacagaataatggggcttgggcaagacctgggcaggattcagtctgggcctgg

SEQ ID NO: 174254 - DNA, 201 bp, Homo sapiens
actataagtaaaacttgtaagttaaggagaagtgtcctggtgttagtgtatgtggagacaggtgattttgttttatattttgagtatctgtgaggcaagakattcccagagtgctttaccttgaaggggccaactcttagacataatccagccattagtagtaagaaggaagatggggacatttgttggacatccagcgtt

SEQ ID NO: 174255 - DNA, 201 bp, Homo sapiens
tggacgtccagcccagcatcttccactacaccatagaaggtgtgggccatgcgggaaggtccagccccagagaccctggagtggccagggatggggatggrggactgaagggagtgtggggaggcagccaggaggcctggggctgccttgtgctcagcagtgcatcctccccgcagccagcaacttagctctttttggaga

SEQ ID NO: 174256 - DNA, 201 bp, Homo sapiens
ctactgaccaggccagatggaaacccagcctctgtcctaggtgctgaagcacttcctggtggagacactaactcaagaggacataaagatggtctacagcktcatattgaggcctggcacgtcccccctcctcactttcagagcgattaactagtcttgcatctgcacccagggtcccagcctggccaccagcttccctct

SEQ ID NO: 174257 - DNA, 201 bp, Homo sapiens; identical to SEQ ID NO: 31107

SEQ ID NO: 174258 - DNA, 201 bp, Homo sapiens
gcctgaccctggacgtccagcccagcatcttccactacaccatagaaggtgtgggccatgcgggaaggtccagccccagagaccctggagtggccagggayggggatggaggactgaagggagtgtggggaggcagccaggaggcctggggctgccttgtgctcagcagtgcatcctccccgcagccagcaacttagctct

SEQ ID NO: 174259 - DNA, 201 bp, Homo sapiens; identical to SEQ ID NO: 31108

SEQ ID NO: 174260 - DNA, 201 bp, Homo sapiens; identical to SEQ ID NO: 31109

SEQ ID NO: 174261 - DNA, 201 bp, Homo sapiens
aaggtgctgcagaacgcccgggggagcctgaccctggacgtccagcccagcatcttccactacaccatagaaggtgtgggccatgcgggaaggtccagccycagagaccctggagtggccagggatggggatggaggactgaagggagtgtggggaggcagccaggaggcctggggctgccttgtgctcagcagtgcatcc

SEQ ID NO: 174262 - DNA, 201 bp, Homo sapiens
cgaggcctgagcggtataatccccagcgctggctagacatcaggggctccggcaggaacttccaccacgtgccctttggctttggcatgcgccagtgcctygggcggcgcctggcagaggcagagatgctgctgctgctgcaccacgtaagcaggcctgggggcgggggcgggacctgggcagcagaggcgggacctgcac

SEQ ID NO: 174263 - DNA, 201 bp, Homo sapiens
tgaagaagaaggtgctgcagaacgcccgggggagcctgaccctggacgtccagcccagcatcttccactacaccatagaaggtgtgggccatgcgggaagrtccagccccagagaccctggagtggccagggatggggatggaggactgaagggagtgtggggaggcagccaggaggcctggggctgccttgtgctcagca

SEQ ID NO: 174264 - DNA, 201 bp, Homo sapiens
aggccctgaagaagaaggtgctgcagaacgcccgggggagcctgaccctggacgtccagcccagcatcttccactacaccatagaaggtgtgggccatgcrggaaggtccagccccagagaccctggagtggccagggatggggatggaggactgaagggagtgtggggaggcagccaggaggcctggggctgccttgtgc

SEQ ID NO: 174265 - DNA, 201 bp, Homo sapiens
caggccctgaagaagaaggtgctgcagaacgcccgggggagcctgaccctggacgtccagcccagcatcttccactacaccatagaaggtgtgggccatgygggaaggtccagccccagagaccctggagtggccagggatggggatggaggactgaagggagtgtggggaggcagccaggaggcctggggctgccttgtg

SEQ ID NO: 174266 - DNA, 201 bp, Homo sapiens; identical to SEQ ID NO: 31116

SEQ ID NO: 174267 - DNA, 201 bp, Homo sapiens
cccaggccctgaagaagaaggtgctgcagaacgcccgggggagcctgaccctggacgtccagcccagcatcttccactacaccatagaaggtgtgggccaygcgggaaggtccagccccagagaccctggagtggccagggatggggatggaggactgaagggagtgtggggaggcagccaggaggcctggggctgccttg

SEQ ID NO: 174268 - DNA, 201 bp, Homo sapiens
tggctagacatcaggggctccggcaggaacttccaccacgtgccctttggctttggcatgcgccagtgcctcgggcggcgcctggcagaggcagagatgcygctgctgctgcaccacgtaagcaggcctgggggcgggggcgggacctgggcagcagaggcgggacctgcacactgggggcggggcttgcatggtgtgatt

SEQ ID NO: 174269 - DNA, 201 bp, Homo sapiens
cgaccattcttgcaggagtaaggtggtatcacattgtggttttgatttgcatttgactgatcattagtgatgttgagaatgttttcatatgtttgttggcyatttgtttatcttcttttgagaactgtctattcatgtccttagcccactttttgatgggtttgtttgtttgtttcttgctaatttgtttgagttgattgt

SEQ ID NO: 174270 - DNA, 201 bp, Homo sapiens
gcgccaggagagcctggccgccgcagccagcatcagtgaacatccccagaaggcaaccaccgagctgcccttgctgcgggcggccctcaaggagaccttgmggtgggtgctggctgaggcctccctgtggccctggccccctgctggagagcagcccccactgggtggtggcagacagaatctggggctgataaacagcgt

SEQ ID NO: 174271 - DNA, 201 bp, Homo sapiens
ctacgacctgggcttcccatggatctgggacctctgcggggtcttcggtaggaagggtgctgagagcacagggagccccatccagctgaggaccctttctrtggatgcccccacctccaggctctaccctgtgggtctgtttttggagcgagtggtgagctcagacttggtgcttcagaactaccacatcccagctggggt

SEQ ID NO: 174272 - DNA, 201 bp, Homo sapiens
ggctgataaacagcgtcacccagcagcccattcccctgcacctgctcttcctccccctcaaggacagggagctcttcttcctctggaatccctcttcaacrccctggggattaacgtggggcatgtccttctgcgcttggggcttctcaagttaggggaggtttggctgggctcagcaggtgcaaggaagcacttcctacg

SEQ ID NO: 174273 - DNA, 201 bp, Homo sapiens
ttggtgcttcagaactaccacatcccagctggggtgagtgagccccacacccctcgagctgagaacctccctccccagtcattccctgatccctgctctgyaccgtccgcagacattggtacaggttttcctctactcgctgggtcgcaatgccgccttgttcccgaggcctgagcggtataatccccagcgctggctaga

SEQ ID NO: 174274 - DNA, 201 bp, Homo sapiens
cagggagccccatccagctgaggaccctttctgtggatgcccccacctccaggctctaccctgtgggtctgtttttggagcgagtggtgagctcagacttrgtgcttcagaactaccacatcccagctggggtgagtgagccccacacccctcgagctgagaacctccctccccagtcattccctgatccctgctctgcac

SEQ ID NO: 174275 - DNA, 201 bp, Homo sapiens
acatcccagctggggtgagtgagccccacacccctcgagctgagaacctccctccccagtcattccctgatccctgctctgcaccgtccgcagacattggwacaggttttcctctactcgctgggtcgcaatgccgccttgttcccgaggcctgagcggtataatccccagcgctggctagacatcaggggctccggcagg

SEQ ID NO: 174276 - DNA, 201 bp, Homo sapiens; identical to SEQ ID NO: 31132

SEQ ID NO: 174277 - DNA, 201 bp, Homo sapiens
aggatcgcagcagccaccttcctctgccccgccgagaaggctgaggctgccgccatctgcactgctcctgcattttctcatctcccgctctctgcccagcrgctcccaccctgcacgaccctgtttcgcccatcccttgccagctcctcactcactgcccctctcaccctgccttcgggtgatttctggccccttggcaag

SEQ ID NO: 174278 - DNA, 201 bp, Homo sapiens
gggggtgtcgttcatgttcaatggaacctccttagggttcgtcaacagccacttgacttcaggaagtgaaaagaaactcaggtaatggaactccttccccmcaagagtgtgcatttgggctgtctgcccagacacgcctcacacctttaagcaccagaaggacctgctcagctcctgcctttgaccttgtggatgtcctgt

SEQ ID NO: 174279 - DNA, 201 bp, Homo sapiens
tgctgggccacttcttcttgctctgacctgctaatctaccccatcagtgagaccacgggaaccttcgtccaggtttgcaaacattcttctgaaggacggtstccccttggaggctctgaggatgaggatttgttattgtggttgctgttcccattggtgatggtggctaaaagaaacaggcaagcatagtttgtttctttt

SEQ ID NO: 174280 - DNA, 201 bp, Homo sapiens
gcacgtggtgtgtcagtcttatggtgagttcaaacactggggaaagcagaacaggatcagagaatggcaccaagctgggaggtgtgactgccctaaaatcwaagggcttcagtctgttgatgtgtcaaagggaggaattcactgtaaccctaatcaggcgacctggaaatgttgatgcttccctgcctgtcttgtgctgcc

SEQ ID NO: 174281 - DNA, 201 bp, Homo sapiens
tcctgctgggccacttcttcttgctctgacctgctaatctaccccatcagtgagaccacgggaaccttcgtccaggtttgcaaacattcttctgaaggacsgtgtccccttggaggctctgaggatgaggatttgttattgtggttgctgttcccattggtgatggtggctaaaagaaacaggcaagcatagtttgtttct

SEQ ID NO: 174282 - DNA, 201 bp, Homo sapiens
tgtgtgcatgtgtgtgtgcacgcatgcatatgtgcgtgcatgtgtgaacgcatgcatgtgcacacatgcgagtgatggtcctgggaactgctccatgagargggagagtcaggatttgaacccaggtctgcctgtcccacacatccctgaccctgcattgcctctgcagcagttgttaaaaggaagaaaggcggggctgtg

SEQ ID NO: 174283 - DNA, 201 bp, Homo sapiens
gatccatcacaggaggtggggcgtcttggaggctcccctaggagattccctcagaggtgacactcgaggtgaattttaaaaggacagtcttaagcaggcaragggaccattctctcctgagactggggtaggatgttggcaggtttcagggggctggacccacattggcattaacttttgattggaaccaactctcaggcc

SEQ ID NO: 174284 - DNA, 201 bp, Homo sapiens
catcccagggctgctagtgggaccgtcaccactaagtcatccttccctccccactaggcttctgggcaggacagccagcagtggcaaccccttccatgtaytgagccttccctatgtgtgagatctgtgccaggcactttccagtatcatgtgatataaccttgacaagaccttactgttctccaatgagtaaacagaggc

SEQ ID NO: 174285 - DNA, 201 bp, Homo sapiens
aatgagtggatgaatgaattaatgaatttcttttctcttaagtcctgcagctcattaagtcacagaaatttctgaataagttggtgatcttggtggaaacrgagaaggagaagatcctgcggaaggaatatgtttttgctgactccaaagtaagtgacagcaaacttctaaaatgggctgtgaggtagggaggggacacaa

SEQ ID NO: 174286 - DNA, 201 bp, Homo sapiens
agcagctggaagcagagggagctgggagaccagacacaaactcggggctcagcttggggacgggagttgatagtcaggtgcctggaacataatggagaccrtccatattggttgaatgagtggatgaatgaattaatgaatttcttttctcttaagtcctgcagctcattaagtcacagaaatttctgaataagttggtga

SEQ ID NO: 174287 - DNA, 201 bp, Homo sapiens
tccatttaaaacgaagcctggaagagccttgtggggggttcctagcaccccggggctcctgctctgcctgcatggccttcctctgtgcctagtcctgtttyacgcctcatttagagacagcaaacagtgctaaagttaaaattacccactgggaaacttgagcctgtgcaatgactttcctggatggtgtgactttcctgg

SEQ ID NO: 174288 - DNA, 201 bp, Homo sapiens
ggagggaagaggaagagctgattgttttgtttttgttttgtttgtattttttttttctattaacaaaagccacattcaattattgttctttttaagaacamacattttggagtccattcaaagccatgtggctgaagagagattcctgggactgaaggaggcctcaaaagctcttcccaaatctgtcccccagccccacca

SEQ ID NO: 174289 - DNA, 201 bp, Homo sapiens
gagcagctggaagcagagggagctgggagaccagacacaaactcggggctcagcttggggacgggagttgatagtcaggtgcctggaacataatggagacygtccatattggttgaatgagtggatgaatgaattaatgaatttcttttctcttaagtcctgcagctcattaagtcacagaaatttctgaataagttggtg

SEQ ID NO: 174290 - DNA, 201 bp, Homo sapiens
tcaccacctccttggttctggctgtgcagacttctaaggccctcgtcatgtccttatcccagctgctccctcgtccccactggctctgcagcctcctgcawcctgaccacctccctggccccaggtccaaggtctgctggccctggacacttcaaaggaagggaaaggaaaggaaccaataaaatgtttttaaaaaaagag

SEQ ID NO: 174291 - DNA, 201 bp, Homo sapiens
gggctgtgaggtagggaggggacacaagcgttttgaggctcgctgtgtgccagggagtgtatcattagctcactcagttcccagaacaacccatttcacayctgggaaaggtgaacttagagaagttgaggatcatgttccaggttggcctggatttgagccatcactgtctcaggagtagggaggcttcccactttgccc

SEQ ID NO: 174292 - DNA, 201 bp, Homo sapiens
ggttggacttctgcgcagctcctgatcactttgttaaactcgcacctttgcaggggagtgtctaggccagaagccactcgcttatgactttggacacatgyttccaggttgctgtcctggaagttcacactgatttacgctcctctcagttttcttgaagctgaccaagtcctttgcaaagtgtaatgtgcagggaggcag

SEQ ID NO: 174293 - DNA, 201 bp, Homo sapiens
aggctggagtgcagtggtacgatctcagctcactgcaacctctgcctcctgggttccagcaattctcctgcttcagcctcccaagtagctgaaattacagrcctggctcatttttgtatttttagtagagacagggtttcaccatgttggccaggctggtctcgaacttgggacctcaggtgatccactcacctcggtttc

SEQ ID NO: 174294 - DNA, 201 bp, Homo sapiens
tgtgggctctcgcagcagacagagtgaggaaatagtgtgtgcacatacactcattcatgcacctgtatttatctatatatcttttttttaaaaaataccgmatctcactctgttgcctaggctggagtgcagtggtacgatctcagctcactgcaacctctgcctcctgggttccagcaattctcctgcttcagcctccca

SEQ ID NO: 174295 - DNA, 201 bp, Homo sapiens
cttagtctaaagaagaaggcgtggcagtggagtctggacttgagccatgtgaaaaaagtttaaagccacctacagggaaattctatcaaaagccaacagcygatgaatttgaggattacagaggccaccagttaatctgttcttttactgattaaaaaaataataataagaggcattttttaaagcctatgactttgattt

SEQ ID NO: 174296 - DNA, 201 bp, Homo sapiens
agtaccagcgacatcatgacgagtgaccacagccctgtctttgccacatttgaggcaggagtcacttcccagtttgtctccaagaacggtaagcaaaggayggtgtctgtttctctgttttcctcaatgacaaggagtgttgggagcttgtcttcaggtggcagtcagtggtctgcattagaggaaggctcattttcccag

SEQ ID NO: 174297 - DNA, 201 bp, Homo sapiens
taagcaaaggacggtgtctgtttctctgttttcctcaatgacaaggagtgttgggagcttgtcttcaggtggcagtcagtggtctgcattagaggaaggcycattttcccaggcaagtccacaatatcagtcagtttcttcatgtcccagccacagcacaattgcagtccagagaatttacttgctctgcttggcaagtat

SEQ ID NO: 174298 - DNA, 201 bp, Homo sapiens
gagtgcctgtacctgagggggtgagtgtgtggagcttctacactgaggcactggcttcattacagaggctggtcctgtctacagggctctacgggccaggygagccttccgggctcaggagaatcttaagtagcaaaatggggcaagattatggtgggtgagaacagaccagcagctttaagtaagagcctaagatccaaa

SEQ ID NO: 174299 - DNA, 201 bp, Homo sapiens
cttgaacctgggaggcagaggttgcagtgagccgagatcgtgccactgcactccagcctgagtgacagagtgagactccgtctcaaaaaaaaaaaaaaaaatctagttaaacaaaacataccaataacatatgtaaatgctcagtggagtgcctgtacctgagggggtgagtgtgtggagcttctacactgaggcactggc

SEQ ID NO: 174300 - DNA, 201 bp, Homo sapiens
tccgctcgcctcggcctcccaaagtgctgggattacaggcgtgagccaccgcgcccggccaggatccagcagtttatttaattccactgggccctggttcycctttcgaaaaccagtgctaagaatacctatgtggtaatgttgtggggcagattggatggaaaatatgtatcatgtttttagcacagtacttggtaaaaa

SEQ ID NO: 174301 - DNA, 201 bp, Homo sapiens
tctcaccatattggccaggctgctttcaaactcctgaccttgtggtccgctcgcctcggcctcccaaagtgctgggattacaggcgtgagccaccgcgccyggccaggatccagcagtttatttaattccactgggccctggttcccctttcgaaaaccagtgctaagaatacctatgtggtaatgttgtggggcagattg

SEQ ID NO: 174302 - DNA, 201 bp, Homo sapiens
cggggtctcaccatattggccaggctgctttcaaactcctgaccttgtggtccgctcgcctcggcctcccaaagtgctgggattacaggcgtgagccaccrcgcccggccaggatccagcagtttatttaattccactgggccctggttcccctttcgaaaaccagtgctaagaatacctatgtggtaatgttgtggggca

SEQ ID NO: 174303 - DNA, 201 bp, Homo sapiens
gagtgcatagcagcaatgctgtgtcctctgtgcacccatctcagggggtacaatggcgctctgctgttactgcagaacttaacactggacacttggttaarctggtggctgccaggttacaataaggattgtaaagttactagtttttgcttttaataacaatttaaggccaggcgcagtggctcacgcctgtgatcctag

SEQ ID NO: 174304 - DNA, 201 bp, Homo sapiens
cccctccctgcagtcaccccctctgcttctgctttcctgactcaggcatcctcaaggtggggtggagtgacgacatccatgtccccttccttcctgccccwgggccctgcccctaagccccagcccacccgcacaacctccttcctgaggaattccacccttttcctgagatgatgggtaagaaaaacgagctttgggact

SEQ ID NO: 174305 - DNA, 201 bp, Homo sapiens
ggacagtaaggttgcttctgatttttttctgtgctgaggcctgtgctgcagagccgtgacagggttggacttctgcgcagctcctgatcactttgttaaastcgcacctttgcaggggagtgtctaggccagaagccactcgcttatgactttggacacatgtttccaggttgctgtcctggaagttcacactgatttacg

SEQ ID NO: 174306 - DNA, 201 bp, Homo sapiens
gatttttttctgtgctgaggcctgtgctgcagagccgtgacagggttggacttctgcgcagctcctgatcactttgttaaactcgcacctttgcaggggartgtctaggccagaagccactcgcttatgactttggacacatgtttccaggttgctgtcctggaagttcacactgatttacgctcctctcagttttcttga

SEQ ID NO: 174307 - DNA, 201 bp, Homo sapiens
tagactcccaccttcctgggaccctgagaaggagctcagtatgtggcatgagaactaatttgaaatgctccatctccaggcacattgtggaactgaatccrtgttctcccctgttccaggtcccgggactgttgacagccaaggacagattgagtttctcaggtgctatgccacattgaagaccaagtcccagaccaaatt

SEQ ID NO: 174308 - DNA, 201 bp, Homo sapiens
gaccagattctctcccctgctcacttcaggctcctgttgtcccctttcattaggaaaacacgatattaacaagtgcaggcccctaacagtttgggttcaayacttactgtaaacaaccccacggagggctgtccccgagagatcatttgggacctccccggagcagagaggcttgctggaccacacagctgtcagtggcaa

SEQ ID NO: 174309 - DNA, 201 bp, Homo sapiens
ctgtgctgcagagccgtgacagggttggacttctgcgcagctcctgatcactttgttaaactcgcacctttgcaggggagtgtctaggccagaagccactygcttatgactttggacacatgtttccaggttgctgtcctggaagttcacactgatttacgctcctctcagttttcttgaagctgaccaagtcctttgcaa

SEQ ID NO: 174310 - DNA, 201 bp, Homo sapiens
cctggtctcagggttcccagattcgagtgtcaccagtggggaagttcttcttaaggctctgttggcctcatgtttactaaggtcccattggccaaagaaartcacatgaccaagcccagactcatggtgggaggggaccacagagagtgtggttactgggaggaggactgggtctttgagggtcacccatcttacagtcca

SEQ ID NO: 174311 - DNA, 201 bp, Homo sapiens
gcacgcagcaccacgcctggctaattttttgtatttttagtagagatggggttacaccatgttggtcaggctggtctcgaactcctgacttcaggtgatcyacccgcctcagcctccccaggtgctgggattacaggcctgagtcactgcgccaggcccagtggtattatttttaaaacactgcgaattcccacacaatgg

SEQ ID NO: 174312 - DNA, 201 bp, Homo sapiens; identical to SEQ ID NO: 31152

SEQ ID NO: 174313 - DNA, 201 bp, Homo sapiens
caaggcaggtgggttatgacagagactttggagctaatagacttgggctaaggattcagcaggtttttttttttttttcgagatggtgtctctgtctgtcrcccaggctggagtgcaatggtgtgatcttggctcactgcaaacttctgcctccccagttcaagtgattcttctgcctcagtctcccgagtagctgggatt

SEQ ID NO: 174314 - DNA, 201 bp, Homo sapiens
ttcttgtacaaggcaggtgggttatgacagagactttggagctaatagacttgggctaaggattcagcaggtttttttttttttttcgagatggtgtctcwgtctgtcacccaggctggagtgcaatggtgtgatcttggctcactgcaaacttctgcctccccagttcaagtgattcttctgcctcagtctcccgagtag

SEQ ID NO: 174315 - DNA, 201 bp, Homo sapiens
gaatggcagtcagtctcactcaccacgggagggagtgcaaatgccgacaaatgctctggagggcaaattgccaatgtctatcaacatccgtaatgtctggrtgcagtgaggaatgttctcccacccctaatttgtccaacaagtcacatggacaaagatatatatacgaggacacccactgcagcattatttcaaataggg

SEQ ID NO: 174316 - DNA, 201 bp, Homo sapiens
ctgctcagagtctggtccacaggccagcagatcagcatcacctgggagcttgttagaaatgtggacaatcaggtcccagacccgggaattcagaatcagcrtttgaacaagatccccaggtgatcctgatgcacattagggtttgaagaccatgtgtgggttgggggaatggcagtcagtctcactcaccacgggagggag

SEQ ID NO: 174317 - DNA, 201 bp, Homo sapiens
tgataaacagcaatgtcctgttctttagagtcactttaaaaaatggtatttatacaaagcacagaaagtacaaagcaaaaagcagaaaagtaaccaccccrtcactgagacactagaataaccattgttaattcactggtgtatcttcttcttctctctacctccctgtatgtatgtaatttccattttgtatatacatgt

SEQ ID NO: 174318 - DNA, 201 bp, Homo sapiens
ttgtatataaggctcacattacattttcactgggcatcattgctctagaaccttgctgctcagagtctggtccacaggccagcagatcagcatcacctggragcttgttagaaatgtggacaatcaggtcccagacccgggaattcagaatcagcatttgaacaagatccccaggtgatcctgatgcacattagggtttga

SEQ ID NO: 174319 - DNA, 201 bp, Homo sapiens
tgccccactgcactccagcttgggcaatagagcaagactccatcccaaaaaaaaaaaaaaaaaaaaaaaaaaaaaaaaaaaattctaaaatctggctgctrgaaaatttaaaattgtatataaggctcacattacattttcactgggcatcattgctctagaaccttgctgctcagagtctggtccacaggccagcagatc

SEQ ID NO: 174320 - DNA, 201 bp, Homo sapiens
gagggagaagaggaggaagaagaggagaaggaagaagagagaggggaaggagggaggcagggagaaagatgaaaagacgatcacgctgtctctgctctggmcaggccaactcttgcttgttccagacatcaccctccccaagcatgagcctctcttgggaagagcagctggaagcagagggagctgggagaccagacacaa

SEQ ID NO: 174321 - DNA, 201 bp, Homo sapiens
gatgggttgttcttatgtcacaggacagagtgatctgacatgcacacttccccgccaccctgtcatggaccttgtccttggagttcagagagctggtctcrtggcaggttttgcagccttggagctgtcagaaccactctgaggcctgatgttacaccccagcttcccatgagctgtatggaccttgtggcttccttggag

SEQ ID NO: 174322 - DNA, 201 bp, Homo sapiens; identical to SEQ ID NO: 31144

SEQ ID NO: 174323 - DNA, 201 bp, Homo sapiens
cccaccatggggagttgacaggccacttccagggggagatcaagctgcagacctctcagggcaagacgagggagaagctctatggtaagcagcaagccccwccccagcgccctcttcagccccccacttagggacgggaacgtgctttctctcagcaaagctgtcgaatatgctctctgctgcggcctcagagcagaaatc

SEQ ID NO: 174324 - DNA, 201 bp, Homo sapiens
ctttgtgaagacggagcgtgatgaatccagtgggccaaagaccctgaagagcctcaccagccacgaccccatgaagcagtgggaagtcactagcaggtaamgtgggcgtggggtgggtgttggggggggtggatatcagggactcatgacaaattagcatggtttggccgggtgcgatggttcacgcccataatcccggca

SEQ ID NO: 174325 - DNA, 201 bp, Homo sapiens
gaagtctggcagcctgggccattaggaaccaagggcagtcccctccttggtcagaagtgtggctggtgctaacctcccgattcgaacctggacgcttcatsgggggacgcaggcatttgttttccctctgtctccttgggcgccttttcaccatggccttcacgtgctgagcatcttccatttgctccccagttcattcgc

SEQ ID NO: 174326 - DNA, 201 bp, Homo sapiens
ttgtgaagacggagcgtgatgaatccagtgggccaaagaccctgaagagcctcaccagccacgaccccatgaagcagtgggaagtcactagcaggtaaagygggcgtggggtgggtgttggggggggtggatatcagggactcatgacaaattagcatggtttggccgggtgcgatggttcacgcccataatcccggcact

SEQ ID NO: 174327 - DNA, 201 bp, Homo sapiens
gtaccagcgacatcatgacgagtgaccacagccctgtctttgccacatttgaggcaggagtcacttcccagtttgtctccaagaacggtaagcaaaggacrgtgtctgtttctctgttttcctcaatgacaaggagtgttgggagcttgtcttcaggtggcagtcagtggtctgcattagaggaaggctcattttcccagg

SEQ ID NO: 174328 - DNA, 201 bp, Homo sapiens
acagagatgaaatgaggtccggactcctgggactctgcatctttctgccccgctctctgccctggccagctcacgatgcatcagagaggttgaggatgctyggctgggtgctggatttcgctgtagctttagttctcctcccactagactcccaccttcctgggaccctgagaaggagctcagtatgtggcatgagaacta

SEQ ID NO: 174329 - DNA, 201 bp, Homo sapiens
agatctgacaagcggcagggccttggccaggtcactcctgcaggccacaccatttgtgacacctgtgacatgagaagtaaggccctgtgcctgccaggagyggcacggcacctgcagcagcacagccaccaagcacagccacagtcccagcacccatgtgccggtgaggtccatcactcattccccatcctcggatgcctt

SEQ ID NO: 174330 - DNA, 201 bp, Homo sapiens
ctctttgggccacacaactgtcacaatgcttcagctctgccatcgtagtctgaaagcagctacagacaatccagaagtcaataggcatggctgtgttccartaacgtgttctttacgaccactgaaatttgaatttcgtattttcatgaatgacaaaagattgtttttcttttgatttgtttccaaccatttacaaatgta

SEQ ID NO: 174331 - DNA, 201 bp, Homo sapiens
gttaaattctcgaaggggaggagtttaaatggagctgcatgtaaatacaggacctttgcttggggtgagaaggaaaggggaaatggaaatagcaaggggaygagcttccttaattgcatgtggcagaaggaaacggcaatttcaaaggcaaacattgaacgtgggaggtggaggaggccttggatgctcccaacagcatcc

SEQ ID NO: 174332 - DNA, 201 bp, Homo sapiens
gggctgcaggtggatgactcaaggggacactcagttattgtgaggggtccccctgtggcctgtgcagccctaggggcaggggtggccatgaatgtactgascccccagtcccttgtaggtggcaagcagggtccaatccctggccctcagggtggactgtgacccactctaggttccctgcaagctggggctctgactcaa

SEQ ID NO: 174333 - DNA, 201 bp, Homo sapiens
ggcccagtggaaccatgagggcttttgaaacataatgattagggcaggtttttagcattgatgagcctgtgcaatgatgaatgccatctatacgggtgtgwggtaccaaaagatgtgtggttaaattctcgaaggggaggagtttaaatggagctgcatgtaaatacaggacctttgcttggggtgagaaggaaaggggaa

SEQ ID NO: 174334 - DNA, 201 bp, Homo sapiens
ttccccttatgaggactcttgaacgtagattgggaacagctgaataattcaggatcctctcccaacctcgaggccagcacatgagcaaccttatctccctyaggccatggtacataacagccacaggttccagggataaggagggcttgggaggcggaggccgttattttttctaccgcagcaactatcttgattctgtat

SEQ ID NO: 174335 - DNA, 201 bp, Homo sapiens
gcgccacaacactctggcctgggtgacaagagcaaaattccgtctcaaagaaaaaaaaaaaaaaaagaagtaacttggaagtctacaagaaagataccacyggctgcttgggaaaccagacaatagaactgctttctcccctgacgaaggtgctggggagatacttactcttatgacactaaactccttcctgccccaggg

SEQ ID NO: 174336 - DNA, 201 bp, Homo sapiens
gggtggatgcctggggtcccaaccaggtgacaagagagagccttgaggacacgggagggaccagcgggaggccccacaactcccacctggggcctatcttrtcatccctttctggcctggttgccttttgttgagcccctgtcaggagctaggcacttcatccgtgttctttaatcctggggaagggtttactactattgt

SEQ ID NO: 174337 - DNA, 201 bp, Homo sapiens
catggtacagggagctgtggacctaggtggtctgaagaggttttccttcaaggtgaattaaaggggaattctcataggattctcccaggtggactcacctwcgaaaatctacctccaagagtaaatgacagcagacgtccactgaggaccaagtgcacactcatgcccaattaagcagactcagagcccttcggggaagct

SEQ ID NO: 174338 - DNA, 201 bp, Homo sapiens
agctactgattagttcccattacttacgaagtgagaccttaaaaatccacagaacagagttgctttgaacacttcactgactgagaattgtggtattttattatttatttatttatttatttatttatttatttatttattgagacggagtctctctcagtcgcccaggctggagtacagtggcaaaatctcggctccctg

SEQ ID NO: 174339 - DNA, 201 bp, Homo sapiens
gctactgattagttcccattacttacgaagtgagaccttaaaaatccacagaacagagttgctttgaacacttcactgactgagaattgtggtattttattatttatttatttatttatttatttatttatttatttattgagacggagtctctctcagtcgcccaggctggagtacagtggcaaaatctcggctccctgc

SEQ ID NO: 174340 - DNA, 201 bp, Homo sapiens
atggtacagggagctgtggacctaggtggtctgaagaggttttccttcaaggtgaattaaaggggaattctcataggattctcccaggtggactcaccttygaaaatctacctccaagagtaaatgacagcagacgtccactgaggaccaagtgcacactcatgcccaattaagcagactcagagcccttcggggaagctt

SEQ ID NO: 174341 - DNA, 201 bp, Homo sapiens
ccaaaggggccttggagaggaggacaagtgcctggaaatcctgactgcccgatcggggcccaggcgcgagggtcatggaggacagaggcaccaagtagggmccctagaccctgtctgccttgggatcctctgagaactgagaactgtaacagcattacagccgtatgtcccgactatattccttaagggtcaggggttgtc

SEQ ID NO: 174342 - DNA, 201 bp, Homo sapiens
ctactgattagttcccattacttacgaagtgagaccttaaaaatccacagaacagagttgctttgaacacttcactgactgagaattgtggtattttattatttatttatttatttatttatttatttatttatttattgagacggagtctctctcagtcgcccaggctggagtacagtggcaaaatctcggctccctgca

SEQ ID NO: 174343 - DNA, 201 bp, Homo sapiens
ttttcctggttgggggagggttggggcagtgctctgagccctgtgtgaggccagacgaaggcagaacggctcagccccgcaggcctgactgtcccacaccmagagagtgggtttcttgtaaagccaaaactcctttcttgacttggaaagggaagtgactctcccctaagagaagcggtgcctatcttgagctgctcgctg

SEQ ID NO: 174344 - DNA, 201 bp, Homo sapiens
tactgattagttcccattacttacgaagtgagaccttaaaaatccacagaacagagttgctttgaacacttcactgactgagaattgtggtattttattatttatttatttatttatttatttatttatttatttattgagacggagtctctctcagtcgcccaggctggagtacagtggcaaaatctcggctccctgcaa

SEQ ID NO: 174345 - DNA, 201 bp, Homo sapiens
agctccagggtggccagggaggcctggagtggcctcagacgtgtcgcataaatggctgtctcaaacctagggccacagttgaagcaaaagaggcccttcgrctccaccctacaaccttttggcccttgcgtcctttctaacatccttcccaccgagaggaataaagcagaaaattagaactacccataatcccctatcaca

SEQ ID NO: 174346 - DNA, 201 bp, Homo sapiens
tgtcacaatgcttcagctctgccatcgtagtctgaaagcagctacagacaatccagaagtcaataggcatggctgtgttccaataacgtgttctttacgamcactgaaatttgaatttcgtattttcatgaatgacaaaagattgtttttcttttgatttgtttccaaccatttacaaatgtaaaaccatttgtagctggc

SEQ ID NO: 174347 - DNA, 201 bp, Homo sapiens
tttttttcttttcatgtttattagccatctgtattttttggtgaattttctgtccatatcctttggttggttgaagggtggagtgtttatctttttcttgmtgatttgtaaatgctttctaaaaaggatgccaagtctgttttatcaccttcttggtctcctttgctggcggtttttcctttgcccgcccattcatggttg

SEQ ID NO: 174348 - DNA, 201 bp, Homo sapiens
aagacatacctaagactgggcaacttacaaaagaaagaggtttaatggactcacagttccacgtggctggggaggccttacaatcatggcggaaggtgaarggcacatctcatgtggcagacaagagaagaatgagcttgtgcagtcaaactcccatttctaaagccatcagatctcatgagacccattcactatcacgag

SEQ ID NO: 174349 - DNA, 201 bp, Homo sapiens
catcgtgtctccttcctaagtctggccactgtgcctttctagaatcttcctagtccttaggcaggacctcttccccgacttccacccatctctcctttctstgagctcctgcagccttgaaggggttgcccttgccatctcctcctctattccggggtagggcatcctccatgtcaggctgggcttccctccacgggggat

SEQ ID NO: 174350 - DNA, 201 bp, Homo sapiens
cgggggatcagtacacagcagatgctggaaaacactgatcacggggattgagcattgacagggcatctacctaagccaagcctggactgggcactgtgggrtttagaaagagaaaggaaagaaggaaggatgtgagggatggaggaaggaaaggtttgttcatggtctccgaacaagtctctgttctgtggctcaaaattt

SEQ ID NO: 174351 - DNA, 201 bp, Homo sapiens
tgcttggcatagcatacaaactcatcaaatcatcattaggcagaagtatggggaaagctccagcatttttctaatactttttctttcaagcacgaacgccytgtttgtcagtaacttcatttatgttctctaagatcttgttatatctcccctcccaaaagtcacaaatccaaagagagagccggtggggggcgggggacc

SEQ ID NO: 174352 - DNA, 201 bp, Homo sapiens
cacaagtcagctgccctcagccaaataagaggctgttctcacccctcacctcatttgcatacctacaggaggaagtgccaagggaagagagcattgaaaawtaagagcacagcagagttgagctatctccacatttgtctggcaggctctgcaaaggggattgaggccagtggttctctgtgtcccagaggtgtccctggg

SEQ ID NO: 174353 - DNA, 201 bp, Homo sapiens
tcctaaaaataattagaccatgttggcaaatgaccaatccctgcacaaaaacagaatccccggcaggcctgactcctaaatgatgctgaggccccgagataaaaaaaaaaaaaaaaaaaaaaaaggagagagcacatcttcctaggtctgggtggggtgaccccagggagtcttttctgtctggttcttgctctgttttct

SEQ ID NO: 174354 - DNA, 201 bp, Homo sapiens
gagaaaaagcctcgtgagagaggccagctgcagtcccagttacggtgctgcctggtggaggccagtctctgcatttggtggcaggacagagcagccacccrgtggagggtgggtcatgctgccacactcccctcccctttatgagaccctgagtcttgaagaaaaacagaaaaggttgttcttgatttgtctttaggaatt

SEQ ID NO: 174355 - DNA, 201 bp, Homo sapiens
tcttctgctttttgtttttatattctaaaaaatgatctctggaccggacacagtggctcacgcctgtaatcccagcactttgggaggctgaagcaggcggrtcacctgaggtcaggagttcaagaccagcctggccaacatggtgaaaccccatctctactaaaagtacaaacattagccgaacatggtggcgggtgcctg

SEQ ID NO: 174356 - DNA, 201 bp, Homo sapiens
cctaaaaataattagaccatgttggcaaatgaccaatccctgcacaaaaacagaatccccggcaggcctgactcctaaatgatgctgaggccccgagataaaaaaaaaaaaaaaaaaaaaaaaggagagagcacatcttcctaggtctgggtggggtgaccccagggagtcttttctgtctggttcttgctctgttttctg

SEQ ID NO: 174357 - DNA, 201 bp, Homo sapiens
gcattgcttgaacccgggaggtggacgttgcagtgagccgagatggcgccactgcactccagcctgggtgacagagtgagactccatctccatctaaaacraaaaaaaaaaggaaaaagaaaaaaagaaaatcacataaacatggagagctggtgaactgcagtggtgcagaattctattctaaggtgtgaacactgctct

SEQ ID NO: 174358 - DNA, 201 bp, Homo sapiens
ccaaaaatacaaaaattagccaggtgtggtggtgggcgcctgtaatcccagctactcaggaggctgaggcaggagcattgcttgaacccgggaggtggacrttgcagtgagccgagatggcgccactgcactccagcctgggtgacagagtgagactccatctccatctaaaacaaaaaaaaaaaggaaaaagaaaaaaag

SEQ ID NO: 174359 - DNA, 201 bp, Homo sapiens
atacaaagagaaatgagagaaatgcagtagccattaactagaaatcagcaatagaaaaacaatgacattagaaattaaagatatgcaaatttattcatccrtattgaagtgcaatgttatgtcccttaaaagagagagaaagaacagaagtacagtcattggagctattgggtaatcaggtctggacaatataatcagtac

SEQ ID NO: 174360 - DNA, 201 bp, Homo sapiens
ggttcctatagaggcgacccatttttttctttttttctactttgaagccggtgggaattcttttccagtgttgtcattttcctttcattgatagtacctgmaatgtgttcggcttgttcactttgcaaactctgttctttgacacaaaagacctttcttctgttaggtctttgagtaagtttttattccagctcttctggc

SEQ ID NO: 174361 - DNA, 201 bp, Homo sapiens
tttctgctgacaaaccgcaaactgcccgcgtccacccccactcgtcccccttccttcctgccacagtagaagggtggggctggcgtggctatcctggctgygcccacgccctcctgctgcccagcaaccaccccgggtgtggattccatcgctccctgggcttccagtccctcccaccagcccctgccccgctgtgcagaa

SEQ ID NO: 174362 - DNA, 201 bp, Homo sapiens
gctgcacgcagcctcacatcagcacctctcaatcaattggtgccatctccctgcacatgaacccttgcgtcatgatgacatgtggtcctcacagccaggcmtttctccccaccccagacatagagtgagaggagctctgctcttccctcaataattcgtgccatgctgtgcactcctgaggagcaaggctctgtggtctgc

SEQ ID NO: 174363 - DNA, 201 bp, Homo sapiens
tgtcccggctgacttgggccttcatggtttccttctctgtttcaaaatgacttaacaactcttttcaggaaggcggctgctgtggaatggggaacgaagtstggcagcctgggccattaggaaccaagggcagtcccctccttggtcagaagtgtggctggtgctaacctcccgattcgaacctggacgcttcatgggggg

SEQ ID NO: 174364 - DNA, 201 bp, Homo sapiens
aattaagacgtaggctgggcaccgtggcttatgcctgtaatcccagcattttgggagaccgaggtgggtgagtcacctgaggtcaagaggtcgagaccagsctggccaacatggcaaaactcttgtctctactaaaaatacaaaaattagctaggcgtagtggtgtgcacctgtaatcccagctacttgggagactgagac

SEQ ID NO: 174365 - DNA, 201 bp, Homo sapiens
ttcatatggctcaaactaatacatgtcgcaagtgtgtacacatatatacacatatatatttggggaggtttaaccataaattgagttaaattgatttttaraaggcataacatgtaatattaaaataaataattatggaataagttatcaaaacaattaagaaataactgttagccaggcactgtgccacgtacctatagt

SEQ ID NO: 174366 - DNA, 201 bp, Homo sapiens
ttgttaacacctgtgtgtgtgtgtgtgtgtgtgtgtgtgtgtgtgtgtgttttataaacacagaaggttgggaaccatggataactaagtgaagtcattttgtcactcagatttgaattttctacaggctatagagtgcagtttggctaaagcaaaacctaggtacagtcaggactacacaattccagttcgctgtgggtt

SEQ ID NO: 174367 - DNA, 201 bp, Homo sapiens
gtgctgagattacaggcatgagccaccgcggccgacccggagcacttttttaaaaattcagttttatttcttttgaaaagaacatattaagtgtgaaccayatgaaagtgtttttgtaggtcagaaatagttattggaaattcatatggctcaaactaatacatgtcgcaagtgtgtacacatatatacacatatatattt

SEQ ID NO: 174368 - DNA, 201 bp, Homo sapiens
cctcaagcccgcagttccatatgttggcagcttcttagggactacaagtacacaaagagtaacagaaaaaaacattgaaaatcacataaacaggccaggcrtggtagttcacgcctgtaatcccagtactttgggaggccgaagcgggtggatcacctgaggtcgggaattcgagaccaacctgaccaacatggtgaaacg

SEQ ID NO: 174369 - DNA, 201 bp, Homo sapiens
acattgaaaatcacataaacaggccaggcgtggtagttcacgcctgtaatcccagtactttgggaggccgaagcgggtggatcacctgaggtcgggaattygagaccaacctgaccaacatggtgaaacgctgtctctaccaaaaatacaaaaattagccaggtgtggtggtgggcgcctgtaatcccagctactcaggag

SEQ ID NO: 174370 - DNA, 201 bp, Homo sapiens
gcaaggtgagttatcttagtctaaagaagaaggcgtggcagtggagtctggacttgagccatgtgaaaaaagtttaaagccacctacagggaaattctatmaaaagccaacagccgatgaatttgaggattacagaggccaccagttaatctgttcttttactgattaaaaaaataataataagaggcattttttaaagcc

SEQ ID NO: 174371 - DNA, 201 bp, Homo sapiens
agcgggtggatcacctgaggtcgggaattcgagaccaacctgaccaacatggtgaaacgctgtctctaccaaaaatacaaaaattagccaggtgtggtggygggcgcctgtaatcccagctactcaggaggctgaggcaggagcattgcttgaacccgggaggtggacgttgcagtgagccgagatggcgccactgcactc

SEQ ID NO: 174372 - DNA, 201 bp, Homo sapiens
cagtgggccaaagaccctgaagagcctcaccagccacgaccccatgaagcagtgggaagtcactagcaggtaaagtgggcgtggggtgggtgttggggggsgtggatatcagggactcatgacaaattagcatggtttggccgggtgcgatggttcacgcccataatcccggcactttgggaggccaaggctggaggatca

SEQ ID NO: 174373 - DNA, 201 bp, Homo sapiens
ggtggcacacgcctctaatcccagctactctggagggctgaggcacaagaattgctcgaacccaggaggcagagattgcagtgagccgagatttcaccacygtactccagcctgggcaacagaccgagactctgtctcaaaaataataataatacttagctgggtgtagtagtcctaactacttaggaggctgagatggaa

SEQ ID NO: 174374 - DNA, 201 bp, Homo sapiens
taaggcactatttttcatatctgatattgacagtcagtgggaaaaaatgctggcccaggtcgtagccagagctactgacatctggctcacaccagaaagcmggccaaggggctttatccaaggctgactgtgccgggttttctctctgcatgcaagaccaggaaggggtatgtgccctggaaggcctatgtatttcactca

SEQ ID NO: 174375 - DNA, 201 bp, Homo sapiens
ggtactcactattcactgtgcagcttcagcctgcaaatggaaacccctttgccatccctcgcctaagctctggaagctgggccctcacatgctctttcccrtccctttccttccagactttgtgaagacggagcgtgatgaatccagtgggccaaagaccctgaagagcctcaccagccacgaccccatgaagcagtggga

SEQ ID NO: 174376 - DNA, 201 bp, Homo sapiens; identical to SEQ ID NO: 31139

SEQ ID NO: 174377 - DNA, 201 bp, Homo sapiens
aacccaaagggccacgctggtcaccacaattcagggatgagactggggagaaggggactgggccaagggggattttgagtttgcccacattgttagtttargttttctacggagaacacgaatttgtattttacttgtgcaactttcaaaattcagaaaaaaaaatttttgctttctctgaagtgaatgatgggttaattt

SEQ ID NO: 174378 - DNA, 201 bp, Homo sapiens
gagaccataaggtggcctgtgtggggcggggcagagcctggagagggaacttctcgtgatggagccgcagagaagggacttgggagggcgaaactcctaayctcagagagtccaacagagttggaaagctgtggtatgagcgggtggctaagtctccctttcgaagcttcagtaaaatagacactgttaattgtttttgtg

SEQ ID NO: 174379 - DNA, 201 bp, Homo sapiens
gccagcacacctggcagggccttatgctgcaaagaagagatgccttgggaatggggtcagtcaatgcaagggtccatgggttggccgagccggcatccccytgtgcaatctgcacaggcaaagctgatcaaaggcccaatgtcagtatataggctgccctctctgcaggagcagctggggcccgggatcaggcctagagtg

SEQ ID NO: 174380 - DNA, 201 bp, Homo sapiens
gtgagtgacaacagtcaaagccacggccatctgcccccagaggctgcagctgagaccagcagcctgtggcccaacctctcctgctcccagtccagcggggyaggcatgtagccttgcagggctggagaaagaagcaaggggagccacagtgtttacagggtcagctggggcactggaaaccaagccaggctcgcagctggt

SEQ ID NO: 174381 - DNA, 201 bp, Homo sapiens
taatgtttgaaagagattgcttaacacggggctttgtgaaaacaagtgaatttattgaaaagaatttagaacacccttttgcttaactctctataaattthctaagacacacacacacacacacatacccccaggcatagacttacatatgtgtgcaatgcacacaaaaaaacacacttggaaagagaaagacagagacag

SEQ ID NO: 174382 - DNA, 201 bp, Homo sapiens
gggctttgtgaaaacaagtgaatttattgaaaagaatttagaacacccttttgcttaactctctataaatttactaagacacacacacacacacacatacscccaggcatagacttacatatgtgtgcaatgcacacaaaaaaacacacttggaaagagaaagacagagacagagccagagcccagatggacagccctgaa

SEQ ID NO: 174383 - DNA, 201 bp, Homo sapiens
tgagggaggagaatagcttgaacctgggaagcagaggttgcagtgaaccaaaattgcgccactgcactccagcctgggcaacaagagaaaaactgcgtctaaaaaaaaaaaaaaattccacatcgagcccattgtttagttccccagggtttccatttcttcccaggtttggatgctgagtgcagtaaactggatggggaa

SEQ ID NO: 174384 - DNA, 201 bp, Homo sapiens
agatcctatctttataagtagataaggtaggaaaacaattccacttacactttccaaagcttttggcctccttttgtgtgtgtgtgtgtgtgtgtgtgtgwgagagacagtgtctcactctgtcactcaggctggagtgcaatggcacgatctgttttcactgcaacctctgccttccgggttcaaatgattctcctgtct

SEQ ID NO: 174385 - DNA, 201 bp, Homo sapiens
gtgccaagcctaaatctcttacaatgtctctaaatgacaagaaaagataaattcaacaaacagattgttacaaacagtaccatagctttaaaatggtcgayatttaaaatgttaaatatttttaaatatttaatattttaatattttatatttaatatatttaatatttaaaaattcaaactccttgacagtataataaag

SEQ ID NO: 174386 - DNA, 201 bp, Homo sapiens
gatgctgccctgatcctctttccctcctctcccaggttcctggtgaggccaatcccatcaacatggtgtccaagctcagccaactgacaagcctgttgtcrtccattgaagacaaggtacgtgtggggctcctgcggcttctcttggtctcctctttggtcccctctttgcatggagaatgcccagatgcacaggctcggc

SEQ ID NO: 174387 - DNA, 201 bp, Homo sapiens
ctctcccaggttcctggtgaggccaatcccatcaacatggtgtccaagctcagccaactgacaagcctgttgtcatccattgaagacaaggtacgtgtggrgctcctgcggcttctcttggtctcctctttggtcccctctttgcatggagaatgcccagatgcacaggctcggcgtccccttgaccctctgtctctaacg

SEQ ID NO: 174388 - DNA, 201 bp, Homo sapiens
gtacgtgtggggctcctgcggcttctcttggtctcctctttggtcccctctttgcatggagaatgcccagatgcacaggctcggcgtccccttgaccctckgtctctaacgctgctgcccacaggtcaaggccttgctgcacgagggtcctgagtctccgcaccggccctcccttatccctccagtcacctttgaggtaag

SEQ ID NO: 174389 - DNA, 201 bp, Homo sapiens
tctctgtcgtggaggactcctgtgcactctaggagtcctccacatcctggcctctacccatgagatgccattagcatcccccagctgtgacaactggaaaygtctcagacattgccaaatgtcccctggagggcaaaatcgccaccagctgaggaccactgggctagcccccaattcacatctcaggtctatactagctgt

SEQ ID NO: 174390 - DNA, 201 bp, Homo sapiens
ctgcggcttctcttggtctcctctttggtcccctctttgcatggagaatgcccagatgcacaggctcggcgtccccttgaccctctgtctctaacgctgcygcccacaggtcaaggccttgctgcacgagggtcctgagtctccgcaccggccctcccttatccctccagtcacctttgaggtaagtggccatgggacagc

SEQ ID NO: 174391 - DNA, 201 bp, Homo sapiens
ctttagctggggaagagcagggagcgcattagccaagaatggcagtcagttgacctttgtcgctgtgatggcggttcaacgtcagaacgggcacccagagrcaactgggaaatccccttcggagggaagctacaagggaggagtgtctcattgggccaggcaccatgtaaactttgtccttctcaaaatggcagagatgag

SEQ ID NO: 174392 - DNA, 201 bp, Homo sapiens
gtcaagaggtcgagaccaggctggccaacatggcaaaactcttgtctctactaaaaatacaaaaattagctaggcgtagtggtgtgcacctgtaatcccagctacttgggagactgagacaggagaatcgcttgaaacctggaagcagaggttgcagcgaaccgagatggcgccactgcactcctgcctggagcaaggctc

SEQ ID NO: 174393 - DNA, 201 bp, Homo sapiens
cgacctcaggtgatccacccgccttggcctcccaaagtgctgggattacaggcatgagccaccatgcccagcctgaaaatagaacattcttgaaagaaaaytggtaaaaggaagaaaagagaaaagtaattgaaggagatgacagagataagctctttcaggatgagttcctttatgtttgtagacagagaagaaagagct

SEQ ID NO: 174394 - DNA, 201 bp, Homo sapiens
ccatgcccagcctgaaaatagaacattcttgaaagaaaattggtaaaaggaagaaaagagaaaagtaattgaaggagatgacagagataagctctttcagratgagttcctttatgtttgtagacagagaagaaagagctagaacatgaggggataaggatattgataaaagagggttgttattgccagtttaccttgtct

SEQ ID NO: 174395 - DNA, 201 bp, Homo sapiens
  misc_feature (1)...(201): n = A,T,C or G
ttgctcatcattgcagcctgaggccctggagagggcttgtcatatagtattaatagatactgtttgagtgattggataagtaggtagacgggtgtgtgaayggtcaatggatgagtggatgggtgcgatggatggatggatggatggatggatggatggatggatggattgggatgaataggcgaatggnnnnnnnnnnnn

SEQ ID NO: 174396 - DNA, 201 bp, Homo sapiens
cctgtctctacaaaaaaaatgtggtggttcatgcctgtaatcgcagcactttgggaggccaaggccggtggattgcttgaggtcaggagtttgagaccagsctggccgacatggtaaaaccccatctctactaaaaatacaaaaattagctgggcgtggtggtggcacacgcctctaatcccagctactctggagggctga

SEQ ID NO: 174397 - DNA, 201 bp, Homo sapiens
ttcttgctccttcatctgaaaacttgtgaccatgccagttgcaccctcctgtgccctcttcccttggctaactcacagcaacggcctttgagggtccacaygggggtcagaagagggctgaacatggagggggccctttccaaagtccttgtttgaggccccagcatttctatgtatgcacctgctctaaggtgtttccaa

SEQ ID NO: 174398 - DNA, 201 bp, Homo sapiens
ccatatcagggtctgagcggctgcatgaatgatgcttctacttcttgcactgggttagatgcagtgccgcgggtaagggagaccaaggcacagccacagcrtatgaggaagaccagaatgctgttgtgctggggacaccatcagaagagttgggtcaaggagagggtgtggttacaatagcaaatgtggccaagggaccca

SEQ ID NO: 174399 - DNA, 201 bp, Homo sapiens
aggcacagcagtgcatccacgtcccaagcagagtagccggggtcgacaaaggtttggatatcatgtcatggaagagcaatgacggcgttggaggagtttgkttgaaaagaaagtggaagtgggaggggagaggcagggtacactcttcagtttcaaagcttgaagggaatgattcattttgtgctaactaggatgcagtag

SEQ ID NO: 174400 - DNA, 201 bp, Homo sapiens
cctcccggccagccgcccatatcacccaagaagtttttaccctcaacagcaaaccggggtctccctcccaggacacaggagtcaaggtgagcatcctcttyattaagacggctccctccctccttatgaaagcaccctgggctttgggctttcaccctagaatggaagcctcataagggccacaatttgtgtccacttggc

SEQ ID NO: 174401 - DNA, 201 bp, Homo sapiens; identical to SEQ ID NO: 31160

SEQ ID NO: 174402 - DNA, 201 bp, Homo sapiens; identical to SEQ ID NO: 31161

SEQ ID NO: 174403 - DNA, 201 bp, Homo sapiens
cactctgcagaagtgagatgcccctgccaggatggattcctggggtaagaggtgctgtgggccactggggaaacccaggctgggcctctgtgcccccacartgggttctttgtgacctgacccctcatctcagaaatttgaaccagggccaaaacctatcatcgtgaacctcattcattgttctctgccatgcagctcgtg

SEQ ID NO: 174404 - DNA, 201 bp, Homo sapiens
ctggatttaaatctgagtctcgactggagctccatcccagagactttcatttctacactttgccccactctgcagaagtgagatgcccctgccaggatggrttcctggggtaagaggtgctgtgggccactggggaaacccaggctgggcctctgtgcccccacaatgggttctttgtgacctgacccctcatctcagaaa

SEQ ID NO: 174405 - DNA, 201 bp, Homo sapiens
agccctcagtttcctcatctgtaaaatggggatgataaaaattatgtgaataatatgctcaaggctctttaggctagagcccagcatgtagtggccacttwgagagtcagctgttattagtaggttctgagaaccatcaaatcaactcatccataaaatggaagctcttcacacaacaaatgcatatagagaagctgcagt

SEQ ID NO: 174406 - DNA, 201 bp, Homo sapiens
cccaaagtgctggtattataggtgtgagccacccctggatttaaatctgagtctcgactggagctccatcccagagactttcatttctacactttgccccrctctgcagaagtgagatgcccctgccaggatggattcctggggtaagaggtgctgtgggccactggggaaacccaggctgggcctctgtgcccccacaat

SEQ ID NO: 174407 - DNA, 201 bp, Homo sapiens
gataaaaattatgtgaataatatgctcaaggctctttaggctagagcccagcatgtagtggccacttagagagtcagctgttattagtaggttctgagaaycatcaaatcaactcatccataaaatggaagctcttcacacaacaaatgcatatagagaagctgcagtggggcaagacaaggggatccagggccagcaggg

SEQ ID NO: 174408 - DNA, 201 bp, Homo sapiens
gtgtgtttatgtgagtctatgtatgtgagtccatgtatgagtgtaccaccccatatctatgagtgtgtgagtatctgtgagtccatgtgtctgtgtttgtdtgtgtttatgagagtctaggtatgtgagggtgggtgtccgagtgcatgtgcataagtgctagagcctctctgtgtgtttgtgtgtgtgtgtgtgtgcccg

SEQ ID NO: 174409 - DNA, 201 bp, Homo sapiens
aggctcgctgtgtgccagggagtgtatcattagctcactcagttcccagaacaacccatttcacacctgggaaaggtgaacttagagaagttgaggatcaygttccaggttggcctggatttgagccatcactgtctcaggagtagggaggcttcccactttgcccagctgcctcccagcctcgaggccacatcctttatg

SEQ ID NO: 174410 - DNA, 201 bp, Homo sapiens
gagtcagctgttattagtaggttctgagaaccatcaaatcaactcatccataaaatggaagctcttcacacaacaaatgcatatagagaagctgcagtggrgcaagacaaggggatccagggccagcagggcagatgaggcccctgcccacatggaatttatattctggtgcattgagtggccgatagagactcaaataca

SEQ ID NO: 174411 - DNA, 201 bp, Homo sapiens
ttgaggctcgctgtgtgccagggagtgtatcattagctcactcagttcccagaacaacccatttcacacctgggaaaggtgaacttagagaagttgaggaycatgttccaggttggcctggatttgagccatcactgtctcaggagtagggaggcttcccactttgcccagctgcctcccagcctcgaggccacatccttt

SEQ ID NO: 174412 - DNA, 201 bp, Homo sapiens
atgtgtgtgtgtccatgcatgtgtgtttgtgagtgtgtgtttatgtgcatctgtgtgtgagtgtaccacccccgtatctatgagtgtgtgagagtccatgyatgtgtttgtgagtgtgtttatgtgagtctatgtatgtgagtccatgtatgagtgtaccaccccatatctatgagtgtgtgagtatctgtgagtccatgt

SEQ ID NO: 174413 - DNA, 201 bp, Homo sapiens
tgaataagttggtgatcttggtggaaacagagaaggagaagatcctgcggaaggaatatgtttttgctgactccaaagtaagtgacagcaaacttctaaartgggctgtgaggtagggaggggacacaagcgttttgaggctcgctgtgtgccagggagtgtatcattagctcactcagttcccagaacaacccatttcac

SEQ ID NO: 174414 - DNA, 201 bp, Homo sapiens
tgtggaactgtgagtccattaaaactctttcctttataaattacccagtcttgggtatgtctttattagcagcgtgagaacagactaatacatctgttaargagagaggggtggcccaacttggataagaggagatggaaacgttaagatgagtgaagactgtcagagcacctgattactaaaaaacttaagattgaaaga

SEQ ID NO: 174415 - DNA, 201 bp, Homo sapiens
acaagggcaagaagtcttcataagtgtaggagtgcaagcctgtgtgtttgtgtaggatgtgtgtgtgagtaggtctgtgtatgtgagtttgtgtgagtgasagcgtgcatgtgagtgtgtgagcctgtgtaggtgtgtgagagtttatggatgtgtgtttgtgagcatgtttatgtgagtcaatgtgtgagcgtaccaccc

SEQ ID NO: 174416 - DNA, 201 bp, Homo sapiens
ttgatagtcaggtgcctggaacataatggagaccgtccatattggttgaatgagtggatgaatgaattaatgaatttcttttctcttaagtcctgcagctsattaagtcacagaaatttctgaataagttggtgatcttggtggaaacagagaaggagaagatcctgcggaaggaatatgtttttgctgactccaaagtaa

SEQ ID NO: 174417 - DNA, 201 bp, Homo sapiens
tctttattagcagcgtgagaacagactaatacatctgttaaggagagaggggtggcccaacttggataagaggagatggaaacgttaagatgagtgaagaytgtcagagcacctgattactaaaaaacttaagattgaaagaaacacctcccagggttctcagaagtgctgtgaacttttgtcggtttaatgcaacagata

SEQ ID NO: 174418 - DNA, 201 bp, Homo sapiens
gcccagacaggtggtgggagatggagagaaagaccgctgggctggaatgctttctgagcacctgggcataggttcaaacaccagctctgccccattgctgygacctcaaaaggactgaggcacagggataaatggaggccatgaatcttgagccactcccaactcgaggcaggttatagtaaagatggtcattatgacatc

SEQ ID NO: 174419 - DNA, 201 bp, Homo sapiens
agacttcacaccaccgaggtggctctgaccgggatttgaaggatgaataggattttgccaagcatgaggcaggggagggcactggtactgagagaatgggktgtgcagggaacgggacagggggttagtgaaatcacacattacatgttgctcatctctcactgtggttctggagagagaagccgctgggcacgccatcct

SEQ ID NO: 174420 - DNA, 201 bp, Homo sapiens
gggtgtccatcacatcaggtgctggctgacatctcacatcagggacccccagcaaggccaagggacaagcgcttctggtgcaggcccacagtgatagcttyccactgagtgcccagtctccgctcctactttcacctccaaagcatcaggggtgggctggtgggaggtctaaggtgtccagagctgtcaggaataataggg

SEQ ID NO: 174421 - DNA, 201 bp, Homo sapiens
atgatgtggggactgaaattatgcattggcagggagtcaagttgggggagcaggttgtgtgtgtgaaagaaatttcaaccctcatcttccatagtggacaktcaaaaatgtaataggacataatgaaaactgaaacatcggaaagtattaatctaagcatttttttttttaagaaacagagtagaattccaaaagaatcca

SEQ ID NO: 174422 - DNA, 201 bp, Homo sapiens
ttgggaggctgaagtgggaggatcacttggagccaggagtttgagttcaccctgagcaacacagcaagactccatctctaaaaattaataataataataayaataataggctatttcagagcaggtttgtgagccctgaagagcatgggtgcccacagactgccagcccactctccgggaatgtgcccacctagctccagt

SEQ ID NO: 174423 - DNA, 201 bp, Homo sapiens
actgagacaggagaatcgcttgaaacctggaagcagaggttgcagcgaaccgagatggcgccactgcactcctgcctggagcaaggctccgtctcaaaaamaaaaacaaaaacaaaaaccataaatgcacacattagcctaggctgaaacaggctcaggatggtcaatgacattatcacccacctccacatctcatcccat

SEQ ID NO: 174424 - DNA, 201 bp, Homo sapiens
tccacaagacaggggttcctacaggggttgttgtgagagttaatggggtaaggtgtgtccttagtgcggagtctggctcatggtgagtttccatccatggttattatgacagagcggtgctcgcctggagggaatctgtggttgcaagagttggagcttccttaccctattttaatcaccatgttcatgaatagctttggc

SEQ ID NO: 174425 - DNA, 201 bp, Homo sapiens
ttgaacccgggagatggaagttgcagtgagccgagatcgcgccattgcatgccagcctgggtgacagagcaagactgtgtctcaaaaaaaaaaaaaaaaaagaaggtggtacacctgtatagggcacttaccatgaatgaagcttgcaggcttggaagttgctctgggtgagtcagtgagtgagtggtgaatgagtgcgaa

SEQ ID NO: 174426 - DNA, 201 bp, Homo sapiens
ccacaagacaggggttcctacaggggttgttgtgagagttaatggggtaaggtgtgtccttagtgcggagtctggctcatggtgagtttccatccatggttattatgacagagcggtgctcgcctggagggaatctgtggttgcaagagttggagcttccttaccctattttaatcaccatgttcatgaatagctttggca

SEQ ID NO: 174427 - DNA, 201 bp, Homo sapiens
ttccaaggaacagtgttttggggaaagatgcaataaaatatgtattcatttgttcaaagatatttcctgatggcctattatgggttaggcactctcctaggtgatgggagagcaaagatgtcttttccagggacttcacagtaggaaaaacagatatgcaactagctgtagccagagccagaatgtgacaatgccagggca

SEQ ID NO: 174428 - DNA, 201 bp, Homo sapiens
cacaagacaggggttcctacaggggttgttgtgagagttaatggggtaaggtgtgtccttagtgcggagtctggctcatggtgagtttccatccatggttattatgacagagcggtgctcgcctggagggaatctgtggttgcaagagttggagcttccttaccctattttaatcaccatgttcatgaatagctttggcat

SEQ ID NO: 174429 - DNA, 201 bp, Homo sapiens
gttagtacactttatgtaagttgtacctaaagttttttttaaaaagtgaatggttcagaagtagagagaatgaaaataaaaacttttgtttttttttttttgagatggagttttgctcttattgcccaggctggagtgcagtggcgcaatctcagcacaccacaacctccaccttctgggttcaagcgattctcctgcctc

SEQ ID NO: 174430 - DNA, 201 bp, Homo sapiens
tccctggaggcaaaaatcctccagaagttgtcaagagggagagcgtggtgagcagaacgcccctcaggaagacagcttatgaggatggaaggaattgcttygaggagcgatgtgattgagagaggcccaaggggcatgtgtgatgcagcccggtccaggggcatttgctgcgaggcctccttaggagatgcgagtttaggc

SEQ ID NO: 174431 - DNA, 201 bp, Homo sapiens
tctcccacctcagtctcctgagtagctgagattacaggtgtgcaccactatgcccagctaaattttgtatttttctgtagagatagggtttcactatgttrcccaggctggtctcaaacgcctgggctcaagtgatccacccgcctcagcctcccaaagtgttgggattacaggcgtgagccaccatgcccagccacactc

SEQ ID NO: 174432 - DNA, 201 bp, Homo sapiens
tcacggtggctttcttgtgtgtttccttatctggcagactaagttcccatttattattctcattagtccttgcttgccatgcattttcttttccaggtgawttttaaaatcagcttgtcaagttctctgaaaaaatcccagttggaattttgtgcaattacatgtaattaataggttaatttataaataacttatgttctt

SEQ ID NO: 174433 - DNA, 201 bp, Homo sapiens
ttcccatttattattctcattagtccttgcttgccatgcattttcttttccaggtgaattttaaaatcagcttgtcaagttctctgaaaaaatcccagttrgaattttgtgcaattacatgtaattaataggttaatttataaataacttatgttcttataacatcaagtccttcaatttgagatcatggtttctctctcc

SEQ ID NO: 174434 - DNA, 201 bp, Homo sapiens
ggagcccaaggcttttcctggatcgcagtcactccctccgcctcgctggtctctgctgcagttggcctttgtggttggctgacattctagttggttaacaygtgcgtttgtttggatgttctgtcctcaggcatccgaaggcgtctccatgaggttcttcaccaagctggaccagctcatcgagttttacaagaaggaaaa

SEQ ID NO: 174435 - DNA, 201 bp, Homo sapiens
ttcagccccccacttagggacgggaacgtgctttctctcagcaaagctgtcgaatatgctctctgctgcggcctcagagcagaaatccagcactggaaaakatctcagacaatctggcccaaccctcactcaactcaaaaatgtcccaacagaacccaacatccagcacccccagatcaccctccccgaccctgtggattt

SEQ ID NO: 174436 - DNA, 201 bp, Homo sapiens
cattagaaatgacactaatgacccaggcgtggtggttcatgcctataatcccagcactttggaaggcagagctgggcggatcaccagaggtcagaagttcragaccagcctggccaacatggtgaaatgccaactctactaaaaatacaaaaattagccaggcgtggtggcgcatgcctgtaaccccagctactcaggagg

SEQ ID NO: 174437 - DNA, 201 bp, Homo sapiens
tctgtcatgtcttatgctgcatcaaatcttgggaagttttcattccctacagcgatcagatgagtgtttaattctgtctttctgctgcattttctacaatwtaattttttttacatcaactaatccacgttttgttctaagacttgagacatttgcccccaaagtactgtggtgttgttctgacggatttattaaataacc

SEQ ID NO: 174438 - DNA, 201 bp, Homo sapiens
gtttcaacatgttggccaggctggtcttgaactcctgacctcaagtgatcagcccgcctcggcctcccaaagtgctgggattacaggcgtgagccaccacrcccggtgcattgggtgttatttttctcgcttcctatctatgctaacttcatgtctgtgaaagagcaacttaatgattccttagtttgcatttttgatggc

SEQ ID NO: 174439 - DNA, 201 bp, Homo sapiens
tgggagagtgccagcttcctttggaggtgaaggaggtgacagaactggggtcttgccacacagtgatttggcagagggacattaagtacaaagtacaaagktcctgaggcaggaatgaagacagcctgctcaaggaacgggaagtctgtgtggcaagtgagtgttaggaacagaggttggggagaggctggtgtaacatgt

SEQ ID NO: 174440 - DNA, 201 bp, Homo sapiens
cttccccagatccttgctggcattgggtggttttgttttttgtttttggaggccagagtgcagtggcacgatcttggctcgctgcaacctccgcttcccakattcaagagattctcctgcctcagcatcctgagtagctgtgattacaggcatgcaccaccacccctggctaatttttgtaatttttcgtagagagggggt

SEQ ID NO: 174441 - DNA, 201 bp, Homo sapiens
acagaactggggtcttgccacacagtgatttggcagagggacattaagtacaaagtacaaagttcctgaggcaggaatgaagacagcctgctcaaggaacrggaagtctgtgtggcaagtgagtgttaggaacagaggttggggagaggctggtgtaacatgtaaaagctggtcaacaagtaaaagcacaggctgcccaga

SEQ ID NO: 174442 - DNA, 201 bp, Homo sapiens
tggtcactgtaggcaggagccacatcacgcaaggcttaagaggccctatagagtttgtgcagggctgggccatgatctgattttcaagtggtggaggatgmatcctaggaggcactgcccaaagcaggagaccagctgggagtggctgtggttgtccaagtgagacaggatggcagtccatgaggaaggtggctagcaggg

SEQ ID NO: 174443 - DNA, 201 bp, Homo sapiens
caggatggcagtccatgaggaaggtggctagcaggggcaggggtctgtgtctgttttgcttcctgctgagtccccggttatacacaggctctggcacatgyggctcaacagatattaggtaaatgacccaatggctgggggcgtgcagatgctgagaactggtgtgacctgggacacgtgtgcatggcaaaggtgtcagat

SEQ ID NO: 174444 - DNA, 201 bp, Homo sapiens
aaacaataaaaaaaaaagtatggcaattactaactccaggaataacacaaagttgtctagaaaaagaaaaacaatcagggctggtctgtcaatagcatttygataatcagaataacaaacactgagtacttatctggccaaaattatgatataattgttagaaggatgatgtggggactgaaattatgcattggcagggag

SEQ ID NO: 174445 - DNA, 201 bp, Homo sapiens
gctacacgttaaaggaagcctggcctagcccacagcatgcagggacctgggccacttagttcaacatggcctggtgagaatgagccctgacagcccttctrttcttgtcccacagtgaagccctcagtgagctgccactgagtcgggagcccagaggaacggcgtgaagccactggaccctctcccgggacctcctgctgg

SEQ ID NO: 174446 - DNA, 201 bp, Homo sapiens
gcctagcccacagcatgcagggacctgggccacttagttcaacatggcctggtgagaatgagccctgacagcccttctgttcttgtcccacagtgaagccytcagtgagctgccactgagtcgggagcccagaggaacggcgtgaagccactggaccctctcccgggacctcctgctggctcctcctgcccagcttcctat

SEQ ID NO: 174447 - DNA, 201 bp, Homo sapiens
tggtgaaattccatctacactaaaaatacaaaaaattagctggatgtggtgttgcacacctgtaatcccagctactcaggaggctgaggtaggagaatcgyttgaacccaggagacggaggttgcagtgagccgagatggtgccactgtgctccaggctggatgacagagcgagaccgcgtttaaaaaaaaaaaggaaata

SEQ ID NO: 174448 - DNA, 201 bp, Homo sapiens
gagagttataaactggggaagaattagaaacaataaaaaaaaaagtatggcaattactaactccaggaataacacaaagttgtctagaaaaagaaaaacawtcagggctggtctgtcaatagcatttcgataatcagaataacaaacactgagtacttatctggccaaaattatgatataattgttagaaggatgatgtgg

SEQ ID NO: 174449 - DNA, 201 bp, Homo sapiens
gtcatgtcctaatccccttgatgtttccaggacccagcaaagtacatgaaatgttgatttattcgatattcatgaacaaagatccaatgtgtaccaactayctgcaaggcactgttccaggagctggaaatacagcagtgaataaaacagaatctttaagaaatctctgctgagcaactgagcaataacaacagccagaaa

SEQ ID NO: 174450 - DNA, 201 bp, Homo sapiens
ggaaaagagagttataaactggggaagaattagaaacaataaaaaaaaaagtatggcaattactaactccaggaataacacaaagttgtctagaaaaagaraaacaatcagggctggtctgtcaatagcatttcgataatcagaataacaaacactgagtacttatctggccaaaattatgatataattgttagaaggatg

SEQ ID NO: 174451 - DNA, 201 bp, Homo sapiens
cgggaggcggaggttgcagtgagctgaggtcatgccactgcactttagcctgggtgacagagcaagactccatctcaaaataaataaataaataaataaataaataaataaataaataaataaatagatgagaggaagtcaggaagagagagagaaaaggacaggacaggatagccctgaagctcagctcagctgtctctc

SEQ ID NO: 174452 - DNA, 201 bp, Homo sapiens
gaacctgggagacggaggttgcagtaagcagagatcgcgccactgcactccagcctgggagacagagtgagactctgtctccaaaaaaaaaaaaaaaaaaagaaagaaaggaagaaaagaaaatgggagccaaatagatcataaataaatagatttatgatcaaaatagattacaatttgatttattacaatcaatagatc

SEQ ID NO: 174453 - DNA, 201 bp, Homo sapiens
cgagagagagaaacgtattcctggattatgaagtaaggccccaaggtaaaggctgtgcctcggcccttgaagtcaccagtccagagaagacccagaagctstgggaaaggctccctcaggacaaaggaactgatgaaagtagttggtcacatggaaaagagagttataaactggggaagaattagaaacaataaaaaaaaa

SEQ ID NO: 174454 - DNA, 201 bp, Homo sapiens
ccgcatcacggcaagcaccggccggaggaggggccaccagggcctctaggcaggactgccatgcaggtgcgctgcgccacacgtgggttcgtgtgcatttkgtgtgtgtgtgcatgcgtgagtgcgtatgtgtgtacctatgcatatgtgtgtgcatgtgtgtgtgcacgcatgcatatgtgcgtgcatgtgtgaacgcat

SEQ ID NO: 174455 - DNA, 201 bp, Homo sapiens
gaagaggaagacctggggtccaagaaatgggatttaatacgagagagagaaacgtattcctggattatgaagtaaggccccaaggtaaaggctgtgcctcrgcccttgaagtcaccagtccagagaagacccagaagctgtgggaaaggctccctcaggacaaaggaactgatgaaagtagttggtcacatggaaaagaga

SEQ ID NO: 174456 - DNA, 201 bp, Homo sapiens
tttgggaggccaaggtgggaggacctcctgagaccgggagtttgagaccagcctgggcaacataggaaggtaccatttctacaaaaaaaaaaaaaaaaaaatggcatagtagtgcatgcctgtgggcccagctactcaggaggctgaggtgggaggatcacttaaatctgggaggtcaaggctacagaaagccatgatttt

SEQ ID NO: 174457 - DNA, 201 bp, Homo sapiens
aaaccaagaagaggaagacctggggtccaagaaatgggatttaatacgagagagagaaacgtattcctggattatgaagtaaggccccaaggtaaaggctrtgcctcggcccttgaagtcaccagtccagagaagacccagaagctgtgggaaaggctccctcaggacaaaggaactgatgaaagtagttggtcacatgga

SEQ ID NO: 174458 - DNA, 201 bp, Homo sapiens
aaaggcctggccagagtcccagctttatgaccattgcagggcagcttctgggctgtgcagctcacacacaccttcccctccttcccctccttcccctcctytctgccctggggccagcctccctcctccactcccctgaaatggctcccagccataattagcacaggacagaaacagcaaatgctggtcggtgtggtaggc

SEQ ID NO: 174459 - DNA, 201 bp, Homo sapiens
gcctctcatggtatctcaaggatcaaatgagttgagaaatgtagcacccagagcctggtacatattcatagtaagcactccataaatgcagctacggtcaytagcatgattacaatctgctgaatttcactgagaggagagtgaaggaggagacccttgcacctaactggaaggatgaggaaggtgtttctttatgtcatc

SEQ ID NO: 174460 - DNA, 201 bp, Homo sapiens
ctaccaaaatgagggtgtaaaccaagaagaggaagacctggggtccaagaaatgggatttaatacgagagagagaaacgtattcctggattatgaagtaakgccccaaggtaaaggctgtgcctcggcccttgaagtcaccagtccagagaagacccagaagctgtgggaaaggctccctcaggacaaaggaactgatgaa

SEQ ID NO: 174461 - DNA, 201 bp, Homo sapiens
aggcctctaaaaatgtatcaccgattcttcctttcttggaaagccactagagatgctgctctaccaaaatgagggtgtaaaccaagaagaggaagacctgrggtccaagaaatgggatttaatacgagagagagaaacgtattcctggattatgaagtaaggccccaaggtaaaggctgtgcctcggcccttgaagtcacc

SEQ ID NO: 174462 - DNA, 201 bp, Homo sapiens
gaccaaactgagggtcaggctgctatttcttgtggcccaataacaagatgcacatgaactggggaggaagacaggttttattttctgtaactggttacagraagaaggcctggaaattatcaccagaccaactcaaaattacaaagttttccagagcttatataccttctaatctgtatgtctacgtgtgtgtattcattg

SEQ ID NO: 174463 - DNA, 201 bp, Homo sapiens
cgcgatctcagctcgcagcaacctccacctcctgggttcaggcgattctcgtgcctcagcctcccaggtagctgggactataggcatgcaccaccatgccyggctaatttttgtatttttagtagaaatgaggtttcaccatgctggccaggctggtctcaaactcctgagctcagatgatctgcctgccttggcctccca

SEQ ID NO: 174464 - DNA, 201 bp, Homo sapiens
agaccaccctgcggagaagccctgctcgacagaccccacctcactgttggacacagacagccaaggatcaccagacactggagggaagctggggacaggaracaggggacacaaagacaaaacacttggagggatcaaattctttttgtttttttttgagacagagtttcactcttgtggcccaggctggagtgcaatggc

SEQ ID NO: 174465 - DNA, 201 bp, Homo sapiens
atgctgctggccagccccaccctccctaggcaggagttagaagtcttctctgggaaacttgatcagcccaggggcaaagatggaaaggtgttgccatcacrcagtttccccaggattcagcccatcagaccaccctgcggagaagccctgctcgacagaccccacctcactgttggacacagacagccaaggatcaccaga

SEQ ID NO: 174466 - DNA, 201 bp, Homo sapiens
ggtttcacatttccagcctcatacataggcatacctagattttcatacttacatcacagaaacatcattttatactctgcttccctcacctggtattagawgaaacacattttccatgattctcctgccccatctttgtgactgttccttttgatggctgcattatattccatggacttactgcatcctcattttaaaagt

SEQ ID NO: 174467 - DNA, 201 bp, Homo sapiens
cgtggctcacgcctgtaatcctagcactttgggaggctgaggcaggcagattgccggagctcagtagtttgagaccaacctgggcaacacggtgaaacctygtctctactaaaatacaaaaaattagctgggtgtggtggtgggtgcctgtagtcccagctactcctgaggcagagacaggagaattgcttgaacctggga

SEQ ID NO: 174468 - DNA, 201 bp, Homo sapiens
gggagacggaggttgcagtaagcagagatcgcgccactgcactccagcctgggagacagagtgagactctgtctccaaaaaaaaaaaaaaaaaaagaaagraaggaagaaaagaaaatgggagccaaatagatcataaataaatagatttatgatcaaaatagattacaatttgatttattacaatcaatagatcaaattt

SEQ ID NO: 174469 - DNA, 201 bp, Homo sapiens
agtgagccagcatttgcccacccctgacactggagggcttgtcaaacacagattactgggccccatcccaggatttcagattcagtaggtctggggtgggrctgagaatctgcccttccatgaagttcccaggtgatgtgcagctgctggtccagggaactccctttgggaaccactgacctagaatagatcagaacgttg

SEQ ID NO: 174470 - DNA, 201 bp, Homo sapiens
aaactcaggtaatggaactccttccccccaagagtgtgcatttgggctgtctgcccagacacgcctcacacctttaagcaccagaaggacctgctcagctyctgcctttgaccttgtggatgtcctgtggcctttcagggcccaccacagtctcatcaaaggcaactgcagcaccatagtgacctcacgtgtggaggaatt

SEQ ID NO: 174471 - DNA, 201 bp, Homo sapiens; identical to SEQ ID NO: 31137

SEQ ID NO: 174472 - DNA, 201 bp, Homo sapiens
aaaagaaagcactgtaattttgcagtagattaaaagataaacggaaaccatttacatagataacattttaaattcatctctaatttttaaaaatcattttwaaaaaaaaggaatagaaggatacttccttaataatgcaatatgaatcaaagtaaaactaattacaatcgatagggaaacattaaaatcattccattaaac

SEQ ID NO: 174473 - DNA, 201 bp, Homo sapiens
tgatttcacttattaatataaatgcatattgtttcagtaacatcccagcaaatataatttagtgacatgaaaaatggaggctttatctaggaggtcactcyaaagatgagtcaacaaaaagaaagcactgtaattttgcagtagattaaaagataaacggaaaccatttacatagataacattttaaattcatctctaatt

SEQ ID NO: 174474 - DNA, 201 bp, Homo sapiens
ggaggacaagatggtaaaaataaaaacagagatacatcaggaaaaactgtcaattaagaaagttttaaacatgagaaatgtcaaaggagaattaataatcygcattaaagatttggaagtcactaaagaatagtgtacagttatgtagctacagatcttcaagttataattaaatggaacacatagtttacgtaaaatata

SEQ ID NO: 174475 - DNA, 201 bp, Homo sapiens
gacggggttttgccatgttggccaggctgatctcgaactcctggcctcaagtgatccacccacctcggcctcccaaagtgctgggattacatgcgcccacmaccacgcccagctaatttttgtatttttagtagagacggggttttgccatgttggccaggctgatctcgaactcctggcctcaagtgatccacccacctc

SEQ ID NO: 174476 - DNA, 201 bp, Homo sapiens
aataataataataataggctatttcagagcaggtttgtgagccctgaagagcatgggtgcccacagactgccagcccactctccgggaatgtgcccacctrgctccagtcctcccgtcaatccaggatggtggagcctgacttcctctctgtggtgacacctgtcacatcagagcacaattgactcctcacaaattccctc

SEQ ID NO: 174477 - DNA, 201 bp, Homo sapiens
gcttcccaaatagctgggattacaggtgcctcccatcacatccagctaatttttgtatttttagtagagacgaggtttcaccatgttggctaggctggtcycgaactcctgacctcaggtgatctgcccgcctaggcctcccaaagtgctgggattacaggcgtgagccactgcacctggccctggtatacaattctttat

SEQ ID NO: 174478 - DNA, 201 bp, Homo sapiens
tggtgtgttcttggctcactgtaacctccgcttcctgaattcaagcaatcctctgcctcagcttcccaaatagctgggattacaggtgcctcccatcacayccagctaatttttgtatttttagtagagacgaggtttcaccatgttggctaggctggtctcgaactcctgacctcaggtgatctgcccgcctaggcctcc

SEQ ID NO: 174479 - DNA, 201 bp, Homo sapiens
acctgcctcggcctcccaaagtgctgggattacaggtgtgagccaccgcacctggcctttttttaaaattattattattttattttttatttttgagacasggtctttcgctgttgcccaggttggagtgcagtggcacaatcacagctcactgcagccttgcttgatcaagcgatcctcctgcctcagtttcccgagtag

SEQ ID NO: 174480 - DNA, 201 bp, Homo sapiens
gctaggctggtctcaaactcctgacctcgtgatccacctgcctcggcctcccaaagtgctgggattacaggtgtgagccaccgcacctggcctttttttawaattattattattttattttttatttttgagacacggtctttcgctgttgcccaggttggagtgcagtggcacaatcacagctcactgcagccttgcttg

SEQ ID NO: 174481 - DNA, 201 bp, Homo sapiens
ggctaggctggtctcaaactcctgacctcgtgatccacctgcctcggcctcccaaagtgctgggattacaggtgtgagccaccgcacctggcctttttttwaaattattattattttattttttatttttgagacacggtctttcgctgttgcccaggttggagtgcagtggcacaatcacagctcactgcagccttgctt

SEQ ID NO: 174482 - DNA, 201 bp, Homo sapiens
gacccaccatgcctggcaattcctgtccaatcttaagagcaacggcttttcattctttcacagattccacaggaaaagccttgtggcctttagtttcaatwtgattacatatcaagcctggaataaaaatctttaaggcggctgggcagggtggttcacacctgttatgccagcactttgggagcctgaggcagtggatca

SEQ ID NO: 174483 - DNA, 201 bp, Homo sapiens
gagggactacaggcatgcaccaccatgcctggctaatttttttattttttgtagaggcagggttcccctatgttgcccaggctggtctcaaactcctgggmtcaaacaatccttctgcctcagccccccaaagtcctgggattacaggcatgagccactgtgccaggcccaaatgttttattaaaaatgcaatgatgctat

SEQ ID NO: 174484 - DNA, 201 bp, Homo sapiens
cagtctcatcaaaggcaactgcagcaccatagtgacctcacgtgtggaggaattttgtctgaaggtcagaaaagatatttccttgtgtcattagcctgatrgaccgctaactagcactgtttctaaagcagaaagcctcctctggggcctccttacaaatccaagctgatcttgcctagctggggcccaggaatgaagaca

SEQ ID NO: 174485 - DNA, 201 bp, Homo sapiens
gaggaattttgtctgaaggtcagaaaagatatttccttgtgtcattagcctgatggaccgctaactagcactgtttctaaagcagaaagcctcctctgggkcctccttacaaatccaagctgatcttgcctagctggggcccaggaatgaagacagccatctagaatcttcactgttctgattctctgctgagcagatgct

SEQ ID NO: 174486 - DNA, 201 bp, Homo sapiens
gccccagatcatgggcctgtttcctgtctttgttacccaaagcggtctagaactaacatcaacatgcaccatgtagccgataagtttagactggggaatgrgatgcaagtgtaaccaatgagatgtgaagagaagggctttgtgggcttctagtaaaggtctgtttgtcttaaaaacagacatagggataagatagcctct

SEQ ID NO: 174487 - DNA, 201 bp, Homo sapiens
ccctttgcatcctggctgtgccatatttgcacactaaggagttctgctgcagcagggctggagggctaagtctcacttccccccacctgctatgctcctcrccccacacctatggcaggagtgacttcctgccacagtggagggggaaccagtgaccccgtgctagatggccgctttttccttgcattaggcgaaaccaaa

SEQ ID NO: 174488 - DNA, 201 bp, Homo sapiens
aaaaatccagtggtctgagccattccggtgagttctaaagaagagacacttgtgactcaagtccctggtccctgacggtggctgtcacgtatctccgggcracatggcttttggagagggaaaacaaaacaactttctaaaagctgttccgtcacaagcatccgggaggtgaacggttgagccattgttattaagctcagg

SEQ ID NO: 174489 - DNA, 201 bp, Homo sapiens
ctgtcccttgtggtaaatcagtgaggtgcccctagaatgaaagcagactccattcccggctgggatctgggttcaagtccaatttggtcagcgatgtggcyttgggcaaggactgccaagaaactgctggaaagtagagatcacacacatacctcccagcacaaggaagctgctggggaggagggtggagacagcagggag

SEQ ID NO: 174490 - DNA, 201 bp, Homo sapiens
gccaattgcctgaggcacttgcaatgtcatccatcataaatcccagttctgtctcccctctttaatgtgggcttcacaaaggctgggatgtggattttttsgttgttgttaaccactaaatcccagagccaaaacagtgcttagcacagagtaagtgatcagtaaatgcatattgagagaacgcatgcatgaatcagtgaa

SEQ ID NO: 174491 - DNA, 201 bp, Homo sapiens
attaggagtggctccactcttctgtggagtcacaaaggacacacttccctcctcccccagtgaggtgtgacaacatgtgtgaaatgtggttgttaactggsgaatggtcacatagacaccctctacctggcaggtacccagattacagactcccaaaaggaaaacaggtgctcagcataaaccatattgtttgtacaaaca

SEQ ID NO: 174492 - DNA, 201 bp, Homo sapiens
atctgccttcctcggcctcccaaagtgctgcaattacagcatgagccaccatgcccagttcaaacagtaattttagtaaatgtcatggtaagataaaacasgatgatgtgaggaagagacattgggtgggagagtgccagcttcctttggaggtgaaggaggtgacagaactggggtcttgccacacagtgatttggcaga

SEQ ID NO: 174493 - DNA, 201 bp, Homo sapiens
gtttcaccatgttgcccaggctggtctcaaactcctgagctcaggcaatctgcctgcctcagcctcccaaagtgctaggattacaggcatgagccaccgcrcctggcccacgcttccttctaagtacagcgagccaccattaggagtggctccactcttctgtggagtcacaaaggacacacttccctcctcccccagtga

SEQ ID NO: 174494 - DNA, 201 bp, Homo sapiens
cacaagggcaggggtgcccttcccacagaagagtatggaaggagccagctgaggccatgccgcaggagggccggggacccaccagcccgggggttcgggcmcccactttgagcctcttgggggagcagaatttagccacagtccatttactccaatgcttggcttctttgcacttgtaaggcaagaagctcatctctttga

SEQ ID NO: 174495 - DNA, 201 bp, Homo sapiens
gttttccaggttatgttccagggcagcaattgccaaacactatttagttgtagaatctttgctttaaacattttgcatgcaagatattgtgtgtgtgtgtkcatgtgtacatacacacatgcatgcatgcatgttacatgtatacacatgtatgcatatgttgtgtgtgcacatgtatatgtgtgtgtgtgtgtgtgtata

SEQ ID NO: 174496 - DNA, 201 bp, Homo sapiens
aggaagtactgttgggcccagtgctatcctaacccagatctccaatgggaataatcctgatctgattactctgaaaggtcatccagtcactgggaggagtytcagctgagagccagtgttagcgtaacaaggtgttaccaaatcaccacaaagagctggggaagggctgggcgggacccactgcccctaaagagcagtgag

SEQ ID NO: 174497 - DNA, 201 bp, Homo sapiens
caagataggaacacaaagaggttcttgaattttatagttggattctctgtctctctgtgggtctgtccatggtgaagatgttcctgggtctggctgtcagygttcatttggctaggaatggccacacagaaatgctaagatttatctgaaagaatcaaacacgatgatgtttcttcctacttccacgggcttgtcctccca

SEQ ID NO: 174498 - DNA, 201 bp, Homo sapiens
ttgttttacattgaaccatttaatctctctggaattaatttaacaaatgatgcaggatacagatttaggctgggcacagtggctcacacctgtaattgcascactttgggaggccgaggcggccggatcaccagaggtcaggagatcaagaccatcctggctaacatagtgaaatcctgtctctactaaagatacaaaaaa

SEQ ID NO: 174499 - DNA, 201 bp, Homo sapiens
aattcacttgtttcttcttgtacaaggcaggtgggttatgacagagactttggagctaatagacttgggctaaggattcagcaggtttttttttttttttcgagatggtgtctctgtctgtcacccaggctggagtgcaatggtgtgatcttggctcactgcaaacttctgcctccccagttcaagtgattcttctgcctc

SEQ ID NO: 174500 - DNA, 201 bp, Homo sapiens
gaaattcacttgtttcttcttgtacaaggcaggtgggttatgacagagactttggagctaatagacttgggctaaggattcagcaggtttttttttttttttcgagatggtgtctctgtctgtcacccaggctggagtgcaatggtgtgatcttggctcactgcaaacttctgcctccccagttcaagtgattcttctgcc

SEQ ID NO: 174501 - DNA, 201 bp, Homo sapiens
ttagtctttatgagctaaaagtgactagtgacatctcagaagcagaggagtacaggacccatctgtgaagaacattccatacagaggagagaggagaatgrgggcagaggattgcttaggaaacttcctggaggcctctgggggatgctgagttgtcacttgaggcctccttggaggaagcactcagagagatggaagcag

SEQ ID NO: 174502 - DNA, 201 bp, Homo sapiens
gctggcaattagtctttatgagctaaaagtgactagtgacatctcagaagcagaggagtacaggacccatctgtgaagaacattccatacagaggagagargagaatgagggcagaggattgcttaggaaacttcctggaggcctctgggggatgctgagttgtcacttgaggcctccttggaggaagcactcagagagat

SEQ ID NO: 174503 - DNA, 201 bp, Homo sapiens
gtccaggctggagggcagtggtgcgatcttggctcactgcaacgtccgcctccttgttcaagcaattcttctgcctcagcctccggagtagctgggattayaagtgtgcgtcaccatgtctggctaatttttgtatttatagtagaggcgaggttttgctatgttggccaggctggtctcgaactcctgacctcaggtgat

SEQ ID NO: 174504 - DNA, 201 bp, Homo sapiens
gtccacccccactcgtcccccttccttcctgccacagtagaagggtggggctggcgtggctatcctggctgcgcccacgccctcctgctgcccagcaaccrccccgggtgtggattccatcgctccctgggcttccagtccctcccaccagcccctgccccgctgtgcagaatatgctcggacctcctagggccacataaa

SEQ ID NO: 174505 - DNA, 201 bp, Homo sapiens
cactctgtcgtccaggctggagggcagtggtgcgatcttggctcactgcaacgtccgcctccttgttcaagcaattcttctgcctcagcctccggagtagytgggattacaagtgtgcgtcaccatgtctggctaatttttgtatttatagtagaggcgaggttttgctatgttggccaggctggtctcgaactcctgacc

SEQ ID NO: 174506 - DNA, 201 bp, Homo sapiens
cataggaaatagagatccccttctcctattggtaaccctaatgtcctgcaaatcccccaccctagtcccactgttgacagtttctcagatactgttttcawatgttttatatatttatatttgtttttgtaaataggataataccgtatacactgttctgcgatttgctttcttcccttagcaatctgtccgtgagatgga

SEQ ID NO: 174507 - DNA, 201 bp, Homo sapiens
gagggggtggtggtgggcacctgtaatcccagctacttgggaggctgaggcaggagaatcgcctgaacctgggaggcagaggttgcagtgaaccgagccaytggactccagcctaggcaacaagattgaaactgtctcaaaaaaaaaaaacaactcctgggctcaagcaatcctcccaccttggcttcccaaaatggagat

SEQ ID NO: 174508 - DNA, 201 bp, Homo sapiens
aatacaaaaattagctggagggggtggtggtgggcacctgtaatcccagctacttgggaggctgaggcaggagaatcgcctgaacctgggaggcagaggtygcagtgaaccgagccattggactccagcctaggcaacaagattgaaactgtctcaaaaaaaaaaaacaactcctgggctcaagcaatcctcccaccttgg

SEQ ID NO: 174509 - DNA, 201 bp, Homo sapiens
acctcggcctcccaaagttctgggattataggcatgagccaccccgccaggctgcagttaaatttaaaaacaaaaatcagctgcacccgtccaagcccggraaggccaccctaagcacggtttactaaaggctttgtttcgccacaaaatgtgacaactgagtgtgtggaagccaggaaagctattgttatctggctacat

SEQ ID NO: 174510 - DNA, 201 bp, Homo sapiens
tacccagctaattgttatattttttgtagagatggggttttgccttgttgcccaggctggtctccaattcctaggctcaagcaatctgccttcctcggccycccaaagtgctgcaattacagcatgagccaccatgcccagttcaaacagtaattttagtaaatgtcatggtaagataaaacaggatgatgtgaggaagag

SEQ ID NO: 174511 - DNA, 201 bp, Homo sapiens
ttgctcatccttcaagggcattgtagggagaaccgttcaaaatttcttgattgagcttcttcaactcagttttgaaatgggaatgcggaggagtttccacrctctcccgtttctctggctcacacccaggcatccctccgctctgggctgggatctgtcttgcaagggagactttgttgtctcccaacaatgggttagaac

SEQ ID NO: 174512 - DNA, 201 bp, Homo sapiens
gtgagccgagatctcgccactgcactccagcctgggtaacagagcaagactccgtctcaaataaacaaacaaacaaaggaaagaaaggtcaacattttgaytggaaaaatgggatttcatactggcaacggttttgtagtctgtgctgttttgtgttttattacacatacagccgtttcaagattcctttgttgatttttc

SEQ ID NO: 174513 - DNA, 201 bp, Homo sapiens
atcagctctcagttttcaaggatgtctggaggcccccactgagagatgcgtctgtattcagaaataaatgggatctgtggggtattgctgaaaaccactgrgtcctctatcttcccacccttggtcagccccggttctcatctttaggatgttttgtctcgcctatcaagcatcgctgggagtcccccgaagggttgggat

SEQ ID NO: 174514 - DNA, 201 bp, Homo sapiens
cttttgcaggaaagggaagggcctgacagtaaatatttcaggctttgcaggccactcaacactattcctctctgcctttctggtgggaaagcagccatagscaacccagaaagcgaatgggagtgactgtgttaccagtgagaccttccttacaagcacaggcgggaggtggctggcccctgccctcggtccctgtgcacc

SEQ ID NO: 174515 - DNA, 201 bp, Homo sapiens
tatttcaggctttgcaggccactcaacactattcctctctgcctttctggtgggaaagcagccataggcaacccagaaagcgaatgggagtgactgtgttaccagtgagaccttccttacaagcacaggcgggaggtggctggcccctgccctcggtccctgtgcaccaggttggatctggaaacgctggtgtcagtggag

SEQ ID NO: 174516 - DNA, 201 bp, Homo sapiens
caggctggtctcgaactcctgacctcaggtgattcacccaccttggcctcccaaagtgctgggatcacacgtgtgagccaccgtgcccagccgagacttgsaactttagattgttttgtcctaaacttcccatggctacaccagcccgttactccagaccattgaggtcagcttcatcctggctctagcacctggcatgtg

SEQ ID NO: 174517 - DNA, 201 bp, Homo sapiens
tgggagtgactgtgttaccagtgagaccttccttacaagcacaggcgggaggtggctggcccctgccctcggtccctgtgcaccaggttggatctggaaaygctggtgtcagtggagagttgctggcttcagagagcagtaacaagggcaagaagtcttcataagtgtaggagtgcaagcctgtgtgtttgtgtaggatgt

SEQ ID NO: 174518 - DNA, 201 bp, Homo sapiens
tgtgctaatttcccccatagtcctaatctgatttgaaacgcctcctcctgttccattgatagattaatctactcttgacccagctgcataggtttaatcamggtggctttcttgtgtgtttccttatctggcagactaagttcccatttattattctcattagtccttgcttgccatgcattttcttttccaggtgaattt

SEQ ID NO: 174519 - DNA, 201 bp, Homo sapiens
atctcaaaagaaaagaaaaaaaatgtttctagagctagttaacctttgggcatctcccgctccctagagggccctgtggaacagggtgggagtttccatgwagagcctgctcgcaccctccagttcccctcttttttctcgaccatgaggttccccattctataagcagcttcctagtctctcctgtaggggacacttagt

SEQ ID NO: 174520 - DNA, 201 bp, Homo sapiens
acctgagctctgcctcctgtcagatcagcggtggcattagattctcatgagtgtgaacccggttgtgaactgtgcacttgagggatctaggctgcacgccycttaggagaatctaactaacgcctgatgatctgagatggagcagtttcctcccacaaccatccccccaccacccatccgtggaataattgtcttccacaa

SEQ ID NO: 174521 - DNA, 201 bp, Homo sapiens
cttttttttttttttttttttttgagacatagtcttgctctgtcgcccaggctggagtgtagtggtgtaatcttggctcactgcaacctctgcctcccagkttcaagtgattctcctgcctcagcctctcaagtagctgggattacaggtgcgcaccaccacacctggctaatttttgtatttttagtagagatgggattt

SEQ ID NO: 174522 - DNA, 201 bp, Homo sapiens
taggcatgagccactgtgcccagcctaccacaaacattttaacaaatagaactgcctgtaatacagactcacggtatcaaagtcacaaggcaatagtaatwagacctgttaagatacatattttaatacaggggtccccaacctgtggactattaggaactgggtggcagcaggaggtgagcggagggcaagcgagcatta

SEQ ID NO: 174523 - DNA, 201 bp, Homo sapiens
aggcactgtgccacgtacctatagtctcagctgctcaataggctgaggggggaggatcgcttgagcccagtagttcaaaaccagcctgggcaacgtagacyccatctctgaaaaaaatgaaagaaagaaatgactgttaactcttgaccctcaaagttgaaggtgcactgaaggagttcttaattgcctgaatgcttattc

SEQ ID NO: 174524 - DNA, 201 bp, Homo sapiens
tcaccatgttggccaggctggttgcaaactcctgacctcaggtggtcagcccacctcggcctcccaaagtgctgagattacaggcatgagccaccgcggcygacccggagcacttttttaaaaattcagttttatttcttttgaaaagaacatattaagtgtgaaccacatgaaagtgtttttgtaggtcagaaatagtta

SEQ ID NO: 174525 - DNA, 201 bp, Homo sapiens
tcatgacattttctggttaggttttgtgggtatctaggaaagtgatagtttcggtagggtactcttaaatatctgtctgaattctcttattcattttaatmgtttctgaatttattcttttggcttccctaggtaaatgatcttgttttgtgcaaataatggcagacagtctgttccttccaatgcaactcatttagggac

SEQ ID NO: 174526 - DNA, 201 bp, Homo sapiens
gcaaagacatggaatcagcctaaatgcccatcagtgatgactggataaagaaaatgttgtatatatacaccatggaatactatgcagccagtaaaaagaaygagatcatgtcctttgcaggaacatggatggagctggaggtcattatccttagcaaactaacacaagaacagaaaaccaaataccacgtgttctcactta

SEQ ID NO: 174527 - DNA, 201 bp, Homo sapiens
ggagaggaaggccaagcgctgggtggattttagaacagagcaggagaggaagagaatacaactgagaggacaggaggagatcccggactgctgtcacccaygaggctgggacccccaggatgggacaccccattccgcagggtccactgcctgctgtgtggataaggtcacctggcccaaaggcactgtcagagcaggtcc

SEQ ID NO: 174528 - DNA, 201 bp, Homo sapiens
aatagagcaacagtcagatggagaaagtcttgcagagaaggagcttacctggggatgccccacttttcccctcaaggatttactgagaatatacctaaggraatagaaatcattttgttacaaagacacatatgtgtatgttcattgcagcactatttgcaatagcaaagacatggaatcagcctaaatgcccatcagtga

SEQ ID NO: 174529 - DNA, 201 bp, Homo sapiens
cagaatgtgacaatgccagggcagggaaggatcagggaagccagcccctggcaggattcaagggtcaaatggctgggacggtgaggtacccaggcccactrgaagcctagggcaatggagcgcaagttcaaagtgtcatctgaaagagttctgggccccatctgggctcaggagaaagtgaagaactggacgtgggagagg

SEQ ID NO: 174530 - DNA, 201 bp, Homo sapiens
gtgggttcgtgtgcattttgtgtgtgtgtgcatgcgtgagtgcgtatgtgtgtacctatgcatatgtgtgtgcatgtgtgtgtgcacgcatgcatatgtgygtgcatgtgtgaacgcatgcatgtgcacacatgcgagtgatggtcctgggaactgctccatgagaagggagagtcaggatttgaacccaggtctgcctgt

SEQ ID NO: 174531 - DNA, 201 bp, Homo sapiens
tggcgagtgaggccaacacacggaaaggagaagtgaacctgggtcctggatgatgcccttgaatttgctgaacagaatgaagcaacctgggatctgccctgcctctagattttctgttttgtgagttaattaatttctttttgctcaagttagttgagttagggttttctaacagctaaaagtgtcctaacttacaaaggt

SEQ ID NO: 174532 - DNA, 201 bp, Homo sapiens
gcaatggatggggcccatctggggtcaggccttcttgctgggacctgggagccagctcagtttaggaggcctggggtgcagcgtggaggtgagggggacarggaaggaagctaacccccaccttgctggacagggtgtatgtgaaagctataccccacctgctctcttgggtatggacagcagagatttagatctgattac

SEQ ID NO: 174533 - DNA, 201 bp, Homo sapiens
aaccttcctaaaacttctgttcggagatgggaatgagtgaagggggcatgtgcagagaccaaggaaagcggcgacacagagccgccctccattctcagggkcaaggaaaactgggaatccacattgtgttttaaaatcagtctatttcgcttgtcaagctgctttgcacatagaggactgccttttgattatttttcttta

SEQ ID NO: 174534 - DNA, 201 bp, Homo sapiens
catcgagcccattgtttagttccccagggtttccatttcttcccaggtttggatgctgagtgcagtaaactggatggggaagagtcggggaggccccatgkttccacctgctgacctctcctactaaggctcgtacacctcccgccaactccatctcctcctcatcagcccctccatcctggttatggggttctgcctcag

SEQ ID NO: 174535 - DNA, 201 bp, Homo sapiens
cacatcgagcccattgtttagttccccagggtttccatttcttcccaggtttggatgctgagtgcagtaaactggatggggaagagtcggggaggccccaygtttccacctgctgacctctcctactaaggctcgtacacctcccgccaactccatctcctcctcatcagcccctccatcctggttatggggttctgcctc

SEQ ID NO: 174536 - DNA, 201 bp, Homo sapiens
ccaaaattgcgccactgcactccagcctgggcaacaagagaaaaactgcgtctaaaaaaaaaaaaaaattccacatcgagcccattgtttagttccccagsgtttccatttcttcccaggtttggatgctgagtgcagtaaactggatggggaagagtcggggaggccccatgtttccacctgctgacctctcctactaag

SEQ ID NO: 174537 - DNA, 201 bp, Homo sapiens
atgataaataatatcgtaaacacggaaatgagtgacagttgtttatcattatcaaatattatgtactgaacagaattgtactgttatgcttttacacagcwggcagtgcagtgggctggtttgcaccagcatccccagaagcatgtgagtaatgtgttgcgctgtgacgtgatgacagctacagcagcactacgtgatggg

SEQ ID NO: 174538 - DNA, 201 bp, Homo sapiens
cttctggttacctcctgaaggacctgcctgaggctattttatagttaacattttcttataagtaggaatacactctaatgataaataatatcgtaaacacrgaaatgagtgacagttgtttatcattatcaaatattatgtactgaacagaattgtactgttatgcttttacacagctggcagtgcagtgggctggtttgc

SEQ ID NO: 174539 - DNA, 201 bp, Homo sapiens
agtgagccatgattgcaccactgcactctagcctgggtgacagaaagagaccttgtctaagaaaaaaaaagagagagagagaaagagacagtaaagactgmacttcctctgcttcacttgactagcctttaaaaagacagagagagagaataacgatagtacctgcctctcatggtatctcaaggatcaaatgagttgaga

SEQ ID NO: 174540 - DNA, 201 bp, Homo sapiens
acagggtgcaccactacgtttggctaatatttgtattttttgtagagacaggtttcatcatgttgcccaagctggtctccacctcctgggcttaagcaatytgcccacctcggcctctcaaagtgctgggattacaggcgtgtgccaccatgtctgaccaagacctcataatttttttttttctttgagacagagtctcac

SEQ ID NO: 174541 - DNA, 201 bp, Homo sapiens
ccctgcacccaccttgagtgcttgtagactaggtgagtcctattatcagagggagattgttggcgtgggggttaaggacaagttaggaacacaggctctcyggtcaggcagacatgggttaaaattcctcctccccagcttattagccaggtgaccttggggaaattacctgacctctctgaatcacagacttctctttaa

SEQ ID NO: 174542 - DNA, 201 bp, Homo sapiens
aaagtgctgggattacaggtgtgagccaccgtgcctggcccaaaaacacttttaaaaataaaagttttttaaaaacggaaagaaaaacagatcttaggaaygatcctctgtgtgccttttgcagaagggcccttggcagctgctggttgcaggatgtgaggtgtgggcatgagggtcacacaccctgcgtaggagcccaag

SEQ ID NO: 174543 - DNA, 201 bp, Homo sapiens
ctgttggagtgttgtgggctctcgcagcagacagagtgaggaaatagtgtgtgcacatacactcattcatgcacctgtatttatctatatatctttttttwaaaaaataccgcatctcactctgttgcctaggctggagtgcagtggtacgatctcagctcactgcaacctctgcctcctgggttccagcaattctcctgc

SEQ ID NO: 174544 - DNA, 201 bp, Homo sapiens
tgagtttcatcatgttggccagactggtctcgaactcctgacttcaagtgatgtgcccacctcagcctcccaaagtgctgggattaccggcacaagccacygcacccagacaaatttcttatttaaaaaaatccatatttctaattttgccataatataaatgtactatttgtataaaaatacttttattttattttattt

SEQ ID NO: 174545 - DNA, 201 bp, Homo sapiens
ttcaaaggaagggaaaggaaaggaaccaataaaatgtttttaaaaaaagagaagggagggaagaggaagagctgattgttttgtttttgttttgtttgtattttttttttctattaacaaaagccacattcaattattgttctttttaagaacaaacattttggagtccattcaaagccatgtggctgaagagagattcct

SEQ ID NO: 174546 - DNA, 201 bp, Homo sapiens
tgaactcgggaggcggaggttgcagtgagccaagatcacaccactgcactccagcctgggcgacacagcgagactccgtctcttaaaaaaaaaacaacaacaaaaaaaaactgttgcttcgacagttattttaaaaaaagataatttgacttatagaacattttcaagaacggtacaaagaattcctgtataccctctgct

SEQ ID NO: 174547 - DNA, 201 bp, Homo sapiens
ttctttctttctttctttcttttttttttttctttttttttttttttgagacagggtctcactctgtcgcccaggctggagtgcagtggtgtgatcttggytcactgcaacctccgcctcccaggttcaagcaattctcttgcctcgccctcccaagtagctgaaattacaggtgcgcaccaccacgcttggctaattttt

SEQ ID NO: 174548 - DNA, 201 bp, Homo sapiens
aaaggagcatgattatttgtgtaagtgaatgcttttcagctcccaaagcgaatggatcttggtgcataacaacgagcacacagcttggtgggagcatgctycccacagccccatggtgacagctgcagacaggctgccatccacgggcaaggggcccccagggtacgcttctaactcactgctcaccaaggaggcgcttgg

SEQ ID NO: 174549 - DNA, 201 bp, Homo sapiens
aacttgtgaccatgccagttgcaccctcctgtgccctcttcccttggctaactcacagcaacggcctttgagggtccacatgggggtcagaagagggctgmacatggagggggccctttccaaagtccttgtttgaggccccagcatttctatgtatgcacctgctctaaggtgtttccaaaaattaatgggcaacacccc

SEQ ID NO: 174550 - DNA, 201 bp, Homo sapiens
caggagaaatgcttgatcccggcaggtagaggttgcagtgagctgagattgccccactgcactccagcttgggcaatagagcaagactccatcccaaaaaaaaaaaaaaaaaaaaaaaaaaaaaaaaaaaattctaaaatctggctgctagaaaatttaaaattgtatataaggctcacattacattttcactgggcatca

SEQ ID NO: 174551 - DNA, 201 bp, Homo sapiens
gcaggagaaatgcttgatcccggcaggtagaggttgcagtgagctgagattgccccactgcactccagcttgggcaatagagcaagactccatcccaaaaaaaaaaaaaaaaaaaaaaaaaaaaaaaaaaaattctaaaatctggctgctagaaaatttaaaattgtatataaggctcacattacattttcactgggcatc

SEQ ID NO: 174552 - DNA, 201 bp, Homo sapiens
ggcaggagaaatgcttgatcccggcaggtagaggttgcagtgagctgagattgccccactgcactccagcttgggcaatagagcaagactccatcccaaaaaaaaaaaaaaaaaaaaaaaaaaaaaaaaaaaattctaaaatctggctgctagaaaatttaaaattgtatataaggctcacattacattttcactgggcat

SEQ ID NO: 174553 - DNA, 201 bp, Homo sapiens
gtctcaatctcttgaccttgtgatccacccatctcagcctcccaaagtgctgggattacaggcgtgagccaccgtgcctggcctgcaagcacccactcttsctctatcttcttggcagccgagaggttaagaaagcccctccatgtggcagactcctttagatcagatcctttagctgccgggtccccacctaaatgaccc

SEQ ID NO: 174554 - DNA, 201 bp, Homo sapiens
ccttcccgagtagctgggattacaggtgcccaccactggctaatttttgtatttttagtagagacagtgtttcaccacgttggccagactggtttggaackcctgacctcaagtgacacacctgcctcggcctcccaaagtgctggggttacaggcatgagccaccacacctggcctgtttattttaatctgacaaaacat

SEQ ID NO: 174555 - DNA, 201 bp, Homo sapiens
aagcagactgtccagagatgaagggaaaggaggggctgtggcttggccgactgttgtcttcagtctctcaaaggagagagaggaagtggctcaggagggaragaagggaggtgaacttacaggagaacagaccgtgttttctgaggggctgcgagactagcacaaaacagtgcctttccatttgtagaactctgttctgtc

SEQ ID NO: 174556 - DNA, 201 bp, Homo sapiens
taaatcagaacacaaacaagcaaaggcagcacttgcctactttgggtcacaacacaggagcttcccctgcccatgagttgagtgggcctttcttctagctrctggccttggcttccccagtactcgcaagtgtccaagttccctctgacttgcaccacagccaccacgtgttccttccactgtgagttaggagaggcttcc

SEQ ID NO: 174557 - DNA, 201 bp, Homo sapiens; identical to SEQ ID NO: 31133

SEQ ID NO: 174558 - DNA, 201 bp, Homo sapiens
caccccgacgccgcggccgccgctgccagtcaagagcccggcggtgctgcacctccagcactccaagggccgcgactaccgcgacaacaccgagctcccgyatcacggcaagcaccggccggaggaggggccaccagggcctctaggcaggactgccatgcaggtgcgctgcgccacacgtgggttcgtgtgcattttgtg

SEQ ID NO: 174559 - DNA, 201 bp, Homo sapiens
aaggaacctcctataaaaactatatacatatcaaaaaacatgttttgggccgggcatggtggctcacgcctgtaatcccagcactttgggaggccaaagcrggtggatcacctgagatcgggagttcgagaccagcctgaccaacatggaaaaaccccatctctactaaaaatacaaaattagccaggggtggtggtgcat

SEQ ID NO: 174560 - DNA, 201 bp, Homo sapiens
tttttaccctcaacagcaaaccggggtctccctcccaggacacaggagtcaaggtgagcatcctcttcattaagacggctccctccctccttatgaaagcrccctgggctttgggctttcaccctagaatggaagcctcataagggccacaatttgtgtccacttggctcatgacttatccctggggcctgaacacagcag

SEQ ID NO: 174561 - DNA, 201 bp, Homo sapiens
gcctggagagggaacttctcgtgatggagccgcagagaagggacttgggagggcgaaactcctaacctcagagagtccaacagagttggaaagctgtggtrtgagcgggtggctaagtctccctttcgaagcttcagtaaaatagacactgttaattgtttttgtgcaaatgcaataaggcactatttttcatatctgata

SEQ ID NO: 174562 - DNA, 201 bp, Homo sapiens; identical to SEQ ID NO: 31156

SEQ ID NO: 174563 - DNA, 201 bp, Homo sapiens
tttatgatgtcaagacccagaataaatatagaagaacttaaatgtaaatgttctcttctcaatctaacaagtcaaatgggtaagccagtcctgttcagtawtttttttgagatggagtctcgctctgtcacccaagctggaacacagtggcgcgatctcggctcactgcaacctctacctcctgggttcaagcaatcctcc

SEQ ID NO: 174564 - DNA, 201 bp, Homo sapiens; identical to SEQ ID NO: 31140

SEQ ID NO: 174565 - DNA, 201 bp, Homo sapiens
gcctaataacagcaggcaacttccaaagagctctgtgccaggcaccattctaggcttatattgactcatttgatgtccacgaagaccttcaaaggaggtcytattatctccactttacagatggggaaaccgaggtgcagagcggtttatggaacaggcctagtttacaggactaacaaataaaagggccaggattgcatg

SEQ ID NO: 174566 - DNA, 201 bp, Homo sapiens
gaggcaggagaaatgcttgatcccggcaggtagaggttgcagtgagctgagattgccccactgcactccagcttgggcaatagagcaagactccatcccaaaaaaaaaaaaaaaaaaaaaaaaaaaaaaaaaaaattctaaaatctggctgctagaaaatttaaaattgtatataaggctcacattacattttcactgggc

SEQ ID NO: 174567 - DNA, 201 bp, Homo sapiens
tgaggcaggagaaatgcttgatcccggcaggtagaggttgcagtgagctgagattgccccactgcactccagcttgggcaatagagcaagactccatcccaaaaaaaaaaaaaaaaaaaaaaaaaaaaaaaaaaaattctaaaatctggctgctagaaaatttaaaattgtatataaggctcacattacattttcactggg

SEQ ID NO: 174568 - DNA, 201 bp, Homo sapiens
ggagacccagctatgggaaggcccagaagctttctgcaaggcagcaaactcagctcccagccttcactctgacagagaccctttataatgcaaatgtgtgktctcacccccacagacactgccacccacgaaggtcccattttgggaaatctgaaccacccagggaacgcactgggaggttgagtctaggtataggcaatc

SEQ ID NO: 174569 - DNA, 201 bp, Homo sapiens
ggtgaggcaggagaaatgcttgatcccggcaggtagaggttgcagtgagctgagattgccccactgcactccagcttgggcaatagagcaagactccatcycaaaaaaaaaaaaaaaaaaaaaaaaaaaaaaaaaaaattctaaaatctggctgctagaaaatttaaaattgtatataaggctcacattacattttcactg

SEQ ID NO: 174570 - DNA, 201 bp, Homo sapiens
agggtgaggcaggagaaatgcttgatcccggcaggtagaggttgcagtgagctgagattgccccactgcactccagcttgggcaatagagcaagactccatcccaaaaaaaaaaaaaaaaaaaaaaaaaaaaaaaaaaaattctaaaatctggctgctagaaaatttaaaattgtatataaggctcacattacattttcac

SEQ ID NO: 174571 - DNA, 201 bp, Homo sapiens
aagatctcggctcactgcaaactctgcctcctggattcaagcgattctcctgcctcagccttccaagtagctgggattacagccatgcaccaccacccccsactaattttttgtatttttagtagagacggagtttcatcatgttggccaggctggtctcaaacttctgaccttgtgatctgcccgcctcagcctcccaaa

SEQ ID NO: 174572 - DNA, 201 bp, Homo sapiens
tcttaaaaacagacatagggataagatagcctctttctttctttctttctttctttctttctttctttctttctttctttctttctttctttctttctttctttcctttttgagacagagtttcgctcttgttgcccagggtggagggcaatggcatgatctcggctcaccacaacctccgcctcctgggttcaagtgatt

SEQ ID NO: 174573 - DNA, 201 bp, Homo sapiens
gtttgtcttaaaaacagacatagggataagatagcctctttctttctttctttctttctttctttctttctttctttctttctttctttctttctttctttctttctttcctttttgagacagagtttcgctcttgttgcccagggtggagggcaatggcatgatctcggctcaccacaacctccgcctcctgggttcaag

SEQ ID NO: 174574 - DNA, 201 bp, Homo sapiens
tgtttgtcttaaaaacagacatagggataagatagcctctttctttctttctttctttctttctttctttctttctttctttctttctttctttctttctttctttctttcctttttgagacagagtttcgctcttgttgcccagggtggagggcaatggcatgatctcggctcaccacaacctccgcctcctgggttcaa

SEQ ID NO: 174575 - DNA, 201 bp, Homo sapiens
ctgtttgtcttaaaaacagacatagggataagatagcctctttctttctttctttctttctttctttctttctttctttctttctttctttctttctttctttctttctttcctttttgagacagagtttcgctcttgttgcccagggtggagggcaatggcatgatctcggctcaccacaacctccgcctcctgggttca

SEQ ID NO: 174576 - DNA, 201 bp, Homo sapiens
aactcctgacctcaaatgatccacctgcctccgcctcccaaagtgctgggattactggtgtgagccactgtgccctgccttttttttttttttttttttttgagacatagtcttgctctgtcgcccaggctggagtgtagtggtgtaatcttggctcactgcaacctctgcctcccaggttcaagtgattctcctgcctca

SEQ ID NO: 174577 - DNA, 201 bp, Homo sapiens
ctccatcctctcctgcctcacacagcactggacctcactgatttcttcttgcctgtgtccagttttttgttttttttgttttgttttgttttttgagacartcttgctttgttatccaggctggagtgcagtggcaccatcctggctcactgcaacgtcagcctcccaggttcaagtgattctccgcctcagcctcccaag

SEQ ID NO: 174578 - DNA, 201 bp, Homo sapiens
ttttgctggaactagctgggagcctgaaatagtgggggtattgcctgaggtcacacagctttagtgacagagatgaaatgaggtccggactcctgggactstgcatctttctgccccgctctctgccctggccagctcacgatgcatcagagaggttgaggatgctcggctgggtgctggatttcgctgtagctttagttc

SEQ ID NO: 174579 - DNA, 201 bp, Homo sapiens
tcaacatggcctggtgagaatgagccctgacagcccttctgttcttgtcccacagtgaagccctcagtgagctgccactgagtcgggagcccagaggaacsgcgtgaagccactggaccctctcccgggacctcctgctggctcctcctgcccagcttcctatgcaaggctttgtgttttcaggaaagggcctagcttctg

SEQ ID NO: 174580 - DNA, 201 bp, Homo sapiens
ctcccgggtttctcctggatttccccataggtgaggtggttccagtgcccaagggcagtcgtctgaggcaccaggcttaggtctttggcagcaaagcaacrgagcccccagaagtggggatgggagcaggggggcggtcagtgggtcccagggaactgggtaggacagcagctgcgctctctgtaagaacctggctatggt

SEQ ID NO: 174581 - DNA, 201 bp, Homo sapiens
ccgtcttcgctgagatggtctgcacagtggtcgggggaggaaaagggggcatcacctcctcaaaagggcattttgtgagggcctggctgggatgcttccakaaatcaggaagaagcgtgtgctgccagttctgcccctctggtccctgcctcctccaactgaggtgggcccaggcctggtgctagagcggcctttgtcact

SEQ ID NO: 174582 - DNA, 201 bp, Homo sapiens
cagggccccccagccctggacagcaagggcctgggggaggggttacaacctggtgcttgccggggagctgggaagaaccgggtgtctggggtgggagtcakgatgtccctgctggccccagctggcgggtggttggagacagggtgggtgcttgggctcagtcttcgctttccttcccttaagcttgggcctcttccccag

SEQ ID NO: 174583 - DNA, 201 bp, Homo sapiens
acctcctcaaaagggcattttgtgagggcctggctgggatgcttccagaaatcaggaagaagcgtgtgctgccagttctgcccctctggtccctgcctccyccaactgaggtgggcccaggcctggtgctagagcggcctttgtcactgagtccccaagctccagttcacccagcagggtcaaagcggttcgaaaaatgat

SEQ ID NO: 174584 - DNA, 201 bp, Homo sapiens
cagccagagtacctccctctcctggtcacaaaatgagacctgccttgctcttctgtggatggaaacttgcaggagcctagctttgccatgccaatgcacastgcccatccacctccatcctgcagccccagctgagacacttgtgctgctgaagagaatgcagcccctcccctctggccagtcccacagcacacgcttcag

SEQ ID NO: 174585 - DNA, 201 bp, Homo sapiens
atgatggcacatgcctggagtcctagctgctctggagactgaggcgggaggataacctgagcctaggagatccaggctgcagtaagctatgatcatgccabtgcactccagcctgggtgatgcagtgagacgctgtctctttttttgttcatttgtttttctactgaaactgcttttgtggagctaaattgacagtggaga

SEQ ID NO: 174586 - DNA, 201 bp, Homo sapiens
gtctctgtgtcactgagcttgtttttctctcccatcaaaagtgagttccataagaacagagaccatggctgcctcactcacagccatattccctcctcccsgcctggggccaggtgcttacgaggccctcagtaatcacggtgttgcatggatagatgaatgaatgaatggatcactgcccaagaggtgaaggagttgagg

SEQ ID NO: 174587 - DNA, 201 bp, Homo sapiens
ttctggtctctttgccggctcaccagccggggaggcagaaccatgccagcagcagacatagcttgttcctctcctccctcccttccccacaactcatcccyaccaacccttgccctcaccccagccacccccgctgtacacaggaattctcatctctagcacattccctgatccacttccagcttccgatgttcacagccg

SEQ ID NO: 174588 - DNA, 201 bp, Homo sapiens
cagaatacagacgtccttggtagcagggctgccctaactcaccgatgtggtctccgagatccagaatcaagttctggtctctttgccggctcaccagccgrggaggcagaaccatgccagcagcagacatagcttgttcctctcctccctcccttccccacaactcatccccaccaacccttgccctcaccccagccaccc

SEQ ID NO: 174589 - DNA, 201 bp, Homo sapiens
ggagagaatggagagattccaagtctacaaatggtggctgtgtctcctgtgggacagaggacaccagcaatcatgggatctgtggccaccaaaccccaccytatccactagcaagaaaaatcactgggggaaaatgcacactggttgctcttggcagagactgaactgagaatagtacagatgttaaagtctgtattacca

SEQ ID NO: 174590 - DNA, 201 bp, Homo sapiens
ggggacccaaatacagggaaagaccatcttgctctgtgtccttcatgccctgggggacacacgtgaggccgaagcactgtcttcctggggtgctcttatcyatcctattgtatctaacatccatggccccagaaatgtgacctccctcctccacccaagccttgacccaccatcgtgtctccttcctaagtctggccactg

SEQ ID NO: 174591 - DNA, 201 bp, Homo sapiens
tgtaccaccatgcctggcttatttttgtgtttttagtagagatggggtttcaccatgttggccaggctggtctcgaactcctgacctcaaatgatccaccygcctccgcctcccaaagtgctgggattactggtgtgagccactgtgccctgccttttttttttttttttttttttgagacatagtcttgctctgtcgccc

SEQ ID NO: 174592 - DNA, 201 bp, Homo sapiens
ctcctaacctcaggtgatccgcccacctgggcctcccaaagtgctgggattacagttgtgagccaccatgcccagccttggtctcctttttaaagtataaycatttcccagacccccagccaaaaccacttcctcccagcagcacccaaaggagctcattgagaggcaccttttcctgctgggccacttcttcttgctctg

SEQ ID NO: 174593 - DNA, 201 bp, Homo sapiens
gcagtgccggagtgtagtcagggaaatatgtgtccacctgaacatctcaagtagcatccctgggctggcagaaatgttcccccgagcagccagggccttgygcttctccaggcaggaggggaattgggtgatgaacccagacctgttttgaatactgactcacagctgggacctgtcgtgctaagcatttgttagcccatt

SEQ ID NO: 174594 - DNA, 201 bp, Homo sapiens
tgcagctctcggtctaatcataggggggccttgccctgcagctcttggtctaatcattttgccggggcctcaggcagtgccggagtgtagtcagggaaatrtgtgtccacctgaacatctcaagtagcatccctgggctggcagaaatgttcccccgagcagccagggccttgtgcttctccaggcaggaggggaattggg

SEQ ID NO: 174595 - DNA, 201 bp, Homo sapiens
tacgcgctctgcgtgctgtgagtacaacctgctccctccccgggcacagatatgacagaggggcttagagggggcccagctttgagatgggttgttcttakgtcacaggacagagtgatctgacatgcacacttccccgccaccctgtcatggaccttgtccttggagttcagagagctggtctcgtggcaggttttgcag

SEQ ID NO: 174596 - DNA, 201 bp, Homo sapiens; identical to SEQ ID NO: 31138

SEQ ID NO: 174597 - DNA, 201 bp, Homo sapiens
atgtgctaatttcccccatagtcctaatctgatttgaaacgcctcctcctgttccattgatagattaatctactcttgacccagctgcataggtttaatcrcggtggctttcttgtgtgtttccttatctggcagactaagttcccatttattattctcattagtccttgcttgccatgcattttcttttccaggtgaatt

SEQ ID NO: 174598 - DNA, 201 bp, Homo sapiens
gctcacacctgtaatcctagctgaggcaggagaatcgcttgagcccaggaggcagaggttgcagtgagccaagattgcaccactgcactccagcctgggcracagaacgagactccataaaaatgccaggtgtggtggtgcacgcctgtaatcccagctactcaagaggctgaggcaggagaatcgcttgaacccaggagg

SEQ ID NO: 174599 - DNA, 201 bp, Homo sapiens
gcccaggaggcagaggttgcagtgagccaagattgcaccactgcactccagcctgggcgacagaacgagactccataaaaatgccaggtgtggtggtgcaygcctgtaatcccagctactcaagaggctgaggcaggagaatcgcttgaacccaggaggcagaggttgcagtgagccaagattgcaccagtgcactccagc

SEQ ID NO: 174600 - DNA, 201 bp, Homo sapiens
tgaacttgggaggctgaggttgcagtgagctgagatcacgtcactgcacactccagtctgggcgacagagtgagacactgtctccaaaaaaaaaaaaaaaagactttatgttaagctcatcaagtgttcaatgaggcatttgttagagatggtagagatggacagtcttcaattttggggtgaaaagatttgcaaaaattt

SEQ ID NO: 174601 - DNA, 201 bp, Homo sapiens
agaaagagaaattaaagaatgtgtcttgagagaaatggaacaataagcagacttcaacctgagggctttgtgaagtcagggtctccttcacgtggtctgaygggccactgcattcctctcttgtctaatctttcttttctttttttggacagagaaggattacggcagattaatattgataatttctgctttttctcttag

SEQ ID NO: 174602 - DNA, 201 bp, Homo sapiens
ctccatcttaagagaacggtcagctccgaaattcggagactttgtgtccagattcctcaagctgtgtcaggaagtcttgtcttttcagttaagaggaaacygggtcttcctgcatgggttctaataaagtctttgatctatttcaggtatcggaattgcgtttacacttacagaattctgcccaatgaagatgataaattc

SEQ ID NO: 174603 - DNA, 201 bp, Homo sapiens
acactcccttggcagaagaacacgctatgcatgcctcctgagcacccttcttctgcctcctggcccgttttccctgtgcttctccctggagtctgagaaasagatgttgccgtggtcccctgcctggtagagcccaagagattctctacagctgtgctggccagtgctgcagccacaggccacatggggtcacagagcact

SEQ ID NO: 174604 - DNA, 201 bp, Homo sapiens
actctattttaacctgatgaaataattttggtatatttatttctgttatagtcgggctgtgaagtttttgtttgagattctcagtagttttgataatgagyagcagaggttatttctccagtttgtgactggtagcccaagattgcctgttggaggtgggtacgatgttgatgtttagcatttattctacctatgggtggg

SEQ ID NO: 174605 - DNA, 201 bp, Homo sapiens
aaagtacgatgcttctcaaggaaagaaataaagggttcctgaagtctcaggggtgagaaggaattgtgattaggcacccagctaggtttggactaaagaaygaagtctccagaaagagattgttaaaatctacacaaattttttttaggcctttattacagcacttttgcattttttacattaatttctgcattatgttgc

SEQ ID NO: 174606 - DNA, 201 bp, Homo sapiens
ctccagtttgtgactggtagcccaagattgcctgttggaggtgggtacgatgttgatgtttagcatttattctacctatgggtgggtttgtgagtgtgaawcttcagtaccatcagcaggagattctttatctcacttgcagtgcctcttagttattccagtatcattatagtacattgagaccactagcagggaaatcca

SEQ ID NO: 174607 - DNA, 201 bp, Homo sapiens
cctccagccattttactgtttgccattgtttctggtataaaggagaaatgtggaggagtcagctttcctgcattataatgtttatttgtgtatgggagggraaagtgaaatttttataagccaaggcactttatatataagataaaatgggaagattgtcaaacttatcaataccctactaataagattccaagcgttgac

SEQ ID NO: 174608 - DNA, 201 bp, Homo sapiens
ctgtgaagttttgaacatgatgacctgaagaattttataatttttaattagtgataatttctcattataaaattacacttttccattttctgtggataggkttaagaaaatctacgaagaaacgcagtgagtctccacctgctgagctccccagtttgaggcggagcacacgccaaaagaccacgggctcctgtgctagta

SEQ ID NO: 174609 - DNA, 201 bp, Homo sapiens
catctacttatttttggtaaaaatgctaaatgtagaaatgtggggcattagtctatagagtatggcatttaaaatttttttttaacttttgaaaaatattygagacattctaaatgaatttaggtataattactctgaaatgcatgatcttaaacaaaaatttgacactattattcaccaggtgttaaagttacagtctgt

SEQ ID NO: 174610 - DNA, 201 bp, Homo sapiens
gagcaagcttttatgagaaaattgactttgactggtcttctgtgcagcattatatataagcagtgtataagcaggccaatcctgctaatagtggtcctggkctctaactctaagtcgtcttctttttagcattttcctgatcattgcaccttcactattagcttactctctcatatgtgctgagagtcttgtcttccattc

SEQ ID NO: 174611 - DNA, 201 bp, Homo sapiens
ggattgggattaattgggagagaacaattacagctatatatttattctcttcatgtgactcgtttagccttcctaagtaaaatgctgtcattgtagccttsgtttcctgaaaatggttgacttgccccataaaggtattcacagtgatacagtgattcaactaatgataataatagcagttacacaacagcattaatggag

SEQ ID NO: 174612 - DNA, 201 bp, Homo sapiens
tttactaaaaatataaaaattagccaggcatggtggcaggcacctgtagtcctagctactcaggtggctgaggcaggagaatctcttgaacccaggaggcrgaggttgcagtgagctgagatcatgccactacacttcagcctgggtgacagagtgagtatctgtctcaaaaaaaaaaaacaaacaaacaaacaaaaaaaa

SEQ ID NO: 174613 - DNA, 201 bp, Homo sapiens
tagatcacggtaaaatcagtactttcacctggcaaagtaaatttgtagtaatgtatgattccatgtatgattcctttcccattgtaactttttttttttttaaagcagaatcttgctctgtcgcctaggctggagtgcagtggtgcagtgtaggcttaatgcaacctctgcctcctggttcaagcgattctcctgcctcag

SEQ ID NO: 174614 - DNA, 201 bp, Homo sapiens
ggaaacatctatggagagtacctggtagattactttgttttatgagactctgacctctttgaggacagggactagactgttacctatatttatgtgccctrttgggacttgcatatatttgttggtggcaaacctaacatcttttgaaatgagtagcttagtacaatggttctcaactctatcagaggcagtgctccctgt

SEQ ID NO: 174615 - DNA, 201 bp, Homo sapiens
tcagtctgcaacgatctttaagaaaataagaatgtagaggacctgaatgacataatttatatttcctgtagctgttaaattccacaccccaaaaacagaaygttacacctcttttttagaataactatggaatgatttgaaaaatagtctcatttctgaagaaaaaagagttgaactctgagatctgttagtagaaatata

SEQ ID NO: 174616 - DNA, 201 bp, Homo sapiens
aagatgctttatgaaaaaccattctccatgttcaagtattattcaaggagattctagataagcaggaatatattgaaagctgtgggaagacttgcagtaamttcttaacccaataatttgcaaattaatttgaccagctattacttgggaaccagtagtggttcatggaatacactcaggaaatgatataatacatttagt

SEQ ID NO: 174617 - DNA, 201 bp, Homo sapiens
atagttttcctctcttcccccacgtcttccctttaaaaatacgatactaacagtgccttagagttagacaatattattgttccatggaggacacccccccctccccctgctccctgccccctgccgccaccacagtaattttcacactggtttccctggtccacagaaaagggccctgtagcacttttttttcacaaaact

SEQ ID NO: 174618 - DNA, 201 bp, Homo sapiens
gaattgggaataaaagaaaaaatatttttaagcctccttgcgaggtccaaaacttgaatggttcattgcatatgggtaatttttcctgatttgtgagccargtacttaaaagcaaactggaatccaaagcagttcctaaatttttccccagatatgctagactcaaagaagtagttcatagccactgacatgatcagacac

SEQ ID NO: 174619 - DNA, 201 bp, Homo sapiens
taaattccatatttctccaggacttttttgtgttctttctgttgacaagtactttaaagttttagcaagtatcactatgttgatttcatgtaggtttattwattgtttagtgcttgaaatgattttctgtgtaaaatcagtttgagaattggttcgtctgtctctgcatttgctgtgtttacctgaattttaagtacaaat

SEQ ID NO: 174620 - DNA, 201 bp, Homo sapiens
ggcttaaatggcttttgctttgctttattcaggctgctcagttcctaaattcaggaaatgtaagacacaggctgcagttttatattggagaacatttgctkccgtataacatgactgtgtatcaggcagtacggcagtttagtatacaggctgaagatgaaagagaatccacagatgatgagagcaatcctctaggcagag

SEQ ID NO: 174621 - DNA, 201 bp, Homo sapiens
gtgaagggttacctcctttcttctttgcttttctcacacctgttaatcacagattcaacaagttaggcacgtacttccttacttggagttgtcatcttctyatgcctcagagattgatatgctcttctgatccaaagcttatgctcttaatttttttccccctgcgggatcctgttagtagactgtcctttattcccaacc

SEQ ID NO: 174622 - DNA, 201 bp, Homo sapiens
cctatggtgggttacatgttagagatagtatacatggatgtaaattagagaaaatatgtagaagataagttattgggaaagaacttaaatgataaccttakggtaactatatatatgttcccagctgcaagttattcagtgtattgatgtggcagagcaggccttgactgccttggagatgttgtcacggagacatagtaa

SEQ ID NO: 174623 - DNA, 201 bp, Homo sapiens
actgaaataaacattaggttggagtcttaaaaaatttggaactgaatccgattttagagactatctagtctgatacccttaagaggaagtaactagaaagrctattgataagctgacctcctatccccattcactggctaatgatggtagccaacaggattgtagacctgttaaaattgggtctgtgcaccatttttggca

SEQ ID NO: 174624 - DNA, 201 bp, Homo sapiens
tctatccctgtattttaacaagaatgtgaattttaacaagatccataggtaattcttaggcacgttaaatactgagcatcgctgcgttaagtgatcagtargatttgaagttccttggcttaaagtttcttggatcattcacctgatttgaaatatgcctacaaatcttggccacacatgtataaattctcaggtatagat

SEQ ID NO: 174625 - DNA, 201 bp, Homo sapiens
aattacatttttcatcctttgaaagttcatttttcctgattgtcaagcacatttgagcacattattaagtatattccatagaaatgtcaggtgttggaaaytttccaattttttttcagatttttccagttttatttgggccacagaccaactaaaccacaacatttttcagccttttcatcttatttagttttgttattc

SEQ ID NO: 174626 - DNA, 201 bp, Homo sapiens
cacattctttcagttgaaactcagaaattaaatatgtaatctctcttacaaatgtggaagcttgctcaactttgtatagctagtgtgtagtcaggacttgwttccagacctcttgactgtaaagtcagtgtaccttttcattatgccagagtgtttcattgcagcccactggatccgtatgatgagggagtgttagaagag

SEQ ID NO: 174627 - DNA, 201 bp, Homo sapiens
tttttcttaaaatatttttacatggttttaaatagttttaagtggttccatattacagcatggttgcaaatgaaaaattcatgttaattttttttaaatgraaattgtttaattacatttttcatcctttgaaagttcatttttcctgattgtcaagcacatttgagcacattattaagtatattccatagaaatgtcagg

SEQ ID NO: 174628 - DNA, 201 bp, Homo sapiens
ggccaatttaatacttctaatacttcatgagagtcctcattttgccaaatcctagtcaatagagcataccctttttaaaaagaaaagtttgtggggaaaargaattccttggtttaaagttagcatttcttcgtttactatagagtggaaaaatttgctccgtgggccattttcatttattttctgagctgtttgttagcg

SEQ ID NO: 174629 - DNA, 201 bp, Homo sapiens
tcagcttttgtaactaggtagacttttcttatagtttagttttaatatagtttagggtattactggctttttcccaggtgacacactaaggactgtttacmtggcaattccagcagcaacagcctctggaatgagacaaggaaagctcatttgtttcttttatgaaggttaagaagtctacagcttgggctggccggtatt

SEQ ID NO: 174630 - DNA, 201 bp, Homo sapiens
tctctataattttccgttatgtagatatatcaattatgcatatatgtaatcactcctttcatcatttggtttcaggtttttgccatagcaaatgatgccayacctgaacattctcactgtcatcgtgaacttgtactagtacttctctagtactagttagtactagctaggttattgcaagtggaattgctgggttgagta

SEQ ID NO: 174631 - DNA, 201 bp, Homo sapiens
  misc_feature (1)...(201): n = A,T,C or G
caacagttgcaaagcaggtgtggtatatgtcaactatatttgtctttgacatgtggtctcattaattcctttcacagtctgggttttatttcgaagttgcntgtattgtgttaatttgctggtaagtggtaggtgttcaacaattactagtatgggttagaaaaggatatttgtttccttggaatttctgggcacagaaat

SEQ ID NO: 174632 - DNA, 201 bp, Homo sapiens
agtattctagaatcggctgggtaatttgtaacttgctcttttcagcaatagtaaatcttactgctctaattaggcagcctggagttttagctgtggagacmtgtgtgcctgctgcattggtaatgctgaaactagtctgtcccatcaggccttgggatcaggaggcaagataatatggtgctgtattcaacaatggcatgg

SEQ ID NO: 174633 - DNA, 201 bp, Homo sapiens
gtttgaactgatggtgcaaaagctgtaatgggtaaaactggtgggatcttaagcatcaaagcagtggcactaaacggtactagcaatcattgtgtttttcmctgccacatactcctaataaatataattcagtttttatctaagatgcccttactgaaccaaagttaatttaattaggtctttactcccaagacatgtctt

SEQ ID NO: 174634 - DNA, 201 bp, Homo sapiens
aaggagctttaaaagtaacatcatataagattggttaagtgttaatttaattaattgtggtttcaagtaggaaagtgtccatgaaaaatgaaacacattcrtagactttattttttaaaattaattaattaattttgagatgaagtctcagtctgtggcccagtctggagtgcagtgacatgatctcggctcactgcaacc

SEQ ID NO: 174635 - DNA, 201 bp, Homo sapiens
attgtaacaatagtgtcttccattcttctcatccttgtagatttatgtctcagattgttttaatgctgtattagtggcatttcatgtggagacagaagtgmgtgcatgtgtgttaagtcttctgtctttacccagaagggagacacttcgctaggcatatgcaaaagtatgatctcgctgtacatgacagtgggcattact

SEQ ID NO: 174636 - DNA, 201 bp, Homo sapiens
attgacaaatcagtgcatgaaatgctgtgcattgactaggaaataaaaatttgctttaaaaattgcatttgggatttagctcattatctgcaaaatctgtsttattattactgagttattttaaaataaaagtctgtgattcctttttataacctcatagattacttttcattttttttaaatttatttttaccaaagtaa

SEQ ID NO: 174637 - DNA, 201 bp, Homo sapiens
tttgtttttatagtgaatattgcaagtctatgccctatttttaacattgtcaagaaacctctggttctcgcaactttcctttttctaactttttagtgtgyacccacttaaacatttctacttgtaatggttttaaaggaaagtaggatatttatatatttctttagtataacatttgtttaggtattgagattgtgtaag

SEQ ID NO: 174638 - DNA, 201 bp, Homo sapiens
gaagctcctgaacacatgtgtgcacgtgtgcgcgtgcacacacacacacacacacacacacacactctctctctctctctctctctctctctctctctctytcacccaaatctttgggctataatttactaaatgacctcattctagtgctatttaaaagagtttgtcatgcattttactatactgttctacaaattttat

SEQ ID NO: 174639 - DNA, 201 bp, Homo sapiens; identical to SEQ ID NO: 31186

SEQ ID NO: 174640 - DNA, 201 bp, Homo sapiens
gcgcaggctagtcgcagacccttggcctcaagtgatcctcccgcttcagtttctaagttgctggggttacaggcatgtgctttatttgcacttattttttkttgttgttgttgttttttttttttgagacagagtctcctctgttgcccaggttggagtgcagtggcgcgatctcagctcactgcaagctccgcctcccgg

SEQ ID NO: 174641 - DNA, 201 bp, Homo sapiens
tgtaagttggaactaaataatgtatacacgtggacatagagtgtggagtaataaacattggagactgagaaggagatgaaggatgataaattacctcatgsctgtaatatacattatttggatgatggctaataccgaaagcccagactttgccactaagcaatatatccatataacaaaactgcacttgcaccccttaaa

SEQ ID NO: 174642 - DNA, 201 bp, Homo sapiens
cctcctggattcaagtgattctcgtgtctcagcctcccaagtagctgggattcacaggtgccaccacacctggctaatttttgtatttttagtagagatgsggttttgccatgttggccaggctggtctcgaactcctgacctcaggtgatctgcccgcctcgcccagccaggtcatgtatttaaagggcttttgtatgca

SEQ ID NO: 174643 - DNA, 201 bp, Homo sapiens
tggattataggcatgagccactatgcctggccagatctattatttttttttaaagcagtctttctgccactttgcccttttctgtggctgattattttgawgtttcagtgtctagattatgtgcttttatatgtccctttgttgattcttctcccccacccccaagtgtttgatccctgttgtgttccccttagggaaaat

SEQ ID NO: 174644 - DNA, 201 bp, Homo sapiens
ttcactatgttggatggctgatctcgatctcctgacctcaggtgatccgcccaccttggcctcccaaagtgctgggattacaggcatgagccactgtgccyggcctgtttccttgaattggatcaaaatatgatctatacattacaatcaggtaatgtttcttacctgatttttgtttgtttgtttgtttttaagagaaat

SEQ ID NO: 174645 - DNA, 201 bp, Homo sapiens
gatgttgatgtttagcatttattctacctatgggtgggtttgtgagtgtgaaacttcagtaccatcagcaggagattctttatctcacttgcagtgcctcwtagttattccagtatcattatagtacattgagaccactagcagggaaatccatggggattgtcttaaacatattgaagtaggattactaatgcacatgta

SEQ ID NO: 174646 - DNA, 201 bp, Homo sapiens
ggataaaatattaaacagtttgctagctgaattttttataactttaaatatttggacataaggatgttggttttcatgtgtactttttatatatatatatwttttttgagatggagtcttgctctgtcgtccaggcgggagtgcagtggcgtgatctcagcttactgcaacctctgcctctcgggtccagtcctcccacct

SEQ ID NO: 174647 - DNA, 201 bp, Homo sapiens
tggtagataaaggggaaaatggattgccaactgggcaatcttcccattttcatgattttcaaagagtgatttggatttagtagtaaaatttttgaatatarttgagaaataaatgacattacaaacagtttgatcacatttaatcctcaactttaatatctagaaaatgaaaaattaagtacctacaaaattaaattggga

SEQ ID NO: 174648 - DNA, 201 bp, Homo sapiens
ggggggaatgattttagcttacgttttcccactcaggttagcagaaaggtctttccacttcttttggttcttatctctactcttggcggtgttacaatagygacataagtaaacagtacaacttggtgcctataagtcataagaaatatagctttgccaccttaaatcttttcaacctgtttttaaattttttagattgtt

SEQ ID NO: 174649 - DNA, 201 bp, Homo sapiens
tcgagtcacaccttatacctagtaataattttcttaaatgtttaaagataataattatttttttctctaaaggttctaaggcccagcagctactacaaggwttgcaagccagtgatgaaagtcaacagcttcaggcagttattgagatgtgtcagttactggtcatgggaaatgaggagacactgggagggtttcctgtca

SEQ ID NO: 174650 - DNA, 201 bp, Homo sapiens
gtccaggagtttgggaccagcccgggtaacatagcaacatcctgtctctactcacctccatctccccacaaggaaagccaggcatggcggcacacacctayactcacagctactcaggagggtgatctagtgattctactcttagttaattctgctcaaaagagatgaaagcatgtatccatggaaagacttgtagaaaaa

SEQ ID NO: 174651 - DNA, 201 bp, Homo sapiens
aaacatagaaaaggtacagtaaaaatagggtattaataatcttgcaggaccacggtcatatacgtggttcgtccttgacagaaacaacattatgcagcacrtgactgtagcttgttccctctagtaaatgcatcaacactagtaatgcaggggggaatgattttagcttacgttttcccactcaggttagcagaaaggtct

SEQ ID NO: 174652 - DNA, 201 bp, Homo sapiens
tgagtcttgaatcctggttaacttgtggcaggtgttgtgactatctggaagggtgttaggtattatgttgcagcattcataggagtctgtgggaacatagrggggagagagaggaggcaaacatggttgtctaatgtaagtacccacttgcagaggcatctaacgaaatgtctaagtttgcaaagtgccatggggctcttc

SEQ ID NO: 174653 - DNA, 201 bp, Homo sapiens
tggatgctattgttcatttctctactagtaaaatgatcaagccttcatttattttaggctttgttttttgatccattttgttttccctgctgtaatgagaytaattgtttggaaatgtcatattctgtatttatgattctctgagaaatgcttttgtataagtcttaggtttgacattgcagtagttgacatacacggtaa

SEQ ID NO: 174654 - DNA, 201 bp, Homo sapiens
agaagttcatgtgttctataatgaaaaagttttcatagcatttcaagaattacactggcttgagtattttatattgtttattgtgtttctgaagtctgtcmcttcaggattgcatatatatttttttttaatgtaataggtggatattcagagtcaaagaaggatgatgctcgagcacagcttatgaaagaggatccggaa

SEQ ID NO: 174655 - DNA, 201 bp, Homo sapiens
cagaaataaagttttaatctgtcgagcaaaaactgatagcttttcaatttaaaaatgacatttaaagctctgttagcttatagctctgtgtacgtagaatrtgtcttttaggctgggcgtggtggctcacgcctgtaaccccagcactttgggaggccaaggcaggtggatcacttgaggtcaggagttggagaccagcct

SEQ ID NO: 174656 - DNA, 201 bp, Homo sapiens
taaaaatgtaaggatatagtttaaattgcttcacacatatataaattttaatttagaatttttgtaagccctaaaatacaagtattcagtttgaaccttasctgtaagaatagtatttatattgttatgggcttctcatttttattcttgatatattagaagcacaaaattaaggcttttctctcagctttaaataatgta

SEQ ID NO: 174657 - DNA, 201 bp, Homo sapiens
atggaaattggtggtaggtgggtttaactaggacttgggggagggaggtgggccaattgtcaccccaatcgtattagcattcagagcgagtcaggcgattratttatttatatgtggattacataaaacctattatttacaacgtttgtccatcagttcagcccctctccttccttctccatagtgagtgggtttctagta

SEQ ID NO: 174658 - DNA, 201 bp, Homo sapiens
aggctggagtgcagtggcgcagtctcagctcactgcaacctactcctcccaggttcaagcgattctcctgcttcagcctccccagtagctgggactacagkcacgtgccaccacgtctggctaattttttgtatttttagtagagacagggtttcactgtgttagctaggatgttctcgatctcctgaccttgtgatctgc

SEQ ID NO: 174659 - DNA, 201 bp, Homo sapiens
aaggtaaatgataaatgtagttttgctgcattacagagcctgggaaaggggggtggggagagagggagggagagagagaaggagggagggagggaaggagkgggggagagagagagagaaagagagaataagagagaattacctacaagggatcaggaaggatctttttagagtaatggaaatgtttgtgtcttaatggtg

SEQ ID NO: 174660 - DNA, 201 bp, Homo sapiens
caaactgtgctaattgaactgtgtcaatttaaatatgttctgtataccacacacaaccttggcgattaatctgtttcagttgtgtccctttcagtcttaaagttatctttgtttaatgaggacaattttataggatcattttgtttaagggaggattttggtaggtcgctaagaattcatcatgtaaataatatttttaat

SEQ ID NO: 174661 - DNA, 201 bp, Homo sapiens
acataaacaaaagtgctttgtggtacctcagtagtttttaagagtataaaatgattctaaattcaaaatccactgctctaggagttggtttctcctcataratcagaggataaatcaggttttggttatggttttggctttttgttgtcatcttcagtttagtgtaagttatttttaggaacatcccagatgttttattgg

SEQ ID NO: 174662 - DNA, 201 bp, Homo sapiens
tgtaagttatttttaggaacatcccagatgttttattggtattgatgataattttgattatgctgtataagatccatgtccttaagagttgccaaccccartggttataagacctccatctagttgcatacatgttggttctttcttttagggggttgtgctcttaggccatacttgatatgaactgtttaatccttttaa

SEQ ID NO: 174663 - DNA, 201 bp, Homo sapiens
attttacaaagcttttagtgaaatatggtgcatttctagaactcagtttcttaccactggtttggttggttaggattggatttccctattgtttcattgartgtatatcagtaaaataaagaggtacagtgcggtgatgaattgttactttcagctggccccaatgggtcactagttttctagacagctgaattttgtctg

SEQ ID NO: 174664 - DNA, 201 bp, Homo sapiens
gtcacaatctgtgcagtatatagggcttaaggtattgtggaagagcttatgtagatcaatcatctgtgttaaaaaaaaaaaaaaaaacccaaaaaacaaamaaaaaaaacctttgacctcagcagacacatagaggcacaattaactgctagttttgcaggaatatggttttacttcctgttcagatttataatagactct

SEQ ID NO: 174665 - DNA, 201 bp, Homo sapiens
attcatggattttaaaaataaatacagttagctttctgtatccatgagttctacattagcaaccaaattcagattggaaatacagtgtttgggccaggcgcggtggctcatgtctgtaatcccagcactttgggaggccgaggtgggcagatcacctgaggtcaggagttcactaccagcctggccaacatggtgaaaccc

SEQ ID NO: 174666 - DNA, 201 bp, Homo sapiens
agattttgcattctaaccttaccccaccccattcacctaccaaacacatactgttacatacttcctgtcttcccagtgatgatcagcacgcagggtttatygtatcgtgaacatctaaatgttatttacactgagccacgtaaaggaacatttcctttctcacacatttttgcttttcctgaattttaaattcctttttgt

SEQ ID NO: 174667 - DNA, 201 bp, Homo sapiens
cttggtttctcttacctcctgcatgtcagtgtaatttctcccatctgtatatccagttgcctacataattctcaatctttacttccatttgcttattgaarctctacctggatacctacatgatgagtcaggttttatatgattaacactaaatgtactctttctgctcatgtgtatcatttgataatgctgctacaatca

SEQ ID NO: 174668 - DNA, 201 bp, Homo sapiens
atcccttctggctgtcacaccacagggtgtgcactgtatttctgtagttgattattgtttttataatgagtattttgaactctgaataggactttgtgacyctattaagttttatataatctggttttgaagattagaagacattcaatatcagtatttttctttaacctttagtttttatatttttttctgattgaagtc

SEQ ID NO: 174669 - DNA, 201 bp, Homo sapiens
tttttttttcaggaatacccatatgttgttatagaagctcctgaacacatgtgtgcacgtgtgcgcgtgcacacacacacacacacacacacacacactcwctctctctctctctctctctctctctctctctctcacccaaatctttgggctataatttactaaatgacctcattctagtgctatttaaaagagtttgtc

SEQ ID NO: 174670 - DNA, 201 bp, Homo sapiens
ggtagaacgtaatgataccgatgatcttcatcccgtgcaggcctaggttaatgttcgtgtttgtgtctgagtgttttaaaagacagtttaataaccaaaawaataataataataataattttcaaaataggaaaaagcttatactctatggatataaagaaagaaaatgtttttgtacagctgttcattgtgtttgtgttt

SEQ ID NO: 174671 - DNA, 201 bp, Homo sapiens
ctctaaattttattttattttattattatttttttttttttggaaagaggtcccaagcagaaggttttagtactgagactgatactcttttatggtacacrtagacctttattttcactcacgtaaacaaatgtttccttagtaattctttttacccttatttaaactcacagctggatcagctcctttgtggcagtaaag

SEQ ID NO: 174672 - DNA, 201 bp, Homo sapiens
ctgggccatgcattgaacaagcttgatttagaatgtattccttctatatactaaagaagaacattaactgtaaccctcagtagtaggtattccagaagaargcattgttgtcataggagatgacagcttcatgcctgtcatcacccctgaagaccttccagtgggacataagatgtggaggtagaacgtaatgataccgat

SEQ ID NO: 174673 - DNA, 201 bp, Homo sapiens
tttggggagcttttgtttaaatgctatcaagtttgaataattttgggggaagtatttttgcttctccctggtttgcttactgatttcgctgttgaaggagmaaaaaaggtttattatcaataaaatgtaattttctataggagaaataagtggtcattctttttccataatttattctgtgtctctgtcctagatgaatat

SEQ ID NO: 174674 - DNA, 201 bp, Homo sapiens
aacatagaaaaggtacagtaaaaatagggtattaataatcttgcaggaccacggtcatatacgtggttcgtccttgacagaaacaacattatgcagcacaygactgtagcttgttccctctagtaaatgcatcaacactagtaatgcaggggggaatgattttagcttacgttttcccactcaggttagcagaaaggtctt

SEQ ID NO: 174675 - DNA, 201 bp, Homo sapiens
atttatttacatgtttctactaagttctaatcattctatttcttgacgatacttttatcttctacttttcctttgttgttaacgctattttcacaatactrttgacagtagcaggacctttgactgtttacagagttctcgtctgccaaatatacttctaatgagcatctttatgcagatttgggttgtttttaaaaggta

SEQ ID NO: 174676 - DNA, 201 bp, Homo sapiens
acttgcacaagtatgctctcgctattaataatggctgttattaatgagttcttcagatatatcttttatcacagttgaatattatttatatctcttcatcmcaatacagtcatgtgacataaatagccatttttggtgaaagggtatctgtttatatcagtcattcccaaacacagtataacaaggttatttaataattgg

SEQ ID NO: 174677 - DNA, 201 bp, Homo sapiens
aaaaggaaatgtaggcctcttctatctgtctctattttgttgtcatcccttgacttctaaaaaaaataaaatccttataatgcagcataccatgtattcaracttctctataaagttgcaaaactgtaattaaaaaaaaaatcttaatcactaattgtgaaattctgtgtggcaggcagttcactatccacatctctgccc

SEQ ID NO: 174678 - DNA, 201 bp, Homo sapiens
ggtgtgatcatagctcactgctcaagtaatcctccttcctcagctttctgagcatctgggactacaggcttgtgtcaccgcacccagctaattttttttttcttcgtaattttttgtagaaactatgttgcccaggctggtctcaaactcctggcctccagcaatcctcctgcctctgcattctgaactgctgggcttaca

SEQ ID NO: 174679 - DNA, 201 bp, Homo sapiens
gagagattatttcttgttaatgtatgttttgttacagcacatccctaaatactagtttgggaaattgctgcctgccttttgttttaacattttttttcttwtagtatatgttcacctcttttgcatgctccaggcagtttaccacatgtttatcatatggaggtcaccatagttgtttactgtaataaccctataaaagga

SEQ ID NO: 174680 - DNA, 201 bp, Homo sapiens
cctttcttgtcatttcagtgatgtctacagcatctttccatgaataaattccatctcaagacaaaaactacctgccccccccaccttttttttttttttttgaaaaaaagagaggctctcgatctgtcacccaggctggaacgcagtggtgtgatcatagctcactgctcaagtaatcctccttcctcagctttctgagca

SEQ ID NO: 174681 - DNA, 201 bp, Homo sapiens
gctcattatctgcaaaatctgtcttattattactgagttattttaaaataaaagtctgtgattcctttttataacctcatagattacttttcattttttttaaatttatttttaccaaagtaaccattaatatagttacacgggcataccttggagatgttaatgcactcagttcccagccaccacaagaaaattaaaatc

SEQ ID NO: 174682 - DNA, 201 bp, Homo sapiens
tgtttatagaatcatgcgtttggtttatggttgcatttcttttttgatgacattaatggtgagttttctttgcctgtgtaatctcaagtatttgtgtgtgtggggggggcggggggggcctgcattttggattggttttgtctttcatgttaggaactttcctcatattctggtaattctggtaattcctggttgtctcct

SEQ ID NO: 174683 - DNA, 201 bp, Homo sapiens
gacttgtaaatgaatgagtacagctatgttctaataaaatttttatttacaaaaccatgtggtggactggatttggcctttgggccatattttgctgaccmtgttttaaaccataagcttttctaagaattttttttttaatcccaataatgaagttacatagaaaatacttaatggtgtgtgaagagaatggtaatatga

SEQ ID NO: 174684 - DNA, 201 bp, Homo sapiens
caagcccacacccacccggaactccagctggcccgcaagcgccgggtgcagcccccgttcccactcgcgcctctccctccacacctccctgcaagctgagrgagtgggctctggccttggccagcccagaaaggggctcccacattgcagcggtgggctgaagggctcctcaggtgccgccaaagttggaggccaggcaga

SEQ ID NO: 174685 - DNA, 201 bp, Homo sapiens
agaatgcagcaacatattgtaatgtaccatgtaatgttgaattgagagttatggtcatgtatgtatgtatgtatgtatgtattttatttatttatttatttttggagtcagagtctcattcttgtcgcccagtctggagtgcagtggtgtgatctctgctcactgcatcctccccctcctggattcaagtgattctcgtgt

SEQ ID NO: 174686 - DNA, 201 bp, Homo sapiens
taatttttttttttttttttttgtatttttggtagagacaacatggggtttcaccatgttgcccaggctggtcttgaactcctgagctcaagtgatctgtstgctttggcatcccaaagtgctgggattacaggtaatgagccaccgcgcctggccaaaaccatgtttttaaatgaaattttcctcccttatcttttgtat

SEQ ID NO: 174687 - DNA, 201 bp, Homo sapiens
tagaatgcagcaacatattgtaatgtaccatgtaatgttgaattgagagttatggtcatgtatgtatgtatgtatgtatgtattttatttatttatttatttttggagtcagagtctcattcttgtcgcccagtctggagtgcagtggtgtgatctctgctcactgcatcctccccctcctggattcaagtgattctcgtg

SEQ ID NO: 174688 - DNA, 201 bp, Homo sapiens
ggctgtacaaaacagttgtctttattgaaataattgacgtggtaacatcgttcaaaccaaatctgccataaaagataaagatgaatagacaaattattctyttttataaagctgcttattaaatcttctctttgaggagacttttgttttgaaaaggctttgtttaacctgtttgtttatttataactttagcttcctgga

SEQ ID NO: 174689 - DNA, 201 bp, Homo sapiens; identical to SEQ ID NO: 31180

SEQ ID NO: 174690 - DNA, 201 bp, Homo sapiens
tagtagagacagggtttcaccatgttggcctgggtgatctccaactcctgacctcaagtgatccacccgtgctggcctcccaattgctgggattacaggcrtgagctaccgcacctggccaaattctattaacttttaggttaaattttagaattaatgttgtaatgtgctgtcttcttagttaaaaatcttatcaactga

SEQ ID NO: 174691 - DNA, 201 bp, Homo sapiens
ttggagatgttgtcacggagacatagtaaagccattctacaggcggtaagtgttgttactgaaggggactacatttcactttatgtagaatttttaaaatycacatttgtacaggctacttgattgcagtttttgtaagatacaaatgttgtttccagagtaatgtgctagactttttatgagttaaattattttttattg

SEQ ID NO: 174692 - DNA, 201 bp, Homo sapiens
aaaccctagtttaaattgaaccacgcttatgagctggcagaaggatttctaacttggggcgatcgtcccctcttccaagggtcttagggaaccctgatccrtgaaatttccagctccaggtcccgggtgacccgagggggaattagttcctgctaccacggaggggagggggtgaccccggcggagggataccaagtagat

SEQ ID NO: 174693 - DNA, 201 bp, Homo sapiens
aatctcttgaacccaggaggcagaggttgcagtgagctgagatcatgccactacacttcagcctgggtgacagagtgagtatctgtctcaaaaaaaaaaaacaaacaaacaaacaaaaaaaaaccttccctgtctgaccatagcctacacttaaaaaaaaaaacaaaaaaaaaaaccctctatgtgtgtgtgtatatatat

SEQ ID NO: 174694 - DNA, 201 bp, Homo sapiens
gatgcaaaaataatttaatgcctcttatgactgaatttgagccactttttaaaggtatttatactagaattggttgggcgcagtgtctcatgcctgtaatstcagtactttgggaggctgaagcaggcagatcgtttgagcccaggagttcaagagcagcctgggcaaaatggcgaaaccctgtctctactaaaaatacag

SEQ ID NO: 174695 - DNA, 201 bp, Homo sapiens
gaagcagtcctcctgccttggcctgccaaagtgctgggattacaggcatgagccactgcacctggccttaatataggcttctttttttttttttttttttyttttttttacaatatctgtcattaaaactatattatcagttttaatgtctctataattttccgttatgtagatatatcaattatgcatatatgtaatcac

SEQ ID NO: 174696 - DNA, 201 bp, Homo sapiens
tgaagcagtcctcctgccttggcctgccaaagtgctgggattacaggcatgagccactgcacctggccttaatataggcttctttttttttttttttttttcttttttttacaatatctgtcattaaaactatattatcagttttaatgtctctataattttccgttatgtagatatatcaattatgcatatatgtaatca

SEQ ID NO: 174697 - DNA, 201 bp, Homo sapiens
ttttgtagagatagggtttctccatgtttcccaggctggtctgaaactctcaagcgactggctcacctcggcctcccagagtgctgggattacgggcgtgraccactgtgggtattccattttaaaaatcagaagacataaagaactgttgcctccatgttatacagcgagtttttaaatgataaattaaagcaggttcct

SEQ ID NO: 174698 - DNA, 201 bp, Homo sapiens
gtattcttttaaaatataaaagaggctttatttcttttgttttggagagttttaactagtttttgaaatttggatgaattcttacgtggttttttttcccsctcaaagtctgggtcagtaaccattttctgcaaatggccatatagtaaatattttaggccttgctgaccacatacaatctttgccacatattcttcttca

SEQ ID NO: 174699 - DNA, 201 bp, Homo sapiens
cacggtggccaagctggtctcaaactcctgacctcaagcgattcacccgcctcggcctcccaaagtgctgggattataggtgtgagtcactgcgctcagcygctgaattctaataggattatctcatacagcagtttgcggccataaccatgaatgcatattatctagtaaagtatttaaaaattttttaggccgggcgcg

SEQ ID NO: 174700 - DNA, 201 bp, Homo sapiens
atgtttttgtaggtgttgcaaactcccccccatttggagttgcaccattttgcgtttccaccagtcatgtgtgaatgacagtagtatggtatcaagctttkgaatttttaccaaaattcattgtttctctaatattaactttttttagttatatgtatcttcgtatatttcttttagtggtaccctagagagtataatgca

SEQ ID NO: 174701 - DNA, 201 bp, Homo sapiens
tttatcatggtgggggagactatattttgattgtgggactgtgtaataggtctgatgtgtatctcagattaccatatgaaagattaacatgcctttaacayagatcatgtaagaatggaagatagcataaaaacaggacagcgaagatttattattcagttgtctatttctagtttttaattaacataacataactaagag

SEQ ID NO: 174702 - DNA, 201 bp, Homo sapiens
ttattttggaaattacagttaaatgccatgtaaatcttttttgtatatccagtaaagctgacagaaaatgaagttatgatttatacatcatattgtcccayttgatgagattatcaaattatggagatagcttgagttttggtgagagagctgagtaaagaaaagcctgtgaaatacaaggtgacaatccttattctgctt

SEQ ID NO: 174703 - DNA, 201 bp, Homo sapiens
tctcaaactcctgggctcacccattcctccagcctcagcctcccaaattgctgggatttcaggcatgagccactatatccagcctgtgttttttgtttgtygttttggtttggttttcttgtgaggacaagatctgcgttgcccaggctggtctcagactctcaggactcaaatgatcctcaggccttggcctcccaaagt

SEQ ID NO: 174704 - DNA, 201 bp, Homo sapiens
acattctaatagccatcatctgtgcaggaaatgaaagaggatgcaagggtttataattgtgtgtgtgtgtgtgtgtgtgtgtgtgtgtgtgtgtgtgtgtggtttttatttttacagaatattctttccattctcttttttgttagatacgttgttgtgttttttatttccttgccctttcattgttaattggattctatt

SEQ ID NO: 174705 - DNA, 201 bp, Homo sapiens
aacattctaatagccatcatctgtgcaggaaatgaaagaggatgcaagggtttataattgtgtgtgtgtgtgtgtgtgtgtgtgtgtgtgtgtgtgtgtgtggtttttatttttacagaatattctttccattctcttttttgttagatacgttgttgtgttttttatttccttgccctttcattgttaattggattctat

SEQ ID NO: 174706 - DNA, 201 bp, Homo sapiens
ccctcctgagtagatcagactataggcgtgcatcacgatgcctggctaatttttttttttttttttttgtatttttggtagagacaacatggggtttcacmatgttgcccaggctggtcttgaactcctgagctcaagtgatctgtctgctttggcatcccaaagtgctgggattacaggtaatgagccaccgcgcctggc

SEQ ID NO: 174707 - DNA, 201 bp, Homo sapiens
tttcaattgttggagtagtggaattaagtcttaaaagtaggaacattctaatagccatcatctgtgcaggaaatgaaagaggatgcaagggtttataattgtgtgtgtgtgtgtgtgtgtgtgtgtgtgtgtgtgtgtgtgtggtttttatttttacagaatattctttccattctcttttttgttagatacgttgttgtg

SEQ ID NO: 174708 - DNA, 201 bp, Homo sapiens
aatagcagatcatattgcttttccttatgctattatatgatgagcatcttcctgttgcattattagttcttcattaatgtgctttatatttacttaaccakaattgttaaaatctttccctttttgtcagattaaaattttttttttttttttttttttggagatggagtctcactctttcccaggctggagtgcagtggc

SEQ ID NO: 174709 - DNA, 201 bp, Homo sapiens
ttggccaggttggtctcaaactcctgacctcaagtgatccacttgccttggcctcccaaagtgcttggattacaggcatgagccactgcacccagcctctstagactttattttggagtgtattgtttagcttaatgacaacgtacttctctgtggttgttgagtattcacatttttcaattgttggagtagtggaattaa

SEQ ID NO: 174710 - DNA, 201 bp, Homo sapiens
aattaagtgttgtttttcttgtaatcttaattcttgttttgtgattacgagtgttagtgtcagtaatctttgggctaaagaacacccttatcttttaatcrgatattttagtatccaaagtcacatctgcttttgttttgttcttttatttcgttttacagatttgaaccttctgaaaacctatgtttaatactggactta

SEQ ID NO: 174711 - DNA, 201 bp, Homo sapiens
atagaatgcagcaacatattgtaatgtaccatgtaatgttgaattgagagttatggtcatgtatgtatgtatgtatgtatgtattttatttatttatttatttttggagtcagagtctcattcttgtcgcccagtctggagtgcagtggtgtgatctctgctcactgcatcctccccctcctggattcaagtgattctcgt

SEQ ID NO: 174712 - DNA, 201 bp, Homo sapiens
catagaatgcagcaacatattgtaatgtaccatgtaatgttgaattgagagttatggtcatgtatgtatgtatgtatgtatgtattttatttatttatttatttttggagtcagagtctcattcttgtcgcccagtctggagtgcagtggtgtgatctctgctcactgcatcctccccctcctggattcaagtgattctcg

SEQ ID NO: 174713 - DNA, 201 bp, Homo sapiens
attacaggcatcagccagcgcacccggcctaaacacactttttattttaggtcagtttcagattcacagaaaagcttcagagatagagttctcctatactscacatccagtttctgtttgtgaaaattttaacattagtatggtacatttgacacaactaatgacccagtattgatacattattactacctatactttatt

SEQ ID NO: 174714 - DNA, 201 bp, Homo sapiens
acatatgaagtgccatagaatgcagcaacatattgtaatgtaccatgtaatgttgaattgagagttatggtcatgtatgtatgtatgtatgtatgtattttatttatttatttatttttggagtcagagtctcattcttgtcgcccagtctggagtgcagtggtgtgatctctgctcactgcatcctccccctcctggatt

SEQ ID NO: 174715 - DNA, 201 bp, Homo sapiens
gttttcacatatgaagtgccatagaatgcagcaacatattgtaatgtaccatgtaatgttgaattgagagttatggtcatgtatgtatgtatgtatgtatgtattttatttatttatttatttttggagtcagagtctcattcttgtcgcccagtctggagtgcagtggtgtgatctctgctcactgcatcctccccctcc

SEQ ID NO: 174716 - DNA, 201 bp, Homo sapiens
taaaagtatattcgttattctcagcactttgttacctgaagggatcaataatgcttttgttatttttgaagatggtttaaaccttttgtgtctgaaaactgttttaagagactgcagagaagacagtataataactgagggccttattctacaagtgagggtctgtggtgtgctgggtattcattattgtgtataacgttt

SEQ ID NO: 174717 - DNA, 201 bp, Homo sapiens
ttgttttcacatatgaagtgccatagaatgcagcaacatattgtaatgtaccatgtaatgttgaattgagagttatggtcatgtatgtatgtatgtatgtatgtattttatttatttatttatttttggagtcagagtctcattcttgtcgcccagtctggagtgcagtggtgtgatctctgctcactgcatcctccccct

SEQ ID NO: 174718 - DNA, 201 bp, Homo sapiens
gataagtttagtgaagtgggtaagagcgaacactgagattcagtttaaatctaggctccaacattactagttgaataacctttttttttttttgacactasttctcccatctgtaaaatgggagtaaaaatagtatatatatcctgattgttatgaggattaaattagttaatatatgtaaaacatttaaaacaatgcctg

SEQ ID NO: 174719 - DNA, 201 bp, Homo sapiens
agttgttttcacatatgaagtgccatagaatgcagcaacatattgtaatgtaccatgtaatgttgaattgagagttatggtcatgtatgtatgtatgtatgtatgtattttatttatttatttatttttggagtcagagtctcattcttgtcgcccagtctggagtgcagtggtgtgatctctgctcactgcatcctcccc

SEQ ID NO: 174720 - DNA, 201 bp, Homo sapiens
agatctgccctcttagagggtgctgaaaaagaagagatttataaaaggagattccttatcttgaaatgtactttgttgtagatgagttgaaacttacgacwacagcacacaacatctaacattgtgcatatttgttattaagtacaagatcgagttttatacagtgggtacttggaagtttagagaggttcagttctgggt

SEQ ID NO: 174721 - DNA, 201 bp, Homo sapiens
tggttccatacaagatctgccctcttagagggtgctgaaaaagaagagatttataaaaggagattccttatcttgaaatgtactttgttgtagatgagttsaaacttacgactacagcacacaacatctaacattgtgcatatttgttattaagtacaagatcgagttttatacagtgggtacttggaagtttagagaggt

SEQ ID NO: 174722 - DNA, 201 bp, Homo sapiens
ctgagggaggatgatgacgaggggggcatgcagggaggcctaaagaagccgagaaacttgactgagaggaatagagtatccttttaaatagatcagaatgraaattggtggtaggtgggtttaactaggacttgggggagggaggtgggccaattgtcaccccaatcgtattagcattcagagcgagtcaggcgattaatt

SEQ ID NO: 174723 - DNA, 201 bp, Homo sapiens
ctggttttcctcatgaaatatttagtgtgtgtgtgtgtgtgtttaaaatcataatttccaaggatttactaagactgtaccactcccctgccctctttttyaagggcgttgagaatatattcatttccttttgaggatatgtgagttgtgtattttttaagtgctgcttaaatcaatatagaaatacttttcctaactctt

SEQ ID NO: 174724 - DNA, 201 bp, Homo sapiens
tgtttctgttaaaaaatagatggcaggaacttatattcctgtcttttattttctacttagtatatagtcatacattgaacttactaggggttgactgcttmcttgaatgttgagttaatttatcttggtgaaatgtagtagaaatgacattttgtgtttggcaattttcttagacctttctgcttcatagatcagagtgta

SEQ ID NO: 174725 - DNA, 201 bp, Homo sapiens
ggattcctggttttcctcatgaaatatttagtgtgtgtgtgtgtgtgtttaaaatcataatttccaaggatttactaagactgtaccactcccctgccctsttttttaagggcgttgagaatatattcatttccttttgaggatatgtgagttgtgtattttttaagtgctgcttaaatcaatatagaaatacttttccta

SEQ ID NO: 174726 - DNA, 201 bp, Homo sapiens
agtaaagcagaaatatctgtacagtaccagatcaagtcttacttattacaactgtaatcattccatttgaattctagtctagtcataacagaaacgaattdaagtacattgtaatggaaaatgtatgtgtaatttaaaagtgctaatctaatttttatgtcatgtgatgcgatgcagtgtgattaaaactctattttaacc

SEQ ID NO: 174727 - DNA, 201 bp, Homo sapiens
gggatgattctttagatctcagccctcaagggtaagtaagaattgtgttgtgatttttatttctttgctgttagcgctgctttggtacctaagaatcatayagggagtaaaatggtaacatattagcatatatatattatatttttccttttgtattttgttaatgagaatgggaagaaaacatttattggaaacctactg

SEQ ID NO: 174728 - DNA, 201 bp, Homo sapiens
aacagcaacaacattgagccagcacggactgcgggaggtagtggccttgccagggctgcctcaaaggataccatctccaataataggtgaagtggggggarttttatgtttcttctattcccatatcagaaaaacttaaacattatttcagccagtacgtttattgtgtggagacgatacatagacacagcactttaattt

SEQ ID NO: 174729 - DNA, 201 bp, Homo sapiens
ccggccaggcacaggcagtggtccacgcctgtaattgcagtactttgggaggccgaggtgggcggatcacttgaggtcatgagttcaagaccagcctggcyaacaagatgaaactccatctctactaaaaatacaaaaattagccgggtatggtggtaggcatctgtaatcccagctactctggaggccaaggcaggagaa

SEQ ID NO: 174730 - DNA, 201 bp, Homo sapiens
gggtttctcaggaaccaagtccctgcagatgggcagggtacttaatagcgtacagctaaaaaggaaatggaatctctaaattttattttattttattattwtttttttttttttggaaagaggtcccaagcagaaggttttagtactgagactgatactcttttatggtacacgtagacctttattttcactcacgtaaac

SEQ ID NO: 174731 - DNA, 201 bp, Homo sapiens
ccaaggttggaggaacgtttgaagccaggagtttaagaccagcctggggaacagtgagacacctcccaacctctgtctctacaaaaaataaaaataaattaggtggatgcggtggggcacacttataattctagctactggggaggctgaggtgggatgaccacttgagcccaggaggtggaggttatagtgagctttgat

SEQ ID NO: 174732 - DNA, 201 bp, Homo sapiens
gccaaggttggaggaacgtttgaagccaggagtttaagaccagcctggggaacagtgagacacctcccaacctctgtctctacaaaaaataaaaataaattaggtggatgcggtggggcacacttataattctagctactggggaggctgaggtgggatgaccacttgagcccaggaggtggaggttatagtgagctttga

SEQ ID NO: 174733 - DNA, 201 bp, Homo sapiens
agtcttactgatttgaatgtgaatatggctttttattttttatttttattttttcgaggcagggtctcactctgtcacccaggctggagtgcagtggtgcratctcagcccactgcagtctccatctcctgggctcaagcaatcctcccacctcagccccgaaagtcgctgggactagagatgcgcactaccatgcccggc

SEQ ID NO: 174734 - DNA, 201 bp, Homo sapiens
ggccaaggttggaggaacgtttgaagccaggagtttaagaccagcctggggaacagtgagacacctcccaacctctgtctctacaaaaaataaaaataaattaggtggatgcggtggggcacacttataattctagctactggggaggctgaggtgggatgaccacttgagcccaggaggtggaggttatagtgagctttg

SEQ ID NO: 174735 - DNA, 201 bp, Homo sapiens
aatcttaactagagatggagttttacttcattttattttctgatttgttgccttcataatagtttattattattattttattatttttgagacggagtctygctctgtcacccagggtggagtgcagtggcgccatctcagctcactgcaaccttcacctcccaggttcaagcgattctcctgcctcagcctcctgaccat

SEQ ID NO: 174736 - DNA, 201 bp, Homo sapiens
cttactgcttatcagttatcttttccttacactttatgtcactaagcaaagtggtagaattaccttctttatccattttacaaagcttttagtgaaatatsgtgcatttctagaactcagtttcttaccactggtttggttggttaggattggatttccctattgtttcattgaatgtatatcagtaaaataaagaggtac

SEQ ID NO: 174737 - DNA, 201 bp, Homo sapiens
agctctctttacacaccttaaaggatgtgatagttcccacccttcaatagctggttttttttttggtggcagtgttaatgtgatcttgtctttttgtagcrcttgaagttaactgattcttggtcttttccatcccttctggctgtcacaccacagggtgtgcactgtatttctgtagttgattattgtttttataatgag

SEQ ID NO: 174738 - DNA, 201 bp, Homo sapiens
tttttctcttttacttcaataaggaatgggaaaagaaaatataccattttattgtttcttgctgatgacttttagtgtattcagcaatactgagcacagtkgctcatgctttgggaggccaaggttggaggaacgtttgaagccaggagtttaagaccagcctggggaacagtgagacacctcccaacctctgtctctaca

SEQ ID NO: 174739 - DNA, 201 bp, Homo sapiens
aggccaaggttggaggaacgtttgaagccaggagtttaagaccagcctggggaacagtgagacacctcccaacctctgtctctacaaaaaataaaaataaattaggtggatgcggtggggcacacttataattctagctactggggaggctgaggtgggatgaccacttgagcccaggaggtggaggttatagtgagcttt

SEQ ID NO: 174740 - DNA, 201 bp, Homo sapiens
actgcaacctctgcctctcaggttcaagcagttctcctgcctcagcctcctgcgtatctgggactacaggtgcacaccactgcgctcggctaatttttgtrtttttagtggagatgcggtttcgccatgttggccaggttggtctcaaactcctgacctcaagtgatccacttgccttggcctcccaaagtgcttggatta

SEQ ID NO: 174741 - DNA, 201 bp, Homo sapiens
tttttaatgtaataggtggatattcagagtcaaagaaggatgatgctcgagcacagcttatgaaagaggatccggaactggctaagtcttttattaagacrttatttggtgttctttatgaagtgtatagttcctcagcaggacctgcggtcagacataagtgccttagagcaattcttaggataatttattttgcggatg

SEQ ID NO: 174742 - DNA, 201 bp, Homo sapiens
gaggccaaggttggaggaacgtttgaagccaggagtttaagaccagcctggggaacagtgagacacctcccaacctctgtctctacaaaaaataaaaataaattaggtggatgcggtggggcacacttataattctagctactggggaggctgaggtgggatgaccacttgagcccaggaggtggaggttatagtgagctt

SEQ ID NO: 174743 - DNA, 201 bp, Homo sapiens
tagaatgatagaagccgtggactcttccccagaaaaatgtgaacgtgtgctcattcactcacgttaaatatatccacatatttgcatatagtttatactasctgataatcagacatgcatattggtatacaatttgatagttcttagtcacactccttcatacatactctcctatgattccgggacagataggaacccctg

SEQ ID NO: 174744 - DNA, 201 bp, Homo sapiens
gttgggagagtcatgtaaaaattacaaaggaatagaagatgatacgtaatgataccaaaacaatagcgtaaatctgtgtcacagttgtcaaacctagctgrtactagaaaaatagttattttgctttttttcctttttaatttcttttggtgtttttgttttgttttgttttgacgcagggtctccctctgtcacccaggt

SEQ ID NO: 174745 - DNA, 201 bp, Homo sapiens
acatgaaatgtgtgatggacttttaagagcttcctttgtataacagtctgtacatagtgtgttaagttctcaagaatctctccttaaaaactttgaagttmttttgtgcaactgtgttttgaataaacccatgtcagttaaaaacaaaccaaacaacagaacttccataggctttctttttgtatgtaacaacttgtttta

SEQ ID NO: 174746 - DNA, 201 bp, Homo sapiens
agttcccacccttcaatagctggttttttttttggtggcagtgttaatgtgatcttgtctttttgtagcacttgaagttaactgattcttggtcttttccrtcccttctggctgtcacaccacagggtgtgcactgtatttctgtagttgattattgtttttataatgagtattttgaactctgaataggactttgtgacc

SEQ ID NO: 174747 - DNA, 201 bp, Homo sapiens
tccaggaaacacaagttaaggataatgcagatatgtatgtactttaggaagtaaagggaacacttaggaaagtgttatattgcagggttccaaaaaattaytacactttgtttacaattcatgtaatgacctgcagtgtattttaagtttttaaacagttctccaggtggtacatcgtagcccattttcaaagtgaaagtt

SEQ ID NO: 174748 - DNA, 201 bp, Homo sapiens
aaaagtatattcgttattctcagcactttgttacctgaagggatcaataatgcttttgttatttttgaagatggtttaaaccttttgtgtctgaaaactgttttaagagactgcagagaagacagtataataactgagggccttattctacaagtgagggtctgtggtgtgctgggtattcattattgtgtataacgtttt

SEQ ID NO: 174749 - DNA, 201 bp, Homo sapiens
tggcctatatacaaagccatctgggctgcatgtggcctgtgggccgcaggttggacaagcttgctttgtggaatcatacagataatcacagtttaagtttstatctgactcctgccagagcttttctgaaatgagcaattaaacatcatgaccaggtttcaactgcagtagctattaaaccgcttcgttcaaaactattat

SEQ ID NO: 174750 - DNA, 201 bp, Homo sapiens
gacgtggtaacatcgttcaaaccaaatctgccataaaagataaagatgaatagacaaattattctcttttataaagctgcttattaaatcttctctttgargagacttttgttttgaaaaggctttgtttaacctgtttgtttatttataactttagcttcctggagaagagcccattggaagagtggaaccagtgggtaa

SEQ ID NO: 174751 - DNA, 201 bp, Homo sapiens
cctttctgcttcatagatcagagtgtaatatatacaggttgaacatccctaacctgaaaatctaaaatgcaaaacgctccagaatctgaaactttgattgytgccgtgaacatcgcaagtggaagactccacacctgacaactttgctttctgatggttcaatgtacatacactttgtttcatgcacaaaattattgaaaa

SEQ ID NO: 174752 - DNA, 201 bp, Homo sapiens
gttaaatagtttgtatttgactcagttgttatattaatgttttattttagaagattttaattcttttattgtactaactaagacatatgatttcacagtgrgtcacatgacctatactcacagcaggctataaacatcttgattagcaaatacaattctaaatcaaaccataaataaggactcctttcaattaaattttag

SEQ ID NO: 174753 - DNA, 201 bp, Homo sapiens
agaaagtggggggccggaagtgcaggtggggggtgtgaagacggcaagggttccccggaaatgggacgaggggcccggaaatcgggaaaggggaggctccrgggccgtggacggcccggaaatggaaactaggaagcagctccagtgacaacagttgtgggaagcgagggtcagagaagggagaggccagagagactttag

SEQ ID NO: 174754 - DNA, 201 bp, Homo sapiens
ttgccagttatgttttagtctttttgtgtattatgtcagtgttggtatttagggattttgtaatggtggggagaaggttctactcctgattaaaactgacyccctttcatctctgttattataaaggtgtaatgcatcaagtaaaacacttagcagaatcagagtctttgttgacaagtccaccaaaggcatgtacgaatg

SEQ ID NO: 174755 - DNA, 201 bp, Homo sapiens
aacattgatcagatgaatcaagcttctttttgtaatagaaatagaaaaacagtgcgttttacagggaacattagtgagttacttatttaaagtggtttaaagtgaactttccaccattaattattgaaaatcaatggctcttttaaaacatggattttccagcatttgaaataaaatatctaatttttagaagacaaaact

SEQ ID NO: 174756 - DNA, 201 bp, Homo sapiens
cttattctacaagtgagggtctgtggtgtgctgggtattcattattgtgtataacgttttgcccttgactctttcaaaatatatcttctctcttcctaaaygactttgtctttttgcctgctataacttagtaatgactcctattatctgcacttgcccacttgaagagtctttttaaatacacttttttttttttttttt

SEQ ID NO: 174757 - DNA, 201 bp, Homo sapiens
cctcctgccttggcctgccaaagtgctgggattacaggcatgagccactgcacctggccttaatataggcttctttttttttttttttttttcttttttttacaatatctgtcattaaaactatattatcagttttaatgtctctataattttccgttatgtagatatatcaattatgcatatatgtaatcactcctttca

SEQ ID NO: 174758 - DNA, 201 bp, Homo sapiens
cacccgcctcggcctcttaaagtgctgggattacagttgtgagccactgagcccggcctaatttctttttttttaattaatggaagtcttttatttatttwttttttttcagaaatagatgtaaaacctgatgaagaaagattcatgcagtaaacagtaaacatgtttcttttcttttctttttttttttttttgagacag

SEQ ID NO: 174759 - DNA, 201 bp, Homo sapiens
gagccagcacggactgcgggaggtagtggccttgccagggctgcctcaaaggataccatctccaataataggtgaagtggggggagttttatgtttcttcyattcccatatcagaaaaacttaaacattatttcagccagtacgtttattgtgtggagacgatacatagacacagcactttaatttgttcttaaaagcata

SEQ ID NO: 174760 - DNA, 201 bp, Homo sapiens
tcagcatatttttctcttgccaggaaatatctttcctctctcatccctcatggttctgttaaaattgcatcttgcgtgaaacctaaacaagctcaaaatgkcttcacacaggttgttctaaggagcaggattggattgctaatgtaaggtcaagattttatgcccttccttcatgggtcttacctgttgacctcggaaaag

SEQ ID NO: 174761 - DNA, 201 bp, Homo sapiens
ccattttaagtcaagttgtcaaacttttgtttttctgtttctggggttttatgctttcctttcctttaaaaagaaaaatgaagctcaaccaagtacctacrcttttagtggtgtagttgggtagaatgataatccctgaagagatcaggttactctgtgggggtgctggccacccccaggttgtatcagcaaagcaaacat

SEQ ID NO: 174762 - DNA, 201 bp, Homo sapiens
aagagcgaacactgagattcagtttaaatctaggctccaacattactagttgaataacctttttttttttttgacactagttctcccatctgtaaaatggragtaaaaatagtatatatatcctgattgttatgaggattaaattagttaatatatgtaaaacatttaaaacaatgcctggtataggataagtgcttgcat

SEQ ID NO: 174763 - DNA, 201 bp, Homo sapiens
cccaggctggagtgcaatggcacaatctcggctcactgcaaactctgcctcccgggttcacgccattctcctgcctcggcctcccgagtagctgggactayaggcgcccgccaccatgcccagctaattttttttgtatttttagtagagatgggttttcaccatgttaaccgggatggtctcggtctcctgacctcgtga

SEQ ID NO: 174764 - DNA, 201 bp, Homo sapiens
ctgttgtgaaaataacccgagtgatcagtattcatagaggttggaatgtttctggacatttcttcatttctttttctcttgaacttctggcctcaagcagkcctctcacattggcctcccacagcactggaattacaggcatgagccaccgtgctcttctcatgttttcggaggcactttatcagtatgtttaagacattt

SEQ ID NO: 174765 - DNA, 201 bp, Homo sapiens
ccagggttcatgccattctcttgcctcagcctcccgagtagctgggactacaggtgccagccaccacgcccagctaatttttttgtatttttagtagagayggggtttcaccttgttagccaggatggtcttgatttcctgacctcgtgatccacccgccttggactcccaaagtgctgggattacaggcgtgagccaccg

SEQ ID NO: 174766 - DNA, 201 bp, Homo sapiens
ccccgtctctactaaaaatacaaaaattagccaggcgtggtggtgcacgcctgtagtcccagctactcgggaggctgaggcaagagaattgcttgaacccrggaggcggaggttgcagtgagtcaggatcatgccactgcactccagcctaggcgacagagcgagactctgtctcaaaaataataataataaccagagtcc

SEQ ID NO: 174767 - DNA, 201 bp, Homo sapiens
agctgctcggacagatgaagctccccaaggagctgcaggtagattggtacttcttagctttaaaatgcgtttctgtcttttacagatttgatgggcagagkgagggaagtatgctaggtgttactatcgtataaacttcttgttctgttttgttttactttaccagtttgatattttgattagttggatttggttgccatt

SEQ ID NO: 174768 - DNA, 201 bp, Homo sapiens
tcatggacacagtaaatcatccaaaagcccaccttcaataaccaaagtaggcataaaaataggccgatggttactttggagataatataatcctcggtctwgttgtggagcagatgtcattatgggtggggctgaagcgcagagcagctgaaacatttttataccaccacccgcacactttcaatgggatagaagggactc

SEQ ID NO: 174769 - DNA, 201 bp, Homo sapiens
cctttccactgcttctctgttgacttgctctcagggatactacctagccttttccagttctagcacaggtatttgtaggctaccacctccctcttggcaaygcagtagcgtttttattataccgtgtgctttttcttgtttttctcaagtggcagtggtaggattgaatttaattttatagcaactttaagattgctttag

SEQ ID NO: 174770 - DNA, 201 bp, Homo sapiens
aagtgaaatttttataagccaaggcactttatatataagataaaatgggaagattgtcaaacttatcaataccctactaataagattccaagcgttgactrtaacaacttctgttactcttttagcgatgataggaccttggctgcactggcttagcctttctaactttgatcaaaacttactttgatcttttgtccttta

SEQ ID NO: 174771 - DNA, 201 bp, Homo sapiens
tctataatgaaaaagttttcatagcatttcaagaattacactggcttgagtattttatattgtttattgtgtttctgaagtctgtcacttcaggattgcayatatatttttttttaatgtaataggtggatattcagagtcaaagaaggatgatgctcgagcacagcttatgaaagaggatccggaactggctaagtcttt

SEQ ID NO: 174772 - DNA, 201 bp, Homo sapiens
actccagttacttgtttccattttggtcttccgttggtctgagcttcccagcattcttttaaaccttgcatgcatcctaccaaagattccagtatcaccgytggctatctgcacacctcacttcaagttgtctttgaaagagggcttgggctagctcatgtctttcacagctgatagcacagggtagaatcttggtctagt

SEQ ID NO: 174773 - DNA, 201 bp, Homo sapiens
aaaatattctgtgaagttttgaacatgatgacctgaagaattttataatttttaattagtgataatttctcattataaaattacacttttccattttctgkggataggtttaagaaaatctacgaagaaacgcagtgagtctccacctgctgagctccccagtttgaggcggagcacacgccaaaagaccacgggctcctg

SEQ ID NO: 174774 - DNA, 201 bp, Homo sapiens
gcttgaacctgggaggcggaggttgcagtgagcctagactgcgccattgcactccagcctgggcgacagaacaagactccatctcaaaaaaaaaaaaaaaagagttaacctctgtgatgtcattattatggtggagttcacaatagtgacaagaatatatattgaagagaatatttttgaaaatattgccttattatgtgt

SEQ ID NO: 174775 - DNA, 201 bp, Homo sapiens
ttataagcctaagtgtccatcaacaagccttcaagacttgaagttacagcatttcagtgtgtattttaatcaacttgttggctgtcataaccaatgagttytaccctgacttcaaaactcctactcactctagccgtgggcagtgctctgaataaatagatgtaccttgtgctgtgttcttaaggtcagatgaacttaatt

SEQ ID NO: 174776 - DNA, 201 bp, Homo sapiens
ggaaaagactgtcttattaccttccagttcctaaaaaactgttctgaagtagggtaacagtaaaaataaaattcggttctcatttttttttttttttcagwcagtctcattctgtcacccaggctggagtgcagtggtgcaatctcggctcactgcaacctccaccacccaggttcaagcagttctcctgcctcagcctcc

SEQ ID NO: 174777 - DNA, 201 bp, Homo sapiens
gcgagggaatagcctgcttcctgggaggttaaaggcggttgtagctggattcttttagcagggaagaaaggtggggtagttggaatttgggtagggaaccytgtctgctaccatcttctgtctgtagtctctacttcttcttatcttcttctcttcccactgcttagttttcctcacagaactgtctggtaattgctattt

SEQ ID NO: 174778 - DNA, 201 bp, Homo sapiens
aaagtcttcagacatttattttggccgggcacagtggctcatacctgtaatcccacaacttgggaagctgaggcaggaggatcatttgaggtcagaagttygagaccagcctggccaacatagtgaaatcccatctttactaaaaatataaaaattagccaggcatggtggcaggcacctgtagtcctagctactcaggtg

SEQ ID NO: 174779 - DNA, 201 bp, Homo sapiens
tgctgagagtcttgtcttccattcagcctaggagttccatagattggattctgtaatgagaatattttgtcacttctgtagtctgtttaaagtcaaactgkgctaattgaactgtgtcaatttaaatatgttctgtataccacacacaaccttggcgattaatctgtttcagttgtgtccctttcagtcttaaagttatct

SEQ ID NO: 174780 - DNA, 201 bp, Homo sapiens
atcccatctttactaaaaatataaaaattagccaggcatggtggcaggcacctgtagtcctagctactcaggtggctgaggcaggagaatctcttgaaccyaggaggcagaggttgcagtgagctgagatcatgccactacacttcagcctgggtgacagagtgagtatctgtctcaaaaaaaaaaaacaaacaaacaaac

SEQ ID NO: 174781 - DNA, 201 bp, Homo sapiens; identical to SEQ ID NO: 31182

SEQ ID NO: 174782 - DNA, 201 bp, Homo sapiens
tcccatctttactaaaaatataaaaattagccaggcatggtggcaggcacctgtagtcctagctactcaggtggctgaggcaggagaatctcttgaacccrggaggcagaggttgcagtgagctgagatcatgccactacacttcagcctgggtgacagagtgagtatctgtctcaaaaaaaaaaaacaaacaaacaaaca

SEQ ID NO: 174783 - DNA, 201 bp, Homo sapiens; identical to SEQ ID NO: 31183

SEQ ID NO: 174784 - DNA, 201 bp, Homo sapiens
acttaaacattatttcagccagtacgtttattgtgtggagacgatacatagacacagcactttaatttgttcttaaaagcatagttcaagaattaggtagkttctcagtttatgaaccctgcatctggctttgtcctaagttccagtcatgtgctttgaaactccttccagcatacctagctgaaagtcttatacgttcaa

SEQ ID NO: 174785 - DNA, 201 bp, Homo sapiens
ctaaagaacgaagtctccagaaagagattgttaaaatctacacaaattttttttaggcctttattacagcacttttgcattttttacattaatttctgcaytatgttgctttgtaagaaaatgattctgattattttccccccttgggcaatgtttgcctttgaatgaggtagtataactagtttaatagccttttgtttt

SEQ ID NO: 174786 - DNA, 201 bp, Homo sapiens
gcagtgaggtggctgtgggggtacggggagacactgagggcatccccaggatcctcacctgcatgcagacccctcagcctgtcccttctagaatctcaccygaggagcctgtgcccacgggagaggcagacagtggccagcagggagggggctgtgtgttcacccctcagtgagctctttaggatctgcccccaaggtgtt

SEQ ID NO: 174787 - DNA, 201 bp, Homo sapiens; identical to SEQ ID NO: 31225

SEQ ID NO: 174788 - DNA, 201 bp, Homo sapiens
gtcaggtgagcttcagcctgatgttgggcccattcccgtcgccatgcacaggggatgcctgtgtgtccccttcatgaggctgaagggactcagagactttratccttggctctggtatctccagccagctcagccccaagtgagaactcccttccttttctctcacaaacacacattgagcctactgtgcactcagcaacc

SEQ ID NO: 174789 - DNA, 201 bp, Homo sapiens
caggtgagcttcagcctgatgttgggcccattcccgtcgccatgcacaggggatgcctgtgtgtccccttcatgaggctgaagggactcagagactttgayccttggctctggtatctccagccagctcagccccaagtgagaactcccttccttttctctcacaaacacacattgagcctactgtgcactcagcaacccc

SEQ ID NO: 174790 - DNA, 201 bp, Homo sapiens
cagatgccttcaaggatctgggccaggacctcggggtgggagagggaagctacaggagactggagcaggtgggagggcagcagatcctgcagggccgccartgcccaccacgagcaccccgtcatggcctgcaccgtgtcaccaggcacaggaacatgggagggtttagagggtagaagcatcattttagaaaacttaccc

SEQ ID NO: 174791 - DNA, 201 bp, Homo sapiens
cctgggtggcagcctcggccaagttcaagttccatctgctctcttttgcgcagctgtgaaagggacaccagtatcctccctcaccatcacacttgacccgstatctgcaagacaggagagaaatgacagtggagaggttgcctagaaacccccgccttgatccacctgcctttcctgagtctctctggacaccccagaggg

SEQ ID NO: 174792 - DNA, 201 bp, Homo sapiens
gaaggggttgtagtggggaggggtcctcaagggcttggcgaggaggctaatgcagtaggccttgcgggcactgatggcagaaggggaaatggcgagaacargatggacttgggaggaacctaggagaaagtctggaccaagctaggggtctaggctggggctgcgggtgctgacaaaagcttgacagggtcttgggcctga

SEQ ID NO: 174793 - DNA, 201 bp, Homo sapiens
ggacactgcacttttcatcttggcaacctggctcacagtaggtacacagcatacatttttaaaaataaaaatttacattcattttcctttctgccttgtgsccacccacataatcccccttgtctttcaatccccaaccccactgtcccacctctgtgaactgtgaaagaacacagactgttacctgacaaacgtgggttg

SEQ ID NO: 174794 - DNA, 201 bp, Homo sapiens
agtgccagagcagggaagggcacagcatgggcacagtgtggcaggaggaaggcaaagtgctggcctggctctgctgggtggaagccacatggcaaaagccwaggctgcagacacaggttgcgggtcagaagagagggccagggtgccaggctgggaaacacgggctttattccaaagacagtgagcagcctcccaaggcct

SEQ ID NO: 174795 - DNA, 201 bp, Homo sapiens
atgcccagtccgtttctcctctgttcccaagaggccagctccagtgcctgctcctctaggaaccccagctcctgggtctcactccagccagacctctccargagctctgtccacctttcctgcatcggctttcctaccagaaggctctcctgcctccttccatcatgctgcagcaggggcacaaactccctgggaatctag

SEQ ID NO: 174796 - DNA, 201 bp, Homo sapiens
aggccgcaggagaagcatgctcatgcctgcaaggacgttctgccgagtgtgcgcaggacatcctcggccctgccctttttctggtgccaggtccatccacrggggcagtcagcacaggggctaaggcatctggaggcctggacacctccagtcagcaaacctggctttgtaactttgctctgccagcaactagctgtaggg

SEQ ID NO: 174797 - DNA, 201 bp, Homo sapiens
cccattcccgtcgccatgcacaggggatgcctgtgtgtccccttcatgaggctgaagggactcagagactttgatccttggctctggtatctccagccagytcagccccaagtgagaactcccttccttttctctcacaaacacacattgagcctactgtgcactcagcaaccccagccctggggagactgcggcgaataa

SEQ ID NO: 174798 - DNA, 201 bp, Homo sapiens
tccttggctctggtatctccagccagctcagccccaagtgagaactcccttccttttctctcacaaacacacattgagcctactgtgcactcagcaacccyagccctggggagactgcggcgaataaaatagacaaagcatccctgccctcatggcattggccttctagtgacttggtttactaaaaagctgaacaccgaa

SEQ ID NO: 174799 - DNA, 201 bp, Homo sapiens
tgggcctggagatgtttggggtacctgagaactgataggtagcagtgtttccaccccagcactgtcctgaggtgaaagcatcttgaaagagcccaccacayacacagtgtgaatcttaaccataggtgatgccccatgacctctgcaggcaaagagccaggagctgactgagaccacattttttcactcctttggggagac

SEQ ID NO: 174800 - DNA, 201 bp, Homo sapiens
catgtttgaaataattcataatttttttaaaagctaatcttgcttcactcctttcacccggagtcaggactggacctgggatgcagagccctgagggtgcrggggatgggccaagggctccctgagggctcagcccccagcccagagaccacctaagtggcagtcccagagcctcagtggcagccagggcagaggctcccg

SEQ ID NO: 174801 - DNA, 201 bp, Homo sapiens
aggacaaggacatgggctgtgcagggaaattatgggtttcaagaaatgtaggaaggaggaaaatgaataggactttgatgatggagaagaaagaggcaggrgtggctcctggattctatgctgaccacctggagagaagatgaggcctttggtggcaacagcaaatcccaggggagcaggaggttggatgggaaagcttag

SEQ ID NO: 174802 - DNA, 201 bp, Homo sapiens
ggacatgggctgtgcagggaaattatgggtttcaagaaatgtaggaaggaggaaaatgaataggactttgatgatggagaagaaagaggcaggggtggctsctggattctatgctgaccacctggagagaagatgaggcctttggtggcaacagcaaatcccaggggagcaggaggttggatgggaaagcttagaggttga

SEQ ID NO: 174803 - DNA, 201 bp, Homo sapiens
cttgtaaaagctacagctatgaaacttccagagcgaacgcagaagagcatcttccccatctagaagtagggaatgatttttcagagaaaacacacacacamaaaagcaccaatcttaagagggaaagctgaaacactgggcttgagatctgttgaagctgaagtgtggggacaactagcaggagaggccaggcaggacact

SEQ ID NO: 174804 - DNA, 201 bp, Homo sapiens
tgatgtatattttgcactcacagcacatttcacttcagaatagccacatttcaagtgctcagtaccctataggtgtagtcacaatacatgtgactaccgtrttggatagtaaggacttaaagattcttgagcccaacagacaaaccctcttcaaagagtacaggtgggctgaggcccaatagaaaggtccaggctgtgagg

SEQ ID NO: 174805 - DNA, 201 bp, Homo sapiens
cttgaacccctcaaagttatccatgagggttggaatcaacttcctttaaactccttttcatgttgatattttcacctcctcttgtgaaccaccaatgttcytaatggcatctggagtggtgaatcctttccagaaggctttcagtttactctgcccagatccatcagaggaatcactatggatggcagctatcgccttatg

SEQ ID NO: 174806 - DNA, 201 bp, Homo sapiens
tcaagcatctgctctgcacagccctctctggaagccaccccgtcctcccatctccttcgggactaggggtgcgggaaaggaatcccccctgctttcacttstcccgggagctgcaccgtccttccaggtttccctactcctgccacacctttgtagagttcctcccttaaaccctcctcaaatgacagggatacccccaag

SEQ ID NO: 174807 - DNA, 201 bp, Homo sapiens
attgactctcttttcatgaaaggttactctagcatgcgatgctgtttgatagcattttacccacagtagaccactttcaaaattggagtcagtcctctcaracactgccgctgctcaatcaactaaggtatggaatattctaagtcctttgttgtcatttcaacaatgttcacagcatctttacccaaaatagattccagc

SEQ ID NO: 174808 - DNA, 201 bp, Homo sapiens
gtggccagtggaatccccccaactacacccctaagaggggtagagttcccatctgcacccgcaagatgaagcagagatgaggctgctttggaagcccccartcttgggctattggtgtggggtcgagagcctccctgaggggtgtcctgggctgctctgtcagaaccccagcagggagccttgcctggcctctgactcaca

SEQ ID NO: 174809 - DNA, 201 bp, Homo sapiens
ccaagtcacaggggaaatggttaccacccttgggggaggtcctgagaagattgagacactcccatggggagagagcagagcaggaaatgaccctcttaatrctgaagaaatgaacgaacgatatcttcagattccctctcattttgtttagatcagattgtctatgaattaaaagtgttgtcacctttgcagaatagagat

SEQ ID NO: 174810 - DNA, 201 bp, Homo sapiens
gtgtctttttcttgggtggtttccaaacacatctcctttctccagctaacaagtccaacactggcttcagcagaagctatgcacacagaaagttacttccrgtggaatgaccaggaggtagaagggagataggcatgatggtcacagggaagagaggatcccagggaaggtctcaggctgtgcagtcaaacagatatggga

SEQ ID NO: 174811 - DNA, 201 bp, Homo sapiens
cacttcagtctgcttgggagcttactgatgacctgtcgtctccttccttgtcttgccttatttctacattatgtccctgtatcactgcctggccaggggcmttcatgctaccatctctgaccaagatgcatccccacactggaggcatgcctggccacaccacttgatcttcgagtttgccctcctcccctataagcttgg

SEQ ID NO: 174812 - DNA, 201 bp, Homo sapiens
actgtggagctctagcacatgaggtttcccgccctggcctgcctgcgacacgccattataaaagacagctactacacgatgcctttcgctggtttgttcaraagcccagcgactgcctttgagttgctcccatctcattatccccagagtttctacttctttttgtgaaaatttaattgcctgctagatttgaaagggtct

SEQ ID NO: 174813 - DNA, 201 bp, Homo sapiens
tacagaggtactgggcaggttgagcaatgtgattcatagtctcaaatcctgctaatatattttggtatggtcagatagtaagcaacatgtttctgtttgasttaatatactattaatattgctacaatgtttgtgtgacaaagaaacctttattgttaattatgctttttaaatcctgtcgttgaacccccactccccctg

SEQ ID NO: 174814 - DNA, 201 bp, Homo sapiens
taagtgtggaccaggcacatccaccacctggagcaacatccatgggatggtacagaggtactgggcaggttgagcaatgtgattcatagtctcaaatcctrctaatatattttggtatggtcagatagtaagcaacatgtttctgtttgagttaatatactattaatattgctacaatgtttgtgtgacaaagaaaccttt

SEQ ID NO: 174815 - DNA, 201 bp, Homo sapiens
acataggaaggaaaggtagatgccaaccaggtctcccgatctaggtaggggcatgttatggctgtggtggtgttctgtgacacaagctaagacagcggcarcacagacagaaattcctgcaatgcatattccaggcccagagtaacattagtggtgtacggtggtggtagtgacagctgcatctatcctttgtgaaggcca

SEQ ID NO: 174816 - DNA, 201 bp, Homo sapiens
ctgtggcagccatttggggtgcctcctgcatgcctgaggcatccacgctgagtgaggcccccaggctcatccggagcagagggtgctggcctccagctcastgatccttctgaagttttttgatctgtgcccatgggcagggcacgccatcctacgtgggcctgacttagcgttgatgtagcgcagtagttgaggacaaca

SEQ ID NO: 174817 - DNA, 201 bp, Homo sapiens
ccttgcaggtcatcgccaccatcccgaccagcagactcaagttcctcaaggaggcaggcaggctcacacagaaggaggagatcccggaggaggagctcaaygaggacgtggaggagatcgaccacgcggagcgggagctgcggcggggccagatcctgtggttccgaggcctgaatcggatccagacacaggtacaggagg

SEQ ID NO: 174818 - DNA, 201 bp, Homo sapiens
ggctgtggtggtgttctgtgacacaagctaagacagcggcaacacagacagaaattcctgcaatgcatattccaggcccagagtaacattagtggtgtacrgtggtggtagtgacagctgcatctatcctttgtgaaggccagtatatgccaagcactatttccacacatcatattcccaatcctctgtcaaccccagact

SEQ ID NO: 174819 - DNA, 201 bp, Homo sapiens
ggggatgcccagagaccccttagggcccacagctaggaatccatggggcaggaattccagccagccctatgaagaccccaggtctgcaggggctcctgggyaccagagagaggctggagacaggcaggggagcttcaaggtgtgaaggggcccagccgtggtcccaggagaccaacatgtggcagaggattgagagccaca

SEQ ID NO: 174820 - DNA, 201 bp, Homo sapiens
cactccactacacccagcagctcccagctgtctgtgtccctctttgtctgctctcctggttcagaaagaaaagctaaaactggttcttcttcccacattgwctgttctcactgacattttgcccatcgcctgagcccaggcagaagtttagaaacaccttttctcactgggtgctatttttttgttttggcagggagggtg

SEQ ID NO: 174821 - DNA, 201 bp, Homo sapiens
tgtgtgatcctcaagtgagacagcccaaggcccctcggagaggctgagtgatccactcaaggtcacataggaaggaaaggtagatgccaaccaggtctccmgatctaggtaggggcatgttatggctgtggtggtgttctgtgacacaagctaagacagcggcaacacagacagaaattcctgcaatgcatattccaggcc

SEQ ID NO: 174822 - DNA, 201 bp, Homo sapiens
cccttcttcacagcctctccccactgaaggaacccttttagaagagatgaactctcccctctccctatccagggagaggcctaaaaggtcacacgcaagakatcaaggaaccctaggtccagcccctactgtcctacaccctctgcaacttcagtcattcgccttatctgggctcagaaaccccattttgtaaaaggaggc

SEQ ID NO: 174823 - DNA, 201 bp, Homo sapiens
agggcaagggaaagccacctcctgctgttcaggacaggcccaaggccaggatgggctttgagcctgcagctgggaaggtcctggccactctctgctgccasgtcagagaccaaggaacatcccctccacaggaccaggacagggacagaagcttgggcaggacaggacagacagtaccatccacggaaaccacagtgttcc

SEQ ID NO: 174824 - DNA, 201 bp, Homo sapiens
gtttcccagtgccccatgccagaatgtccctgcaagggtggaggcgtggccatgtttataaacgaggcattcactctgagaaattggcagagcctccagarggcatggtgagcatcagtttccaagctggaatttgggctgggctctccgatgtaatttcatacagaaaagagatctctagacagacgccagaaagtggca

SEQ ID NO: 174825 - DNA, 201 bp, Homo sapiens
ctcagccagagggaaaacctcagcccgggccatctctagggtcctgcagacacattaagattcattttgcaactgcaagaaaacaatctttacctccctcrgtttccctggctgtcaaggggttgaatctccacattgccttcctcccacgagaagcccaaagggtagaacagatcaagacacccttgccagagcacccca

SEQ ID NO: 174826 - DNA, 201 bp, Homo sapiens
ccaggaagtgacagaagggccccaatttgatgggatgaggaagtgggccgccccactaccccacaactccttcacccccaccgcaccccaccagccttctragggggatctgcttcctggggactccccagcagaggaggctgcccatgtgcctgctgaggcaaaaacacctgcagccagtgtgccctggaaggagtcaat

SEQ ID NO: 174827 - DNA, 201 bp, Homo sapiens
ttgtaaaagctacagctatgaaacttccagagcgaacgcagaagagcatcttccccatctagaagtagggaatgatttttcagagaaaacacacacacacraaagcaccaatcttaagagggaaagctgaaacactgggcttgagatctgttgaagctgaagtgtggggacaactagcaggagaggccaggcaggacactg

SEQ ID NO: 174828 - DNA, 201 bp, Homo sapiens
gcggggcagggccactccctgtgccagacccaaccgagctcagctggggccctttgtcacccaacgcttgctggggcctcggcctctggtgttgggtgtcrgggtggattggattctctcctggcagccccacagatgccgcactcctgtaagggtggccgggcgggcagggagaagccagagctcccacctcctcctggg

SEQ ID NO: 174829 - DNA, 201 bp, Homo sapiens
ggaaggcagaacaggacaccagggctggatctgggagccgtcctgctgctgccctgctcagcagctcgtccctgtgtgaagaccagcactctcagaccctytggaataacggctaagcccttggtctttggagacaggcaaaactgaattttaatcctgactgcttccttctcaagctatgcatggccttgggcatgtggg

SEQ ID NO: 174830 - DNA, 201 bp, Homo sapiens
atattcatagtcaggtggctggaacactggcctagtttacttcctgtcctctttcagaagcctgggctgcacagtactgggtgctcagaggcagcagccasagcatcagccccagtcttgccctgtctgtagtcagactgtgcagctgatgcaaagaaaggatgcaagtagcgggagctggatacccagcctctgggcttc

SEQ ID NO: 174831 - DNA, 201 bp, Homo sapiens
gaacaggacaccagggctggatctgggagccgtcctgctgctgccctgctcagcagctcgtccctgtgtgaagaccagcactctcagaccctctggaatawcggctaagcccttggtctttggagacaggcaaaactgaattttaatcctgactgcttccttctcaagctatgcatggccttgggcatgtgggtgactcca

SEQ ID NO: 174832 - DNA, 201 bp, Homo sapiens
gagctgaagccaaataggacagcccaggtgagcagcaacagaagaaggttgctgccagcctatgggtattattgatcagcccccaagggattggttatatkagtctttttctgacagacaggtcctctagactcagctgacaagatcgagattctaagcctcagagccaaggctagacctagaatggatctggttgtaccc

SEQ ID NO: 174833 - DNA, 201 bp, Homo sapiens
gtgtccaagtgatgctcagcttccatgtctccaatgcttctcactctactcacagggtagaatccaggaccgtgcatgagatcctggaattgaggggacasttgattgagaaaacagccccatgacatatgacaacttggtttcagcatttttctcttattctcttatagcaaagtctcttctctcagcagcttttctggg

SEQ ID NO: 174834 - DNA, 201 bp, Homo sapiens
ggccccagttagattgtggttgggaggaagattgacaccaggagagacacctctagaaggaggggctggtctagatatcaatgggtctccccagttatggygaggagagggaatgggagagttctaagctgtcacagtggcagggcacaagaaccaagcatgggccccacacattgaagacctatcatacaactggcacag

SEQ ID NO: 174835 - DNA, 201 bp, Homo sapiens
caacattttggctatagggaagaccttgtttctaaccggccctacaaaaagctatgcactttcacttatgtcctttttagggaattcagaattccttgcgrtgcctagtgaggaattttctgcagcatttcccttctcctcctgcctgtggacttggcagcctcttgggaccctgtggatgaatcgcccacaaacatcatt

SEQ ID NO: 174836 - DNA, 201 bp, Homo sapiens
ccgttttacagatgaggaaattgaggctcagaaagttaaatcacttgaccagggtcagatggattgtgcccttggaggagttttttccaacattttggctrtagggaagaccttgtttctaaccggccctacaaaaagctatgcactttcacttatgtcctttttagggaattcagaattccttgcgatgcctagtgagga

SEQ ID NO: 174837 - DNA, 201 bp, Homo sapiens
agtaatcttgagctgagttgcttctggaaaggagaggtgacaaaagctaattgaagaggaccaaggtgggaacggttagtgaggaagcagagatagggagygaagagcccagaggggctggggacctggggaggggttaaagtgggagctttcatagcacaggtgtcatagcacacctggtggccagagagcatatgcagc

SEQ ID NO: 174838 - DNA, 201 bp, Homo sapiens
atgcttctacaggccaaggaaggggaggaccaagaaatggcctctggactcggcaagatgagggccacagtaatcttgagctgagttgcttctggaaaggrgaggtgacaaaagctaattgaagaggaccaaggtgggaacggttagtgaggaagcagagatagggagtgaagagcccagaggggctggggacctggggag

SEQ ID NO: 174839 - DNA, 201 bp, Homo sapiens
cactaggaacattgcttagagcccgccacatgtccccatttcaggatgaccctaggtgtatggccatgtgtgtatgcacatgtgtgtttgtgtgtgtgcgygtgcgcatgggcagatgaggctgtgtgcttctccttcattaacatgtctcaaaaatcatcacacaggtgtgaagaagggggatggccttcagctaccagg

SEQ ID NO: 174840 - DNA, 201 bp, Homo sapiens
ctaggaacattgcttagagcccgccacatgtccccatttcaggatgaccctaggtgtatggccatgtgtgtatgcacatgtgtgtttgtgtgtgtgcgcgygcgcatgggcagatgaggctgtgtgcttctccttcattaacatgtctcaaaaatcatcacacaggtgtgaagaagggggatggccttcagctaccaggta

SEQ ID NO: 174841 - DNA, 201 bp, Homo sapiens
aggaacattgcttagagcccgccacatgtccccatttcaggatgaccctaggtgtatggccatgtgtgtatgcacatgtgtgtttgtgtgtgtgcgcgtgygcatgggcagatgaggctgtgtgcttctccttcattaacatgtctcaaaaatcatcacacaggtgtgaagaagggggatggccttcagctaccaggtaca

SEQ ID NO: 174842 - DNA, 201 bp, Homo sapiens
gtagaaggaagatggggaatgtggaagggatgtggcagaggaagcctgggggagcagtccagcatctcaggccaccatgagcagcatggcctcagctgggycccctctgccctcccatcccatcacctccactaggaacattgcttagagcccgccacatgtccccatttcaggatgaccctaggtgtatggccatgtgtg

SEQ ID NO: 174843 - DNA, 201 bp, Homo sapiens
cctctgcaacagtaaaacaaaccttcagcgatgacacttaaaatcatcaaccacagtcacctagaaactccacttccataaaagagggctttccccaccakggtttcacaaaggagctacccctgggttccgctgagagctcaagtcctgggacttcaggggcctccccacgaccgtctcgtccagtcccctgcctccccg

SEQ ID NO: 174844 - DNA, 201 bp, Homo sapiens
ggaaggaaggaacgaaggaaggaaggaaggaaggaaggaaggaaggaaggaaggaatttgtagggtggtggatggatggatggataggtgggtgaagagaygaatgggtgggtggatgggcagatggatggatggatgggtggatggatggatcgatttgtgggtgagtgaatggatggatggatggatggatggatttgt

SEQ ID NO: 174845 - DNA, 201 bp, Homo sapiens
tggtgtgtgttccatccatggccaaggaacatggcctcttttgagtattgtaggtgggagcaccaagcgtgcagtttctttggtgtctcatgtctctgtgyctcttcttgaggtatcacatccattttatgttctattccataagagatctgttagtcccagtgtaaaaataatcttcctactgcatccctgagtaaaagc

SEQ ID NO: 174846 - DNA, 201 bp, Homo sapiens
cccatccaccttccaaactgagacactaagacccccactccaggtagtaaaactgttcggcctaattgcttcctcacaccccaccacacacacatagtctrgacagagtcttatttccgaaatgcacatgctttctgcacacctcaacacccagcccactcagacgtgtgcaggctagcttatacacaaccacacacatcc

SEQ ID NO: 174847 - DNA, 201 bp, Homo sapiens
taatgcaattatagtcaaaaagaattcttgggatctgccaggaaggctgaggaaacctctccacagtgatgagtctcaattaagcagtgctttttagcacyggaggcaaagctgaaatgtcatttccagatgttggtggattgagtcttttcaggtggcataaaggacaggggtcagtcggtccatctgaggaggtcaggg

SEQ ID NO: 174848 - DNA, 201 bp, Homo sapiens
tcactaatcagcatgcgcacagggcatggggttccagggtctggggtctggggtctggggcttggggctgccagtggggcagctctggggccaggagagcrgacgcagaggatgagtttgaggtaggcagcggcatgtgcccccccacaccccacctggtccctgggactgggcccaagggctgcctcctggcagatcaga

SEQ ID NO: 174849 - DNA, 201 bp, Homo sapiens
tgcctggaaccctggcatcatagatacctgcgcctgtctttctgggtctttcttgtaagttccctggccacattattctctttgctgggagctgacagccrtcgatgtgggaaggacagcagagcctctgtgtgactgggtagtggttaaaacttggactctggagccagactgccttcgttcaaatccctcaccagctgt

SEQ ID NO: 174850 - DNA, 201 bp, Homo sapiens
ctggccacattattctctttgctgggagctgacagccgtcgatgtgggaaggacagcagagcctctgtgtgactgggtagtggttaaaacttggactctgsagccagactgccttcgttcaaatccctcaccagctgtatgaatataaacaaattatttaacctcttggtgcctcagtttcctaggggagggggagaatct

SEQ ID NO: 174851 - DNA, 201 bp, Homo sapiens
taagacaccctcagggtagatgggcttttagaaatagcagcaggctttggtcattgggccctgcccctagaccaccagcacacagctggaggaggccacaygcctgtgggtggctccaccccccagaccctcctttgtgccctcctgtgatgccagccctgtgggacaagccaacaccccactccaccctcttgcccttac

SEQ ID NO: 174852 - DNA, 201 bp, Homo sapiens
tcagggtagatgggcttttagaaatagcagcaggctttggtcattgggccctgcccctagaccaccagcacacagctggaggaggccacatgcctgtgggyggctccaccccccagaccctcctttgtgccctcctgtgatgccagccctgtgggacaagccaacaccccactccaccctcttgcccttacagtgcctcac

SEQ ID NO: 174853 - DNA, 201 bp, Homo sapiens
gcagtccagcatctcaggccaccatgagcagcatggcctcagctgggccccctctgccctcccatcccatcacctccactaggaacattgcttagagcccrccacatgtccccatttcaggatgaccctaggtgtatggccatgtgtgtatgcacatgtgtgtttgtgtgtgtgcgcgtgcgcatgggcagatgaggctgt

SEQ ID NO: 174854 - DNA, 201 bp, Homo sapiens
agggtgggcagtggatgtcacagatagaaggtgaattccggtcaggtcatgccttcctgattctagggcatttctccttccttcggcctccagccaagcaygacttgacctgcaactgggatgtccatttctgctagacacaaggcagcagcagggaagccctgggaactgtgcatgacccaagaagcaaggatccttgag

SEQ ID NO: 174855 - DNA, 201 bp, Homo sapiens
ttacagaagaggaaactgaggcaggaagggccatagtgcaagttgttgaaggacaaggggatgcaaaggaaaggcagaggctttggacagagaagacataytgaaactatgccaagtcctacccatatggccgtggcgattgtggcctctctgagccccagcttccttgcctataaagtggggacagcaacaccacacagc

SEQ ID NO: 174856 - DNA, 201 bp, Homo sapiens
tctccccacaagttggttcatgtctttgtcgttgttgcttttctccattgtgacactgcattttccatccctcccacccccctgcagcagcagacggtgcrgcagcttcaaatgctgcagatagtgcgaatgccagcctagtcaatggtatgtctcccacggcgagctcctggtcatggttggatgggcgtctctcacccc

SEQ ID NO: 174857 - DNA, 201 bp, Homo sapiens
tcaacaagaagccgtggctgcctgagtgcacgcccgtctacgtgcagtactttgtcaagttcttcatcattggcgtgacggtgctggtggtcgccgtgccmgaggggctccctctggccgtcaccatctcgttggcctattcggtgaaggtgagaggggaggagagcaggaccagccggctgatgcagctgcagctgaggg

SEQ ID NO: 174858 - DNA, 201 bp, Homo sapiens
tcgtgtaggtaaaatgcaggatggcaatgtggacgccagccagagcaaaggtaacccttttgttttaaccggcgtttgtcgtccctgaggcccctccccaycggctctgacagtcacaccagagacagagactggcaagggccagaggcagacacatccactcctacaggtgtctgacgaccttgggggtgtagctgtgat

SEQ ID NO: 174859 - DNA, 201 bp, Homo sapiens
gcagtcagcacctaccctgggcaggcaggggtgggtgccagcgtctccaccctgtgggctgacctgcatgtgtgtctatgtgtctgtgtgtatgcacgtgygtgatctgccccctgcagccaaacaacaggacggggcagccgccatggagatgcagcccctcaagagtgccgagggcggcgacgctgacgacaggaagaa

SEQ ID NO: 174860 - DNA, 201 bp, Homo sapiens
ctctaggcattctgtccctgatggcaaaccttccctggtaatcgcacctttaagggaatgttccagccctctagtcacctgagagcctgctgactcccctrcccttcctcttgccaggtgacctcctccctgccgacggcctcttcatccagggcaatgacctcaagattgatgaaagctccctaactggagagtctgacc

SEQ ID NO: 174861 - DNA, 201 bp, Homo sapiens
tctatgacagcatctccaaattcttgcagttccagctcaccgtcaacgtggtggccgtgattgtggccttcacaggcgcctgcatcacgcaggtgggtcckcaggagaccacaccaaagcctgggggagggcggagaccccccacagaggctcgggggccttagggtactccaggttgtccctgtcagaacagccggggat

SEQ ID NO: 174862 - DNA, 201 bp, Homo sapiens
ttcagttcccttcctctttccctgttctctcttctcaactgtgagagtttgtgagattgtcttcttcagctttgagcacatacacagacactcacacatcrtggggcttgcacacccagagacaggtgtggcacagatatcttgggcttgctctctctctctcacacacacacacgcacactcatgctgacatgctccagt

SEQ ID NO: 174863 - DNA, 201 bp, Homo sapiens
caggacagcagctgttagggaggcaaaggcccaggtagtgaagagtgttctgaacagacacatggcacatctgcaggagtcaggcatctgaggtattctakgcaaactatggggtcctcagttctgtcaatctgtgaaaagatcatttgtataatatcatacaagtagcttttgtgctggtggacttcacatttttccagc

SEQ ID NO: 174864 - DNA, 201 bp, Homo sapiens
tgaacagacacatggcacatctgcaggagtcaggcatctgaggtattctaggcaaactatggggtcctcagttctgtcaatctgtgaaaagatcatttgtrtaatatcatacaagtagcttttgtgctggtggacttcacatttttccagcaaatcttgctgtcagagcaagcaccaaagtgggctctacagcttggaatg

SEQ ID NO: 174865 - DNA, 201 bp, Homo sapiens
ggtcctcagttctgtcaatctgtgaaaagatcatttgtataatatcatacaagtagcttttgtgctggtggacttcacatttttccagcaaatcttgctgycagagcaagcaccaaagtgggctctacagcttggaatgaaaaaacaaaatgcccagaaaaggggtgacctcatgtttgcacccatgagatgaagcagggt

SEQ ID NO: 174866 - DNA, 201 bp, Homo sapiens
cgggcaggatgcactgttataacctcgtgtggtcaccaagtgaagctctccagcctctgctgggcttgacacagtctcttggcatgccagggctgcagggstcttccatgcctcccagttctcagaggggtagaccgagacccagagagaccagcctaaggttccctccagcatgtgttgatatttccttcccaaatcttt

SEQ ID NO: 174867 - DNA, 201 bp, Homo sapiens
tgcatgcccacaaattcacacatatgcacagatacaaatatagtacccataagtagtgcgtcatatatgtccaaatcatatatacacatatggaatgcccrtgcccacaccccagcacctgtaaatacaacccacgttcctgaacaccacatgctcacgtgcaaaacacagcacacacacgaatgcagtacacacatacac

SEQ ID NO: 174868 - DNA, 201 bp, Homo sapiens
agacccaagatgatttcatctcaaaatccttagctaattccatctgcaaagatcctatttccaaacaaggtcacattctgaggttccaggtgggcatgaastttggataggacacccttcaacccactgcagtcactaagatttatgaggtgtttattgctcataagacctgcacacagtcttatctcttcttcaccatca

SEQ ID NO: 174869 - DNA, 201 bp, Homo sapiens
agaataatttgagcccctcttcaggaaaccctggttctcttttgaaactaagccagggaggagcaaacgccaaggaattcacaatcctgtctgggactttytgttttcctctttgaagaaatatgagcttttttgattgctactaaagtgatgcttaaccgttctacagtgacagcttctccctctgcatctgttatatgg

SEQ ID NO: 174870 - DNA, 201 bp, Homo sapiens
gtcagggggtccgccgcctccacgggggcttcagttgctctccccagcttcccctagggggtggagaggctgtggggagcaaaggtcagtcatcctcaagyacacacagacacacatgcacacaccaagcacaccaggggagcacaggtgcagggcgtagccagccagaagcaggtttcttccccagagcagagagagcat

SEQ ID NO: 174871 - DNA, 201 bp, Homo sapiens
cctacccacctggatgacacagtagccacctcacttcctccctgctctcaatctcaccctgccagtccattctccaatgcatgacagatccgtgaaaaagrgaaaagtacgttaatctatcacctaaaattctttagaggcatctctcactacctggaataaaatccaagttcccagcggcttcaaagcctggtgtgatct

SEQ ID NO: 174872 - DNA, 201 bp, Homo sapiens
gagtgcctgtgtatgagagagggctggccctgccaccccttaaccataagaccttacaccaatcactgcacactcagtctgtcttctcctgtataaatggyggggctggagtaccagtgcaaagcatcgttgtgaaggattaaacaagctaagtgcataaagcagtgctgagcacctagcaggaatgatgttggtgttgct

SEQ ID NO: 174873 - DNA, 201 bp, Homo sapiens
ggagttctgatttttaattgattttgttatcccagagttctgtccctctatactggctcacactgttttccttctgcaccttttactagcagacagttgtgtatttcagtttcttcacgattcatctttttattaagtccttctttacctgaagaaaaaaaaatccctacttggagctgagaggaaaggcattcctggtta

SEQ ID NO: 174874 - DNA, 201 bp, Homo sapiens
aaacaaattatttaacctcttggtgcctcagtttcctaggggagggggagaatcttggattgttgtgaggataaagtgagttagttaatggaaagtgctcrgcacacagcactcagtatgactagtattgttgttattcagcaataaaatcacccaccgaaagaggattccatttgtagcaatgcagaggttaacaaataa

SEQ ID NO: 174875 - DNA, 201 bp, Homo sapiens
caatcaggcagggcccagaagtttggctggcctcacctactttttcttggcaaaaaccttaatttgcaccaaatcttatgaggagctccaaaatgtgaaamcagaccccaggaaaaccatttcagggcctgcagacctcagaacccctgggattctcaggacctacccatcttattgaacactcccattgttgaaatgggg

SEQ ID NO: 174876 - DNA, 201 bp, Homo sapiens
agtgaggggactgtcgctcagggctgggggcacccacccacaggggccgtgtgaggctggacagaagctgcaggccaggtcgcccagggtcccccagggcstggtggtcagggggtccgccgcctccacgggggcttcagttgctctccccagcttcccctagggggtggagaggctgtggggagcaaaggtcagtcatcc

SEQ ID NO: 174877 - DNA, 201 bp, Homo sapiens
ggtgagtgaggggactgtcgctcagggctgggggcacccacccacaggggccgtgtgaggctggacagaagctgcaggccaggtcgcccagggtcccccarggcgtggtggtcagggggtccgccgcctccacgggggcttcagttgctctccccagcttcccctagggggtggagaggctgtggggagcaaaggtcagtc

SEQ ID NO: 174878 - DNA, 201 bp, Homo sapiens
ttttccctcctccaaatccctggcaaccactgatttacagatttgccttttccataataccattgaaaaattgaatcatatcaaaaatcatatcatatcartgtaagctttgggccttccttctgtcaacacagtggctggagatccaattgcatgtatcatagtcccttgctttttcttgctgagtagcgtccatgggag

SEQ ID NO: 174879 - DNA, 201 bp, Homo sapiens
tttcttggcaaaaaccttaatttgcaccaaatcttatgaggagctccaaaatgtgaaaacagaccccaggaaaaccatttcagggcctgcagacctcagawcccctgggattctcaggacctacccatcttattgaacactcccattgttgaaatggggaaactgtagctcagagaagggaattggctggccaaagccaca

SEQ ID NO: 174880 - DNA, 201 bp, Homo sapiens
ggtccccacatgatgaggggtgcacctggctacacctcactcccttgtccagaagaggagaaagtaccagtgtcagctgcatgtccaccaggcacgctccragcacgttgcaaggcatccacggtgagggccactcctaagtgggcactcttctgtctggtgagctgctctgttccagtgtctgcaacagtgccaggcact

SEQ ID NO: 174881 - DNA, 201 bp, Homo sapiens
aatacattctatccatgaataagtaaaatccacgagagaatactcctcagtgtactagtggcacggggaaattgctgaaggttcttattttcctctttttwaaaaattctcactatggatttgtattgcttatataataaaacttttatttaaaggaggaaaactcagaataacattaggaagacataaaatgtgaactga

SEQ ID NO: 174882 - DNA, 201 bp, Homo sapiens
gtccagaagaggagaaagtaccagtgtcagctgcatgtccaccaggcacgctccgagcacgttgcaaggcatccacggtgagggccactcctaagtgggcmctcttctgtctggtgagctgctctgttccagtgtctgcaacagtgccaggcacttggtaggtgctcaataaatgctcatggaccacatgaatcacctcat

SEQ ID NO: 174883 - DNA, 201 bp, Homo sapiens
tattcacaaccacccatgggttaagtacaatcaccatccgcattacagtagagggtactgaggctcagagagcgagggccatcacgctgggattttaatcyaggcagtggcttctgattcttctctaaccactgcgcggcattcgacaggagggagagcggaaggagggtaccagcgcaaggcggctgtaggagtgtggat

SEQ ID NO: 174884 - DNA, 201 bp, Homo sapiens
gactcgaggccagaggtcagaaatcaggtgtcagcagggccacctccctctgaagaccagggaacaatccttccttgcctcttccagcgtctggtgccccyagacatttcctggcttatggctgcatcactccaaactctgcctctgtttttgcgtggccatcatccttctgtgtctgtgtctcttgtaaggacacctgtc

SEQ ID NO: 174885 - DNA, 201 bp, Homo sapiens
tctaccacccgcccggcgagggcaacgaaggtaagatgggcctcagacccacgaaccgccccgcacacctggccaccgcatccacgctggggggcactcayggctcacacaaataatcctctcctcccaggggaagaaaccgaggtccaaggggcagggccccacccatagccaacacagccaaagggtggccgagccagg

SEQ ID NO: 174886 - DNA, 201 bp, Homo sapiens
cccattttaaagatgaggaaaccctgggttcagtatatactgcttgggtgatgggtgtaccaaattcccacaaatcaccactaaagaacttactcatgtarctaagtaccacctgttccccaaaaacctatggaaataaaaaatataaaaaaaagatgaggaaaccaaggcacagaaaagggggttaatctgctcgaggtc

SEQ ID NO: 174887 - DNA, 201 bp, Homo sapiens
gtgcaggctgatctgttttataatctgctttttcagtcagtaggatattgtaaatacttttttgtgattcattgtgattcaacatttcctaatgaatgtgytgcataaatagataaccctactacaccttcagacaagcaaattaaaagttaatagcacataagaaataacattatgggcctcattttccctaaataagaa

SEQ ID NO: 174888 - DNA, 201 bp, Homo sapiens
ccaagaaactgaataaccaagtctattaggccaactacctcaattttacacataataagttgatttcttacatgacctcttcccatagagggtttaaagayacaagagatacatctcacaggatgcggtcaaacagaaagccagccagaaaaggaatggaagcaaagaaaccagctgtaattgctgccatgattgagattt

SEQ ID NO: 174889 - DNA, 201 bp, Homo sapiens
gctttcagaggccagtccaaggaaaaaagctcatgaaaaggggagaggtctaacttttaccatgtatctatcatgtgccaggcccttagctcacaaatccrttgggttatcccacttcacagctgtctaatctgaggctcagagaggccaagtcacttacctaaagtcacacagcagaggttggacttgaactaggtcttt

SEQ ID NO: 174890 - DNA, 201 bp, Homo sapiens
cctcagtttcctcatccaaaaaaaagccacctgctgtttcctctacatggaatgttcttccctaggtcaccatgcgactggtgtctgctcaaataccaccycctccaagaagccttccctggccaccctagctaaagtaaccactccctacccctgtcccccatgtcactttctatcacatcatcctggcctttttcttca

SEQ ID NO: 174891 - DNA, 201 bp, Homo sapiens
tggcagggctaggattggcacactcagtgcccctaaccccctgctggtgacagctcccccagtgccagagtgccaaaagagtgataggcacatagtaggtrtttagaaaatgtttatggctcaaccagttttgaggatctttgttggataccaggccctggtagccatctgggaggcaggttcaccattgtactggtgaac

SEQ ID NO: 174892 - DNA, 201 bp, Homo sapiens
aagaaaaaattcctagtagctacattattttaaaaaaggaaaaagaaaccagtgaagttaattttaataatgtacttaacccagtatgtcaaatccaacaytattatccaacttattatcaatccaatgtgtgatcactataaaaattataaatgaactactacttttacattttttcaaaatatcctctaaatctgatgt

SEQ ID NO: 174893 - DNA, 201 bp, Homo sapiens
atggctcaaccagttttgaggatctttgttggataccaggccctggtagccatctgggaggcaggttcaccattgtactggtgaacatgcagacaggcccraagaggccaagcggattccccaagcttacacagacagggagaggccacaccctctatagccgcaggtccaggaagagcagttgcagttccctggacccta

SEQ ID NO: 174894 - DNA, 201 bp, Homo sapiens
ggagaggccacaccctctatagccgcaggtccaggaagagcagttgcagttccctggaccctatggccactgtctccagatcctgtccctgccccagtccragggagccccagaggagacctcagcaggacccacccactcccctcttccctccccttcctattctcttctccctaattgctccaggggcagcaggagttg

SEQ ID NO: 174895 - DNA, 201 bp, Homo sapiens
agtccttttctaccaagcagcttcagggccctcccacgctggctcccaaaggtcgggtttagcgggggaccagaatttgggcatccctggcaacagttctstagctcccagaagcccaggggcctagaccccagtttccaattacttctcctccctgggtctcagtttcctcatctgtcacacgggcctaaggggtgagaa

SEQ ID NO: 174896 - DNA, 201 bp, Homo sapiens
gggtgtcagggagagaaggccactgggaaggacagccccaccgtcctgacagacagggtcccttgcaggtcatcgccaccatcccgaccagcagactcaarttcctcaaggaggcaggcaggctcacacagaaggaggagatcccggaggaggagctcaacgaggacgtggaggagatcgaccacgcggagcgggagctgc

SEQ ID NO: 174897 - DNA, 201 bp, Homo sapiens
gggctcctgggccagccaccagcaagtttcttgctctgtttctccttttctgcccctagattcccagaacatgcctgcatctctcccaggcccccagccarcctctctgttctctgtccacaggtttgccgggcaccgctccagacctggaaaagagaaagcaaatttttgggcaaaactttatacctccaaagaagccaa

SEQ ID NO: 174898 - DNA, 201 bp, Homo sapiens
gaaaaccacttcagtcctcagaactgaagctttcgcttctgtaaagtggggacatgaacaggacagcaagcggactgtaatgagggacacgctcactgctrtactgatgtgtctgtcccccaagcccgatgctcagtgggcgttaagaagtgggcgttaggaagtggcagtgtggtgagagagttaagaggcagacatcct

SEQ ID NO: 174899 - DNA, 201 bp, Homo sapiens
ctaagcctagtgaattcatgattgactgcgaggcctgtggaccctccaggaagatgtaggagctcaggtggccagggtgaagaaccataccaccccctcartgagaacctcagacccccctgcttcctccttatttgggaccacctggtggccagcagaagaccaggggatctgatttaggatgggagccggagggaaagt

SEQ ID NO: 174900 - DNA, 201 bp, Homo sapiens
ccatctccagatcccacatggggccaaagctggctgttccaccatagttcagggccaggcgagcaccagtttggccaggagagccccaaataagtccctcrcttctgagaaaccaggccatctgtgcctcagcactcccagaacatccttcccttcctccagcatatgcattggtgattatttttctgatcacgtgttcac

SEQ ID NO: 174901 - DNA, 201 bp, Homo sapiens
tcagcaaacctggctttgtaactttgctctgccagcaactagctgtagggcctaggcaaagccccagcttcgccatgtgtgaaatgaacacgttagcagcrtttgcggtacagggtcattgtgcaggggagtgaggccatccatgccaagtgcttgttaagggccacgcatccctggacatgagggacaattttaaggttt

SEQ ID NO: 174902 - DNA, 201 bp, Homo sapiens
agatgcatcatcttctctctaaaggatgctcgaagccagggcttagctacctgtttatttggttacaagtgtttattgagcactctctatgtgcggtcatygttatacttttattcacctctcatgtgcctttatgaatgggacaaagagacccctggcctcagtgggactggggagggatgaacagggcccaagataaag

SEQ ID NO: 174903 - DNA, 201 bp, Homo sapiens
tcattttactgatgaggaaactgattctgagagagggcctgcctgggcatttgttacataataagttctcagaaaacccaaaatttatagaaagtgaatamacccttccccctggagaacgttatagttccaagggatctgagaaccttcaccttgggaagcaaattagtgaggcagggtctcactctgtcacccaggctc

SEQ ID NO: 174904 - DNA, 201 bp, Homo sapiens
atcattctaatagaagatgtgaataataggggaaactgaatgcaggacagacaagaactctctgtattgtctttaggaatttttttgtaaatctaaaactsttctaaaacaaaaaggttatttcaagatattgtacagataaggaaactgaggcccagaagagcaaagcctcttactcagggccccacagcagcagtggac

SEQ ID NO: 174905 - DNA, 201 bp, Homo sapiens
gaatgcagcgtagtgttccttcctctcctttgaagagtctccagtgatacccgccatgagaccccagtttcttatctgtctaatgctgatatgtaacagcycctcctcctagcaccctaacaagccgagctggtgcccacggaggcatcttgtcagcaagttattataatgaacaaggccctgttactggccctcagcagg

SEQ ID NO: 174906 - DNA, 201 bp, Homo sapiens
ggtcgcccagggtcccccagggcgtggtggtcagggggtccgccgcctccacgggggcttcagttgctctccccagcttcccctagggggtggagaggctstggggagcaaaggtcagtcatcctcaagcacacacagacacacatgcacacaccaagcacaccaggggagcacaggtgcagggcgtagccagccagaagc

SEQ ID NO: 174907 - DNA, 201 bp, Homo sapiens
aggcactggccccaggggagtcgaggacatgaggctcagagaggtggcgtgacttgttcaaggtcacccagcaaatgggagctgtcaggctcacagcctgrccctcactgcaggaggcaggagagggaatcctcaagagaaggcagggcccttggccaccacgagggcagagggaggcagggaggggcaggccagggccca

SEQ ID NO: 174908 - DNA, 201 bp, Homo sapiens
ttgaatgacagttaaaatagaacctatcaagatttgtggaaccagctaaagcattgctgtgagggaaatttatagcatcatgcataactagcaaataaagwattctgaaatcaacaatctaagcccctactttgagaagccagaaaaggaagagcaaaataaacccaaaccaaacagaagaaaggaaataataaagttaag

SEQ ID NO: 174909 - DNA, 201 bp, Homo sapiens
aacagataatttaatatccctataattactaaggaaattgaatttgtaatttttaaatttcctaaaaaaaaaatccccaggaccaggtagttttttttttwaattatattttaagttctagggtacatgtgcacaacgtgaaggtttgttacatatgtatacatgtaccatgttgctgtgctgcacccattaactcatcat

SEQ ID NO: 174910 - DNA, 201 bp, Homo sapiens
attttactgatgaggaaactgattctgagagagggcctgcctgggcatttgttacataataagttctcagaaaacccaaaatttatagaaagtgaatacamccttccccctggagaacgttatagttccaagggatctgagaaccttcaccttgggaagcaaattagtgaggcagggtctcactctgtcacccaggctctg

SEQ ID NO: 174911 - DNA, 201 bp, Homo sapiens
gagctatgggcccagggatttcctctatcctctataccgccatcgccaccgccacaggcagaagactctatggaaacatggcactgacagggccgggaackaagcgatgagaacaaccccatggccttcaaagtcctcactcctctccctcctgcacctcggccctgccaagaatggagttcacagtcaagcactcctggg

SEQ ID NO: 174912 - DNA, 201 bp, Homo sapiens
aacaagaacagttgaatgcactgggaaagctgtacatggaggagggggagcaggttttaatatccacaggccccacacccacgagctgtgaaaaaagtagkctgggtagaagacaatatggagtggtggagactgtggccaattggaaagggcttgatggctctaaagggaagtaggactctgctccatgcaattattaat

SEQ ID NO: 174913 - DNA, 201 bp, Homo sapiens
agagggactgtcagcgagcccagccgggcaggatgcactgttataacctcgtgtggtcaccaagtgaagctctccagcctctgctgggcttgacacagtckcttggcatgccagggctgcaggggtcttccatgcctcccagttctcagaggggtagaccgagacccagagagaccagcctaaggttccctccagcatgtg

SEQ ID NO: 174914 - DNA, 201 bp, Homo sapiens
aggccacttgccaaagctcacccaactacgatgcgggagaaaagattaaaacccaagtcacgagactgcaattcaatgtatttttctcatttgtgtttctrtgtttaatcttgtgatttttgaaggaaatgacctggcgcattgtgctttcagagcatctgtttgttacctactaacaaagcactttttctcttgagctca

SEQ ID NO: 174915 - DNA, 201 bp, Homo sapiens
gtccatctgacttcaaataccttgttttgccaccatatccctgcagaaataacattatgtttgtaaaagactggacaatggataaaacaatgtattcatartttcacttccctgccacggcatgtttggggtatttttgctctccttcctgcttttatctatatatgtattttcttagacacagtctcattagtgcatcct

SEQ ID NO: 174916 - DNA, 201 bp, Homo sapiens
caggggaggcctcccagaagtgacattggatttcggggagacagtttccttgagagaatattttgagtcagcagccactggcccgtgaacaagagaagagsggtgtgttttggctgctcagctctcaaaataacccgaatccgagggcggacagccccgcaagcctcaggagctatgccatttcaggccaggttcctgcga

SEQ ID NO: 174917 - DNA, 201 bp, Homo sapiens
gtgtgttttggctgctcagctctcaaaataacccgaatccgagggcggacagccccgcaagcctcaggagctatgccatttcaggccaggttcctgcgacyttggaacagtccttgccctgccccgcagcgtccccccagcaagaggtctgggcagtcagtgcaggcaccacagagacaggccctctctcccctggcacat

SEQ ID NO: 174918 - DNA, 201 bp, Homo sapiens
gtcttcacctcactgaggcttgagtgaggggaagacgcccccagactcttctatgggccagatctgtggtttttaaaatgctagcagggccagatctgtgstttttaaatgccagtaggaagacaagtgtcaactgccccagaagcacagttcagggtccttcgctgagcatgcacctgcactcctgtgagatggagatgt

SEQ ID NO: 174919 - DNA, 201 bp, Homo sapiens
ttccaggggactctcttgactggttggaccagcagggtccagacctcagcacagaccagcaccatcccagctaaccaccctggtcatccaccatgctttayttgaaagaccctccatgtctgagtttctcccctcaacctctgcggcatctctatggaacatttcacccccaccccaaatttgagtttcttggtttccaaa

SEQ ID NO: 174920 - DNA, 201 bp, Homo sapiens
cggcatctctatggaacatttcacccccaccccaaatttgagtttcttggtttccaaaggataatttttttttttaagaatagagtcatgttatctccccrcaagttggttcatgtctttgtcgttgttgcttttctccattgtgacactgcattttccatccctcccacccccctgcagcagcagacggtgcggcagctt

SEQ ID NO: 174921 - DNA, 201 bp, Homo sapiens
agatgccctggaattgaaggtcaggaattgaaggtcaggaaacatggatttctatggcactacttaaatggccttcagcagtgcaagcctaagctccctcrtctgggatcggaccaatttggtgttataaagtgctttccaaacttgaaccatcgaggctgttagaattcttggcattatagttattcatcccttttgaag

SEQ ID NO: 174922 - DNA, 201 bp, Homo sapiens
gttataaagtgctttccaaacttgaaccatcgaggctgttagaattcttggcattatagttattcatcccttttgaagcaagcattataggagaggattayagccattgaggaaaacagaaattgagcaataagagaagctgagatcaaggaaaggcgtgtttttaagacaggtgagcacatgccatgcttggaagtggtg

SEQ ID NO: 174923 - DNA, 201 bp, Homo sapiens
gaagaggtcaggatgtgagtgaggcctggtcacagaggacttcataagtggagctaagaacatggatgttatcctgagaccaaggggggaagcaggaaaaygacattccggggatggctgggggacggaactggttcagacatgggtgttagagagatcctgaggttgctgtggggaagcaagttggagggggagtccaga

SEQ ID NO: 174924 - DNA, 201 bp, Homo sapiens
caaggaaaggcgtgtttttaagacaggtgagcacatgccatgcttggaagtggtggatccatggatccactgagtgatccagtggagaggagcatgagggrtgatttgagggggagagagaagggcgccacagtggtgagctctgtgcaaggctttgctctcagtgacctctggcctcagaggccatgggggtcagctagt

SEQ ID NO: 174925 - DNA, 201 bp, Homo sapiens
  misc_feature (1)...(201): n = A,T,C or G
ggcccctggtgactgcacacagtcaggccaccccaggactggaggcagggaggcgtctagggagaggtttcctcccagctttccgcacagcttgagctacncaacggtccgcaccacctgggagccacagggcagaaatttgacccgtccctgccttggaggagcccccaggctgactgagggaactatggaaactcaggc

SEQ ID NO: 174926 - DNA, 201 bp, Homo sapiens
agacaggtgagcacatgccatgcttggaagtggtggatccatggatccactgagtgatccagtggagaggagcatgaggggtgatttgagggggagagagmagggcgccacagtggtgagctctgtgcaaggctttgctctcagtgacctctggcctcagaggccatgggggtcagctagtgtgtttgaacctgatcatta

SEQ ID NO: 174927 - DNA, 201 bp, Homo sapiens
ggggtgatttgagggggagagagaagggcgccacagtggtgagctctgtgcaaggctttgctctcagtgacctctggcctcagaggccatgggggtcagcwagtgtgtttgaacctgatcattaaatcagcaggaccattggagagttttgagcatggggttggtgcctgctgtatggaggacagattgatgagggcaagt

SEQ ID NO: 174928 - DNA, 201 bp, Homo sapiens
tttgggtaaatgcctaggggtggggttgctgaattatgtggtaggtttatgtcacaccttataagaaactgcacaaactctttttcagagtaggcattgcrattttactttcccaccagcagcagatgagagctccagtggttccacatcctcacccacacttgggattgttggcagtgtttattcgttctcattattact

SEQ ID NO: 174929 - DNA, 201 bp, Homo sapiens
agagtaggcattgcgattttactttcccaccagcagcagatgagagctccagtggttccacatcctcacccacacttgggattgttggcagtgtttattcrttctcattattactttagccattctgacaggtgttaggaactttactaagtacctcacaagtgctgggcactgaactaagtgctctttgcacatgatttc

SEQ ID NO: 174930 - DNA, 201 bp, Homo sapiens
cactcagcaagggagccccagaggaagtgctgagtgggtgctgggtgagagatacgtgggttgagatcctttcctccagagatccatgcttccctccattmtggtggatactggtggagtcaggctggatgatgccggcccagagataggcagaggaggtgatgtgctcttgtttttgcctttgaagcagagtcaggtgta

SEQ ID NO: 174931 - DNA, 201 bp, Homo sapiens
gggtgctgggtgagagatacgtgggttgagatcctttcctccagagatccatgcttccctccattctggtggatactggtggagtcaggctggatgatgcyggcccagagataggcagaggaggtgatgtgctcttgtttttgcctttgaagcagagtcaggtgtatggcctcagtgcccggccgtggaactgctgctgtg

SEQ ID NO: 174932 - DNA, 201 bp, Homo sapiens
tgctggagattcctttccatggaaatggccgctccccaggtcccagaggaaatgaaggcctgggtgcgtcctggctgtggcacctcacctcctgggcctcyacctcttgctctcaggacccttgtggggatgagagaggggcgtggaagggccttaggcccagcactgcatgagtaggatctgcctttgggtctgatgcct

SEQ ID NO: 174933 - DNA, 201 bp, Homo sapiens
atcaagggcatgaatccagttaagtcaaagtcatcaccattagcaaatgttcttccagaacaccctgatgcacagagatggtggtcatggagaatactcaytctgagtggtccgtgcccacgctgcactgcctagtgaatatttttccactcctggcccccaatgggcagccagatctcctcatttcatggagccctctct

SEQ ID NO: 174934 - DNA, 201 bp, Homo sapiens
ccatgaaccagagacagagacactccttttttttttttttttttttttttttttttagatagagtctcactctgttgcccaggctggagtgcggtggcacratcacaggtcactgcagcctcgacctcctgggctcagtgatcctcccacctcagcttcccaagtagctgggactacaggcatgtgccaccatgcccaggt

SEQ ID NO: 174935 - DNA, 201 bp, Homo sapiens
tttcaagtgctcagtaccctataggtgtagtcacaatacatgtgactaccgtattggatagtaaggacttaaagattcttgagcccaacagacaaaccctsttcaaagagtacaggtgggctgaggcccaatagaaaggtccaggctgtgaggttaaacggaggtaggttcaaatcccagctttaaacccctccgggtgtg

SEQ ID NO: 174936 - DNA, 201 bp, Homo sapiens
actcccagcaagtgactgcccctgcccaggccttaccttctccctctgtaagacagggctggtcagtggcaatgttgatgggtggaattagagtcacacaygcaatgagtgtatgagtttctcactgtgcctggcccattgtagatggttagtagatacagtcatgtgtcgcttaacgacagggacatgtcatgttctaag

SEQ ID NO: 174937 - DNA, 201 bp, Homo sapiens
caccctcgctccaacatctcggaacagctttacacgggcctgttttggggaacggagagcctgtgggccttggggaagggcagatgcttggccctggtccstggggtggagctgactagggactgctgacttagaagaccacctagaggggtggccagtggaatccccccaactacacccctaagaggggtagagttccca

SEQ ID NO: 174938 - DNA, 201 bp, Homo sapiens
atcatgattcataggagaagttgagtcactcacccatgtcacacagctggcacatggttttaacctgatccccacaatcccagagccagtgcatttaatcmgtgtaccctcagcacttagtttggggcttgacaggcaattgatttcaataaaaagtctttgaataaatgaatggacctggtcatttatctcattagatgc

SEQ ID NO: 174939 - DNA, 201 bp, Homo sapiens
agcattggacatcgagcgaggagggagagcaggcctgagacagagtcctgggtggcacatgtgggtggggagagaggagctgcagaagccaagagctgccsgagtgatggtgcaggctgagaacctacagaggaggccaaggggaggaggctagaggggcaggaggatggtcagtggggagtggtgccgggaagacaagga

SEQ ID NO: 174940 - DNA, 201 bp, Homo sapiens
ctcagcgctgaatggggcccacagacgtgttctatgtggccggtacagcgcctttttaaatgatggatttgaaagactacgcagaccctgctctctcaccyttgacatagtccttactgctgcttgttgtctgatactcagcctacttcactcgttctcagtctggtctcagagctttaagtctcttggtctgtctggtcc

SEQ ID NO: 174941 - DNA, 201 bp, Homo sapiens
tacacaaatagatctgtcaagtttgcaggaactatgtatgtggatgaggcaaagagaagttcacctggccaagcttacctggggccagatctgaggaggcrttcatggaagtctttccaaagtcttcgcccaggtcgagacagccaatggttctgtctcaggatggaccgtcatggtcaataggtggtagcgacctgggac

SEQ ID NO: 174942 - DNA, 201 bp, Homo sapiens
cgcttgggctcgggcctggttctgtccttcggatgtggactggtgtttcttgctgttgcctgtgctggagcgtttgtcctgggtcacaggggtggagggtsggggagaggggctggcactgtgtactggtgtctgcatcttaatctccttacacgcaagcaagaaggagttccattcacttgcccccaaagcctttagaag

SEQ ID NO: 174943 - DNA, 201 bp, Homo sapiens
cccatatcaagaattttctagccctaaatgtcaactgcacagtaagatcccagtgctgagcacagcacctgaaatacggtgaacatgtgataactaatatytgaatgaatgaatttgcaaaaatacattctatccatgaataagtaaaatccacgagagaatactcctcagtgtactagtggcacggggaaattgctgaag

SEQ ID NO: 174944 - DNA, 201 bp, Homo sapiens
aaatatctttgactaataaaaatgaccactaaggggacagcactataggatggaacacacaggctgggcaaaggcagggagaaagtcagtatgtcagaaamtgttattgaaaacctactatttgccaggcaaggttctagattggagataggagatagcccatggttaaacagagagtttggagagtctaggttctcatgt

SEQ ID NO: 174945 - DNA, 201 bp, Homo sapiens
agagttgccggcatccagaccagaggtgatggcagcttggacctgggtgtggcaggggaggaggaggaagagatccaattcaggatctatttggagacagyaccagcaagacttgtggatgggtgcaaggcatgcagaaacagaggggtctaagagagcttcctggattttgtctcaacaactgggaagatagtggccatt

SEQ ID NO: 174946 - DNA, 201 bp, Homo sapiens
attcctgccaagctggcctctgcctccctcctctgtgttcttgccttccctgagctttcccgcagcccctgcctctgccccctcccaccccatctccaccygggcagctcctgctctgcctcaagtccaagcggaaagctctcttcctcgcaagtttctttggcttaataaccaccatcccttcagactgtcccttgcagg

SEQ ID NO: 174947 - DNA, 201 bp, Homo sapiens
tctcccagccccatgacaagacactgagcttttgcatttgtattggccccttgcagtgggaaacagggtgcaaccggcagtcagaagacccaggtcagtcygaacccaccagagacatcctgttcatcccatgacatcctaaggcctcactttcctcatctgtaaattgggagtcattaattccctcacagcagggattaa

SEQ ID NO: 174948 - DNA, 201 bp, Homo sapiens
cagtcagccacctcaaatgagagattcctgaatgaaatatgcaatcagggcacggatcctaagatcccagcactctcccactgggtgagtgagagaggtcscaggtaaaggatctatacctgctcaggctaggacaaacagggcttagggtcaaggaaccagcttttcctttataaggcactgtttggatatagtgcaagc

SEQ ID NO: 174949 - DNA, 201 bp, Homo sapiens
catgggcaggctctcttgtttttgttgttccctaaacacttggacatcaacatttcactgcaactgcaagcatcacacagaatgcaatccttccaagccaygggacttctaggtgtcagagccaagatatcacagcctctttgcaagggcttcaagatgctgcacagtctaaatcatatcatgtactccttttgcccaaca

SEQ ID NO: 174950 - DNA, 201 bp, Homo sapiens
tggctgcccttggtgtcttgtgtggtctgacctgcctctttctccctctgactcccagacagtcctctggtagcccatcacaatccagggccctgcccttstcttagatcaccaggctcagccccctctgggactctacacttaccgttccctctgcctccagcacacttcccagatcttactggctcctccctctcattc

SEQ ID NO: 174951 - DNA, 201 bp, Homo sapiens
aagactttgagatccttagaggttgaggggtagggagtttggctcagtctctgtccaaaagggtcacgggccctccagtccatcctgcatgaagaggccaygccaactgggatagtgacttggctcccatggctgccctcttttacgttctaagcctccttttttgtccctcctgtcgagtggctacttaatatcccacaa

SEQ ID NO: 174952 - DNA, 201 bp, Homo sapiens
atgaagtccttgcccatgcctatgtcctgaatggtattgcctaggttttcttctagggtttttatggttttaggtctaacatttaagtctttaatccatcktgaattaatttttgtataaggtgtaaggaagggatccagtttcagctttctacatatggctagccagttttcccagcaccatttgttaagtagggaatca

SEQ ID NO: 174953 - DNA, 201 bp, Homo sapiens
cctgtctgtcttgtctgaatgtgggaaaggacaagggaccacctagggtaggactcacaggcttgttcaggccgagagggggatccagggtaacagcatcmgtccctgctgtgtcccagattccaggtctgaggcagcgagtaccactgggatccatagctccggctggaagaggcaggcccccatcacaggacttctgca

SEQ ID NO: 174954 - DNA, 201 bp, Homo sapiens; identical to SEQ ID NO: 31217

SEQ ID NO: 174955 - DNA, 201 bp, Homo sapiens
acaaatggcccagagattaaacacctgtccataatcaccgacattatccactggctatgggtttattcatgcccatgaaagttcccagactgaaagttcaygaatgaaggattttctggtcctggataccatcttatcctcaaagatagcctgcaaactcttcactgttacttgactgattgtttatgggggcttctctga

SEQ ID NO: 174956 - DNA, 201 bp, Homo sapiens
tgagtcacaagatgggcagctccccaaacagaggaaggggttcagacatcaggcatccaaagtaaatgaccagtgtcctaggggcaatctggtgggccggsctggattttaaatattcttccatcaaaatggccccaggctaggctaccagtttagcttcccaattttgttttctgtctttcaactcctggaacttctcta

SEQ ID NO: 174957 - DNA, 201 bp, Homo sapiens
ggctcagaaagttaaatcacttgaccagggtcagatggattgtgcccttggaggagttttttccaacattttggctatagggaagaccttgtttctaaccrgccctacaaaaagctatgcactttcacttatgtcctttttagggaattcagaattccttgcgatgcctagtgaggaattttctgcagcatttcccttctc

SEQ ID NO: 174958 - DNA, 201 bp, Homo sapiens
ataatcctttatacatattctaaatccgtgtcacattctgtaagtaaaatgcccccaaatgcaaatgtccccccaagaaactgaaaatacacaaatagatytgtcaagtttgcaggaactatgtatgtggatgaggcaaagagaagttcacctggccaagcttacctggggccagatctgaggaggcgttcatggaagtct

SEQ ID NO: 174959 - DNA, 201 bp, Homo sapiens
aactgagtggctcaagagcagtttgctgtctcacagtcctgaaggctgtacatctgtttgagaccaaggtgtcagcagggctggctctttccagtgacgayagggaggagctgtctctgcctctctctcagcttccagtggcttgctggccacctttggcctccttggagtgtagaagcagcaccccgatttctgcatggc

SEQ ID NO: 174960 - DNA, 201 bp, Homo sapiens
tagccaccttcacaccctagtcccattcacatcagggcatatgcatgcccacaaattcacacatatgcacagatacaaatatagtacccataagtagtgcrtcatatatgtccaaatcatatatacacatatggaatgcccatgcccacaccccagcacctgtaaatacaacccacgttcctgaacaccacatgctcacgt

SEQ ID NO: 174961 - DNA, 201 bp, Homo sapiens
ttcctgaatagataagccaagcttcgcctggtgaagccccaggtccccagtacaccccattctacatggaggtggccacgaggccaataaccccagaaggsaggagggttggctgtgctgtatttcccataaatcttaaaacctagcagatagtagggagggccgaggagaaaggggaaggggggaagcagagacagccct

SEQ ID NO: 174962 - DNA, 201 bp, Homo sapiens
ggagaccccaggcaggagctgtcccagtcaggcttggccccaccttctaactctttgtactagttttctagggctgccgtatcaaagtcacacaaactgastggctcaagagcagtttgctgtctcacagtcctgaaggctgtacatctgtttgagaccaaggtgtcagcagggctggctctttccagtgacgatagggag

SEQ ID NO: 174963 - DNA, 201 bp, Homo sapiens
accctagtcccattcacatcagggcatatgcatgcccacaaattcacacatatgcacagatacaaatatagtacccataagtagtgcgtcatatatgtccraatcatatatacacatatggaatgcccatgcccacaccccagcacctgtaaatacaacccacgttcctgaacaccacatgctcacgtgcaaaacacagca

SEQ ID NO: 174964 - DNA, 201 bp, Homo sapiens
caacagccagaaatgtgtgtacccacctgagggctggctcaggtgtgaaaacaacaggcacacacatgtggggctctgaatgccatctgcgtgcctgcccrtgcattggcaggcacatggcatgctggaatgtgcccacaggtgaatgtcagttgcacacataagaagacggccacaggcacacagatgcagcacctctgc

SEQ ID NO: 174965 - DNA, 201 bp, Homo sapiens
ggccgtcaacttgggggttgaatcaacaacttgcaaggtctgtctccaactctcagccacggataccctcagcagcccctgcagcaattctggccaacacscccagatccccggtccccccaagaaacaacgaccccaaaactaaggatttctccctggacctggctgccacacaatgctgctttggaacagggaaggtat

SEQ ID NO: 174966 - DNA, 201 bp, Homo sapiens
gccccttaagggacttccgatgaggacagagggatactggatcctaagtgcccgccacagcctcacacaggcgttgggggagggccagcccgtattcccasggagctgtgattagactcagcaaggccatcttgggttattgatgttcttcagagaaggctgcccaaagttggaaaggagacagaggcggccagggacgca

SEQ ID NO: 174967 - DNA, 201 bp, Homo sapiens
agaggagggtggtaggggaggagccgcactgagcattttgcaggggtatcgtgggaagggccggaggtgtcggttgggaccaggccaagctgaccttacaygccaccctcatccacagaatcactgcttcctttatgtaacaagtatttgctgagcacctgctctatgccacacactgttctgtgtgctgaggccacaaga

SEQ ID NO: 174968 - DNA, 201 bp, Homo sapiens
ggcgcaggtatgggtcaggggacccaagtaaataatagtaatccagctagcattcacccagctaactgctttgcacgtatcatctcagtgaggacgcccayagccctgttatccccacgtcccagatgaggacgctgtatctagagaggtgaagctgtgtcacccaaggtcacacagctggcatgtggcagaggggaggta

SEQ ID NO: 174969 - DNA, 201 bp, Homo sapiens
gaacctatagctcaagaacttagaattttgtggcaagattccgagaaagagtgaagaggatctcctatgggtgaaggcggaggagccttccccaggcgggygtggccctgacctaggcagccggaccgctgtgtcgtccctttaccctatggagttgctgatgcctagaaagccaaagcagacagatgccttctgaggcca

SEQ ID NO: 174970 - DNA, 201 bp, Homo sapiens
ctcttgaactcctgacctcaggggatctacctgccttggcctcccaaagtgctgggattacaggcgtgagccaccgcactgggcccttctcagtctgtttmtaagtgaagggcagctgcacagaccccaccttggccactcaggaggcgagccctgttctgggcacatttgcagcatcatctccacgagctgcaagctcat

SEQ ID NO: 174971 - DNA, 201 bp, Homo sapiens
gaattttgtggcaagattccgagaaagagtgaagaggatctcctatgggtgaaggcggaggagccttccccaggcgggcgtggccctgacctaggcagccrgaccgctgtgtcgtccctttaccctatggagttgctgatgcctagaaagccaaagcagacagatgccttctgaggccacctagctgggaccgtttataaa

SEQ ID NO: 174972 - DNA, 201 bp, Homo sapiens
caagtgcactcctgggtgaatttttacctctgtttctacatgcatgaccaatacccagatccagctgtagcacgttgccacctccccaggaggccaccgcyccttcccagtggatccctccttgccctccagaggagaccactgctctgaccattaccacggtagattagtttcacctactctggaacctcatataaatgg

SEQ ID NO: 174973 - DNA, 201 bp, Homo sapiens
tcgtccctttaccctatggagttgctgatgcctagaaagccaaagcagacagatgccttctgaggccacctagctgggaccgtttataaaaaggaaactgwggcccagccaggcacagggacttgtccaaggtcacaccgtgttctgtagagacctgggcttcttgcaagtgctctcaggccccagacaagaagcagcaga

SEQ ID NO: 174974 - DNA, 201 bp, Homo sapiens
tatcgatgtgggaagcatatttcaactggatcgatgcctctggggtttgagtcgtaatcatctccggatcctcagtgtccagagcagttagatgcgccagmgctgtttgtccaataagtaaatgagtgagcaacaaaattaagtcctgagagcagcttaagaaaacatcctgttggggtgcaggaatcaggaatggcttca

SEQ ID NO: 174975 - DNA, 201 bp, Homo sapiens
ccaggctgctggtctgtggactctcagctcagtgctcatcctcctctggcacagtgcctcgggttccctctggcatccccagggagatcccaggttccccrgtaaccctgccattccgagtcacgctgccgggaatgcatccccatgagcttgccaagaaagattgttcttttgggagctggcaggacaccatctacattg

SEQ ID NO: 174976 - DNA, 201 bp, Homo sapiens
cttgcaagtgctctcaggccccagacaagaagcagcagaggcctgtgttggcccctggttttccccaggtgtttgactgtgggtggaaagtatgagagccmtgggcccagccctgctcctgaccagctgtgtgatcttggccaagtcacttcctctctctgccctcaatcttctcatctgtggccaggcaggcctatctct

SEQ ID NO: 174977 - DNA, 201 bp, Homo sapiens
agttgaagaccagcctggggaatatagtgagaccccatctctacaaacaatttaaaaattagccgggaaaggtggcaccacacctgtagtttcagctactmagaagacaggtgggaggattgattgagcccaggaggttgatgctgcagtgagccatgatgataccactgcactccagcctgggcaacagagcaagatgat

SEQ ID NO: 174978 - DNA, 201 bp, Homo sapiens
gccctaccttgatgaatcaggaggtcccaggggctacatttccacaggtacccctgggttttcacccatttcactccgcaccctggggagctgaggtgctwaagagtgggcttggtggagcacataggcgctcagagctgggggtggcctagacaccatgctgttctgcctgtacctgtcacacgtggggaaactgaggtc

SEQ ID NO: 174979 - DNA, 201 bp, Homo sapiens
cgcatccctggacatgagggacaattttaaggtttcctatcttgctcagaactgaacacatggggtctctaaggcccagattttggacagtttccagaagwcagattctccctcaaataactagcgcttctctaggttatcctagaagcccatagatttgggcaaaactcccaaatgcagccctacatagagcctccctgc

SEQ ID NO: 174980 - DNA, 201 bp, Homo sapiens
atagagcctccctgccagcacaacttccctcagacaccagagacaacagagggctgccagccagcagcccaggggaaattctcctctccaggtattggtgyttttatgcacatttctcatcctctctaccccagacataacctagcatgcatgagctgccagctaagtcttctcaagtcagtgtccacctatcactgcccc

SEQ ID NO: 174981 - DNA, 201 bp, Homo sapiens
ctcttatctaaagactttatatggattgttttcgttgaatcctccctagaactctaggaggtcattttcccaatgacctcttctctataattattattttrtctgagccccattggccttagttttctcatctgcaaaatggggcataataaccctctgagctttacagacatatagggccctcaggctcagccttcttgc

SEQ ID NO: 174982 - DNA, 201 bp, Homo sapiens
tctcaccagccacttgcacacccactcctgtggctgctaaggaacagcacggcctcctcagagaggtcccattgtgccctctcagggcagcacggggaagyggtaggggtcacacccaccatggtctccagggggatttccctgagagggtggggaagggtggctctgagggcagaggtgagtgaggggactgtcgctcag

SEQ ID NO: 174983 - DNA, 201 bp, Homo sapiens
gcccaggccttaccttctccctctgtaagacagggctggtcagtggcaatgttgatgggtggaattagagtcacacatgcaatgagtgtatgagtttctcrctgtgcctggcccattgtagatggttagtagatacagtcatgtgtcgcttaacgacagggacatgtcatgttctaaggcaatttcatcatcataccaaca

SEQ ID NO: 174984 - DNA, 201 bp, Homo sapiens
gaggggtggccagtggaatccccccaactacacccctaagaggggtagagttcccatctgcacccgcaagatgaagcagagatgaggctgctttggaagcycccaatcttgggctattggtgtggggtcgagagcctccctgaggggtgtcctgggctgctctgtcagaaccccagcagggagccttgcctggcctctgac

SEQ ID NO: 174985 - DNA, 201 bp, Homo sapiens
agtgagaggtgaataaatatctgttgcctgaatgatccaaagaaatgaattacgaatggcggagtgtcaggttgtaggtagcttggaggggccatttaggrataggggctctccttcctgggtgttcaactcaccttgagtccagccctgggctcaagcacgctggtcccagttgggacatctctgggcagtgggatctga

SEQ ID NO: 174986 - DNA, 201 bp, Homo sapiens
gtatttcaaacagaagaaatttaatgcagggaattggttgcaccgggaacaaaagagctgaagccaaataggacagcccaggtgagcagcaacagaagaargttgctgccagcctatgggtattattgatcagcccccaagggattggttatatgagtctttttctgacagacaggtcctctagactcagctgacaagatc

SEQ ID NO: 174987 - DNA, 201 bp, Homo sapiens
gcttgagtccgggaggtcaaggctgcagtgagccgtgattgtgccactgcactccagcctggatgacagagcgagaccctgtctcaaaaaaaaaaaaaaamcgtttaaaaaatgggttatgctatggaaaactcctgggacctcctgctgggcagtgtggcttcggcttcaccccggtcttcacttgacagtctggatgga

SEQ ID NO: 174988 - DNA, 201 bp, Homo sapiens
tttttgtttcttttttttttaacagtagccatcttaatgggtgatatatgctatggtttttcttaatcccatttttgcaaatgttatccgtaacgtgtagytcttcaagtcatcattcattgatcttagctccattcacttcccagcatcccaaaacaagagcacgaattgtcctctcaaaggtacgaccatggctgcacc

SEQ ID NO: 174989 - DNA, 201 bp, Homo sapiens
gaggtccctgggtatgggggagagtgtgttggtctgagggtcaggagagctgggtcccaggccggctcatcactggcgagtgaccttggaaaagctgtgtmagccctctggtcccaagctctccccttgtgagaggggtcagtgatcctgccccccagtgtccttggtgagggcagcttctcctgcccactgccccttggg

SEQ ID NO: 174990 - DNA, 201 bp, Homo sapiens
accaacattattttttgtttcttttttttttaacagtagccatcttaatgggtgatatatgctatggtttttcttaatcccatttttgcaaatgttatccrtaacgtgtagctcttcaagtcatcattcattgatcttagctccattcacttcccagcatcccaaaacaagagcacgaattgtcctctcaaaggtacgacc

SEQ ID NO: 174991 - DNA, 201 bp, Homo sapiens
aggtccctgggtatgggggagagtgtgttggtctgagggtcaggagagctgggtcccaggccggctcatcactggcgagtgaccttggaaaagctgtgtargccctctggtcccaagctctccccttgtgagaggggtcagtgatcctgccccccagtgtccttggtgagggcagcttctcctgcccactgccccttgggg

SEQ ID NO: 174992 - DNA, 201 bp, Homo sapiens
ctggaggaagtgagcagtgggggcaggcaccatcattccagaactgttcatctatcattccatgtagtgtagttggagtatgtagtttcaccacacacccyctcctgctcctaataattgctaatatctactaagtgcttcgtatgtgccaggcactatgtggtattttttaattgtgctaaaatacacataacataaaat

SEQ ID NO: 174993 - DNA, 201 bp, Homo sapiens
ccagcaacccttgctcttcctcaccttgtggctgcgtcacacccatctctgctttcatcttcacctcactccttcctgtgtgtctctcggtgtcctctcckctgcttctaaagacattggtcattggatttagggcccaacctagacccaagatgatttcatctcaaaatccttagctaattccatctgcaaagatcctat

SEQ ID NO: 174994 - DNA, 201 bp, Homo sapiens
attggccctgtggacaccaagttggtttggggaatattctgccttcttcacttcatgtaaccacagcatgaagaaacttccagaacaccttcttcctcccyaaacttccacctttcccccaccaccagttcaatgtaaattcttagagcaacggagatgcagagaaatttgtctcttttcgtttgtggcctgggatatgtg

SEQ ID NO: 174995 - DNA, 201 bp, Homo sapiens
tttgtctcttttcgtttgtggcctgggatatgtgaaaagaatgaagcaggccaactcactgacccagaattttatatttaaacctagctttccttgtgtgsttcagtaatggcagtgagaatttatcttcattaaggattggagagtaggggcctcagatgggcaaagtgggcctctcggggcatggcagtgaggagggcc

SEQ ID NO: 174996 - DNA, 201 bp, Homo sapiens; identical to SEQ ID NO: 31233

SEQ ID NO: 174997 - DNA, 201 bp, Homo sapiens
agttacataacctctctgagcctcatctgcatactggggatgataatagtatcacacacaccccctctgggatatcatgaaggctcagatcatgcatctaygagcaacaagcagagtatctggtacaagataggcggcctacatacgtgggtccccttccttcatgccctcttcagtagatttcattaccctagatccagg

SEQ ID NO: 174998 - DNA, 201 bp, Homo sapiens
catcttaaagatgtccccagaaggggcacatcctagtccaaggagggtggatttgatttgggaaaattgggagcagtcgtgccatagtggagcatatgggrttggtggagcctatgggagaagcagtgaatggatgacaccgtttggggtccaagcaccatgtagctttgaaggaagaaagcaggtctctgcaagcttctg

SEQ ID NO: 174999 - DNA, 201 bp, Homo sapiens
tgacagtggtacaggcctatgtcggcgacgtccactataaagagatccccgaccccagctccatcaacaccaagaccatggagctgctgatcaatgccatygccatcaacagcgcctacaccaccaagattctggtaagtgtggaccaggcacatccaccacctggagcaacatccatgggatggtacagaggtactgggc

SEQ ID NO: 175000 - DNA, 201 bp, Homo sapiens
gacatcagacagatctgtgatcctgagtgccggcacagctggctgtgtgacgttgaaccagttacataacctctctgagcctcatctgcatactggggatrataatagtatcacacacaccccctctgggatatcatgaaggctcagatcatgcatctacgagcaacaagcagagtatctggtacaagataggcggcctac

SEQ ID NO: 175001 - DNA, 201 bp, Homo sapiens
attgggagcagtcgtgccatagtggagcatatgggattggtggagcctatgggagaagcagtgaatggatgacaccgtttggggtccaagcaccatgtagytttgaaggaagaaagcaggtctctgcaagcttctgtgctgcctctgaaggcagtttcctataaagtggtgcctttcctgtgccggctgggctactctacc

SEQ ID NO: 175002 - DNA, 201 bp, Homo sapiens
tccttgatcctcataagaggattgcccatgagaaacagtgtagaccacatgtggcatgggtcggcccagaaggacacagaacccacaggttgccagcaggyattgctctgccatgggggcagtcctcgagctgtccagccagccaccatgagctcttccctctggtcccccaagggacaggtgtaggggctgccctgcctt

SEQ ID NO: 175003 - DNA, 201 bp, Homo sapiens
ggcagtttcctataaagtggtgcctttcctgtgccggctgggctactctaccgggccatgtctggctgccccgggaccattttgtgggagccatgggggcktcatctggatgaactcattctagcccagctctgtcaaacacctgccttgcaggcccaagggagctgtggaggcagtgggcggggaatgctgtggcagcca

SEQ ID NO: 175004 - DNA, 201 bp, Homo sapiens
ctcagggaaaggggatgaggctgggaggccagccaccagggtgacctggagtaagtcacttcacctctttgagtctcagtttccacataatgcccatgggratttccttccttgatcctcataagaggattgcccatgagaaacagtgtagaccacatgtggcatgggtcggcccagaaggacacagaacccacaggttgc

SEQ ID NO: 175005 - DNA, 201 bp, Homo sapiens
gctgcacttgctttatagctgagaaaaccaagggccaagaggcatgctggtttgcccaggatcacacagccagctcccagcagactggaaccacagcccartgtccaggcaccagcccaatgctgcctctttgcccatgttggttcaggactctttctcttatggagaaagcagttcttgccatggagaggagggtttcta

SEQ ID NO: 175006 - DNA, 201 bp, Homo sapiens
ccgtggctggcccgttggtccagccaccagacaggctagggccacaaagtggattggagttggggggaggacaaagacctgggtgcagccagccatgacargcacttcaagtgaccttggacaagtcacagtctctttctgagcatcagtttcccatctttgaaacaagccttttggagccagatgggccccctgagactt

SEQ ID NO: 175007 - DNA, 201 bp, Homo sapiens
cagggccagcgagctcagggaaaggggatgaggctgggaggccagccaccagggtgacctggagtaagtcacttcacctctttgagtctcagtttccacayaatgcccatggggatttccttccttgatcctcataagaggattgcccatgagaaacagtgtagaccacatgtggcatgggtcggcccagaaggacacaga

SEQ ID NO: 175008 - DNA, 201 bp, Homo sapiens
ctgggggatgaactagatgggcactggatgaccagccacagctagctgggcatcacgagggtggggaggtggtctctaagcctttcagaaggagcattccytgggctccccatctcccttccatcctcccctaggtgctgcaaaatcctcaatggggcgggagagcctcgtgtcttccggccccgcgaccgggacgagatg

SEQ ID NO: 175009 - DNA, 201 bp, Homo sapiens
cctgggtacacattggaatcactctgaggagtgtttaaaaaaacattgattcctggattcaccccagacaaattgaactggaacctctggggcaaggctcrcacgtgggtatttattaaaggctcctccaagcaattctaatgtgcaggcagggtcaagaactactagcctgagttttatgtgctttgtaaaccatttcag

SEQ ID NO: 175010 - DNA, 201 bp, Homo sapiens
cccagcaagactcatcttcacttgcatgccccttggccactgtgttttccactatatcctcttaaacatttctatagccagagtcctcccccttctcctcyctaagccgctggttcatcaggaagttctactcattgtcacacttagatctctcttatttcatttcctttagcgtagagttggttgatggtagctattttc

SEQ ID NO: 175011 - DNA, 201 bp, Homo sapiens
aggggtccccaggcaagtgctttgcaaggaagggtgagcagcagtgtcaaatgcttctacaggccaaggaaggggaggaccaagaaatggcctctggactyggcaagatgagggccacagtaatcttgagctgagttgcttctggaaaggagaggtgacaaaagctaattgaagaggaccaaggtgggaacggttagtgag

SEQ ID NO: 175012 - DNA, 201 bp, Homo sapiens
ccccattgccaaggacaatgcagctggccctgccccatccaagagtgtgtgactcagtaggtctgggtgggccctgagaatgtgcatttctaacaagtccmcaggtgatgctgaagccgccgctccagggaccactaagttttcatcccctgctgcacattgcaatccctggggagctcttctaactcccaaggtccgggc

SEQ ID NO: 175013 - DNA, 201 bp, Homo sapiens
gactggatccatttacagatgagcaacatggtctcagagatgtgggatggcttgtccaaggcctcttgaatagcccctctgctcctgcccctttgcattgkacctaagaggagactgaggccggagaggaattgaccaaggttgcagagtagagtccaaagcccagcaccctgtccatggtattagcccctcccccaaccc

SEQ ID NO: 175014 - DNA, 201 bp, Homo sapiens
tgcagaattgtggcatcttaactggaggagaaggcacagggcagtggttaagagcagcccctggagcttgagggcctgggcatgattccccaacacttcckagctatgtgaccttgagcaaatgacttaacttcctgtgcctcagtctcctcgtctgtaaaatgggcaaaaatactagtaccaacctcatgggattctagt

SEQ ID NO: 175015 - DNA, 201 bp, Homo sapiens
accttgagcaaatgacttaacttcctgtgcctcagtctcctcgtctgtaaaatgggcaaaaatactagtaccaacctcatgggattctagtgcagattaartgagttacatgtaaggagcctagaaccatgcctgatgcaagggaatctctatgaaaaaatcagctatcagtggtagcagcagtcgtgggatcagagtagg

SEQ ID NO: 175016 - DNA, 201 bp, Homo sapiens
atgggcaaaaatactagtaccaacctcatgggattctagtgcagattaaatgagttacatgtaaggagcctagaaccatgcctgatgcaagggaatctctrtgaaaaaatcagctatcagtggtagcagcagtcgtgggatcagagtagggagggagcacctttcaccatctctcccttaatctcaccctagccttcccca

SEQ ID NO: 175017 - DNA, 201 bp, Homo sapiens
tgcaggggatgggccaagggctccctgagggctcagcccccagcccagagaccacctaagtggcagtcccagagcctcagtggcagccagggcagaggctmccgacacaggccccaccaggtgccagccgctccttcctctctctgcagcccccagagaaggagggcgccctgcctcggcaggtgggcaacaagacggagt

SEQ ID NO: 175018 - DNA, 201 bp, Homo sapiens
atgggcaaagggggtgcagtcgcaaatgaggcagctgcaattcacagtctcccgtggcatccattctagctggggagagggccagtgcagacagaagctcrtctggaacaagtctgacatcaggtagcagccatggagggaggccagagaaagagggcaaggctctagattggaggtggggctcagagaaagagtctccaa

SEQ ID NO: 175019 - DNA, 201 bp, Homo sapiens
cagatggggagaggtttgcggaggggattcaactttatctgtaatgttttacttcttaaaatagaaaaatctgaggcaagtacggcataatgttaagatgytacaaagctggatgataggcacgtaactttgttacatcattctctttttcatgtttgaaataattcataatttttttaaaagctaatcttgcttcactcc

SEQ ID NO: 175020 - DNA, 201 bp, Homo sapiens
atcattttatgtgtagcccacagctttattttgtcacttagcaatgtaccatggccatcctggtggctcagcagtcatggaatgagaagtggcagaagccmgtgtagatgacaaggaccttgttgctgccagccctactgtttgccagctgtaggatacccgctatgggccccattaaggagtgaaagagccaggccaggc

SEQ ID NO: 175021 - DNA, 201 bp, Homo sapiens
gtcctgaatcttgacagtggtggtggccacattaactcacatgtggtgccattgcatagaaaatacacacgcacacccacacacaagctcatgtaaagccrgtgaactctccacaagttcggcttccttgcgtcagcatctccatctcagttgtggtacttgtgttaatactatggtgatgacattgggggaaactggatg

SEQ ID NO: 175022 - DNA, 201 bp, Homo sapiens
cgaaagttacagactgtatgattccatttatataacaggctggaaatgatgaaagcttggaaacggggaacagattagtggttgccatggccagggagtcrggggaagagagaggtgaccatagctttaaaaaaagggtagtacaaggacccttgtgatgaactgtcctgaatcttgacagtggtggtggccacattaact

SEQ ID NO: 175023 - DNA, 201 bp, Homo sapiens
aggagtgaaagagccaggccaggcgcattggctcaagcctgtaatcccagcacattgggaggccaaggtgggcagatcacttggggtcaggaattccatascagcctggccaatatggtgaaaccccgtctctactaaaaatgcaaaaattagccgggcatggtggtatgcacctgtaatccaagctactcgggaggctga

SEQ ID NO: 175024 - DNA, 201 bp, Homo sapiens
tccccccagtgctagtggagagcctaatacctactaggtgctcagtaaaaatttgagagcagtcacatagacaaatcagacatatccctggcctggagaasctgggttttccgtgagcactgcctgtcataaaatgggcttctggccaagcacagtggctcacgcctataatcccagcactttgggaggccaaggagggca

SEQ ID NO: 175025 - DNA, 201 bp, Homo sapiens
cacctgcaaatctgcactttcacagcctcctgtgaatccaacatcagtgcccatatggaggcatctcgtccttaccattaaccagtctcccccaccactcyggtctgcattaagccatctagcaaacagttaataagcacctgctgtgtgctgggctttgcactgaccctgagaacccagagaggaatagaattcagcttg

SEQ ID NO: 175026 - DNA, 201 bp, Homo sapiens
aaggccctgcttctggcttaggcattgcagatttctaagtgtggtgtattagcttactattgctgctgtaacaaaaaaccatagaccaggggatttaaaaytgatcagctgacagttctgtagtcagaagtctgacacagctctaccgggctgaaatcgaggcagagccacattccttctggaggctgcgggggagaagaa

SEQ ID NO: 175027 - DNA, 201 bp, Homo sapiens
gcagctctgccatttgcaaccacggattgtttgaaatccttttagaggaaaattaaaatatttcacagagggtaataaaatcctgagtgttttgcaggcakgactgctcagctctcttgggcaaataagtaattaggcatttttatttaagtcctctgtgtcgtcattttctttcattagtagagggagaaaaaactgtta

SEQ ID NO: 175028 - DNA, 201 bp, Homo sapiens
cttcagaagggccaaggttcttcagtttgctccagtttctaccactccctaatgtctcccactcacctacttcactcattcacaaaacccacccaaccccyacacctattcaaatttgcagcccctgctctgtctgctgtcctgggactcaggatctcaatgcctggcctgtggattcccagcatgacagagccccagcat

SEQ ID NO: 175029 - DNA, 201 bp, Homo sapiens
accgctcctgctcattataatctcttgcttcttttcacaaaaccccaggggcccctgggatttgggagctgggggatgtcactcaaggatgcctattgagygctaaacaatggccccctcatgaggtcatagggccgcttagcaaccacccaggcccttagtaacgggcccagaagtgttgatatttacccaacagaaact

SEQ ID NO: 175030 - DNA, 201 bp, Homo sapiens
cacgtagcatgtttcctggcggggttgataagggggacaaagatggggcggcagcagggtggagtgggaactggatactgcagagtgctgtgaaacggaamctccggttaattttgtatgaatcccacagcctgcccaagtggaggagagagcggggctgagggaggacgagagagcagatcatgggagatggcgggtact

SEQ ID NO: 175031 - DNA, 201 bp, Homo sapiens
agaagtgttgatatttacccaacagaaactttggattatctcgataacacccagttccttccagagagctgcaggcactaaaagcaagctccacccactcygagctgctgctctggctcttccaagagcaggcctatggaggggcagggagtcctgggtttcccccccagctctgcaatcctctgagggcctcagtttccc

SEQ ID NO: 175032 - DNA, 201 bp, Homo sapiens
atcctcactctcacagctgagaagaggccagggatctgggaggagaaacagctggcccggtgaggctgtgacaagtccgctttaggaactcagacctgggygaaggcctctgtgacacctcacactgccctgggttgctcagcctgccagggtaggcgtggctggaaccccagcacagtctcctcacacagtgctctgtcc

SEQ ID NO: 175033 - DNA, 201 bp, Homo sapiens
gaccccagggctcactggccctgcacagccacctcactctcctcaaaagccaggcctttagaggatgattctgggaaccaagttctgccaaaatttcgtgscacctggggtcctgttggcagcaccccacacacaaacacaaaattattcattgattcactggacagatgttcactggaggccctatggcattggtggggt

SEQ ID NO: 175034 - DNA, 201 bp, Homo sapiens
aagcagtgctgaggggagccaacccagcacatagctgttgctcacaaatgggaggttctggattgcctttccgatgttaagtatgtgagaagactttgaamgtgtttgtgtgagagggagctatggagggcagcacccacaagatgggatttttccctcaccccaggagccaggccagcactcactttgggcggaaggcag

SEQ ID NO: 175035 - DNA, 201 bp, Homo sapiens
gaggtctaccatgtgctggaccactgaccttatatagaaatgaggcagaacgctcaagctggcagaaaggggttacaggaaggtaggcagacccaaacagsccttcataacagttagcaatgtggtaggcaccacgagagagaaggaaacatggttaggagaggatggattgaggcagattccaagaggaggtgacagacc

SEQ ID NO: 175036 - DNA, 201 bp, Homo sapiens
gtgaggtctcctagggagggagccatccctgggctcccccagtgggggtgtctcagccagcctggcccttggaggctcctgatggagatctcatggtcagyatctgaggagactccgcatctagaacccaagacagactcccaaaccacaggctgctggactcccggaaccactgagctctgacatccacgggcagccagg

SEQ ID NO: 175037 - DNA, 201 bp, Homo sapiens
cagaccccagctctgggctcttcctgtagcccccatgcaggagcctgcctccttgtagtaacttccactgggaaatgcaggactagactagatgccatcartgtggcagtggaaggggctggagccagggggccaggatggcggggctgtcttcaaaaaacagcaaggcctggctccagcaggcccgatggctcaaccccc

SEQ ID NO: 175038 - DNA, 201 bp, Homo sapiens
ttttcccatctgcaaaatgaccacaggaccactcaggccctgcccagcgctgagatctgcctatcttaagcagcccccacgggggctgcgctgttctattrttatatactgacaccctcacctgggtctgggctcctgaaatctgagcttggtgtgagtgacatcctgcatggttgccaggcaaccaaggcgcgagctggg

SEQ ID NO: 175039 - DNA, 201 bp, Homo sapiens
tctgggctgggaatcgttttggctttgtttagtgcttgtgcctggaggcagataatagcccccagaaatagcctccatcccttcttcacagcctctccccrctgaaggaacccttttagaagagatgaactctcccctctccctatccagggagaggcctaaaaggtcacacgcaagagatcaaggaaccctaggtccagc

SEQ ID NO: 175040 - DNA, 201 bp, Homo sapiens
actgccgtttaccatgctatggggttcgtttgggagcttttttatttttttatttttattattattattttttttccccaagatggagtcttgctctgacrcccaggctggagtgcagtggcacaattttggctcactgcaacctccgcctcccgggtttgtgtgattctcctgcctcagcttctcgagtaactgggatta

SEQ ID NO: 175041 - DNA, 201 bp, Homo sapiens
tgcatggttgccaggcaaccaaggcgcgagctgggaggcttgggtgtcagggtgtccatcagcagccctctccccaaaggctggagggagcaagagggctyagggcagatctttgcctggctagcccaggaaggactgcccctcctctcatacctgctcaagtccaccctctcttggaacccactttctcagggtgaaagg

SEQ ID NO: 175042 - DNA, 201 bp, Homo sapiens
tctgcaccatcgtgctgggcacctttgccatccaggtagtgaggcccccaccctaaccaggcctggggtgggcagcaagcggctggagcccctgggcaggrccctgagagcccagccctctgtgctggtccctgatggcctctctctctctctttctctgctcccctgtgacctccagatagtgatcgtgcagtttggagg

SEQ ID NO: 175043 - DNA, 201 bp, Homo sapiens
tgcccctcctctcatacctgctcaagtccaccctctcttggaacccactttctcagggtgaaaggggctgctggcctgggatatttttgtagatggagcaygtggtcaggctcagagagagaaactggagtctccttgcactgctatctgatacagctgctgtcaccatcaccctcttcctggaagtctgcagcctaagtg

SEQ ID NO: 175044 - DNA, 201 bp, Homo sapiens
tctcttggaacccactttctcagggtgaaaggggctgctggcctgggatatttttgtagatggagcacgtggtcaggctcagagagagaaactggagtctycttgcactgctatctgatacagctgctgtcaccatcaccctcttcctggaagtctgcagcctaagtgtgcccaaaagcatggagaattccctgaccccct

SEQ ID NO: 175045 - DNA, 201 bp, Homo sapiens
acaagccgctcatctccaggaccatgatgaagaacatcctgggccatgctgtctaccagcttgccctcatcttcaccctgctctttgttggtgagcgcctygcccacccacgcctctcccaggcggggtcatcaccttctgggtgcaccatggctctcacccagcattctcgagtcacaaccccctcctgttttgctaatg

SEQ ID NO: 175046 - DNA, 201 bp, Homo sapiens
ggagcagtcgtgccatagtggagcatatgggattggtggagcctatgggagaagcagtgaatggatgacaccgtttggggtccaagcaccatgtagctttsaaggaagaaagcaggtctctgcaagcttctgtgctgcctctgaaggcagtttcctataaagtggtgcctttcctgtgccggctgggctactctaccgggc

SEQ ID NO: 175047 - DNA, 201 bp, Homo sapiens
ctggtatgttctggacactccacaagtagtggctgagtagcagtatcatcaatgctattgtcattattaagggccagtggatattcattaaatgagtccayagtgttataggctgaaggggagagaaaaaagaatggagcatgtatgcatttaggctggagagaaaattctcagtggctattttcccaacccctctcattt

SEQ ID NO: 175048 - DNA, 201 bp, Homo sapiens
ttgtcttgccttatttctacattatgtccctgtatcactgcctggccaggggccttcatgctaccatctctgaccaagatgcatccccacactggaggcakgcctggccacaccacttgatcttcgagtttgccctcctcccctataagcttggtccttgccaccatgatgactcaccttcctgttcttagcaggatggta

SEQ ID NO: 175049 - DNA, 201 bp, Homo sapiens
agcagcagatgctagcccttcaacggcttccgggttggagtgggagggatctgtccagtgtgggcctatgagaatctaggaatgcactgcggtcagcatcytggagccaatcaactcagaggcacctggagctatccaaggtcctgatcagctgggggctcccgaaatattgcagttaactttgaattggtctgtctccga

SEQ ID NO: 175050 - DNA, 201 bp, Homo sapiens
gagtccctcattcttcccactagtcacaccgcttcccaggaggcccacagacctggagccacagaggctgaacttccattccggaaccagtgcccacgccyacagcctcatatcgtgaaaaggagtcagtcctccagggaaggccagggaagctgtttctcagcttgaacttctaccagcgtggccaagactggggagaag

SEQ ID NO: 175051 - DNA, 201 bp, Homo sapiens
gagtctccgaggggtgaaactggcccaagctcactcacaagtcagtggtagaacaaagaccaaaacctggctcctcctctagtgctctgacctctgcttayaattacacagaaagaaaattgacatttgaaagcctacaaccccacatagcatctgtctggacatttgtgtttctgaattttcagggcctcgctgcctttg

SEQ ID NO: 175052 - DNA, 201 bp, Homo sapiens
ccaaggctcctcaaatacccactgacagcaagcagccgtgacagcagggagttcctatacagccagtccctcactttgcgccgtggctgtcttcttttacrtacatggtaggacacacagattctgcccacagttgaaaaatctgggagagtgttggagtgtttttttaccttcacagtaaaagtgcatgcctttacagtt

SEQ ID NO: 175053 - DNA, 201 bp, Homo sapiens
gaggctggggaagagcccagtttgtatccaggacagctggatacagatgcactttgaggccaaggctcctcaaatacccactgacagcaagcagccgtgayagcagggagttcctatacagccagtccctcactttgcgccgtggctgtcttcttttacatacatggtaggacacacagattctgcccacagttgaaaaat

SEQ ID NO: 175054 - DNA, 201 bp, Homo sapiens
ctcagacctccttaagataggaggatcttgagtcttgagtggggcctggcatctggtgcaggacacccattgtgggccgtccagcttctgtgtaaacatgytccctccctccttcccagaataatccatccatcctcagctcacccattagaaagtccttccctctcatagtgaggagcgcctctgcccggctgctgcacc

SEQ ID NO: 175055 - DNA, 201 bp, Homo sapiens
gttctagcatcactaggtaaggtcagacgcccctcctcagtgggcccctcagtgggcccctcccctgtgctggccattgttcaccaccctgtgctgtactsttcacttttctatcttccctggactccgagagctccctgcaggcagagtctttgtcatttctgtcccagcacagggcctggcagggagcacagggcaggg

SEQ ID NO: 175056 - DNA, 201 bp, Homo sapiens
ctcagaacaggggagaagaggtcagtggtcacctggatggcctggaaaactcaccttgagtccctcccagttgggctctacttttgatacagcccagcctytcagtgtgaggtgccccacacatgggaagagcagaaccctgccctgccctcaagtacagcactagagcagaaagtaagccatatgttaaatgtctgcatt

SEQ ID NO: 175057 - DNA, 201 bp, Homo sapiens
aaaatgggaataatattggtgccttcctcccttagactgggttcttccagaagcagatcataagatgacgattcaagtgcaagtagtttatttgtgaggcrtgggaatgctggtaggggagtagggaagtgagacaggaaagggaacaaggtgttatcaagcaagttaattatcactgtgggcacctggatctgggagcta

SEQ ID NO: 175058 - DNA, 201 bp, Homo sapiens
gaataaatcaaggaagcctttcaggaagtgatagtaaacgttcttctgggtctctcaagactaactaaataagtcgacagagggttgggcatcctgggttygaagccagatgtgccaagtcagaggcaaatgcccggcacatgcagacccgtggcttggtaggagagtgggataaatgtggcatggctagaggtgaggcag

SEQ ID NO: 175059 - DNA, 201 bp, Homo sapiens
gtgtggtatcaaaccagcttgccccatggtggttagatctgtgggattgtggacaaggaaataacagcatctctgcaccagctcttagtgttgctatgacrattaagtgggttcgtttctatatagcttggagaatggtctttggcacagattaagccccttatgagtggcagccttcaggggcttttcctagcactctct

SEQ ID NO: 175060 - DNA, 201 bp, Homo sapiens
tttaattagtagtaaatgatttgctgtttatctaaaattcagatttctctgggtatcctatattttatccagtaaacctttctcaggggccccagcttcastagatccccccattctttggtacagatcattgatgttttcacagcttctagatgagtcctggtcaccaccttccactcagatccccagcccccacaccca

SEQ ID NO: 175061 - DNA, 201 bp, Homo sapiens
cctcgaagaagggattggaactggagggagacaggtaagagcagaggcttggggataccggaggacagagggagggaggactggggattgtagatgccccrtctcccctgccctggctattgctcagctctggaggacaccctggggcatctccagggctgggcggggagcgcactatgcctaagcccctccctgacgtcc

SEQ ID NO: 175062 - DNA, 201 bp, Homo sapiens
tctcttcagtgaggttgatacagagggaatatgaaatggccgtcatttgtgtgtgtagtaaggctccattcaagcaagccgagccgttgttcccttccctsgtgtctgtggggtgctgagagggcctgggccaggggtcagggtccagccccagggagctgaacctccctggacctggatcaagtcgcttccgcgtctctg

SEQ ID NO: 175063 - DNA, 201 bp, Homo sapiens
ctgttggctcacccctgggatgtctatataggagtcataaactgtctcacagcagcaacttactcaagtgacacagcagactcaagggacatgggttctarttctgcccctgccactccctcacagatggcctcagtttccccacttgaaaactgagagaatcagactgtccagcattcacagtgagggacacagcagggt

SEQ ID NO: 175064 - DNA, 201 bp, Homo sapiens
aggcaaggtggctgctgaggccatccaggtgagcaaggatggtggcctggaccagtgtgcagatggcagagggatgtggtcatatctgagatgtttttctygaattttgctggatggtgtaacaggtacaggaggcaggagtggactctgatggaagacagagacagtacatggaggaaaagaagagatgatgggggtaca

SEQ ID NO: 175065 - DNA, 201 bp, Homo sapiens
aagtagcaaggagagcaactgcagggacagcccgttgtgtttgttttctgtggctgccataacaaatgaccacaggctaggtggcttcaaacaacagacgkgtattgtctcccacttctggaagccagaagtctagagtcaggagccagcagggttggcttttcctggagaggctgaggaagagcctgtcccttgtctccc

SEQ ID NO: 175066 - DNA, 201 bp, Homo sapiens
tcttccatgcacgtttactatagaaaatgaggaaaatgaagacattttgtttaagaatcaaacatcctaaccccaccaacattgacatttggggaatactrtatctttccccttatatcttgttttgcataccataaccatagtaattttcttgttggaatcgtgtgaattgagaccctatatcatttcagttctctactc

SEQ ID NO: 175067 - DNA, 201 bp, Homo sapiens
ctggtgtcactggagcacaatgatgggaagggggaatgagactgcagaggagagcaggggccctctgtgcagggccttctggatcttctctaatggatttyctctgcctgcagtgggagccactcgagcattctgagcaagggcttgacatgagcacactgcactttacacatttgaaatgtccctctggctgcagggtag

SEQ ID NO: 175068 - DNA, 201 bp, Homo sapiens
ctgcacccggcctaaaaatggttttctttcatgtgtgtgtatgcttacaacgcatattatttagtttcacttttgtcttagtcctttaaaatggcatcatrcagtatgtaatcttctgagactcgcttctttccgactttcttctactgggaaacattgtttctcagactcctccctgtggttcctgcaggtgtggtttat

SEQ ID NO: 175069 - DNA, 201 bp, Homo sapiens
gcaagcggatcacctgaggtcagaagttggagaccagcctggccaacgtggtgaaaccccatctctactaaaaatacaaaaattagacgggcatgatgacrtgtgcctgtagtcccaggtacccaggaggctgaggcaggagaatttctcgaacccaggaggtggaggttgcagtgagctgagatcatgccattgcactcc

SEQ ID NO: 175070 - DNA, 201 bp, Homo sapiens
tcccctgccttcacatcgtcttcccccagtgagtgcctctgtgtccaaagatcccctttttgtaaggacaccaaatcattccagattagggcccattctartggcctcattttaacttgatcacctctgtaaacaccctctgtcaacgcccatctgtacctcacattctggggtatgaggggttaggacttcaacctatct

SEQ ID NO: 175071 - DNA, 201 bp, Homo sapiens
gtagtggtggtggtgacacaaaactacagataacatttcatagagctacacacacacacacacacacacacacacacacatcaaactgctgcatgcaagckctgtagattgtatgatgtcacaagactggtttttatggcatgctgcagtagtgcaagttaaacttggggaagtctggagggaggtgcatgggatctctct

SEQ ID NO: 175072 - DNA, 201 bp, Homo sapiens
cacacacacacacacacatcaaactgctgcatgcaagcgctgtagattgtatgatgtcacaagactggtttttatggcatgctgcagtagtgcaagttaamcttggggaagtctggagggaggtgcatgggatctctctgtacatttctttgcaatttcttttgaatcgataactatttaaaataaaaagttacaaatagg

SEQ ID NO: 175073 - DNA, 201 bp, Homo sapiens
aaatgctgaaagaatagaactatcaacccagagtcccatatccagcaaaaatatttttcaaaaatgaaggagaaatcaagacattctcagatgaaggaaarctaagataattttttgccagaagacctatcctaaaagaatggctgtagttctccaaacagaaaggagacaattttttaaaaagaattcttgggacatcag

SEQ ID NO: 175074 - DNA, 201 bp, Homo sapiens
cttggaacccactttctcagggtgaaaggggctgctggcctgggatatttttgtagatggagcacgtggtcaggctcagagagagaaactggagtctcctygcactgctatctgatacagctgctgtcaccatcaccctcttcctggaagtctgcagcctaagtgtgcccaaaagcatggagaattccctgaccccctcag

SEQ ID NO: 175075 - DNA, 201 bp, Homo sapiens
tcatatcatggcatctatagagcagttaaaaaggaacacactagagccataaacatgaatgaatctcagaaacagtgttacaaccgggcgcagttacagcygggcatggtggcttacacctgtaatcccagcactgtgggaggccaaggcaggtggattacttgaggtcaggagtctcattaggttaaactgcatgaactt

SEQ ID NO: 175076 - DNA, 201 bp, Homo sapiens
gaccccctcagggggcctgacgctggcttctggagcttccagggctctttgcacgggccctgagccacgcttaacaaatcatatcacccttatatttaccyagcctccctgcatgacctcttgtattttcattccttcacctaacaaatgctgtattgagtatccatcccagctccgctgtgttctgagtgaccttgggca

SEQ ID NO: 175077 - DNA, 201 bp, Homo sapiens
ctcatgattgtgagctgcacggtcacccctggagatgtcgctatctctgggatgcaatgcaggcccctgatatctctagccttagttttcttacttgtgaratggaaatggtcaacggatccttttgagcttaaaactgaaaagcatctaatgaacactcatataattccattttgttgttctgtcattgggttcagggta

SEQ ID NO: 175078 - DNA, 201 bp, Homo sapiens
aggagcagctaatggcagacttcattaccaggcttgcccaatgcctacccacccatggtgggtgtgaccagctgtggggccgcatgctctgctcatgattrtgagctgcacggtcacccctggagatgtcgctatctctgggatgcaatgcaggcccctgatatctctagccttagttttcttacttgtgagatggaaatg

SEQ ID NO: 175079 - DNA, 201 bp, Homo sapiens
ttacgagacatgggggtgggggaactgagggacaggtccagtggcctggaatcaaaggtcactgctctgtgctggggcttgctgactctcttgggggctgrgaagtggggtcctgtcccctggaaatctcaccacgctggaggaagctgaggcagagatgccccgaggcctggcagaggggcacaaccccaggactctgcc

SEQ ID NO: 175080 - DNA, 201 bp, Homo sapiens
cacacacccaggtgaggcatggagggatggcccaaaggtggcaattgaggcagcaggggcccaggatcagttggctgagtagagcagacagtgacagaggygtgctgtggagagcagttagggtgtggcctctggagtgtggtagagctgggtgccagtgctggtgctctgctgccctcaccatgtggcctggcaagcagc

SEQ ID NO: 175081 - DNA, 201 bp, Homo sapiens
taccctgactctgaatgaatgaattaaaaagcaaattgcactccagcctgggcaacaagagtgaaactccatctcaaaaaaaaaaaaaaaaaaaaaaaagrcattgtcaaagactgggctgaggaacaggtgaggtgggtgaaggagtagattgatcacatgcctgggtgagcgggtaggaggagggaggtagaggagcgg

SEQ ID NO: 175082 - DNA, 201 bp, Homo sapiens
ccgtggcctggaacacagggaagagggtgggattggcccgaaggggtgtgtgctgaggctaatggcagggagggggtctcctgcaccctggccttcacccscaccctcacagccgcgcgctggagacactgtgctgggggcagggaggaggcttctgagcgggttccctgctgcgtgtggctgctgtgcttcccgggcaag

SEQ ID NO: 175083 - DNA, 201 bp, Homo sapiens
gggatggcccaaaggtggcaattgaggcagcaggggcccaggatcagttggctgagtagagcagacagtgacagaggtgtgctgtggagagcagttagggygtggcctctggagtgtggtagagctgggtgccagtgctggtgctctgctgccctcaccatgtggcctggcaagcagctgaagcttcaggcttcttatcag

SEQ ID NO: 175084 - DNA, 201 bp, Homo sapiens
cgcgcaccaacactgagctgggcagtgggattttacagcaaatgaaagcagtctagggggactaacgtgtccaggtttgtctgggacattcctgattttarcactgaaagtcccacatcccaggacacccctcagtccgaggcaaaccaggacagttggtcatcctaacacaatctctgccctcatggatttacagtttag

SEQ ID NO: 175085 - DNA, 201 bp, Homo sapiens
tgtaccctgactctgaatgaatgaattaaaaagcaaattgcactccagcctgggcaacaagagtgaaactccatctcaaaaaaaaaaaaaaaaaaaaaaaaggcattgtcaaagactgggctgaggaacaggtgaggtgggtgaaggagtagattgatcacatgcctgggtgagcgggtaggaggagggaggtagaggagc

SEQ ID NO: 175086 - DNA, 201 bp, Homo sapiens
cacagacatggagatgatcattagtacagggaaggctgtatgcctggtggtcatgtaaatgggctctgaaatcagacaggcttagatcagatcttggttcracaacttaccaacatgggtcctcagtttcctcctttgtaaaatgggacctgctgaagatcctacaactggggctactgagatgataaatgaggcagtgca

SEQ ID NO: 175087 - DNA, 201 bp, Homo sapiens
tctagcctaggtaacggagcgagactgtgtctcaaaaaaataaaataaaataataaaataaaatagaatatagcagagtcagcgggaagagcgtgatgacraggcatcttatttttgatggggtgttcagggcagggctctctgaggaggtgccatttgagcgggcactgcctgaggtgggggactgaaacgtgcagacat

SEQ ID NO: 175088 - DNA, 201 bp, Homo sapiens
aagctcggtgaggttaaatgacttgcccgaggccacaggaccagggttgtctggggtattcaaagccacatctgtccaactcctagaggccaagattgtccactatgtaccctgactctgaatgaatgaattaaaaagcaaattgcactccagcctgggcaacaagagtgaaactccatctcaaaaaaaaaaaaaaaaaaa

SEQ ID NO: 175089 - DNA, 201 bp, Homo sapiens
gcatagaccctccatctgcttcctcactggcgaggcttagggctcatctgcattagctgctctctgcccagctctgtcataccttcacccccttcctcagrgctaatgaaggaggcagaaaaaatttaatttcctctaaactagaggctgatcaattatggttaaaggaacttggtgtctggaataattagctttgcgttt

SEQ ID NO: 175090 - DNA, 201 bp, Homo sapiens
aaagctcggtgaggttaaatgacttgcccgaggccacaggaccagggttgtctggggtattcaaagccacatctgtccaactcctagaggccaagattgtccactatgtaccctgactctgaatgaatgaattaaaaagcaaattgcactccagcctgggcaacaagagtgaaactccatctcaaaaaaaaaaaaaaaaaa

SEQ ID NO: 175091 - DNA, 201 bp, Homo sapiens
ggcgtgatggtgcgcacctgtaatcccagctacttgagaggctaaagcaggagaatcacttgaacccaggaggcgggtgttgcagtgagctgagatcacgycactgtcctccagcctgggcaacaacgagactccatctcaaaaacaaaacaaaacaaaacaaaaaggatacaggactgcatcagacaccctatcagcagc

SEQ ID NO: 175092 - DNA, 201 bp, Homo sapiens
ttggagaggagaggagagcgggggtcctggtcggcttgctggcttgaccacttgagcagcacctaccctgggtagtcttgggacatctcacacccagaaarctccacaagcctcctggcaccactttactcagctgtgcaaaaggacacaggacttggccaggtgcagtggctcatgcctgtaatcccagcactttgggag

SEQ ID NO: 175093 - DNA, 201 bp, Homo sapiens
tttgcggaatgaatgaataagaatgaatgggactggaaccccaatcttccacaccatgcctagtgctcctctctctctctctctctctctctctctctctcatacacacacaccctccttgggggtgtcattgtggcttcctcactcctatcaagatcctaaaacagcaaagacaattaatgcccctggagcttggcagtg

SEQ ID NO: 175094 - DNA, 201 bp, Homo sapiens
gtttgcggaatgaatgaataagaatgaatgggactggaaccccaatcttccacaccatgcctagtgctcctctctctctctctctctctctctctctctctcatacacacacaccctccttgggggtgtcattgtggcttcctcactcctatcaagatcctaaaacagcaaagacaattaatgcccctggagcttggcagt

SEQ ID NO: 175095 - DNA, 201 bp, Homo sapiens
tgtttgcggaatgaatgaataagaatgaatgggactggaaccccaatcttccacaccatgcctagtgctcctctctctctctctctctctctctctctctctcatacacacacaccctccttgggggtgtcattgtggcttcctcactcctatcaagatcctaaaacagcaaagacaattaatgcccctggagcttggcag

SEQ ID NO: 175096 - DNA, 201 bp, Homo sapiens
gtgctgaattaggtacagaggcagggggaagagcattccaagcagagggaacagcacagcaaaggccctaaggcaggaaagcacttgtgttgaagcctcaraaaagaggctggtgtcactggagcacaatgatgggaagggggaatgagactgcagaggagagcaggggccctctgtgcagggccttctggatcttctcta

SEQ ID NO: 175097 - DNA, 201 bp, Homo sapiens
gtgtttgcggaatgaatgaataagaatgaatgggactggaaccccaatcttccacaccatgcctagtgctcctctctctctctctctctctctctctctctctcatacacacacaccctccttgggggtgtcattgtggcttcctcactcctatcaagatcctaaaacagcaaagacaattaatgcccctggagcttggca

SEQ ID NO: 175098 - DNA, 201 bp, Homo sapiens
gaccccaaaagtaaagaaaggtcaaatccaagaaaccccggggaggctgatcaatataatctgaaagaggaatagatttgaaggaaacaattagtttggtsttagacttgctgagttggagacgtagataatcaagtggagcttaccttgtggatcccatgaaatcctggaccagggattgaaagagagagaagatgggat

SEQ ID NO: 175099 - DNA, 201 bp, Homo sapiens
ccactgtcttaaggactctggaggaaataagacaagggctgggtaggaaataacagagcggagcctctcagagcctgggatccggagacagaggagacccrgaggatgcaaagtggagaaggtgggcaaaggctgggaggtggggcctgagtggagattgggtgggagacgaagccaggggactgaatggggctggacaac

SEQ ID NO: 175100 - DNA, 201 bp, Homo sapiens
ccctctcatgttctggctcctggaactgctgactgtttgatctagaactgccagcttttctgtcacccccactcccatacctgccccagggctttcctaarttgtctaacaagtaccatctctgggagcctgccaggcttcaggcctgtgcagcctcaatgtgggaggctgatggagatctcgcctgagtcaggggcaggt

SEQ ID NO: 175101 - DNA, 201 bp, Homo sapiens
caagcatcactggcttcctactgcctttgtgcctgcctgaagatgagtaaccacagactcaactcagggagggagcaaacaagcagatgggccacatgccyccctgttcagccttcagacaccacccagacctcttgcttcgctaaagtttggtttcttgcccaagcactttgggacgaaccagattgtttccaaacacat

SEQ ID NO: 175102 - DNA, 201 bp, Homo sapiens
  misc_feature (1)...(201): n = A,T,C or G
tagaataatcagtttttcaaccgctgcagttaatgcgaggccaggccgcaaaactctccctctcatgttctggctcctggaactgctgactgtttgatctngaactgccagcttttctgtcacccccactcccatacctgccccagggctttcctaaattgtctaacaagtaccatctctgggagcctgccaggcttcagg

SEQ ID NO: 175103 - DNA, 201 bp, Homo sapiens
caaagaagatgtcagaggtcggaggagagtgtcacatgcaggtacagtgtgatgagagtatctgacactggattggcaggcagttggacagagcagtcgcyaggaagtaggacgaaggagaaacggcccacactgaggagggcaggctgttgggtgagcccttgggaaagctctgctggaaagaacagcagaatggagtgt

SEQ ID NO: 175104 - DNA, 201 bp, Homo sapiens
gaagaccccagggctcactggccctgcacagccacctcactctcctcaaaagccaggcctttagaggatgattctgggaaccaagttctgccaaaatttcrtgccacctggggtcctgttggcagcaccccacacacaaacacaaaattattcattgattcactggacagatgttcactggaggccctatggcattggtgg

SEQ ID NO: 175105 - DNA, 201 bp, Homo sapiens
tcacttgaacccgggaggcaaagattgcagtgaaccaagctggtcttgaactcctggccttaagcgaacctcctgcctcagccttccaaagtgctgggatyacaggcatgagccactgtgcccggcctgatactcctttttaaatgctttgaagactttggttttttaacaaagtgttgaaaaaaagaaaaaaaaattgaa

SEQ ID NO: 175106 - DNA, 201 bp, Homo sapiens
tgaattacaatctatgtgcagtggtgaagttattgggggtttccagtggtccgatcaatgtttgagaaacatccttccaaagccaggagaggatggggggktgaggggcacatcagaaagggccagatcacagttctaggttgggggtgccagggtggtggggcggggagaatccaaggaggacatgagggccacccagac

SEQ ID NO: 175107 - DNA, 201 bp, Homo sapiens
tcagggaaggcttcatggaagggaaggtgtttggacttggctatggaggaaagagaagggaaagcatgtagtatggcctacagcagcatttcttagagggkattccacagaataactggtatgctgcaagaagtgaggcttcaggtgaaaagtaaagaactctgttttctcatctgtaaaatggaaacaataatgacatct

SEQ ID NO: 175108 - DNA, 201 bp, Homo sapiens
aatccaaggaggacatgagggccacccagaccctaagtgatgaacttctagcctcagaagtgggtctgtccaaggtgattctaagtttctccaagggcagygatggaggacctgacctgatggccagtaggaatcacagtcacaccaatgttaataatcatctcagtgcctaggagtccctaagtacccactgcgtgccag

SEQ ID NO: 175109 - DNA, 201 bp, Homo sapiens
tccttatctgcaccgtgagggtaatagtttatttacagggctgttgtgaagatggaaaatgataatgccacaaataattattttataaactggtgggatgsagctggaaacgtgtattattccactgagaactcttcactaaggtacaccttactaattaggaccttagattgcacctagaagaggagatgcccactggaa

SEQ ID NO: 175110 - DNA, 201 bp, Homo sapiens
tggagggaggatttgtaggggcggggaacctgggaaccgtgtatttgggggagagtgtcccagattatttgggcatggggcgtgtgtaaacatgttaaggrtagtgagagaaagagggaaatggagtctgggtgtgctcagagggcctgtgagcacagcaattcttgagggaaaggggtggggaggttaagttgtatggct

SEQ ID NO: 175111 - DNA, 201 bp, Homo sapiens
ctgcctcaataagggaatcagggaatcttgtcactctctttgccagcaggaacatccagagaggaaaaccaactgagggaagttgtggagtcagaaaacgkttatggaaaatgttttaccccaagactgtgccagaacgacaactaaatcctccccagcagaaaccctttctaactaaaaatgacaggcatctttccttat

SEQ ID NO: 175112 - DNA, 201 bp, Homo sapiens
agcttgatgtggctagagtatggtgctcaaaggggacagcaataagagacgaggtcagattgctgggcaggggtcagttcacatagagccttgtaggctayggaaaggagtttggattttattccattaagcaatcttcatttgtgtcgattaacaaatgatgtttgaatcctgaaaatgtgatggagtatggtcatattt

SEQ ID NO: 175113 - DNA, 201 bp, Homo sapiens
gtgaaagacgaaaaggttatgaaggtgataaggcaggggaggagttggagctgaggagggggtcagtcctgccttccttctctcagcccttcccctcaccrtcctgggcccaggatggccagctgtccatgactgcggggcagggccactccctgtgccagacccaaccgagctcagctggggccctttgtcacccaacgc

SEQ ID NO: 175114 - DNA, 201 bp, Homo sapiens
aaattggcacaaagtagggctttaaaaggacttgaggattcttaaacagcttatccttttggggagtttgaacttttccctgcaatcctgctctcttcaaygagagaacgaaggaaaaaaacgtgagccctgtctgtggccagactgccccagtctaaaactcagggaagggaacaaagaggttgcatcaacacacacccc

SEQ ID NO: 175115 - DNA, 201 bp, Homo sapiens
aaggttgatgtggtttagtgaacagaggctacttagcttgggtagtcagggagggcctctctgcagaggggacctttgagctgagagctgagtgacaagcrggcagcttacaaagatctgagaggagagaattccaggcagaggacccagtcagtgaaaagtgccaagttgggaatgaacgtggtgggttcgaggagcagc

SEQ ID NO: 175116 - DNA, 201 bp, Homo sapiens
gatggaagagaaaataggatatgcccagcttagggcctggaatattgacaactgctcagtgagttttgttcttttggtggtccccggtgggaacaatcgcytcaaatggtgaggacctcaggcgcctttgctgggactgtgtcggtcgctctcagccacctgagcactgcgaaaagagagtctgtcatctgtattagtttg

SEQ ID NO: 175117 - DNA, 201 bp, Homo sapiens
aagagcaaggttgatgtggtttagtgaacagaggctacttagcttgggtagtcagggagggcctctctgcagaggggacctttgagctgagagctgagtgrcaagcgggcagcttacaaagatctgagaggagagaattccaggcagaggacccagtcagtgaaaagtgccaagttgggaatgaacgtggtgggttcgagg

SEQ ID NO: 175118 - DNA, 201 bp, Homo sapiens
gacacatgaccacaaactaacagaaatgtgttgtctcacgttctggagactaggagtccaagatcaaggtgtcagagggcttggttccttccgaggatggkgaggctgactctttcccggcctctctcctggcttccagtggttcgccggccatctttggagctccttggagtagagaagtagcactctagtcccctgcct

SEQ ID NO: 175119 - DNA, 201 bp, Homo sapiens
ttagcttccaggagatgcccattggcatcttaaactccaatctgagactgtggggtcattgtcttacataaagagcctgtaagtttgaagctgagctcttyctcagcacaactatatgctagactctggagacacgggaagccagggacttagctttcaaggtggttacaggcaggaaggccacaaaacaggtaagtacgc

SEQ ID NO: 175120 - DNA, 201 bp, Homo sapiens
cagttcacttctttgtgaggcctttctggaatacctctcagagaatcctgtcccttccctgaattcccatgagacttttgtgttctgaggggtcttttccygtttgtctcatcacttaccttcccctgatatctgcctttgagcagaaactgtgttgtccatgttcctgccccccagtagcccaacttggagtttaatcca

SEQ ID NO: 175121 - DNA, 201 bp, Homo sapiens
ggctccttatttcagctaacatttcaagccaaaatctgcatttggagcctacctcaggtcaccttcttatgacctaccagactagactaagtgactttgartggcttctagaatgctctagctgcagatgcccaagcagatgagcctctgagtacttccctaggtgcctgttctgctaagacccagcacccccagggtgtg

SEQ ID NO: 175122 - DNA, 201 bp, Homo sapiens
attccagcccctcagggccaggagccaggattgccttctgctctcagtgctcggggtggtgtcggcacagaccaggccagggccttgcccattgttgccaytcaaaaaatgtggattagttgttagataggtagggacacaggtaggttgacaggaaggaaggattggagggaaggcgaaataagacaggttcccttagga

SEQ ID NO: 175123 - DNA, 201 bp, Homo sapiens
agagaattccccagtaagaggcttccaggtagatcgctcatcagactcaggatattctggtttggaaatccaggctgcccctcaggaagggattccagccmctcagggccaggagccaggattgccttctgctctcagtgctcggggtggtgtcggcacagaccaggccagggccttgcccattgttgccattcaaaaaat

SEQ ID NO: 175124 - DNA, 201 bp, Homo sapiens
ggcaggggacagagcagctgagatcctagaattaagcccgcagagaattccccagtaagaggcttccaggtagatcgctcatcagactcaggatattctgrtttggaaatccaggctgcccctcaggaagggattccagcccctcagggccaggagccaggattgccttctgctctcagtgctcggggtggtgtcggcaca

SEQ ID NO: 175125 - DNA, 201 bp, Homo sapiens
tggcttcctggccttttgattttcctccttcagatctgaggccaagtcagtagcctcacagagatctctggctttctgccaaggagactctgggtggagayaaccagggctcaagtgtggaagatgagtgcacagtcaccaaaccaggggcacctctgctttagtctagaagaagtagaacagtgtctggccacagtagtg

SEQ ID NO: 175126 - DNA, 201 bp, Homo sapiens
gaggcctagtcgttgctcaaggtcacaaagcaagcaggtggcagagaaatggagcctgggcttgtgactcactccccagggggcatctttctttgttcttycatgaatccctcgaggggagacccctttatccctggaccgccttgatccctgggcctctgggtgcccggccctgtgccgggggctgacgccaatgcaccg

SEQ ID NO: 175127 - DNA, 201 bp, Homo sapiens
cagatgcagaactaagtaggacacagactcattgcttctccttcaggggattcttccctggctgatggttgaggttgtattatatcatgggcctctggtgygtaagatttctttctgcatctggaggcaatgtactggtgcactgcgcaattcagctacagcctcagagttacggctcaacccccagggccatgggggccc

SEQ ID NO: 175128 - DNA, 201 bp, Homo sapiens
cactaactttcatttcccttccccagcccctggcacccaccattctactttctatctctgaagctgatgactcaggggacctcatgcaggtggaatcatayagtatttatggtccttttgtggctggctggctcacttacttactgcagtatcctcaaggttcatccatgttgtagcctgtgttcaagtttctttctcttt

SEQ ID NO: 175129 - DNA, 201 bp, Homo sapiens
agtttgaccaaatcttatgctcgatgagcgggcacccacaaagcctcctgggcagcagaatgatgttgtatgagtgcgatggaagcatgctgacctggccrctggctgaggggagatgcctgagtcccggcacctgacttgggtgcctccatgcccacttgtggcctcctgtcctcacttaccacccctcggccccatgtc

SEQ ID NO: 175130 - DNA, 201 bp, Homo sapiens
gactggtttatttcacttagcataatgtcctcaagattccttcatgtggtagcatgtatcagaatttccctcctttttaaggttgagtaatagtccattgyatggataaatgacattttgtttatccattcatctgttgatggacacgttggttgtgtccaactcttagactttgtgattaatgctgctttgaacatgagt

SEQ ID NO: 175131 - DNA, 201 bp, Homo sapiens
gcttgttgagctggtctcttccacaactaccctcagccatccaggcagcattgatccatagacctcccaattagccgatgtcttttactgaaaaaaaaaaagagtatttgcaaggatagattgcaaggtctacaagactcacaaaccgtagagaccacctagttcagccccctcagtttactctgagaaatgggaagggat

SEQ ID NO: 175132 - DNA, 201 bp, Homo sapiens
ttccatcctgtcttgggttgggaggtggggagcagcctcttggttgccacctaagccagagaaccaatgccttcatttccagcgaacctttctactcagascagaatgtgtctcagaccagaatgtgagggccttgcccctggaggctaagtggaaggtaacaaagacaacaggctcagggacagcagagagttcaagtcc

SEQ ID NO: 175133 - DNA, 201 bp, Homo sapiens
ggtccccagctgcgttcctaccgttacagcatttctcttgcctgtggctgcaagcaagtcacttcccctatctgagcctcagtttcctcatccaaaaaaaagccacctgctgtttcctctacatggaatgttcttccctaggtcaccatgcgactggtgtctgctcaaataccacctcctccaagaagccttccctggcca

SEQ ID NO: 175134 - DNA, 201 bp, Homo sapiens
gtgctgcccaagggactgtggacagtgaggtcccacaaggccctatcagggcctccatccccaagaggttcccacctctgcccctgtggtcgtcctttgaraggtttagcccactgcgctttgacttggatgtctgttgctctgccattaattgcttctgccatggtgttaagcattgccctctgcaggggactcgtggag

SEQ ID NO: 175135 - DNA, 201 bp, Homo sapiens
ggtgagacctgcaaggggcacaggtccacgctagggaagaagccgggggcagctgagatttccagagaactcccagcctctcccgatcccatgggagctcyggagcaacccaaatccatccctgccctcctctgctcagacctcctccgtgactcccactgtcttcaggataaagtccatggctgcccagaactctagggt

SEQ ID NO: 175136 - DNA, 201 bp, Homo sapiens
aatactctcagcggcttcctattgaacaccaagcaaagactccactctgtcaccctccactcaggcaccttctcccttcgtgggcgctgagctttggcccrgcccgcccgctaccatcacactggaccacctcccacctttgcctggctgtgtcccttccggcccgccatgtccttggcttggttttgtcttgcattgctc

SEQ ID NO: 175137 - DNA, 201 bp, Homo sapiens
gaaagatcatccctcttgaaggccaaaactaaggaacacattgacctcagtgccttgtccaaactcctctccattctagaaacactctctcctctctctcygtctctctttctctctctctccccctctcccctctctctactgcatgttttcttttgtgggaaaatgaaaaggacgtaactgaacaagcttccctttgcc

SEQ ID NO: 175138 - DNA, 201 bp, Homo sapiens
acagctgagcgaaaagtggctcagatggaacttggcacatcatgaatgctcaaaagatattctcttccttcctccccctccacccaaaaatactctcagcrgcttcctattgaacaccaagcaaagactccactctgtcaccctccactcaggcaccttctcccttcgtgggcgctgagctttggcccggcccgcccgcta

SEQ ID NO: 175139 - DNA, 201 bp, Homo sapiens
ctattccgaggatgctcctaaattcaggctgcctctgaacttcccttggcctcagtttccccatctataaaatgagagtgatgaaaatccctcctgccccrccttgcagggatactgggaagactgacaagagatgacacttgcaaaagccctttgaaactgcaaaaggctgaaccgtgcaagtgattatgatgaaggtaa

SEQ ID NO: 175140 - DNA, 201 bp, Homo sapiens
ttgtccacaaggtggaaaaagcacaagattggagccacagaccagctcccatcccagctctgccttcctgggctgaatgcagaggtgaccccctgagctgmtgccctatctgtgaaatggggtgaggctgaccacctcacagactgtgacagctgagcgaaaagtggctcagatggaacttggcacatcatgaatgctcaa

SEQ ID NO: 175141 - DNA, 201 bp, Homo sapiens
tgcagccatggggctattccgaggatgctcctaaattcaggctgcctctgaacttcccttggcctcagtttccccatctataaaatgagagtgatgaaaawccctcctgccccaccttgcagggatactgggaagactgacaagagatgacacttgcaaaagccctttgaaactgcaaaaggctgaaccgtgcaagtgatt

SEQ ID NO: 175142 - DNA, 201 bp, Homo sapiens
caggacaggacagacagtaccatccacggaaaccacagtgttccctgagcctgggctcccatttcctcccactcatgggatagctggcagctccccaccaygctctggcccccctttctctccttggggctgccccagacagctctcccaccaactttgtccacaaggtggaaaaagcacaagattggagccacagaccag

SEQ ID NO: 175143 - DNA, 201 bp, Homo sapiens
tcccggctgggaaagtgacttagccctagaatgcctccagctctaaaatgtgtgaaagacgaaaaggttatgaaggtgataaggcaggggaggagttggasctgaggagggggtcagtcctgccttccttctctcagcccttcccctcaccgtcctgggcccaggatggccagctgtccatgactgcggggcagggccact

SEQ ID NO: 175144 - DNA, 201 bp, Homo sapiens
tgggtatagtggcacacatctatattcccagcaactcaggaagctgaagtaggaggattgcttgagcccaggagttcaacgttgcagtgaaccaagatcaygccactgcactccagcctgggcaacaataataataacacattactactaactcccaacgtttacacagtgattttccagtgcctttcataaacatcacct

SEQ ID NO: 175145 - DNA, 201 bp, Homo sapiens
aacctacctcagggggctgttgtgagggggacactttgcctactgcctcgtgctctgtgagcgtgtgttattaactgcattaataacaataataatggaargactgtgtctgggctgggaatcgttttggctttgtttagtgcttgtgcctggaggcagataatagcccccagaaatagcctccatcccttcttcacagcc

SEQ ID NO: 175146 - DNA, 201 bp, Homo sapiens
gaaagaaaacagttaagcaggctcaagcaatacagtgtgaagtgtactacaatctgggaggcacctgggagtcaggagcatttatgcagtctaggtggtcmggaaaggcttccaaggaagggaaactgaggctgaacaggacagcagctgttagggaggcaaaggcccaggtagtgaagagtgttctgaacagacacatgg

SEQ ID NO: 175147 - DNA, 201 bp, Homo sapiens
agcttccacaggcagtagacccaacaccaaatatttattgagtgccttctggatgccagacactgcactaggtacagaagagacatagcaactgcccacakgatgctctcagaatcctggggaaagaaaacagttaagcaggctcaagcaatacagtgtgaagtgtactacaatctgggaggcacctgggagtcaggagca

SEQ ID NO: 175148 - DNA, 201 bp, Homo sapiens
tcgaccctttgaccccattttaaaaacccatgaaatggggataataataggacctagcttgtgggttatgtataaggatgaaattacgctgtacacataamgggcttatcccatgccttatacttaaattgggagctagtgtcaccaccaccaccaccatcatcactatcatcatggttactattattgttattattatta

SEQ ID NO: 175149 - DNA, 201 bp, Homo sapiens
gtgtcaaagtccactgtgaactccacgttgctggagcttgtccagttgggagaggttccctgagcccctgtcagattcggtggcgggcccatgctggacastgctgagggtacagaaatgaagctggcgccatgcctgccctccaggggctctcaatccaggtgaaagacattaaattagagtgcactgggagaacaaggt

SEQ ID NO: 175150 - DNA, 201 bp, Homo sapiens
tagttcatttagtctctcagccatagagtggtaggtcacatgatatttggatgaggcagcaagagcctgagaatcttctggggttgtggctgagggaagtygtcccagcttcaccctcactctgatgcctcattacaaagaggggaaactgggcagtggagggcagtgcatgcatctcaaagaaaaactatgactgctgat

SEQ ID NO: 175151 - DNA, 201 bp, Homo sapiens
atgggtctgggggtgccacacaggggaatctggcatccccccaagaggttgagccagcagacagcccaggttggaggctaccttgtccccgtgacccacarcacccctctaaaagccctcccaatccctgtgtccagggatcactggccagggaaatctctgagggggcgggatatagctttggaggaagctgtcagggaa

SEQ ID NO: 175152 - DNA, 201 bp, Homo sapiens
gattggaggcagggagtaagttaaattttcataggagagtcaccatttaacaagtgtttcctcgttgccagaaactgtgctagctctatctcaatccttasaaaaccctgtgaggtaggctgtagggttgtcttcatgttggggagggtcaaccaaggcacagaggattaagagccctgcccaagtcacataactagtgac

SEQ ID NO: 175153 - DNA, 201 bp, Homo sapiens
tccacccgcctcccacagtgaggaggtgaggggttctcccagcctccactattacctcgcaagggcaggagtctgatcttaaaaccggcacccccctcccstgctgcttgctccagcactggctccaacacctgggcctctccctccaggcccctgagctaattacaggcttccctaaatcattgtaaggaaaagctaatt

SEQ ID NO: 175154 - DNA, 201 bp, Homo sapiens
ggggcaaagactccacctaaaaatgtgacctaatttcatggtgtcaaagtccactgtgaactccacgttgctggagcttgtccagttgggagaggttcccygagcccctgtcagattcggtggcgggcccatgctggacagtgctgagggtacagaaatgaagctggcgccatgcctgccctccaggggctctcaatccag

SEQ ID NO: 175155 - DNA, 201 bp, Homo sapiens
gggcatgggaaagtcagagctgagttccctttgaaatatggcactatggggtacatgctggtctgggagcgattggaggcagggagtaagttaaattttcrtaggagagtcaccatttaacaagtgtttcctcgttgccagaaactgtgctagctctatctcaatccttagaaaaccctgtgaggtaggctgtagggttgt

SEQ ID NO: 175156 - DNA, 201 bp, Homo sapiens
acacctgggcctctccctccaggcccctgagctaattacaggcttccctaaatcattgtaaggaaaagctaattaaatcagggttggccattaattttctrgctaaggacaggcagccgacacctctcttcaattccagaatccagaaaccatggcttggagcttcctttgaggttgggaatagagttttatctgttaggg

SEQ ID NO: 175157 - DNA, 201 bp, Homo sapiens
ctgggaagcaaggtgagtgatccccaggtgccctcaggacagttgcaggcaggctctcaactgggcagagggcccctgtgcaagccagagtcagcactgcygggccaggggcagggagggggcggcagatcccactgattaggaaccagagcaccagccccgtctggagtttgaaaccagaggcttgtgagtaaatccacg

SEQ ID NO: 175158 - DNA, 201 bp, Homo sapiens
cggggcagggcctgtgatgcagctcattagttttattgggtaggtggatgaacagatggatggagagattgatggattgacagatggacagacagctaatrgtcaagcagacagatggaaggatggacgaacggatggatagacggatggatggttggatggatggatgagcagaaatggaaggtttttcctgccatctaa

SEQ ID NO: 175159 - DNA, 201 bp, Homo sapiens
accatggcttggagcttcctttgaggttgggaatagagttttatctgttagggctgattttaggaagagcagcatgtcccagtgaccatgagggatcaggstggggacctgaaaaactgggctgcagccaaatgtatatggtaaagggtatgaggaggtgaagtcagatgtccctgcacccaccaatagcagttgtatgat

SEQ ID NO: 175160 - DNA, 201 bp, Homo sapiens
ccaaaactcaaggtggcccggaattccggggaaggaaggttgctgttggcttgcagtcaaggcaagggggttataggacttccccaaaggacctgagctcyttccctcattttttaccagatgtttattgagggccttgtgcacgccagctccctgctaggcaccaggggatttagtaggactgaaataggcctctcccca

SEQ ID NO: 175161 - DNA, 201 bp, Homo sapiens
aaactgagtggatctgattcccagggaaaacccgaaccaaaagttgtgcagaaatcacttgacccagcctgcacatcctgaccatggggttgaggttattrgggggctctgtgtggcagagtgagcagatgttaaacagcaggaaaaaggatctgagtgtctctcttgctctcctcatagtcccagtgcccggggcagggc

SEQ ID NO: 175162 - DNA, 201 bp, Homo sapiens
aaggccggtggtgaccactctgtgggcctcaggatccctatctgtaaaatggaaagctagggctggacacaggaatgcagcggcacctccagccctgatgygccgcaagtccacataaaccagccccaaaggcagatcccaaagggaattcccagaagttttctgggcccagcatcctctggggagtatgtgggagatatg

SEQ ID NO: 175163 - DNA, 201 bp, Homo sapiens
gaaaagagatggggagagggatgagacccaggaagatatgtggatttgggaggatggaggctcacttttgcttgcgagaaggaaacttgaagattgaacarggccaagaacattcttaatttggaacctatcattccatcactttacccggaagtccataaccccactactccattcacctcatgcagtgaatacgtttag

SEQ ID NO: 175164 - DNA, 201 bp, Homo sapiens
ttagggccagggagttggagattattttgagccacagactgagtcacaaaagcaaggcaggactttagaacccaaaaccaggaaagtgtgggctacaagasgaaggaagcctagagatggaggaacaggagccccaaagcacgaggacaggagttctgctcatttaaaattcacagcccccaccatccgctcattcatctc

SEQ ID NO: 175165 - DNA, 201 bp, Homo sapiens
ccagccctgatgcgccgcaagtccacataaaccagccccaaaggcagatcccaaagggaattcccagaagttttctgggcccagcatcctctggggagtaygtgggagatatgacacccttgtgggtctaaggaacccatcaagactccatcagcatcaccatctcccaagggcggccagttcctgtctgtcctcctcctt

SEQ ID NO: 175166 - DNA, 201 bp, Homo sapiens
gggccagcgagctcagggaaaggggatgaggctgggaggccagccaccagggtgacctggagtaagtcacttcacctctttgagtctcagtttccacatartgcccatggggatttccttccttgatcctcataagaggattgcccatgagaaacagtgtagaccacatgtggcatgggtcggcccagaaggacacagaac

SEQ ID NO: 175167 - DNA, 201 bp, Homo sapiens
agggactgtcagcgagcccagccgggcaggatgcactgttataacctcgtgtggtcaccaagtgaagctctccagcctctgctgggcttgacacagtctcwtggcatgccagggctgcaggggtcttccatgcctcccagttctcagaggggtagaccgagacccagagagaccagcctaaggttccctccagcatgtgtt

SEQ ID NO: 175168 - DNA, 201 bp, Homo sapiens
atcttttcccagtgctagggataactcaggcaaatgagacccagtttcctgtccctggggagtaccccagccagatggacaacacagatgcatataaaaakgttaattgcaaaaaactcttcttggggcatggggaaaagggggacggagggaaaatcaaggaaggcttcatggaggaggggctgctggagctgagtcttg

SEQ ID NO: 175169 - DNA, 201 bp, Homo sapiens
ttcctgtccctggggagtaccccagccagatggacaacacagatgcatataaaaaggttaattgcaaaaaactcttcttggggcatggggaaaagggggayggagggaaaatcaaggaaggcttcatggaggaggggctgctggagctgagtcttgaaggatcagtaggagttctccaggcagagaagtggaaagggaagg

SEQ ID NO: 175170 - DNA, 201 bp, Homo sapiens
cctcagtgtgtggacagctccttcacatgttgtccttaacacccacctccacctccctaatcagcactgtgcccttgaggacagctcccagggaagccagwtccccactgccagctttgtcctccccaggggtactgtctttcagcaccaggaccacgtgggcagttctcactcccagcctaggttagtcaacctgctggg

SEQ ID NO: 175171 - DNA, 201 bp, Homo sapiens
gtttacccagtgcctccaggcaccccatgctccccagcccctctcctcactgttgccctctcacctgccccttctcccagaaaatgatgaaggacaacaayctggtacgccacctggatgcctgtgagaccatgggcaatgccacagccatctgctcagacaagacaggcacgctgaccaccaatcgcatgacagtggtac

SEQ ID NO: 175172 - DNA, 201 bp, Homo sapiens
gtccctctctgtgtcaggcatggaacagggcgctgaggaaactgaggcaaaccagacgtggtccctgctttcaggagcttccagtccgggaaagaacaccrcttaaacactctgcagaaatctaggtctgaatctagaaccttgcaattctcagacttatttgtgttgtcttcactaagctattttagtaaataataatac

SEQ ID NO: 175173 - DNA, 201 bp, Homo sapiens
gaggccaaggcaggtggattgcttgaggtcaggagttggagaccagcctgggcaacatggtgaaactctgtctctactaaaaatacaaaaaaaaaaaaaaattagccggtcatggtagtgggcacctgtaatcccagctacttaggaggatgaggcaggagaattgcttgaacccaggaagtggaggttgcagtgagctga

SEQ ID NO: 175174 - DNA, 201 bp, Homo sapiens
tctgagccagaaagtggtgggtggaggggctggggattgaacttgcgccaaaacctacctcagggggctgttgtgagggggacactttgcctactgcctcrtgctctgtgagcgtgtgttattaactgcattaataacaataataatggaaggactgtgtctgggctgggaatcgttttggctttgtttagtgcttgtgcc

SEQ ID NO: 175175 - DNA, 201 bp, Homo sapiens
tttgggaaatgtaagccaactgtgtcttatggagcgggagatacgaccattgtcgttactgttgttgctgttgttaggaaaggtgtgaccgtgggccagcracttcctctctctaagaatcctttctccctgttgcgtgtggtcaaatcctcaagggccaggaatgtgaagacagccccctgtgtcttactaccatagaat

SEQ ID NO: 175176 - DNA, 201 bp, Homo sapiens
actttgagatcctgagaccccagagaccaagaggctagattgttgcaagcgcacacacacacacacacacacacacaaaagcatgcacgcacacacacacaggcacacacacacacaacatcgggatatcactcagatcctacaaggaaagggacaaggtgggtgataccacttaaaaagtgaaaacagataccttgctta

SEQ ID NO: 175177 - DNA, 201 bp, Homo sapiens
catatgggtgggacctagagtgcaaactctgacctaggcctattttttagctttgtattttaagataatttcaaactttcagaaaagttgcaaggatggcrcaaagaatacgggcatgcccttcactctgattcggctgttgctaaccttttgccgtctttgctctctgacaaatctcactctcctcctcatcatgcagat

SEQ ID NO: 175178 - DNA, 201 bp, Homo sapiens
aagagcctcagtctccccattgtaaagtggaggctgcaagatcaataggttgtacctcatcaatttgacaggctagtggcctctcagaggaagatgaatayatggtggtgggactttgggggctaatttatagctctgagaagaagaggccataggaaggtagggacctcagaagggaggagttcctgcaggcccaagtca

SEQ ID NO: 175179 - DNA, 201 bp, Homo sapiens
cactttgagatcctgagaccccagagaccaagaggctagattgttgcaagcgcacacacacacacacacacacacacaaaagcatgcacgcacacacacacaggcacacacacacacaacatcgggatatcactcagatcctacaaggaaagggacaaggtgggtgataccacttaaaaagtgaaaacagataccttgctt

SEQ ID NO: 175180 - DNA, 201 bp, Homo sapiens
cctccactgcctgccccacagggctgttgtggggaccacaggcatgcacacgtgtgactgtcctttgcaaacaaaccctgcggttgtgaggtgctgtatgrtgtggaaggaatgtggcatctggaggcagaatgcccaggttccagccctccaacagctcccactgtggcctctgcccctcagaacctcagtttccccatc

SEQ ID NO: 175181 - DNA, 201 bp, Homo sapiens
caaatcttggagtgcatgccccatggacccaacatgtaagagatcagagctctcactgctcatctttcagcatcagacacaacttacgttgcacaagcttstcctcggagccagagcttagagttgccatctcatctgaccttcccagtagccgccattagcccttttcacaaatgagaaaactgatgcccagagagaaga

SEQ ID NO: 175182 - DNA, 201 bp, Homo sapiens
atgacttggtttctgcatctgtgcagggagaggctggcatttacgtgcctgaaaggaatcactggagagtgtctgtctctctgtaaagcactttgagatcytgagaccccagagaccaagaggctagattgttgcaagcgcacacacacacacacacacacacacaaaagcatgcacgcacacacacacaggcacacacac

SEQ ID NO: 175183 - DNA, 201 bp, Homo sapiens
cttctctgagcccatttccctgggaggacaataggagtgtcattcatgatatgatgtaagtggatcccctagcacagtgctgcacagggaggctcaacatragttggttcccttccccattccttgggtgaggcctggacttgggggtgaaacagactgggttccaatcccaactctactccttagccagggacccccaac

SEQ ID NO: 175184 - DNA, 201 bp, Homo sapiens
tgcctcatcaggccgttgtgtcggagactgaactgtgcggattccaagatatacattttgacatttctgaagccaggttgtgcctgacaactggtgttacrccacagtggaaccagccatgccttttatttcttaaatatacgtaaagtagtgatacaggttagagtcaagaaaatatgataaataagatcagttttataa

SEQ ID NO: 175185 - DNA, 201 bp, Homo sapiens
aggacatgccctaggctggtctcccttagacagtgtcaagacactattgctgagatatggggcctaagccagctccctccccactctacagatgacaaaaytgaggtccagagaggagaggggctggccccaaggtcacatagcaatcagaattagacaccatgtcccaggtgccctcttctgggtccagggctctctctc

SEQ ID NO: 175186 - DNA, 201 bp, Homo sapiens
ttagtggggaaggacaaggggactggggacagacagaaggcattccatgtctcagcagggatcccagtgagtcccgtgaagcctgggctgctggggtcagyattggttttggcaggattcccagtcatcttggaatggtggcctgtgagcactgagatgagaaaggggtgactgcaaaaagccactacaggccctctgagc

SEQ ID NO: 175187 - DNA, 201 bp, Homo sapiens
gggggacactttgcctactgcctcgtgctctgtgagcgtgtgttattaactgcattaataacaataataatggaaggactgtgtctgggctgggaatcgtwttggctttgtttagtgcttgtgcctggaggcagataatagcccccagaaatagcctccatcccttcttcacagcctctccccactgaaggaaccctttta

SEQ ID NO: 175188 - DNA, 201 bp, Homo sapiens
ttagtaaaggagagaaccaataaagtaataagcaagcaaatatgcaaggtaacttcagataatggtaagtcagatgaagatgttccaccattgtagtgagrtatagagacctgcaggaaaggcacaggaatctgagttcatcagggaagccctgtctgaaaaggttgcatttgacctaaaatcagaacagtgagaagaaaa

SEQ ID NO: 175189 - DNA, 201 bp, Homo sapiens
tttgtcgggctccttgctgagctcagagatgaatcagctccagaaacaactcctgctgggaggcggaggcagccccaggtagaaggtggtatacgactgcrggtgccctgcctgggggctaggccatgaataacttccaggaccaagactcagcctcaccaccacagtatttagagcttccagagcctcagtttccttatc

SEQ ID NO: 175190 - DNA, 201 bp, Homo sapiens
caacataagttggttcccttccccattccttgggtgaggcctggacttgggggtgaaacagactgggttccaatcccaactctactccttagccagggacycccaacaagcttccccccctttctgattatagccccagctcatgaggttgtgttgaaatctggaacctccagaaatgtccatttcgccctctcatccttc

SEQ ID NO: 175191 - DNA, 201 bp, Homo sapiens
tttgaaggatgaataggagctttccaagtccaattgtagagaacgggccctcctagcagagggaaccatgtacaaaggcacagaggtctgaaggagtgtgsaatgtcctggaaatacaaacaggtctgcaggacaggatggtaggagtgagaatagaggtgggggcatttatttatccagcatttattcaaccaacaattg

SEQ ID NO: 175192 - DNA, 201 bp, Homo sapiens
ggtgctcaggccaagtgctgggactatctccacccccaacccaccagtgattcaggcccagcccctgcccatgggagcccctagcctgaatgtccttgggrattcaggcctaccaacagctaatcccacagtagacgtgtgaggaaggtgttgtgagaaagccaaggaaggagcagagctccctggaggaggtggcgttga

SEQ ID NO: 175193 - DNA, 201 bp, Homo sapiens
caatgtaatgagactccaacagaagaagaggacagcggcaaactgccttttcagaccctaaagcaagtgtaatattggctgcctttgttctggaaaaaaaraaaaatacctcacttactctcttttctcatgaattagagaaaattccttgtcttttctcatcaattagagaaaattctcttttctctcctctgtgccttg

SEQ ID NO: 175194 - DNA, 201 bp, Homo sapiens
gaacacaccaggcagaggaaacagcaggggcaaaagcccagaagcaggactggctggaggctgcagtgaaatagagagagtggagaggccacaggtcaggmctcatgggccatggtcagcatttggaaattactcccagtgtgatgaggattctctgaaacggttttaagcagtgagctgatcatgtttacatttttacaa

SEQ ID NO: 175195 - DNA, 201 bp, Homo sapiens
aaaatcatgcagaggcagcagcaggattagaaccagctcatcttcccaacctgcctgggcaatgtaatgagactccaacagaagaagaggacagcggcaaactgccttttcagaccctaaagcaagtgtaatattggctgcctttgttctggaaaaaaagaaaaatacctcacttactctcttttctcatgaattagagaa

SEQ ID NO: 175196 - DNA, 201 bp, Homo sapiens
ttgagcttaaaactgaaaagcatctaatgaacactcatataattccattttgttgttctgtcattgggttcagggtaaacctgaatggcagattttcctgmaagctaaagtcatctgttggcatggtttgggggttcaggggccaccctgcagacagctccagaggcagtgatgaagtttctgctataggttagcctttta

SEQ ID NO: 175197 - DNA, 201 bp, Homo sapiens
acatgcccacttgagcgagggttgcagggccccaacctcagccctccaggccttgtgctgtgtaccttagctccagtgttgagctgtacatgggccttctwtgggcaccatcttggttcctacaccctgggagctctaggcattctgtccctgatggcaaaccttccctggtaatcgcacctttaagggaatgttccagcc

SEQ ID NO: 175198 - DNA, 201 bp, Homo sapiens
aaatgccagttcacaccaattaggatggctatcaccaaaaaacagaaaataggtattggccagaacgtggggaaattagaacactcttgcattctagtagractgtaaaatggtgcggctgctgtggaaaagcatatagtggtccctcaaaaaaatcaaacagaattattccacgatccagcaattccactactgggtaga

SEQ ID NO: 175199 - DNA, 201 bp, Homo sapiens
ggttaattgcaaaaaactcttcttggggcatggggaaaagggggacggagggaaaatcaaggaaggcttcatggaggaggggctgctggagctgagtcttsaaggatcagtaggagttctccaggcagagaagtggaaagggaaggcatccctggcagagggggtggcacatgcaaagacgcagaggcacggaaatgcaag

SEQ ID NO: 175200 - DNA, 201 bp, Homo sapiens
gtttggaggaatgtaggcagctccccaaggctgcagggagttaggaaatggccaggggatggcaggggaggaggggggaggacagttaggagtcaggattkatgggcgggagtgggcagcatgtatgactccgcattaccaaggaggtattagctctgaggggcagcgcagatgagaccatggccttgtgcctgggaaagg

SEQ ID NO: 175201 - DNA, 201 bp, Homo sapiens
ggtcccctggatccacagtccacggcccgtcaaggtctggggctagagatcctgagttgtgtgcttcaaacttgggtaactttaggcaggcgcagagagargggcctagggtttgagtgggaccctcaatcttgctttggtcctcactggctctgtaactttcacgtaaggccctgtggtctccaggtctcaattttcttt

SEQ ID NO: 175202 - DNA, 201 bp, Homo sapiens
accctgacctgtcatttccaaccttcctggagttgcaacactagtgccattgtttgtctaatttcacaacacctctgcctgtccaataccccctgcccccyaacacatcctggaaggccaggccagatgacccaggtgtatctgctgcaggaagagaaggcaaaggggacggggcaagggacagatgtctgcagccagatt

SEQ ID NO: 175203 - DNA, 201 bp, Homo sapiens
gaaccaactcagttggtggaatcaggaaggactgtctggggaagcagaatttgagttggacttcgaagaatgagtagggtgggcctagaactggggtatamccacaaggaaaaaccttcaaactttgctgttcaatatttgcactgcctcaggagataggggcatccagtcactgcggggtggatgcaggcgctgaaagac

SEQ ID NO: 175204 - DNA, 201 bp, Homo sapiens
aaagcctggaagtgtggaaccttacaaggtgcttattatggcaggagggaaggttacaaggaacgggtggaaggatatgagcctgaagaagcaggcaggcstgtgtgtcaggctaaggattttgaaccttgttctgagggcagtgggagccaagcaaggcacctagtcaggtctgccagggtggctgcgtggctccggtct

SEQ ID NO: 175205 - DNA, 201 bp, Homo sapiens
agggtgggcctagaactggggtatacccacaaggaaaaaccttcaaactttgctgttcaatatttgcactgcctcaggagataggggcatccagtcactgsggggtggatgcaggcgctgaaagacatgggatctggaatgtcaaggagatgggaactcggccaggtggcagttctagtcttagggtctgaaaaccaaaat

SEQ ID NO: 175206 - DNA, 201 bp, Homo sapiens
taggggtcaccagcactgtagttattccagttgtaggcaagcaggggattgctgagataaagcgcatgtagaccaggagttataagctcacatacctacarggacagggcacggggacaagaaggtgctttggagccttcagtaggaagtcctcacctggtgtcaccactccccagcttgtaaagtgtggggactaggagg

SEQ ID NO: 175207 - DNA, 201 bp, Homo sapiens
ccaagctgtgatgatacgtttcagacgtggggtggtgacatggggacactgaatgcatgagggttcaccatgagccatggacatgctgggccagggacacwgagacaggtcagcccgctccccacaaggggctcccagaaagacagtgatagtgtagtgtgtccagaaggccatggaaagtctgcccaggaggttagagaa

SEQ ID NO: 175208 - DNA, 201 bp, Homo sapiens
ctgctctgtcagaaccccagcagggagccttgcctggcctctgactcacacccttgccccagtggaggccaaggccttgaatgaccacccggcccttgacrtcgtagcttcgcagcatcctccctgcgttgaggccaccctgcgggctaaggggcaggtgggcacccttccatggggctgggggctgaggagcaaggaggt

SEQ ID NO: 175209 - DNA, 201 bp, Homo sapiens
tttcttagcatcaactccaaagtgattttgatttataaaatcagtggtggagagaaggactaggatgagcaagttggatgtggatggtgatggttgctgastttagcagaaacaaagcttcacctctgtggaccttgacactggcttcaaggtccttctgtcccttgtcagctgaccttcttagatcactgtgggtcaaaa

SEQ ID NO: 175210 - DNA, 201 bp, Homo sapiens
gcactgcactgaatccccagtgcctgcatggactaatgagtcaattacacattcacagaagacctgtttacagtgcctcagggacgtctactggggagggycattcatggtggaaaatccaagacatcttcctctcagaagggtgagttgacttaggggtcaccagcactgtagttattccagttgtaggcaagcagggga

SEQ ID NO: 175211 - DNA, 201 bp, Homo sapiens
gcccttgacatcgtagcttcgcagcatcctccctgcgttgaggccaccctgcgggctaaggggcaggtgggcacccttccatggggctgggggctgaggascaaggaggtctcagcatggcctactggtgggagacccacctcaggcgctcccaactgtctccctcccgtggcccctctgcacggccgggttctgattttg

SEQ ID NO: 175212 - DNA, 201 bp, Homo sapiens
aggccatagcaaaatagttcatcctgaaaacattaattttactaagaaactctcatgaagtgagaagaagtgagttagagataaacaatttgatagttgaratgggcttctggacattaaaatctgaatataaaaaataatttttcttagcatcaactccaaagtgattttgatttataaaatcagtggtggagagaagga

SEQ ID NO: 175213 - DNA, 201 bp, Homo sapiens
cacctgggtaactcagtggtgtttctcaccaagttggggcatctgggaggagaaaagtatggaggcagagggaggaggggtgataactctagcttggaccrtgttaagtttagatgcctgtgggactcccaagggaagacctgccacccagtcaaacatatatctctcaggggagggagggctgaagacagaatgatacct

SEQ ID NO: 175214 - DNA, 201 bp, Homo sapiens
cagctgagggatagggcacctgaggctcctccctgccccctgcagggtcaggatgggaaaatgcagcagggggcctcaggactccctgagggtgggttgckgacagcagcaacccctttctagccaagtagctattccacaccacggctgtcctctgctcacccaggttgggggttgggggttgggggggtgctctggact

SEQ ID NO: 175215 - DNA, 201 bp, Homo sapiens
accagtcagattgaataagggcccaccctaacgacttcattttaacttaatcacatctttaaaaaccctatatccaaatatagtcccattctgaagtggcrggtgttaggatttcaccatatgaatttgggggacacaattcaggctgtaacagggacagcttgttcctggcaactgagaccatttattttgcagagcact

SEQ ID NO: 175216 - DNA, 201 bp, Homo sapiens
gtggaggctggcttggagagaagagatggcagctagggaggtgggtggatgtcttaacagggctccaggcagaaggtgatggtgacctgggccatggctayggggtgagaggggaggagagatcctagaagggtcaaatttatgcagagattgacttggagagtgtgagggaggtgaggccaaggtgcctgccagctccct

SEQ ID NO: 175217 - DNA, 201 bp, Homo sapiens
gctgagggatagggcacctgaggctcctccctgccccctgcagggtcaggatgggaaaatgcagcagggggcctcaggactccctgagggtgggttgcggmcagcagcaacccctttctagccaagtagctattccacaccacggctgtcctctgctcacccaggttgggggttgggggttgggggggtgctctggactgg

SEQ ID NO: 175218 - DNA, 201 bp, Homo sapiens
ttcacttctaggacatttgccctgaggaaataacccaaaatgtatacaaagattgatctacaacgatgtgtatcacagcagtatttatattagttaacaayaggaaacaatgccaatggccagcagcagggaactgggagtcagttgtggcaatatagatcacagaaggaagattctgggcagccatcgaaactgtttgag

SEQ ID NO: 175219 - DNA, 201 bp, Homo sapiens
tctttatttcctgacaagctaaggagccccagctctggttcccagaactgttccccagtttccccccagcctgccctctctggtccatgacttgtcaggcrgggaaaaagaaagactttgagcctaacagaggcaaggaggctattgcccagggatggtgaacaggccagctttggaatcagaccctgggctccagcctca

SEQ ID NO: 175220 - DNA, 201 bp, Homo sapiens
catgtgggtgactccacccctttgtgccttcgtttcttcacctgtaagatgggtgtccactccacagaatgctgagcaaacagcgaggccacctcctttcsttcccttcctaagtaaccaggctctcacctgaagggcaacttcattttagccggggatggctgtcactttcttgtattgactataggcgggtagattggg

SEQ ID NO: 175221 - DNA, 201 bp, Homo sapiens
ctcaagcaaacctcccatctcagcctccagagtagctgagaccacaggtgcataccaccacagccaactgattttaaaaaaaaatgtagagggctgggcayggtggctcacgcctgtaatcacagcactttgggaggctgaggcaggcagatcacttgaggtcaggagttcaagaccagcctggccaacatggcgaaacct

SEQ ID NO: 175222 - DNA, 201 bp, Homo sapiens
ttgcattggtcttcgaattgatggtggttgctgcatctggactgagtgtgagtatctgggaaaataactgcatttgatatcaggcagacctaagttaaaayctctaaccagctggtgaccttaaccgcttacgcctccatttcctcatctataaaatgggggtgatgatacctctttctttttgcctgtgtggattaatga

SEQ ID NO: 175223 - DNA, 201 bp, Homo sapiens
tgcatgcaggacatgggatcccaagagcttgcctgcaccaacaagcaggctggcgtgaggtctcctagggagggagccatccctgggctcccccagtgggrgtgtctcagccagcctggcccttggaggctcctgatggagatctcatggtcagcatctgaggagactccgcatctagaacccaagacagactcccaaacc

SEQ ID NO: 175224 - DNA, 201 bp, Homo sapiens
ggggaaactgaggcccagagaagagaagtggcttgtctgcagtcacaaggcccttccactgtgcctctcctcaccttgactgaccccttcctatcttgtcraaatcctgccagttcaaagtcttcctctccagaacgtctggcttaatctcccacctggcctaaaaactgggcggtaataatgacacagtacatctacccg

SEQ ID NO: 175225 - DNA, 201 bp, Homo sapiens
gaacagttctacatcttgattgtagtggtggtggtgacacaaaactacagataacatttcatagagctacacacacacacacacacacacacacacacacatcaaactgctgcatgcaagcgctgtagattgtatgatgtcacaagactggtttttatggcatgctgcagtagtgcaagttaaacttggggaagtctggag

SEQ ID NO: 175226 - DNA, 201 bp, Homo sapiens
gtggccaggggatgagagaagagaagaggtcaggatgtgagtgaggcctggtcacagaggacttcataagtggagctaagaacatggatgttatcctgagrccaaggggggaagcaggaaaacgacattccggggatggctgggggacggaactggttcagacatgggtgttagagagatcctgaggttgctgtggggaag

SEQ ID NO: 175227 - DNA, 201 bp, Homo sapiens
tctaatctaaattgaatctcgaacgccattcatctctcacaccagcctctgttgtttctgctcccaaaaatatgtgtgttaattttcagcagaaaggaaargagaccacaagattcagctcctgggaagggcatgacaggtaggctggaccaggcaagctgttccacctgcaggtcctcaaaacccctgtctttggatacc

SEQ ID NO: 175228 - DNA, 201 bp, Homo sapiens
ggaacagttctacatcttgattgtagtggtggtggtgacacaaaactacagataacatttcatagagctacacacacacacacacacacacacacacacacatcaaactgctgcatgcaagcgctgtagattgtatgatgtcacaagactggtttttatggcatgctgcagtagtgcaagttaaacttggggaagtctgga

SEQ ID NO: 175229 - DNA, 201 bp, Homo sapiens
tctgcccacagttgaaaaatctgggagagtgttggagtgtttttttaccttcacagtaaaagtgcatgcctttacagtttagagagcttcacacacattcytctgtgcttgggtttccccagcctagaggttattttgttcccattttatgaatgagaaaactgagtctccgaggggtgaaactggcccaagctcactcac

SEQ ID NO: 175230 - DNA, 201 bp, Homo sapiens
aagaagaagaagaagagaagcagaagaagaagaagaggaaagcaaatccataaaacaggcaaaaaaatcctgtgacaaggataaaaagacaaaaaaaaaaraaatcctgtgacaaggataaaaagctaagctatggactagaagaaaatatttgcaaaccacaaaaccgatgaggtactggtatctaacatatacaaaaaa

SEQ ID NO: 175231 - DNA, 201 bp, Homo sapiens
aaaccataactgagactacagaagaacgaattgttgggagacctgcactccaagttcaggcgaggtcaagagaaacactttgtaaagtacatgcccacttragcgagggttgcagggccccaacctcagccctccaggccttgtgctgtgtaccttagctccagtgttgagctgtacatgggccttctatgggcaccatct

SEQ ID NO: 175232 - DNA, 201 bp, Homo sapiens
gctagtgagttttgtttgaaatcatgaaatgcacccaatttctttttgacaacagctgccacatcttggaaggcaccagagtccagtgatcagagcctaggcacagggcctggatctgcctgtctggccctggacccaggccggccctccatgtgctcagcttcagtgtcttcatccataaaagggggtgaatgatagcac

SEQ ID NO: 175233 - DNA, 201 bp, Homo sapiens
aactctaataggtctgggcacatgcccttggtgagctagatgtcaagatttctatatgggaattgactttttaatgtttgtaacaaatttccatttttttwaaaacaccgggcagaccaaatgaaacctctttaatggcctgagactgcagtttgcaggagccagaattggctaaaaagagagaggaaggtaccccaagca

SEQ ID NO: 175234 - DNA, 201 bp, Homo sapiens
aagaggaagaaacaattccaatatattttaaggagctactattatcataatatcaaaaccagacaaagacaatacaaacaaaactgcagacttaacatccrtcatgtgtatacatgtgaaaatctttaacaaaacattaacaaacagaattcaacactgtgtaaaaagaattatgcatcatgaccaagtggggtttattca

SEQ ID NO: 175235 - DNA, 201 bp, Homo sapiens
aaaaggcacacatccccttgacgatgtgacttggttgcggtcttctaaacctagccaagagagactggttccttccaaaatatttcccctaaaccataackgagactacagaagaacgaattgttgggagacctgcactccaagttcaggcgaggtcaagagaaacactttgtaaagtacatgcccacttgagcgagggtt

SEQ ID NO: 175236 - DNA, 201 bp, Homo sapiens
gacagttatgtggccttcttggctcccttctccctgcacacagccttccagagactggggcccagctgtgactgagcacccagcacacgtggcactttatgtccgggttctcagtgaaccctcacacccatttcacagaccaggaactttcggtcaaagatccccaacagggccctccctgagcagccagtgttgaaattg

SEQ ID NO: 175237 - DNA, 201 bp, Homo sapiens
caaaccaggaatgcttcagccactctagcctttcccaagacctttggagtttctcttgccttttcacagcccttctccccacccatatcccttcatctgaycaaccctcactccttccaagctcacccaattacaactacacttctgccaggcgatccttcctgacactcctgtcttccttacagtagtgtccccaacata

SEQ ID NO: 175238 - DNA, 201 bp, Homo sapiens
cggccttcaatgactggagcaaagagaaacagttccggggcctgcagagccgcatcgagcaggaacagaaatttaccgtggtccgggctggccaggtggtscagatccctgtggctgagatcgtggttggggacatagcccaggtcaaatatggtaagtgtcccagccacagagccaggttctaaagctggattccggcag

SEQ ID NO: 175239 - DNA, 201 bp, Homo sapiens
aggtccgctcagccagacagtgcccctgaatatcagccagcctcagagggcagttagtgtattcctgctctcaccaggggcgaaaacaatctctggggtcmctttgctggaaataaagacgtgcagccccatggggcctcagaacaggggagaagaggtcagtggtcacctggatggcctggaaaactcaccttgagtccc

SEQ ID NO: 175240 - DNA, 201 bp, Homo sapiens
tgagagttttaacatgaagcactgttgaattttgtcgaaggccttttctgcatctattgagacagtcaagtggtttttgtctttggttctgttaatatgckggattacatttattgatttgcgtatgttgaaccaaccttgcatcccaggaatgaagccaacttgatcgtggcggataagctttttgatgtgctgctggat

SEQ ID NO: 175241 - DNA, 201 bp, Homo sapiens
tccctctgcctggccaccgccccatctgggaagtgaggggtccctctgcccggccacccaccttctgggaaatgaggagcccctctgcccgcccccccccsccgccgtctgggaagtgaggagcacctctgcctggctgccgccctatctgggaagtgaggagcccctctgcctggccactcaccatctgggaagtgagga

SEQ ID NO: 175242 - DNA, 201 bp, Homo sapiens
taatgatcaccattctaactggtgtgagatggtatctcattgtggttttgatttgcatttctctgatggccagtgatgatgagcattttttcatgtgtctkttggctgcataaatgtcttcttttgagaaatgtctgttcatatccttcacccactttttgatggggttgtttgatattttcttgtaaatttgtttaagtt

SEQ ID NO: 175243 - DNA, 201 bp, Homo sapiens
gctaatcggcttttgctggcagagtgagtgccctccaaggcccagagggttccttggtattgagtcagcaagggcagcaggtagggctgggagttggaatrgggtgcatatcccactcagtcactgtgcccttggctttcagaggccagtccaaggaaaaaagctcatgaaaaggggagaggtctaacttttaccatgtat

SEQ ID NO: 175244 - DNA, 201 bp, Homo sapiens
agtccctctgcctggccaccgccccatctgggaagtgaggggtccctctgcccggccacccaccttctgggaaatgaggagcccctctgcccgcccccccscgccgccgtctgggaagtgaggagcacctctgcctggctgccgccctatctgggaagtgaggagcccctctgcctggccactcaccatctgggaagtgag

SEQ ID NO: 175245 - DNA, 201 bp, Homo sapiens
tccctcccccctccccccaccccacgacaggccccagtgtgtgatgttctccaccctgtgcccaagtgttctcattgttcaattcccacctatgagtgagracacgcaatgtttggttttctgtccttgcaacagtttgctcagaatgatggtttccagcttcgtccatgtccctacaaaggacattaactcatccttttt

SEQ ID NO: 175246 - DNA, 201 bp, Homo sapiens
catgctgcagcaggggcacaaactccctgggaatctagcttcgtccaggcagcccagatgccgcaaaggcggtgagagacccaagcccatctggcaaagcrtcggcagcttgacttttctgatgaactttttataagtcctcaaaagttcacacttcccaagcgtctgcctactctctggcatcttcatttatctcctcag

SEQ ID NO: 175247 - DNA, 201 bp, Homo sapiens
ccacccactcccctcttccctccccttcctattctcttctccctaattgctccaggggcagcaggagttgttcctagggtcggacagcttccaggtggccraatccctaccccagcgatctgcactcccactttctagtcatcccttggcaccgcgtgacgagcagacagttctctggagacaatagctaatcggcttttg

SEQ ID NO: 175248 - DNA, 201 bp, Homo sapiens
gagtccctctgcctggccaccgccccatctgggaagtgaggggtccctctgcccggccacccaccttctgggaaatgaggagcccctctgcccgccccccsccgccgccgtctgggaagtgaggagcacctctgcctggctgccgccctatctgggaagtgaggagcccctctgcctggccactcaccatctgggaagtga

SEQ ID NO: 175249 - DNA, 201 bp, Homo sapiens
gtgaataaatgagccaggtgacaaatgctgtcaggggaggatgaggacagattgttcttgctgaataaatcaaggaagcctttcaggaagtgatagtaaaygttcttctgggtctctcaagactaactaaataagtcgacagagggttgggcatcctgggttcgaagccagatgtgccaagtcagaggcaaatgcccggca

SEQ ID NO: 175250 - DNA, 201 bp, Homo sapiens
aaggcacgtctcacatggtgacaggcaagagaaaatgaaagccaagcaaaaggggaaacactttataaaaccatcagatcttgtgagacttattcactacygtgagaacagtatgggggaaactgcccccatgattcagttatctcccactaggtccctcccacaacacatgggaattatgggagctacaattcaagatga

SEQ ID NO: 175251 - DNA, 201 bp, Homo sapiens
aaccccctgctggtgacagctcccccagtgccagagtgccaaaagagtgataggcacatagtaggtgtttagaaaatgtttatggctcaaccagttttgargatctttgttggataccaggccctggtagccatctgggaggcaggttcaccattgtactggtgaacatgcagacaggcccgaagaggccaagcggattcc

SEQ ID NO: 175252 - DNA, 201 bp, Homo sapiens
attgcgtccacatgcttgcaaagaaaccacccagcgctgcactatgcacattcaaatccacaatctagtgccacatccacagttgtgtgccacatctgtgkgtgcatgtgcacgtctagatgtcaggtctgctatgagcacataactgtgaatgagctgggtgacaaatgctatcagggaggatcaggtaaatgctgcccc

SEQ ID NO: 175253 - DNA, 201 bp, Homo sapiens
gccctcgtttgagtcctggctatatcacttcctggtgtgtaaccttgggaaggtcttatctcatactcatcactgagaaagcagttggggcagggctatgrgtgctgcagaactctgcagcctgttagtcctctaccaacatcattttgtacatgaaggattacctggctcagagacctctaggcacttgtcctaggtcac

SEQ ID NO: 175254 - DNA, 201 bp, Homo sapiens
cacttgccctgtggagatcttgtgatgattgaaggaaataatgcaaagcgcttatcatggagccctgagcaaacctcaggaagcaggtgtcactccccacrtggccgatcgctcctggtttctggaaaagtggccacgttcaacaccccacaattctagtatcctctacagcaacgcaggggtggacagtgtgagcatatt

SEQ ID NO: 175255 - DNA, 201 bp, Homo sapiens
ttgaagccgggaggcggaggttgcagtgagccaagatcacaccatcgcactccagcctggaggacaagagcgagacttcgtctcaaaaaaaaaaaaaaaaagtgaaaccaagacacagagaggggaagttacccgcccaaggtcacagagctggaaggagtctctagtgaggcccagacctagatccgctgtcccatttca

SEQ ID NO: 175256 - DNA, 201 bp, Homo sapiens
cgtccttcctctgagtctgttcagtgcagaagcccaggctgaaactggaagtggttaattcggacattctcagcccaagctgtgatgatacgtttcagacrtggggtggtgacatggggacactgaatgcatgagggttcaccatgagccatggacatgctgggccagggacacagagacaggtcagcccgctccccacaa

SEQ ID NO: 175257 - DNA, 201 bp, Homo sapiens
tgcccagatgcgacctcgtttaactctgtatggcaggcactatcattattctcaggctgcacgtgaaaaaaccaaggcccaggccgggcgtggtggctcayacctgtaatcccagcactttgggaggccaaggcgggtggatcacctgaggtcaggagttctagaccagcatggccaacatggtgaaaccccatctcaact

SEQ ID NO: 175258 - DNA, 201 bp, Homo sapiens
cttctgaagctctccacggcttcagctaaagatggcctgatctggggcaacctgtcataatgccaaggccctgcaaatgcttcccagtttcaccagctggytatcttttgggggtgatatgattatgcgaattttgcagacagagaaacttgcttagcggggtaactcatgcttcctgcctggtccctaaaggagtaactg

SEQ ID NO: 175259 - DNA, 201 bp, Homo sapiens
attctctagtgctttaccttactgggggtctccaagcatggggccccagccttgacccttgctctctctaaccatccccacgcacccgttgttcccatgcyttctgggtctgccatcttggtgctatttctacacggcctttattgaaaagcagagagttgacttggtcctactaggccttgattttgagtccttgtgggg

SEQ ID NO: 175260 - DNA, 201 bp, Homo sapiens
ctcttcctctccacactcagctcctcccaaggcagggccttgtctccttgttcatgcctggggctcagtgaggtgctaatttgcgtgggaactggtatttsccgtgccctaccatgtgccaggcacagtactaaggttcacctcttacataggttcatcctgagaacaagacgcaatgattatccccgttctgcaggcgag

SEQ ID NO: 175261 - DNA, 201 bp, Homo sapiens
tctctcagcagcttttctgggagactgaaaattggtcactattcctagaggtctacttggtactgactctttatttcttgcctaaatgtctggggactccrtgctgtggtagatgttagcaagggagtcaaccaaataaagtcctgtgggcctgcttccatcctgcctctcatagaaccctcacagccactctgggacata

SEQ ID NO: 175262 - DNA, 201 bp, Homo sapiens
aaagtctcttctctcagcagcttttctgggagactgaaaattggtcactattcctagaggtctacttggtactgactctttatttcttgcctaaatgtctkgggactccgtgctgtggtagatgttagcaagggagtcaaccaaataaagtcctgtgggcctgcttccatcctgcctctcatagaaccctcacagccactc

SEQ ID NO: 175263 - DNA, 201 bp, Homo sapiens
gacaggtcctttgaaaacacagatctgctcgcatcactccctgactgtaaccctccagcagcttcctgatgtcctgaggctaaaatccaagctctcctgayaatagtggtttagggtgcttcctgccttcacctctggcctctgatcccaccagccccctgttctctgtgtccaagtgatgctcagcttccatgtctccaa

SEQ ID NO: 175264 - DNA, 201 bp, Homo sapiens
gaggaagagtaggagtttactaggtgatgatagggagggaacagcattctaggcagaaggaacagaacagacaaaggccatgtggtgggggacaagcagargaaatgagagaatggggttcttgggggctgaaggagcaaggccaggccacccagtgctttgaagatcacatgtgggagtgttttctttatcccaaaagca

SEQ ID NO: 175265 - DNA, 201 bp, Homo sapiens
cacccaccccatggcagcagccagacaggtcctttgaaaacacagatctgctcgcatcactccctgactgtaaccctccagcagcttcctgatgtcctgargctaaaatccaagctctcctgacaatagtggtttagggtgcttcctgccttcacctctggcctctgatcccaccagccccctgttctctgtgtccaagtg

SEQ ID NO: 175266 - DNA, 201 bp, Homo sapiens
tgcccaaagtcacttgaccattaagatgcaggactggaacccagtccatctgacttcaaataccttgttttgccaccatatccctgcagaaataacattaygtttgtaaaagactggacaatggataaaacaatgtattcataatttcacttccctgccacggcatgtttggggtatttttgctctccttcctgcttttat

SEQ ID NO: 175267 - DNA, 201 bp, Homo sapiens
attcctctttcaaaggtgctgcccaaggacattaatggaagcagatctggcctggggagagaaacccagaaccccagaaccacaagggagcagaaggcgcycagcccatccttattcttattcattcactcattctctccataactgtttactgaggtcctgccaggtgccagccctgctcaggacaggcctggtcctgcc

SEQ ID NO: 175268 - DNA, 201 bp, Homo sapiens
ggacattccacattcccactccctccagccctgtaagaatgaggtcacgtttgcttatgtgattagccgctgtggcacgaggcaggggccttgctcacgtrgcccccaaaccccgagtgggcactggaaggcttctccccaggccctggaagtaagccccagaggaggctggtggtcagctggccctgctctaacccttca

SEQ ID NO: 175269 - DNA, 201 bp, Homo sapiens
ttggacattccacattcccactccctccagccctgtaagaatgaggtcacgtttgcttatgtgattagccgctgtggcacgaggcaggggccttgctcacktggcccccaaaccccgagtgggcactggaaggcttctccccaggccctggaagtaagccccagaggaggctggtggtcagctggccctgctctaaccctt

SEQ ID NO: 175270 - DNA, 201 bp, Homo sapiens
cttggacattccacattcccactccctccagccctgtaagaatgaggtcacgtttgcttatgtgattagccgctgtggcacgaggcaggggccttgctcaygtggcccccaaaccccgagtgggcactggaaggcttctccccaggccctggaagtaagccccagaggaggctggtggtcagctggccctgctctaaccct

SEQ ID NO: 175271 - DNA, 201 bp, Homo sapiens
agacgtgttgattcagcacctccgagtggggcgggatggatgcaggacccaaggagacgggtgggtatggctttgtttatttgtttgttttttaggtaggycattcctgccccctctagccccctggttcccacctcagaggtaaccactatccccagattttaggggcgaccttcagggaacgtgtgtgcttatggtggc

SEQ ID NO: 175272 - DNA, 201 bp, Homo sapiens
gtggctgagtgaacccagattagaacaggttttctgcctccctgcctcagggcctttgcctggttgccacacacacacacacacacacacacacacacacrcacacacgcacaaaggaaaggacaagtagttctaagtcaagaggatgagcagacgaggacaaggatgagagctccccatgcccagggcctgagggggcag

SEQ ID NO: 175273 - DNA, 201 bp, Homo sapiens
aaggttagaagagaaaacagcatagcaaacaacacaaagctgaaaagctgcttccttcacccccaaatcaaataacagatatttttaaatatcaacaggarcagatagaggcttcttactaaggagaaagtcacagagaggccaaagtgatcttccagtccccctggctccacccctgccagttgcaggaggcccaggtca

SEQ ID NO: 175274 - DNA, 201 bp, Homo sapiens
ccacaggtttgccgggcaccgctccagacctggaaaagagaaagcaaatttttgggcaaaactttatacctccaaagaagccaaaaaccttcctgcagctygtgtgggaggcgctgcaggacgtgacgctcatcatcctggagattgccgccatcatctccctggggctgtccttctaccacccgcccggcgagggcaacg

SEQ ID NO: 175275 - DNA, 201 bp, Homo sapiens
cttcctcagcctcctgagtagctgggactataggcgtgcacaaccacgcccagctaatttatatatatatacgtatatatatatatattttagtagagacrgagtttcatcatgttggctaggctggtctcaaactcctggccccagatgatccacctgcctcagcctcccaaagtgctgggattacaggtgtgagccacc

SEQ ID NO: 175276 - DNA, 201 bp, Homo sapiens
gacctttattttcttatagttcatattgacttcccctttaaagtctgaattatttaaataacattctcttggttaaaattaattttttttttgagacagcrtctcgctctgtcacccatgctggagtacagtggcacgatctcgactcactgcaacctccacctcctgggttcaagtgattctccttcctcagcctcctga

SEQ ID NO: 175277 - DNA, 201 bp, Homo sapiens
ccagtcttaagctatagtgaattaagtctctatgaatatctgtgtataagtctttggtggtcatatacatatatatgtttttctttttgttttttttttttgagatggactctctctctgtcacccaggctggagtgcagtggcgagatctcggctaactgcaacctccacctcctgggttcaagcaattctcctgcctca

SEQ ID NO: 175278 - DNA, 201 bp, Homo sapiens
tgcttatccctatttccttaacccacatctgttttgaagtttagatgtgcggccttgggttggttccctaacctccctaaaccacagtttcctcatctgcmatttgaacctcttaatgcaggccctgcagtcttgagactcagatgcaatcacagatgtgaatgcggtttctaaatcaactttcacgagggaccttctctc

SEQ ID NO: 175279 - DNA, 201 bp, Homo sapiens
agagtcatgtagctggtacacaagtgttctttggtttttagagtattccgcgtttcctattgatatattaagatgagcacaggatttggggtcacactgascaggacttgagtctcgttcccctgccatccagccctgtcacctgttctgagcctcagttcctctgcctatacatggcccgtgatccacactccccctgtt

SEQ ID NO: 175280 - DNA, 201 bp, Homo sapiens
caacagcaacctctccaccgcctccttatacacgccctggccaggcttccctgtcgttccctctgtccctaatgtagaaagccgcgtccctttgtcccctrtcaagagacaggtcccagggagacagccctaagcccagaggggctatgatctaagctagtgaagacatgcccctgccacctccttgccagcctcaaggac

SEQ ID NO: 175281 - DNA, 201 bp, Homo sapiens
tctgagccaaaaatacagtacaggtgggtgacaggagtacctccagccaagggaacagcctgcccagacacagggccagtgagagctagctctgtgggacygtaagcacagattgggggtggccaggggatgagagaagagaagaggtcaggatgtgagtgaggcctggtcacagaggacttcataagtggagctaagaac

SEQ ID NO: 175282 - DNA, 201 bp, Homo sapiens
cccccttctcccacctctttcctcactgggatgtatttggagaaatcacagtatcagaaatagcaccccctactctgttagagcctagagctgtcagctgrgcgaaagccaagtcccaagaggccactgagtgtccagtaaagaaaaggggtcacataactatggccaatccctgagaaaataggcatgtgggaaaatccc

SEQ ID NO: 175283 - DNA, 201 bp, Homo sapiens
tcccagttgagcctctttcttgaagggcagcacttcaccctggccacgacggagcacacctgacatcgctgggcagccccactgcctttggaagtcgtccycgagtcagcccctcatcttagctttcacagcctggaagctagagctgtccgctcaaacctcagccacttctttctcagcttttcttctgcctcatttgca

SEQ ID NO: 175284 - DNA, 201 bp, Homo sapiens; identical to SEQ ID NO: 31236

SEQ ID NO: 175285 - DNA, 201 bp, Homo sapiens
ccacctcctgggttcaagtgattctccttcctcagcctcctgagtagctgggactataggcgtgcacaaccacgcccagctaatttatatatatatacgtrtatatatatatattttagtagagacggagtttcatcatgttggctaggctggtctcaaactcctggccccagatgatccacctgcctcagcctcccaaag

SEQ ID NO: 175286 - DNA, 201 bp, Homo sapiens
gctttgagagtgactgagggaggggcagctttaggtgggcaatcaagacaggcttccttgtggaggtgacatttatcctgagcatcagctgacgtgctggrtgcctaggaactaccttccatggattgctgaaggtgggtaacagtggggcttctgctcttcagtattttcaaatcccctatgtccattccttgggttctc

SEQ ID NO: 175287 - DNA, 201 bp, Homo sapiens
gccaggcaaggttctagattggagataggagatagcccatggttaaacagagagtttggagagtctaggttctcatgtagcttatattctagtgacagaayagagggaacacgaaagcaaatagagaagttagttttgagggcactaccaaacagtgtgatgtgatggaaaatgacgaggggaaaagcattagggagggag

SEQ ID NO: 175288 - DNA, 201 bp, Homo sapiens
tccacctcctgggttcaagtgattctccttcctcagcctcctgagtagctgggactataggcgtgcacaaccacgcccagctaatttatatatatatacgyatatatatatatattttagtagagacggagtttcatcatgttggctaggctggtctcaaactcctggccccagatgatccacctgcctcagcctcccaaa

SEQ ID NO: 175289 - DNA, 201 bp, Homo sapiens
cgtcaatcactcagcaagggagccccagaggaagtgctgagtgggtgctgggtgagagatacgtgggttgagatcctttcctccagagatccatgcttccstccattctggtggatactggtggagtcaggctggatgatgccggcccagagataggcagaggaggtgatgtgctcttgtttttgcctttgaagcagagtc

SEQ ID NO: 175290 - DNA, 201 bp, Homo sapiens
cctccacctcctgggttcaagtgattctccttcctcagcctcctgagtagctgggactataggcgtgcacaaccacgcccagctaatttatatatatataygtatatatatatatattttagtagagacggagtttcatcatgttggctaggctggtctcaaactcctggccccagatgatccacctgcctcagcctccca

SEQ ID NO: 175291 - DNA, 201 bp, Homo sapiens
agatctttcccccgtctgctaatgtcatttgagattccataataagttaaagattgtaactgaaaataaatgatgatcatgtttaagttgtgccctgagastatagatgttctgcttcttactattctctgagaaattttggcacatcccctagtggggtatgccccaccccctagctgagaatcactgcattcatttact

SEQ ID NO: 175292 - DNA, 201 bp, Homo sapiens
tcgcacagctgtgaaaggcaggcctggatgagaccagaccttgtgctcttaaccatttgtcaaagggaatgaagggtcattcctagaactctcttcccccrtagagggcacaggatgctggctcagaagcctgaaagttttcagttgctccaaaccacactggggctcaggcccaaatatgaggaagaggggccaggggag

SEQ ID NO: 175293 - DNA, 201 bp, Homo sapiens
aacagccttgtgaagaaggtgctattcttctcaacactttacagatgaggacacttgaggttcggagacgtggagcctcttgcacagctgcttaagtggtrgtagagccgagatttgaaccctcctaaccattcctttctgccgcctactgcagctcccagcagagatgattgaactgttgctcggggtagggcccccagg

SEQ ID NO: 175294 - DNA, 201 bp, Homo sapiens
ccggtaatggtccggttggggggtgaccaccttgtgtcaacagctcaggccctgacgtgggagatgccactcctacccccattttgcatgtgaggaaaccraggcacagaggggttgacggactcgcccacgtcgcacagctgtgaaaggcaggcctggatgagaccagaccttgtgctcttaaccatttgtcaaagggaa

SEQ ID NO: 175295 - DNA, 201 bp, Homo sapiens
gatgatgagcattttttcatgtgtctgttggctgcataaatgtcttcttttgagaagtgtctgttcatatcctccgcccacttgttgatggagttgtttgkttttttttcttgtaaatttgtttgagttctttgtagattctgggtattagccctttgtcagatgagtagattgcaaaaattttctcccattctgtaggtt

SEQ ID NO: 175296 - DNA, 201 bp, Homo sapiens
agctttttcgcccagtagtaacttcgcgcacctaaatggaaagttcaagtgacatcccaggctgaggcccaggctggagattgcatttccccaagtccttytgtggccttcatggccttgggggtctggctggaggcgcctccatccctcctgtcgacagcaaggacacgggagtccactgaggcgcttgctatgtggtct

SEQ ID NO: 175297 - DNA, 201 bp, Homo sapiens
ctgtgctggtgaatgttaaccccagctctctagttgcgagggaatcctcttttgcagtgggtgctgatttccttggtgtaaataccaccacgttacccacrtgacatcattaaacacagagttgggacgagaggcgcagccgcacaccattatacggtatttctaccatgcagatacaatagactgtctactagagagaat

SEQ ID NO: 175298 - DNA, 201 bp, Homo sapiens
cttaatgcaggccctgcagtcttgagactcagatgcaatcacagatgtgaatgcggtttctaaatcaactttcacgagggaccttctctcatggggtctcygtgggttttctgatttgcttcatcaccatctcatcaccatcttccccccacccccaccccaccctcctatcccccgcaaaattctttctccctgaggagg

SEQ ID NO: 175299 - DNA, 201 bp, Homo sapiens
attctcaggaatgtcctggtagccccaggcagacttcctaccagtgtgtaactgaacaaaaagagagggtctgctctgagactaggtggcaggcgggatgractgagatctggtgcgggtggagcagatagtggtgtgagataaagagagggaggggtgacggggccctctggccctggccttgcagaccccactgaggac

SEQ ID NO: 175300 - DNA, 201 bp, Homo sapiens
tatcttcattctcaggaatgtcctggtagccccaggcagacttcctaccagtgtgtaactgaacaaaaagagagggtctgctctgagactaggtggcaggygggatgaactgagatctggtgcgggtggagcagatagtggtgtgagataaagagagggaggggtgacggggccctctggccctggccttgcagaccccac

SEQ ID NO: 175301 - DNA, 201 bp, Homo sapiens
agatctcagtatcagaaatagcaccccctactctgttagaacctggagctgtcagctgagtgagagccaagccccaagaggccaccaagtgtccagtaaaraaaaggggtcacagaactgtggccaaccccagggaaaataggcatgtcagaaaagccttattaaaaccctttctttactggacactcagtggcctcttgg

SEQ ID NO: 175302 - DNA, 201 bp, Homo sapiens
cagacatctgggggaagagcactccatgcagaggaaacagggcaggcagaagccctgaggtggagtatgctggtgtgccgcagaaacagaaaaagagaggsggtggggtgagggaggatcagccagttggattcattgggactacctttagaagcaagtgatataaataccaactcaagttagcttatagcaaaaaagatg

SEQ ID NO: 175303 - DNA, 201 bp, Homo sapiens
agctactcaggaggctgaggcaggagaatcacttgaacccaggaggtggaggttgcagtgggcagagattgtgccattgcactctagcctaggtaacggarcgagactgtgtctcaaaaaaataaaataaaataataaaataaaatagaatatagcagagtcagcgggaagagcgtgatgacgaggcatcttatttttgat

SEQ ID NO: 175304 - DNA, 201 bp, Homo sapiens
cccagctactcaggaggctgaggcaggagaatcacttgaacccaggaggtggaggttgcagtgggcagagattgtgccattgcactctagcctaggtaacrgagcgagactgtgtctcaaaaaaataaaataaaataataaaataaaatagaatatagcagagtcagcgggaagagcgtgatgacgaggcatcttattttt

SEQ ID NO: 175305 - DNA, 201 bp, Homo sapiens
acatcccaggacacccctcagtccgaggcaaaccaggacagttggtcatcctaacacaatctctgccctcatggatttacagtttagtggagggacatagmcaataagtaaatatataacatcatagtgggtgtaagtgttattttttagaatatagcagaggtgggacatggtggctcacacctgtaatcccagcacttt

SEQ ID NO: 175306 - DNA, 201 bp, Homo sapiens
ccccaggctggctatgaggatgccatgagacagagcacgtaaatgcagcccagggcctgcgctcactcatccactcaactagacattaagcacctaccgcrcaccaacactgagctgggcagtgggattttacagcaaatgaaagcagtctagggggactaacgtgtccaggtttgtctgggacattcctgattttaacac

SEQ ID NO: 175307 - DNA, 201 bp, Homo sapiens
cactatttatctcctctaaaaatatctttgactaataaaaatgaccactaaggggacagcactataggatggaacacacaggctgggcaaaggcagggagraagtcagtatgtcagaaactgttattgaaaacctactatttgccaggcaaggttctagattggagataggagatagcccatggttaaacagagagtttgg

SEQ ID NO: 175308 - DNA, 201 bp, Homo sapiens
agttgagcaaaccgaggtcgtgatgacaaatgcacaagaatcttctgaaagaaagcaaatgcaggaagcaggtgcctgatttaaaaacaagcaaactttarttagagattgagggcctgctgctgacatggaagttcagctgggttttatgactagtcattaaacatttactaagtacctactctgtgctgagcacggtgc

SEQ ID NO: 175309 - DNA, 201 bp, Homo sapiens
gttctggaggcttgtagatggccatcttctcccagtgtctgttcacattatcttcccactatgcatatctgtctctctgcccaaatttcctctttgtataygggtgtcaatcatagcatggattaggcccaccctaatggcctcatcttaatttagtatctgcagtgtccctatctctacaatgactctatctccaaatac

SEQ ID NO: 175310 - DNA, 201 bp, Homo sapiens
agagtatccaaaagcctgggttggggcacagatcacataagttcttaatgcatcatttgttaaatctgtgaaatggagcagacactgtctggcttccaggrgccacactgactgtggattaaatgagagaacacacaatgtgcctggcccaggggtcttaggcgaagttggtctttgcgggggccccaaggggatgcatgt

SEQ ID NO: 175311 - DNA, 201 bp, Homo sapiens
tttgttacatatgtatacatgtgccatgttggtgtgctgcacccattaactcgtcatttacattaggtatatcgcctaatgctatccctcccccctccccmcaccccacaacaggccccggtgtgtgatgtcccccttcctgtgtccaagtgttctcattgttcaattcccacctgtgagtgagaacatgcaatgtttggt

SEQ ID NO: 175312 - DNA, 201 bp, Homo sapiens
ggaaagggaggtgcaaaggtggattgtaaactgctcccgccttaagactgtcccagtctagctgtgctactagttactagccacgatgctagttatagctrtgatactagagaataattaacatgcattgaacactaacagcagccaggctccctgctgaggcttcacggcattttctcctataatcttcacatcacccct

SEQ ID NO: 175313 - DNA, 201 bp, Homo sapiens
aaaattgaagtaatctaataaaatgccagacaaatatagatgctaattaaatagacgtgtttcttttattattattattattattatattattatactttaagttctagggtacatgtgcacaacgtgcaggtttgttacatatgtatacatgtgccatgttggtgtgctgcacccattaactcgtcatttacattaggta

SEQ ID NO: 175314 - DNA, 201 bp, Homo sapiens
ctgcccggcagctgactgaagggcttcccggtgattccagcaagactagggagtcttcatgtcccgtgagcgatgctgcttggctcactaggtgcttcccrtaatcaggcacccagagaggtggtagaagagatgggttgtaagggcagcatttccacggggcctcactttaggcagagcattaggcagacccaccatgca

SEQ ID NO: 175315 - DNA, 201 bp, Homo sapiens
ctaaaaaattgaagtaatctaataaaatgccagacaaatatagatgctaattaaatagacgtgtttcttttattattattattattattatattattatactttaagttctagggtacatgtgcacaacgtgcaggtttgttacatatgtatacatgtgccatgttggtgtgctgcacccattaactcgtcatttacatta

SEQ ID NO: 175316 - DNA, 201 bp, Homo sapiens
cttcaaaagcacagtttaatgtgaagttccaatgaatcatgtgtggatgctttccagaatgctgcctgcatatccttctgaatcatcaataaaataaaccyacatgttaatcaatgcatgctatcgatggtcataggctggggtggtagagtctgctgggcaaataattctgcaggccacggggtggcagggagagcacgg

SEQ ID NO: 175317 - DNA, 201 bp, Homo sapiens
cgaggggaaagtgttgagcaagtgagcgctggggtttagaataatcagtttttcaaccgctgcagttaatgcgaggccaggccgcaaaactctccctctcrtgttctggctcctggaactgctgactgtttgatctagaactgccagcttttctgtcacccccactcccatacctgccccagggctttcctaaattgtcta

SEQ ID NO: 175318 - DNA, 201 bp, Homo sapiens
gctaaaaaattgaagtaatctaataaaatgccagacaaatatagatgctaattaaatagacgtgtttcttttattattattattattattatattattatactttaagttctagggtacatgtgcacaacgtgcaggtttgttacatatgtatacatgtgccatgttggtgtgctgcacccattaactcgtcatttacatt

SEQ ID NO: 175319 - DNA, 201 bp, Homo sapiens
gagctaaaaaattgaagtaatctaataaaatgccagacaaatatagatgctaattaaatagacgtgtttcttttattattattattattattatattattatactttaagttctagggtacatgtgcacaacgtgcaggtttgttacatatgtatacatgtgccatgttggtgtgctgcacccattaactcgtcatttaca

SEQ ID NO: 175320 - DNA, 201 bp, Homo sapiens
cacttccgctgtcctctgtgttggcttcattttcaggcgggttttagcacatgggggctccggcagcttcgggttaacatcctcccatcccggtcaatgcrgcagccaggcctttcctcataagccccgccccattaaaaatcccagactacgctctcactgggccacttatagtcacatggccattcctgagccaatccc

SEQ ID NO: 175321 - DNA, 201 bp, Homo sapiens
tgagctaaaaaattgaagtaatctaataaaatgccagacaaatatagatgctaattaaatagacgtgtttcttttattattattattattattatattattatactttaagttctagggtacatgtgcacaacgtgcaggtttgttacatatgtatacatgtgccatgttggtgtgctgcacccattaactcgtcatttac

SEQ ID NO: 175322 - DNA, 201 bp, Homo sapiens
ctagtgccaggtggtccgggaggcctagaggcaggagctctgtgttattctccaccatgtctccaacacctgatgcattgcctgggagctcaagaaatatwcacggaaagaagaaaaggaagaagaaagaagaggcaggggatgtcccagtgcccctcctttcatgagacagaaggctgcaggcttggggacagacacagg

SEQ ID NO: 175323 - DNA, 201 bp, Homo sapiens
atgagctaaaaaattgaagtaatctaataaaatgccagacaaatatagatgctaattaaatagacgtgtttcttttattattattattattattatattattatactttaagttctagggtacatgtgcacaacgtgcaggtttgttacatatgtatacatgtgccatgttggtgtgctgcacccattaactcgtcattta

SEQ ID NO: 175324 - DNA, 201 bp, Homo sapiens
gttctggaaagttcttagtcaaatcacctccccagcgctcacccctccagcggggttcagccttcccccagcatctgagacccatctctcctacaagccccagccactgcattggcctgaaggacccctgacctcatttccttccttctgccccaattgtagcccatttgcctcactctatccttgtcttactcctgccat

SEQ ID NO: 175325 - DNA, 201 bp, Homo sapiens
aatccttggcacagccccagccccagtttaaaagctccgtggtctgggctgtgccagctccagacacagggactcagtttgaccattcccgacaccccctwcccctaatctgctgacgagtagggagctggcctctgagtcacactgcaggaaatgctccaggccacgcataaattagccttcccattcaagttcagctaa

SEQ ID NO: 175326 - DNA, 201 bp, Homo sapiens
aatgagctaaaaaattgaagtaatctaataaaatgccagacaaatatagatgctaattaaatagacgtgtttcttttattattattattattattatattattatactttaagttctagggtacatgtgcacaacgtgcaggtttgttacatatgtatacatgtgccatgttggtgtgctgcacccattaactcgtcattt

SEQ ID NO: 175327 - DNA, 201 bp, Homo sapiens
aggaagccctggatccctctcactgcctgccccttagacctacgtctgccacctgtgccttcaaggctgatgcaaggcggtttctttgggattttttttttagattttccttttctggttaacagaataggagttgtctaaaaatagcactaaatttgcttctgaggtattcattttcagttcccttcctctttccctgtt

SEQ ID NO: 175328 - DNA, 201 bp, Homo sapiens
tcatgagaacctaatgagatctctgatggccaagatctctgaggagaagggaagcccatcataggatttcctgcagctcctgccacattggtccctagaarcatctcccagggggctgggaggtacaggctggaagagatttggggagaggcagaagagcataatgccacagacccaaacttgggcatcccaggttcaaat

SEQ ID NO: 175329 - DNA, 201 bp, Homo sapiens
taatgagctaaaaaattgaagtaatctaataaaatgccagacaaatatagatgctaattaaatagacgtgtttcttttattattattattattattatattattatactttaagttctagggtacatgtgcacaacgtgcaggtttgttacatatgtatacatgtgccatgttggtgtgctgcacccattaactcgtcatt

SEQ ID NO: 175330 - DNA, 201 bp, Homo sapiens
cttcacctaacaaatgctgtattgagtatccatcccagctccgctgtgttctgagtgaccttgggcaagttacttgccttagttttcttttctataaaatrgagataataagaatacctgcctcatagggatgtgatgtggatcggatgagatgacgtgtaaaaagtgcctcttgcagggcttggcacatagagaatgctc

SEQ ID NO: 175331 - DNA, 201 bp, Homo sapiens
gggaaggcttcatggaagggaaggtgtttggacttggctatggaggaaagagaagggaaagcatgtagtatggcctacagcagcatttcttagaggggatyccacagaataactggtatgctgcaagaagtgaggcttcaggtgaaaagtaaagaactctgttttctcatctgtaaaatggaaacaataatgacatctcta

SEQ ID NO: 175332 - DNA, 201 bp, Homo sapiens
attaatgagctaaaaaattgaagtaatctaataaaatgccagacaaatatagatgctaattaaatagacgtgtttcttttattattattattattattatattattatactttaagttctagggtacatgtgcacaacgtgcaggtttgttacatatgtatacatgtgccatgttggtgtgctgcacccattaactcgtca

SEQ ID NO: 175333 - DNA, 201 bp, Homo sapiens
tacaggcgcccgccaccacacccggctaatttttttgtatttttagtagagacggggtttcaccgtgttcgccaggatggtctcgatctcctgacctcgtkatccgcccgcctcggcctcccaaagtgctgggattagtatctatttttttaaaagaaaattattattaatttttttaaattaatgaatcataattgtata

SEQ ID NO: 175334 - DNA, 201 bp, Homo sapiens
aaatggggactgtcacacctatcctaccagttggcctgaaataagaagcaatgtgtgtgcagggtctgactccagaaatggcagcagttttgtcggcccckacattaccctcaccagggagagaaggtaggatagatgacacgtgagtgagggagatggacctgaatccacctctgggaatcctaaccctgcccctatgag

SEQ ID NO: 175335 - DNA, 201 bp, Homo sapiens
tctctttttttttttttttttttttgagacggagtctcgctctgtggcccaggcgggagtgcagtggcgcaatctcggctcactccaagttccgcctcccrggttcacgccattctcctgcctcagcctcccgagtagctgggactacaggcgcccgccaccacacccggctaatttttttgtatttttagtagagacggg

SEQ ID NO: 175336 - DNA, 201 bp, Homo sapiens
ataaaggcccctttgagccttctaaaaccaactattgaagtggagtcccctggtgcccctgagcccagtcagtaaaattattttagaaaataaaaataatygttgttattcattcctgcttactctaaaaagcttttttctcttgtgttttttaatccagtagaaagaattttacagtagagacacagggggtctttcact

SEQ ID NO: 175337 - DNA, 201 bp, Homo sapiens
ggacacaggtaggttgacaggaaggaaggattggagggaaggcgaaataagacaggttcccttaggagtcctccctgccctgggacctacgccagtcattwactcctctgctgtacagcctcgtcatctgtaaaatggggactgtcacacctatcctaccagttggcctgaaataagaagcaatgtgtgtgcagggtctga

SEQ ID NO: 175338 - DNA, 201 bp, Homo sapiens
gtcttgatgtatctctttttttttttttttttttttgagacggagtctcgctctgtggcccaggcgggagtgcagtggcgcaatctcggctcactccaagytccgcctcccgggttcacgccattctcctgcctcagcctcccgagtagctgggactacaggcgcccgccaccacacccggctaatttttttgtattttta

SEQ ID NO: 175339 - DNA, 201 bp, Homo sapiens
ttagaaaataaaaataattgttgttattcattcctgcttactctaaaaagcttttttctcttgtgttttttaatccagtagaaagaattttacagtagagmcacagggggtctttcactttaaagcccaggatgggcaactgatcctttgccatgggaggccatggggacagctctgcacttacccttgaacagacagtgc

SEQ ID NO: 175340 - DNA, 201 bp, Homo sapiens
gctctcagtgctcggggtggtgtcggcacagaccaggccagggccttgcccattgttgccattcaaaaaatgtggattagttgttagataggtagggacayaggtaggttgacaggaaggaaggattggagggaaggcgaaataagacaggttcccttaggagtcctccctgccctgggacctacgccagtcattaactcc

SEQ ID NO: 175341 - DNA, 201 bp, Homo sapiens
ggcagagaaatggagcctgggcttgtgactcactccccagggggcatctttctttgttctttcatgaatccctcgaggggagacccctttatccctggacygccttgatccctgggcctctgggtgcccggccctgtgccgggggctgacgccaatgcaccggcccccaagtccttccgtgggtggctccagcatctgtct

SEQ ID NO: 175342 - DNA, 201 bp, Homo sapiens
tgcctagcacatagtaagtgctgattttaaaaagcaggtgccactcttctggtggtggtgatgactttggctactggcctcctgaagaccccctcacctcytgtcccctgccccttgcctctgtctccctcctctcacaccccttcctgaaggcacacaagacccagactgagccctcaaccagcccctttcacagagggg

SEQ ID NO: 175343 - DNA, 201 bp, Homo sapiens
gctggggctgggcgcaatggctcacgcctgtaatcccagcactttgggaggccaaggcaggcagatcacttgaggtcaggagttcgagaccagcctggccwacatttagtagagatgaaaccccatctctactaaaaatacaaaaattagctgggtgtggtggctcgcacctgtagtcccagctactcaggaggctgaggc

SEQ ID NO: 175344 - DNA, 201 bp, Homo sapiens
ctacatgctgggtacatttgaggcagtgggtacatagtggtaaacaagacagaggagttctcattaataactaagattaataattctggctggggctgggygcaatggctcacgcctgtaatcccagcactttgggaggccaaggcaggcagatcacttgaggtcaggagttcgagaccagcctggcctacatttagtaga

SEQ ID NO: 175345 - DNA, 201 bp, Homo sapiens
catctggggatttgttttggggtgtatatctgtgtttgtctgtgtgtgtgtgtctctctgtatgtgcatgtctgtgtgtgtgtgcgcacacacatgcttgkggggagaggctgtgctaggaatgtgtaaaggaaaggaagggaccagcatgtttcaggctcagtacatattatttgttcctgtagcaaacatttcttgaat

SEQ ID NO: 175346 - DNA, 201 bp, Homo sapiens; identical to SEQ ID NO: 31219

SEQ ID NO: 175347 - DNA, 201 bp, Homo sapiens; identical to SEQ ID NO: 31220

SEQ ID NO: 175348 - DNA, 201 bp, Homo sapiens; identical to SEQ ID NO: 31221

SEQ ID NO: 175349 - DNA, 201 bp, Homo sapiens
cgcaggcctgtggtgcagggcagccactgctctgcaggtgggtgccacttggcctgcacacagcagccgactaaggctctgtcctggaggcgccaacgccrccttgttttctccacctctgactccactccgagttggggctgggacgagaggaggaggcacctttgtcccaagtcccatcagactcttgagatgacaggc

SEQ ID NO: 175350 - DNA, 201 bp, Homo sapiens
agatgcatggctccaaatcaaccattatgagtttactctccagtgctcccagacctaccatcttgtctgagttctgattcttcctcctccttgaaaataarattccttattcactgggctctcctcaatgcagcgagctgaccacccaggctaaaactgtctctcagaacagagggaaagatgctcaaacaaaaagctcaa

SEQ ID NO: 175351 - DNA, 201 bp, Homo sapiens
cccacacacagacaaacattcattagtgtgcttttgctgcatagcaaactactccaaaacttagtggcttgaaacaaacctgtgtatttcactcaaagtcytgtgagtcagcaattcaagctgggttcagctggatggttcttctggtctcagctaggcttcctcctgcatctgtgggggttcatgtggacatctcctctg

SEQ ID NO: 175352 - DNA, 201 bp, Homo sapiens
aacctttattgttaattatgctttttaaatcctgtcgttgaacccccactccccctgcccacacacagacaaacattcattagtgtgcttttgctgcatarcaaactactccaaaacttagtggcttgaaacaaacctgtgtatttcactcaaagtcctgtgagtcagcaattcaagctgggttcagctggatggttcttc

SEQ ID NO: 175353 - DNA, 201 bp, Homo sapiens
ggtaggttcaaatcccagctttaaacccctccgggtgtgtgatcctggtcaggtcactttgcctagatttcttcagttgccaaaatggattaccagaatcytttcctgtgccacagaattcttaaaacatcggacaagaagtaattcacaacaaggctttgcaaactgtaacatgttgcaaattcaagttgctgttgatca

SEQ ID NO: 175354 - DNA, 201 bp, Homo sapiens
cccggggatgtccttgaaagttgcacagagctggtttgggagaatcatatacagatgcttttaggcctctgcgccttctgcagttcgtatctctggcaccygctaccttcgctcatcttaggtagtgttaaagttaggtacttttacagtcacttgataaacttaggagagcaccccaacacaggagaggcagactgtgcc

SEQ ID NO: 175355 - DNA, 201 bp, Homo sapiens
tctcattttcttccctttgccccatgttttctccacctcgaagggccgggcgtagggcttctgtttcccagtgccccatgccagaatgtccctgcaagggyggaggcgtggccatgtttataaacgaggcattcactctgagaaattggcagagcctccagagggcatggtgagcatcagtttccaagctggaatttgggc

SEQ ID NO: 175356 - DNA, 201 bp, Homo sapiens
ctagcacagggctttcttgtttggggtttttgttctttggtctcatctggggatttgttttggggtgtatatctgtgtttgtctgtgtgtgtgtgtctctstgtatgtgcatgtctgtgtgtgtgtgcgcacacacatgcttgtggggagaggctgtgctaggaatgtgtaaaggaaaggaagggaccagcatgtttcagg

SEQ ID NO: 175357 - DNA, 201 bp, Homo sapiens
gtccctgcctcacctgcttctccgaggaatacattgttggggtcaaaactcatggattctgtggatggtgtgtgttccatccatggccaaggaacatggcytcttttgagtattgtaggtgggagcaccaagcgtgcagtttctttggtgtctcatgtctctgtgcctcttcttgaggtatcacatccattttatgttcta

SEQ ID NO: 175358 - DNA, 201 bp, Homo sapiens
ctctctgcccttgccagtgaccttgacttcccacagcctcagtggagatcctaaggtaagccaggcaggacctgacaactggactcatgaccctggtaacmcctagcatcctccttctagcacagggctttcttgtttggggtttttgttctttggtctcatctggggatttgttttggggtgtatatctgtgtttgtctg

SEQ ID NO: 175359 - DNA, 201 bp, Homo sapiens
tccccactgtgtgaccttgggcaagtgacttcacccctctgaacctcattcgcttggtctataaaatggaggtaattctagtatccacttcacagtgttgyacagaatgagacagtgtctgtttgcttttcattcattcacttattcatttaacaattgtttactaggtagctacaaggagccaagtgcttttctggtcaa

SEQ ID NO: 175360 - DNA, 201 bp, Homo sapiens
ctcgtggtttcctccttctttccttcttaacctaggggctcctcctaacttccctgccatgcctgcaactccctgtagaaggggccgatggaagtcctgasacactgtgcctgtgtgtgtgcctctgtgcctgtgtgtatgtgcctctgtgtgtgtgtgcctaggtgcctgtgcctgtgtgtgtgcctgtgtgtgtgccta

SEQ ID NO: 175361 - DNA, 201 bp, Homo sapiens
cattaaaatcaacagtagcccactaactcatgcctactgttgtgatcacagatataattgctgctaacgattctcatagcttgcttgtactgtcagagacrtaattatcagtgcctgtaagccactccgcaggtagcacaggcacagatagaaaacagcagctcgggtttagaaagtcccttgtggattgcaaagcacttt

SEQ ID NO: 175362 - DNA, 201 bp, Homo sapiens
gggtaagtggatggatggatggatgagtggatgggtagatgggtcggtgggtggtgggtgggtggatgaatggatggaagggtcagtgagtgagcgagtgsatggatggatggatggatgagtggatgggtgggtagatgggtggatggatggatgaatgaatggaagggtgggtgagtgggcaggtggatgggtgggtgt

SEQ ID NO: 175363 - DNA, 201 bp, Homo sapiens
cttaggtcttgatgtatctctttttttttttttttttttttgagacggagtctcgctctgtggcccaggcgggagtgcagtggcgcaatctcggctcactscaagttccgcctcccgggttcacgccattctcctgcctcagcctcccgagtagctgggactacaggcgcccgccaccacacccggctaatttttttgtat

SEQ ID NO: 175364 - DNA, 201 bp, Homo sapiens
aggatgggcaactgatcctttgccatgggaggccatggggacagctctgcacttacccttgaacagacagtgctgggcgaggttcggggaagccacttctyccctctgagtcacccagaaagtgggcacagtgacagtgatgaactaatcctgcagccatggggctattccgaggatgctcctaaattcaggctgcctctg

SEQ ID NO: 175365 - DNA, 201 bp, Homo sapiens
tgcttcggtctctgtgtcttggcttcagttcctctgtgtcttcctctgtctctgcgtccctccctctccctcccttcttaggtcttgatgtatctctttttttttttttttttttttgagacggagtctcgctctgtggcccaggcgggagtgcagtggcgcaatctcggctcactccaagttccgcctcccgggttcacg

SEQ ID NO: 175366 - DNA, 201 bp, Homo sapiens
ttgattttgttatcccagagttctgtccctctatactggctcacactgttttccttctgcaccttttactagcagacagttgtgtatttcagtttcttcaygattcatctttttattaagtccttctttacctgaagaaaaaaaaatccctacttggagctgagaggaaaggcattcctggttaccccgggccagttcagg

SEQ ID NO: 175367 - DNA, 201 bp, Homo sapiens
atgtctcatcctgttttatgaaagtggaagcttgatgagattgggagatagaaagccagcagctagttggtggtgaaatgaagacttcaggaaccctgtcscagcagtgccacctcaacttccctcccctgggctcagaggggctgaggggtgtccatggtctccctgacggcagcttctggagaagcaatggcaggacgg

SEQ ID NO: 175368 - DNA, 201 bp, Homo sapiens
atcacttgaacccgggaggcggaggttgcagtgagccgatattgcaccactgcactcccacctgggtggcagagtgagactctgtctcaaaaaaaaaaaaactgtaaagatagggtcccagtgtgttggccaggctagtctcgaaatgctggcctcaagcaatcctccagctccagcctcacaaactgttcttaggtcttt

SEQ ID NO: 175369 - DNA, 201 bp, Homo sapiens
ctgcttcggtctctgtgtcttggcttcagttcctctgtgtcttcctctgtctctgcgtccctccctctccctcccttcttaggtcttgatgtatctctttttttttttttttttttttgagacggagtctcgctctgtggcccaggcgggagtgcagtggcgcaatctcggctcactccaagttccgcctcccgggttcac

SEQ ID NO: 175370 - DNA, 201 bp, Homo sapiens
cagtagacccaacaccaaatatttattgagtgccttctggatgccagacactgcactaggtacagaagagacatagcaactgcccacatgatgctctcagratcctggggaaagaaaacagttaagcaggctcaagcaatacagtgtgaagtgtactacaatctgggaggcacctgggagtcaggagcatttatgcagtct

SEQ ID NO: 175371 - DNA, 201 bp, Homo sapiens
cctgcttcggtctctgtgtcttggcttcagttcctctgtgtcttcctctgtctctgcgtccctccctctccctcccttcttaggtcttgatgtatctctttttttttttttttttttttgagacggagtctcgctctgtggcccaggcgggagtgcagtggcgcaatctcggctcactccaagttccgcctcccgggttca

SEQ ID NO: 175372 - DNA, 201 bp, Homo sapiens
agcctgaagggactccagagagcactaatccaatcccttcacttcccacatggggaaactgaggcccagagaagaaaggggcttgctcagggtcacaccaytggagctgggaaaacaaggaggagattctcactgggctttgtctcagttggctgtgtgacccctagtgtgttgctcaacctctttaggccaggtctggct

SEQ ID NO: 175373 - DNA, 201 bp, Homo sapiens
acaaaaagcttggtgtgggggcctgagtgcttctctgctgcctcctccagcagactctaatcccctgcaccctctgatacttccctttgatctgtaacacrctcaaggccaaaagtattccagcagaaacctccctcctgagtcccctggagaatcaagagttgcccggctggcaggccccacagctaaggtgcggccagg

SEQ ID NO: 175374 - DNA, 201 bp, Homo sapiens
cgatatatattttttcctgtcatatatatatatatatacatgtatatatatatttatgcatatatgtgtatatatgtgtgtgtgtgtgtgtgtgtgtgtgkatgtgtgtatatgtatatgtgtatgagaagcacaagaagacaaaaagagaaacaggaaggagcaaaggaaccaggaatggtcagactgagtcaggatttt

SEQ ID NO: 175375 - DNA, 201 bp, Homo sapiens
tcctgcttcggtctctgtgtcttggcttcagttcctctgtgtcttcctctgtctctgcgtccctccctctccctcccttcttaggtcttgatgtatctctttttttttttttttttttttgagacggagtctcgctctgtggcccaggcgggagtgcagtggcgcaatctcggctcactccaagttccgcctcccgggttc

SEQ ID NO: 175376 - DNA, 201 bp, Homo sapiens
ggagagtcaccatttaacaagtgtttcctcgttgccagaaactgtgctagctctatctcaatccttagaaaaccctgtgaggtaggctgtagggttgtctycatgttggggagggtcaaccaaggcacagaggattaagagccctgcccaagtcacataactagtgactggcagagctaggcttccatcactggggatctt

SEQ ID NO: 175377 - DNA, 201 bp, Homo sapiens
cctcctgagtcccctggagaatcaagagttgcccggctggcaggccccacagctaaggtgcggccaggcctgctcctgcttcagggccctccccaacccgyatccccacacagagggatgcagtcagcacggcccgcccttcatctgtgacattaatgtctgtggcctgttgcgtcttcgtgatgaccgaccatgtgttgt

SEQ ID NO: 175378 - DNA, 201 bp, Homo sapiens
ttcctgcttcggtctctgtgtcttggcttcagttcctctgtgtcttcctctgtctctgcgtccctccctctccctcccttcttaggtcttgatgtatctctttttttttttttttttttttgagacggagtctcgctctgtggcccaggcgggagtgcagtggcgcaatctcggctcactccaagttccgcctcccgggtt

SEQ ID NO: 175379 - DNA, 201 bp, Homo sapiens
gccatctaacattggcaactcctctgagaacagaggacagtggagtgagttgaccctggtaggaaggtaagggctggacctccccttcctcaggccaggcrtgagggtgagaagctccacaggaagccctggatccctctcactgcctgccccttagacctacgtctgccacctgtgccttcaaggctgatgcaaggcggt

SEQ ID NO: 175380 - DNA, 201 bp, Homo sapiens
cgtgtaggtaaaatgcaggatggcaatgtggacgccagccagagcaaaggtaacccttttgttttaaccggcgtttgtcgtccctgaggcccctccccacyggctctgacagtcacaccagagacagagactggcaagggccagaggcagacacatccactcctacaggtgtctgacgaccttgggggtgtagctgtgatt

SEQ ID NO: 175381 - DNA, 201 bp, Homo sapiens
agcgtccccccagcaagaggtctgggcagtcagtgcaggcaccacagagacaggccctctctcccctggcacatgggtcactgggctctcctgagacccarctcatctttgcatttgggcttctgaaccagtgccttgaccaaagaccagcaggtggcaagagggcaggctcagagcttggccactgccctcactctttcc

SEQ ID NO: 175382 - DNA, 201 bp, Homo sapiens
caaaactgagtggatctgattcccagggaaaacccgaaccaaaagttgtgcagaaatcacttgacccagcctgcacatcctgaccatggggttgaggttaytagggggctctgtgtggcagagtgagcagatgttaaacagcaggaaaaaggatctgagtgtctctcttgctctcctcatagtcccagtgcccggggcagg

SEQ ID NO: 175383 - DNA, 201 bp, Homo sapiens
aggggtgggtgccagcgtctccaccctgtgggctgacctgcatgtgtgtctatgtgtctgtgtgtatgcacgtgcgtgatctgccccctgcagccaaacarcaggacggggcagccgccatggagatgcagcccctcaagagtgccgagggcggcgacgctgacgacaggaagaaggccagcatgcacaagaaggagaagt

SEQ ID NO: 175384 - DNA, 201 bp, Homo sapiens
agtcataatgccttattctcttcatagcactttttttgtgtgacagagcctcattctgtcacccaggctggagtgcagtggtgcaatcttggctcactgcmaacttgcctcctgggttcaagtgattctcgtgcctcagcctcctgagtagctgggattacaggtgtacaccgccgcacacagctgatttttgtattttta

SEQ ID NO: 175385 - DNA, 201 bp, Homo sapiens
ctgtgcagatcgggaaggcgggtgagtgcagcaggtgggaggcaggggacagggctcacagggggaccccaggcagagccctgccccatgctcggcctcasttacctcatctgcaaagtggggggcttgaatgagtgcctgaagcccacctttctctaccacagcacccagtctgagtcctgtgtacagaaggcactccat

SEQ ID NO: 175386 - DNA, 201 bp, Homo sapiens
gctctccacggcttcagctaaagatggcctgatctggggcaacctgtcataatgccaaggccctgcaaatgcttcccagtttcaccagctggttatcttttgggggtgatatgattatgcgaattttgcagacagagaaacttgcttagcggggtaactcatgcttcctgcctggtccctaaaggagtaactggacctata

SEQ ID NO: 175387 - DNA, 201 bp, Homo sapiens; identical to SEQ ID NO: 31215

SEQ ID NO: 175388 - DNA, 201 bp, Homo sapiens
gatggctggtgacagccccgctggcccagctgcaaagtgagcccccgaccctctggcacggcctaggcttcccctcccgggtaaggaggtagcaaatgccraggccttcccacctggctgctcgatcctttgtggctgtctccccagctctaattatagacaccacagcatggggaagggaagcagattacaggcttggct

SEQ ID NO: 175389 - DNA, 201 bp, Homo sapiens
gaggcctggcctggaggaagccacacattaggctccttatttcagctaacatttcaagccaaaatctgcatttggagcctacctcaggtcaccttcttatsacctaccagactagactaagtgactttgagtggcttctagaatgctctagctgcagatgcccaagcagatgagcctctgagtacttccctaggtgcctgt

SEQ ID NO: 175390 - DNA, 201 bp, Homo sapiens
aggagatcagaatatgaaccatctctgcagagccacaaagagggactccagggggaaagagctcagagcagccacagtggccatgatggagcaccagcatraaggccgtgtctggctggctcttatttggcacttgttgcctcttatttaaagcacaattccagcaagtggggtaccctggagtcccagctcacagtatgc

SEQ ID NO: 175391 - DNA, 201 bp, Homo sapiens
aaggagtcagtcctccagggaaggccagggaagctgtttctcagcttgaacttctaccagcgtggccaagactggggagaagggcaccttcccactggtgrtcaaggacaagattagcatcccacacttcgatccaaggcaaagccgcacagcctctctttctcattgcctcaaattcctaactcatctcaaaccatcttt

SEQ ID NO: 175392 - DNA, 201 bp, Homo sapiens
tccagcttctttgatgagaagtagactccagctcaccccttgaaactttataaagggcctctacccccatccaaaaccagaacacccacaacacaaccccctgcagccaagcaggtaacccggtgtgctggtgggagcgcctccctcagtgcctccagtaggaggcgcgggccacagggagcctgttgatggcaaatgtcc

SEQ ID NO: 175393 - DNA, 201 bp, Homo sapiens
ctcctggagaatctcgcattccccctctgtgacagaatccagcctgtaattctgggtccctcctgagacccttcctgagcctatagtcttaaaaagagcckgaccaaacccctgcctgagggcactggttcccagacaggatcacagcctctgtggtttcagtacacacatttggacaacacagcctcgtgcctcctttgc

SEQ ID NO: 175394 - DNA, 201 bp, Homo sapiens
gcctccccaccctgctcaccatcttgcctctccctcttcatgcctcctggagaatctcgcattccccctctgtgacagaatccagcctgtaattctgggtscctcctgagacccttcctgagcctatagtcttaaaaagagcctgaccaaacccctgcctgagggcactggttcccagacaggatcacagcctctgtggtt

SEQ ID NO: 175395 - DNA, 201 bp, Homo sapiens
cgtccccgagtcagcccctcatcttagctttcacagcctggaagctagagctgtccgctcaaacctcagccacttctttctcagcttttcttctgcctcayttgcaaagccattcaatagggcccgtccgggaacaacacttctttgcagaaatgcccttttcttcatttctgcagaaatgcttagacaggaatgtgtcta

SEQ ID NO: 175396 - DNA, 201 bp, Homo sapiens
ggtgaaggcccagttctttgtccatcccagttgagcctctttcttgaagggcagcacttcaccctggccacgacggagcacacctgacatcgctgggcagscccactgcctttggaagtcgtccccgagtcagcccctcatcttagctttcacagcctggaagctagagctgtccgctcaaacctcagccacttctttctc

SEQ ID NO: 175397 - DNA, 201 bp, Homo sapiens
gtggctgagtcacatttccatgagataccgtcactaggcagtcactgccaggatttctcggggaaggcaacaccggtcccatcctcctcccctttagaccrgagagctctcaccttagcagcagcctagccagctgacctcccagctcctttctgcaccaactcagctctggccttgctcagcacccccacctatcctgag

SEQ ID NO: 175398 - DNA, 201 bp, Homo sapiens
taagccaaaaacaaaaaggaagtctgatttcatagaagcctcctccccttgggaaagaggctaaaaatataagaaattttaaagcagttaaatgaagagcwggggtcatgaatgttttccggggaagcttggtctgggacctttctaagcgctaccctgatggcagagctgcacctccacctgcacccaggccatgactgt

SEQ ID NO: 175399 - DNA, 201 bp, Homo sapiens
tgaaatggagatgcatttcagcagatggtggctgagtcacatttccatgagataccgtcactaggcagtcactgccaggatttctcggggaaggcaacacyggtcccatcctcctcccctttagaccagagagctctcaccttagcagcagcctagccagctgacctcccagctcctttctgcaccaactcagctctggcc

SEQ ID NO: 175400 - DNA, 201 bp, Homo sapiens
ctcctgccaagctcatctcctcatgccaccacttctgatctagatcactcattgctggctttgtctagctctttcccggacccatggcttcgggccccatrgggaacaagtctgtctttcctcccatcgccctgctatgtttccagtcaggcgcttctgatctgcaggggagcccctggttctggtcttctccaattggca

SEQ ID NO: 175401 - DNA, 201 bp, Homo sapiens
cctcctgccaagctcatctcctcatgccaccacttctgatctagatcactcattgctggctttgtctagctctttcccggacccatggcttcgggccccayggggaacaagtctgtctttcctcccatcgccctgctatgtttccagtcaggcgcttctgatctgcaggggagcccctggttctggtcttctccaattggc

SEQ ID NO: 175402 - DNA, 201 bp, Homo sapiens; identical to SEQ ID NO: 31228

SEQ ID NO: 175403 - DNA, 201 bp, Homo sapiens
atttcccctagtggaatgttcactgtttatataatcacaaagaggagttagagttaagaaaaaatcctctgcccccaccaatgagtgtgtgtgtgtgtgtkcattttgctagtcagctgtataagaaaaatggttatgttggcacttttcattctaaagtgctctttttctcaaaaacaaatttttttattcaaagccaag

SEQ ID NO: 175404 - DNA, 201 bp, Homo sapiens
ccagcagcagggaactgggagtcagttgtggcaatatagatcacagaaggaagattctgggcagccatcgaaactgtttgagatgaatttttaataatggaggagaaaatgttcacatttcagtattaagtgaaaaggcaatttgccaaaattaaactgtatttttttaaataggtagacaaaaacagaagtaagcaagag

SEQ ID NO: 175405 - DNA, 201 bp, Homo sapiens
gaatacagtagtgatgaaaacgtagacacaggccttagtgaaaggagacagacagtaagtatatatataatatgcataatagctataactgttattttttwaattattgcagagtctgggcctaggaggtggtgataagggttcttatctagtcagtgatctaaaatcaaacaatccaacagtcacacaaacatgtttaaa

SEQ ID NO: 175406 - DNA, 201 bp, Homo sapiens
agccttccctggccaccctagctaaagtaaccactccctacccctgtcccccatgtcactttctatcacatcatcctggcctttttcttcacaatgtgtcrccatatctgaaactgtcttgttcatgtattcgtttttttgtttcttgtcttcctcctcctctagaatgtctgctcctcaagggcaggaactcttgtcttc

SEQ ID NO: 175407 - DNA, 201 bp, Homo sapiens
ttgcagtgggcagagattgtgccattgcactctagcctaggtaacggagcgagactgtgtctcaaaaaaataaaataaaataataaaataaaatagaatayagcagagtcagcgggaagagcgtgatgacgaggcatcttatttttgatggggtgttcagggcagggctctctgaggaggtgccatttgagcgggcactgc

SEQ ID NO: 175408 - DNA, 201 bp, Homo sapiens
tattatccaacttattatcaatccaatgtgtgatcactataaaaattataaatgaactactacttttacattttttcaaaatatcctctaaatctgatgtrtattttgcactcacagcacatttcacttcagaatagccacatttcaagtgctcagtaccctataggtgtagtcacaatacatgtgactaccgtattggat

SEQ ID NO: 175409 - DNA, 201 bp, Homo sapiens
ctctactgaaaatacaaaaattagctgggcgtggtggcgggcgcctgtaatcccagctactcaggaggctgaggcaggagaatcacttgaacccaggaggyggaggttgcagtgggcagagattgtgccattgcactctagcctaggtaacggagcgagactgtgtctcaaaaaaataaaataaaataataaaataaaata

SEQ ID NO: 175410 - DNA, 201 bp, Homo sapiens
gaacagaaatgtgaccataggaagcagccacagggaggcccctggtgactgcacacagtcaggccaccccaggactggaggcagggaggcgtctagggagmggtttcctcccagctttccgcacagcttgagctacgcaacggtccgcaccacctgggagccacagggcagaaatttgacccgtccctgccttggaggagc

SEQ ID NO: 175411 - DNA, 201 bp, Homo sapiens
ttagtaacataaagctctattaaaattattattcttttttaccctggttataaagagttataatgaggagcaaaaataaaggaaatcaaattcctaggcacagcctagaactccatctgattcagctactatgtcaggagggcctgcatgaagaacagtatttccttgagaattacttcatttgcattacttgtttgagag

SEQ ID NO: 175412 - DNA, 201 bp, Homo sapiens
tgtaagtgttattttttagaatatagcagaggtgggacatggtggctcacacctgtaatcccagcactttgggaggccaaggcgggaggatcacctgaggycaggagtttgagactagcctggccaacatggtgaaaccccatctctactgaaaatacaaaaattagctgggcgtggtggcgggcgcctgtaatcccagct

SEQ ID NO: 175413 - DNA, 201 bp, Homo sapiens
agcaagcaggtggcagagaaatggagcctgggcttgtgactcactccccagggggcatctttctttgttctttcatgaatccctcgaggggagacccctttatccctggaccgccttgatccctgggcctctgggtgcccggccctgtgccgggggctgacgccaatgcaccggcccccaagtccttccgtgggtggctcc

SEQ ID NO: 175414 - DNA, 201 bp, Homo sapiens
ttttgttctttggtctcatctggggatttgttttggggtgtatatctgtgtttgtctgtgtgtgtgtgtctctctgtatgtgcatgtctgtgtgtgtgtgygcacacacatgcttgtggggagaggctgtgctaggaatgtgtaaaggaaaggaagggaccagcatgtttcaggctcagtacatattatttgttcctgtag

SEQ ID NO: 175415 - DNA, 201 bp, Homo sapiens
ggatggatggatttgtgagtgaatgaatagataggtgggtgggtggatggatgcatgcatggatggatggatggatggatggatggatggatggatggatrggtggatgagtggatggatggatggatggatagatgggtggatggatagatgggtgggtagatggatggatgcatggataggtgggtgggtgggaggatg

SEQ ID NO: 175416 - DNA, 201 bp, Homo sapiens
ggatgggcagatggatggatggatgggtggatggatggatcgatttgtgggtgagtgaatggatggatggatggatggatggatttgtgagtgaatgaatrgataggtgggtgggtggatggatgcatgcatggatggatggatggatggatggatggatggatggatggataggtggatgagtggatggatggatggatg

SEQ ID NO: 175417 - DNA, 201 bp, Homo sapiens
gtgggtggatgggcagatggatggatggatgggtggatggatggatcgatttgtgggtgagtgaatggatggatggatggatggatggatttgtgagtgartgaatagataggtgggtgggtggatggatgcatgcatggatggatggatggatggatggatggatggatggatggataggtggatgagtggatggatgga

SEQ ID NO: 175418 - DNA, 201 bp, Homo sapiens
ggtgggtggatgggcagatggatggatggatgggtggatggatggatcgatttgtgggtgagtgaatggatggatggatggatggatggatttgtgagtgratgaatagataggtgggtgggtggatggatgcatgcatggatggatggatggatggatggatggatggatggatggataggtggatgagtggatggatgg

SEQ ID NO: 175419 - DNA, 201 bp, Homo sapiens
caccaaggcaagggttggagttggacaagaggtcccagtcttgcagtcaaagtcagcagaagggtcactgtgggtcaaggggagcaagccccttagggtcmcagtcagtcacattgggatccacccaggagagggtcacgtcaaccagactttcccagttggtcagggggcacccacagtaatgagggtcatggtcaaggg

SEQ ID NO: 175420 - DNA, 201 bp, Homo sapiens
ctcagcacagaccagcaccatcccagctaaccaccctggtcatccaccatgctttatttgaaagaccctccatgtctgagtttctcccctcaacctctgcrgcatctctatggaacatttcacccccaccccaaatttgagtttcttggtttccaaaggataatttttttttttaagaatagagtcatgttatctccccac

SEQ ID NO: 175421 - DNA, 201 bp, Homo sapiens
gtgccgcctccagcttccgtaagctgcccgggctctggggggctctgggacaatcggggctgggaagtgactgtgctcttattgtacactctttatttctstgtatctttggcttgtgctctttgtaattaatgggatttgtctgccttttcaacactatactgagcaataacaataaatgcacacgtggaaatgcagaca

SEQ ID NO: 175422 - DNA, 201 bp, Homo sapiens
gtcagtcagagggtcattagggtcccaagtggccaaaaagtctggttcagtcaaggggtcacccttggtcaagaggacatcagtgaccaaatggtcccaayccaccacagggtcccggcagccagagggggacagacatggaggggacacagagtgtcccactggcctagggtcatatgtggtcaggaaaagcccggacca

SEQ ID NO: 175423 - DNA, 201 bp, Homo sapiens
cttcattaacatgtctcaaaaatcatcacacaggtgtgaagaagggggatggccttcagctaccaggtacagtaagacaccctcagggtagatgggctttyagaaatagcagcaggctttggtcattgggccctgcccctagaccaccagcacacagctggaggaggccacatgcctgtgggtggctccaccccccagacc

SEQ ID NO: 175424 - DNA, 201 bp, Homo sapiens
ccagcagactcaagttcctcaaggaggcaggcaggctcacacagaaggaggagatcccggaggaggagctcaacgaggacgtggaggagatcgaccacgcrgagcgggagctgcggcggggccagatcctgtggttccgaggcctgaatcggatccagacacaggtacaggaggctcttgggggctgggcccaggcctggc

SEQ ID NO: 175425 - DNA, 201 bp, Homo sapiens
tggctcacttacttactgcagtatcctcaaggttcatccatgttgtagcctgtgttcaagtttctttctctttaaggctgaataatattccattgagtgtrtagaccatatttctcccctctcttcagcttatcctccctctgaagcccttgcttgctgttggacaagttgctctctgagcctgcatggtggagaggctgc

SEQ ID NO: 175426 - DNA, 201 bp, Homo sapiens
gggcttgggaggagggcccagaaccaactcagggcctaaggggcctgattcccaaggtgctcacacatccaggcagtgggaccccatgggtgggaggcatwtttcttgccttcaagctgtctgcaggctagagtgagaagctacgggggcaaaaattaactaaaagataaataagaaagtttagtttcatccaaaaggact

SEQ ID NO: 175427 - DNA, 201 bp, Homo sapiens
gtttgcccaagttccagaccctgtcacagctctgagagcatgcagcccaaaggctcctgacccaggacacagggcttgggaggagggcccagaaccaactmagggcctaaggggcctgattcccaaggtgctcacacatccaggcagtgggaccccatgggtgggaggcatttttcttgccttcaagctgtctgcaggcta

SEQ ID NO: 175428 - DNA, 201 bp, Homo sapiens
gtccaggcacaatccctccttcaagagcgtatggccaccacaggcagagacacacccaccaatgcaacacagggattcttgtgatggagacccagacatarcacctgtcctgagagctggaagaggcagaggggcctcatatctcggccagaaataaaggaaagacattttggaaaagttactgagggggtgaaattccac

SEQ ID NO: 175429 - DNA, 201 bp, Homo sapiens
caagggagacagcactggatggagaatccaggacccccaggaatgggctgccagaccccaggcaagctcctccctatctctggacatctgagcaagggggyttgtcccaggtcctatactggtcgtctgggtactactgctctgatttttgccttatatctatctaccactgctcctgttgtttatgtaatattttctctc

SEQ ID NO: 175430 - DNA, 201 bp, Homo sapiens
cgcaatgtctttgacggcatcttccggaaccccatcttctgcaccatcgtgctgggcacctttgccatccaggtagtgaggcccccaccctaaccaggccyggggtgggcagcaagcggctggagcccctgggcaggaccctgagagcccagccctctgtgctggtccctgatggcctctctctctctctttctctgctcc

SEQ ID NO: 175431 - DNA, 201 bp, Homo sapiens
tccacagaaaaagtggaagacagttgcccaaggcctttcttccccagaggagaaagggctttgctgacccttcagtcctagtctctgaccagctgacagcmcagccctggccccccactgtccaagcatgccttgatgtcttggggattcacgtcactgctcagaagaggcccccacgaaaggccaggcatctcccctctg

SEQ ID NO: 175432 - DNA, 201 bp, Homo sapiens
aaacacaggaggaggttgcagtgagccgagatttcatcactgctctccagcctgtgcgacagagagagactccatctcagagaaaaaaaaaaaaaaaaaaagaatgccgtggactgacatgtattgttccaagtgttttgcttgacttatttgattacaatatccctctagcagttattattcccattttacagatgagga

SEQ ID NO: 175433 - DNA, 201 bp, Homo sapiens
taaacacaggaggaggttgcagtgagccgagatttcatcactgctctccagcctgtgcgacagagagagactccatctcagagaaaaaaaaaaaaaaaaaaagaatgccgtggactgacatgtattgttccaagtgttttgcttgacttatttgattacaatatccctctagcagttattattcccattttacagatgagg

SEQ ID NO: 175434 - DNA, 201 bp, Homo sapiens
gcacctgtagtcccagctactcaggaggctgagatacaggaattgcttaaacacaggaggaggttgcagtgagccgagatttcatcactgctctccagccygtgcgacagagagagactccatctcagagaaaaaaaaaaaaaaaaaaagaatgccgtggactgacatgtattgttccaagtgttttgcttgacttatttg

SEQ ID NO: 175435 - DNA, 201 bp, Homo sapiens
gctgctttccctcagtgagaaatatctaggataattttagcgagagaagtcattttttcccaaacttatttatttatttttaatttcacagtaattttatygatgtgggaagcatatttcaactggatcgatgcctctggggtttgagtcgtaatcatctccggatcctcagtgtccagagcagttagatgcgccagagct

SEQ ID NO: 175436 - DNA, 201 bp, Homo sapiens
cctgatcaacctggccaactctactaaaaacacaaaaattagccaggcatggtggcgtgcacctgtagtcccagctactcaggaggctgagatacaggaaytgcttaaacacaggaggaggttgcagtgagccgagatttcatcactgctctccagcctgtgcgacagagagagactccatctcagagaaaaaaaaaaaaa

SEQ ID NO: 175437 - DNA, 201 bp, Homo sapiens
tatcctgaggtgcggtaaccaagtgtcccggcagggagagctacatggggaagaatccacttctgttctgccacccctcccgatgactcctgcggccctcyggctggggctgcctgctagcagtctggcttctgggtgaaggcccagttctttgtccatcccagttgagcctctttcttgaagggcagcacttcaccctgg

SEQ ID NO: 175438 - DNA, 201 bp, Homo sapiens
gcaggaggcccaggtcagctacatgcacctactgggtgcagctcctgagctcccagtctgtaggattttctggataagaatgctgtggattgctgggcgcrgtggctcacacctgtaatcccagcactttgggatgctgaggtgggcagatcacttgaggccaggagctcgagaccagccaggcctgatcaacctggccaa

SEQ ID NO: 175439 - DNA, 201 bp, Homo sapiens
ctgggaggcagaggttgcagtgggccaagatggtgccactacactccagcctgggtgacaagagtgaaacaccgtctcaaaaaaaaaaaaaaaaaatggartgaaggagccagcacatgtgcagtgcccaacacaggcgggctccaggtgaatgcccggagtcagagcttccctgtggaaggtgtgccacagtaggatgca

SEQ ID NO: 175440 - DNA, 201 bp, Homo sapiens
tgaacctgggaggcagaggttgcagtgggccaagatggtgccactacactccagcctgggtgacaagagtgaaacaccgtctcaaaaaaaaaaaaaaaaaatggaatgaaggagccagcacatgtgcagtgcccaacacaggcgggctccaggtgaatgcccggagtcagagcttccctgtggaaggtgtgccacagtagg

SEQ ID NO: 175441 - DNA, 201 bp, Homo sapiens
ctgccagccctactgtttgccagctgtaggatacccgctatgggccccattaaggagtgaaagagccaggccaggcgcattggctcaagcctgtaatcccrgcacattgggaggccaaggtgggcagatcacttggggtcaggaattccataccagcctggccaatatggtgaaaccccgtctctactaaaaatgcaaaaa

SEQ ID NO: 175442 - DNA, 201 bp, Homo sapiens
cgcttgagtccgggaggtcaaggctgcagtgagccgtgattgtgccactgcactccagcctggatgacagagcgagaccctgtctcaaaaaaaaaaaaaaaccgtttaaaaaatgggttatgctatggaaaactcctgggacctcctgctgggcagtgtggcttcggcttcaccccggtcttcacttgacagtctggatgg

SEQ ID NO: 175443 - DNA, 201 bp, Homo sapiens
atggggcctgggagcctgcagaggtccttggagctcagtggccttttgaattgagctggctctgggaccacagtctttggcccctgtcttgggttgatggrgccactgtgggctagcctgaaaccctcaccatcatggtgtccccgagaaaacaagcttgaggctctgagccatctgtttacaaacaagtcttaggagaca

SEQ ID NO: 175444 - DNA, 201 bp, Homo sapiens
gggtgggttgcggacagcagcaacccctttctagccaagtagctattccacaccacggctgtcctctgctcacccaggttgggggttgggggttgggggggtgctctggactggcctgccccaatcaggcaagggccctgggggtctcgggccctccatgcagaggcccagcctggctcgaccttcagaagggtaagtgag

SEQ ID NO: 175445 - DNA, 201 bp, Homo sapiens
cctgtcctcgcagtccagaatgagttttccagtctgaggtcactttttagaagccatgtcgcccacctttaacacagccggccgtccacctttatcgggtytccacagaaaaagtggaagacagttgcccaaggcctttcttccccagaggagaaagggctttgctgacccttcagtcctagtctctgaccagctgacagc

SEQ ID NO: 175446 - DNA, 201 bp, Homo sapiens
ggcgggtgttgcagtgagctgagatcacgccactgtcctccagcctgggcaacaacgagactccatctcaaaaacaaaacaaaacaaaacaaaaaggatasaggactgcatcagacaccctatcagcagcgtctacacagcagtgccctgccatgtgacagctcaggtgttagaatgaagccacatgggagggtccagagc

SEQ ID NO: 175447 - DNA, 201 bp, Homo sapiens
ccccttctctgacccattccagcaccttatcctggccccgtggaagggaccctcagcaaggcttcctggggcagggcatacacgctcacaccaccaccgaytctcacaatgcttccacttgggctgcctggttgggtcttccactcagtgaggcaagcacatttgcctccaccccacattacaaacgagggcaccaaggct

SEQ ID NO: 175448 - DNA, 201 bp, Homo sapiens
gctgctgtttgaaaaacagattgtcatctcattaaatccctgcaacagttctaggcacttgatggtgaaatccccattctacagacagagaaactgagtcrctcagctagtgggtggcaaagcaaggttagtttgaccaaatcttatgctcgatgagcgggcacccacaaagcctcctgggcagcagaatgatgttgtatg

SEQ ID NO: 175449 - DNA, 201 bp, Homo sapiens
ccgagaagaggtcctgcaactcgtggcacagaaggtgctggtgacgtgggcggagggcattctgggaacgtggaggggccaaagtctggctgctgtggacwagatacgtgggggtgtgaggaaggatggggacagaagaaccagctcctctcagccaaagagacaggtctgaaagggtccctcccagaacctggacagtgg

SEQ ID NO: 175450 - DNA, 201 bp, Homo sapiens
aagccagtgtgctttcctcccacagggaggtttaaacaggtggccaggaagtgacagaagggccccaatttgatgggatgaggaagtgggccgccccactwccccacaactccttcacccccaccgcaccccaccagccttctgagggggatctgcttcctggggactccccagcagaggaggctgcccatgtgcctgctg

SEQ ID NO: 175451 - DNA, 201 bp, Homo sapiens
gaagccaggaagacaaaggacagcacaggggagggagaagtgagaggtgaggtcagagagctaggtgaggggctgtgccttaattccaggggaggtggggmactcgagggtcttgagtgggctgggtgggggatacaggctccccaagctgctgtttggagagtctgctgcagggggcaagggcggaagcagggagaatgt

SEQ ID NO: 175452 - DNA, 201 bp, Homo sapiens
acatattatttctactcatcttccattcagatgaggatttagtcacatggctacacctagctgcagagaaggctggaaaatgtggtctatctaagcagccrtgtacccagacaactctcaattactctgggagagtaggagagtgcatttgagagaacaataggaaatctgtcctatctgggaattgttgggatgcagagt

SEQ ID NO: 175453 - DNA, 201 bp, Homo sapiens
gttctgccacccctcccgatgactcctgcggccctccggctggggctgcctgctagcagtctggcttctgggtgaaggcccagttctttgtccatcccagytgagcctctttcttgaagggcagcacttcaccctggccacgacggagcacacctgacatcgctgggcagccccactgcctttggaagtcgtccccgagtc

SEQ ID NO: 175454 - DNA, 201 bp, Homo sapiens
ttggagtgcatgccccatggacccaacatgtaagagatcagagctctcactgctcatctttcagcatcagacacaacttacgttgcacaagcttgtcctcsgagccagagcttagagttgccatctcatctgaccttcccagtagccgccattagcccttttcacaaatgagaaaactgatgcccagagagaagaaacttt

SEQ ID NO: 175455 - DNA, 201 bp, Homo sapiens
tggagaagcaggaagcacatggcatcgtgcgcattttacaaatgaggagcctgaggccagagaggttgagagacttgcccaaagtcacacagcccatcacrgtaaagcagggatttgagcaagggccaccagactccagctcccaaactctttgcaccacttcggaattgccgcctgtgggtgcaatggaggactgaggca

SEQ ID NO: 175456 - DNA, 201 bp, Homo sapiens
tcccaatccaccacagggtcccggcagccagagggggacagacatggaggggacacagagtgtcccactggcctagggtcatatgtggtcaggaaaagccyggaccaccaaggcaagggttggagttggacaagaggtcccagtcttgcagtcaaagtcagcagaagggtcactgtgggtcaaggggagcaagccccttag

SEQ ID NO: 175457 - DNA, 201 bp, Homo sapiens
ggctggggcaccagaggacatggggggcagccggtcacaatcaggcccagggggatgaagggtcccagccaccgaagagggtcccgttggtcaggagagcrtagccagtcatgcggtggcagtcactcagtggaccagggtcagtcagagggtcattagggtcccaagtggccaaaaagtctggttcagtcaaggggtcac

SEQ ID NO: 175458 - DNA, 201 bp, Homo sapiens
acaccaggggagcacaggtgcagggcgtagccagccagaagcaggtttcttccccagagcagagagagcatggctgccacgtggcacacgacacacctgcrcgcctccccccgaccccccacacacataccacatgctctcacatggtccccttatgcctggagcaggtgttgtagctcacaagtgctgtcacagccctgc

SEQ ID NO: 175459 - DNA, 201 bp, Homo sapiens
aaacaaatgtattttcagtgggctgctctcacaagtagctggtttgtagattccctccagtctagtcctgccagttcactttcttttatttttttttttttctgcattttagagaagaggaaacgggggcctagagataaatgcctgggctctgatatatttgaccacttagtggagccaagttctcctctcccctgctac

SEQ ID NO: 175460 - DNA, 201 bp, Homo sapiens
cccactcctgtggctgctaaggaacagcacggcctcctcagagaggtcccattgtgccctctcagggcagcacggggaagtggtaggggtcacacccaccrtggtctccagggggatttccctgagagggtggggaagggtggctctgagggcagaggtgagtgaggggactgtcgctcagggctgggggcacccacccac

SEQ ID NO: 175461 - DNA, 201 bp, Homo sapiens
caagatattgtacagataaggaaactgaggcccagaagagcaaagcctcttactcagggccccacagcagcagtggactaactacaaccaaaaggctggtyggtgctttagctgccaagggtggagttaggggatgagggtgtcaggggtgctgaggtcttcttgaatctgtaagtgccttacagcagactcacctctgca

SEQ ID NO: 175462 - DNA, 201 bp, Homo sapiens
cttagtggccagccctgctcccctgcccctccccaccccacctccctcctcaccgatcctcaggccagaaagggaggcagccctgctggcagccaggcctsggtgccgtggccaccttgcagggtgtggccatacgctgcagacttctgcagtgactgtaggtgctggagccgagcagtcagagagggtacttgtgtccgt

SEQ ID NO: 175463 - DNA, 201 bp, Homo sapiens
aggagtttgaattacaatctatgtgcagtggtgaagttattgggggtttccagtggtccgatcaatgtttgagaaacatccttccaaagccaggagaggaygggggggtgaggggcacatcagaaagggccagatcacagttctaggttgggggtgccagggtggtggggcggggagaatccaaggaggacatgagggcca

SEQ ID NO: 175464 - DNA, 201 bp, Homo sapiens
ggacccaacatgtaagagatcagagctctcactgctcatctttcagcatcagacacaacttacgttgcacaagcttgtcctcggagccagagcttagagtygccatctcatctgaccttcccagtagccgccattagcccttttcacaaatgagaaaactgatgcccagagagaagaaactttgcagccagcatgcaaccc

SEQ ID NO: 175465 - DNA, 201 bp, Homo sapiens
ctgacctggccgctggctgaggggagatgcctgagtcccggcacctgacttgggtgcctccatgcccacttgtggcctcctgtcctcacttaccacccctsggccccatgtcgcaatggcgctggctgagtttcatgatgccctggcccccacatccgctcagggccattgtggggtgggtgctcagagcatggatctcac

SEQ ID NO: 175466 - DNA, 201 bp, Homo sapiens
ggaggtgggcatggatccattcctcaaaggcagttagttgccttttataaattttgaaagtagtgtgttgtcaggacacattttactgttgtaaaacttaycatgaaaaagcttagaggaagccacttatatgcagaactagaagagactcagaggaggtggaggggttggagaggagaggagagcgggggtcctggtcgg

SEQ ID NO: 175467 - DNA, 201 bp, Homo sapiens
tcttggagtgcatgccccatggacccaacatgtaagagatcagagctctcactgctcatctttcagcatcagacacaacttacgttgcacaagcttgtccycggagccagagcttagagttgccatctcatctgaccttcccagtagccgccattagcccttttcacaaatgagaaaactgatgcccagagagaagaaact

SEQ ID NO: 175468 - DNA, 201 bp, Homo sapiens
tattgtacccattttacagatgaggaaaccagggctcatgtgagaccctagagcagagcccagcccagcccgttggtccccaagccctctctccactgcayagaagaaagtatagggtccgtaaaaattagcttcatttttctcatgaagccagcttgcttggagaggcccagaagatggctgattttggctctgggagac

SEQ ID NO: 175469 - DNA, 201 bp, Homo sapiens
tctccttacacgcaagcaagaaggagttccattcacttgcccccaaagcctttagaagatttcggatttctatccccttctggcttcagagcaacagacarggcttttgtttactcagataccacccctatccccaaataaagtgacataatagtcccccaggctactcctgaactgttgagagccattagggctccatca

SEQ ID NO: 175470 - DNA, 201 bp, Homo sapiens
cccgggaggcagagatctcagtgagctgagatcatgccattgcactccagcctggatgacagagtgagactccatctcaaaaaaaaaaaaaaaaaaaaaaaccaaataaatgaataaatggattgagagagagagagagaaggaagctgatagggagccctatagcatccagtgccctctgctgctgctgtttgtcgggcg

SEQ ID NO: 175471 - DNA, 201 bp, Homo sapiens
gaagccgggggcagctgagatttccagagaactcccagcctctcccgatcccatgggagctctggagcaacccaaatccatccctgccctcctctgctcaracctcctccgtgactcccactgtcttcaggataaagtccatggctgcccagaactctagggtctgtcctacctcaaagcagatggctgggctttgggact

SEQ ID NO: 175472 - DNA, 201 bp, Homo sapiens
ctgtcctacaccctctgcaacttcagtcattcgccttatctgggctcagaaaccccattttgtaaaaggaggcttcccagttctgctacctatggctcagsataccccacaagccacagcagaaggctttgactccgagactgccaccatctagaccagctcagggcaagggaaagccacctcctgctgttcaggacaggc

SEQ ID NO: 175473 - DNA, 201 bp, Homo sapiens
ttggaactggagggagacaggtaagagcagaggcttggggataccggaggacagagggagggaggactggggattgtagatgccccgtctcccctgccctkgctattgctcagctctggaggacaccctggggcatctccagggctgggcggggagcgcactatgcctaagcccctccctgacgtcctcctgccacctccc

SEQ ID NO: 175474 - DNA, 201 bp, Homo sapiens
tgcagtgcccagtcactgcgagtctgaccctactgggtcacccccaggttctcacacccgggtctcattttcttccctttgccccatgttttctccacctygaagggccgggcgtagggcttctgtttcccagtgccccatgccagaatgtccctgcaagggtggaggcgtggccatgtttataaacgaggcattcactct

SEQ ID NO: 175475 - DNA, 201 bp, Homo sapiens
tcctccgagccacagctgagctttcagatggaaatagctctttcctcgacctctggaggcaccacgcttccttgggaaaacatccccctgttctgcccatrtctgttctgtgtactggaaccacccgagcggacttacattttctacttcactagacctcttttagaggaggttgatactgcagttgacatttgaactatt

SEQ ID NO: 175476 - DNA, 201 bp, Homo sapiens
gcgatagttgactggaagacttaccctcccatcttccctcacttccttcagtcagggcatccacatgggccacgctctctcctgttggctcacccctgggrtgtctatataggagtcataaactgtctcacagcagcaacttactcaagtgacacagcagactcaagggacatgggttctaattctgcccctgccactccc

SEQ ID NO: 175477 - DNA, 201 bp, Homo sapiens
catgtagctttgaaggaagaaagcaggtctctgcaagcttctgtgctgcctctgaaggcagtttcctataaagtggtgcctttcctgtgccggctgggctmctctaccgggccatgtctggctgccccgggaccattttgtgggagccatgggggcgtcatctggatgaactcattctagcccagctctgtcaaacacctg

SEQ ID NO: 175478 - DNA, 201 bp, Homo sapiens
aaacaacagatgtttaaaagcctttatttaatgaaaacaggaagcacccatttcctggctgctttccctcagtgagaaatatctaggataattttagcgaragaagtcattttttcccaaacttatttatttatttttaatttcacagtaattttatcgatgtgggaagcatatttcaactggatcgatgcctctggggtt

SEQ ID NO: 175479 - DNA, 201 bp, Homo sapiens
gatgcagaattgtggcatcttaactggaggagaaggcacagggcagtggttaagagcagcccctggagcttgagggcctgggcatgattccccaacacttscgagctatgtgaccttgagcaaatgacttaacttcctgtgcctcagtctcctcgtctgtaaaatgggcaaaaatactagtaccaacctcatgggattcta

SEQ ID NO: 175480 - DNA, 201 bp, Homo sapiens
caaagtgtacaccttcaactccgtgcgcaagtccatgagcactgtcatcaagctgcccgacgagagcttccgcatgtacagcaagggggcttctgagatcrtgctcaagaagtaagcgctgggcagggcaccggggctgagggctgtgccctggtgcagggagctggggatgtcagggtcatatagcactggccgccatcc

SEQ ID NO: 175481 - DNA, 201 bp, Homo sapiens
aatgttaggatacccaaagataagtggagcatgaagaagtgagtgaattgctgcaatctcatgatcaaacttgaatggaggaggagttgcttcttatgaawgaacaagttaagaattctcattctcttgctattttcaccacatctgcagtgacctcctccactgaagtcttgaacccctcaaagttatccatgagggttg

SEQ ID NO: 175482 - DNA, 201 bp, Homo sapiens
gggaggccagccaccagggtgacctggagtaagtcacttcacctctttgagtctcagtttccacataatgcccatggggatttccttccttgatcctcatragaggattgcccatgagaaacagtgtagaccacatgtggcatgggtcggcccagaaggacacagaacccacaggttgccagcaggtattgctctgccatg

SEQ ID NO: 175483 - DNA, 201 bp, Homo sapiens
ctgattcccccaccactgccttcagcccagccccactctctcacttggcaggcgagaagatgttccagatcgacagcgggaggaacgcgcccctgcattcrccaccctcagaacattacaccatcatcttcaacaccttcgtcatgatgcagctcttcaacgagatcaacgcccgcaagatccacggcgagcgcaatgtct

SEQ ID NO: 175484 - DNA, 201 bp, Homo sapiens; identical to SEQ ID NO: 31223

SEQ ID NO: 175485 - DNA, 201 bp, Homo sapiens
cgtcagactgagcccttccaggctggagattctaacaggctgtggtcctcccaaacaactggatttcctgcccttgacatgttctctcccactgaaagacrttctgcagcaaatattattttattatttgtcactgccctcgggtaagaatcactcgttccattgatttctgttgtgtataaaggggtgccccagctccag

SEQ ID NO: 175486 - DNA, 201 bp, Homo sapiens
gtgcgacagagagagactccatctcagagaaaaaaaaaaaaaaaaaaagaatgccgtggactgacatgtattgttccaagtgttttgcttgacttatttgwttacaatatccctctagcagttattattcccattttacagatgaggaaattgagggtcattgatacacagtgacctgtccatgggcactgagccagctgg

SEQ ID NO: 175487 - DNA, 201 bp, Homo sapiens
ttggtgctttgtagatcaccctgtggaatttggggctgatcctgacataggagcatcttatgcagggctgagacacacacacacacacacacacacacacrcacacacacgcacacacgcacgcacacacacctggctgctgtttgaaaaacagattgtcatctcattaaatccctgcaacagttctaggcacttgatggt

SEQ ID NO: 175488 - DNA, 201 bp, Homo sapiens
ggggacaccgaagccatctgccggcgcctcaaaacctcacctgttgaaggtaagtgttcaagacttgaacccagggctgcagcctaggtggccaccatctraattggccacagggaccatattcataatatgtaacagcagggatgtgtcagagaaaggctgaaatgccagaatggccattgtagtgcattctagctgagt

SEQ ID NO: 175489 - DNA, 201 bp, Homo sapiens; identical to SEQ ID NO: 31224

SEQ ID NO: 175490 - DNA, 201 bp, Homo sapiens
tcctggagattgccgccatcatctccctggggctgtccttctaccacccgcccggcgagggcaacgaaggtaagatgggcctcagacccacgaaccgcccygcacacctggccaccgcatccacgctggggggcactcatggctcacacaaataatcctctcctcccaggggaagaaaccgaggtccaaggggcagggccc

SEQ ID NO: 175491 - DNA, 201 bp, Homo sapiens
tggggctgtccttctaccacccgcccggcgagggcaacgaaggtaagatgggcctcagacccacgaaccgccccgcacacctggccaccgcatccacgctkgggggcactcatggctcacacaaataatcctctcctcccaggggaagaaaccgaggtccaaggggcagggccccacccatagccaacacagccaaagggt

SEQ ID NO: 175492 - DNA, 201 bp, Homo sapiens
gtgtctccaggtcgtcgcgtcgggctcctgggatttggcggcaactgtgggaggatggcagagtcctcggataagctctactgagtggagtacaccaagarcgggcgcacctcttgcaagaaatgcagcgagagcatccccaaggactcgctccggatggccatcatggtgcaatagtccatgtttgatggagaagtccca

SEQ ID NO: 175493 - DNA, 201 bp, Homo sapiens; identical to SEQ ID NO: 31348

SEQ ID NO: 175494 - DNA, 201 bp, Homo sapiens; identical to SEQ ID NO: 31349

SEQ ID NO: 175495 - DNA, 201 bp, Homo sapiens; identical to SEQ ID NO: 31350

SEQ ID NO: 175496 - DNA, 201 bp, Homo sapiens; identical to SEQ ID NO: 31351

SEQ ID NO: 175497 - DNA, 201 bp, Homo sapiens
cactttggtaatgctgttccctctccacaccacaaaagcgcaaagagcccttgctgagcaccaggaggcagtggtgttctctgtgtgcacacatattctgyacctgtgtatgtgtgttttgcaatgtgctgcagtaggaaagggtgagagggcagactttcctagactctgttcttagacataatccatcacgggctgtga

SEQ ID NO: 175498 - DNA, 201 bp, Homo sapiens
ccattctctcttcaccataactttttcccttttgataaactggaatttcaatgcattgaaaatttcttgaaagtgagtcatttcctgggaattggaaagcrttttgttttttgttttgttttgttttgttttcctctgtagagactttggtttccttcagggctgacattcaaaatactgttaacaacctttgagtttggc

SEQ ID NO: 175499 - DNA, 201 bp, Homo sapiens; identical to SEQ ID NO: 31346

SEQ ID NO: 175500 - DNA, 201 bp, Homo sapiens; identical to SEQ ID NO: 31347

SEQ ID NO: 175501 - DNA, 201 bp, Homo sapiens
tgccatgacccttgggccactcgatgcagcctccccaggccttggtttccctaagcagcttgattaggtgatttctgagtttccaaggaaactctggggtytctaaaaggtcactatcccatatcatgccatgctagaaactgccctctaaccaattccttcctgccttcaaccctcccaggtgctggaatgagctgttgc

SEQ ID NO: 175502 - DNA, 201 bp, Homo sapiens
ttgagggtgtccgaggccttgagagtgggccttggggaggacgctgttctcactttgaacgagaagtcagccaaggtgtcctctaattgtgccaactgtcyttggtgtcttgttagattgtgtctaagtgattaattagtggcaacaagaagcataaaccatgttcttagttttgacatatcagataaccccaaatggttt

SEQ ID NO: 175503 - DNA, 201 bp, Homo sapiens
gcaattgaaatgaacataaatcaaatgaaatgctgtacttacctggcaggggagatactgtgattctgaaggtggttttcctagagtgaggcttatcttasctattttactccagaaatgctgacccctgtgatttccccaaatgtaggaaactcaactgcataatttatgataatgggagactgtatttgtgccctccct

SEQ ID NO: 175504 - DNA, 201 bp, Homo sapiens
ggattccattctttactacttcaagaatgcttgtcagatccttctgaaacgccttgagcccatcattaagaaacatccggaaggtaaatgggaagactggrtaagtgttccactccctttgaaatgagaaaacaatgtaaaccagtactcagacagcaccacagcatgcacagccatcacacacagagacagttcctctaa

SEQ ID NO: 175505 - DNA, 201 bp, Homo sapiens
cggtgccaccacctgggaccccatgatgggaccctgtgactttgccgtggactcagacctcagccttgctctgtgtagaggaagctggcctttccttctcyactgctgacatttaaaagaacagaataatcttgctctccttgttgtgactgtgcagaaatatcattctcttccacagaaggtacgcggcggattcctcta

SEQ ID NO: 175506 - DNA, 201 bp, Homo sapiens
gaaatttcagaccaattcctaagcgctctcgaagatttcccagtcacaataccccagggagtccaaacgtaccaggtcagtgagtttgatttaactgaaayctgcaaactagagctgtgctgagcgagcaagcttttcagagctgtggtttcaagtctgacattctagtcgtggctctttgcttagtccgcgtcagggaga

SEQ ID NO: 175507 - DNA, 201 bp, Homo sapiens
tcttcctgccactgaaccaaataagtgcctgaaaatctcaatttggcctacttcctacacatctaaaacttagaaaaaaggaaattcttaacattctaaayggactcaatttgaaaagaaccactgtggaatattaccaagaaaacgctgtaaaaatgagcatgaggccttacaaaaaaagtagttttgatgcttataaag

SEQ ID NO: 175508 - DNA, 201 bp, Homo sapiens
aatgctgacccctgtgatttccccaaatgtaggaaactcaactgcataatttatgataatgggagactgtatttgtgccctccctggcaaaaaaagaaaaygaaacactaccataaaaccttggtaacttttaaaataaatcaacattctatctccccagctcaagctaaaaggctttatttcttctgtcaggggctacaa

SEQ ID NO: 175509 - DNA, 201 bp, Homo sapiens
ttaaaatgatgttacaataaacatcttggtacatatgtacccaggtatatgtttgccttatttatctttaggataaatttacagaagtggaattactggtrcacttgaaaacttttaagaaatactgccagaagaacaccctctgaaaatactgtttttcacaatagaccagaaggtgcacaggatgtacagtatgctgga

SEQ ID NO: 175510 - DNA, 201 bp, Homo sapiens
agagtgggagaatggatagtggatggatggataataggcagatacattgatgggtgggcagatagttaaatgaggggatggataaatatgagtagataggkgaacgagaagatggatggatggatggatgggatgggtggagaacctaagatttattttctttagaactggtcaccccattcgtctcatccttgatcgtga

SEQ ID NO: 175511 - DNA, 201 bp, Homo sapiens
gcgtttcctgatccttgcaacacccaataaagttggcatcactgcccacacttcactgacaaaggaacagaggagattatctcacttacccagagaaacayggggagtaagggccaggattcagactcagtctcactaacttaagggtcacaaattggtggtctactggctaaatctagcctgaagatgtacttttctttg

SEQ ID NO: 175512 - DNA, 201 bp, Homo sapiens
agtttgttcgagcctccagaccctgtctcctcaactgttcaccaacagagagaaggggctggttagaagccagccttgattgggacctcccaaggagtgcrgagaggaggaagtcctgggtcttagtttaacagaggccaagaaacacacaaaatttagattcttctactattacctgttgcaggaaatggcaatactcat

SEQ ID NO: 175513 - DNA, 201 bp, Homo sapiens
attccccagaaggtgtcctgtactctcggagcccagatgagtacaaaattccaaccatcactgatgtcccagaggagttcaatgtctccttgctgccatcmtcacaaaccccactaaccatctattcgtctaaggtaagcatccaaacctaccactgcacggtgtcatggatcgggtagcacaggacagatgaaagcaggt

SEQ ID NO: 175514 - DNA, 201 bp, Homo sapiens
ttttaaaaaagtatttcccaagtgttaatttgatcatcttagcaaccctgaagtatgataatttattaatatcatgctgcagccaggcacggtggctcacrcaagtaatcccagtactttgggaggccaaggtgggcggatcacgaggtcaggagatcgagaccacctggctaactcggtgaaaccccgtctctactaaaa

SEQ ID NO: 175515 - DNA, 201 bp, Homo sapiens
ttctgaaaattaaaggcttctgaggcaactcttgtcttccctgtagagtgtggatcctcaccagcctctccaagacccagttggacaccctatcatgcacytgtcagctcttaaacatgccactggggaagccatgttttgtgatgacattcccatggtggataaagaacttttcatggctttggtgaccagtagcagggc

SEQ ID NO: 175516 - DNA, 201 bp, Homo sapiens
ttttgagggtggtttttcctttttcataactgagtccagtcatctttagaaatctaaaaacagatggaaagaaaataactctgccctgcaaacctgtttcmtgtccaactgcagattgggccagcaccaaggccctccgacagccaagagcaggcagctccgggtgtggatgtggggctgttgttctagctgcagggtgga

SEQ ID NO: 175517 - DNA, 201 bp, Homo sapiens
ttagcaaccctgaagtatgataatttattaatatcatgctgcagccaggcacggtggctcacacaagtaatcccagtactttgggaggccaaggtgggcgratcacgaggtcaggagatcgagaccacctggctaactcggtgaaaccccgtctctactaaaaatacaaaaaattagccaggcatggtggcacgcacctgt

SEQ ID NO: 175518 - DNA, 201 bp, Homo sapiens
actaccttgtgttttatattgaacctcaccaaatgctaacttgcactgagctatgccttccggattcttttactaggcagctgcactggttcatatctacrcagatgggtctgtgttggtcacacatggaagcaatgaactgggacaaggtattcacaccaaaatgctacaggtaaaataaataaaattaaaccattattc

SEQ ID NO: 175519 - DNA, 201 bp, Homo sapiens
  misc_feature (1)...(201): n = A,T,C or G
ctgttaggatcattctaatgtaatctaagtcgtatcgaacatactttacgtgggaattgcttgtagcatatacatagttagatttcctatctgattttgtnattgtcttagattatcttccctgtattactaaagccacagttttctatagcacagaacaattttatttcttccattggcattaataatttttataattag

SEQ ID NO: 175520 - DNA, 201 bp, Homo sapiens
atcggtgcagatgtcaacggcagagctgtgcaggtgagtcttcctgtctctccttggtgtgcctctcccacatccctggtttttatgactagatacaggtrcaatagttgacttcagagaagtcatctgtgtcactacacatagtctgaggtaattaaaatgttgggagagtgtatttggagtaggctaaattgagatgac

SEQ ID NO: 175521 - DNA, 201 bp, Homo sapiens
ctgtaatcttcaccatcaaggtaaacagggctggccggtctctccctaaggttgtagaattaaaagtacctttgtaaaaatcttaatgaaggatctaattktttttccttgccactggtttgctctggaaaaatcaactttctttggaaaacattacttgcatgagctgaaattatctttggttccaaggagtggaaaaga

SEQ ID NO: 175522 - DNA, 201 bp, Homo sapiens
gctgattttctactagccagatttcacacgatcaggctccccaaggcatggtctgcagtgacccctgcagtggccgaaggaggagaggcagagctgagaaygctgggtgttgggtgagagaaggtaggcaataaggcatacaatacagcccggaggaggccgaaggtccttaaagccatgggcacgttgtcatgagaggct

SEQ ID NO: 175523 - DNA, 201 bp, Homo sapiens
gcttctggatgaagtctcgctcccaggctcagccccgggtggccgggtggaattcaagaggatgaggaccctagtcgtcagcttcctcttcaaattctacytagaggttctgcaggaactgaagaagctggtgaagctagtctctgtgcctgtgggtgctctggtgtattcgctggctggggctgctgaaacaaagtagca

SEQ ID NO: 175524 - DNA, 201 bp, Homo sapiens
ctgtagagtgtggatcctcaccagcctctccaagacccagttggacaccctatcatgcacctgtcagctcttaaacatgccactggggaagccatgttttstgatgacattcccatggtggataaagaacttttcatggctttggtgaccagtagcagggctcatgcaaaaatcatgtaagtaaacgaagagctttcaaga

SEQ ID NO: 175525 - DNA, 201 bp, Homo sapiens
ttaagcatgagagtgactttcaaacaattggaaccaacgctctcaactcctgaggtatccaaaggggctcctatgaaaaccaggaggaatgttctttacargcgactttttgcacaaaacagaactaagcttcagcatcccaccaggaaagtttgcttctctgaccccctccactccctaagactggtgtttcactacctt

SEQ ID NO: 175526 - DNA, 201 bp, Homo sapiens
agatcatctgtgctgtggttgcagaaacagacgtacaggcaaaacgagcagctgaaaagataaagctcacctatgaagatctggaacctgtaatcttcacsatcaaggtaaacagggctggccggtctctccctaaggttgtagaattaaaagtacctttgtaaaaatcttaatgaaggatctaattgtttttccttgcca

SEQ ID NO: 175527 - DNA, 201 bp, Homo sapiens
aaagggaacatgagagctgccttggactatgtctagactcctgaggtctgatgtgttattacatatgagcagagagtagaagagtaactgacagatgaggrtccagggagccagatttcagctcaggggaaacaaaaaaaaatgtaaaatggaactgctcataaaggaatggggattccctgtcctcacctgtgttccagt

SEQ ID NO: 175528 - DNA, 201 bp, Homo sapiens
  misc_feature (1)...(201): n = A,T,C or G
ggggtgggaggacaggcaaagggaacatgagagctgccttggactatgtctagactcctgaggtctgatgtgttattacatatgagcagagagtagaagantaactgacagatgaggatccagggagccagatttcagctcaggggaaacaaaaaaaaatgtaaaatggaactgctcataaaggaatggggattccctgtc

SEQ ID NO: 175529 - DNA, 201 bp, Homo sapiens
tcttctgtcaggggctacaaggccttcatggactgggagaagggggtgggggacccatttccttactatgtctgcagagctgcctgttctgaggttgaaaytgactgcctgacaggtgctcacaaggtaagtcaagtctaactttcctcttggcaaatcaaaacaacaaaagtgtgttgtatagtaaatagcccaattcca

SEQ ID NO: 175530 - DNA, 201 bp, Homo sapiens
cccacctgtttcagattagagagaaaaatatgtacaaaacatatctacagatatgtagataaacatatctacagatatgtagataaacatatctacagatrtgtagataaaaccatctacaaacaagcattcaaccctgagaccctgataagatgttggaatgagtgtctagacaagtcttcctttcacagcagaagaatg

SEQ ID NO: 175531 - DNA, 201 bp, Homo sapiens
attaaatgagttaacaggtgtaaagcacttagaacagtacctggcacatggttagcactcacccaatatagcctatgttataacaatattatactgtcttkgttgggcatagtggctcatgcctgtaatcccagcaccttgggaggctgaagcaggtggatcacttgaggtcaggagtttgagatcagcctggccaacatg

SEQ ID NO: 175532 - DNA, 201 bp, Homo sapiens
acggcctttcgtggatttggcttcccacaaggagccctagtaacagaatcttgcatcacagctgtggcagccaaatgtggccttccaccagaaaaggtaakgttgcaacaaaggccataaccaaagttgctgatgaaccagactgggaaacccagcttctttgacccaaggaaacacactagaagaaccacatgaattagc

SEQ ID NO: 175533 - DNA, 201 bp, Homo sapiens
gcttctctgaccccctccactccctaagactggtgtttcactaccttgtgttttatattgaacctcaccaaatgctaacttgcactgagctatgccttccrgattcttttactaggcagctgcactggttcatatctacacagatgggtctgtgttggtcacacatggaagcaatgaactgggacaaggtattcacaccaa

SEQ ID NO: 175534 - DNA, 201 bp, Homo sapiens
aattgctctgtacttcagtgtcttcatctgtaaaatagggataacaacacccacctcactgggttgttgtgtcaggggttagacagcgcgtggaacacacyggtgttaggtaagtgctaggcaccctcgagtcctcttcccatccaaagaagccagtgggaggggccctccctgacaagctgaacccacaccctctgcaaa

SEQ ID NO: 175535 - DNA, 201 bp, Homo sapiens
tcctggggtcatctgtgttctttgccattgctgacgctgtggccgcagtgcgaagagaaagagacatagctgaggacttcacggtgaagagcccagcaacrccagaatgggttcgaatggcctgtgcagatcgattcacagaaatggtaggaaattgtttattttcctaaaaggtgatttgtctatttcctgcttcttaga

SEQ ID NO: 175536 - DNA, 201 bp, Homo sapiens
tcaaatgcgactccaatgtggttactattgctaaacagcgacatctaagacagcagccactgctaaggttgaactaagcctattcccacccagaattttgkatctgcttcatgtgtgtactttccacaggtagtctgtgtgggccagatcatctgtgctgtggttgcagaaacagacgtacaggcaaaacgagcagctgaa

SEQ ID NO: 175537 - DNA, 201 bp, Homo sapiens
gaaaatgcatataaaattcgcaacctgttcaggttccagggccgtgcatgcatgacaaatttaccatccaatacggcctttcgtggatttggcttcccacraggagccctagtaacagaatcttgcatcacagctgtggcagccaaatgtggccttccaccagaaaaggtaaggttgcaacaaaggccataaccaaagttg

SEQ ID NO: 175538 - DNA, 201 bp, Homo sapiens
ccattgctgacgctgtggccgcagtgcgaagagaaagagacatagctgaggacttcacggtgaagagcccagcaacgccagaatgggttcgaatggcctgygcagatcgattcacagaaatggtaggaaattgtttattttcctaaaaggtgatttgtctatttcctgcttcttagacctcttgggtaaatgtataaccta

SEQ ID NO: 175539 - DNA, 201 bp, Homo sapiens
tttttgcacaaaacagaactaagcttcagcatcccaccaggaaagtttgcttctctgaccccctccactccctaagactggtgtttcactaccttgtgttwtatattgaacctcaccaaatgctaacttgcactgagctatgccttccggattcttttactaggcagctgcactggttcatatctacacagatgggtctgt

SEQ ID NO: 175540 - DNA, 201 bp, Homo sapiens
actctttatgaagtttatttcctaatgtagttaaattctacaagccgtttgactctgtacttgactttcagagaaaagaaaaaaaaagtgatgataaatgygaatatccctttttaggtaacagaatttctaatactaaagctggaaaatgcatataaaattcgcaacctgttcaggttccagggccgtgcatgcatgaca

SEQ ID NO: 175541 - DNA, 201 bp, Homo sapiens
tttcagttggctttgctgcaacaagctaccatcaggtaagacttgcatataggataaataaccttcatgctagacacactcctggcccaatcagcttttgyggactttgaaaaatatctcatttcttagagcattgagctcctccctgccaacacctaagagaaatatacagaactgtccagagcagcacccctatctgca

SEQ ID NO: 175542 - DNA, 201 bp, Homo sapiens
cataccctcaattgtatagcagaaatctttgggatatggaaaaccagggagggcatgtttcctttaaaacagctctcaagtgatttcaaaatgttctctcyccagtcaggaactctgacgaggtacactggtgaggagaaggtggcaggagaatgaggggttggaaaccaccccaaaaagaggactaggggtgggaggaca

SEQ ID NO: 175543 - DNA, 201 bp, Homo sapiens
agtgtctaataggatgcagcactttgggctttctaatatttcttgctctccagaaatcttgccttatatcctgcctcttgtgaccctcttctcttgtctartgggggattggttataaaagctgtgagtcaaaccagggatgaccaaaacagccccatacaaatagcatgggaagttgagcaaggtaccccatcagacatg

SEQ ID NO: 175544 - DNA, 201 bp, Homo sapiens
caagtcgaagagttcaataagaagaattattggaagaagaaaggcattgctattattcccatgaagttttcagttggctttgctgcaacaagctaccatcrggtaagacttgcatataggataaataaccttcatgctagacacactcctggcccaatcagcttttgtggactttgaaaaatatctcatttcttagagcat

SEQ ID NO: 175545 - DNA, 201 bp, Homo sapiens
aaaaaaagtccaagttttattttattttttaagaaacaatttcaattccaatataatatatataaacaatttcacttcatatatacatatatatatatatwcacacatatatatatatatacacacacacatatataatccttcagacacagctaacaaagttttgcttggttattcagaactatttgtaaattaggataa

SEQ ID NO: 175546 - DNA, 201 bp, Homo sapiens
ggcaacagaacgagactctgtctcaaaaaatatattttttttaatttttagccaagcagatgtagtcaaatgcgactccaatgtggttactattgctaaamagcgacatctaagacagcagccactgctaaggttgaactaagcctattcccacccagaattttgtatctgcttcatgtgtgtactttccacaggtagtct

SEQ ID NO: 175547 - DNA, 201 bp, Homo sapiens
caggcaaaacgagcagctgaaaagataaagctcacctatgaagatctggaacctgtaatcttcaccatcaaggtaaacagggctggccggtctctccctamggttgtagaattaaaagtacctttgtaaaaatcttaatgaaggatctaattgtttttccttgccactggtttgctctggaaaaatcaactttctttggaa

SEQ ID NO: 175548 - DNA, 201 bp, Homo sapiens
ggagttcaatgtctccttgctgccatcatcacaaaccccactaaccatctattcgtctaaggtaagcatccaaacctaccactgcacggtgtcatggatcrggtagcacaggacagatgaaagcaggtggacaaaatagtaaatcaatgttaactgttatcaggaacaaatcattatagactgctagaatttggagatgac

SEQ ID NO: 175549 - DNA, 201 bp, Homo sapiens
tgagccttacgttcactgagttacatggccaatggaactgtctgtattatttaaattattttttcattaaacatattttttagccaagcgtggtggctcaygcctgtaatcccagcactttgggaggctgaggtggatggatcagttgagtccaggagttcaagaccagcctggccaacatgatgaaatcccatctctact

SEQ ID NO: 175550 - DNA, 201 bp, Homo sapiens
ccaattcttgctgtgggcaatgctaccctcaatctgatttcagcaggtaagctgcctccaaacactctgaacagcacctagagatcttttgtcttttctayttattcttttaaggaattgctttaagtcagagcccaagtctctagttctcaattcaccatggggagcccagctcatgagggaaggtgcactgatccaaaa

SEQ ID NO: 175551 - DNA, 201 bp, Homo sapiens
taactggtgcattgatgaagaggtaaaaataacctctactatttttgcaaaagcatgtaccattcaaagaaaaaacagaccctgtcttcccttctctacarcttgtgctttcgtggagaggtttttcaagtctctatttggccatcagtttctgccttaccataactactgaatttcccacctgtttcagattagagagaa

SEQ ID NO: 175552 - DNA, 201 bp, Homo sapiens
actaagaggaccatcagcaggtgccttcggggtagagaagctgagagatggaatgactgagctgtaactctctctccttagtccttaggggggcatgtgakaagccggcattgctattcggacctgaatccaattcttgctgtgggcaatgctaccctcaatctgatttcagcaggtaagctgcctccaaacactctgaac

SEQ ID NO: 175553 - DNA, 201 bp, Homo sapiens
agactgaactgacttagattcctcttgaccctttcatggccactaagaggaccatcagcaggtgccttcggggtagagaagctgagagatggaatgactgmgctgtaactctctctccttagtccttaggggggcatgtgataagccggcattgctattcggacctgaatccaattcttgctgtgggcaatgctaccctca

SEQ ID NO: 175554 - DNA, 201 bp, Homo sapiens
cctcaattgtatagcagaaatctttgggatatggaaaaccagggagggcatgtttcctttaaaacagctctcaagtgatttcaaaatgttctctctccagycaggaactctgacgaggtacactggtgaggagaaggtggcaggagaatgaggggttggaaaccaccccaaaaagaggactaggggtgggaggacaggcaa

SEQ ID NO: 175555 - DNA, 201 bp, Homo sapiens
gttcaggcccagcatgccccttctataaacaggcacaagaaggttaactgtcatgtctgcaagctagatgcaatcaaaggctgtgacatcagagaaacttsagagctgcctgtgtggtttcctctctgatgccaaatattgtcttttccaaaccaactccaacaccaagtgggtgtccaaccattctgttctcacactaac

SEQ ID NO: 175556 - DNA, 201 bp, Homo sapiens
ctctatgcagattacgtgaaaaccaccctcagagtaagaacttcatctagggttgagatgtattgttaaagtttcttgactcctcttaagatattaaaatmtttcctggccatggtggtgcacatctatagctccagctactcaggaggctgaagcaggggattgcttgagcccaggaattcaagaccagcctgggtaatc

SEQ ID NO: 175557 - DNA, 201 bp, Homo sapiens
cgccttgagcccatcattaagaaacatccggaaggtaaatgggaagactgggtaagtgttccactccctttgaaatgagaaaacaatgtaaaccagtactsagacagcaccacagcatgcacagccatcacacacagagacagttcctctaagtgtcacagtgatggagcatgccccctgtttcttccccagttgaatgga

SEQ ID NO: 175558 - DNA, 201 bp, Homo sapiens
aaaccaccctcagagtaagaacttcatctagggttgagatgtattgttaaagtttcttgactcctcttaagatattaaaatctttcctggccatggtggtrcacatctatagctccagctactcaggaggctgaagcaggggattgcttgagcccaggaattcaagaccagcctgggtaatcaataaataagatcttttgg

SEQ ID NO: 175559 - DNA, 201 bp, Homo sapiens
ggttggcaagtgcagaccttaagccagaggaaattttggaatctgtgcatatcccgcactctcaaaaggtcagaattccgctggttgcttttgagggtggwttttcctttttcataactgagtccagtcatctttagaaatctaaaaacagatggaaagaaaataactctgccctgcaaacctgtttcctgtccaactgca

SEQ ID NO: 175560 - DNA, 201 bp, Homo sapiens
gaatctgaatcccaggcctgccccttcctagctggggacattggtcaagtttcataattgctctgtacttcagtgtcttcatctgtaaaatagggataacracacccacctcactgggttgttgtgtcaggggttagacagcgcgtggaacacaccggtgttaggtaagtgctaggcaccctcgagtcctcttcccatcca

SEQ ID NO: 175561 - DNA, 201 bp, Homo sapiens
aatcaccagtcattgtcaaattcaaaaagcatgtgacattagttttacagtctaatgaaacaaaccaccaaacaatagatacacacacacacacacacacagagaacagtaaagcaaatcctcatgaagaatgaggaaataaggaggtaacagcccagcctagagccttgtacctaatgagttctaaattcctaagttcag

SEQ ID NO: 175562 - DNA, 201 bp, Homo sapiens
taatcaccagtcattgtcaaattcaaaaagcatgtgacattagttttacagtctaatgaaacaaaccaccaaacaatagatacacacacacacacacacacagagaacagtaaagcaaatcctcatgaagaatgaggaaataaggaggtaacagcccagcctagagccttgtacctaatgagttctaaattcctaagttca

SEQ ID NO: 175563 - DNA, 201 bp, Homo sapiens
tgagccaagattgcaccactgcactccagcctgggcgacagagtgagaccctgtctcagacataaataaataaataaataaataaataaataaataaataratagataatctgattttatctgaatggctttgttcttttctatcattttgattttgctaaattctaaaaacaaacttagcacctaaaatattaaatgagg

SEQ ID NO: 175564 - DNA, 201 bp, Homo sapiens
gggagaaaggagccatctttcccctgtggctgtttaggtactatactatagggcaggggctgccacaggcagttctgtgccatggatggaaccggccatcrtagaaagaaaagcaaatgtgagaggctgagaggagaccctgacgagaccacaaagcccctagatacacatgtacttcacactagctccatctatcctgcc

SEQ ID NO: 175565 - DNA, 201 bp, Homo sapiens
tggtgtgcctctcccacatccctggtttttatgactagatacaggtacaatagttgacttcagagaagtcatctgtgtcactacacatagtctgaggtaaytaaaatgttgggagagtgtatttggagtaggctaaattgagatgacagacccaaaatgtaaaggctcaaacacagtaaaagtccctttcttgtacacata

SEQ ID NO: 175566 - DNA, 201 bp, Homo sapiens
gcaaaaaaagaaaacgaaacactaccataaaaccttggtaacttttaaaataaatcaacattctatctccccagctcaagctaaaaggctttatttcttcygtcaggggctacaaggccttcatggactgggagaagggggtgggggacccatttccttactatgtctgcagagctgcctgttctgaggttgaaattgact

SEQ ID NO: 175567 - DNA, 201 bp, Homo sapiens
gatgcttataaagtacattattttagtcttaaaagggtaccatggatgtaataacaaataatttttattaagaaaaataatgattcaaatcttcatagaaktccttgctggacttgaaaatatttatgtttctcataggtggccagccatgagctaaaaatacccatgtcctatatgcacatctgtgaaacgagcacagca

SEQ ID NO: 175568 - DNA, 201 bp, Homo sapiens
actttcagagaaaagaaaaaaaaagtgatgataaatgtgaatatccctttttaggtaacagaatttctaatactaaagctggaaaatgcatataaaattcrcaacctgttcaggttccagggccgtgcatgcatgacaaatttaccatccaatacggcctttcgtggatttggcttcccacaaggagccctagtaacagaa

SEQ ID NO: 175569 - DNA, 201 bp, Homo sapiens
tgataacagctgaagacattccaggcaccaatggcgctgaaggtgacaaattgctggctgtagataaggtacgtctgggacatgctcttctagatgattcygtgtagacaatcaccaaggtacccctcctgccagctgttcagctcccagctcttcctgcctttgggaggtggaagcgccgagccttctggcagctgtcta

SEQ ID NO: 175570 - DNA, 201 bp, Homo sapiens
gtcttcctgtctctccttggtgtgcctctcccacatccctggtttttatgactagatacaggtacaatagttgacttcagagaagtcatctgtgtcactamacatagtctgaggtaattaaaatgttgggagagtgtatttggagtaggctaaattgagatgacagacccaaaatgtaaaggctcaaacacagtaaaagtc

SEQ ID NO: 175571 - DNA, 201 bp, Homo sapiens
ggcctgaacaatagaaacatgttccttcacagttctggaggcgtcagcaggcctggttccctctgagtgctgtgcaggggactctgccccctgcctttccyctagctcctgctggtttgctggcaatcttgggcactccttggcttctagaagcatcaccctgatctgtcttcatatgaagttctgtgggtacatgtgtgt

SEQ ID NO: 175572 - DNA, 201 bp, Homo sapiens
gtctctgtgcctgtgggtgctctggtgtattcgctggctggggctgctgaaacaaagtagcacagcctgcctggcctgaacaatagaaacatgttccttcmcagttctggaggcgtcagcaggcctggttccctctgagtgctgtgcaggggactctgccccctgcctttcccctagctcctgctggtttgctggcaatct

SEQ ID NO: 175573 - DNA, 201 bp, Homo sapiens
agagggagatcctctctaatagttggccgattcaactgtttatttgctttcaaatgcacagatattaatagtcacagctattattgtcttctaggaccgasagcaatgtagagacacactgctaagattggagcagttgctgttgtggtgatggctgtgctcttatcaaagttatgagattcttttagtactaatacttgt

SEQ ID NO: 175574 - DNA, 201 bp, Homo sapiens
atgaggaccctagtcgtcagcttcctcttcaaattctacctagaggttctgcaggaactgaagaagctggtgaagctagtctctgtgcctgtgggtgctcyggtgtattcgctggctggggctgctgaaacaaagtagcacagcctgcctggcctgaacaatagaaacatgttccttcacagttctggaggcgtcagcagg

SEQ ID NO: 175575 - DNA, 201 bp, Homo sapiens
gctgatttctacttcctctttttttaatttagagacagagtctggctctgtcatccaggctgggggcagaggcaccatcatagctcactgcagccttgaaytcctgggctcaagccatcctcccacctcagcctcctgagtagctgggactacagacatgcgccaccaccacacctggctaatttttataattttttttgt

SEQ ID NO: 175576 - DNA, 201 bp, Homo sapiens
gagtccttctcaaagaaggcacagacagcattgaggacctgagcatcgcctatggaggggtgggggctgccaccatcagtgcacacagatcctgctagcarctccttgggaggtaagccaagagcccgcaccctgagggggaagcttgctgttaaataaaacaagtggagatctgtctctggcaagcatcagtaaagccct

SEQ ID NO: 175577 - DNA, 201 bp, Homo sapiens
gtctcaaattcctggcatcaagcaatctctcccttcttgaccacccaaagtactgagattacagacctccaccaccctgcccagagtgatttctacttctyaaatatctcttgtttagatcaattgatgtgtccaaggcccttgaactacccgaagtggttgatgtgataacagctgaagacattccaggcaccaatggcg

SEQ ID NO: 175578 - DNA, 201 bp, Homo sapiens
cctacttcctacacatctaaaacttagaaaaaaggaaattcttaacattctaaacggactcaatttgaaaagaaccactgtggaatattaccaagaaaacrctgtaaaaatgagcatgaggccttacaaaaaaagtagttttgatgcttataaagtacattattttagtcttaaaagggtaccatggatgtaataacaaat

SEQ ID NO: 175579 - DNA, 201 bp, Homo sapiens
gatggggtttcaccatgttgcccattctggtttcaaactactgggctcaaactatccagctgccttggcctcccaaagtgctaggattacaggcgtgagcygtcattcccggcctgcactgcttatttaattcttgattctagcatgtctggctgtggaacatgttcatgtttaagttgcaggtcccattctcaccctgcc

SEQ ID NO: 175580 - DNA, 201 bp, Homo sapiens
acaattctggggctacagtagtgaatgaaacagagaccccctaccttggtggagtttagtttctggtgaccctgaagctacctaccatctctccaccctggatcaaagctgcctcctggctgatctctctacaccccctgcagccagaagcttgtggtgtggcaaagcagaccatgccacaccagcacacacattggcaaa

SEQ ID NO: 175581 - DNA, 201 bp, Homo sapiens
ccttgctctgtgtagaggaagctggcctttccttctccactgctgacatttaaaagaacagaataatcttgctctccttgttgtgactgtgcagaaatatmattctcttccacagaaggtacgcggcggattcctctaaatgaacattttcttgctgggttggcaagtgcagaccttaagccagaggaaattttggaatct

SEQ ID NO: 175582 - DNA, 201 bp, Homo sapiens
tggggtttcaccatgttgcccattctggtttcaaactactgggctcaaactatccagctgccttggcctcccaaagtgctaggattacaggcgtgagctgycattcccggcctgcactgcttatttaattcttgattctagcatgtctggctgtggaacatgttcatgtttaagttgcaggtcccattctcaccctgccat

SEQ ID NO: 175583 - DNA, 201 bp, Homo sapiens
gggtgagggcaggacagaatgtttaacttttcaataataagccccttgttattaaggctacttagaccatatggagaatgatcatttatgctttttttttytcttttggagacagggtcttgctctgttgcccaggctggagtgcagtgttgcaatctcagctcactgcaccctctacctcccaggttcaagtgattctcc

SEQ ID NO: 175584 - DNA, 201 bp, Homo sapiens
ggggtgagggcaggacagaatgtttaacttttcaataataagccccttgttattaaggctacttagaccatatggagaatgatcatttatgcttttttttyttcttttggagacagggtcttgctctgttgcccaggctggagtgcagtgttgcaatctcagctcactgcaccctctacctcccaggttcaagtgattctc

SEQ ID NO: 175585 - DNA, 201 bp, Homo sapiens
aaagaataaggtgaagttaaaatcagccataatcccaccaaccagaactaactataaccatgttttggagtgtgagcgtgcatgtgtgtgtgtgtgtgtgkacatttttaaccatcctttaatttatatgtttatatgtacaatatatcttatttgtaaactcatttaataaaatcaggatatccctgacgtaagtcttga

SEQ ID NO: 175586 - DNA, 201 bp, Homo sapiens
tggatggaagagctaagtgggcagacactatcccagcctgttagggctgctatagccaaactgaaagcgggcgtgttatgaacaacagcaatgaattcctyacagttctgctggctgggagtcctgcgtcagcgcactggcagactcggtgtctcgggagggcctgcttcccatttgtagacggccgtcagctctcgaggg

SEQ ID NO: 175587 - DNA, 201 bp, Homo sapiens
gcctcacaaagcgctgggattacaggtgtgacccacggcacctggcccatttttcttgttaatttgtgaagaatggcaactagattttaaatttccatgcstttgtctatttgctgtgttgatttgtctatatgtatttactggtgatttttcatttatatttttggtagctcgcacctaccctagcccatagttccttgg

SEQ ID NO: 175588 - DNA, 201 bp, Homo sapiens
cgtttttggaatgaagtggggagcgtggaggctgcttgtggagtggtgtttccacaccgaaacccggagacctaaatagggcgcaacctgaactgaaaccrgcaggacatggctgtgtgcgttaattggaaccacagcacctcgggtgagggagggtgtcaagtaagcctgcgagttgcgaattagaggacccaggagtaa

SEQ ID NO: 175589 - DNA, 201 bp, Homo sapiens
attaatgtccgtgtgcacccacagtattcaagagttttcacatcattgtcagaatactgtgtaatgaagaagttataatatgtttctcctttagtccgtakaaactcaatgctctagaaagattagattccagatttctattagaactactactatagctcgctgcagtagcgcccgcccccgcaagagcagggaagataa

SEQ ID NO: 175590 - DNA, 201 bp, Homo sapiens
cacctggcccatttttcttgttaatttgtgaagaatggcaactagattttaaatttccatgcgtttgtctatttgctgtgttgatttgtctatatgtattwactggtgatttttcatttatatttttggtagctcgcacctaccctagcccatagttccttggagatgttaagttattgccctacatcttaaaaatacttg

SEQ ID NO: 175591 - DNA, 201 bp, Homo sapiens
gttttgtttacttataaatatatttcctgtggctgggtgcagtggctcacgcctgtaatcctatactttggaaggctggatcacttaagcccaggagttaragaccagtctggccaacatggcaaaacgctgtctctactaaaacacaaaaaattagctgggtgtggaggtgtgcacctgtaatcccagctactcgagagg

SEQ ID NO: 175592 - DNA, 201 bp, Homo sapiens
ttttcctttttttctttttctttttttttctttttcttttttttttttttgagagagggttttgctgtcacctgggtacctggtgcagtggcacctggtgyagtcctagctcactgcagcctggaacttgtgggctccggcaaacctcccatttcagcctcctgaggagctgggaccacaggcatgcactaccacacctgc

SEQ ID NO: 175593 - DNA, 201 bp, Homo sapiens
gattagtgacttgagaaaagtgccttgaggtagaatcgcacatcagaagatacgggcacattcggaatgttttggatagagcccctggtgactttatcaaygagtgtgatttacattcctactggcagtagattaaaatgtctgtttcccaggtctctccagcatcaaattagaattttaatcaggttaccttttttcctt

SEQ ID NO: 175594 - DNA, 201 bp, Homo sapiens
ttgctgtttgtattgcttctggctgttaaaaagagtgctgctatgaacatatatgcttttgttttgtttacttataaatatatttcctgtggctgggtgcrgtggctcacgcctgtaatcctatactttggaaggctggatcacttaagcccaggagttagagaccagtctggccaacatggcaaaacgctgtctctacta

SEQ ID NO: 175595 - DNA, 201 bp, Homo sapiens
ggccccactggagtctggcccacacctggagtgtggtgcctggcaagctttgggaagacacagtggatgaggttgtacaggcaggtgggacattggaggcrcctcctcgggctctccctgttggctgggggccagtgccccgcacatcacttctaccggaagggctttggtgggtcctttgactttaactgctggtgagga

SEQ ID NO: 175596 - DNA, 201 bp, Homo sapiens
cagggctcgcctctgaggggggcgggcatttgagtcacagccggctgcaggaacaggctgccccgcactgaaggcagccaggccgggctggggcaggtccmgcagccaggctgctcctgcacgggagctcctcctcctcagcccatccgcggcctcctgccttcaccgcagctgctgccggcactaccaggctggcccagc

SEQ ID NO: 175597 - DNA, 201 bp, Homo sapiens
cacatcttgaggttgcacagaccttcaggggcagggccactcccacagctctgacttcagctatctctgggcaagtacccctgccaggtgggaatggcctrcgcacttgtggcgggtagcagaagtctctttcccgtgcaggctgagggccccactggagtctggcccacacctggagtgtggtgcctggcaagctttggg

SEQ ID NO: 175598 - DNA, 201 bp, Homo sapiens
caggttcattggatgtgtccccatcttgcagaagagtcaagaggttaaggtgatcacatcttgaggttgcacagaccttcaggggcagggccactcccacrgctctgacttcagctatctctgggcaagtacccctgccaggtgggaatggcctgcgcacttgtggcgggtagcagaagtctctttcccgtgcaggctgag

SEQ ID NO: 175599 - DNA, 201 bp, Homo sapiens
attatgagtgaatttttatacaattaaatagacttcaactcacttaagcaacaactccaaaattaaaaatgctaatattgtgtcctgaaattgatgcaatrcctttgtcagtttctcctgagaacccttgtggcgcaggccctggtgccatcagtgagagggagtttccttgtacctgctccgctgacctgtccattgtgc

SEQ ID NO: 175600 - DNA, 201 bp, Homo sapiens
taaactaatagctttattgaaatgtaatgcacatactatataagtatactatttaaatggtactgcttagtggtttgtaagatattcgcagttgtgaaacsaccactatctaagaacgtttttttttttttctttttgagacagagtctcactctgtcgcccaggctggagtgcagtggcacaatcttggctcactgcaag

SEQ ID NO: 175601 - DNA, 201 bp, Homo sapiens
ttagataaccttgagttttaaggtaacttttatgggaaaacagattcttgagatgctaagtagattttaaacccttttagttttacaagtctgaattaccycagtgtagtatataaataagctggcatttttaaatattctacactagtgtgtgcattcttaggagtaatcttatatggctttaatgggatcgtacttgtt

SEQ ID NO: 175602 - DNA, 201 bp, Homo sapiens
cacatcttttagactctttcccaacttgaggtgaatgaaggagcatggtgatgagaatggtaataatagcttgtgtttttagaattcatgctgcacaggckgtaaggctggacagcagtcctgttaggtggtgggattttgccaaatttataagcaagccgactgagctgtaagaggttaattatcttgttgagttttgga

SEQ ID NO: 175603 - DNA, 201 bp, Homo sapiens
tccaccgccaccttgttctcccacggcaggtgccactgagctgggacagaccctgtggtctgtgtccagtgggcctagggactcgcggtcactggagggcrtgagagccacatgtcccgctctccgtgtggtccctgggtggcagtgccctcagaaaacactgattctgctggaccagggcaggggcacagcatggtgggc

SEQ ID NO: 175604 - DNA, 201 bp, Homo sapiens
gactgaaaacagcaaaatgcaggccagagaataagcagaaccttgttgagtgaggctgctgtgtgccttacggttcgggttgagagtgaacccagaggacragggatcccagtgctggtctgggcccggcccacagtggatgtgggcttcctcgtcaagctcgagtcctctccactccttctctctgggtctggacaagtc

SEQ ID NO: 175605 - DNA, 201 bp, Homo sapiens
gctaaatatctgtgcacatctaatgattagtgacttgagaaaagtgccttgaggtagaatcgcacatcagaagatacgggcacattcggaatgttttggayagagcccctggtgactttatcaacgagtgtgatttacattcctactggcagtagattaaaatgtctgtttcccaggtctctccagcatcaaattagaatt

SEQ ID NO: 175606 - DNA, 201 bp, Homo sapiens
cttgtgatccacctgcctcggcctcccaaagtgctgggcttacaggcgtgagccaccacgcccggcctctaagaacgtttttatcaccccaaaaagaaacrccacatccatgggccatcacttctcactcccacctcctcccagccccgacagccgctcatctactttctgtttctgtgattcacctattctggactgaaa

SEQ ID NO: 175607 - DNA, 201 bp, Homo sapiens
tagtgtattgtcaattcagtcattatcttttgggtgttgaaatcatcccggatttagccagggagggctcttctgactggctccggtcccccagggacagrcccctcggcctctgttgtgccctcctgcacctgcctgccttttgctttcctacccagacctgccgtttctccaagcagccaccctgcctttgaggggaaa

SEQ ID NO: 175608 - DNA, 201 bp, Homo sapiens
gaatgactaccagatccctctactgcagagtttattttcttcttatgaatattaagcatctgagaggtggcatgctgcatggtaatttgtttcctaataascttccaccctatggttttagaggcttcactttgatcaggtatttcattggttattgcaaagtcatggttgtctaattgttccctcttttacatttattag

SEQ ID NO: 175609 - DNA, 201 bp, Homo sapiens
cccggggccacggggttgcatgacgcagagggggtccaaacccagccacggggttgcatggtatgcagtggggtcggagcctggccgtggggttgcatgaygcagagtggggccagagccggccatggggttgcatgacgcagaggggggtcggagcccggccacggggttgcatgacgcagagagaggtccgaacccggc

SEQ ID NO: 175610 - DNA, 201 bp, Homo sapiens
cctcccgcaggtttccgcagtccctttcttggtggagcttccctttctctttccgcgtttcaaggccggcgccctcttccttgccttttccttttataatkgttgtctccctcttggcgcatctgctgacttccttcccgccctcacccaccacctcttactggtgtggctttgggatttgtttaggttttgctgtttgcc

SEQ ID NO: 175611 - DNA, 201 bp, Homo sapiens
gggaactgctggatcaaaggacaaaagaccaaaaatcagcgggctgaggatggagcacagccatgaacctgctcacgacaagacgcacccatgcttctcasggtcaaggctttatgttaaagcttcctgtcggggctgctaggtcagcattaaagtaaggcaaccaacagtgtcccactggcgtctgtttgttagtaactg

SEQ ID NO: 175612 - DNA, 201 bp, Homo sapiens
tacagatttgaggtttcctgccttattcttaaagtccccaccatcactttgtatgtggctgacagaggccccttggggctggcgctgtgtccctgaacatycctgtcattctttggacacccttgtagaattctcagcacaaggcgctctggctcttttggggtgtggctcggctgctgctgcctggacgggggctgccac

SEQ ID NO: 175613 - DNA, 201 bp, Homo sapiens
cttccgttgtaactcaagagcatttttgcaaagagacttggatcctatgaaaatgtcctcttccttatcaggctcacctgaaactcgtttattctatcaayacagatttgaggtttcctgccttattcttaaagtccccaccatcactttgtatgtggctgacagaggccccttggggctggcgctgtgtccctgaacatc

SEQ ID NO: 175614 - DNA, 201 bp, Homo sapiens
ttgtagtatagtttgaagtcaggtagcatgatgcctccagctttgttcttttggcttaggattgtcttggcagtgcaggctcttttttgaactttaaaccrtatgaactttaaagtagttttttccaattctgtgagaaaagtcattggtagcttgatagggatggcattgaatctataagttaccttgggcagtatggcc

SEQ ID NO: 175615 - DNA, 201 bp, Homo sapiens
gaatgtgcagaagtcacaggcacagtaagagaacattttttcctgacccatttgagggcaagttggcgacctgagcccccttgcctggcacatgttttgtmcggacaggacgggctccccgacaggcacgagtcacctgcaccttcccagcgaggctcaccctggctgtgcagtgaaggtggacgctgccaggcttctcca

SEQ ID NO: 175616 - DNA, 201 bp, Homo sapiens
caggtgggacaaagaccgtgaaggcggcggcaggctttggttcctgcacgtctgagggtcccctgccaggccctgggaggcgctgcgtcaggagccccgtkacctttgatgacccgggaagccgaggctgtttgtgcctctcccacctctggaaacacctgggggttctggccacatgctctgttagttgagcatctctgt

SEQ ID NO: 175617 - DNA, 201 bp, Homo sapiens
cagtccctttcttggtggagcttccctttctctttccgcgtttcaaggccggcgccctcttccttgccttttccttttataatggttgtctccctcttggygcatctgctgacttccttcccgccctcacccaccacctcttactggtgtggctttgggatttgtttaggttttgctgtttgcctttaataggctcagagc

SEQ ID NO: 175618 - DNA, 201 bp, Homo sapiens
cccactttaagtggctctccgcctaatcgcgccctcagctgtgcgcctcccgcaggtttccgcagtccctttcttggtggagcttccctttctctttccgygtttcaaggccggcgccctcttccttgccttttccttttataatggttgtctccctcttggcgcatctgctgacttccttcccgccctcacccaccacct

SEQ ID NO: 175619 - DNA, 201 bp, Homo sapiens
gccctctggcccctttcttatgacgagacctgcctcacctccctcccactttaagtggctctccgcctaatcgcgccctcagctgtgcgcctcccgcaggyttccgcagtccctttcttggtggagcttccctttctctttccgcgtttcaaggccggcgccctcttccttgccttttccttttataatggttgtctccct

SEQ ID NO: 175620 - DNA, 201 bp, Homo sapiens
ctgtgcagtgaaggtggacgctgccaggcttctccacattccttctcttccgttgtaactcaagagcatttttgcaaagagacttggatcctatgaaaatrtcctcttccttatcaggctcacctgaaactcgtttattctatcaatacagatttgaggtttcctgccttattcttaaagtccccaccatcactttgtatg

SEQ ID NO: 175621 - DNA, 201 bp, Homo sapiens
gaatgaattcactactttgcactgtgtcttgcagtatggtatttggaagtcaactggatatccattcaggtgggatagatttagcttttccacatcatgaraacgaaattgcacagtgcgaagtctttcatcagtgcgagcagtggggaaattattttctgcattctggtaagtaataacttcagattaatttgttctgtt

SEQ ID NO: 175622 - DNA, 201 bp, Homo sapiens
atgtccaaatcatgcatttatcttatagtattgtttttaattctggttaacaaatatattaagccaggcatggtgtcactcctatagccccacctactggkaaggttgaggtgggaagactgcctgagccaaggagttcaaggctatcgtgagctgtgattgtaccactgcactccagcctgagcaacagcaagaccctgt

SEQ ID NO: 175623 - DNA, 201 bp, Homo sapiens
cccactgtctgacgagccccagtgagatgaagccagtacctcagttggaaatgcagaaatcacccgtcttctgcgtcgctcatgctgggagctgtagactrgagctgttcctattcggccatcttggaaacggcaccagaaatgggttttaaaaaaatcactgttaactcatggattttagtatacttgatagcaaatatt

SEQ ID NO: 175624 - DNA, 201 bp, Homo sapiens
agtctgccgctgacacacgggatggcacccagcctggggcttgaccctcccgggcctcagggccacctggggaacaagctctcaggagcccctgaggctgmgaaattctgtgtgcttgatcctcaggggacacatctcatgtccccactgcattcatggccctttcacagagagagcttttgtggggaactttttaaggaa

SEQ ID NO: 175625 - DNA, 201 bp, Homo sapiens
agttttaaaaaattagaaacacaggaaaggatgattaaggtaaacattttaagctagtagctacatcagagattttcagatggataaatccagtcacctcraaacctgtgggctttgtatccaggatgtgtttcctggctgggtgtagagggggtttgggtggagataattatctcccacacgaggactctgctccattca

SEQ ID NO: 175626 - DNA, 201 bp, Homo sapiens
ttgctttcttcagtgggtattctttggtggggctttctgggttgactatgccattcagagccctgggtctcagggtcacatggttgggacctggccccacrtgtggcgttgcgcttgagaaagtttctcagtattctagagtggtaattccttcacctgtgaaatggggagacttggttcccgaggctgcgtggagcagct

SEQ ID NO: 175627 - DNA, 201 bp, Homo sapiens
aagtgacctgctgaagcctttgtcttttgacattgaattccgtttgcccactgccatcaagactgcttttaaggagcttctgcgacatgatctcttacagraacctgaagggccgagaagtcctgctgtgtttggtgccatcatctcttactttgaacagttttttgaaactgttggaatttctctggcaaatcaacaggt

SEQ ID NO: 175628 - DNA, 201 bp, Homo sapiens
tgagcattgcctccttcctagggagacacatggcctggaacacacagcggctgcagccgggcagccttggagcataggttggtagcgctttcttcttgacraagctcccactctgagtgcctcctccccagctctgctttcttaggctttgtggtggaaggggcaagggcagcccaggcttgcaggaggctctggagaagg

SEQ ID NO: 175629 - DNA, 201 bp, Homo sapiens
tggtagcttgatagggatggcattgaatctataagttaccttgggcagtatggccattttcacgatattgattcttcctatccatgagcatggaatgttcytccatttgtttgtgtcctcttatatttcattgagcagtggtttgtagttctccttgaagaggtccttcacatcccttgtaagttggattcctaggtattt

SEQ ID NO: 175630 - DNA, 201 bp, Homo sapiens
cttgaggattgaatgctgtttgttgttttgttactgtgttttattataaacaatttaatgatagtataaatataattaattcaaaatacacttacattcamtcaaaccccagtaatttggactttgttacaattccacaagggcttggttgtaatttgatctttgaactcttggtgaaaaacaatttcttcagcaaattga

SEQ ID NO: 175631 - DNA, 201 bp, Homo sapiens
ggcgttgcgcttgagaaagtttctcagtattctagagtggtaattccttcacctgtgaaatggggagacttggttcccgaggctgcgtggagcagctcggrgagactagcaggtggcaggtgctgtgcttgggaggcccaaaggccatttgagcaggaccagcagttatgatgcccggctccattccagagcttcacagtg

SEQ ID NO: 175632 - DNA, 201 bp, Homo sapiens
ttgctggctcttgtttagcttctgagtcagctggggcacccctgccatctgctctcagtgtggggctgggtgtccctgcaccatggaacaagggcaggtcstgtcttcccggaaggcccagcacgggtgaagatttgggggcagatttataccaacatacactggtctatacattggatatgtgcaggttcccattcgttt

SEQ ID NO: 175633 - DNA, 201 bp, Homo sapiens
tagagacggggtttcaccatgttagccaggatggtcttgatctcctgaccttgtgatccacctgcctcggcctcccaaagtgctgggcttacaggcgtgasccaccacgcccggcctctaagaacgtttttatcaccccaaaaagaaacgccacatccatgggccatcacttctcactcccacctcctcccagccccgaca

SEQ ID NO: 175634 - DNA, 201 bp, Homo sapiens
tggcaagcaccgtacgccttcagcacacgcgtgggtccggattttcccatcacacacacgctctcccccgtccaaggtgcctgtttacttctggtctgcgygggctcaggtttcaaagagcttgctgaaggcggcccccacctcggcgatcatgtcggaggtggtggtggagcgaccgtgcttctggaaggcttggtggtt

SEQ ID NO: 175635 - DNA, 201 bp, Homo sapiens
ctgctgtcagtaccacggttgctggctcttgtttagcttctgagtcagctggggcacccctgccatctgctctcagtgtggggctgggtgtccctgcaccrtggaacaagggcaggtcgtgtcttcccggaaggcccagcacgggtgaagatttgggggcagatttataccaacatacactggtctatacattggatatgt

SEQ ID NO: 175636 - DNA, 201 bp, Homo sapiens
gccccctgtgccacatgacgtggtgtctgctcagagttggacctcactcttcttctccaggacagaagcagtacaacatccacgtgggaactgctggatcmaaggacaaaagaccaaaaatcagcgggctgaggatggagcacagccatgaacctgctcacgacaagacgcacccatgcttctcagggtcaaggctttatg

SEQ ID NO: 175637 - DNA, 201 bp, Homo sapiens
atggcctaagaaacacccacagactctaaagccaggtctggggactgctcctccctccccctttgggctgtcccatcacacacaggcactttccctcgggrgggccttccctagaggtgcctctgaccccagggcggggctccctctttccagagctagccattcatccgcacctccatccatccagggcggggctccttc

SEQ ID NO: 175638 - DNA, 201 bp, Homo sapiens
aagaaatgaacagatgtaaacagaaacactggcccctcatccaggtggcctaagaaacacccacagactctaaagccaggtctggggactgctcctccctyccactttgggctcctcatccagatggcctaagaaacacccacagactctaaagccaggtctggggactgctcctccctccccctttgggctgtcccatca

SEQ ID NO: 175639 - DNA, 201 bp, Homo sapiens
ctggtgaagtctgtggacccagccttacaatttgctttaaatacgtaaaataaaatacataggatcccaaaggccgttgatgatactgaagtagaggagcrggggctctgcttgactcagcggttagctcagcgtgggtggggtctgatggctgccatcctctcgtgtgagttgtggtgtgtgatgtcatccctgtggggt

SEQ ID NO: 175640 - DNA, 201 bp, Homo sapiens
gtggccttacccatttgttttctgtggtccagcaaggagcgcccagtgtaccaggacgcccagggagcccgacaggaggtccccttgccctccacacctgyggctgctgccttcctggctgcacacaagcactgcacagggcagaagtgagagcaggtgtcagcatggccatgtgtgtgaatgtgacagtagccacgggtg

SEQ ID NO: 175641 - DNA, 201 bp, Homo sapiens
agagagcatggagaaggctggcctggagcccgcctgcacccattccttccccagcagccacagttgtgttctctgttttggattcatcttcctgtgttccrttacacacgataggccaatacacataaacctttctcctctgtctcattcatgaggcagtgtcgtatgcatgccgcctcttccctaacaatttaagtgagg

SEQ ID NO: 175642 - DNA, 201 bp, Homo sapiens
ctatctaagaacgtttttttttttttctttttgagacagagtctcactctgtcgcccaggctggagtgcagtggcacaatcttggctcactgcaagctccrccttccgggttcacgccattctcctgcctcagcctcctgagtagctgggactacaggcgcccaccaccacgcctggctaattttttgtatttttagtaga

SEQ ID NO: 175643 - DNA, 201 bp, Homo sapiens
gcaagtggggcatcgtccacccccgcccccagcgtgcctggctccattccctggagacagtgctggtcactgtctcctttttcctccccagggttttcagygcacatgaaaacctcatacacgtacatcatattttcgcgttcttctgtgttaccgtacatttaattcccatacgtgtcttactatgtgttaaacttccaa

SEQ ID NO: 175644 - DNA, 201 bp, Homo sapiens
cacgggagaggtcttccagggctcatgctcggtgtggccatgctgactgacctggcactggcccatgcacagagggcagccgccactcaccctgctggccrttggagaggatgtcgcgctctcctttctggaccaccgtcacgttgcccagggcttggctgagtcttagcacagatccatggctgtcatcgctgtccatag

SEQ ID NO: 175645 - DNA, 201 bp, Homo sapiens
gggtgggattcaggaggcaccgatctgccagtgagggatttctaggaacacaaggttagtcaggacgtggatccccacagtggacacgactgccccacccygccgaggtcggaggtggccttgaggagctgggccgtcgcttgctgtctgagcttccatccacgaatggtgtgggagttcgggatcttcccagacattctt

SEQ ID NO: 175646 - DNA, 201 bp, Homo sapiens
cagtacaacatccacgtgggaactgctggatcaaaggacaaaagaccaaaaatcagcgggctgaggatggagcacagccatgaacctgctcacgacaagaygcacccatgcttctcagggtcaaggctttatgttaaagcttcctgtcggggctgctaggtcagcattaaagtaaggcaaccaacagtgtcccactggcgt

SEQ ID NO: 175647 - DNA, 201 bp, Homo sapiens
cctgccaggccctgggaggcgctgcgtcaggagccccgtgacctttgatgacccgggaagccgaggctgtttgtgcctctcccacctctggaaacacctgkgggttctggccacatgctctgttagttgagcatctctgtggaggtctccatccctggctgcgtgcagtgttgggtttcagagcaccagcaggtggggcag

SEQ ID NO: 175648 - DNA, 201 bp, Homo sapiens
atcctcaggggacacatctcatgtccccactgcattcatggccctttcacagagagagcttttgtggggaactttttaaggaaagacccatttaccccaakgcactgttatgcaatctgcaccccagtgtgatgaccacaccaagcacccaggggtctgagcctggactcgtgggtcactgcaagtgtttggcaggtggga

SEQ ID NO: 175649 - DNA, 201 bp, Homo sapiens
cgcctggggagagtggagctccctctgctgtgactgttctctcctcttccctcaggctctccagcaccaagagggccgtgaaggcggccttggcagatgaytttgacacacccagggtggttgatgccatcctgggccttgcacaccacgggaatggacagctcagggcgtccctgaaggtagctcaacgaacaggtggcc

SEQ ID NO: 175650 - DNA, 201 bp, Homo sapiens
ggggaggttttcactgtgttgcttccagcttgaagccatgtctgattttggaattctcgttttgaagtcaggacttggaggcatgttgagatgtaattttsagcatatgtgtccagataggctctttttattcttgtggttttcaaagagctgtttaaagcagcactcctcaaaagcatggactgtggactcagacagcct

SEQ ID NO: 175651 - DNA, 201 bp, Homo sapiens
cgtacgccttcagcacacgcgtgggtccggattttcccatcacacacacgctctcccccgtccaaggtgcctgtttacttctggtctgcgcgggctcaggkttcaaagagcttgctgaaggcggcccccacctcggcgatcatgtcggaggtggtggtggagcgaccgtgcttctggaaggcttggtggttgcactgcctg

SEQ ID NO: 175652 - DNA, 201 bp, Homo sapiens
gaggagccaaaatctataaaacacacaggcctgggcccacagcatcgcctccactccccacccacgggtgtcctgggcagcgctgcacattcatcccggcrtgcagagtcttccggatggtcttggtgataacccacccctgccacttcagcagggtaggcagccagtggccacgggaggctgagatccgggagccccggg

SEQ ID NO: 175653 - DNA, 201 bp, Homo sapiens
tatacttttatttttaaacgaggagttgatcaaggttcatatgttgcatttgtatgttgtgtctttttagggttttttttaatgtggttaaaaaaaccacrtaacataaaagttatcatcttaaccatacagttcagtagtgttaatatgttcacattgttatgcaacagatctctagaattttttcatcttgtaaaacca

SEQ ID NO: 175654 - DNA, 201 bp, Homo sapiens
cagcattaacactaaagagagcatggagaaggctggcctggagcccgcctgcacccattccttccccagcagccacagttgtgttctctgttttggattcrtcttcctgtgttccgttacacacgataggccaatacacataaacctttctcctctgtctcattcatgaggcagtgtcgtatgcatgccgcctcttcccta

SEQ ID NO: 175655 - DNA, 201 bp, Homo sapiens
ccacggggttgcatggtatgcagtggggtcggagcctggccgtggggttgcatgatgcagagtggggccagagccggccatggggttgcatgacgcagagkggggtcggagcccggccacggggttgcatgacgcagagagaggtccgaacccggccgtggggttgcatgacgcagagggggtccgaacccgaccatgggg

SEQ ID NO: 175656 - DNA, 201 bp, Homo sapiens
caagtgattctcatgcctcagcctcccaggtagctgggattacaggcctacaccaccacacccagctaatttttgtatttttagtggagatggggtttcaycatgttggccaggctggtcttgaactcctaacctcaggtccacctgcctcggcctcccaaagtgctgggattacaggcgtgagccactgcatccagtccc

SEQ ID NO: 175657 - DNA, 201 bp, Homo sapiens
ggggaaatgggattttgaaggcaagatttgggcactgcgatgttgattgctaccagagtgacactgcgtctacgctttttcaggggtcagagctaggggaragggagataaacctgcacatacaaaatagattccttatttgggttaattttgatatatccaaataaaattataaaatttaatatcacagggctttttagt

SEQ ID NO: 175658 - DNA, 201 bp, Homo sapiens
atcacaggcatgagtcactgcgcctggcctgttttctccagttatccccaaaatgtgttttatacttttatttttaaacgaggagttgatcaaggttcatrtgttgcatttgtatgttgtgtctttttagggttttttttaatgtggttaaaaaaaccacgtaacataaaagttatcatcttaaccatacagttcagtagt

SEQ ID NO: 175659 - DNA, 201 bp, Homo sapiens
cagcctgggcgacagctagactccatctcaaaaaaaaaaaaaaaaaaaagaattatgctaagtgtactctccctgtgctgtatacgtggaatatcaaagcstgtatgacagcacatccatttacagcatggtttactgaatattttaagcccactgttgagacctactgctcagaaaaaaggattcctttccaaatattga

SEQ ID NO: 175660 - DNA, 201 bp, Homo sapiens
cttcaaaggacaggctgactattgttaggggctaatgtagctggtgactttaagttgaaaccagcgctcattgacaattcaaaaaatcctagggcccttgmgaattaccctaaatcggctgggtgcagtggctcacgtttgtaatcccagcactttgggaggcccaggtgggcagatcatgaggtcaggagttcgagacca

SEQ ID NO: 175661 - DNA, 201 bp, Homo sapiens
tgtttgggtaattcttgcaatatttcaaagtttctcattattaaatctgttatggtgatctgtggtcagtgatctctgatgttactgttgtaattgttttsgggctccatgaaccacatccatggaagacagaacttagtatgtgttgtgcatgttctgactgctccaccaactgtccattcctttaaatctgcccctcct

SEQ ID NO: 175662 - DNA, 201 bp, Homo sapiens
cagagggggtccaaacccagccacggggttgcatggtatgcagtggggtcggagcctggccgtggggttgcatgatgcagagtggggccagagccggccayggggttgcatgacgcagaggggggtcggagcccggccacggggttgcatgacgcagagagaggtccgaacccggccgtggggttgcatgacgcagagggg

SEQ ID NO: 175663 - DNA, 201 bp, Homo sapiens
gccacggggttgcatgacgcagagggggtccaaacccagccacggggttgcatggtatgcagtggggtcggagcctggccgtggggttgcatgatgcagartggggccagagccggccatggggttgcatgacgcagaggggggtcggagcccggccacggggttgcatgacgcagagagaggtccgaacccggccgtggg

SEQ ID NO: 175664 - DNA, 201 bp, Homo sapiens
gaggaaggttggagcccggggccacggggttgcatgacgcagagggggtccaaacccagccacggggttgcatggtatgcagtggggtcggagcctggccrtggggttgcatgatgcagagtggggccagagccggccatggggttgcatgacgcagaggggggtcggagcccggccacggggttgcatgacgcagagaga

SEQ ID NO: 175665 - DNA, 201 bp, Homo sapiens
gctgttctatataaggtttctttcaagtaaaactattaagaaggaacttgaagtagtacaatgtaacgataattatgaacatcctttctgaagctataatrttgtcactagacatctctgccatcttctaataacattgccctttcttccactgttcaaacacctaactgatgaaccccagctgtctgctctcagaagtgg

SEQ ID NO: 175666 - DNA, 201 bp, Homo sapiens
tgtcatgattttatagttccatctcttgttaaaattggaaaaccactaaactctacctattgaaagtaagtaaaggtaattttttgagttgaaaaagaaasaaagaaaaagagaaaaaaagaacctggagcaaaaagaattaagtgcctttactaggatgaaaagtcatgaattacgggcttgtgatgacaggatttcagt

SEQ ID NO: 175667 - DNA, 201 bp, Homo sapiens
aggccacaggacactgggtgctggacaggaggtgtggggtcaggggctcccgagacatcccagggagacggcgctggcaggaagtgtgcctggggccctcrggctctgagccccctgctcagagtggctttggactcgggttccctgtgcgaggagcggagctgctcatccctcccagtcctgactgtgaggagccaaaat

SEQ ID NO: 175668 - DNA, 201 bp, Homo sapiens
ggggctccttctttccagagccagccattcatccgcacctccatccatccgtcagtggaaatgcacctcttggctggaagcactgggagcatgtctccacygccaccttgttctcccacggcaggtgccactgagctgggacagaccctgtggtctgtgtccagtgggcctagggactcgcggtcactggagggcgtgaga

SEQ ID NO: 175669 - DNA, 201 bp, Homo sapiens
tggggactgctcctcccttccactttgggctcctcatccagatggcctaagaaacacccacagactctaaagccaggtctggggactgctcctccctcccyctttgggctgtcccatcacacacaggcactttccctcgggggggccttccctagaggtgcctctgaccccagggcggggctccctctttccagagctagc

SEQ ID NO: 175670 - DNA, 201 bp, Homo sapiens
actcctggtgaagatgctgtggacattgttgaaatgacaacagaggatttagactattgcataaatttagttgataaagcagtggcagggtttgagaggaytggctccaattttgaaagacattctgccgtgggtaaaatgctatcaaacattggatgctacagagaaatctttcatgaaaggaagagtcaattgatggca

SEQ ID NO: 175671 - DNA, 201 bp, Homo sapiens
tcgggatcttcccagacattctttcttcacctttgggaagatggagggggacggtggtggcatcccttgcagtctgtgctgcgctgacactttggagaagygtctcccatctgtagagcagaatcctctttggagaaatgcagctgtccttgaccttgaggcagaaggcgtctccatcctgggcatctgtctgcccctccc

SEQ ID NO: 175672 - DNA, 201 bp, Homo sapiens
gtttcttgagatggaatctactcctggtgaagatgctgtggacattgttgaaatgacaacagaggatttagactattgcataaatttagttgataaagcartggcagggtttgagaggattggctccaattttgaaagacattctgccgtgggtaaaatgctatcaaacattggatgctacagagaaatctttcatgaaag

SEQ ID NO: 175673 - DNA, 201 bp, Homo sapiens
cccgccgaggtcggaggtggccttgaggagctgggccgtcgcttgctgtctgagcttccatccacgaatggtgtgggagttcgggatcttcccagacattstttcttcacctttgggaagatggagggggacggtggtggcatcccttgcagtctgtgctgcgctgacactttggagaagtgtctcccatctgtagagcag

SEQ ID NO: 175674 - DNA, 201 bp, Homo sapiens
aaacgaggagttgcttcttatggatgagcaaagaaagtggtttcttgagatggaatctactcctggtgaagatgctgtggacattgttgaaatgacaacaraggatttagactattgcataaatttagttgataaagcagtggcagggtttgagaggattggctccaattttgaaagacattctgccgtgggtaaaatgct

SEQ ID NO: 175675 - DNA, 201 bp, Homo sapiens
cgatctgccagtgagggatttctaggaacacaaggttagtcaggacgtggatccccacagtggacacgactgccccaccccgccgaggtcggaggtggccwtgaggagctgggccgtcgcttgctgtctgagcttccatccacgaatggtgtgggagttcgggatcttcccagacattctttcttcacctttgggaagatg

SEQ ID NO: 175676 - DNA, 201 bp, Homo sapiens
gttagtaactgagcctaaacactcactgcgttctgtggctacagactcaccgtcgattgagtgaagtagtgtcagacattcagtagcatccagcagcacaygtgcctgtgcgtgagacctgctggccctgtgcccagggaacagacaacacagcaacagaagagcagggaccccgggaggcggcagaatgcagcctgtttc

SEQ ID NO: 175677 - DNA, 201 bp, Homo sapiens
agtttggtctgaaaagaggctttctcaagcctgggcagctctttcaggaacacattcccagtgggaattttgggtgggattcaggaggcaccgatctgccrgtgagggatttctaggaacacaaggttagtcaggacgtggatccccacagtggacacgactgccccaccccgccgaggtcggaggtggccttgaggagct

SEQ ID NO: 175678 - DNA, 201 bp, Homo sapiens
cacagtgaaaccctatctctactaaaaatacaaaaattagctgggcgtggtggtggacacctgtaatctcagctacttgggaggctgaggcaggagaatcrcttgaacctgggaggcggaggttgcagtgagctgagattgtgccactgcactccagcctgggcgacagctagactccatctcaaaaaaaaaaaaaaaaaa

SEQ ID NO: 175679 - DNA, 201 bp, Homo sapiens
cagtggctcacgtttgtaatcccagcactttgggaggcccaggtgggcagatcatgaggtcaggagttcgagaccagcctggtcaacacagtgaaaccctrtctctactaaaaatacaaaaattagctgggcgtggtggtggacacctgtaatctcagctacttgggaggctgaggcaggagaatcacttgaacctgggag

SEQ ID NO: 175680 - DNA, 201 bp, Homo sapiens
attgccccgaagtcacttcctgcagcatgtccttcaccccgggcttaccctgttgagtcgggggacccagcaggcggctctgcccctaccattacctactrtgtctgcctctcacagtgccccagtttttgtctaaaaatgaagcagaaacaaagctggctgcgtggctgtttgaggacttaggagctgttgtccggcacc

SEQ ID NO: 175681 - DNA, 201 bp, Homo sapiens
gttcacttgggtttcttcgtgaaagtacatgaggctgattgccccgaagtcacttcctgcagcatgtccttcaccccgggcttaccctgttgagtcggggracccagcaggcggctctgcccctaccattacctactgtgtctgcctctcacagtgccccagtttttgtctaaaaatgaagcagaaacaaagctggctgcg

SEQ ID NO: 175682 - DNA, 201 bp, Homo sapiens
gcagagttcacttgggtttcttcgtgaaagtacatgaggctgattgccccgaagtcacttcctgcagcatgtccttcaccccgggcttaccctgttgagtygggggacccagcaggcggctctgcccctaccattacctactgtgtctgcctctcacagtgccccagtttttgtctaaaaatgaagcagaaacaaagctgg

SEQ ID NO: 175683 - DNA, 201 bp, Homo sapiens
atgttgtgtctttgttcttattggtttcaaagaacgtctttactgctgccttcatttcattatgtacccagtagtcattcaggagcaggttgttcagtttycatgtagttgagaggttttgagtgagtttcttaatcctgagttctagtttgattgcactgtggtctgagagacagtttgttacaatttctgttcttttac

SEQ ID NO: 175684 - DNA, 201 bp, Homo sapiens
tttctattgattgtaatagtttccgaaggaatggtaccagctcctccttgtacctctggtagaatttggctgtgaatccttctggtcctggactttttctrgttggtaggctattaattattgccttaatttcagagcctgttattggtctattcagggactcaacttcttcctggtttagtcttgggagggtgtatgtgt

SEQ ID NO: 175685 - DNA, 201 bp, Homo sapiens
ccttttttgttgtgtctctgccaggttttggtatcaggatgatgctggcctcttaaaatgagggaggattcccttgttttctattgattgtaatagtttcmgaaggaatggtaccagctcctccttgtacctctggtagaatttggctgtgaatccttctggtcctggactttttctggttggtaggctattaattattgc

SEQ ID NO: 175686 - DNA, 201 bp, Homo sapiens
tccctgtcttgtgccagttttcaaagggaatgcttccagtttttgcccattcagtatgatattggctgtgggtttgtcataaatagctcttattattttgmgatacgccccatcaatacctagtttattgagactttttagcatgaagggctgttgaattttgtcaaaaggccttttctgcatctattgagataatcatgt

SEQ ID NO: 175687 - DNA, 201 bp, Homo sapiens
tgctgaagttgcttatcagcttaaggagattttgggctgagatgatggggttttctaaatatacaatcatgtcatctgcaaacagggacaatttgacttcytcttttcctaattgaataccctttatttctttctcctgcctgattgccctggccagaacttccaacactatgttaaataggagtggtgagagagggcatc

SEQ ID NO: 175688 - DNA, 201 bp, Homo sapiens
ttctttttttgtcaggtttgtcaagatcagatggttgtagatgtgtggtattatttctgagggctctgttctgttccattggtctatatctctgttttggkaccagtaccatgctgttttggttactgtagccttgtagtatagtttgaagtcaggtagcatgatgcctccagctttgttcttttggcttaggattgtctt

SEQ ID NO: 175689 - DNA, 201 bp, Homo sapiens
ttagatcccatttgtcaattctggcttttgttgccattgcttttggtgttttagtcatgaagtccttgcccatgcctatggcctgaatggtattgcctgcrttttcttctagggtttttatggttttaggtctaacatttcagtctttaatccatcttgaattaattttgtgtaaggatagggatccagtttcagctttct

SEQ ID NO: 175690 - DNA, 201 bp, Homo sapiens
agtcccccagccaccctcatgtgggtcctctgtcaccaaagctcctcttcccactgtctgcctgggaccgcagctgcctgccgcccccactcagtcacacracactgctctcctggcccactgcggcatcccctactctggaaacaccctctctgtcctggtttctgcctctcagtagagctttctccgccttctccctgg

SEQ ID NO: 175691 - DNA, 201 bp, Homo sapiens
tcccgagctcaagcgattctcctgcctcagcctccacagtagctgggattacaggcacctgccaccacacccggctgatttttgtatttttagtagagacraggtttcgtcatattggtcaggctggtctcgaactcctgacctcaggtgatccgcccgcctcggcctcccaaagtgctgggattctaggtgtgagccacc

SEQ ID NO: 175692 - DNA, 201 bp, Homo sapiens
gcggagatgaatcccgtgtgcgagcgcagagctctcttcccggctcgtgcttgctcccctcgtggctgggggctgtggtcctttcaaagctgttccctgcrgatcccttcccaggggcactttgccctcggaagccccgcctcccttctcgcagattgtggcaggattaggggcagcatcttgtatgactgtcctaattgt

SEQ ID NO: 175693 - DNA, 201 bp, Homo sapiens
gtggggtcaggggctcccgagacatcccagggagacggcgctggcaggaagtgtgcctggggccctcgggctctgagccccctgctcagagtggctttggrctcgggttccctgtgcgaggagcggagctgctcatccctcccagtcctgactgtgaggagccaaaatctataaaacacacaggcctgggcccacagcatc

SEQ ID NO: 175694 - DNA, 201 bp, Homo sapiens
aggcgaatgggctggagaaactgtttccgcctggctccgtgttgctggaaacgggcagaggcggcggagatgaatcccgtgtgcgagcgcagagctctctycccggctcgtgcttgctcccctcgtggctgggggctgtggtcctttcaaagctgttccctgcggatcccttcccaggggcactttgccctcggaagcccc

SEQ ID NO: 175695 - DNA, 201 bp, Homo sapiens
tggacacgactgccccaccccgccgaggtcggaggtggccttgaggagctgggccgtcgcttgctgtctgagcttccatccacgaatggtgtgggagttcrggatcttcccagacattctttcttcacctttgggaagatggagggggacggtggtggcatcccttgcagtctgtgctgcgctgacactttggagaagtgt

SEQ ID NO: 175696 - DNA, 201 bp, Homo sapiens
ttttctgagacgtggtctgaacctctcccctgggtggaactgcagtgcatcggcccaggggacctgcgctcacgggcgcacgagcttgagaaagaagtgtsgccagcctcgtgctcgcctggcctcgtgcagcatctgtgtgtggtgtgcacttacgcgtgatgaaagcagcccagccgtgccgtgagaggaagagtcggg

SEQ ID NO: 175697 - DNA, 201 bp, Homo sapiens
ggctaccttgggccatgtctttatcctggctctgacgccacgtcgttggctttctactgcaaactcaggttttctgagacgtggtctgaacctctcccctsggtggaactgcagtgcatcggcccaggggacctgcgctcacgggcgcacgagcttgagaaagaagtgtggccagcctcgtgctcgcctggcctcgtgcag

SEQ ID NO: 175698 - DNA, 201 bp, Homo sapiens
ccctgcctgtcctgcccaggggcagcacttccccgaacggtgtgtagcagagcaaggtctcctggatgggtgatgacggttcctcccatgctgcacagttrcctgctgccccgggctaggctcttggccaggagttgtctagcactggcctggcatggtggctcacgtgtatgatcccagcactttgggaggccgaggctg

SEQ ID NO: 175699 - DNA, 201 bp, Homo sapiens
tctggcctctggtgtcccctctgctccattgacactgccgaggccctgggtcgctgctgttgtcatgccacctccctctcccccttcttgtccctcctacktagctctcttgctccaaattgatgatttcacctttttaatgaagacgatgggagtggggacatgcagccgaaacatagtttattctcattcccccatggg

SEQ ID NO: 175700 - DNA, 201 bp, Homo sapiens
cccagtgctggtctgggcccggcccacagtggatgtgggcttcctcgtcaagctcgagtcctctccactccttctctctgggtctggacaagtcgtgaacycgcagcacctcggcttcctgctgtgtgaactgggagattggaaggggccagcctggcacggcccctgaacatgggagccctcaaacgtgaccctgcctgt

SEQ ID NO: 175701 - DNA, 201 bp, Homo sapiens
aatcctactgtattttccactagggtatgtgcattttcaattttcacagacattgccatgtctgcattatttttagcagcctcttagtggctcatggcagkgaggcaccgtgattttatttccctgttgttgggcttgtttgtgagacctgtactctgcaggctgcagtgctgtgatgaatatcctttagctaaatatctg

SEQ ID NO: 175702 - DNA, 201 bp, Homo sapiens
aggccagagaataagcagaaccttgttgagtgaggctgctgtgtgccttacggttcgggttgagagtgaacccagaggacgagggatcccagtgctggtcygggcccggcccacagtggatgtgggcttcctcgtcaagctcgagtcctctccactccttctctctgggtctggacaagtcgtgaacccgcagcacctcgg

SEQ ID NO: 175703 - DNA, 201 bp, Homo sapiens
ccttcacacacagtcgtgtagttttgcgcttgcttgattaatctcttggcctcagtcggttttctaccatatggagttggttcattctctcgaatggctgygtagtccagtgtgtgggtgcagcttaattaaagaatcccctattgatggtcatttaaatcctactgtattttccactagggtatgtgcattttcaatttt

SEQ ID NO: 175704 - DNA, 201 bp, Homo sapiens
tgactgcctgtctctcgctttaccaggactttctgaagaccttttcccccgatgtcttccggttcttctgcctgcggagcagctaccgctcaggtgagccragcacacgtggagtggactccccccccagctcggagacagtcattctgacaggactgaaaacagcaaaatgcaggccagagaataagcagaaccttgttg

SEQ ID NO: 175705 - DNA, 201 bp, Homo sapiens
tgtgtgtgtgcacacatctccctatagctgtgcttctcactttcccttcacacacagtcgtgtagttttgcgcttgcttgattaatctcttggcctcagtmggttttctaccatatggagttggttcattctctcgaatggctgtgtagtccagtgtgtgggtgcagcttaattaaagaatcccctattgatggtcattta

SEQ ID NO: 175706 - DNA, 201 bp, Homo sapiens
aagggactgagccctggaggcaggtggagcagtgtcctcctccttccagctcagcagtccagggagccccctcctttctactgggtgggcgaggccgctgmagcctgaagcagggacagccccttctaccccaagacgctcttcagttgtgtgtgttttgctctcagtagggttgttgagcagcacggccttagactggtc

SEQ ID NO: 175707 - DNA, 201 bp, Homo sapiens
aagcagcggttagttttctcggagcaggtgtgtgtgtgcacacatctccctatagctgtgcttctcactttcccttcacacacagtcgtgtagttttgcgyttgcttgattaatctcttggcctcagtcggttttctaccatatggagttggttcattctctcgaatggctgtgtagtccagtgtgtgggtgcagcttaat

SEQ ID NO: 175708 - DNA, 201 bp, Homo sapiens
tgagaatgcccctcactgcctcaggcacaggcagacaggagttgggctgtggggtgggggctgagctccttcctggtagaagacagaccagacctgctccrtcctctgaagggactgagccctggaggcaggtggagcagtgtcctcctccttccagctcagcagtccagggagccccctcctttctactgggtgggcgag

SEQ ID NO: 175709 - DNA, 201 bp, Homo sapiens
agtgttggcagctaggggtcatctggagaaaaacataagccagaggtagatagaggcgtcatagccgcattcaaggcaggtcagagatttaaatataaaaragaccccaaggcaaatttgatagcctcatactggggaggctttgtaagtttgtttccaaatccagaagccatttatgagaaaagattcagaaatatgaaa

SEQ ID NO: 175710 - DNA, 201 bp, Homo sapiens
gctgaagatacgtaggtattgaatgtttgttgcaatgagtcagaaagcatgaagcactgccctggacgttcctgtccttcctgggtcctacttggagcgtragatgagcacgtgaggccctgaggatctgctcagtaggctctgtgtatggaagtagctttttacttgttctaatgtggtatatttagattttgtttcaaa

SEQ ID NO: 175711 - DNA, 201 bp, Homo sapiens
gtgggctttcttgtggctgggtggttctgttgcgaatgccccagactcattaacgtgcacatctaatccttctgcagatgaatatttcccccgcttccctygccagtctttatgaggaagacttcaagcaggacatggcagccctgaaggtaaagtgtggggctggttgttcctgccatgagggtgacaggcgtgagcaat

SEQ ID NO: 175712 - DNA, 201 bp, Homo sapiens
taatattgaatcaaaaccttccaccagcaaaaagatgactcactgaaggctcatatgattatcatttttgttagcaataaaatattttttcattaaggtaygtacattgttctttcagacataatgctattatatacttaatagactgcagtataatagtgtaaacataacttttatatgcactgggaaaccagaaaatat

SEQ ID NO: 175713 - DNA, 201 bp, Homo sapiens
acattgcatgtacactctccttgctgtctatcttctgaatatatatgcttttgttttggttccaggaccccctccccacataccaaaatccttggatgctygagtccctgatataaaatatatttgcacttaatctatgcacatcttcccatatactttaaatcatatctagattacttttaataactaatacaatgtaaa

SEQ ID NO: 175714 - DNA, 201 bp, Homo sapiens
agactattgcataaatttagttgataaagcagtggcagggtttgagaggattggctccaattttgaaagacattctgccgtgggtaaaatgctatcaaacrttggatgctacagagaaatctttcatgaaaggaagagtcaattgatggcacagacttcattattgtcttgttttaagaaattgccacagtaactcagcct

SEQ ID NO: 175715 - DNA, 201 bp, Homo sapiens
cgaacaccgcatggttctcactcataagtgggagttgaacaatgagagcacatggacacagggaggggaacatcacacacccggcgcctgtcgggggttgrggggctaggggagggatagtattaggagaaatacctaatgtagatgacgggttgatgggtgcagcaaaccaccatggcacgtgtatacctgtgtaacaaa

SEQ ID NO: 175716 - DNA, 201 bp, Homo sapiens
tttttttctcttttttttttttttttcattttttctgggtaagcacatgtagattcaagactctgacaggtcagttttcctgtggagcagtctgtgtttaratttgcatgttgcttactgcaggtggtttcattggtttgcggatgctaatctttgtctggtggaccccaggcaaggctggcgtcttgctgttttgctgct

SEQ ID NO: 175717 - DNA, 201 bp, Homo sapiens
ggtaggatatattcacatagtaacattttgttttgtttttgttttgagacagggtctcactttgtcatccaggctggagtgcaatggtgggatctcagccyaccgcaacctccgcctcccaggctcaagcgattttcctgcctcagcctcccgagtacctgggactacaggcgtacaccactacgcccagctaatttttgt

SEQ ID NO: 175718 - DNA, 201 bp, Homo sapiens
tgccgcctcttccctaacaatttaagtgaggttttaatttgattatagacatgatgggtttaatttcagaaagtttgaaaactgcagacaagacagagaascacacggtagaaaaattcaaaggtactaagtctggaaagcaggcctcctgcccgaccacgttcactgttgcccggcttctctcctgaagcagcggttagt

SEQ ID NO: 175719 - DNA, 201 bp, Homo sapiens
agcacgcataaacagatgatggaatacaccaaaaagtccagaaacagccctgataatcaatgggagtttgttttatgataaaagatggcatttcaaatcaktaggggtgggaggtagagtgttggcagctaggggtcatctggagaaaaacataagccagaggtagatagaggcgtcatagccgcattcaaggcaggtcag

SEQ ID NO: 175720 - DNA, 201 bp, Homo sapiens
tatgcatgccgcctcttccctaacaatttaagtgaggttttaatttgattatagacatgatgggtttaatttcagaaagtttgaaaactgcagacaagacrgagaaccacacggtagaaaaattcaaaggtactaagtctggaaagcaggcctcctgcccgaccacgttcactgttgcccggcttctctcctgaagcagcg

SEQ ID NO: 175721 - DNA, 201 bp, Homo sapiens
ttaaaatattttaaattataataatacactttcctgagtcactcccttgactttaatttttggcaccattttataggttgtcagagatggaaagcacaggwtttaaacaaatctggggtaagaattaaaagaggtaggatatattcacatagtaacattttgttttgtttttgttttgagacagggtctcactttgtcatc

SEQ ID NO: 175722 - DNA, 201 bp, Homo sapiens
gtgtatatatatatgtatatgtgtatatatatatgtgtgtgtgtatatatatatatatatatattttttttttttttttttttctgcacagctttatgtggtaggattgacctacaatagattgcatgtattattcaggaaggtgcagtttgccaaatgttgacctagggatgcccctgtggatgcatccctcacccctgt

SEQ ID NO: 175723 - DNA, 201 bp, Homo sapiens
tgaagagattgagccacttgtcttgttgaacatcccacattttggatttgtctgtttcattgtgttgtcatttagcttgttcttctatctcctgtagttcrtttcacgggaagtgagggttaaagggtcagtttgatccaggtagaagctttttggcaggaataccttgtagttgatgctgtgaactcacagtgcattccc

SEQ ID NO: 175724 - DNA, 201 bp, Homo sapiens
atatatatgtatatatgtgtgtgtatatatatgtatgtgtgtatatatatatgtatatgtgtatatatatatgtgtgtgtgtatatatatatatatatatwttttttttttttttttttttctgcacagctttatgtggtaggattgacctacaatagattgcatgtattattcaggaaggtgcagtttgccaaatgttga

SEQ ID NO: 175725 - DNA, 201 bp, Homo sapiens
cccagattcaatagttgtgatgattttgctgtatttgctgtgtaggatctttttcgcctacccagcttagattctcccaccggggagcctcaattaaattrgtaaattagactctggccaaagacagattagcaagagaaaaacaaagagaaatgtgttagagcgtgcacggcacacgtggaggtggagcacagggttgca

SEQ ID NO: 175726 - DNA, 201 bp, Homo sapiens
tgtaaattagttcaaccattgtggaagacagtgttgcgattcctcaaggatctagaaccagaaataccatttaacccagcaatcccattactgggtatatacccaaaggattataaatcattctactataaagacacatacacacgtatgtttattgcagcactgtccacaatagcaaagacttggaaccaacccagatgc

SEQ ID NO: 175727 - DNA, 201 bp, Homo sapiens
tatagtttccttaagtagaatttttccgttttatcctaggcaaaatttcaaaccgatagaaaagttgaaagaaacatcactatggctccacccagattcartagttgtgatgattttgctgtatttgctgtgtaggatctttttcgcctacccagcttagattctcccaccggggagcctcaattaaattagtaaattaga

SEQ ID NO: 175728 - DNA, 201 bp, Homo sapiens
gtgtaaattagttcaaccattgtggaagacagtgttgcgattcctcaaggatctagaaccagaaataccatttaacccagcaatcccattactgggtatatacccaaaggattataaatcattctactataaagacacatacacacgtatgtttattgcagcactgtccacaatagcaaagacttggaaccaacccagatg

SEQ ID NO: 175729 - DNA, 201 bp, Homo sapiens
ttaagaaatgcaaatcaaaaccacagtgagataacatctcatgccagttagaatggcgatcattaaaaagtcaggaaacaacagatgctggcgaggatgtrgagaaataggaacgcttttacactgttggtgggagtgtaaattagttcaaccattgtggaagacagtgttgcgattcctcaaggatctagaaccagaaat

SEQ ID NO: 175730 - DNA, 201 bp, Homo sapiens
cctcacaaaataatttgtatatagtttccttaagtagaatttttccgttttatcctaggcaaaatttcaaaccgatagaaaagttgaaagaaacatcactrtggctccacccagattcaatagttgtgatgattttgctgtatttgctgtgtaggatctttttcgcctacccagcttagattctcccaccggggagcctca

SEQ ID NO: 175731 - DNA, 201 bp, Homo sapiens
aaaggaatggtgtgaggtccttgaggaacattttcactgaggtctctgtcttcctattttctattgatttgtctttctcataactgggtagtctcccaccrcatggggctgtttagcagttctagccttttcccaattgctgtttgtattgcttctggctgttaaaaagagtgctgctatgaacatatatgcttttgtttt

SEQ ID NO: 175732 - DNA, 201 bp, Homo sapiens
aggctcagagctggctggatccttaaccaacctgaaaaatggcatcatgctatgctgctgacacatggaatgtgaattttcgtgtgaatggaaaacaggcrcacccacggagggctctggctgacatagtttgaactcctcctttgtcttttggcctgtctttaaagccagatttaatttaattgcaaaataaatggagaa

SEQ ID NO: 175733 - DNA, 201 bp, Homo sapiens; identical to SEQ ID NO: 31380

SEQ ID NO: 175734 - DNA, 201 bp, Homo sapiens
aaaaatgaaataaactagtggtcacccacgaagatgtagagttgacataccaagaagcaataatgaacatggtgaagttcaacaggaaagcttcatcatgyacacgttcagtgcccatgcagccacggacatcgtgggcattaggatttggggtcatacacagaacctgaccaagcagctgaggaatggttttttgcaatt

SEQ ID NO: 175735 - DNA, 201 bp, Homo sapiens
caccatgagcactgaaggctttgatatggatgctggagatacctgcctgctttcaggcaggcacgacaatctcacaccctctttccttttgcctaagagcrtttaattcatggggaagaaagcattttctgcagcttgccctccagaccatcacaataacagaagttttgaatgcagaaaccaaattatttcaaagggggt

SEQ ID NO: 175736 - DNA, 201 bp, Homo sapiens
agatgcagccgaggaagcaggaatgtctgtaacttgtggccaaacagtgctaacctcctggattgttttgggaggagtcactacaactacaggccaatcartttatcatgccagacaatacagcgccaggggatgtgctggagtccacaaaacccctgggggcacaagtggagtggctgtgcacgactgtcacttgtatca

SEQ ID NO: 175737 - DNA, 201 bp, Homo sapiens; identical to SEQ ID NO: 31383

SEQ ID NO: 175738 - DNA, 201 bp, Homo sapiens
taaataaatgattgaataaattaacaagtcagagagaagagaaaaatctgccatgcagaagaattccaaataagtcacacagatactctatcctaaaggakgaagtgcataactccccactcaagtgcaggctgcacatactgtaccatgtggaatctaggaaaagcctacagtatggaaagctggagtcagcaaatttat

SEQ ID NO: 175739 - DNA, 201 bp, Homo sapiens; identical to SEQ ID NO: 31384

SEQ ID NO: 175740 - DNA, 201 bp, Homo sapiens
aaaatgaaataaactagtggtcacccacgaagatgtagagttgacataccaagaagcaataatgaacatggtgaagttcaacaggaaagcttcatcatgtwcacgttcagtgcccatgcagccacggacatcgtgggcattaggatttggggtcatacacagaacctgaccaagcagctgaggaatggttttttgcaattc

SEQ ID NO: 175741 - DNA, 201 bp, Homo sapiens
caaaaaagactaaggtataatcctatatcatgagtgaataggaattttttgttattggtgtttgcgttagttgagattttattcagcagtaaatagagagatttaaaatagaagtggcttaaggaagacagatatttctccttcatgtaaaatctgaaagttggcagtccgaggttaatatggcacctctatccagtacag

SEQ ID NO: 175742 - DNA, 201 bp, Homo sapiens
ctttttgccaaacaatgcattctacataatcttaaaaaacaaagtccatttcaaagaacaaaaataatgaccatatccactgagcaattgagcagaatggraatcggagttttaaactctgatatatctgttttccttagggctgaaatcttcttttcatggttctagtttctctaattgaaataagaacctaaccctgtt

SEQ ID NO: 175743 - DNA, 201 bp, Homo sapiens
acaaaaaagactaaggtataatcctatatcatgagtgaataggaattttttgttattggtgtttgcgttagttgagattttattcagcagtaaatagagagatttaaaatagaagtggcttaaggaagacagatatttctccttcatgtaaaatctgaaagttggcagtccgaggttaatatggcacctctatccagtaca

SEQ ID NO: 175744 - DNA, 201 bp, Homo sapiens
ttattattatagttcctatttaggtaagaacgcaatggagaaaaaatgcatttggttattgggcctctgtttgaatatcctgtgctttttgccaaacaatrcattctacataatcttaaaaaacaaagtccatttcaaagaacaaaaataatgaccatatccactgagcaattgagcagaatgggaatcggagttttaaac

SEQ ID NO: 175745 - DNA, 201 bp, Homo sapiens
cacaaaaaagactaaggtataatcctatatcatgagtgaataggaattttttgttattggtgtttgcgttagttgagattttattcagcagtaaatagagagatttaaaatagaagtggcttaaggaagacagatatttctccttcatgtaaaatctgaaagttggcagtccgaggttaatatggcacctctatccagtac

SEQ ID NO: 175746 - DNA, 201 bp, Homo sapiens; identical to SEQ ID NO: 31393

SEQ ID NO: 175747 - DNA, 201 bp, Homo sapiens
tagtgttcctgagtttgagactaagctttctagaccagtaatttaacaaccagaatttgtactggtcatgccagttctttgtttttttgtttgtttgtttgttttttccccagcatttattttatttttattatactttaagttctagggtacatgtgggaattgaacaatgagaacacttgggcacaggaaggggaacat

SEQ ID NO: 175748 - DNA, 201 bp, Homo sapiens
acacaaaaaagactaaggtataatcctatatcatgagtgaataggaattttttgttattggtgtttgcgttagttgagattttattcagcagtaaatagagagatttaaaatagaagtggcttaaggaagacagatatttctccttcatgtaaaatctgaaagttggcagtccgaggttaatatggcacctctatccagta

SEQ ID NO: 175749 - DNA, 201 bp, Homo sapiens
tgtgcttttgagacatagctatggtttcccatactaatgctattccaaattctttatgggatttgagaaagaggagctagctatttaagtaactatttttrtggttataactacagtcaaatccttcatctgtctgacctgcaatgataaaaatcagctattactttaaaaggcccaaaagttatggaccaagtgccagaa

SEQ ID NO: 175750 - DNA, 201 bp, Homo sapiens
ctccccccagaattgcaagtggtcccacccctagattttgaaggttttagaactctgtcatacataacaatagaaacaaaaggagctgagagcagccatgscacacaggtgagggaatgtgtcattgccatctgtgccatctgtgaattctggacattagtcgtattgtttaatccctatgcttttatgttggatgagggg

SEQ ID NO: 175751 - DNA, 201 bp, Homo sapiens
tatacggtctgtactgaatatcaatggcaaagccttgatatttgtcttagctcaagctgctataacaaaataccataaactgatggcttaaacaacaaacwtttatttctcacagttctgggagctggaagtctgagatcagggtgtcagcatagtcaggttctggtgagggcatcttcagggttgcagactgcccacata

SEQ ID NO: 175752 - DNA, 201 bp, Homo sapiens
aactcatactctgcgtggcttgtggaggttgttaaagtgtcgagattttgaagctaaatacattttagagcttactatatatatacatatatatatatatwcatataatcaatcaaaaatgcctgaagcaaactatttactgtcagtgtcttggggctacataaaggtaagacttacttagcttttgaaaactccttactc

SEQ ID NO: 175753 - DNA, 201 bp, Homo sapiens
tgtaaatgacaggatttccttccttttttagggctgaataatatttcattgtatatgtgtgtgtgtgtgtgtgtgtgtgtgtgtgtgtgtgtgtgtgtgtrtatatatatatcacatttcctttgtccattcatctgttgatggacatttaggttgcctctgtatcttagctattacaaatatgctgcagtgaaaatatct

SEQ ID NO: 175754 - DNA, 201 bp, Homo sapiens
aatctttaaaaactcatactctgcgtggcttgtggaggttgttaaagtgtcgagattttgaagctaaatacattttagagcttactatatatatacatatmtatatatatacatataatcaatcaaaaatgcctgaagcaaactatttactgtcagtgtcttggggctacataaaggtaagacttacttagcttttgaaaa

SEQ ID NO: 175755 - DNA, 201 bp, Homo sapiens
cactttgggaggccgaggtgggcagatcacttgaagtcaggagtttcagaccagcctgggcaacatgatgaaacctaatctctactaaaaatacaaaaaaatcagccaaatgtggtcacaagcacctgtaatcccagcaactcaggaggctaaggcactagaatcacttgcacctgggaaggagagggtgcagtgatctga

SEQ ID NO: 175756 - DNA, 201 bp, Homo sapiens
aaatgtagttgtgtacaagtatttatattttgtagtatttgatagaaattactcatttctcctttatttcactgataagccattatactgattttttttttaaatctatgtagggagtatttagcctatatgtattcagtacagtattatgaaggaagtgtatttaggaatttcatttcaggatgaatacttgttataaaa

SEQ ID NO: 175757 - DNA, 201 bp, Homo sapiens
aacccaggagatggaggttgcagtgagccaacatggtcccactgcactccagcctgggtgacagagtgagactccatctcaaaaaaaaaaaaaaaaaaaaagaagagaaataaaaaagtacagatgttgcaggaagaaggtatcatcagagagaggagaagaaatacacttgatattgtattcataaatattaacattgct

SEQ ID NO: 175758 - DNA, 201 bp, Homo sapiens
acaaggaatagcagggaagtggcctctagaaattctgaggggtatttctaggaaaagtctgaaaaagagaactaactgaacattatgggaattttttttttcttttttgagacaaggtcttgctctgtcatccaggctggagtacagtggtgcaatcatagctcactgcagccttaaactcctggcctcaagccatcctcc

SEQ ID NO: 175759 - DNA, 201 bp, Homo sapiens
ttggagccgcgctgcgcctgccgcccgaggagttgagaaagaaaacaggaaacgtggtggccgcgcacccggccgcggctgattcattcacttcaagtgcmgtgcagaaggctcggcaggcggggcgggcgtggggccgcggctccgggttggggaccgaggagatccggctgtggaccagacgctcctctgcggggcggg

SEQ ID NO: 175760 - DNA, 201 bp, Homo sapiens
gtactgaaatagttcaaaaagattgttaattgcttgggtatctggtaaggactgagaaaacaaggaatagcagggaagtggcctctagaaattctgagggstatttctaggaaaagtctgaaaaagagaactaactgaacattatgggaattttttttttcttttttgagacaaggtcttgctctgtcatccaggctggag

SEQ ID NO: 175761 - DNA, 201 bp, Homo sapiens
agttatgcaaggagataattggaattgtgtatgtttttagtggctatttgcctgtgcatgtcgtatgcagatggctgaaggattcagccagtaaggactgrtaatgttgtgagacaattagtaatagttgcctcgtcaagatatttaagtatttttggccacctatttacaaggtcaagaaggttatattatcttacagtt

SEQ ID NO: 175762 - DNA, 201 bp, Homo sapiens
tagtggctatttgcctgtgcatgtcgtatgcagatggctgaaggattcagccagtaaggactggtaatgttgtgagacaattagtaatagttgcctcgtcmagatatttaagtatttttggccacctatttacaaggtcaagaaggttatattatcttacagttcatctatgtgcacatatctttaaatgagtgatgcttt

SEQ ID NO: 175763 - DNA, 201 bp, Homo sapiens
catgtgttaatgtatcagcagttcagctccatcagcagaatttcaaatatcctgaaatgtactgaaatagttcaaaaagattgttaattgcttgggtatcyggtaaggactgagaaaacaaggaatagcagggaagtggcctctagaaattctgaggggtatttctaggaaaagtctgaaaaagagaactaactgaacatt

SEQ ID NO: 175764 - DNA, 201 bp, Homo sapiens
caatagcagtagacatatgctgaatatgtccagtgtcctaactgctaaatgggagcactttgccatgggcctgagttcttaattctattgtgtggttgatkctgtgtaagaaaatgaagagcagaatcaaaagccacttagcaatgtgcaagcattagtgtatgttttcaaggtgattcgacagtagtttttcagctaaat

SEQ ID NO: 175765 - DNA, 201 bp, Homo sapiens
tcctaactgctaaatgggagcactttgccatgggcctgagttcttaattctattgtgtggttgattctgtgtaagaaaatgaagagcagaatcaaaagccmcttagcaatgtgcaagcattagtgtatgttttcaaggtgattcgacagtagtttttcagctaaatgaatttgagcagctagttactttccctaaaatcca

SEQ ID NO: 175766 - DNA, 201 bp, Homo sapiens
agccagtttattattagaagggaaaaactcctattaatattttcttgtttatgtttgtgttttcatgttagtcttaaaacaagttactgtttgagaatgtragaattttaaccatttacaaaatggtgtatgatatgacatgtatatgatctctcacaagtgaaatgataatggaaagtttactgaaaatgtcttaacagt

SEQ ID NO: 175767 - DNA, 201 bp, Homo sapiens
catgggcctgagttcttaattctattgtgtggttgattctgtgtaagaaaatgaagagcagaatcaaaagccacttagcaatgtgcaagcattagtgtatrttttcaaggtgattcgacagtagtttttcagctaaatgaatttgagcagctagttactttccctaaaatccatattcttaatgttgagatctatgtttgg

SEQ ID NO: 175768 - DNA, 201 bp, Homo sapiens
tggggcaaggttctccagaaggccataaaggccatatatgctctgaatcagcatccaatatgtggtgctatttctcccataaccagaattcatgggtccargaatcattggatagaaatgggactgttaccactcataattacccccagtgacccactagcaaagtttgcttcctgttcctgcaaatttatgtgctgctag

SEQ ID NO: 175769 - DNA, 201 bp, Homo sapiens
ggtctgggagtgggataaatagggggaggatccaggggtggctgtttctccctctttcacctccaaaggaggaggtagtttttccttttggcttctggagraagaaatgttggagaggaatcagcagaggagtctccagggccgatgcagggccctggaggagatggctaagcatagctaggatgtgaggtttgccttaca

SEQ ID NO: 175770 - DNA, 201 bp, Homo sapiens
taagttaacaggtagttttaaataactagatatagtcttttcctcttccatgtaagccaagataatatttccacttctccttctgaacatgtgagtacagwttatatataaatcaacagcaagatggaaatttactctgagctttgtgatgttttcactttaagatgctgtagttctgatcctttatacatttatttcatt

SEQ ID NO: 175771 - DNA, 201 bp, Homo sapiens
ggattaccttaggtcaggagttcgagaccagcctggccaatatggtgaaaccccgtctctactaaaaatataaaaaaattagctgggcgtggtagtaggcractgtaatcccagctactcaggaggctgaggcaggagaattgcttgaacccaggagatggaggttgcagtgagccaacatggtcccactgcactccagcc

SEQ ID NO: 175772 - DNA, 201 bp, Homo sapiens
accaacttcaaagtacagatgttggccgggcgcggtggctcacgcctgtaatcccaacacttcgggaggccaaggcggggggattaccttaggtcaggagytcgagaccagcctggccaatatggtgaaaccccgtctctactaaaaatataaaaaaattagctgggcgtggtagtaggcaactgtaatcccagctactca

SEQ ID NO: 175773 - DNA, 201 bp, Homo sapiens
gcttgagcccaagaggtctaggctgcaatgagctatgatcacagcactccagcctgggcaaaaaatcttaagtagtctcaggactgtaccacagagtatcrtaagaattcagaggaggcaaagaccaaattagaataataagcaatgaaggcttccagcaaacatggtatttttgttgggccttgaacactctttagatgc

SEQ ID NO: 175774 - DNA, 201 bp, Homo sapiens
atagccttttgtgaatggcttctttcacttacaatacttttgagttttgagttgaattataagtttcacttataatacattttgtgttattgcatctattrgtaatttgtttcattttattgctttttagtatttcatttttttccagtatgtcattttatggacacaatttgtttacccattcaccagttgactgatatc

SEQ ID NO: 175775 - DNA, 201 bp, Homo sapiens
cttgagcccaagaggtctaggctgcaatgagctatgatcacagcactccagcctgggcaaaaaatcttaagtagtctcaggactgtaccacagagtatcgwaagaattcagaggaggcaaagaccaaattagaataataagcaatgaaggcttccagcaaacatggtatttttgttgggccttgaacactctttagatgct

SEQ ID NO: 175776 - DNA, 201 bp, Homo sapiens
ttacatggcattcctaccatcccatgcccatggtagacataattaagaaattgtgtgtgtgtgtgtgtgtgtgtgtgtgtgtgtgtgtgtgtgtgtgtgttttgtaagctttttactccttctcaacaaagcatttcaaggagccaacagcaaattagaattgaaactccattatgtctctcaggtcttctgatcagctct

SEQ ID NO: 175777 - DNA, 201 bp, Homo sapiens
atgtgtaattataatatatatgtactatataatataggatatttataccacccaaaaagttttctcttgctttttatagtcattccccaaaccccacgtccagtgctgattgtccctatggttttgccttgccagaatgaataatacattaaagatatagccttttgtgaatggcttctttcacttacaatacttttgagt

SEQ ID NO: 175778 - DNA, 201 bp, Homo sapiens
cagtggcgcgatctcagctcactgcaacttctgcctcccgggctcaagcaattctcctgcctcagcctcccgagtagctgggattacatgagtgcaccacmacaccctgctaattttttgtatttttagtagagacagggtttcaccatattgccgaggctgatctcaaactcctgagctcaggcaatctgcctgcctcgg

SEQ ID NO: 175779 - DNA, 201 bp, Homo sapiens
gttacatggcattcctaccatcccatgcccatggtagacataattaagaaattgtgtgtgtgtgtgtgtgtgtgtgtgtgtgtgtgtgtgtgtgtgtgtgttttgtaagctttttactccttctcaacaaagcatttcaaggagccaacagcaaattagaattgaaactccattatgtctctcaggtcttctgatcagctc

SEQ ID NO: 175780 - DNA, 201 bp, Homo sapiens
aaactgcacctgtccccttgaattgatacaaataaaaataaaacaaaaaaggacaatattttactttatggaactttttattacaaagaattaaaaaaaaataaaataataatacttaaaagaatactttgactattattttatcacctaaaggcttctcttattattttatttttggagacagaatctctgtcaccccgg

SEQ ID NO: 175781 - DNA, 201 bp, Homo sapiens
agttacatggcattcctaccatcccatgcccatggtagacataattaagaaattgtgtgtgtgtgtgtgtgtgtgtgtgtgtgtgtgtgtgtgtgtgtgtgttttgtaagctttttactccttctcaacaaagcatttcaaggagccaacagcaaattagaattgaaactccattatgtctctcaggtcttctgatcagct

SEQ ID NO: 175782 - DNA, 201 bp, Homo sapiens
tgagcccaagaggtctaggctgcaatgagctatgatcacagcactccagcctgggcaaaaaatcttaagtagtctcaggactgtaccacagagtatcgtargaattcagaggaggcaaagaccaaattagaataataagcaatgaaggcttccagcaaacatggtatttttgttgggccttgaacactctttagatgcttt

SEQ ID NO: 175783 - DNA, 201 bp, Homo sapiens
ctccccatctttgtggttttatctacctttggtctttgatgatggtgacgtacatatggggttttggtgtggatgccctttctgtttgttagttttccttytaacagtcaggaccctcagctgtgggtctgttcgagtttgctggaggtccactccagaccctgtttgcctgggtatcaccagcagaggctgccgaaccgc

SEQ ID NO: 175784 - DNA, 201 bp, Homo sapiens
tagttacatggcattcctaccatcccatgcccatggtagacataattaagaaattgtgtgtgtgtgtgtgtgtgtgtgtgtgtgtgtgtgtgtgtgtgtgkgttttgtaagctttttactccttctcaacaaagcatttcaaggagccaacagcaaattagaattgaaactccattatgtctctcaggtcttctgatcagc

SEQ ID NO: 175785 - DNA, 201 bp, Homo sapiens
gcatttgcttgtctgtaaaggattttatttctccttcacctgtgaagcttagtttggctgggtatgaaattctgagttgaaaattcttttctttaagaatrttgaatattggcccccactctcttctggcttatagagtttctgctgagagatcagctgtaagtctgatgggcttccctttgtgggtaacccgacctttct

SEQ ID NO: 175786 - DNA, 201 bp, Homo sapiens
ctagttacatggcattcctaccatcccatgcccatggtagacataattaagaaattgtgtgtgtgtgtgtgtgtgtgtgtgtgtgtgtgtgtgtgtgtgtgtgttttgtaagctttttactccttctcaacaaagcatttcaaggagccaacagcaaattagaattgaaactccattatgtctctcaggtcttctgatcag

SEQ ID NO: 175787 - DNA, 201 bp, Homo sapiens
tgcagaacgtgcaggtttgttacataggtatatacatgccatggtcgtttgctgcacccatcaacctgtcatctacattaggtattttgcctaatgctgtycttcccctccctacccgctgataggccctggtgtgtgatgttcccctccctgtgtccatgtgttctcattgttcaactcccacttatgagtgagaacatg

SEQ ID NO: 175788 - DNA, 201 bp, Homo sapiens
acaaaatctcagcatttgcttgtctgtaaaggattttatttctccttcacctgtgaagcttagtttggctgggtatgaaattctgagttgaaaattctttyctttaagaatgttgaatattggcccccactctcttctggcttatagagtttctgctgagagatcagctgtaagtctgatgggcttccctttgtgggtaac

SEQ ID NO: 175789 - DNA, 201 bp, Homo sapiens
aatccctagaacctgagaggcagaggttgcagcgagatcgcaccactgcactccagtctgggcaacagagtgagactctgtctcaaaaaaaaaaaaaaaaagaagaaaaaaaaaatcagttgcccatcctgcagatatacagtatagtgtaactgcttcagccgcttgcaaatctcttttacaattcaaaacaaattatgg

SEQ ID NO: 175790 - DNA, 201 bp, Homo sapiens
ataggtgtttaatgataaattagaaatgattcctgccctcgatgaatttaccgtcttgtgtacatcaagcctagtaaactggtgggcagataaaatacaawtgctaaataaaagtttgctaataatagctgagtttggtgtcctgggacaactcttgtacctcatccacagaaagaaaatgcagtaaataaaggtcagtaa

SEQ ID NO: 175791 - DNA, 201 bp, Homo sapiens
tgagcctatgtgtctctctgcatgtgagatgggtctcctgaatacagcgcactgatgggtcttgactctttatccaatttgctagtctgtgttttttaatyggaacatttagcccatttacatataaggttaatattgttatgtgggaatttgatcctgtctttatgatgttagctggttattttgcccattagttgatgc

SEQ ID NO: 175792 - DNA, 201 bp, Homo sapiens
tagtcattcaggagcaggttgttcagtttccatgtagttgagtggttttgaatgagtttcttaatcccaacttctactttgcactgtggtctgagagaaartttgttataatttctgttctattacatttgctgaggagtgctttacttccaactatgtggtcagttttggaataactgtgatgtggtgctgagaagaatg

SEQ ID NO: 175793 - DNA, 201 bp, Homo sapiens
agtagtcattcaggagcaggttgttcagtttccatgtagttgagtggttttgaatgagtttcttaatcccaacttctactttgcactgtggtctgagagamaatttgttataatttctgttctattacatttgctgaggagtgctttacttccaactatgtggtcagttttggaataactgtgatgtggtgctgagaagaa

SEQ ID NO: 175794 - DNA, 201 bp, Homo sapiens
cagatagacatacatacactcaattataagtaaagtttttatgaggctgggtttgacagcaacatgataagtagaagtttttgatttggtaagatttttcraaaactcagagagtttattgccaaatttatttttctcctagaaacatttttgttgttgttgttgctggcatggacagttataaaaataaattagaagtaa

SEQ ID NO: 175795 - DNA, 201 bp, Homo sapiens
tctatgctgttttccataatggccatattaatttatattcccaccaactaagaattcccttttctccacttcctcaccagcatctatttttttttttttttggtcttttaataatagccattctaaggtaagatacctcactgtggttttgatttatagttccctgatgattagtaatgttgagtactttttacatacctg

SEQ ID NO: 175796 - DNA, 201 bp, Homo sapiens
aggttcagggactagagaccacacatatatgtggttagaaagtccaaagtaagaacagtagagctagtttgtattggacacttactatgcaccaggaaccrttcccaatcccatacatgcattagctcatgcatgtcatcctccaaaacagcctcgggaggtggatctagcattacctttatcttacaaatgaggaaacca

SEQ ID NO: 175797 - DNA, 201 bp, Homo sapiens
ctctatgctgttttccataatggccatattaatttatattcccaccaactaagaattcccttttctccacttcctcaccagcatctatttttttttttttttggtcttttaataatagccattctaaggtaagatacctcactgtggttttgatttatagttccctgatgattagtaatgttgagtactttttacatacct

SEQ ID NO: 175798 - DNA, 201 bp, Homo sapiens
tatttcacttaacattcaggtcaattcatgttgctgcaaatggcaggattttgctctttttatgactgcatagtattccattgtatgtgtatgtgtgtgtrtatatatatatatatatgtattttctctatcggtttgtttgttggtggatactttggttgattccatatcttagctattgtagatagtactgcaataaac

SEQ ID NO: 175799 - DNA, 201 bp, Homo sapiens
gcccaagaggtctaggctgcaatgagctatgatcacagcactccagcctgggcaaaaaatcttaagtagtctcaggactgtaccacagagtatcgtaagarttcagaggaggcaaagaccaaattagaataataagcaatgaaggcttccagcaaacatggtatttttgttgggccttgaacactctttagatgctttagt

SEQ ID NO: 175800 - DNA, 201 bp, Homo sapiens
cttatttcacttaacattcaggtcaattcatgttgctgcaaatggcaggattttgctctttttatgactgcatagtattccattgtatgtgtatgtgtgtrtgtatatatatatatatatgtattttctctatcggtttgtttgttggtggatactttggttgattccatatcttagctattgtagatagtactgcaataa

SEQ ID NO: 175801 - DNA, 201 bp, Homo sapiens
gagacaatgaaaagtgtgggaaaaatttgtcaatattaaattttcagagatattcagggggagaatataaccattaagtatgatctgatttccataaatarcagaatactgaatatatatgtatatataaagattggataaaatgcaattcaagtaatattcattcttgaatattgaattaagcaaatatcttagaatata

SEQ ID NO: 175802 - DNA, 201 bp, Homo sapiens
attgcaaaagcagggaggaagagagggtggcaagggtcaaaaaatagctatcaggtcctatgttctctacttgggtgacaagataattagaagcccaaacytcagcttcctgcaatatagccatgtaacaaaactgtgcatggacccctggatctaaaatttaaaaatcaataaataatacaaaagaaatacattcatatt

SEQ ID NO: 175803 - DNA, 201 bp, Homo sapiens
ctgtgcctggctaatttttaaaaatttttgtagagacaaggtctccctatgttttcttggctggtctcgaactcctggtctcaagcaatcatcccacctcrgcctcccaaagtgctgggatgacaggtgggagtcaccacatctggccttatttttttaacgtattttttaaaaacccaagaacaggcattttctgcgtaa

SEQ ID NO: 175804 - DNA, 201 bp, Homo sapiens
gatttgaaatcacagcatctaggttcatatctcagcttcatcattaaccagcaaaccagtaaacctccctgtttgcagtttcattatcaataaaatgggttgacaaaaaatttatttaacagaaatgttatgaaatgcaaataaaataatggatgtaaagaaattggcaaatggtcaagcaaaacatgaatgttaatttta

SEQ ID NO: 175805 - DNA, 201 bp, Homo sapiens
atccattaattgcttgccatatgcttatcactggaatatattttgcagcatctcctgacatcactatttatcccttttaccaaaaaaaaaaaaaaaaaaaagaaaaagaaaaaaaaaacatggctactgataatacttgggagcactcaacgaaggtcccgtctgagactctgtagaatatattatagaatgcaaatattc

SEQ ID NO: 175806 - DNA, 201 bp, Homo sapiens
ggtttttttgtgtctctatctccttcagttctgctctgatcttagttatttcttgccttctgctagcttttgaatgtatttgctcttgcttttctagttcktttaattgtgatgttagggtgtcaattttagatctttcctgctttctcttgtgggcacttagtgctataaatttccctctacacactgctttaaatgtgt

SEQ ID NO: 175807 - DNA, 201 bp, Homo sapiens
tagggaataacttttataaatctgtttcagtatggataggcaggcctacaccacacacacacacacacacacacacacacacacacacacacacacacatwgagttcctatgaatttgttttttttaatttctttcttttttttttttgagaaggaatctcactctgtcacccaggctggagtgcagtggtgcgatctcca

SEQ ID NO: 175808 - DNA, 201 bp, Homo sapiens
actgtattaccatccagtaattccactgaaatggaacagtgtggagaactgggagtaattagttcattcgtcagtttgtccgacttctctttgtttcttgkagggggctggttccatagaaaaggatgggtctgtggagtaaatggtcatgagtagtgctagccacacacattctttaacacttctgaatgcagcaggcca

SEQ ID NO: 175809 - DNA, 201 bp, Homo sapiens
acatataatgaggacttactctgtgcacacactggtgaggacacgttacacatttcatatcaccgagttcacacacacacacacacacacacacacacacmcctatatgagggcagtatgatttccccatgtgataaagaaggaaagggaagctcagacagattagatatattgtctgacattgttcagatagcaagaagc

SEQ ID NO: 175810 - DNA, 201 bp, Homo sapiens
aaaaccagctcctggactcattgatttttttgaaggtttttttgtgtctctatctccttcagttctgctctgatcttagttatttcttgccttctgctagmttttgaatgtatttgctcttgcttttctagttcgtttaattgtgatgttagggtgtcaattttagatctttcctgctttctcttgtgggcacttagtgct

SEQ ID NO: 175811 - DNA, 201 bp, Homo sapiens
atagggaataacttttataaatctgtttcagtatggataggcaggcctacaccacacacacacacacacacacacacacacacacacacacacacacacaytgagttcctatgaatttgttttttttaatttctttcttttttttttttgagaaggaatctcactctgtcacccaggctggagtgcagtggtgcgatctcc

SEQ ID NO: 175812 - DNA, 201 bp, Homo sapiens
catgtcgttctcaaaggggtctctggtctccaaaatttgaaactctttgcaacagggtggctatgttttagaatgacataaacagatacaatgttctccaragtccagagcagggtctaaacctattgggatactatacttgtgttatcaactgaaccacttggttagttcactaggaagatctgcaggtcttgagctgag

SEQ ID NO: 175813 - DNA, 201 bp, Homo sapiens
tgtgtccaggaatttatccatttcttctagattttctagtttatttgtgtagaggtgttattctctgatggtagtttgtatctctgggggattggtggtgrtatcccctttatcattttttattgcatctatttgattcttctctcatttcttctttattagtcttgctagtggtctatcaattttgttgatcttttcaaa

SEQ ID NO: 175814 - DNA, 201 bp, Homo sapiens
taatacaatttcgtgttttagtatttatatgctatttaatacagatgccacctgttttgctgcttttattttctctggttgcttgatgttctattaccttractagactttagtgctttctagaaaaggacaatgtgtagtatatctgtacttattcaagtgctgatctaaggacataggatgtaatgtaaaagtttattc

SEQ ID NO: 175815 - DNA, 201 bp, Homo sapiens
ccaggttatctaactccaaagcccttagcttaatcactaggctatactgaactttatggaattacatccaaaaggggtgtgtgtgtgtgtgtgtgtgtgtktttgtgaatttttccgaagactcacatttccaaagatttataagtcatgtcgttctcaaaggggtctctggtctccaaaatttgaaactctttgcaacag

SEQ ID NO: 175816 - DNA, 201 bp, Homo sapiens
actgtacgaaacaactttgctgcattaactaatttgcaagatcgagcacctagcaagtaagatatccttttttcccccctcttttttgctgaacttttaartaagttttctcaacttgattgagcccaaggcaatatgttagacttctctgtgttgttgccatgttgtctgtgtatactaagtcatatgatgtcctgttaa

SEQ ID NO: 175817 - DNA, 201 bp, Homo sapiens
cagggattcaacttcttcctgatttagtcttgggagggtgcatgtgtccaggaatttatccatttcttctagattttctagtttatttgtgtagaggtgtwattctctgatggtagtttgtatctctgggggattggtggtggtatcccctttatcattttttattgcatctatttgattcttctctcatttcttctttat

SEQ ID NO: 175818 - DNA, 201 bp, Homo sapiens
taagaagaatttgacaatctattgtgtggtatgctagcaagccagttctccttcctccttttctcaccatcccaccacccctcacaaaaaaaaaaaaaaaagttaaaaacctgatctgcagtgtttgtctatggccatggtgcaaatactcctcccatggctggttccaagctaccactggttcaacagttcttttgcaga

SEQ ID NO: 175819 - DNA, 201 bp, Homo sapiens
cttatagaatggttgtgtgtgtgtgtgtgtgtgtgtgtgtgtgtgtgtgtgtgtgtggaagtatgtatgtatgttgggggacagccagtggagaaggagartcaaagagagtgctgatttttgtccatgaatgagtacgtacatggtgatgtacgtacatggtgatgaggaacaaagggcagagagtagaaaacatgacag

SEQ ID NO: 175820 - DNA, 201 bp, Homo sapiens
tagcagtagggtcattattttaggccaggttatctaactccaaagcccttagcttaatcactaggctatactgaactttatggaattacatccaaaagggrtgtgtgtgtgtgtgtgtgtgtgtgtttgtgaatttttccgaagactcacatttccaaagatttataagtcatgtcgttctcaaaggggtctctggtctcc

SEQ ID NO: 175821 - DNA, 201 bp, Homo sapiens
gtgctgctggatttggtttgccagtattttattaaggatttttgcatcgatgttcatcatggatgttggtctaaaattctcttttttttgttgtgtctccrccaggcattggtatcaggatgatgctggcctcatcaaatgagttagggaggattccctctttttctattgattggaatagtttcagaaggaatgttacca

SEQ ID NO: 175822 - DNA, 201 bp, Homo sapiens
tcccatttaatagattgtctcttcactctcttgattgtttgctttgctgtgctatacagaaatttttagttcaatacagccccatttatctatttttggtygtgtggcctgtgcttttgaggttttagccataaaatctttgcctagaccaatgtcctgaagtgtttcttctgtgttttcttctagcagttttatgtttaa

SEQ ID NO: 175823 - DNA, 201 bp, Homo sapiens
taagtacaagggcaggcaaagagagagaaaaccgagtaaatttatatctagagctgatgacataataaaactaatgacttttgttcaactgtatcactctyctccaatgtagaaagaatatgaataaaattatacaagctagaaatgaatggtagatttaacctgagtgcactgtcactcttgattaacacacacacacac

SEQ ID NO: 175824 - DNA, 201 bp, Homo sapiens
gggacaatttgacttcctcttttcctaattgaataccctttgtttctttctcctgcctgattgccctggccagaactttcaacactatgttgaataggagyggtgagagaaggcatccctgtcttgtgccagtgttcaaagggaatgcttccagtttttgcccattcagtatgatattggctgtgggtttgtcataaatag

SEQ ID NO: 175825 - DNA, 201 bp, Homo sapiens
atctccatgctggttttcatagtggctgtactaatttacattcccactggtgatatgtaagagttcccttttctctgcatcctagccagcatctgttattwtttttttattttttattattttttgcatttttaataatagccctctaactggggtaagatgatatctcattgtggtatcaatttgcatttccttgattat

SEQ ID NO: 175826 - DNA, 201 bp, Homo sapiens
  misc_feature (1)...(201): n = A,T,C or G
ataggtgaaatttgatggagacctgaatttaaaatattggtagtagggatggaaggaagtgggtacaatagaaattaatgcttggatggatgttatagggnaggagtgtggagggagaagcccaggtttgggagaacagcattaggcacaaaatgggtatttgttgaatcgaattcaaatatttgatgaattactgtgtat

SEQ ID NO: 175827 - DNA, 201 bp, Homo sapiens; identical to SEQ ID NO: 31408

SEQ ID NO: 175828 - DNA, 201 bp, Homo sapiens
gagattttgggctgagatgatggggttttctaaatatataatcatgtcatctgcaaacagggacaatttgacttcctcttttcctaattgaataccctttrtttctttctcctgcctgattgccctggccagaactttcaacactatgttgaataggagcggtgagagaaggcatccctgtcttgtgccagtgttcaaagg

SEQ ID NO: 175829 - DNA, 201 bp, Homo sapiens
aacaacaacaacaacaacaacaaaactagttgctaagttacaagggacattgcctgtgaggctgtgtcgtaaaacattccacatggagaagaaagggtgarcaatttttctgtgcataggtcttttgtctctcattggtcaaagtttgctccatggtacccttggccctcccagagtccctggggaatacagagcctttgt

SEQ ID NO: 175830 - DNA, 201 bp, Homo sapiens
tcactcatgatttggctgtttgtctgttattggtgtataggaatgcttgtgatttttgcacattggttttgtatcttgagactttgctgaagttgtttatmagcttaaggagattttgggctgagatgatggggttttctaaatatataatcatgtcatctgcaaacagggacaatttgacttcctcttttcctaattgaa

SEQ ID NO: 175831 - DNA, 201 bp, Homo sapiens
aatgagacaatggatatgaaatgctaaaaatagtacattctctgttgttattatctattgtgattattgtgttacccttggaaaaaggcctgtagaatagyggcagctgggtcccctggacagtgaactaccaacctaaaaactgtctgggcaggcttgcctttgggagttcttgtatatcagctctaattctgtccagga

SEQ ID NO: 175832 - DNA, 201 bp, Homo sapiens
ttggattccttggtattttattctctttgaagtaattgtgaatgggtgttcactcatgatttggctgtttgtctgttattggtgtataggaatgcttgtgwtttttgcacattggttttgtatcttgagactttgctgaagttgtttatcagcttaaggagattttgggctgagatgatggggttttctaaatatataatc

SEQ ID NO: 175833 - DNA, 201 bp, Homo sapiens
atagaccagagaccattatttgagaccatgaggccttttctcaccagttattcattcacttaatattaatcacttaatatgcatttgctgagcacctgtcratgtcttgtaaatcagtgcaggaaaatcataagatttgaaatcacagcatctaggttcatatctcagcttcatcattaaccagcaaaccagtaaacctcc

SEQ ID NO: 175834 - DNA, 201 bp, Homo sapiens
ccttgtagtatagtttgaagtcaggtagcatgatgcctccagctttgttctttttgcttaggattgtcttggcaatgcgggctcttttttggttccatatraactttaaagtagtttttccaattctgtgaagaaagtcattggtagattgatggggatggcattgaatctataaattaccttgggcagtatggccatttt

SEQ ID NO: 175835 - DNA, 201 bp, Homo sapiens
tttcattataaaattatgttaatacctcatcatgtgggtgagtgattctcaactggagatggtttctcttcccctttccctcctgccaccaccagggacayttggcaatgtctggaggcatttttggttgtcacaactatcacatttttagttgtacatgatactggcatcttgttggtagaggccaggaattctgctaaa

SEQ ID NO: 175836 - DNA, 201 bp, Homo sapiens
caaaggggaaaagactctgcccccaaggagtagtaaggattttccactgtcattaaaaggcatagtgttgttttattcctttttcattcttatattctgcrtaatattttcatgtgtaaattctgttttctctgaacttaataatatactctatattttaaggtacttgcaacagatatgtcaaaacacatgaatctactg

SEQ ID NO: 175837 - DNA, 201 bp, Homo sapiens
tatatctatacatatatatgtatatatgtaaatgtacatacatgtatgtgtatatatgtgtatatatgtatatatatatgtgtatacatatgtgtgtacaygtatacatatatgtgtgtatatagagagagagacctacctgatattcatctggcacataataggatatatatgaccattaaaatgtatgtatatgtatat

SEQ ID NO: 175838 - DNA, 201 bp, Homo sapiens
ggtagtttacagacagaatgtgtaacataggcatgtggcttgtaactgaaacttttacaaaacctagttcattctcattctataaaagtgtgtacacacatgtgcatatacacacacacactgtgataatgtatctgtgtatttgagggttataaatatttagttgtagagttctgacaaagtagtaaaatagtctcactt

SEQ ID NO: 175839 - DNA, 201 bp, Homo sapiens
aggtagtttacagacagaatgtgtaacataggcatgtggcttgtaactgaaacttttacaaaacctagttcattctcattctataaaagtgtgtacacacatgtgcatatacacacacacactgtgataatgtatctgtgtatttgagggttataaatatttagttgtagagttctgacaaagtagtaaaatagtctcact

SEQ ID NO: 175840 - DNA, 201 bp, Homo sapiens; identical to SEQ ID NO: 31401

SEQ ID NO: 175841 - DNA, 201 bp, Homo sapiens
cctcatttgtgtaaacttttcaaaaaattttaatttgtttagggttttttttttttatcatttagtcttttaaaatatttgagtagtcaaattcatcctttcagatggtttctggacaccctgtatcttttatgcttgtttttcctggcattcggtgcagtacctatcacaaaatagattctcaataaatgttttttaaat

SEQ ID NO: 175842 - DNA, 201 bp, Homo sapiens
actttactatgtgtctttcaatgtaagagcattcactaatttaacaagcattacataacatgtgtcattaatgagttcagttagctaggccatggaatagrtattcctgtaaatcaactcctttacagttactaactgacttagtttcatggcagaggcatttatttcaattagactgtggttcctgttgagataaaatga

SEQ ID NO: 175843 - DNA, 201 bp, Homo sapiens; identical to SEQ ID NO: 31404

SEQ ID NO: 175844 - DNA, 201 bp, Homo sapiens
ggagtttattttttatggatatgttaatgttttgagtatattaagaaaatgaactctcctcatttgtgtaaacttttcaaaaaattttaatttgtttaggrttttttttttttatcatttagtcttttaaaatatttgagtagtcaaattcatcctttcagatggtttctggacaccctgtatcttttatgcttgtttttc

SEQ ID NO: 175845 - DNA, 201 bp, Homo sapiens
tttggctgtgcagaagcttttaagtttatttagatcccacttgtcaatttttgcttttattgtgattgcttttggtgtctttgtcatgaatctttgcctgytgctatgttcaggatgggattgcctaggtcatcttccagggtttctatagttttgggttttatatttaagtctttaatccatcttgaatttttttgtgtg

SEQ ID NO: 175846 - DNA, 201 bp, Homo sapiens
caagaagtcaggagatccagaccatcctggttaatacggtgaaaccctgtctctactaaaaatacaaaaaattagccacgcgtggtggcgggcgcctgtaktcccagctactagggaggctgaggcaggagaatggcgtgaacccgggaggcggagcttgcagcgagctgagatctcgccactgcactccagcctgggcga

SEQ ID NO: 175847 - DNA, 201 bp, Homo sapiens
  misc_feature (1)...(201): n = A,T,C or G
tttttttaatttttattttaggtttgggggtacatgtgaaggtttgttatatgggtagactcatgtcacaggggttggttgtacatattatttcatcaccngggtattaagcccaaagcctaatagttatcttttctgctcctctccttcttcccaccctccctgatcaagtagaccccaatgtctgttgtttccttcttt

SEQ ID NO: 175848 - DNA, 201 bp, Homo sapiens
ccatgctattttggttactgtagccttgtagtatagtttgaagtcaggtagcatgatgcctccagctttgttctttttgcttaggattgtcttggcaatgygggctcttttttggttccatatgaactttaaagtagtttttccaattctgtgaagaaagtcattggtagattgatggggatggcattgaatctataaatt

SEQ ID NO: 175849 - DNA, 201 bp, Homo sapiens
caactttaaaaataaagtatagcagagtagcagtttgtccacagtcaaatatgaaatatgtaaacatttcacaggttctttttttaatttttattttaggyttgggggtacatgtgaaggtttgttatatgggtagactcatgtcacaggggttggttgtacatattatttcatcacccgggtattaagcccaaagcctaa

SEQ ID NO: 175850 - DNA, 201 bp, Homo sapiens
ggaatcctttccccatttcttgtttttgtcaggtttgtcaaagatcagatggttgtagacatgtggtattatttctgagggctctattctgttccattggyctatatctctgttcttgtaccagtaccatgctattttggttactgtagccttgtagtatagtttgaagtcaggtagcatgatgcctccagctttgttctt

SEQ ID NO: 175851 - DNA, 201 bp, Homo sapiens
ctgtaataaaaacagcatattaaacatacctttaaaagaacaaagacatttataaaacaataacaacaatcagcttctggatggttcccccccccccccccattaaaccctattaaagggaatacggtctctaaaagggaaatccagagacctgtgtattcgagttataaccctgggtcaagcaacttaactaggctgata

SEQ ID NO: 175852 - DNA, 201 bp, Homo sapiens
aggtgggaggattgcttgagactgggaggtcaaggctgcagtgagctgtgattgtgccactacactccagcctgggtgacagcaagaccccatctcggggraaaaaaaaacccagatgatatggttaaccatattcagtcattattcagttattagaaaataagatttacaaggcatccatggaggggaaaacaattacac

SEQ ID NO: 175853 - DNA, 201 bp, Homo sapiens
ccatttattaaatagggaatcctttccccatttcttgtttttgtcaggtttgtcaaagatcagatggttgtagacatgtggtattatttctgagggctctrttctgttccattggcctatatctctgttcttgtaccagtaccatgctattttggttactgtagccttgtagtatagtttgaagtcaggtagcatgatgcc

SEQ ID NO: 175854 - DNA, 201 bp, Homo sapiens
tctgtaataaaaacagcatattaaacatacctttaaaagaacaaagacatttataaaacaataacaacaatcagcttctggatggttcccccccccccccccattaaaccctattaaagggaatacggtctctaaaagggaaatccagagacctgtgtattcgagttataaccctgggtcaagcaacttaactaggctgat

SEQ ID NO: 175855 - DNA, 201 bp, Homo sapiens
tgtatatgatctctcacaagtgaaatgataatggaaagtttactgaaaatgtcttaacagttctaggtaaaacttaatttttccttaatttgaaaattaayaaaagtatgaattagatttaatctaaatttattattctgttaaagtcacatgaatgtggaaaaaaatcagtatcacttctaactaaatctggccttgaaa

SEQ ID NO: 175856 - DNA, 201 bp, Homo sapiens; identical to SEQ ID NO: 31407

SEQ ID NO: 175857 - DNA, 201 bp, Homo sapiens
ctttaatccgtcttgaattaatttttgtataaagtgtaaggaagggatccagtttcagctttctacatatggctagccagttttcccagcaccatttattmaatagggaatcctttccccatttcttgtttttgtcaggtttgtcaaagatcagatggttgtagacatgtggtattatttctgagggctctattctgttcc

SEQ ID NO: 175858 - DNA, 201 bp, Homo sapiens
cactcttaaaaacataggaagggttgaatctgaccaagttaatatttcaaaggtgtctatcagaaaggaaaaggaaagcttcctacagttatgtgtatatwtttttttagtttaaaaagaataagaacaagatattgggtgtgtatgtatatatgtatctatttatttattggagacggaatcttgctctgtcacccaggc

SEQ ID NO: 175859 - DNA, 201 bp, Homo sapiens
gtgtgcagttacagcagctccagttctatatggctagttttgaacttagtctgactttaaaacccatcccatttactatcctctgctttttttttttttttggtgtatattgtgggaaattccataaatgatttttataaactttagccagtaatcgggaaaaactgtaagattttgtttgtaagctttataaacgttact

SEQ ID NO: 175860 - DNA, 201 bp, Homo sapiens
ctttttaatgattgccattctaactggtgtgagatggtatctcattgtggttttgatttgcatttctctgatggccagtcatgatgagcattttttcacgygtctgttggctgcataaatgtcttcttttgagaagtgtctgttcatatacttcacccactttttgatggggttgtttgattttttcttgtaaatttgttt

SEQ ID NO: 175861 - DNA, 201 bp, Homo sapiens
agaatcagaataagaagaacttccaagtacaatttgaaaataaaagtatctttcaagaatttgcactgtactgcattatttgatttggaaaaaaaaaaaaatcagaccacttccatttcttgatgaaacaactaactcatttgctaactttcaactggctctcttcagtggctttgagaatgtggcacttccatcatacct

SEQ ID NO: 175862 - DNA, 201 bp, Homo sapiens
gactttttaatgattgccattctaactggtgtgagatggtatctcattgtggttttgatttgcatttctctgatggccagtcatgatgagcattttttcaygtgtctgttggctgcataaatgtcttcttttgagaagtgtctgttcatatacttcacccactttttgatggggttgtttgattttttcttgtaaatttgt

SEQ ID NO: 175863 - DNA, 201 bp, Homo sapiens
ccagcacctgttgtttcctgactttttaatgattgccattctaactggtgtgagatggtatctcattgtggttttgatttgcatttctctgatggccagtsatgatgagcattttttcacgtgtctgttggctgcataaatgtcttcttttgagaagtgtctgttcatatacttcacccactttttgatggggttgtttga

SEQ ID NO: 175864 - DNA, 201 bp, Homo sapiens
tacatgtgaatgtgtctttatagcagcatgatttataatcctttggatatatatccagtaatgggatggctgggtcaaatggtatttctagttctagaccyttgaggaattgccacactgtcttccacaatggttgaactactttacagtcccaccaacagtgtaaaagtgttcctatttcttcacatcctctccagcacc

SEQ ID NO: 175865 - DNA, 201 bp, Homo sapiens
gacatttgggttggttccaagtctttgctatcctgaatagtgctgcagtaaacatacatgtgaatgtgtctttatagcagcatgatttataatcctttggrtatatatccagtaatgggatggctgggtcaaatggtatttctagttctagacctttgaggaattgccacactgtcttccacaatggttgaactactttac

SEQ ID NO: 175866 - DNA, 201 bp, Homo sapiens
tatgtgccacattttcttaatccagtctatcattggtggacatttgggttggttccaagtctttgctatcctgaatagtgctgcagtaaacatacatgtgmatgtgtctttatagcagcatgatttataatcctttggatatatatccagtaatgggatggctgggtcaaatggtatttctagttctagacctttgaggaa

SEQ ID NO: 175867 - DNA, 201 bp, Homo sapiens
cccaattagaattaaaactctcttctctgtgctgtcatgaaaccttgtacatttctctaactcttgaaggattacaattattgtcttctgtctcacgtacctctcctgtgagcatgttttggagtagactgggtttgctcatctttgtagagcaatgaacccctgttcccagcaccatgcctgctccatcatgggcattca

SEQ ID NO: 175868 - DNA, 201 bp, Homo sapiens
tccccaattagaattaaaactctcttctctgtgctgtcatgaaaccttgtacatttctctaactcttgaaggattacaattattgtcttctgtctcacgtmcctctcctgtgagcatgttttggagtagactgggtttgctcatctttgtagagcaatgaacccctgttcccagcaccatgcctgctccatcatgggcatt

SEQ ID NO: 175869 - DNA, 201 bp, Homo sapiens
ttccccaattagaattaaaactctcttctctgtgctgtcatgaaaccttgtacatttctctaactcttgaaggattacaattattgtcttctgtctcacgtacctctcctgtgagcatgttttggagtagactgggtttgctcatctttgtagagcaatgaacccctgttcccagcaccatgcctgctccatcatgggcat

SEQ ID NO: 175870 - DNA, 201 bp, Homo sapiens
gtcaggctcttctcccaaacctacctctagcataacctaatgaaattgctctaaaaattatggtctatgcctctttattaaaaaaaaacaacaacaacaamaaaaaaaaccctgcccaccagtatagcaattcttttgttataaccacacatagtactagtgtgtggttctggggcactgtcatgccaacttacctgtgtt

SEQ ID NO: 175871 - DNA, 201 bp, Homo sapiens
taacatttccagtcaagtagggtcaagaaaaactgttaaaaacaatgtcaatgcttaagtggtaaaaagatttgttgaagaatatatatatatatatatatttagagacagggtctcactgtgtttcccaggctgaggtacagtggctatttacaggtgtgatcatatgcactacagccttgaactcctagtctcaatcct

SEQ ID NO: 175872 - DNA, 201 bp, Homo sapiens
ttaacatttccagtcaagtagggtcaagaaaaactgttaaaaacaatgtcaatgcttaagtggtaaaaagatttgttgaagaatatatatatatatatatatttagagacagggtctcactgtgtttcccaggctgaggtacagtggctatttacaggtgtgatcatatgcactacagccttgaactcctagtctcaatcc

SEQ ID NO: 175873 - DNA, 201 bp, Homo sapiens
gtattccatggtgtgtatgtgccacattttcttaatccagtctatcattggtggacatttgggttggttccaagtctttgctatcctgaatagtgctgcartaaacatacatgtgaatgtgtctttatagcagcatgatttataatcctttggatatatatccagtaatgggatggctgggtcaaatggtatttctagttc

SEQ ID NO: 175874 - DNA, 201 bp, Homo sapiens
gagcccaagaggtctaggctgcaatgagctatgatcacagcactccagcctgggcaaaaaatcttaagtagtctcaggactgtaccacagagtatcgtaagaattcagaggaggcaaagaccaaattagaataataagcaatgaaggcttccagcaaacatggtatttttgttgggccttgaacactctttagatgcttta

SEQ ID NO: 175875 - DNA, 201 bp, Homo sapiens
tcaacccaggaggtggaggttacagtgagccaagatcgtgccactgcactccagcctgggtgacagagcaagactctgtctcaatttaaaaaaaaaaaaaatccatttttctaatacttatagctttcattttattgagtgtcttatgaaagagctctatcaagaattttacatatatattatttagttcttattacaata

SEQ ID NO: 175876 - DNA, 201 bp, Homo sapiens
ctgataatctagggctcagaaaaaaaaaaaaactgtgatatgaaacagtggcaaaaggattcaaaaagaatacagcggttgggactatctacttttttaawttttttattacactttaagttctagggtacatgtgcacaatgtgcaggtttgttacatatgtatacatgtgccatgttggtgtgctgcacccattaactc

SEQ ID NO: 175877 - DNA, 201 bp, Homo sapiens
tcgcagcactttgggaggctgaggcaggaggatcacttgagcctaggaatttcagaccagcctgggcaacatgatgaaaccttttctctacaaaaaaaaaatacaaaaattagccaggcatggtggcacatgcctgtagtcctagctactgggggagttgagataggagggttgcttgagcccaagaggtctaggctgcaa

SEQ ID NO: 175878 - DNA, 201 bp, Homo sapiens
caggcggcgtagcttgctcctgtaatacctgcaatttaggaggctgaggcaggcagatcgcctgaggccaggagttcaagaccagcctggccaaaatggcrcaaccctgtctctactaaaaatccaaaaattagccagagtggtggaacatgcctgtaatctcagcttcttgggaggctgaggcatgagaattgcttcaac

SEQ ID NO: 175879 - DNA, 201 bp, Homo sapiens
actgataatctagggctcagaaaaaaaaaaaaactgtgatatgaaacagtggcaaaaggattcaaaaagaatacagcggttgggactatctacttttttaatttttttattacactttaagttctagggtacatgtgcacaatgtgcaggtttgttacatatgtatacatgtgccatgttggtgtgctgcacccattaact

SEQ ID NO: 175880 - DNA, 201 bp, Homo sapiens
gtgggagggagggaatttgggaaatgtttagtaattgcattctttttgtcttcttggacacagtaccaagtctccttaaactaataaaagaaaaaaaaaaataaaagaaccacacaaactgcattcttcagtcactccctttctccacaaagtgcttcccacccatttcagccttaaaaaatattctaggcatactcagaa

SEQ ID NO: 175881 - DNA, 201 bp, Homo sapiens
aatttggcctgagggtataatcagctgtagtaacagttttgccattttattatccgtctatcagtcaaatattagacacatctattatatttatttatttaattacatgtataaaatcaatatagattatagatttggtatatagagaaaatatatgtttgtgtgtatatatatgtatacacatacatacacacacacatg

SEQ ID NO: 175882 - DNA, 201 bp, Homo sapiens
cgatactgaccgtgaggcagcagattcctatggactacattaaaaaaaaaaaaaaaaaaaaagaacagactgataatctagggctcagaaaaaaaaaaaaactgtgatatgaaacagtggcaaaaggattcaaaaagaatacagcggttgggactatctacttttttaatttttttattacactttaagttctagggtaca

SEQ ID NO: 175883 - DNA, 201 bp, Homo sapiens
atatatatgtttattataaaataaatatataaaatatatattaaataattatattatatatttaatatataatatatatgaatatgtattcatatatatakagagagagagccagtggctctacctaggaaatgctccctgataaatttgaagaacataatgctttccatgtggttaggggaggattgaggattacctcac

SEQ ID NO: 175884 - DNA, 201 bp, Homo sapiens
agccctttgctttatataagaattttacttggaaccctggtatttttgtttgtatttgtttgttaataaatgtcaagagttcagtagtaagataggtttcrgaaatgctaagttaaacagaataaagaaagaatatgtattacaggtcctggcagagccttgaatatgctaacatttgacagtgggagtctttgagaatta

SEQ ID NO: 175885 - DNA, 201 bp, Homo sapiens
aaatttggcctgagggtataatcagctgtagtaacagttttgccattttattatccgtctatcagtcaaatattagacacatctattatatttatttatttaattacatgtataaaatcaatatagattatagatttggtatatagagaaaatatatgtttgtgtgtatatatatgtatacacatacatacacacacacat

SEQ ID NO: 175886 - DNA, 201 bp, Homo sapiens
aatgtgatcgaaaaatgctgatgatacattgtgtttaatagctttaataaaaaactgataaagcatctaatacatctaatgactgtcggatttcctaaatyttttaagctgaaggagtttacttttacaaaaatcctcattgaaaaagaatcttccggtaaaaacattgaactgaaagatttgcataaatgcatggagtat

SEQ ID NO: 175887 - DNA, 201 bp, Homo sapiens
atagatagatagatagcgaaacatatagacatacctctgaaaatacaaccagccatataatgtaagcctgttgtgtgttaatgaatgatagggtaataatacattatgttcctgtcctgtagaggagttcgagtattcaatacagaggaccagaatgattggtcccagaaaaagtgctccttaagctggatcttgaatact

SEQ ID NO: 175888 - DNA, 201 bp, Homo sapiens
tcgggaggctgagacaggaaatcgcttgaactctgagggcggaggttgcagtgagccgagatcaggccactgctcttcggcctgggtgacagagtgagacmccgtctcaaaaaaaaaaaaaaaaaaaaaaaaaaaagaaagaaaaatggatagagttccgaatgtgatgaggaactcaccaagtgtttcttcctataaccc

SEQ ID NO: 175889 - DNA, 201 bp, Homo sapiens
tccaaaaaataaagagaaagagagatgaacaataacaattcctatatgctaaaataaatactttgagtaactgatttcttctgccaaaattcaaattcaayataaatgagtctaaactgagttggaggtgtggaaccggatccctctgtttctatgcactttcctaagttgaggaatggacaggcctacatttatgaacct

SEQ ID NO: 175890 - DNA, 201 bp, Homo sapiens
gatagatagatagatagcgaaacatatagacatacctctgaaaatacaaccagccatataatgtaagcctgttgtgtgttaatgaatgatagggtaataatacattatgttcctgtcctgtagaggagttcgagtattcaatacagaggaccagaatgattggtcccagaaaaagtgctccttaagctggatcttgaatac

SEQ ID NO: 175891 - DNA, 201 bp, Homo sapiens
ggaatataagttaatcagacagcatgctttttttttttacttcaaggggtttatagtcattttgtggaacttggcaaacatctgaaaacttagagaacacragatagaatttatttaagtacctttggcttagagtatttctaaagcttctatagtatctatttggacaagtcattaatatacctctctaacaaatatatc

SEQ ID NO: 175892 - DNA, 201 bp, Homo sapiens
agatagatagatagatagcgaaacatatagacatacctctgaaaatacaaccagccatataatgtaagcctgttgtgtgttaatgaatgatagggtaataatacattatgttcctgtcctgtagaggagttcgagtattcaatacagaggaccagaatgattggtcccagaaaaagtgctccttaagctggatcttgaata

SEQ ID NO: 175893 - DNA, 201 bp, Homo sapiens
gtatctgctccagaggttcttataggtgaaatgagatttttatgtatctgtattcaaacacatagatagatagatagatagatagatagatagatagatagcgaaacatatagacatacctctgaaaatacaaccagccatataatgtaagcctgttgtgtgttaatgaatgatagggtaataatacattatgttcctgtc

SEQ ID NO: 175894 - DNA, 201 bp, Homo sapiens
tgtatctgctccagaggttcttataggtgaaatgagatttttatgtatctgtattcaaacacatagatagatagatagatagatagatagatagatagatagcgaaacatatagacatacctctgaaaatacaaccagccatataatgtaagcctgttgtgtgttaatgaatgatagggtaataatacattatgttcctgt

SEQ ID NO: 175895 - DNA, 201 bp, Homo sapiens
aaaaaatggtaggagtgaaggtaagggggactgcctctcttttcttcactgtatttgcatattgtatgtagtttttatcaataaagtattatatatgaaartttaaaatattaaaaatatacctactatatgtattagcaagctcatctttatatatgccaatatctacttagacattaaaccacaatttgctcaggttat

SEQ ID NO: 175896 - DNA, 201 bp, Homo sapiens
ttcagtgtctgccatatagcaagtattcatttaacaggaaaagagaaagacaagtgggtaagtaattgcctgaatgaatgaggttgatggtgaagaatggrtgggaagggcatgaattggcctagaatagattagacattaagtaagcaggagtcgagacagttaaggggccaaaggcagctgaaaagaatatggaacagg

SEQ ID NO: 175897 - DNA, 201 bp, Homo sapiens
cagtaggatcccatgtttggccaatgtctatcaagcaagaaaggaatagtgaagccagctattagctcccttcagcagaggaaacctgggattaggagtcrccatcaggcatcatggcatcacaagcaggcatgggttaaagatttaaatgttgcaaaaagagagaagaaccagaaggaaattacgtccacattatccctg

SEQ ID NO: 175898 - DNA, 201 bp, Homo sapiens
aaaatttggcctgagggtataatcagctgtagtaacagttttgccattttattatccgtctatcagtcaaatattagacacatctattatatttatttatttaattacatgtataaaatcaatatagattatagatttggtatatagagaaaatatatgtttgtgtgtatatatatgtatacacatacatacacacacaca

SEQ ID NO: 175899 - DNA, 201 bp, Homo sapiens
aaaaatttggcctgagggtataatcagctgtagtaacagttttgccattttattatccgtctatcagtcaaatattagacacatctattatatttatttatttaattacatgtataaaatcaatatagattatagatttggtatatagagaaaatatatgtttgtgtgtatatatatgtatacacatacatacacacacac

SEQ ID NO: 175900 - DNA, 201 bp, Homo sapiens
accgcttgggtatatcactgcagctgccaaaaaatttggcctgagggtataatcagctgtagtaacagttttgccattttattatccgtctatcagtcaartattagacacatctattatatttatttatttaattacatgtataaaatcaatatagattatagatttggtatatagagaaaatatatgtttgtgtgtata

SEQ ID NO: 175901 - DNA, 201 bp, Homo sapiens
accctttttatttgctgcagaaaaggagtctaggaagaatgcattccaaacccagcccctgggtgggtattcagatgcacattgctgacttgttaacacaytactgcttcttgtcaccttgggttttttgtttttgttttgcccttgagattttttattccagaagtgagttctggctcatctgtcattagaggaggtatc

SEQ ID NO: 175902 - DNA, 201 bp, Homo sapiens
gctggtctctggagctgatccgcccctttgctttgtaagtctcagcaattgacgaggctaggctgggcgctgggcttttctttttttttttttttttttttcctttctcactgccctgcggtgttttgaactgccttcttacagacgtcatacagcccttgaggaatagtttctgcctggtgagattgaatgatagttctc

SEQ ID NO: 175903 - DNA, 201 bp, Homo sapiens
ttgataaaggcaaaaaaatctaaaaagataaaagtaatttttcaatattaaatggaaaactggtttgctgttatttcaatgtccattttttttaaaaaaaatctgctattaatatgaaataaaatattaaaatgccaacttcaaataattttccagaaggaaaaaaaacatttaaatcatattaagaggatagtaaatata

SEQ ID NO: 175904 - DNA, 201 bp, Homo sapiens
tgctggtctctggagctgatccgcccctttgctttgtaagtctcagcaattgacgaggctaggctgggcgctgggcttttctttttttttttttttttttttcctttctcactgccctgcggtgttttgaactgccttcttacagacgtcatacagcccttgaggaatagtttctgcctggtgagattgaatgatagttct

SEQ ID NO: 175905 - DNA, 201 bp, Homo sapiens
tcaggttcttgataaaggcaaaaaaatctaaaaagataaaagtaatttttcaatattaaatggaaaactggtttgctgttatttcaatgtccatttttttwaaaaaaaatctgctattaatatgaaataaaatattaaaatgccaacttcaaataattttccagaaggaaaaaaaacatttaaatcatattaagaggatag

SEQ ID NO: 175906 - DNA, 201 bp, Homo sapiens
tattgacaagatataaagcttcattccttactgaagagctgttaaggattagcaaacccaagtctttgtgtgtagagatgaatgaaatttgcatttttttwaaaaaaaaataaggtttagaaaacattgtgcaagggaacagccttaatacgtgcagccacttgtccaggaataatacattcaatttttcagtttaaaatt

SEQ ID NO: 175907 - DNA, 201 bp, Homo sapiens
atgtatctgctccagaggttcttataggtgaaatgagatttttatgtatctgtattcaaacacatagatagatagatagatagatagatagatagatagatagcgaaacatatagacatacctctgaaaatacaaccagccatataatgtaagcctgttgtgtgttaatgaatgatagggtaataatacattatgttcctg

SEQ ID NO: 175908 - DNA, 201 bp, Homo sapiens
caagtgtatatggttatgaaaaacaatcctcgaaaccatttattttcctctttttttttaggctatgatgttcagctgtttaagtgttaaatgataaccgyattttcctgctattttcagtgattcttattgtttaataaatgtttagaagcacctaagaagatccgagagtagtgtacgtaaataacattgaatccttcc

SEQ ID NO: 175909 - DNA, 201 bp, Homo sapiens
gtttcaccatgtttgccaggctggtctcaaactcctgacctcaggtgatccacccgtctcggcctcccaaagtgctgggattataggcatgagccaccgcrcgcagcctccaatcttattttaatgaaaatctcaatttatctcagtgttagaaactagggcttcatttggcaatgtggtctttccagttgtttcatctct

SEQ ID NO: 175910 - DNA, 201 bp, Homo sapiens
catgtatctgctccagaggttcttataggtgaaatgagatttttatgtatctgtattcaaacacatagatagatagatagatagatagatagatagatagatagcgaaacatatagacatacctctgaaaatacaaccagccatataatgtaagcctgttgtgtgttaatgaatgatagggtaataatacattatgttcct

SEQ ID NO: 175911 - DNA, 201 bp, Homo sapiens
aggttgcagtgagccgagatcgcgccattgcactccatcctgggcaacaagagcaaaactccgtctcaaaaaaaaaaaaacaaaaaaaacaaaaaaaaaaacggggtaggaacaactacatctctttacctttactctaaccaaaatacagcacctgggatacttctaggataaaaatgcagtagttattaatactataga

SEQ ID NO: 175912 - DNA, 201 bp, Homo sapiens
agttcctcctagtcctgggcaggtctagagatgacgtccaggagccagggcctggagtcagaaatcttaggaatctaccggtactctattctacggtgggygagctggcacccaagtcacaagacaaagtccttcccactcttccttctcctttccacaagcagaggagtctctccctgtggccaccactgccccaggcct

SEQ ID NO: 175913 - DNA, 201 bp, Homo sapiens
acatgtatctgctccagaggttcttataggtgaaatgagatttttatgtatctgtattcaaacacatagatagatagatagatagatagatagatagatadatagcgaaacatatagacatacctctgaaaatacaaccagccatataatgtaagcctgttgtgtgttaatgaatgatagggtaataatacattatgttcc

SEQ ID NO: 175914 - DNA, 201 bp, Homo sapiens
cccaggaggcagaggttgcagtgagccgagatcgcgccattgcactccatcctgggcaacaagagcaaaactccgtctcaaaaaaaaaaaaacaaaaaaaacaaaaaaaaaaacggggtaggaacaactacatctctttacctttactctaaccaaaatacagcacctgggatacttctaggataaaaatgcagtagttat

SEQ ID NO: 175915 - DNA, 201 bp, Homo sapiens
attttgtcaaggtttctgtcttgtagcaaatacaaactttctggtgttaaacatatgaccctgatttgggtctttactgacatcatcacttttttttttttaattttctgagacggagtcttgctctgttgcccaagctggagtgcagtagcacaatctcggctcactgccacctccacctcctggattcaagtgattctc

SEQ ID NO: 175916 - DNA, 201 bp, Homo sapiens
tctctgtgtgtgtctctgtttcctggatctgggggaggggtaacacaaatacccctgtggccaccaccactgggactgcatagggtcagacctgaagccarcatagcactgggtcttgcccaaagcctgcagtaaccactgcttggctcctgcctatgtttgctcaaggcactagggctctataatcagcaggtggtaaag

SEQ ID NO: 175917 - DNA, 201 bp, Homo sapiens
aacttgaacccaggaggcagaggttgcagtgagccgagatcgcgccattgcactccatcctgggcaacaagagcaaaactccgtctcaaaaaaaaaaaaamaaaaaaaacaaaaaaaaaaacggggtaggaacaactacatctctttacctttactctaaccaaaatacagcacctgggatacttctaggataaaaatgca

SEQ ID NO: 175918 - DNA, 201 bp, Homo sapiens
ctgtgagtctgttatatatgacttttattgtgttgaggtatttccttttatacccgattttttgaggatttttatcatgaagggatgttgaattttatcaratgcttattcagcatctgttgaaatggtcatatggtttttgtccttcctgtcttccttttagtaaaagtgattttctctggtggcgtgttttaatttttt

SEQ ID NO: 175919 - DNA, 201 bp, Homo sapiens
ttaagtgaaaacttacataaattatgtagtgtggtggggacatatgataggtactgtggcctatccttaggagggatgaggaatggaactatttttaaacrtaaaaggtcaactttatatgctgccatataagtaacccagtgcaattggagcttgaatcaacagggctgggagaaagcttacagagtgtgcctttgaaat

SEQ ID NO: 175920 - DNA, 201 bp, Homo sapiens
tgtaggaaactcttctctgctgtcagctgcctccgggctcagtgatcccaggatttgtgacacaactaccctgtagtaaaactctaagttgactagaattytcatgtggaagtgtgtaatgttaaatgaagtagactctgatgaaagaaagagaaaacaggaaaacccaagcattatgctggatccctggagaaaccctca

SEQ ID NO: 175921 - DNA, 201 bp, Homo sapiens
aggttcacgccgttctcctgcctcagcctcccaattagctgggactacaggcgcctgccaccacacctgccttttttttttttgtatttttaagtagagayggggtttcactgtgttagccaggatggtctcgatctcctgacctcatgatctgcccgcctcggcctcccaaagtgctgggattacaggagtgagccacca

SEQ ID NO: 175922 - DNA, 201 bp, Homo sapiens
catggcatcagcatctgattaggatatttgggatgcatcatcccaaacaatggaaaaatggaagggcaagtgagcacatgcaaaagagaaaacatgagggkctgggctcactttataacaacccactcttatgataactaaccccctcccaccataacagcattaattcattcatgagtgtgaagccctcctgacctaatt

SEQ ID NO: 175923 - DNA, 201 bp, Homo sapiens
ttgtgatctgcccgcctcggcctcccaaagtgctgggattacagatctgagccactgcgcccggcctgtataatctatatatatatatatatatatatatatatatatatatatatatcacattttctttatgcacacttgatgaacacttagattgcttccatatcttggctgttgtaaataaagctgaaatgaatatgg

SEQ ID NO: 175924 - DNA, 201 bp, Homo sapiens
cttgtgatctgcccgcctcggcctcccaaagtgctgggattacagatctgagccactgcgcccggcctgtataatctatatatatatatatatatatatatatatatatatatatatatcacattttctttatgcacacttgatgaacacttagattgcttccatatcttggctgttgtaaataaagctgaaatgaatatg

SEQ ID NO: 175925 - DNA, 201 bp, Homo sapiens
aacaaatggggtcttcatgttttcagaatagcagagttgtctggtaaccggcccttgactgttatcatgcacaccatttttcaggtaagatggttgagttstattacatttattttatttaggaacttaatgtccagtctgtagcttatgcatacattttgtcttttttaatattccccaccttttgcttatttttatact

SEQ ID NO: 175926 - DNA, 201 bp, Homo sapiens
accttgtgatctgcccgcctcggcctcccaaagtgctgggattacagatctgagccactgcgcccggcctgtataatctatatatatatatatatatatatatatatatatatatatatatcacattttctttatgcacacttgatgaacacttagattgcttccatatcttggctgttgtaaataaagctgaaatgaata

SEQ ID NO: 175927 - DNA, 201 bp, Homo sapiens; identical to SEQ ID NO: 31437

SEQ ID NO: 175928 - DNA, 201 bp, Homo sapiens
gtcattattttaggccaggttatctaactccaaagcccttagcttaatcactaggctatactgaactttatggaattacatccaaaaggggtgtgtgtgtktgtgtgtgtgtgtgtttgtgaatttttccgaagactcacatttccaaagatttataagtcatgtcgttctcaaaggggtctctggtctccaaaatttgaa

SEQ ID NO: 175929 - DNA, 201 bp, Homo sapiens; identical to SEQ ID NO: 31438

SEQ ID NO: 175930 - DNA, 201 bp, Homo sapiens
tttgcccattttaaaatcaggttatttgtttttttgccattgagttgtttcttaattcttaaaatattaataagatgtgagcaaacagtttaaatttcagmaaactaaatatctttgaaggtcactgtactagtctgttctcatgctgctgataaagacatatctgagactgggcaatttacaaaaggaagaggtttaact

SEQ ID NO: 175931 - DNA, 201 bp, Homo sapiens
tagaagatgtgaacaaatggggtcttcatgttttcagaatagcagagttgtctggtaaccggcccttgactgttatcatgcacaccatttttcaggtaagrtggttgagttctattacatttattttatttaggaacttaatgtccagtctgtagcttatgcatacattttgtcttttttaatattccccaccttttgctt

SEQ ID NO: 175932 - DNA, 201 bp, Homo sapiens
cgtttgctttgtttctttctttttgaaggacaagttcccctttgttttagagatttacttgaattctaaaaaaattagaaaacttatttcagtcttggttrtccaagtagtcatgattccttacctccctttaaatctgtggatgattcagatttttaaaaatgtttttaaaatatatagacttccattatttgaattttg

SEQ ID NO: 175933 - DNA, 201 bp, Homo sapiens
ttaaaatctcaggaataaatgtaacctccacaggtaggcttatgcataaaattcagatgcaatgaataacaaaatgactgcctcccacaaaattaagaagyaaacatataatgaggacttactctgtgcacacactggtgaggacacgttacacatttcatatcaccgagttcacacacacacacacacacacacacacac

SEQ ID NO: 175934 - DNA, 201 bp, Homo sapiens
cgtgttcaaactgatattttcagtttattctcctttagcctttgaaaaattatgacagttttctgtgttctctcttgaggttttaaaaaatttactctaayagattgaaaagcacaataaaaacactagtaagagatcaggatttttaaatggtgatagagaatacttattatggagatggatttaggtattaggaaggag

SEQ ID NO: 175935 - DNA, 201 bp, Homo sapiens
agagtcttcagttataccctattcagtatgataccagctgtgagtctgttatatatgacttttattgtgttgaggtatttccttttatacccgattttttgaggatttttatcatgaagggatgttgaattttatcaaatgcttattcagcatctgttgaaatggtcatatggtttttgtccttcctgtcttccttttagt

SEQ ID NO: 175936 - DNA, 201 bp, Homo sapiens
attttgactttctttcttttgggtatgtacttagcagtgggattgctagatcatatggtagctctatttttagtcttttgaggagtcttcaaactgttctscatagtggttgtactaatttacattcccatcaaaagtgtaccagggttcccttttctttacatcctcaccagcatttcttattatttgtcttttgcataa

SEQ ID NO: 175937 - DNA, 201 bp, Homo sapiens
tccacttccatccgtattgttgcagatgacaggacctcattcttttttatggctaaatagtactacattatatatatgcaccatattttctttatctattygcctgttgatagaaatttagattgcttccaaatcctggctattgttaatagtgctgcaataaacatgggagtatagataactctttgatattttgacttt

SEQ ID NO: 175938 - DNA, 201 bp, Homo sapiens
atgtatacgtgtagctgtacatacacgtgtatgtatacgtgtagctgtacatacacgtgtatgtatacgtgtagctgtacatacacatatgtatgtatacktgtagctgtacatacacatatgtatgtatacgtgtagctgtacatacacatatgtatgtatacatacacgtgtatctatacatacacgtgtatgtataca

SEQ ID NO: 175939 - DNA, 201 bp, Homo sapiens
ccaaaagagcacaaattaatatacaaggtcaggttaaatagttaagtctgctttcctatcccttatacagaagctatccattcaaaaaaaaaaaaaaaaaacttctttttactttttttaatttttaattttggtgcatacatagtaggtgtatatatttgtggaatacatacaaacatacaatgcataataatcacatca

SEQ ID NO: 175940 - DNA, 201 bp, Homo sapiens
gtatgtatacgtgtagctgtacatacacgtgtatgtatacgtgtagctgtacatacacgtgtatgtatacgtgtagctgtacatacacgtgtatgtatacktgtagctgtacatacacatatgtatgtatacttgtagctgtacatacacatatgtatgtatacgtgtagctgtacatacacatatgtatgtatacataca

SEQ ID NO: 175941 - DNA, 201 bp, Homo sapiens
cctttaagctatcatatggcagctaaccttgcctaaccttgcgagtttaaccttgctttttacgtgcatgcacgcgtgtgtgtgtgtgtgtgtgtgtgtgttactaatttctaactgtaccagctcctgaattaatatttggcaacatcaatattccttgtataatgaagaagcatggtccaagagacttggatgtgacct

SEQ ID NO: 175942 - DNA, 201 bp, Homo sapiens
gtatgtatacgtgtagctgtacatacacgtgtatgtatacgtgtagctgtacatacacgtgtatgtatacgtgtagctgtacatacacgtgtatgtatacktgtagctgtacatacacgtgtatgtatacgtgtagctgtacatacacatatgtatgtatacttgtagctgtacatacacatatgtatgtatacgtgtagc

SEQ ID NO: 175943 - DNA, 201 bp, Homo sapiens
ccctttaagctatcatatggcagctaaccttgcctaaccttgcgagtttaaccttgctttttacgtgcatgcacgcgtgtgtgtgtgtgtgtgtgtgtgtgttactaatttctaactgtaccagctcctgaattaatatttggcaacatcaatattccttgtataatgaagaagcatggtccaagagacttggatgtgacc

SEQ ID NO: 175944 - DNA, 201 bp, Homo sapiens
agtttaaaaaaaaattcacatatgaggcctgtgaagcaaataaagcaataatgtggtggttttcatggacattatgtctttcactacccgtccctctttttgttgtaaactctctaaggcaagtataacctcatctatacattagtatttatttaccacaaggacccataagtatttattgatatatcttcctaagtatgt

SEQ ID NO: 175945 - DNA, 201 bp, Homo sapiens
tatacgtgtatctgtacatacacgtgtatgtatacgtgtatctgtacatacacgtgtatgtatacgtgtagctgtacatacacgtgtatgtatacgtgtakctgtacatacacgtgtatgtatacgtgtagctgtacatacacgtgtatgtatacgtgtagctgtacatacacgtgtatgtatacgtgtagctgtacatac

SEQ ID NO: 175946 - DNA, 201 bp, Homo sapiens
taagcatgtgattcacgtgacactgtaagccttttttttttttttttttttttttttgagacagaccctttttctgtcgcccaggctggagtgcagtggtrtgatctctgctcactgcaacctccacctcctgagttcaagcgattctcctgcctcagcctcccaagtagccgggactacaggcacgggacaccacgcctg

SEQ ID NO: 175947 - DNA, 201 bp, Homo sapiens
tatacgtgtatctatacatacacgtgtatgtatacgtgtatctgtacatacacgtgtatgtatacgtgtatctgtacatacacgtgtatgtatacgtgtakctgtacatacacgtgtatgtatacgtgtagctgtacatacacgtgtatgtatacgtgtagctgtacatacacgtgtatgtatacgtgtagctgtacatac

SEQ ID NO: 175948 - DNA, 201 bp, Homo sapiens
gaaatgcaaatcaaaaacacaaaatgtgataccaccgtacttctgcaagaatggccataataaaaaaattttaaaaaacagtagatgttggcatggaaggrgtgatcaggaaacacttctacactgctggtgggaatgcaaactagtacagccattatgggaaacagtgtggggattccttaaagaactaaaagtagaact

SEQ ID NO: 175949 - DNA, 201 bp, Homo sapiens
tacgtgtatctatacatacacatatgtatgtatacgtgtatctatacatacacgtgtatgtatacgtgtatctgtacatacacgtgtatgtatacgtgtakctgtacatacacgtgtatgtatacgtgtagctgtacatacacgtgtatgtatacgtgtagctgtacatacacgtgtatgtatacgtgtagctgtacatac

SEQ ID NO: 175950 - DNA, 201 bp, Homo sapiens
agataattggctagccacacataggagaatgaaactagatcctatctctcaccgtatacaaaaatcaactcaagatggattaagggcttaaacctaagacstgaaactatgaaattttagaagataactttggaaaaacccttctagacattggcttaggcaaggatttcatgaccaagaacccaaaagcaaatgcaataa

SEQ ID NO: 175951 - DNA, 201 bp, Homo sapiens
atatatatacatacacatatgtatgtatacgtgtatctatacatacacatatgtatgtatacgtgtatctatacatacacgtgtatgtatacgtgtatctrtacatacacgtgtatgtatacgtgtatctgtacatacacgtgtatgtatacgtgtagctgtacatacacgtgtatgtatacgtgtagctgtacatacacg

SEQ ID NO: 175952 - DNA, 201 bp, Homo sapiens
tatatctcccaaagtatgtatatgtatgcatgtacttcatatgtgtgtatgtatatatatacatacacatatgtatgtatacgtgtatctatacatacacrtatgtatgtatacgtgtatctatacatacacgtgtatgtatacgtgtatctgtacatacacgtgtatgtatacgtgtatctgtacatacacgtgtatgta

SEQ ID NO: 175953 - DNA, 201 bp, Homo sapiens
ggccgaggcaggtggatcacgacgtcaggagatcgagaccatcctggctaacacggtgaaatcctgtctctactaaaaatacaaaaaaattagctgggcayggtggcaggcgcctgtagtcccagctactccagaggctgaggcaggagaatggcgtgaacccgggaggcggagcttgcagtgagccgagattgcagccac

SEQ ID NO: 175954 - DNA, 201 bp, Homo sapiens
agtaagcacttgatcattgctggttaactattattaagattatctaatagggatacaaagtatattcctgaaagaaattagggtgctcttagataggggarataaatgctagtaggattggtttcaatgcactatttattttattaatttatttctcactgaatttctttttatgatactcattttttttagagatccaga

SEQ ID NO: 175955 - DNA, 201 bp, Homo sapiens
gagaatacttgtggtgccaaaatttagagtgaaaccccagactattaatgatgctcaagttactttactccaacacaataagtactcagtgatttgttacrgaaattcaattaagtcttctcaagtattttttttcttttcttttttttttttaattatactttaagttttagggtacatgtgcacattgtgcaggttaga

SEQ ID NO: 175956 - DNA, 201 bp, Homo sapiens
ctttatttttgtatcttaatgcactcatattaagtgcttaataaatgcctatttaagcatatccaaggagagtttgccaaagatccctaatgtatgtctaytgaatgattagagaccatcctccccttccagccttcctgggaattgacaaggtttcacatacatatgtgcctatcctattctggtgaaacagatgtcccc

SEQ ID NO: 175957 - DNA, 201 bp, Homo sapiens
ggccttcggggtgccccattggggcattttctcagctagtagataatactctccctacctcccatgtcaaactactgtcctttctttagcaattaacaagkccctcaccacttcttgggcctctaatgtgtgttttcagtcacagccactcctctctactacttttgcctgctaagtataagagtagtattgcttccagtc

SEQ ID NO: 175958 - DNA, 201 bp, Homo sapiens
agccaattagcagcttttaaatgatgctctaggagcaactagctgtatttcctgtattggtattatatatgtttcttgcttgttgatggcattgaagcagraaaattattgaattcttggccaaggctagggttggctgtaacacatgtaggatgcttgtaccaagtagggtaagagattccagatggcatttaatttgag

SEQ ID NO: 175959 - DNA, 201 bp, Homo sapiens
ggaagtcctagcaagagcaatcagacaagagggagaaataaagggcatccaaatcggtaaagaggaagtcaaactgtcactgtttgctgatgatatgattrtttaccttgaaaactctaagaactcctccagcaagctcctagaactgataaatgaattcaagaaagtttctggatacaagattaatgtacacaaatcagt

SEQ ID NO: 175960 - DNA, 201 bp, Homo sapiens
aacatatcaaaaagataatccaccatgatcaagtgggtttcataccaggggtgcagagatggtttaatgtacacaagtcaataaatgtgatacaccacatraacagaattaaaaacaaaaattccatgatcatctcaatagatgcagaaaaagcattcaacaaaatccagcatccctttatgattaaagctctcagcaaaa

SEQ ID NO: 175961 - DNA, 201 bp, Homo sapiens
cttaacaaaatactagctgactgaatccaacaacatatcaaaaagataatccaccatgatcaagtgggtttcataccaggggtgcagagatggtttaatgyacacaagtcaataaatgtgatacaccacataaacagaattaaaaacaaaaattccatgatcatctcaatagatgcagaaaaagcattcaacaaaatccag

SEQ ID NO: 175962 - DNA, 201 bp, Homo sapiens
tagtgactgtactagtttacattcccaccaacagtgtaaaaaggcttccttttctccatgtcttcaccaacatttgttacctttttttgattaaaaaaaaactattataggtgtcaggtgatatctcatcatggttttaatttgcatttcacttaagattagtgatgttgagcacttttacatatacctgttgaccttttt

SEQ ID NO: 175963 - DNA, 201 bp, Homo sapiens
acaagaacaaaccaaacccaaacccagcagaagaaaggaaataatcaagatcagagcagaactaaatgaaattgaaacaaaaaaaaaccatacaaaaaaawaaataaataaatgaaacaaaacctggttctttgagaaaataaataaaattgatagaccattagcaagattaaccaagaaaagaagagagaaaatccaaat

SEQ ID NO: 175964 - DNA, 201 bp, Homo sapiens
cttcatattaatagttcagatctttaattataacatgtttcatggtctataagattaaattgaacattaggaaagcttagcatttctcatttgtgagtctkacattcacacctgtcaggattggtacagattcaagcttgtttttaataaacttcaaagaagatcaaaactagggatcatctgtttcatgtctttgacgtg

SEQ ID NO: 175965 - DNA, 201 bp, Homo sapiens
tcatactgttttccatagtgactgtactagtttacattcccaccaacagtgtaaaaaggcttccttttctccatgtcttcaccaacatttgttaccttttkttgattaaaaaaaaactattataggtgtcaggtgatatctcatcatggttttaatttgcatttcacttaagattagtgatgttgagcacttttacatata

SEQ ID NO: 175966 - DNA, 201 bp, Homo sapiens
tcagggatctagaaacaagaacaaaccaaacccaaacccagcagaagaaaggaaataatcaagatcagagcagaactaaatgaaattgaaacaaaaaaaaaccatacaaaaaaataaataaataaatgaaacaaaacctggttctttgagaaaataaataaaattgatagaccattagcaagattaaccaagaaaagaaga

SEQ ID NO: 175967 - DNA, 201 bp, Homo sapiens
tagttttatccttaattttttgaagacccttcatactgttttccatagtgactgtactagtttacattcccaccaacagtgtaaaaaggcttccttttctycatgtcttcaccaacatttgttacctttttttgattaaaaaaaaactattataggtgtcaggtgatatctcatcatggttttaatttgcatttcacttaa

SEQ ID NO: 175968 - DNA, 201 bp, Homo sapiens
cacacctcagggatctagaaacaagaacaaaccaaacccaaacccagcagaagaaaggaaataatcaagatcagagcagaactaaatgaaattgaaacaamaaaaaaccatacaaaaaaataaataaataaatgaaacaaaacctggttctttgagaaaataaataaaattgatagaccattagcaagattaaccaagaaa

SEQ ID NO: 175969 - DNA, 201 bp, Homo sapiens
ctaagcataatgtattctaggaacatccatattgtcataaatggaaggatatcccctttttaagcctgagtaggattctagtgtgtgtgtgtgtgtgtgtrtataacattttctttattcatctgttgttagacacttaagttgattccatattttggctattgtgattaatgctgcaccaaacatgggagtgcaggtatc

SEQ ID NO: 175970 - DNA, 201 bp, Homo sapiens
acctcggcctcccaaagtgctgggattaaaggcgtgagccactgcgcctgggcgagcatttttttttattccagtgtttctcgttaatctaccccatggcrttttatttcaggttgtatgtatgccagagatgaaaaaaggcaaatgacagaagagcaagtatatggagaaagataggagggacttgagaaaacttggcaa

SEQ ID NO: 175971 - DNA, 201 bp, Homo sapiens
aacttatcaaaacctctgggatacagcaaaggtggtgctaagaggaaagttcatagccctaaatgcctacatcaaaaagactgaaagagcaaaaaagacamtctacagtcacacctcagggatctagaaacaagaacaaaccaaacccaaacccagcagaagaaaggaaataatcaagatcagagcagaactaaatgaaat

SEQ ID NO: 175972 - DNA, 201 bp, Homo sapiens
taatgacacaacttatcaaaacctctgggatacagcaaaggtggtgctaagaggaaagttcatagccctaaatgcctacatcaaaaagactgaaagagcamaaaagacaatctacagtcacacctcagggatctagaaacaagaacaaaccaaacccaaacccagcagaagaaaggaaataatcaagatcagagcagaact

SEQ ID NO: 175973 - DNA, 201 bp, Homo sapiens
cccatctgctttatcatcagtgcctgtcctccacaagtgatatgagcacacatgagccaaaaattaaggatttttggttgaaagattttttttttttttttggtcaaagatggggccgggctctaattcttgttttaaatttatttttcatcaacaaataacaaattatatgcatttattatatacaaggtaatattttga

SEQ ID NO: 175974 - DNA, 201 bp, Homo sapiens
cttcctacccatgagcatggaatgttcttccatttgtttgtatcctcttttatttcattgagcagtggtttgcagttctccttgaagaagtccttcatgtygcttgtaagttggattcataggtattttattctctttgaagcaattgtgaatgggagtttactgatgatttggctctctgtttgtctgttattggtgtat

SEQ ID NO: 175975 - DNA, 201 bp, Homo sapiens
attttattttttaaagacattttcacttcagtgaaaaagaaagagcataatctcagaataaaagaattttccaaaggaatacgtatagtttaaaaaaaaaatctcactgcatggtccatgtacactctgactttgacaaggaccactgagcattctgttgggcaagtaccagatcttagagtggcatttggaaaccactga

SEQ ID NO: 175976 - DNA, 201 bp, Homo sapiens
aattagatcccatttatcaattttggcttttgttgccattgcttttggtgttttagacgtgaagtccttgcccatgcctgtgtcctgaatggtaatgcctrggttttcttctagggtttttatggttttaggtctaacatgtaagtctttaatccatcttgaattaatttttgtataaggtgtaaggaagggatccagttt

SEQ ID NO: 175977 - DNA, 201 bp, Homo sapiens
gaacttcaaattgaatttgttataaccaccaagatcagttttgtttttgtggattggtgtgtgtgtgtgtgtgtgtgtgtgtgtgtgtgtgtgtgtgtgtktttagctagtggatagcatattagacagcaccgagagtcttgcagaatattctgttgcagaaatagaatgttgcagaaatattctattggacagtgctgt

SEQ ID NO: 175978 - DNA, 201 bp, Homo sapiens
cagaacttcaaattgaatttgttataaccaccaagatcagttttgtttttgtggattggtgtgtgtgtgtgtgtgtgtgtgtgtgtgtgtgtgtgtgtgtgtgtttagctagtggatagcatattagacagcaccgagagtcttgcagaatattctgttgcagaaatagaatgttgcagaaatattctattggacagtgct

SEQ ID NO: 175979 - DNA, 201 bp, Homo sapiens
tacagaacttcaaattgaatttgttataaccaccaagatcagttttgtttttgtggattggtgtgtgtgtgtgtgtgtgtgtgtgtgtgtgtgtgtgtgtgtgtgtttagctagtggatagcatattagacagcaccgagagtcttgcagaatattctgttgcagaaatagaatgttgcagaaatattctattggacagtg

SEQ ID NO: 175980 - DNA, 201 bp, Homo sapiens
catgtacactaatccatctaaagtgctactgttaaggaggagcaatagaagaggtgattcagggaatggtttttgatggttatttacttttataatagttyttatttgtaaaaagaagaaacctagagttttgtatcctaaacaaaatttaggattaggatacaaaataataaaattcaaaataagtcttgactagtgagt

SEQ ID NO: 175981 - DNA, 201 bp, Homo sapiens
taagttgttctatatctcccaaagtatgtatatgtatgcatgtacttcatatgtgtgtatgtatatatatacatacacatatgtatgtatacgtgtatctrtacatacacatatgtatgtatacgtgtatctatacatacacgtgtatgtatacgtgtatctgtacatacacgtgtatgtatacgtgtatctgtacataca

SEQ ID NO: 175982 - DNA, 201 bp, Homo sapiens
tatctcccaaagtatgtatatgtatgcatgtacttcatatgtgtgtatgtatatatatacatacacatatgtatgtatacgtgtatctatacatacacatrtgtatgtatacgtgtatctatacatacacgtgtatgtatacgtgtatctgtacatacacgtgtatgtatacgtgtatctgtacatacacgtgtatgtata

SEQ ID NO: 175983 - DNA, 201 bp, Homo sapiens
tacttcatatgtgtgtatgtatatatatacatacacatatgtatgtatacgtgtatctatacatacacatatgtatgtatacgtgtatctatacatacacrtgtatgtatacgtgtatctgtacatacacgtgtatgtatacgtgtatctgtacatacacgtgtatgtatacgtgtagctgtacatacacgtgtatgtata

SEQ ID NO: 175984 - DNA, 201 bp, Homo sapiens
tggggggcagtcttgggaactgaaccttcaaccggtgggatctgacattatctccaggtagacagcgttggaactgaattacaggacacccagctagtgtyggctgcttggtgtgggggggaaacctcacatgtttgttcgtagaaggcttcatctgtgttgatgatttttgtggtgtgagagtagaggaaaaatgccatc

SEQ ID NO: 175985 - DNA, 201 bp, Homo sapiens
cactaatgatcaaggaaatgcaaatcaaaaacacaaaatgtgataccaccgtacttctgcaagaatggccataataaaaaaattttaaaaaacagtagatkttggcatggaaggggtgatcaggaaacacttctacactgctggtgggaatgcaaactagtacagccattatgggaaacagtgtggggattccttaaagaa

SEQ ID NO: 175986 - DNA, 201 bp, Homo sapiens
agttgacagtcccaccaacagtgtaaaagtattcctatttctccacatcctctccagcacctgttgtttcctgacttttgaatgattgccattctaactgrtgtgagatggtatctcattgtggttttgatttgcatttctctgatggccagtgatggtgagcattttttcatgtgttttttggctgcataaatgtcttct

SEQ ID NO: 175987 - DNA, 201 bp, Homo sapiens
aaaagaagatatacaaatggcaagcaaacatatgaaaaaatgctcaacatcactaatgatcaaggaaatgcaaatcaaaaacacaaaatgtgataccaccktacttctgcaagaatggccataataaaaaaattttaaaaaacagtagatgttggcatggaaggggtgatcaggaaacacttctacactgctggtgggaat

SEQ ID NO: 175988 - DNA, 201 bp, Homo sapiens
tagtatgggtctttaaaaaaaatggatatttataacaaagaaaggataaaattaataagtaagttataaggaatatttagaaaaataaaaacagtattctraaagacaatacttatatctttctaatgtaaatcttagaaaatggtgagaatttcttgtatgctttatatttataagaagtaataatagcttttgaaataa

SEQ ID NO: 175989 - DNA, 201 bp, Homo sapiens
tttgccattaccaagccaccactacaagaactgctagaaggagctctaaatcttgaaacaaatcctggaaacacaacaaaacagaacctcttttttttttwaattattattattatactttaagttttagggtacatgtgccatgccggtgtgctgcacccattaactcgtcatttagcattaggtatatctcctaatgct

SEQ ID NO: 175990 - DNA, 201 bp, Homo sapiens
cccttccccccaccccacaacagtccccagagtgtgatgttccccttcctgtgtccatgtgttctcattgttcaattcccacctatgagtgagaacatgcrgtgtttggttttttgttcttgcgatagtttactgagaatgatgatttccaatttcatccatgtccctacaaaggacatgaactcatcattttttatggct

SEQ ID NO: 175991 - DNA, 201 bp, Homo sapiens
tggaagacaaagggcatataatcttgggagttctagggttcctccccatactaccacagctgatgctctctggaaggcaacacctcctggcaggagaccarccagcacaaaaatagagcattaaaccacgaaagctaagaacccccacagagcccattgcgccccccaacccctaccccctgcaccagaacaggcactggt

SEQ ID NO: 175992 - DNA, 201 bp, Homo sapiens
aaagcctacaagctagaagggactggggccctatcttcagcctcctcaaacaaaacaattatcagccaagaattttgtacccagtgaaattaagcatcatrtatgaaggaaagatacagtctttttcagaaaaacaaatgctgagaaaatttgccattaccaagccaccactacaagaactgctagaaggagctctaaatc

SEQ ID NO: 175993 - DNA, 201 bp, Homo sapiens
gagctgagtgaaatacagaggcaaagaaagtagcagaaaggccctggaagctctctgagtcccctagcaggccatccatgcctggcatcacagggatccayccagagggcagccagagccagaggtgcaaggggtaaaactctacagggagaagaaaatctctagctgaagtttgtaacaatttgaatggggtgagaagcc

SEQ ID NO: 175994 - DNA, 201 bp, Homo sapiens
gttctagggttcctccccatactaccacagctgatgctctctggaaggcaacacctcctggcaggagaccagccagcacaaaaatagagcattaaaccacraaagctaagaacccccacagagcccattgcgccccccaacccctaccccctgcaccagaacaggcactggtaacctataaaggaaaatctgtgagattaa

SEQ ID NO: 175995 - DNA, 201 bp, Homo sapiens
atatcaaccactgggctttgctttcagattcctggtaatctgtggtatgattcacaccaggttcacagaggaaacaaccccaattattccgtctgcctachgcagcatctcctaggctttgtgtccacctacggttaattgccttgagactttatggtttttcctaaccttgggtcaagaaaaatttgctgacattgaata

SEQ ID NO: 175996 - DNA, 201 bp, Homo sapiens
tagcattttgaatatatttcaattaatgtatgtacagatgttagcactggtttgccagatcatttaagaaatctttgtgggactttgccaaaattaaaccaacttttaaggatcatgagaggcaagcacagaaaacattagacagacttgaatatcatttaagatatagtacagcttgaaaaacaatgaaaactgacaagc

SEQ ID NO: 175997 - DNA, 201 bp, Homo sapiens
gaaggtctccagtctttgaatggcctaggctcaagccctatcacccttgtgagccacctgtccaaaagggccacagtgacttaggtctactcagtacagastctgaagtcctccacctctgctgtcgcccaccaggatgaactgaggaatctgctagagggaagagtgaccaaagagaatttttctggagatgggctggtg

SEQ ID NO: 175998 - DNA, 201 bp, Homo sapiens
tgaactcatcatttaagaaaaagtccaataaaatatcagtcactatttttagatcttcattctcaatgtttgtaaagctaatactaatattagattaatgkaattttatcaatattgataattacttagtatacattgtgaactttgttttttggatgtcatttaaagggttattttcatgagttcctaagaaataattta

SEQ ID NO: 175999 - DNA, 201 bp, Homo sapiens
aaggaaatgaaggtctccagtctttgaatggcctaggctcaagccctatcacccttgtgagccacctgtccaaaagggccacagtgacttaggtctactcrgtacagactctgaagtcctccacctctgctgtcgcccaccaggatgaactgaggaatctgctagagggaagagtgaccaaagagaatttttctggagatg

SEQ ID NO: 176000 - DNA, 201 bp, Homo sapiens
ttttttttttttttgagacagagtctctctctgttgctcagctggagtgcagtggtgcaatctcagctcattgcaacctctacttcctgggttcaagtgakgcttgtgcctcagccttccgaggagctgggactacagatgcataccaccaagcccagctaatttttgtatttttagtagagacggggttttgtcctgaac

SEQ ID NO: 176001 - DNA, 201 bp, Homo sapiens
tgtgtgtgtgtgtgtgtgtgtgtgtgtgtgtatgtgtgtgtgtatgacaggatctcactgtgttacccagactggagcgcagtggcatgatttagactcaytgaagcctcagcctcctgggctcaagtgattctcctgcctcagcaccacaggcttgtgccatcatcgtgcctgacttttttttttttttttttttttttt

SEQ ID NO: 176002 - DNA, 201 bp, Homo sapiens
agctggttcgagcaggggaggaaccatgtgagcaatgggagagcagattttacagagttccagatggaatctgctgagggattttctttcccagagtcatgaagccacttagcgtggtcacagattctctttatatgttcctctacttgcccactattgttgacacaagtgcaatagggtttattgatgacagcacagacg

SEQ ID NO: 176003 - DNA, 201 bp, Homo sapiens
gtatatttccagtaccacctaatgttttactcataagtaagcatatacccttcatctttgtaccagtgtgtgtgtgtgtgtgtgtgtgtgtgtgtgtgtgkatgtgtgtgtgtatgacaggatctcactgtgttacccagactggagcgcagtggcatgatttagactcactgaagcctcagcctcctgggctcaagtgat

SEQ ID NO: 176004 - DNA, 201 bp, Homo sapiens
ttttgtttattttcccttgacaaaatgttattgttttaaatagggaaggagaaaggtcttgggaaaacacacacacacacacacacacacacacacacacatatatatgtactctctcatatttgaaattagcatgtagtttaaggatactgcacacagctctatgatgagcttaacttgaatctccttagattatgagca

SEQ ID NO: 176005 - DNA, 201 bp, Homo sapiens
catgagacaatgtatttaaagcacccagcatactatctggttcatagtttacagtcaataaatgttaattccattatttgatcacaatgtaagactattgaggtttaattttgattgttttttcaaaagtttgtaatctgttaggaacaatttctaaagtaaaattcagaaaacaaaaccatcaaaatttaattcagctaa

SEQ ID NO: 176006 - DNA, 201 bp, Homo sapiens
ttcctgcttctatgagttcaactactttaaatccctcatataagagggatcatgcaatatttatctttctgtgactgacttatttcacttggcataatgtyctcaaaattcatccatgttgtagcatatgacaggatatccttcttttaaggctaaataatattccattgtatgtatataccacattttttaatccattcg

SEQ ID NO: 176007 - DNA, 201 bp, Homo sapiens
aactcatcattttttatggctgcatagcattccatggtgtatatgtgccacattttcttaatctagtttatcattgtgactcaacacatttaaaaaaaaaatctagagtagacctatacaatttgacagattgcatcaatagttacaattttagacacccctacccctccacacatagaaattagtgaataagcagactgt

SEQ ID NO: 176008 - DNA, 201 bp, Homo sapiens
aatttttaaattgtttatatttttaaaggtatttgatttattaaaactatttgattactttatttcatcaagtccaaggtgccattgattataaaaacatrtctggattttagaggcattaaaaatgtaggggccaggcgcgatggctcatgcctgtaaccccagcactttgggaggccgaggcgtgcagatcacctgagg

SEQ ID NO: 176009 - DNA, 201 bp, Homo sapiens
catggtatatatgtaccagatttttctttatccaatctatcattcatggacatttagtttgattccatgtctttgtgattgtgaatagggctgtaattaasacatgcatgcacgtatctttatggtagaatgatttatattccttttggtatataccctgtagtttgattgctgagttgaatggtagttctgtttttagtt

SEQ ID NO: 176010 - DNA, 201 bp, Homo sapiens
agtaaagcacttttagctaccagatccagagaccattcagttatatgggcacttgagtttctgctaaagaatcacaactcaatttaattttttttttttttggtatttcattcacagccagtctggagtgtgtgtgtgtgtgtgtgtgtgtgtgtgtgtatttctgtttctgtattaacatatgagacagcagaataataa

SEQ ID NO: 176011 - DNA, 201 bp, Homo sapiens
tctgtctgtgtgttctcattatttggttaccacttataagtgaaaacatgcagtatttggttttcttttcctgcattagtttgctaaaaataatagcctgyagctccatccatgttcctacaaagaacatgatctcattcctttttatggctgcatagttttccatggtatatatgtaccagatttttctttatccaatct

SEQ ID NO: 176012 - DNA, 201 bp, Homo sapiens
aggcaggagaatcacttgaacgcgggaggcggaggttgcagtgagccgagatcgcaccattgcactccagcctgcacaacaagagcaaaactccatctcaraaaacacataattaattaagtaatgatataaggtgctaaatttttattttcacccatccagtttcttttcttattctttcctgatatgtaattacctcag

SEQ ID NO: 176013 - DNA, 201 bp, Homo sapiens
agagagggagggagagagggaggtgatagggagggagggaaagaataaaaaggaatgaagaaaaaactaataacaatttatctcttaagaaaatagaaggygcagctgggtacggtggctcacgcctataatcccagcactttgggaggccgaggcaggcggatcgcctgaggtcgggagttcgagaccagcctgaccaac

SEQ ID NO: 176014 - DNA, 201 bp, Homo sapiens
aaaagcaacaataacaaccaaaagtaactaaatacgatttttatttagtatgaaatgtattgcattgtaattatttcaacatcataacatttattaaagaygtatgtatcactttattattctatgctcatcccccctctttatacaaaatggagcataatctgcacattcattgttctgcagtttgtattttgcacttga

SEQ ID NO: 176015 - DNA, 201 bp, Homo sapiens
ctgttcaagtttcttcttttaatcttatgtatatcaagaacatgtttgcctatggtatttgtctgcctttccccccaagatttgtatacaagcctccaacygtgagccctagagatatattgagaaatagaacatggactttgacacggctccattccttggagatctagctagttcctgactcgttcagcttattgactc

SEQ ID NO: 176016 - DNA, 201 bp, Homo sapiens
caagatcatgccactgcactccagcctgggtgacagagcaagactctgtcaagaaaaaaaaaggaaagaaagaaaacttataattctatatctaagacctsagagagaggtgaacagacaaaatatggcataacaatgtaagtaacatcatcaaacatagaaccaatcattccaatttgagttcattcaagtagctattct

SEQ ID NO: 176017 - DNA, 201 bp, Homo sapiens
aggcaaaaaaatctaaaaagataaaagtaatttttcaatattaaatggaaaactggtttgctgttatttcaatgtccattttttttaaaaaaaatctgctmttaatatgaaataaaatattaaaatgccaacttcaaataattttccagaaggaaaaaaaacatttaaatcatattaagaggatagtaaatataagtgtat

SEQ ID NO: 176018 - DNA, 201 bp, Homo sapiens
aaaaaaaaaattaattagccaagcatggtggcatgcacctgtagtcccagctacttgagaggctgaggtggtggggggaatcactagagctcaggagttcwaggctgtagtgagctatgatcacaccactgcactccagcctgagcaacagagtgagaccctatctcaaaactttaaaaaaaaaaaaatttaagaagaaga

SEQ ID NO: 176019 - DNA, 201 bp, Homo sapiens
ttgcttcttgctcatagtcctactaatgggtcagaatagtgctgcttcaggctgcaggttgccttcatgcttgttcttcatgtttctccttcttggaccartgatctcccagggcgtgtccttgtggcacagtttacaactcccaatgtggcaagtagaaatgttcaatactttgtaaggcctcagtttataaagcagtat

SEQ ID NO: 176020 - DNA, 201 bp, Homo sapiens
taagttaatcagacagcatgctttttttttttacttcaaggggtttatagtcattttgtggaacttggcaaacatctgaaaacttagagaacacaagatakaatttatttaagtacctttggcttagagtatttctaaagcttctatagtatctatttggacaagtcattaatatacctctctaacaaatatatcagaggt

SEQ ID NO: 176021 - DNA, 201 bp, Homo sapiens
gaccatctatcattcctgaagaggccacctgacagtcacaatgacagtcatttgactgtctcctgacattccttggggccctatcctgccctgctcatatycacctatctacctaccctaacatattcccccctcaagagtgtgagactcaattatttggggctagtggatgaaggtcagtcctctgtggctgcttcctgc

SEQ ID NO: 176022 - DNA, 201 bp, Homo sapiens
caagaatagatctctgatctctttctcatactttatctgccctaacttccactttccttttcttgagaggagaagaacaactccacagtgctttccttttrtgttttgggctaattttgttgtgttgttttatggtcttgaactgagagctgcctcagcactcaacaccagcccctggactgtgagactaatgagaaaagc

SEQ ID NO: 176023 - DNA, 201 bp, Homo sapiens
aaaaaaaaaaaaaaaaaaactcgaggagagagggagaaaggcaaagttactctaatgttttaactaacccatataaccacggagaaccagccctaggaacyaacactaaaatcttaaggactgttttttcagactctgaaaattctcctaaatctccattccagtatcattcaagctctttacaaccgctgtttgtcctta

SEQ ID NO: 176024 - DNA, 201 bp, Homo sapiens
acccaagagaaaaaacccaaagataatggtgcaaggtatttctgaatgaaactgttcagttggatcatcaaaaagtggatgtagttgacaaatcttacctrtgcaaacagagcttccaatctgatttttagtactctagccttaaatatgagtagacagataagatttatcaaatacttagaaaaagtaagtgaaagaaac

SEQ ID NO: 176025 - DNA, 201 bp, Homo sapiens
gactgctggctttcccccacttccctgacaacctgcatgactcagcagaggaagccataatcctcctaggtgcacaactccagtgacctgggaatctcacycccatcccccatagcagccctagcaagactcacccaaggagagtctgagctcagacacacctagccttgcccccacctgatggtccttccctatctaccc

SEQ ID NO: 176026 - DNA, 201 bp, Homo sapiens
tgaactcaggaggcagaggttgcagtgagccaagatcatgccattgcactccagcctgggtgacagagctaggctccatctccaaaaaaaaaaaaaaaaaaaaaaaaaaactccactggatcctctcttccaacttttttcccctaatttcttcccttagcactgatattatcaaacaagtggccaatcctataaaggcta

SEQ ID NO: 176027 - DNA, 201 bp, Homo sapiens
acacctgtaatcctagcactttgggaggctgaggcgggcagatcacctgaggtcaggagtttgagaccagcctgaccaaggtggtgaaaccccatctctayaaaaatacaaaaattagccaggcataatggcaggttcctgtagtcccagctactagggaggctgaggcaggaaaattgcttgaactcaggaggcagaggt

SEQ ID NO: 176028 - DNA, 201 bp, Homo sapiens
tcccacaactgatctgcttagggacagtgtccctggtgccctgggtcagcctttgtaaacagaacaggcttttctgtatgcctttgaatatggtctttccgttttctcaaaattgtagtgtactctgcacatggtgggtagaaacacccttccagattttcttccttggcccaagatcatctaggtcttatgcaattcaca

SEQ ID NO: 176029 - DNA, 201 bp, Homo sapiens
accctacagaccaggcactccgtcagtgagatggcctccaacaaggtaagccccggttctgctgtcactggtgcccccaggctgctgattcccatgccggygagccactggtacccatagccccgggaaataaattgagaggttttttaggcttactgcatgttggctattctgctccttagagggaggttcctgtttcct

SEQ ID NO: 176030 - DNA, 201 bp, Homo sapiens
gcacccgaagataaccactaactgacttccaatagcatagatttgactacttttgaattttatatgaatgaaattatacaatataaactcttattttatttcagtcaatattgtgtttatgggattcattcatagtgttttgtgcattctttattctcattttgttagtattgcaccaaatgaatatgctacaatttactt

SEQ ID NO: 176031 - DNA, 201 bp, Homo sapiens
gtatagcaaatgaatcagctaaaatatttgaaaatgggtaccctctggggagtggaagatacatgtatgtattgtgggtgggggatgcactgcaggagatytctttttttaatccttgtggtactacttagttctctaaactatttgcatctataactttgctaaaaataacatttaaatttaaaaattgatcactcttgt

SEQ ID NO: 176032 - DNA, 201 bp, Homo sapiens
tgcacccgaagataaccactaactgacttccaatagcatagatttgactacttttgaattttatatgaatgaaattatacaatataaactcttattttatttcagtcaatattgtgtttatgggattcattcatagtgttttgtgcattctttattctcattttgttagtattgcaccaaatgaatatgctacaatttact

SEQ ID NO: 176033 - DNA, 201 bp, Homo sapiens
atgttcaagttttttttgtttaagcttccccatcccccagaaaatactggatatatatagcaaaacctttcatggataataattgacatataccttggagrccatttggaatctccataaacgaaagaagaaagggcatttcagacaaagggaactacatgtacaaagtcacaggcatgtagaaaaagatgaatgtttcgg

SEQ ID NO: 176034 - DNA, 201 bp, Homo sapiens
atgcacccgaagataaccactaactgacttccaatagcatagatttgactacttttgaattttatatgaatgaaattatacaatataaactcttattttatttcagtcaatattgtgtttatgggattcattcatagtgttttgtgcattctttattctcattttgttagtattgcaccaaatgaatatgctacaatttac

SEQ ID NO: 176035 - DNA, 201 bp, Homo sapiens
ctatgtgccaggcactgtgctgttcacttgacctaattatctcattagatcctcatgatgaatcctagacagtactcattagtcttattcctcagactgargcctaatgaagtaaagtggcttgcctaaatttgagtggcaaataagataatttcatgattcgcatattttcttaattataaaatgttacctttagcaatg

SEQ ID NO: 176036 - DNA, 201 bp, Homo sapiens
tatgcacccgaagataaccactaactgacttccaatagcatagatttgactacttttgaattttatatgaatgaaattatacaatataaactcttattttatttcagtcaatattgtgtttatgggattcattcatagtgttttgtgcattctttattctcattttgttagtattgcaccaaatgaatatgctacaattta

SEQ ID NO: 176037 - DNA, 201 bp, Homo sapiens
ctatgcacccgaagataaccactaactgacttccaatagcatagatttgactacttttgaattttatatgaatgaaattatacaatataaactcttattttatttcagtcaatattgtgtttatgggattcattcatagtgttttgtgcattctttattctcattttgttagtattgcaccaaatgaatatgctacaattt

SEQ ID NO: 176038 - DNA, 201 bp, Homo sapiens
tgagatactcatacaaggaacgtcaggtttttttcctaaagcaaatccgtgtaaactgagacaacataaaccttagggagatctgacacaccaaaatgccragaaagggaaagaagaaattattatcggtgggggaaacaaattatcctgtattttggagtgaatttaaaaggcttattgtttgttttagcactacatgac

SEQ ID NO: 176039 - DNA, 201 bp, Homo sapiens
agtaaatatatattactgtaattatgttaagccaatcaaatgcaaaggacagttcaaaggggacaagtatgtaagccacattccaaaaaaaaaaaaaaaaaagctttgaagtgaagctttaaaaagataagctttgtgttgagctaaagaaataaactctataaaaacaaaaccctaaaattgttatgacaatgaattaaa

SEQ ID NO: 176040 - DNA, 201 bp, Homo sapiens
tacagcccttggtactttacatttcttatgcatttctcataataaccctgtaattctcaatgtatacaatgtgctcaggtcttttaaatggcttatttcasataatacaactagaacaatggcaaggctggaattcaagttctgagtgactcaaaagtccatgctctttctgatctatcacactatttcccatgaagagct

SEQ ID NO: 176041 - DNA, 201 bp, Homo sapiens
cttatttaaaattaacttatttaaacaactctgcaaagtggttcagtatacctactattgattgaataccttctatatgtcagatacagcccttggtactktacatttcttatgcatttctcataataaccctgtaattctcaatgtatacaatgtgctcaggtcttttaaatggcttatttcagataatacaactagaac

SEQ ID NO: 176042 - DNA, 201 bp, Homo sapiens
ttaactaacccatataaccacggagaaccagccctaggaaccaacactaaaatcttaaggactgttttttcagactctgaaaattctcctaaatctccatyccagtatcattcaagctctttacaaccgctgtttgtccttaggctgtaacttgtgcctgaaatcccactctaaggttcccttgtggtatttttaatagtg

SEQ ID NO: 176043 - DNA, 201 bp, Homo sapiens
aggcgtaagccactgtgcctggtctaaaagctattctaaatcataggttgttcactcacatttggctcagaactggttaatatttgagggttgatggtgawgatggaaaaatagtaactgttttaggattgagaatctgtggaaaaggaaggaaactctcaaatattaactaccttatttaaaattaacttatttaaacaa

SEQ ID NO: 176044 - DNA, 201 bp, Homo sapiens
attcaaaacaccactcatcttttttctcattgagtattatttatttatttttgctttctggagacatacgtttaccctttatttactgtctcattttgtcrtctctgaacataccatttacagctttttagttattctggaaaaatcactttgtatgaaataataggctatgatggctagaaaggatctcactgatcatca

SEQ ID NO: 176045 - DNA, 201 bp, Homo sapiens
aaattccaagatgaatgggttacgggtctgaccttcaggaacatgtaggctgcctgccgatgtccacaacatcgtccctttcacatgcctaatacattagygtgggccactcatttaaaatttaaaaaatttcatttagcatttaaaaattcatttgacagaagagatgtttcaaataaatagtcttcaaaaaaagcccgg

SEQ ID NO: 176046 - DNA, 201 bp, Homo sapiens
agttaacaccaaatacaacttccatagacttcaagtttccctcatatttttcctgggtcactattccagagttgagaaactgaactacatctaatattttrttaaaataaaattgaagattattagaaaagtttattagtcaatagtaaaacgttatttggttagctttcttaaacaatggcatttatagatatctgatta

SEQ ID NO: 176047 - DNA, 201 bp, Homo sapiens
ttttggttacacaaatttgtagtacaggccttgcctcagcatttgaacatttcagcaagagagctgaacttgcttcgttcttcatgtagcagatataagtmttttggaattaatttgaaaaaaaaagaaaagaaaagaaaagaaatgtacccagaaagcaagagatcttaaatgtatccaaaacctagaacaaacaaacat

SEQ ID NO: 176048 - DNA, 201 bp, Homo sapiens
cttatttgtaatctgtgatcaaggagaaactgcctgagttgcctggattattttggcatttttaatatgtacaagaaaaatgttatcaaataaatgtaaawttaaaggtcctgatgagagtttactttctaataaaacaattttcaacatttcccattacatcagaaactaaattattattaaaacacatcttgtgttcat

SEQ ID NO: 176049 - DNA, 201 bp, Homo sapiens
tttactttgatggaacgcactgtgttgaatgttattgtgctgacaaataagcccccaaattaaatgacttaaaaaataaactcattcttcatcaagtagcrttctaggatggtgtttaggaggatgtggcagctctccttgctctcagtcacggaccaggattctcccaccttctgtttctaccatccttcacgcatcagc

SEQ ID NO: 176050 - DNA, 201 bp, Homo sapiens
caaaataattgaagttggcacacccagaggagtatatatcctctgtgtagatgttcagagagataggcaggctggtcaactgttccttctgttgggagcarttggaatcagcttagattatatctactgtaatagaaaatattttatatttaggaggtgggaaaggttttggccttcgaaataataagagatattgacaag

SEQ ID NO: 176051 - DNA, 201 bp, Homo sapiens
gagtaaatatatattactgtaattatgttaagccaatcaaatgcaaaggacagttcaaaggggacaagtatgtaagccacattccaaaaaaaaaaaaaaaaaagctttgaagtgaagctttaaaaagataagctttgtgttgagctaaagaaataaactctataaaaacaaaaccctaaaattgttatgacaatgaattaa

SEQ ID NO: 176052 - DNA, 201 bp, Homo sapiens
cccaagtattatagagaagaaagaggagaatgatgtgctcaagaaaacaatgtggagaagtttatattggttgtttaaacatagtacctaaaaaaaaaaaatggggaaaaacgatctgggaagtaaagaaagaatcaaggagcaaagatttagcaagcctgtggaccctgacaactccaataagagaacactagggaattt

SEQ ID NO: 176053 - DNA, 201 bp, Homo sapiens
gataatgtacaggcaatcacgagaatttaggccaacaataaaaatttcttaaccctgtattagggaagacaattataaattgactgctttttcaaattcaragtctataagctctggcttcagcgaataaagtctgtaagaatttcctcttctctcatgtcccagtgacacttacatcagctttatttaccccaaatcaat

SEQ ID NO: 176054 - DNA, 201 bp, Homo sapiens
tcattattttaaactgataacaacttaacactgattgcataaacaaactaacaagcaaagggaaaaccaataaaaactctacattttaactttgtcccccsctttaaaactttctgttgtctttatatcttattgtattgtctgtatttcaaaaaatagttgtagttattatttttgatcagtttatcttttattctttct

SEQ ID NO: 176055 - DNA, 201 bp, Homo sapiens
caatttttttgtcatttgtgcctcatttctaaatttggcacagctcctcatcagaatgaccaattattgctctcttactgggacttttaccccctgctgtrgcattaggcacctttattctcatctgagtaacaaattcttagttttataaaatatagtttgttttcataatttgattctcaatagcagtagacatatgct

SEQ ID NO: 176056 - DNA, 201 bp, Homo sapiens
aactcacatgaagccaactagagaagcctatgctctacactattttacatctcataattctcatacactactaacctgttgcaaatgaaaaagaagtcttmttattgtaccacttttaattgcacttattattgccttcagtaaagtcttcatttctaaaatgtcttagtaaaacagtaatttcataaaaatattgccaac

SEQ ID NO: 176057 - DNA, 201 bp, Homo sapiens
ttcagtaaagtcttcatttctaaaatgtcttagtaaaacagtaatttcataaaaatattgccaactaggagtactaaattctaattttggttatattatgyggccttggataaggaagtttcttaggctttcatattccaaattattggactattctaaaaacatttttaatattttgatggatgtagtctattctaatat

SEQ ID NO: 176058 - DNA, 201 bp, Homo sapiens
atcaccccatgacgtattatgtatttattaacttagttttggaatataagctgcaggtgagaaagctttgtttctctttctcaggcagtgcctgacatagrgtaggagcttaataaatattgaatgaaggggcagatgtagaatcgttagaatttggaaaaaggctggaatatttggtcctaagatgtactttgaatgatt

SEQ ID NO: 176059 - DNA, 201 bp, Homo sapiens
agtgacacttacatcagctttatttaccccaaatcaatcactgtgagatttaccagttttctttttggacatgtgtgatctgagccataatacaaagaacrcctagggacttgtctggctagtctgaaagaaatcatttgcgtgtccaaacttaaaaataattctttaaagtaaaatgctatatctgaaatgactcagaga

SEQ ID NO: 176060 - DNA, 201 bp, Homo sapiens
ctaggaggcaagaccttgcagggctggggcaaggttctccagaaggccataaaggccatatatgctctgaatcagcatccaatatgtggtgctatttctcscataaccagaattcatgggtccaagaatcattggatagaaatgggactgttaccactcataattacccccagtgacccactagcaaagtttgcttcctgt

SEQ ID NO: 176061 - DNA, 201 bp, Homo sapiens
tagtctgactttaaaacccatcccatttactatcctctgctttttttttttttttggtgtatattgtgggaaattccataaatgatttttataaactttarccagtaatcgggaaaaactgtaagattttgtttgtaagctttataaacgttacttataagattttaattgaattctaaattaatttctaatttgaacctc

SEQ ID NO: 176062 - DNA, 201 bp, Homo sapiens
tagtcttagatggtttttcataaattttgagtcatgaaaaactgacaacatatgagtctccaagtaccttttaatatatgcaatattttacctacttaatkaatacatgtgtttatttgataactaaaaagtttataaagtctagaaataaagaaaagtccatgtcctttttcttttttgttttcttttaaatgaaaactc

SEQ ID NO: 176063 - DNA, 201 bp, Homo sapiens
tcatgttttgtcacttcaagatctacaattgaacttcattacgatagtcttagatggtttttcataaattttgagtcatgaaaaactgacaacatatgagwctccaagtaccttttaatatatgcaatattttacctacttaattaatacatgtgtttatttgataactaaaaagtttataaagtctagaaataaagaaaa

SEQ ID NO: 176064 - DNA, 201 bp, Homo sapiens
caagtactctgatacattttttaagggtaatgaggacctgctctattcttcattcttttgagcccttaaagcagcagtctccaatgtttttggcaccaggsaccaggttttatggaagacaatttttccataaactgggggcgcagggagagaatggttttgggatgaaactgttccatctcagatcatcaggcattagtt

SEQ ID NO: 176065 - DNA, 201 bp, Homo sapiens
cccatgacgtattatgtatttattaacttagttttggaatataagctgcaggtgagaaagctttgtttctctttctcaggcagtgcctgacatagagtagragcttaataaatattgaatgaaggggcagatgtagaatcgttagaatttggaaaaaggctggaatatttggtcctaagatgtactttgaatgatttaaat

SEQ ID NO: 176066 - DNA, 201 bp, Homo sapiens
agacagagatgggattgtcagctgtatggtgaaggtggaggaatactagtctttcaggaacagagcaaatgtaatagagcagctgaaaataggcttggcgytggggattaaggtcagatatggcagtctggaatttacagagggatgtgatgaagcaggcattactagctttgaagtaacaggctgcggctggatttgagg

SEQ ID NO: 176067 - DNA, 201 bp, Homo sapiens
gtgtatattgtgggaaattccataaatgatttttataaactttagccagtaatcgggaaaaactgtaagattttgtttgtaagctttataaacgttacttrtaagattttaattgaattctaaattaatttctaatttgaacctctcccttctcttagctttatatgcttggtcatccctccttaagtaattagctttttt

SEQ ID NO: 176068 - DNA, 201 bp, Homo sapiens
gtcatctgaacctgactgcatagagaatggagtactaacttaaaaaaaatgaataaagcccctgctggctactaaccttagaatatagttttttcagtcaytttcttgtgtcctgcttctttcttcatatccatttctctctcttattgaccctttgctccagcttagggtgggatttaaatgagaagttgaggctgctgt

SEQ ID NO: 176069 - DNA, 201 bp, Homo sapiens
atttattaaaataataatttagacatcatcttagtcatctgaacctgactgcatagagaatggagtactaacttaaaaaaaatgaataaagcccctgctgkctactaaccttagaatatagttttttcagtcattttcttgtgtcctgcttctttcttcatatccatttctctctcttattgaccctttgctccagcttag

SEQ ID NO: 176070 - DNA, 201 bp, Homo sapiens
tgcactccatcctgggcaacaagagcaaaactccgtctcaaaaaaaaaaaaacaaaaaaaacaaaaaaaaaaacggggtaggaacaactacatctctttayctttactctaaccaaaatacagcacctgggatacttctaggataaaaatgcagtagttattaatactatagaatattaccatttagttggtaataaaata

SEQ ID NO: 176071 - DNA, 201 bp, Homo sapiens
taacacattactgcttcttgtcaccttgggttttttgtttttgttttgcccttgagattttttattccagaagtgagttctggctcatctgtcattagagkaggtatcgaggcaaccatggatcaaagtattaatattttctgcttgccattacttgttcagatatcaagttcctgagtaccagttaattgtaggattgat

SEQ ID NO: 176072 - DNA, 201 bp, Homo sapiens
  misc_feature (1)...(201): n = A,T,C or G
ctggaccagctagagaccctacagaccaggcactccgtcagtgagatggcctccaacaaggtaagccccggttctgctgtcactggtgcccccaggctgcngattcccatgccggcgagccactggtacccatagccccgggaaataaattgagaggttttttaggcttactgcatgttggctattctgctccttagaggg

SEQ ID NO: 176073 - DNA, 201 bp, Homo sapiens
agatcttagagtggcatttggaaaccactgagttctgtcagcttgtcaagggcatgactgccaatgagtaacttaagttgtcagggcctagttccttatgytagaatgggaatatgagcatccatttaatgcagagttgtcaggattaaattcagcatgttggtagaacaccgtgtctggtgcctagtaggcattcataaa

SEQ ID NO: 176074 - DNA, 201 bp, Homo sapiens
gggagttggacaattgttaacatcccagaagacatatttttaacccagttgctgggaagaacatgtgctgaagtataaggatggaatcactgtaattctcyatgggaactcatgaaagtggaacttgccgtttaatattgaacgacactgagcacagagttattgatgatttctaatgcgggatttggtttatttttcaga

SEQ ID NO: 176075 - DNA, 201 bp, Homo sapiens
gctacatgcagatctcatatttccatgtttcaaaattcattttttctttggtgcttacagaacttcaaattgaatttgttataaccaccaagatcagtttkgtttttgtggattggtgtgtgtgtgtgtgtgtgtgtgtgtgtgtgtgtgtgtgtgtgtgtttagctagtggatagcatattagacagcaccgagagtctt

SEQ ID NO: 176076 - DNA, 201 bp, Homo sapiens
tgtggaagaaacgtcagggatctttttggttagcaagcattaaggagtaaggacaactgtaaaaggagccttaaagctttgactacagttcttaaagagtygaattcaggggaagtgagggctgccctgaacaaaagcaaagaacaatggaactttaacttaggggcttcagtaaaactgtttatagttctccccacagcc

SEQ ID NO: 176077 - DNA, 201 bp, Homo sapiens
gatcatagaaaataagttgcctgcatttctatgtctatttacccagctgtcaactgcaatgaacttaactattatgtattggaataaaaatctcagaattytagggttaaaaattttgcctaggaaggggatcaattagctggtgcaatgattttatcttaaagtttccattagtatgtttgatattcacttcttaaaaca

SEQ ID NO: 176078 - DNA, 201 bp, Homo sapiens
tgggtttgaccctggggaaacttgcccatttcaggagaaagagaggagggaagaaggagataaggctctaggaaccttctcctaggctcacttccagtccsttggctactttctagttccaactggaattagaaaaagcgactgttagagatagtgacacctattggtcctgccttgtcatgtgtgtgggcatgttgtgtc

SEQ ID NO: 176079 - DNA, 201 bp, Homo sapiens
ctcctaggctcacttccagtccgttggctactttctagttccaactggaattagaaaaagcgactgttagagatagtgacacctattggtcctgccttgtyatgtgtgtgggcatgttgtgtctatgtattcatttagtcaacaaatttttattgagtatcttctgtgtgccaagcattgtgcatgtacagggcgtagcat

SEQ ID NO: 176080 - DNA, 201 bp, Homo sapiens
tgggcatgttgtgtctatgtattcatttagtcaacaaatttttattgagtatcttctgtgtgccaagcattgtgcatgtacagggcgtagcattttacatragaaacgcatccctgagagcttcttacaatgcacaattcagataaccttaacaaaagaaaacaatgtctgcttactagctagagtagccatgtggcaaag

SEQ ID NO: 176081 - DNA, 201 bp, Homo sapiens
ctgcaatttgaaaatgttaaagaaattctttcttctctacattatcatttctatcattgatctcacaaattgtctaagctgttatttggaacatttttacygatttacgttttttactgatgtacattatttttaaccatttaactatgtgcttatactcatttgagcattgctctgggcatttgtattttgagagatgat

SEQ ID NO: 176082 - DNA, 201 bp, Homo sapiens
actgatgtacattatttttaaccatttaactatgtgcttatactcatttgagcattgctctgggcatttgtattttgagagatgatgttactttcaagtcrcttcccattctggttccacacatgtgttattagcatgatataatatgtcatcatttagtttaataagagtgaaggcataaataaaaggagtaacgtgttg

SEQ ID NO: 176083 - DNA, 201 bp, Homo sapiens
agaataggaagttactattaatgagtacagggttgtcgatttggaaggatgaaaaagttctggagatggatggagataatcgttgtgcaacagggggaatrtacattacaccactgatcagtatacttagaaagggttaaaatgtcaattttacgtgatgtgtattttaccataataaaaaatacttaatatttacctatg

SEQ ID NO: 176084 - DNA, 201 bp, Homo sapiens
aatcgttgtgcaacagggggaatatacattacaccactgatcagtatacttagaaagggttaaaatgtcaattttacgtgatgtgtattttaccataataraaaatacttaatatttacctatgcttagagagagttgacatatagtcatttgataaataaaatttgtaaatgcgtatgcttagataaacatagaaaattg

SEQ ID NO: 176085 - DNA, 201 bp, Homo sapiens
actaattcaagtatcccaaggtttggagttaaaactgaacaagaagatgtccttgccaaggtatgatgatttcaaagatcaggatcataaatattaaatgrtgccctttcatgaattttcacttctagtcttttaaatggatagaaaagtttattaattgggtttttttttttctttttttgaagatgggaaggcatttta

SEQ ID NO: 176086 - DNA, 201 bp, Homo sapiens
ttattttttcagaacacatttttcctttgtacattttagaatgactaagggtctttataaactcagagtcttccagagccataatgttcttttgagatgtrtatatatgtgttttagtgatagttcatgttaatgtaatttaactgaaaattatcattatatcccttgaggcatgtgatatttgaaaaatgtgttccagtt

SEQ ID NO: 176087 - DNA, 201 bp, Homo sapiens
agcatgatataatatgtcatcatttagtttaataagagtgaaggcataaataaaaggagtaacgtgttggttcatcaatatcccacttgtgtgtaggaagsaacattgtaccagtagtccaataaaggactgagagagctgagaataaactcagtttgggaggggagagaagttaatatacaatgcagaaaaagttcaatg

SEQ ID NO: 176088 - DNA, 201 bp, Homo sapiens
ctcagaaaaggcagtgcttgtgcctttcctccctctgcagctgaccactcaggccccaccctctaggctcactccccctgaagttggaacctggctgtacygtggcagtagtcctgggaagggcaaagaagtattaaaaagagtcagtgaggcacccttaagatgaatgggtccctgttgataggggtcagacctagtgcc

SEQ ID NO: 176089 - DNA, 201 bp, Homo sapiens
tggctggggaggcctcacaatcatggtggaaggcgaggaggagcaattcacatcttatgtggatggcaacaggcaaagagagagagcttgagcaggggacytcctctttttaaaaaattagatctcataagactcattcactactatgagaacaacgcaggaaagaccagaccccctaattcagtcatctcccaccaggct

SEQ ID NO: 176090 - DNA, 201 bp, Homo sapiens
ctagtgagagagggtgctgcttagtgacaatgccaggaataaacatgtggttcctttttcgagtccatggtccttcttacacctttataaagtaaaataamccattagattcgggtggcctttatacccaccgtggaagtatatgctttagagaaagtaaatgaagtattaatactaactcctgagtaatagatgtggcat

SEQ ID NO: 176091 - DNA, 201 bp, Homo sapiens
catcacagtgtttatgatacctaaaagttagtgcctaaaaattagaaacaaggacagtgaagttagattgtttaatcctgcatatcttaaagatctaacaytttctagctgttaaatatgtttatcattatactagtaatgtacgtgcaccatttttattatattaattcattgccactgtacaactaaagaggatggatg

SEQ ID NO: 176092 - DNA, 201 bp, Homo sapiens
acaagagacccagccattgccagagaagccctacttcctcatcaaccaccagcaggcagcagcttcatgctgtagttctttttttcctttaatagaataargattgtggccacactttaataattgccagaaatatgtgttcattaagctttttaagaaatgtgatcgaaaaatgctgatgatacattgtgtttaatagct

SEQ ID NO: 176093 - DNA, 201 bp, Homo sapiens
attattatcctaacctgacagtttatgaaagaggtaggaaatctgaagataggaaagccttcaaaatataatactccggacttctcctttgggaattaagraatgtagctccaagcaaggttcatgccagtaggaaagtccttgaatccaactgtattcctagtaagtgtaataaaataaaagaaacctctagaaattgcc

SEQ ID NO: 176094 - DNA, 201 bp, Homo sapiens
  misc_feature (1)...(201): n = A,T,C or G
cctacttcctcatcaaccaccagcaggcagcagcttcatgctgtagttctttttttcctttaatagaataaagattgtggccacactttaataattgccanaaatatgtgttcattaagctttttaagaaatgtgatcgaaaaatgctgatgatacattgtgtttaatagctttaataaaaaactgataaagcatctaata

SEQ ID NO: 176095 - DNA, 201 bp, Homo sapiens
tagaaattgcctcaaaattcccctccagataaggaaaataacacaatatttctcaataatgaggaactgctacaggagttcagtgtcttattctcattaaygttagagtacaatagagaatagcaggaaactgtaaaaactgcagtcccctggtctttttttctaaaaagttagtttgacatatctggagtactgaatttc

SEQ ID NO: 176096 - DNA, 201 bp, Homo sapiens
ctcctttttttctattaatatatcttatattttgggggcaaattataccagtatattaaatctatttacagaataaatataaagttaccttttatattcartttaagtttttttaaaaagtgagtcaattaagaaaaatatcaaatcatggtatagatggaatgctaatatggaaagaattatgaaggtggtgttatgact

SEQ ID NO: 176097 - DNA, 201 bp, Homo sapiens
caaagtccactcctgccagcatcccttccccgctgccctgagtttaaaaagagcaatacttcccaaacctgtctctgatcaaaggaatccccaagggcttyctgagaacaaccacaaaatgactgattcccagactttccagaactgaatgtctaggataaggctcaggatctaaattattaacaaatactcccaggtgaa

SEQ ID NO: 176098 - DNA, 201 bp, Homo sapiens
attaatatatcttatattttgggggcaaattataccagtatattaaatctatttacagaataaatataaagttaccttttatattcagtttaagttttttwaaaaagtgagtcaattaagaaaaatatcaaatcatggtatagatggaatgctaatatggaaagaattatgaaggtggtgttatgactgaagtttcagaaa

SEQ ID NO: 176099 - DNA, 201 bp, Homo sapiens
accttagaaaagtcacgccgatgtgttagatcttttctgttaaaatgtggtgggtaataattataccttcctaattttgaggaattacatgagataatctrtgtaaaaaaattagcacggtgtctgggacatagtaaatgtcaggtcttatttaaaagcatgtggaaagtgcttaatatgttgaaaagtattataaactac

SEQ ID NO: 176100 - DNA, 201 bp, Homo sapiens
aacacatagatagatagatagatagatagatagatagatagatagcgaaacatatagacatacctctgaaaatacaaccagccatataatgtaagcctgtygtgtgttaatgaatgatagggtaataatacattatgttcctgtcctgtagaggagttcgagtattcaatacagaggaccagaatgattggtcccagaaaa

SEQ ID NO: 176101 - DNA, 201 bp, Homo sapiens
aatggttttataagttttgtgaggtctcttgtctgcttggccggtttacagtgctggtctctggagctgatccgcccctttgctttgtaagtctcagcaaytgacgaggctaggctgggcgctgggcttttctttttttttttttttttttttcctttctcactgccctgcggtgttttgaactgccttcttacagacgtc

SEQ ID NO: 176102 - DNA, 201 bp, Homo sapiens
agtgctccttaagctggatcttgaatactgaggatttatataggcatctaatagggaagaggtggtattccaggggctggataaggcagggtaggatgggrtattcatgtggattcgctttattgtatgtttgctggagaggagggtagtgggcattctggaggagtgagcctctctggaacagaggatgtgattatagga

SEQ ID NO: 176103 - DNA, 201 bp, Homo sapiens
tatatatatgtatacacatacatacacacacacatgtttacttgagcattaaaaaaacccaaacggcctctcttcttgtgcctctgcacataaaggccacrggcctcaaattgctcagagggacaatgttttctcaccagtgttgctgtctgcatttctccaccaccaccctaccctcattccttttcagttgacttccca

SEQ ID NO: 176104 - DNA, 201 bp, Homo sapiens
atactgaggatttatataggcatctaatagggaagaggtggtattccaggggctggataaggcagggtaggatggggtattcatgtggattcgctttattrtatgtttgctggagaggagggtagtgggcattctggaggagtgagcctctctggaacagaggatgtgattataggaccagtggcaggtgtgagaaatgta

SEQ ID NO: 176105 - DNA, 201 bp, Homo sapiens
agcctgttataattaaaattttattaatttcaagacaaaatacaaataaccttaaaattaatctatttgtctctttgtaacataggtgtccaaatttaggktttatttaataaaggtgtatactaggttgcttttatttaaggaacagttatttatatgccacgttctagcagaaagtgattatagtatttattcttaagc

SEQ ID NO: 176106 - DNA, 201 bp, Homo sapiens
tatttgtctctttgtaacataggtgtccaaatttagggtttatttaataaaggtgtatactaggttgcttttatttaaggaacagttatttatatgccacrttctagcagaaagtgattatagtatttattcttaagcattattttaaaaaaatgtgcctgcatgaaattgagaaaaactttatatattttcttatgctca

SEQ ID NO: 176107 - DNA, 201 bp, Homo sapiens
tggagttcttcttcttgataattattccgataggattcaggtaaagccttgtttgagtttgctctgtgtgtgtgtgtctgtgcacatgtgcacatgtctgygtgttcagctttgataagatgtatttcttccttctcccaccttatactttcagcaattgtaggcaggatttttatccaaatttttattcctgagaattaa

SEQ ID NO: 176108 - DNA, 201 bp, Homo sapiens
gtcacaaaataatggaagagacatgtattggtttaggctcctgcagcagtagaccccaatataaggaatattagttgtttatttaggaaattcaagaaacmtaagtaaaggagtagggaagtgagacaggaaatggaaggatctctgaaaaaatacacatcatcaagtccgttcccacagagggaaacaggagctcagtcc

SEQ ID NO: 176109 - DNA, 201 bp, Homo sapiens
aaggagtagggaagtgagacaggaaatggaaggatctctgaaaaaatacacatcatcaagtccgttcccacagagggaaacaggagctcagtccccattgytgggttctggaagacagtgtggaacagaccccagagttatcccaactgtgagatgaggaagctggggtgcttttcaccaactcttcatccatcacctgct

SEQ ID NO: 176110 - DNA, 201 bp, Homo sapiens
ttatgtgagtcataaacacaaagttaattttgtttgcatgtgtatacaagtattttgaatgaatgcttctctttgttttgtgtgtttggaaaatttaaacmaaattattattgtttttgtattggtatttaaacatctgaatatgtaacatcaaagatgatattaaaaagtataaagcaaattatcacaaaatcagatgtg

SEQ ID NO: 176111 - DNA, 201 bp, Homo sapiens
tactgtctacagtgcctaacaatgacacaggatgactcagttaaggagaaaaatactccatttatcagcacagaattcttccctttaagctatcatatggyagctaaccttgcctaaccttgcgagtttaaccttgctttttacgtgcatgcacgcgtgtgtgtgtgtgtgtgtgtgtgtgttactaatttctaactgtac

SEQ ID NO: 176112 - DNA, 201 bp, Homo sapiens
aatgctaaatacatctccttgcatgaatcacttcttaccagaattccctttctttccagatcccacctccagggttctgtggtccataccaggcactacaktcctcaggggctacagcctatgagcgtctcatggggctatgaaaccatttgagacctggaaaatgaagtaattgaatacaaacagaaaactgcaaaatga

SEQ ID NO: 176113 - DNA, 201 bp, Homo sapiens
caaggccagtcattggttaaatgagtttaatagtagccacataatttcaaaagcaaaattataaagacccttcccagactgttgatagcaaaaataatctrcgttgtggaaagtgggtccatgttaatatgttagatataagtagtgaggcctaaaaaggtattaaaacatctttgcttaaggtactacctatttgcaaga

SEQ ID NO: 176114 - DNA, 201 bp, Homo sapiens
ggctaacacaatgaatatgaaaaaacttttttgttggcgggggtgggaggtgggacggagtctctctctgttgcccaggctggagtgcaatggcgcaattyggctcactgcaacctccacctcctggattcaagtgattctcctgcctcagcctcctgagtagctgggattacaggcacacgtcaccatgcctggctaatt

SEQ ID NO: 176115 - DNA, 201 bp, Homo sapiens
agatcctacaagtgtttacttgacttttctgggttcttttcacctacttactgattttgaatagtataaattcctggataattaatctggataagtaagtygtcactgtacctctagagaaaataaaatcaaccaaaatatgtttaattctgtgctctgggtttcaagaaaacaaaaatgaataagatatagtcctacccc

SEQ ID NO: 176116 - DNA, 201 bp, Homo sapiens
agagtgggtatttgtctattcctgtctgcatactgtgacttggagatgcctattattttgcttgctaaaatatggaagccaaccttgaaactggcagagargagttaaatgatcagaaggcaatcgtcttcattcagcacgtctgacacatgaaagatcattaggactagcaaatataaacaagatcagggagtggtcttg

SEQ ID NO: 176117 - DNA, 201 bp, Homo sapiens
agagcacataccaagaacatcaagagaactcaatataaattcaatataaaagctactattcaaggccaattatctcttttgagttagaagagcccaatggrgagccactcacgcaaatcaataccctttccttctctcagttggagccagacatctctaactatcctctgaattaaactggatttttaaaatgtttttctg

SEQ ID NO: 176118 - DNA, 201 bp, Homo sapiens
ttgagaaaaactttatatattttcttatgctcataaagctaataaaattagcagattcattgattgcagaattgtttgcctttcttgcatatcttaaattmagatttagtcagttgttatatactatgaaaatattaccttacatattccttgatatctctttaacacttttataaacatttataaacatttcccagggat

SEQ ID NO: 176119 - DNA, 201 bp, Homo sapiens
ttctaacccttcagaaagaaaaaaaaattgtgaagcaatggaaatgtaccatcctgggtattaatgtcattaattttcaatacattttctcacaaaaagtrtaaagaagtctttgcttgaccttacgggaaaaaacaacatacatgtggctttattttgccttttttttttttttaattaatgaagaaatccaagatttga

SEQ ID NO: 176120 - DNA, 201 bp, Homo sapiens
ttatgaaatatacttaaagatatacagcttttagaaatgattaagataccttgaaatatttgatgtatttaaaacataactagaaagacacagagtggatmacagataggtttactctttaaagtcatgaagtatgagattccctggaaaaagccatttgtccactgtacttctaacatgctctgtgtccctggaggagtc

SEQ ID NO: 176121 - DNA, 201 bp, Homo sapiens
tcatgaatccttctaccaaatctatctgtctgtctatatatatttttgaaacagagttgtctcactctgttgcccaggatggagtgcagtggcaagatttmagctcactgtaacctccacctcctgggttcaagcaattcttgtgcctcagcctcccaagtagctggtattacaggtgtacaccatcacacccagctaatt

SEQ ID NO: 176122 - DNA, 201 bp, Homo sapiens
gcaagggaacgagaacttcttttatgcccaggaacaggcagagaatggaatatggcagacaacaagcagaatttcctatactcacagtcctgattattgamttctatgctttcccaaggtcattttgtcttcagccagattccatttcaaggaaacatgaaaatgtttcttcactctataaaatcattgttgaagtagatc

SEQ ID NO: 176123 - DNA, 201 bp, Homo sapiens
tttttaagctttttagggaaagatgctgagcgatatgtataaatattcccaataatactaatactaaacatatagaattgtcaaagtttagataaaggtawagagaatagggcctgagggatattagctaggttggtaaggaagatagtcacaaagaaagcacagtcttaataaaaaatcaatatagattttcttggaagc

SEQ ID NO: 176124 - DNA, 201 bp, Homo sapiens
accaactctcccctgaattatagtactagtacctgaaatagtgtttttgaaactgtcagttgcatttagcattttattttaaaaatatgatacagaattgmgtaaaaaataagagtataaaaccacatctataatatcaaagataaatatggttttataaaattattgatacacccacagacatgcaaacacacacagaca

SEQ ID NO: 176125 - DNA, 201 bp, Homo sapiens
acttcctcaccagcatctatttttttttttttttggtcttttaataatagccattctaaggtaagatacctcactgtggttttgatttatagttccctgawgattagtaatgttgagtactttttacatacctgttggtcattttacatcttcttttgagaaatgtcttcatgtcctttgtccactttttgatgggattat

SEQ ID NO: 176126 - DNA, 201 bp, Homo sapiens
tttttcatttcatattgcaaaatattcattctaaattgtaaaatagatggcaccagtgtgacttgttaaaataaatgtttcattaaacataatttcagtakgtaattgttttcagacttcctagagaaaagtgctcccgttgtatctaattctctttcttgtttaaaatacatcaaagatgagaaattgagctctttttag

SEQ ID NO: 176127 - DNA, 201 bp, Homo sapiens
ctccagcccagcccctggctgactctttcagcagcaaactttttccacccacgtgcaccatgtttcacaactgtcttcatttacttgtactcttctcaccmtctaaaactcgcttctctctcataattgcctggttcactttatctcattttagaggacacctaaaattcaagcccagtccccttcctcaggccgagtcag

SEQ ID NO: 176128 - DNA, 201 bp, Homo sapiens
caaggaatttatatgactgatactattttagtcaggataaattactgtaaaatgtgtccacttttaaccaatggcattctaacatgggataggcaacagcrggctgtgatttttgctctgatactgcaactttgttatagaatagcaagtaactgattggcagctagatcaccagctagctggagaaagcagcttctaggt

SEQ ID NO: 176129 - DNA, 201 bp, Homo sapiens
ttatggccaggcacggtggctcacaccgtaattccagcactttgggagactgaaatgggtggatcacttgaggccaggagttcaggaccagcctggtcaayatggtgaaaccccatctctactaaaaatacaaaaattagcctggtgtggtggtgcatacctgtaatcccagccacttggcaggctgagacatgagaatca

SEQ ID NO: 176130 - DNA, 201 bp, Homo sapiens
tataaactttagccagtaatcgggaaaaactgtaagattttgtttgtaagctttataaacgttacttataagattttaattgaattctaaattaatttctratttgaacctctcccttctcttagctttatatgcttggtcatccctccttaagtaattagcttttttgaagctttgttttttttggtttttcactgtttc

SEQ ID NO: 176131 - DNA, 201 bp, Homo sapiens
gtgtcattcattcattcattcatttgcccaatatttcttgagtgcttcctaagttcaggcactgttctaggtactggggacataggaggatagaagccagkcaaattttgcactcactgaaactttactttagtaggtaagaatctatagtttaaaaaaaaattcacatatgaggcctgtgaagcaaataaagcaataatg

SEQ ID NO: 176132 - DNA, 201 bp, Homo sapiens
aataacaaataacttgtgctgagtggttaccatgcaggtgctgggatacgctttctctctacatcatcatttcaccctctccacactgtttgaggtgtggrtctattgtcattgtctccatgctataaatgagatgaggcacagatgttttttattatctccatgaaacaaatgagagcactgaagcttagagaaggagag

SEQ ID NO: 176133 - DNA, 201 bp, Homo sapiens
aaccaacttggggagaaaaagaaaaaaagactctcaggacaatctttttaaaggagtaacagataatctattttggctaagacagggtagattcaggtagwcagataatagaaaggggagtcccttgtgtatcaactgatgctggaatttgtgaaatcctataaagttttgtagaaaaaaatgttaaattcatggaaactt

SEQ ID NO: 176134 - DNA, 201 bp, Homo sapiens
gacattatgtctttcactacccgtccctctttttgttgtaaactctctaaggcaagtataacctcatctatacattagtatttatttaccacaaggacccrtaagtatttattgatatatcttcctaagtatgtgataatattctaaatagatagtagatttaatcattgggatttatgtgaagttggattaaatagataa

SEQ ID NO: 176135 - DNA, 201 bp, Homo sapiens
ctttcactacccgtccctctttttgttgtaaactctctaaggcaagtataacctcatctatacattagtatttatttaccacaaggacccataagtatttmttgatatatcttcctaagtatgtgataatattctaaatagatagtagatttaatcattgggatttatgtgaagttggattaaatagataacatgataatt

SEQ ID NO: 176136 - DNA, 201 bp, Homo sapiens
tatataaaatagttcaacagcaagattcttatttagaataattttctacagttttatttagggtagtttctatacagaaaaaatacatattttatctcctktctgtgctaggctctggagatgcaatggtgcctccctcccttcctggagcttaccaagcaaaacaaattcactaaataaaattattcctaattgtgtttt

SEQ ID NO: 176137 - DNA, 201 bp, Homo sapiens
aagagcacaaattaatatacaaggtcaggttaaatagttaagtctgctttcctatcccttatacagaagctatccattcaaaaaaaaaaaaaaaaaacttytttttactttttttaatttttaattttggtgcatacatagtaggtgtatatatttgtggaatacatacaaacatacaatgcataataatcacatcatggt

SEQ ID NO: 176138 - DNA, 201 bp, Homo sapiens
attctttgaccataatgaataacagggttttctctgcacagatatgtccatttaagtaaagatgccaatgcagctaaatagaatcactcaaaaacaactcsaaaatgagccagggagagtggagggaaggaaaaggaggaatgcatccaaacatagccctacgttccatgaacactcagtaacatcatcaaaacgtgatgc

SEQ ID NO: 176139 - DNA, 201 bp, Homo sapiens
gtttttgtaggaggattggggtgccaactcattttggaaaccaaacaagtgttagaagttctatttgttttcattcgtcatattaataattcgacactatmcgcctctgagttttagagttgcaggtgacaaggtacattttcttagttttatttaggactttaggaattcttgaattaagattatatattgccatttttt

SEQ ID NO: 176140 - DNA, 201 bp, Homo sapiens
ctcataacctctgtacatcaaaagtgaaaagaacctgtccccttctctctgtatgcaaaattccagagaagcaccaagaaccagaagaagatgaaagattyggaagagcacacattttccagcctgccagcctgggtttaatttcactttcccaaatatttacttggtaaattcagaaaaatcactggacctccaggaacc

SEQ ID NO: 176141 - DNA, 201 bp, Homo sapiens
tatcccttatacagaagctatccattcaaaaaaaaaaaaaaaaaacttctttttactttttttaatttttaattttggtgcatacatagtaggtgtatatrtttgtggaatacatacaaacatacaatgcataataatcacatcatggtaaatgggtatgcatcacctcaagcatttatcctttttttatgttacaaacaa

SEQ ID NO: 176142 - DNA, 201 bp, Homo sapiens
tctctttaacaatagaaaattagactaattaaagtcataaaagatgttgctcctttataagccatagagaaacccccgatggtttctttatttggatctgygatctttaaagcatgtgactagcagctataattggattaaagtgaaaacatgtgattgtgaaggagttaaagtacctttgccttattctgctttgatagc

SEQ ID NO: 176143 - DNA, 201 bp, Homo sapiens
tatccattcaaaaaaaaaaaaaaaaaacttctttttactttttttaatttttaattttggtgcatacatagtaggtgtatatatttgtggaatacatacaracatacaatgcataataatcacatcatggtaaatgggtatgcatcacctcaagcatttatcctttttttatgttacaaacaatccaattttaccctataa

SEQ ID NO: 176144 - DNA, 201 bp, Homo sapiens
ctccactgcactccagcctaggcgacagtgagaccctgtctcaaaataaaatccaattatgatcatacctctctcctgttgatgtccatcagagtctgcartgccttcagggtaaagtttaaacttccttctagaaacaatgttctgcggtaaaatgaccagggtctttggtattagatacacctggcctcaaaaaatggg

SEQ ID NO: 176145 - DNA, 201 bp, Homo sapiens
tatctacttgaatacagatgtcttgttactatttctggaaaatattcagtaacaaatttttctctgaaatattgttattaaattttcttaaaaattgtttytaaccttctttactagagctcactataaggtagtctttagtttaagaacttcaacactctctgattttggtttaccattttcatttgtgcaaaatgaatg

SEQ ID NO: 176146 - DNA, 201 bp, Homo sapiens
tggtgcatacatagtaggtgtatatatttgtggaatacatacaaacatacaatgcataataatcacatcatggtaaatgggtatgcatcacctcaagcatktatcctttttttatgttacaaacaatccaattttaccctataattgcttaaaaaacatacaataaattgttaactatagtcaccctgttgtactatcaaa

SEQ ID NO: 176147 - DNA, 201 bp, Homo sapiens
attcagtcattattcagttattagaaaataagatttacaaggcatccatggaggggaaaacaattacacacctggttagttgggctgaggcttgcagagakaaaatcacctgcacactgttgcagagccagtgctccaacctagacttccggacaccaaagcctatggccattaagcactctgctggactgtatcttggat

SEQ ID NO: 176148 - DNA, 201 bp, Homo sapiens
ttttgggtttttaaacctattgaacttatctttggatacatattttaagttttccttaactgtaaatgtgtttatgttcactagaaacaccacatgatttsgcagacatggaattatgtaggtgaaatcagcggctttcaattagggctcgataatattagatatagtataacttttatggcattcacacatactcttcag

SEQ ID NO: 176149 - DNA, 201 bp, Homo sapiens
acaatccaattttaccctataattgcttaaaaaacatacaataaattgttaactatagtcaccctgttgtactatcaaatattagctcttattgattctayctaattacatttttttatacccgctaagtatcccacccttccctccacgctaccctacctaacctccggaaactgtcttctgctctctatctccttcgtt

SEQ ID NO: 176150 - DNA, 201 bp, Homo sapiens
tatagtttcatataaattttaggattttttttctatttctgggaagaatgtccttggtatttttatagggactacattgaatctgtagattgctttgggtrgtatgaacgttttaacaatattgatccttccaattcatgaatgtggaatatctttccatttttttgtgttctctttttttccattagtatttgatagttg

SEQ ID NO: 176151 - DNA, 201 bp, Homo sapiens
ggtacaaaaaatgaggatgaaagaaccctgaataacaacctagagctcatatatttggagccatgaggaaaagtattccatgtaagttgaaggaagatagyagtcaggagcattggtgttgaagaccaccctcactatgagaaagggtcatatatataatgtggaatgaatcagagctaccactgtgggtcccctgttgga

SEQ ID NO: 176152 - DNA, 201 bp, Homo sapiens
acctagagctcatatatttggagccatgaggaaaagtattccatgtaagttgaaggaagatagcagtcaggagcattggtgttgaagaccaccctcactawgagaaagggtcatatatataatgtggaatgaatcagagctaccactgtgggtcccctgttggaaaaactgcaattttggataattatgtgcaagcactag

SEQ ID NO: 176153 - DNA, 201 bp, Homo sapiens
agaatatgactattttaagactattaatatatgttgcaaaaaatacttctctaaaggttataccaggttacactccaagccacactgcttgagagttctcrtcttactgtgctgctgcaggaaatgtttttcattaaaaaaaatctttatccacatattaggttaaagtggtatttcagtgttgttttacttaacactttt

SEQ ID NO: 176154 - DNA, 201 bp, Homo sapiens
tctctctcataaaatagcattaagtggttccaaacatatcttaggttataattgaaattggactctgtggaacaaaattaatgatggtttgttctcaaagrcccattgtcccgttgattttatcagttattctttgttaataaggtggtaatgtggtcttaagagcttccactactgagagaatccaaggaatcatagata

SEQ ID NO: 176155 - DNA, 201 bp, Homo sapiens
gtttagctacattttccgtatttgtgattttttaacctagctcttaatctgtttggaatttatcttaatataaggtagggatacaagtttattttttcccrctatacgtctcaggaccatttgttacatgtgccctactttgcttattgctttgtgtcacagataaaattttatgtatcatctatcatgtgtagacacctc

SEQ ID NO: 176156 - DNA, 201 bp, Homo sapiens
aaagggtgagcaatttttctgtgcataggtcttttgtctctcattggtcaaagtttgctccatggtacccttggccctcccagagtccctggggaatacaragcctttgtccatctcacgtgtagctggatggttcctgtcaagtcagaggccattgcccacgctaagcccgcaaggatggggaggtggaaaacatgaggc

SEQ ID NO: 176157 - DNA, 201 bp, Homo sapiens
gttaactgcagcaggatggtgtggtgctgggctcctgaatctgtttctgcctaaagtcatatctgtaaagatcaaggaggaggagccagagcagcaggtgwggttcaagtgattaataacactggaaaggagaacaggttgcagaaactatggctcaggctacctattcagccattttcattttttgtaatgcaagtgcct

SEQ ID NO: 176158 - DNA, 201 bp, Homo sapiens
taaaagtgtgtacacacatgtgcatatacacacacacactgtgataatgtatctgtgtatttgagggttataaatatttagttgtagagttctgacaaagyagtaaaatagtctcacttcatctggataaagatcaccatctggaactataaaaattgcaatgattccaaattgttgaatagttggattgcatatttactt

SEQ ID NO: 176159 - DNA, 201 bp, Homo sapiens
tcaagcttgtttttaataaacttcaaagaagatcaaaactagggatcatctgtttcatgtctttgacgtgatagaagtttggggcccccgttttgccctgyagcttttgcctaaggagaaagccacccttttcagctgatacttgctcccacaggtttttcacaatttttgagtagcgagtggcaagaagcaatatgacga

SEQ ID NO: 176160 - DNA, 201 bp, Homo sapiens
  misc_feature (1)...(201): n = A,T,C or G
tttgccagtgcaatacatgatgtagatcatcctggtgtgtccaatcaatttctgatcaatacaagtaagtaaactttattttttcagaacacatttttccnttgtacattttagaatgactaagggtctttataaactcagagtcttccagagccataatgttcttttgagatgtatatatatgtgttttagtgatagttc

SEQ ID NO: 176161 - DNA, 201 bp, Homo sapiens
atggtacccttggccctcccagagtccctggggaatacagagcctttgtccatctcacgtgtagctggatggttcctgtcaagtcagaggccattgcccasgctaagcccgcaaggatggggaggtggaaaacatgaggcaattgcagtgataaccgctgctttactggggctgctgtggcatgcctgggaaactgggaga

SEQ ID NO: 176162 - DNA, 201 bp, Homo sapiens
aatagcttggctcacctgtcatctccactctttggcacaccattgagaagtctaatatgtgcaaagaaaagttaattttactttcaagggttatacctttkcttattccaaagaacggtgggggagtgtaccagggccattattataatgtatattattaaactttttacattttaactgatttctcttatagtaaaatta

SEQ ID NO: 176163 - DNA, 201 bp, Homo sapiens
taacagagtccccatctggtgatatgtttttacatcagatttattaagatcagagcgggttttaactagagcaatgacactgctattattaaataagagayggaaggcctaatacataattgtctatttctttctagacatttatgtgtttttattaggataatgaatacagaattatcaacatcatgatcatagtttttt

SEQ ID NO: 176164 - DNA, 201 bp, Homo sapiens
gccttaagcaccatgaaggcaacatacaaattgctgtgagagcatataaccaactcagaaatcagccttaaactgagacctaaaaaggactccccctgtgycttttgtatatttaaggcatcttttttatattctagaaatacaatatcattgagcagatagattccaaagggccatcttctagctggatgaaatagaaaa

SEQ ID NO: 176165 - DNA, 201 bp, Homo sapiens
agagacggaaggcctaatacataattgtctatttctttctagacatttatgtgtttttattaggataatgaatacagaattatcaacatcatgatcatagkttttttggtttttaagtagtatctgtaatggcaagctcatttttattttataacctacccacacacagacctacagtgaagcaaaacagatgctgaaata

SEQ ID NO: 176166 - DNA, 201 bp, Homo sapiens
atttcagacaaagggaactacatgtacaaagtcacaggcatgtagaaaaagatgaatgtttcggagtaacttacagtatgtagggcgcaaacagaggaaayggcaaggaataagactatgtgagaaagcaagttagggcgaccttattaaaaagtttatagacagtggcgcaccgccaaagatgtagaaatgtggcttgct

SEQ ID NO: 176167 - DNA, 201 bp, Homo sapiens
acttgaatgaggcagaagggctattcaggaatttaaagttgactaaggtattgattgggtacaaaatttttactaggtaggtaagggcaggatgattccaytagaaacaagaactttttctccagtgctctgggaagaattgattggttcagggctaaatcaccaagatgaataccttcttttgattcacacacccttttg

SEQ ID NO: 176168 - DNA, 201 bp, Homo sapiens
gaatagatgtcattgtgtccttcaaacaaagctgacactgtagaaaagaaatggattgccttgtctttttaccagtgaacatcttcacctgaacaaaactyatcaggaaaaataaaggattttcgaagtgtagttgttgtttaagcagatactagttattccatccttacaaatattttatatataatatatacatttata

SEQ ID NO: 176169 - DNA, 201 bp, Homo sapiens
taaaaccagcatctgccccatctcctcaccattcgcgaccagaatgtgatgcacgtctaccaaaaagagagtagcaaaaggtgatttatagaagcagttayagtcctctgaagagaaggcaaaactattggggatagggaaaaagtaactataaagatcatatttatataatcgaatattaacttaatggcttgaattagg

SEQ ID NO: 176170 - DNA, 201 bp, Homo sapiens
tttttacaatgtgcctgggattgtgctttgcagtttagtggcattttctgattcaacctcacagagccctgcatggtataatattgtctacatttaagatragaaaagcaagatgtggagaggctaggaaatcttcccaaaggcacgaagctcctggcagaaccaggatttgaggccaagtatcaaggttacagtacagat

SEQ ID NO: 176171 - DNA, 201 bp, Homo sapiens
tctcctcccaacctcctatttctttttctttattaaaaaaaggagaggaggtgcatgctgccatctggggtgaatatgggcttcacgtggggacctgggcrctggttctgatccagagagtgagctaggagcacttacacaagagggtcttagccactgtgtcgggggaatagccttatatcaaagactgaagccttttag

SEQ ID NO: 176172 - DNA, 201 bp, Homo sapiens
ttagaagtaaacagataacagtttcctggctgccttcatgtctgtgagcctaacacggctcccagaaggaaaaaatatgcctcaaggaggcttatatgatwttgcttatttagggaacctttgaccacttatttacaatatccagttacagctgtgctactttcctttttgggcaaaagcacatattcgcttgaccattat

SEQ ID NO: 176173 - DNA, 201 bp, Homo sapiens
ataacagtttcctggctgccttcatgtctgtgagcctaacacggctcccagaaggaaaaaatatgcctcaaggaggcttatatgatattgcttatttaggraacctttgaccacttatttacaatatccagttacagctgtgctactttcctttttgggcaaaagcacatattcgcttgaccattattttggaggaagctg

SEQ ID NO: 176174 - DNA, 201 bp, Homo sapiens
gatattcatctggcacataataggatatatatgaccattaaaatgtatgtatatgtatatatatatatgtgtgtgtatacatatattatttctaaattttkaaaatttttatttattattttttgagatgaagtcgccctatcgcccaggctggagtgcagtggcacaatcttggctcactgaaacctacgtctcctgggt

SEQ ID NO: 176175 - DNA, 201 bp, Homo sapiens
atagtaaaaacgagaatcattttactcaatctggttcatgtagcagtatcaggctgtgaaattcatactgctcagacactggttctccaactgtgatgtamgtaagaaatactgtgcctgctgtctcttaaatgtagagtcctgatcttcatccctaagaccctgattcatttgctttagataacactgagagctaatcat

SEQ ID NO: 176176 - DNA, 201 bp, Homo sapiens
ccaatactcccattaaaaatataggtgggctgcctgaactgagaaggttgtgtcatggctgttagttttaataactggaaggcttgacagagataattgcrttagtgcttcactggcctcaagatgcatgcaatgagtaaaattaagaccatcttattaaaataccaaagcattgtataggaaactcccatgtattcaaag

SEQ ID NO: 176177 - DNA, 201 bp, Homo sapiens
tacctactattccaaatgcaaatgacaaggtcccagtttactgttgatcctatattacaagagtcatcaattttggttgagaaacacaaaggacaaatatytcattattgtgctaaccatgcctattattagttttgtgcccccataacataagtaatagccccaaatacatggcacttatcacacaccaggcataattct

SEQ ID NO: 176178 - DNA, 201 bp, Homo sapiens
taacaaaatgactgcctcccacaaaattaagaagcaaacatataatgaggacttactctgtgcacacactggtgaggacacgttacacatttcatatcacygagttcacacacacacacacacacacacacacacacccctatatgagggcagtatgatttccccatgtgataaagaaggaaagggaagctcagacagatt

SEQ ID NO: 176179 - DNA, 201 bp, Homo sapiens
ttttgctccttttgtgcaatattatagttgtaaaattcatcaatgttgtatgtagctgaggattgcacatcataatatatatcatgatatatagcattctrttgtataaaggaaccacaatttactgtccaatcttctttctttatgcagttgaacatatccagtttggaaatattatgaataaagatatttcgaacactt

SEQ ID NO: 176180 - DNA, 201 bp, Homo sapiens
ctgatatgtttaagtaaatttaaccagatagttgttttctgtatctccctctaagtattaacaaacatttaccatacactataaagcattacaatattgtyaggatgattaacaagagtaccaaaatgaaggactcttgctaaaatccttttccagctttttcattctactatttacagacatgtaagcacatccattcat

SEQ ID NO: 176181 - DNA, 201 bp, Homo sapiens
agacattaaaataagcatttgtctttcattcaagctttatgaaggattaaaagtaatccaattgttcaatccttcatttaaatctttagtccaaagaacaraagatttgggattgagtcgtaatccagccatttaaatctatgagactctaggcacatcattgccctccttcctgagcctcagatttttcttcagcaaata

SEQ ID NO: 176182 - DNA, 201 bp, Homo sapiens
cagctctgtaggaagaagccaagagcagaataagcatagatgtggtttggattttatttttcctcttgtcaaatttaacttaagttctgaattctataaaraaagaaaaagagtggtgaaacagtcatattttaagatttttaaaagtcttaaagacatggaaaaagcaaagacgatacctacactgcttatttaaaaaaa

SEQ ID NO: 176183 - DNA, 201 bp, Homo sapiens
ggaatggataggtatctcttttctatgacctactctatcaccctcaggatctattaatcctttgagtttgatctctaaggtggcaatgaaatatttcttayaccagaaatacactgaaactcagagaaagagggctcaaatttgaggagagtgctatactggcaagaggatgccccaggtaatatcctttccttcttctag

SEQ ID NO: 176184 - DNA, 201 bp, Homo sapiens
caacgtgtcagggattagaatggacaggaagagtctctgtaagaggagggtgtgatgctggagcaatttatgaaaattgggtcccctggtaactgtagtgsatgttatacagacagtcctgcagagtcatccacgaggctgactcactgacaatgtacacatagaggtgggcctcgagtgtgtgcaaataacaagtttact

SEQ ID NO: 176185 - DNA, 201 bp, Homo sapiens
taaacttcaagtaaaacaatttttggttggggctttctggttgccttagtcaactcaggccgcataacaaagtaccctagactggtggcctaaacagaaaygttctcacaattctggatgctgagaagtccaagaccaagattggctgatttggttcctgttgagggctctcttcctacatacagatggctgctttctcac

SEQ ID NO: 176186 - DNA, 201 bp, Homo sapiens
actctgtcctcacatggtgaagagagaatgctcttgtgtctctctctgttcttataagaacaccagcactattggattagggcctcatccatatggcctcrtttaacatatgaattctaggggaaacaagatagatttaacctcaacctcaacctcatgtaaccattggtgattaaggcttcaacatatgaattatagggg

SEQ ID NO: 176187 - DNA, 201 bp, Homo sapiens
cgtgtctgagccaccagatccactccttctgtggttcacacgctattccctctatcccagccaagcttgcaaactctgatcatgaactaccaggtggaggsggggcatggatatcctccccaggaagcctgtctggaacctctgaacttttctgacctgtgcatgcctctaccacagcacaccttaatttcttttgaaatc

SEQ ID NO: 176188 - DNA, 201 bp, Homo sapiens
agttacattagagaaatgacttcaattttttttagcttcagtttccttagcatacaatgggcaccataataactatcttgaaaagtcagtgtaagagttcmaaagaatatatacaaaagagctagctaatatagtatctgacaatagtaggcactgtatctgttgttattgctattatttgggttttaggtcaaacttcat

SEQ ID NO: 176189 - DNA, 201 bp, Homo sapiens
gcctacgtggctaaaatgtctttttaccattcggttgtaatttataccagacacttcaagtttgatggatttttataattcttagataactgtctatagcrcacatttctgtatcataaaaatgcttaaattatatttacagtttttgtggtataatacagacatgaacattctgaagttctaattagaagtttaggcttt

SEQ ID NO: 176190 - DNA, 201 bp, Homo sapiens
agaacataaccccctacaccgtaagtgtgagctgtgcatattgacttccttctaaacagtacagtgtagaaagggaaaaaaaagaaactgtagtggagaawcctatcactacttcagccaggttatcaaggtcaacattgacagtgataagtgataacatgtaccctcgatatgatctgatgaaaatggcacttttaatct

SEQ ID NO: 176191 - DNA, 201 bp, Homo sapiens
tggagggataaaaccttagtgggaagcagacagcagatagagaagatataggataaactcacggaaggtgtaagcaggttcatgattttaaaattagcctrttaagaggttgtgttggaggtctgttttcttagtgggggcaaagtggcaagggaagtttcacttctgaatagggtggaaaatgaagatataaggaaagaa

SEQ ID NO: 176192 - DNA, 201 bp, Homo sapiens
gagccacagcgccctgccaacctaaaggcttttcacaactgggaattcactgaatgttgtatcattaaagctaatgtggaccttggataactgtatgcctrttttctgggaaataatggtggagctctttgaaagggtaaaaatggtgttttatcatacataactatgcctgaggtttttgttttgcatttatctttgggc

SEQ ID NO: 176193 - DNA, 201 bp, Homo sapiens
ctaggtgtgcatattgtccttattttgtagaagaaggtactgaatcttaaagagataatgtgttttcaaagcttacagagtccaaatcgatagctaaacartgtctgtgggatttgaatccccctgtgatgttcactgtgtgttgccatatactgcaaatgtgttataaaataataattataataaacaaaattaacctga

SEQ ID NO: 176194 - DNA, 201 bp, Homo sapiens
tgtattgtttgtattttgtattttatacattctagtaagtatgtagtgtggcatctcactgtggttttactttttgtttccctaatgtctaatgatggtcrtggatcttttcacatgcttattgatctttttgattcttatgaagtgtttgtttgttcaaatcttttgaccatcttttcactggattgtcctcttattgtg

SEQ ID NO: 176195 - DNA, 201 bp, Homo sapiens
gttggaaaaacatatttacagctgctcaagataatgagttttccctcttctgtttatttgatggattatttcggagccactgttatttgatcacagattcwaaagtgatccatgaaacatcttccaatcttagagtcataactctatttattaatgactccgataaagaaaataaaggaatgttttaaaatgagctagtta

SEQ ID NO: 176196 - DNA, 201 bp, Homo sapiens
agaacccaactactttttacgtataagtattaaatatttttacatggttttaatccacaccaaattttctagtaatgcagcaatagtgtatattgtgaagrtggcactttgttacatttgaaacctttcaaagaatcattcatcatatcaggaaaaaggaaaatttttctaacataacacccctgtattcattttcatgct

SEQ ID NO: 176197 - DNA, 201 bp, Homo sapiens
agtgtttgttgagtgcatgagtgaataaccattctaaaaaactctgatgtttaaagccctttgctttatataagaattttacttggaaccctggtattttygtttgtatttgtttgttaataaatgtcaagagttcagtagtaagataggtttcagaaatgctaagttaaacagaataaagaaagaatatgtattacaggt

SEQ ID NO: 176198 - DNA, 201 bp, Homo sapiens
actcccaatgtggcaagtagaaatgttcaatactttgtaaggcctcagtttataaagcagtatcatttgtgcccacattctgttagccacagcacataatrtgactaaacccaatatcactgagggaggagagcatgaggaagaaaaggatggtgaatatatgctgcaatgcctaaaacataatgtaaatatagatagcat

SEQ ID NO: 176199 - DNA, 201 bp, Homo sapiens
gcaagttcattgtccacttttaatgaccctcaacttctaatgaggtaatatatgtgaaagtgatttttttaaatgcaatgcaaatacagggtgtttttagycattatttcagtacctgaggaaaatgtaaaaacacaaagccacacatgtaccaaggcactacatgagtgtacttggtttcaccatctaatttagccctct

SEQ ID NO: 176200 - DNA, 201 bp, Homo sapiens
caagaacaggttgcctggggctagtttagcgatggggtccaaacgatctcactaatgtgaaaggatcatagttaccttaccaagggaaagttggcttcaaytatatatttcacttctgtaccaggttttgcttaaatgctactctttggagaatatcaagaaatttagatgagtttaccaaatccaagattgtgttccctg

SEQ ID NO: 176201 - DNA, 201 bp, Homo sapiens
tttggaagaacatatctcagactgagaaaagctggcgctaaagtaagctagcatttgattagaatgttgaaggataatttcattcttggagacagaaaacytaagtagaagcaaaagaagtaggaaatagaagcctgtgtttgagagattcagagtgactgtgttttattagaattgcaagaaagggaacttgaaaacata

SEQ ID NO: 176202 - DNA, 201 bp, Homo sapiens
atttttaatgtaacttcccccttctcgatatatccagaaaatagttaataacaatccctgagggaaaagaaaaatgctgcccttcatattaaaaaaaagargataacagagatccccttagtggtgagtgatttatagtgaaaacagccaactcattctcttttgcctccttttgacctagagaactggattcgcggattt

SEQ ID NO: 176203 - DNA, 201 bp, Homo sapiens
cttaaatccagcagatcaagaaaaactccccaaggagtctttaattagaactctttaggatggaatcaaaatctctccataaaaaatgaatcttgccttargctacataaattacaaaatctgaagccctttaagcagcattaaaactgctgattttaattgctctgataatgaactggagagagacacactaagcttcct

SEQ ID NO: 176204 - DNA, 201 bp, Homo sapiens
tgctactaaggctgggtcttggaagatggagaaggccgtagaagaaaggaaagccaaaaaaagaaaggaatgagattttgatatattaattagctcatacyataagcctggacttttgctaggcattttccatggtaatttggttatacctcaaaacaattctcaacattattatcactgccaccacttctgttagcagct

SEQ ID NO: 176205 - DNA, 201 bp, Homo sapiens
tgaaccccgggggacggagcctgcagtgagccgagatcacaccactgccctccagcctgggcgacagcgagactccgtgtcaaaaaaaaaaaaaaggtggrggggggggaacttatgaatgcctttcacttataccagcatcattaaaaatttaagttttttaagaaccatgaaaagctaaccattgacaatttaagaagc

SEQ ID NO: 176206 - DNA, 201 bp, Homo sapiens
tttgtacgttttggctgcaaacaaccacaacccagtctttaggttttcactgagggatttttgttttagcccaattattgtatgacatgtatctgctccaraggttcttataggtgaaatgagatttttatgtatctgtattcaaacacatagatagatagatagatagatagatagatagatagatagcgaaacatatag

SEQ ID NO: 176207 - DNA, 201 bp, Homo sapiens
ctaattattattatagaaatgtttattgaacatttactgtgtggtaagcacatttttcagcacttaacattattaatttattgaatcccaaaacatcactmtatgtatgtgctgttatctccattttacagatgaagaggccaagggaaagtgaagtttaataacttgcacaatttcacacacctagtatgtggcagagct

SEQ ID NO: 176208 - DNA, 201 bp, Homo sapiens
tagaaatgtttattgaacatttactgtgtggtaagcacatttttcagcacttaacattattaatttattgaatcccaaaacatcactctatgtatgtgctrttatctccattttacagatgaagaggccaagggaaagtgaagtttaataacttgcacaatttcacacacctagtatgtggcagagctgaaattccaaccc

SEQ ID NO: 176209 - DNA, 201 bp, Homo sapiens
tgaagaggccaagggaaagtgaagtttaataacttgcacaatttcacacacctagtatgtggcagagctgaaattccaacccaaacttccatcagagagtraaatccaagttcttgtacatttcatacaagggctctgtgatctgctgcctggctcgttaccacccatgattctgaatttcctgccttccatggcattctc

SEQ ID NO: 176210 - DNA, 201 bp, Homo sapiens
ctagaatcaccgagcttctcgttgcagctctgtatctgcttctttctcatctaggcagctgctctgcctccttggcttcatccctctctgctggctcccaygggctcaatggcctccttgccacttcagtgcaccaggcctgctcctaccctgggccattgttctaggaaagagcctttctgggcttgacctcagaagacc

SEQ ID NO: 176211 - DNA, 201 bp, Homo sapiens
aaacaatggaaaaatggaagggcaagtgagcacatgcaaaagagaaaacatgaggggctgggctcactttataacaacccactcttatgataactaacccmctcccaccataacagcattaattcattcatgagtgtgaagccctcctgacctaattacttctcacaggcccccacctcttaatactgttgcaatggcaat

SEQ ID NO: 176212 - DNA, 201 bp, Homo sapiens
ccatttatcaattttggcttttgttgccattgcttttggtgttttagacgtgaagtccttgcccatgcctgtgtcctgaatggtaatgcctgggttttctyctagggtttttatggttttaggtctaacatgtaagtctttaatccatcttgaattaatttttgtataaggtgtaaggaagggatccagtttcagctttct

SEQ ID NO: 176213 - DNA, 201 bp, Homo sapiens
atttaggaagccgtgcaaagatagattgcacttttttggccaggctaaagcctgaaacatcttggatagtaattttcagaaaggatcctatagtatctctmcatagtttatcccattgtctaaaacactgtcagggctagaaattcttgctggtgtttaacctaaactcttttccacctctgatttcttatgctttcccct

SEQ ID NO: 176214 - DNA, 201 bp, Homo sapiens
ctctgctgtcagctgcctccgggctcagtgatcccaggatttgtgacacaactaccctgtagtaaaactctaagttgactagaattttcatgtggaagtgygtaatgttaaatgaagtagactctgatgaaagaaagagaaaacaggaaaacccaagcattatgctggatccctggagaaaccctcacttcattcagacta

SEQ ID NO: 176215 - DNA, 201 bp, Homo sapiens
tgtaatgttaaatgaagtagactctgatgaaagaaagagaaaacaggaaaacccaagcattatgctggatccctggagaaaccctcacttcattcagactraggagatatccctgatttgaaaatacagaggcgggagaataacttgaacccaggaggcagaggttgcagtgagccgagatcgcgccattgcactccatcc

SEQ ID NO: 176216 - DNA, 201 bp, Homo sapiens
ttggatacctttgactttccacagaacttttatttgtaattctcttaactcttagtacaatattttgtgtctctgttttattgttctgatgaggtcttctrcagtgtttttagcccaacccagtgagtgtctggtgccttagaccacttggccatcctgacaccctacacagtgagtgtcaatataacattttgtagttag

SEQ ID NO: 176217 - DNA, 201 bp, Homo sapiens
atctaagatctccataagggtaagtgataattgggttttgataaatcataaggaatcttctactagaaatatgtctgtttatttattgtacatcaggaaamgattagtttactttatgccagaagataatgtttgggcctaaatcttaatttttctatctagtgttaatacagtagaatgcctaaaggatatatagaagaa

SEQ ID NO: 176218 - DNA, 201 bp, Homo sapiens
tgttctggtcctattgagttcacccaggagaggcatcaaactctgcaatcagaacatatcaacacatggcctattagctgattctgccacttggtagctgyatattctctctctgtttagtgtccttatctgtaaattgaaataataataatagctcataaggctttgtggggattaagtgagataatcatgtacagtgcc

SEQ ID NO: 176219 - DNA, 201 bp, Homo sapiens
gacctggccctagttcctaggaggagcatgtgccctctaacatgtgcacagaaggataatagggtcagtgggatgaggagaccaagtgactaaagcagatstgagaatctgagctgtaaaggatttggaggtgggatggagggataaaaccttagtgggaagcagacagcagatagagaagatataggataaactcacgga

SEQ ID NO: 176220 - DNA, 201 bp, Homo sapiens
cagaagaatgcaagatattatcacgggaggcaacatttttgggatatcacatattagtggaaacttaaagaatatttgagaggttatctttgacatttacrtaaaaccatgtatgaaacaagtagttcttgtgtttttttaacctatgaactttttcaagtgttttctccacaacattcctctcttctaccaaagaaaatc

SEQ ID NO: 176221 - DNA, 201 bp, Homo sapiens
aactttctgtagagtgtgccagtcaatgcaaaagtgctcatcaagagagaattaaaacattagcaaataggggctgttgatgaaaatgagattccagagarggtgagaagactgaacacattcctgtaaagcaacagggattaatgcaccaatgagaattgcttttttttttttaaacaaaacaaaacaaaacaacaaaaa

SEQ ID NO: 176222 - DNA, 201 bp, Homo sapiens
gatggaactggaggtcattatattaagtgaaataagccacacacagaaagacaaactttgtatgttctcatttgtgggaggtaaaaatgaagacaattgawctcatggagatagagtggaaagatggttatcagaacctaggaagggtagtgagtggcaggggtgtgggagtggagatggttaatgggtacaaaaatatat

SEQ ID NO: 176223 - DNA, 201 bp, Homo sapiens
tgattacatgtttaaatactaatactgtgtatagggttaaataaaacatatttaaattaatttcacctggttgtatctaagtgtccatcagccaattaacrgataaagaaaatatggtacatacacacaatggagtactattcagccacaaaaaggaatgagatcctgtcatctgcaacaatatggatggaactggaggtc

SEQ ID NO: 176224 - DNA, 201 bp, Homo sapiens
aaaaatcccttggcttttgtggtgtggactattataagggactctgatgcttcatgacagggagtaatttgatccaaagtacaacggagctctcgtgtggwtttaagttaccaaactattgaagggacccatgcaccaccaagtattcaaatcacaatataatttcattattctctaccctcccttgcaaatgtaataact

SEQ ID NO: 176225 - DNA, 201 bp, Homo sapiens
aaaaaagaaaaagtatgtaatttttacgtaagagtcactcgattcatatcatgaagcttgtgctaaaaatggaatcattcagtgatcatgggctgcttttmaagcatttttcgctcaccctttaccattatgacagtaaactttggggaaaggggaaggcatgggccaatacatcttttagtatttcttggttatactaag

SEQ ID NO: 176226 - DNA, 201 bp, Homo sapiens
cataaacatcttaagctaagaataactgtgagattaattttttattttcaaagaaataatacaaattttaaatcttgcattaaaaggaaagctagctggaygaaacttttctgacacacagattttgagaatagcacccataaatatgcttccaatgcttgtcacttgatccctttttggcaattaacttgcctttaattg

SEQ ID NO: 176227 - DNA, 201 bp, Homo sapiens
attacattgtttcacactatctcaaaactttttatacgtagaaaatactaaagcaaagaaaaatggaagttaaaaatcggtagcagtagtaatagtcctayagtaggaaccttgttttgtttgaaatatgtgtctgtgtctgcctacaaaacataaacatcttaagctaagaataactgtgagattaattttttattttca

SEQ ID NO: 176228 - DNA, 201 bp, Homo sapiens
ggaacagtgagagaaaggcaagcttgcaagatcatgagaggaaaacttgtgggtccttaaattggccaaaatggatgcgcttgctttgtgcccatcaaaayggggtctcctcctgctcccagcactgtctcctttattctcatcacaattcacagacgctggtagctttgtgatagagatgatacactgttgttcaggatg

SEQ ID NO: 176229 - DNA, 201 bp, Homo sapiens
aaatacagaggcaaagaaagtagcagaaaggccctggaagctctctgagtcccctagcaggccatccatgcctggcatcacagggatccatccagagggcmgccagagccagaggtgcaaggggtaaaactctacagggagaagaaaatctctagctgaagtttgtaacaatttgaatggggtgagaagcctcctggccag

SEQ ID NO: 176230 - DNA, 201 bp, Homo sapiens
atggatagcaaaaaaggaaaacaatgttaattccttttagaaaatacccttgtgttataacttaatgtacgcttcagaattatctttaggaaattccttakaccgtcttcctagagtagagaagtaattgcttcaaatattgtcttttataattatgttaaaatgaaatgttgacttccttggagtcccttataagccttg

SEQ ID NO: 176231 - DNA, 201 bp, Homo sapiens
atttctaaatttggcacagctcctcatcagaatgaccaattattgctctcttactgggacttttaccccctgctgtagcattaggcacctttattctcatytgagtaacaaattcttagttttataaaatatagtttgttttcataatttgattctcaatagcagtagacatatgctgaatatgtccagtgtcctaactgc

SEQ ID NO: 176232 - DNA, 201 bp, Homo sapiens
tttacattcttagaattggggaagctatacagagcaggtattttatatttaccatttaaaattattaatatctttaagcttgttaagggggaaaaaaaagmttcaatctgaaactttaattcacctggcaaggtttaggcagttgtttgtccatctaaagtatatatttacatagactgcggggtggaggaagtagaacaa

SEQ ID NO: 176233 - DNA, 201 bp, Homo sapiens
ggtgaagatggaggaagggggcagtttacttagctactgggaaatcacttgaggctcaggctttgagaaagttggagtgcaggggagaggagccacagaamgccgaacctcagaggggactcccagcttcattgtaaccaatgattgaaaagatggcactgaacaaatcccagacacaatggttatgcatctttaatccac

SEQ ID NO: 176234 - DNA, 201 bp, Homo sapiens
ctattagtccctaaatacccagacttcataccttcttgcttcccactctcctcatatctaatctctcccttaggtttagcaacaaaatgtgcagcttgacrtggtcagtgggtgtctgaacatttagtgctagtgtttcctctcatctctctgcttttatttggacttctcaactcttaaaagtaattttaacatattata

SEQ ID NO: 176235 - DNA, 201 bp, Homo sapiens
aaactaaaatgataaagaggaaagatggattgtgaatagagtaaatatatattactgtaattatgttaagccaatcaaatgcaaaggacagttcaaagggracaagtatgtaagccacattccaaaaaaaaaaaaaaaaaagctttgaagtgaagctttaaaaagataagctttgtgttgagctaaagaaataaactctat

SEQ ID NO: 176236 - DNA, 201 bp, Homo sapiens
tttagatacgcagtagttcttctgtttgtcatgtggtatatgtttgaattgtgcttgaaaaatatatggtaattaaatacattcattgcaaataaattatygggccaaattacttatactgatttatggattccagttagtatgttgcacataaagtttataaaattaatttgtggctgtttctaaaaatctatactactt

SEQ ID NO: 176237 - DNA, 201 bp, Homo sapiens
atttattaagcaaggtaatttcttacctcagtgttttcaaaccaattggtagatttcaaaatcaatttaaggggtcacaattaatactttaaaattaaatwaaatagaaaacatcagagtgaatcatacatagtaaggataaatgttatttcatgttaaattatgtttcaattctctgtattggctcgaatatatatttac

SEQ ID NO: 176238 - DNA, 201 bp, Homo sapiens
cgggtttgtctcaaatacttggcctcaagttatcctcccacctcagcctcctaaagtgctgggattacaggcatgagccatggcacatggctcaaattatwtaattcattagctggtaatagtgtaaatttggaagagaaaaactaaaatgataaagaggaaagatggattgtgaatagagtaaatatatattactgtaat

SEQ ID NO: 176239 - DNA, 201 bp, Homo sapiens
cattgcaaataaattattgggccaaattacttatactgatttatggattccagttagtatgttgcacataaagtttataaaattaatttgtggctgtttcyaaaaatctatactactttaacctgacgaggaatacgtttttttcacctttagctataaagccctaggtgacattaaaaattgacattacttaactatgta

SEQ ID NO: 176240 - DNA, 201 bp, Homo sapiens
aagagaaagagtttgaaagcaaaagactgagaacaagagatagacgagggtgattacatgtaggaagccacacccaggccagtattactgtttgaatctcrtttggaaataaatattcttatctgatagaaaacaagcatacttactgattattcactcacaaatatttgctgagtgcctgtaaatgtcaggaattttcta

SEQ ID NO: 176241 - DNA, 201 bp, Homo sapiens
gaatgtattattttatttacttattttagaggcagggtctcactctgtcatctaggctggagtacagtggcatgatcatcactcattgcagcctcaaactmctaggctcaagggatcctccagccacagcctcctgggtagctaggactacaggtgcaccctaccattcctggcttaaaaaatatatattttagagtctgt

SEQ ID NO: 176242 - DNA, 201 bp, Homo sapiens
tatactactttaacctgacgaggaatacgtttttttcacctttagctataaagccctaggtgacattaaaaattgacattacttaactatgtaagtgataytaaagtgaaaacttgattgtctattatacttgcaaaactgaacaaagtttttattacactgttttgtgaatctcaagaaatgaattaataaacaattcaa

SEQ ID NO: 176243 - DNA, 201 bp, Homo sapiens
ttttctgtattatcatgacagcacatggaacaaccacaggcagaaagattacaaactctgcaataaatataaaggtattggttttataaggtggcctgcargctacggaccagcacagagctctggcaaatgtggaatgccaggagatgtacaaaaaaatcaaggtgacaaaagaagaaaagacactccaaactgccaagg

SEQ ID NO: 176244 - DNA, 201 bp, Homo sapiens
gcaaaactgaacaaagtttttattacactgttttgtgaatctcaagaaatgaattaataaacaattcaataagattgtgtccatgcttggcaggctttttscatgccctgtggtaacattagcattgtgatcctgtctccacaatagaaggaggtagaaaaaccttattcagtcctaaatgaaacatcacttcacagattt

SEQ ID NO: 176245 - DNA, 201 bp, Homo sapiens
gctcttgcatttctgcaggtccctcatgtatccaaaggagattacgcattcagccacgacaatgtactgacaataatgaaaaaaggtacatatcatataasttaaaatttttatcataccataatacctcaaatgcaccatgagtcactctatatatatacagacacatatacacaccacacacaggcacatgcacgcaca

SEQ ID NO: 176246 - DNA, 201 bp, Homo sapiens
tttggtatttgagccactcgcttgaacctgggagccaatcacaacacattttaaaagattcattttctgttactctgaggatttttcagattggagtgttygtcgtttgctttgtttctttctttttgaaggacaagttcccctttgttttagagatttacttgaattctaaaaaaattagaaaacttatttcagtcttgg

SEQ ID NO: 176247 - DNA, 201 bp, Homo sapiens
tttatcagagttaagaaatgtttctagggaatagaaaatggacaagataattgatctttgttgtcagagtcatgcattgtaattcactctctaaggtgacrcagcatctccttgagggcaaagctgccaaaagttctgaaagtgatctgcctgtttttttttctcacactgacttttagagaggcgctggtattttcaaga

SEQ ID NO: 176248 - DNA, 201 bp, Homo sapiens
acaagttcccctttgttttagagatttacttgaattctaaaaaaattagaaaacttatttcagtcttggttgtccaagtagtcatgattccttacctcccyttaaatctgtggatgattcagatttttaaaaatgtttttaaaatatatagacttccattatttgaattttgttagccatttcttggctaaaaatcttcag

SEQ ID NO: 176249 - DNA, 201 bp, Homo sapiens
tgatatgaaacctgtagcattcttaagaacccctggtgtcctggatgctgttgtgaaaacaagcataatgtttaatgtcttgagcttttattgaaattatrtgaatattcaagactcccttggtgtacaagagacagattgagctttagaggtctcaaaatttgcagatatggtgatgttcactgagctcaactcttggtc

SEQ ID NO: 176250 - DNA, 201 bp, Homo sapiens
aaaaattagaaaacttatttcagtcttggttgtccaagtagtcatgattccttacctccctttaaatctgtggatgattcagatttttaaaaatgtttttwaaatatatagacttccattatttgaattttgttagccatttcttggctaaaaatcttcagaaatgcagaaaagtatagagagtaaatataagaagccctc

SEQ ID NO: 176251 - DNA, 201 bp, Homo sapiens
aagccacattttgagaaagagtgcattttggaaatatagcatcttagaagtgatcttagaaagtgaaagattggtagtaacctgctgtgagcagtacaagraaaataaaactgagttattcctgtgggactacagctgactctcaggtccagcctggcctggagagcatgtgcttttctgctcttccctccatactcttag

SEQ ID NO: 176252 - DNA, 201 bp, Homo sapiens
atagcatcttagaagtgatcttagaaagtgaaagattggtagtaacctgctgtgagcagtacaaggaaaataaaactgagttattcctgtgggactacagstgactctcaggtccagcctggcctggagagcatgtgcttttctgctcttccctccatactcttagttagtggtcagcacatgataataggatgtaaggga

SEQ ID NO: 176253 - DNA, 201 bp, Homo sapiens
aaggcctcccaatgactaccaaaaaaaaagacactttccgcttcccattgtcagcacgtattctgattgaatgtatatgtttactacttgaagttctcatkatttctaggtaattactgcaaatatggacctcatactgctactgcaggctttgcctcaagagtccaaataccatggcctcatgttagggccatttgagat

SEQ ID NO: 176254 - DNA, 201 bp, Homo sapiens
gaattaattgagttatatgtagtaatatatcttggctattactgccaaagtaatagatatatactgaagtcttaggagagatagagggataaatgttagtyataaaaagttgttaaagcagagggaaaaagaagtgaaaactgaccaaacatatacgtaattcattgtttctatgacaagcctgctgcaattcgaactcta

SEQ ID NO: 176255 - DNA, 201 bp, Homo sapiens
tgaaatataatgtgtggagccacatcctgttagatttgaagcctgagtctgaaaagctttgggaacttggtgaagatggaggaagggggcagtttacttarctactgggaaatcacttgaggctcaggctttgagaaagttggagtgcaggggagaggagccacagaaagccgaacctcagaggggactcccagcttcatt

SEQ ID NO: 176256 - DNA, 201 bp, Homo sapiens
ttagccaaaactttcctgaattattttccacattaaaaaataacaactgaaatataatgtgtggagccacatcctgttagatttgaagcctgagtctgaamagctttgggaacttggtgaagatggaggaagggggcagtttacttagctactgggaaatcacttgaggctcaggctttgagaaagttggagtgcagggga

SEQ ID NO: 176257 - DNA, 201 bp, Homo sapiens
gatgctgttgtagcaggggccttcaaggctcaatttatttctcagttgctgttccatagccctctcccagcctttagggagtttagccaatagtttttgcktgggtgtttttctctgtttagttccttgacttagcaagatttggtgcagttaaagagttttcatgtatttttaaggagagccacagtgtatactactctg

SEQ ID NO: 176258 - DNA, 201 bp, Homo sapiens
ttaggaggatcgctctgtctgcaatataaagaataaatgtgggtgggtggctggagaagtagcagggcacatcattaaaatatcaatgtttcaaagtcggsttattaaatcaattttacttgctctatgtcatagaaacaataaataaagacagaaacaccccgcaacactaccttgggtatttttctttgcttgcttgtt

SEQ ID NO: 176259 - DNA, 201 bp, Homo sapiens
tacccagtagcacactggcgtgatgtagaagtaaaggagattacatttaaggacattttgttttattattttagtttgcttcctgaacaatcttaaatgcstaatgtaaattgaagaattgcagttctgaaaagcaaaatacagtattgagattcaactgcatttttactttcctttatgccttaactgctgtacacagac

SEQ ID NO: 176260 - DNA, 201 bp, Homo sapiens
atgaagtaacaaagcacagaaaagttattttgtcaaggtttctgtcttgtagcaaatacaaactttctggtgttaaacatatgaccctgatttgggtcttkactgacatcatcacttttttttttttaattttctgagacggagtcttgctctgttgcccaagctggagtgcagtagcacaatctcggctcactgccacct

SEQ ID NO: 176261 - DNA, 201 bp, Homo sapiens
tacatctagctatgcactccaaaaccaatttgtgagatcaactaccagttgagaaagcacttatggtaatttttgtggttattcatttagctttgctggaytgaaacttttatatggatagcaaaaaaggaaaacaatgttaattccttttagaaaatacccttgtgttataacttaatgtacgcttcagaattatcttta

SEQ ID NO: 176262 - DNA, 201 bp, Homo sapiens
gatagcaaaaaaggaaaacaatgttaattccttttagaaaatacccttgtgttataacttaatgtacgcttcagaattatctttaggaaattccttatacygtcttcctagagtagagaagtaattgcttcaaatattgtcttttataattatgttaaaatgaaatgttgacttccttggagtcccttataagccttggta

SEQ ID NO: 176263 - DNA, 201 bp, Homo sapiens
atttagttttgtttttccctattcaaaaatgcatcttttctctcttgacctctgttacaaagtcaataatgacagcatgtgttaatgtatcagcagttcarctccatcagcagaatttcaaatatcctgaaatgtactgaaatagttcaaaaagattgttaattgcttgggtatctggtaaggactgagaaaacaaggaat

SEQ ID NO: 176264 - DNA, 201 bp, Homo sapiens
cagtgctgggattttgtcatttctgtgtacattcatatctgctattatatgttgaatgttttaacttaatgtattttttattaatctttaaaatttatttrtcaattattcttaattgacaaatattaattgtatctatttcttgggtataatgtgatttttaaaatgtgtacatcatagaaagatttagtaaagctaatt

SEQ ID NO: 176265 - DNA, 201 bp, Homo sapiens
agtagcacaatctcggctcactgccacctccacctcctggattcaagtgattctcctgcctcagcctcctgagtagtgggtataacaggtgcatgaccacrcccagctgttttttgtgtttttagtagagatggggtttcaccatgttggccaggctggtctcaaactcctggcctcaagtgatctgcccacctcagcttt

SEQ ID NO: 176266 - DNA, 201 bp, Homo sapiens
ttttgtgtttttagtagagatggggtttcaccatgttggccaggctggtctcaaactcctggcctcaagtgatctgcccacctcagctttccaaagtgctrggattacaggtgtgagtcaccacacccggccaacatcatcacttttgaatgaaatttttagtttggtgatgactttattatttgtatttgatccttgtcc

SEQ ID NO: 176267 - DNA, 201 bp, Homo sapiens
aaatgagggagttagagggggtgatattaaagttactttctatttctctcagtcttttaaatatttggattcagattacgggaggggtaatggtaaggaayaaactgaaagaaacagctctggataaaagatagggcttgctaacaaagttgaatgaaggagggaaggtgatgccgtataggggaacatgccgggttactc

SEQ ID NO: 176268 - DNA, 201 bp, Homo sapiens
tcttctaagttaattacatgattcttttttcagttttgcttcaatgtttctgtttgccaaattttaattggcaagttatggtgttcttcaatgattatgcyttggtgtgatttgcttggatgtgtgtttagagagtggagggtagaagggatgagatttttgtgaaatacagtgagcaggggcttagaaaacctactgcag

SEQ ID NO: 176269 - DNA, 201 bp, Homo sapiens
gagagtgagtactccttcatatgtttagtagatatttgaattgtatttgtttttgttgttgttgtagctcttcatgaaaagtactttctaaacagcatttytgagcaccctttagggagccaaaggccaaataagttagagtatttgtcacaacatggcaataagagaggcgaattcatccattaattgcttgccatatgc

SEQ ID NO: 176270 - DNA, 201 bp, Homo sapiens
attacttataatacttataaaggagatacaaccaaagagaaaattaaatgttttaataaatatgcaacccttttgagttttgaaagattcaaatccactgyaatctatataaaaaattaggagacatatttccatggattcatttcagattgatgatgtgccttgtcaagatgacttagtcctgaaaaaaataaactttat

SEQ ID NO: 176271 - DNA, 201 bp, Homo sapiens
ggatggaatcactgtaattctctatgggaactcatgaaagtggaacttgccgtttaatattgaacgacactgagcacagagttattgatgatttctaatgygggatttggtttatttttcagacacggagatgacttgattgtgactccatttgctcaggtaagcacagcttggtgaatgggcaggtttctcacagatgta

SEQ ID NO: 176272 - DNA, 201 bp, Homo sapiens
attttactttatggaactttttattacaaagaattaaaaaaaaataaaataataatacttaaaagaatactttgactattattttatcacctaaaggcttytcttattattttatttttggagacagaatctctgtcaccccggctggagtgcagtggcgcgatctcagctcactgcaacttctgcctcccgggctcaagc

SEQ ID NO: 176273 - DNA, 201 bp, Homo sapiens
agaagatccgagagtagtgtacgtaaataacattgaatccttccccatgggctaatacatgaaccatctttgtctaaaatttttctgtaaaactaccagtrtttccttcctaaggaatatatatttctcatcattcccaatgtaattttgacattgactggctatacttctgcttggtggggcagaagagaaagaaatgac

SEQ ID NO: 176274 - DNA, 201 bp, Homo sapiens
caatattttactttatggaactttttattacaaagaattaaaaaaaaataaaataataatacttaaaagaatactttgactattattttatcacctaaagscttctcttattattttatttttggagacagaatctctgtcaccccggctggagtgcagtggcgcgatctcagctcactgcaacttctgcctcccgggctc

SEQ ID NO: 176275 - DNA, 201 bp, Homo sapiens
caaatcggcttctttgggtatcagaatagtaggattcaatctattcacggctaaactcgattctgttcagtgagaacaaagtgctgtaactctgcctcatsacatgatgaccctgggagaatcagaacctttcctgctgggcactcacagagccactagaacatttccaagctcatccttggattttatggaaggcatgtg

SEQ ID NO: 176276 - DNA, 201 bp, Homo sapiens
tttaaggtcttctctatgctggttattctagttagccatttgtctaatcttttttcaaggtttttagcttctttgcgatgggtttgaacatcctcctttasctcggaaaagtttattacccatcgtctgaagccttcttctctcagcttgtcaaagtcattctctgtccagctttgttccgttgctggtgaggagctgcat

SEQ ID NO: 176277 - DNA, 201 bp, Homo sapiens
tcttgaggagtatcttcgtggcattctctgtatttctggaatttgaatgttggcctgccttgctaggttggggaatttctcctggataatatcctgcagaktgttttccaacttggttccattctcccatcactttcaggtacaccaatcagatgtagatttggtcttttcacatagtcccatatttcttggaggctttgt

SEQ ID NO: 176278 - DNA, 201 bp, Homo sapiens
atcctgtgtccaagtgttctcattgttcaattcccacctatgagtgagaacatgcggtgtttggttttctgtccttgcaacagtttgctcagaatgatggyttccagtttcatccatgtccctacaaaggacatgatgaactcatccttttttatggctgcatagtattccatggtgtgtatgtgccacattttcttaatc

SEQ ID NO: 176279 - DNA, 201 bp, Homo sapiens
tactgaccgtgaggcagcagattcctatggactacattaaaaaaaaaaaaaaaaaaaaagaacagactgataatctagggctcagaaaaaaaaaaaaactrtgatatgaaacagtggcaaaaggattcaaaaagaatacagcggttgggactatctacttttttaatttttttattacactttaagttctagggtacatgt

SEQ ID NO: 176280 - DNA, 201 bp, Homo sapiens
tcaaggagaaactgcctgagttgcctggattattttggcatttttaatatgtacaagaaaaatgttatcaaataaatgtaaatttaaaggtcctgatgagmgtttactttctaataaaacaattttcaacatttcccattacatcagaaactaaattattattaaaacacatcttgtgttcatttatttttgacaggctgc

SEQ ID NO: 176281 - DNA, 201 bp, Homo sapiens
ttaattccaaatgaaatctcaaatgctataaagaaacccgccaaatgggttacagcaaagacttttttacaccctactgttatgttcagaattggaaaaakctggggatttggcaaattccaaaatgttgggtcatatgaaaacttttttttttgagacagagtctcgctctgtcgcccaagctggagtgcagtgacgtaa

SEQ ID NO: 176282 - DNA, 201 bp, Homo sapiens
agttagtgagaagataaaagaaaaagaaaaccgtcacaaaattgcacacatctttcctttggaagctttatgaagtactaaataaagttttatatattttrtacaattttaaaatacttcaaaacaataatttgatgccagaaatacacttggagatgagagcagcttgccactagcaaactctgcttaaacctattacat

SEQ ID NO: 176283 - DNA, 201 bp, Homo sapiens
aatggcctgtgttctctaagtgaacttcttcagaatgaatccctgttcattccttgaaattcttttttctttctaactaccctaaaaactgttccaggtawctattaagtttctggaccccgaggttatacctaggtattagttgataggctcactaaaattaatagaatgtttgcatttaagttagagacttgagtccag

SEQ ID NO: 176284 - DNA, 201 bp, Homo sapiens
agtattggatgggaatatggtaggggtaggagtggagataagcagagtgagtgtaaatatactccagaactttctatttattaatagctttatttctgagratacctcaatttcaaatagaaaacatgtacccctgaagaacagttgagctaaactcacagaattccaggatcatggtattggatgggatccttgacaagt

SEQ ID NO: 176285 - DNA, 201 bp, Homo sapiens
ttgactttgtctatgaaagtcaagtgaatactttgaaagaattgatgatggataaggcaagtacattgatttctcaaggtgtgaattgttatcttcaaacyttgtgcttccataattgttttttctttaataatgagacatctagaccataactggctatgtgattctgaatctacctttacaacttaatctttgtgattc

SEQ ID NO: 176286 - DNA, 201 bp, Homo sapiens
tgaaactaatgaagatcaagctaagagcttctcactggcctggttccctttcaagttgtaagaagtggtactagcagctgcacgtagttttaggttttgtraaattcaaaaaactaagatttttttgtattatttttctgaaagcagacccttataattgtataatcttcgtgtaccacaaaaccttgatcccacccctga

SEQ ID NO: 176287 - DNA, 201 bp, Homo sapiens
tgtgcttccataattgttttttctttaataatgagacatctagaccataactggctatgtgattctgaatctacctttacaacttaatctttgtgattccmctatataagatatctagagtagtcaaattcatacggacagaaagccaaatggtgcttgtcaggggctgggagaagaggagaataggaagttactattaat

SEQ ID NO: 176288 - DNA, 201 bp, Homo sapiens
tccttaggcagaatggtccgtggatttagagcaccctactatagacagcctgcctgaattggattcattctctgccttttaccaaacgtaaattgggccaygttgccttctgtgcttcagttttctcatctgttaaatagttgctgtggtgatttaatgaattaaaagatgggaattgtctcgactgagtcaggaatcata

SEQ ID NO: 176289 - DNA, 201 bp, Homo sapiens
agcagaatcaaaagccacttagcaatgtgcaagcattagtgtatgttttcaaggtgattcgacagtagtttttcagctaaatgaatttgagcagctagttrctttccctaaaatccatattcttaatgttgagatctatgtttggatttaaaactgaatgtgaaatttaataatgtattgtaaatgacttcagctgtcaag

SEQ ID NO: 176290 - DNA, 201 bp, Homo sapiens
atgagtaaaattaagaccatcttattaaaataccaaagcattgtataggaaactcccatgtattcaaaggggaaagaagaaaaaggaatttcatatttacrgagcatgtactattttcaaaactctgttctaggtgctttcacattcattaactcattttaatatgtgagtgctttgtaatcctttttgagtgttgcaggc

SEQ ID NO: 176291 - DNA, 201 bp, Homo sapiens
tatcacatgaagctgctgtacattacaacacattctaggaaatgctgtcttagacaaaaacctgtcatattagaattggggtaaggggcacgatactgacygtgaggcagcagattcctatggactacattaaaaaaaaaaaaaaaaaaaaagaacagactgataatctagggctcagaaaaaaaaaaaaactgtgatatg

SEQ ID NO: 176292 - DNA, 201 bp, Homo sapiens
ctgagaaaaccagtttgaggttggcagagtagaagaaggagggtattttaggccgagaatttggtaagacagagatgggattgtcagctgtatggtgaagrtggaggaatactagtctttcaggaacagagcaaatgtaatagagcagctgaaaataggcttggcgttggggattaaggtcagatatggcagtctggaatt

SEQ ID NO: 176293 - DNA, 201 bp, Homo sapiens
ggaataaatcttacactacgtgtatttttaagtgttgcagtcatccaatgtgaatttctagttttttttttgttttttttttttaaaaaaaggaacaggartgaatagagaatgcatccatctattttaggttcttcagaatatggtgcactgtgcagatctgagcaacccaacaaagcctctccagctgtaccgccagtg

SEQ ID NO: 176294 - DNA, 201 bp, Homo sapiens
gcagccccacagacacacacgctcgcgcccgcgcctcctcgtctgcacttcaaagcgagtggcgcccggctgcgccggggggatggcactgcgaggtggcrgggcccccggggcagagctcgaggggaaggacgcggcgggtggcacggacagggacaggcttttgcaattcggaatcttttcgtaagggggttgaggagg

SEQ ID NO: 176295 - DNA, 201 bp, Homo sapiens
tcccaaacataagcgtgtctcactatatggcagggctgtctgcctgtgggcacctgcttcctcaccctgtccagagatctgaccatggtgatagtaaccaygattctttaattcaaggcactgtaaagttagcaaaaagattgaggataaacaaatccactcctagattcatactgtttatcatagagtttgcatcagcct

SEQ ID NO: 176296 - DNA, 201 bp, Homo sapiens
ctgtttatcatagagtttgcatcagcctaattatatgatgagctgtcatacaccattaagagcaaggactgggtttgcatttcaatcctgtcacctatggmgcaagttattgaatatgtaagaaggtccatcttttcatgttaaaatagggataatatttatcttatcagaatgttgccaagattagaaatgaggtatgta

SEQ ID NO: 176297 - DNA, 201 bp, Homo sapiens
aacaagtatttaaaatgacaggacaatccatctgccacccgtgggaatggtagaaaataagggatattcatggaaggctgcttttgtacagtctcacaaasagcagcccttagacctaagaggacattgcctatcagtcttctcagtgtagaggaagaactgtcagggccagggagtttgggatgagagaccacaaaaggc

SEQ ID NO: 176298 - DNA, 201 bp, Homo sapiens
cttttctggcctcaaagatcctccaccctggatgaggagtcaaagttgaagacagttgaaaaaaatagaacagtgattcttaacactggggaacattcagraaatttcaggggacagtgactggggagtactcctggtgcttggtgggcagaggccagggaggctagatgtcctgggatacatgggacagcctttcaccag

SEQ ID NO: 176299 - DNA, 201 bp, Homo sapiens
acacattctaggaaatgctgtcttagacaaaaacctgtcatattagaattggggtaaggggcacgatactgaccgtgaggcagcagattcctatggactayattaaaaaaaaaaaaaaaaaaaaagaacagactgataatctagggctcagaaaaaaaaaaaaactgtgatatgaaacagtggcaaaaggattcaaaaaga

SEQ ID NO: 176300 - DNA, 201 bp, Homo sapiens
tgaagacagttgaaaaaaatagaacagtgattcttaacactggggaacattcaggaaatttcaggggacagtgactggggagtactcctggtgcttggtgrgcagaggccagggaggctagatgtcctgggatacatgggacagcctttcaccagggaggtttgctgtgtgtcccacacaacttccaaaaagtcccagcag

SEQ ID NO: 176301 - DNA, 201 bp, Homo sapiens
cataagtccaaggtttacatgaacagggaacttgtctgttttgtttattactgtatcccctatgctggcacatactatgtaataagtgtttgttgagtgcrtgagtgaataaccattctaaaaaactctgatgtttaaagccctttgctttatataagaattttacttggaaccctggtatttttgtttgtatttgtttgt

SEQ ID NO: 176302 - DNA, 201 bp, Homo sapiens
tgtgccagatgaaatcaggtcggtctctctatacacacacacacacacacacacacacacacacacacacacacagacacacacacatacatacatatatmtatacatatatatgtatatatgtaaatgtacatacatgtatgtgtatatatgtgtatatatgtatatatatatgtgtatacatatgtgtgtacacgtata

SEQ ID NO: 176303 - DNA, 201 bp, Homo sapiens
gttttaatccacaccaaattttctagtaatgcagcaatagtgtatattgtgaagatggcactttgttacatttgaaacctttcaaagaatcattcatcatwtcaggaaaaaggaaaatttttctaacataacacccctgtattcattttcatgctactgttacttttgtggtaattctccccataagagaaatcatagcaa

SEQ ID NO: 176304 - DNA, 201 bp, Homo sapiens
cagcttttccttactacttaattttatagtcccccatcaatgtacgatgttaccctcttttccttcattgagagtgtttgtaatttttttttgtctgcttrtttattgtctttttgccccataagtccaaggtttacatgaacagggaacttgtctgttttgtttattactgtatcccctatgctggcacatactatgtaa

SEQ ID NO: 176305 - DNA, 201 bp, Homo sapiens
tttctagtaatgcagcaatagtgtatattgtgaagatggcactttgttacatttgaaacctttcaaagaatcattcatcatatcaggaaaaaggaaaattyttctaacataacacccctgtattcattttcatgctactgttacttttgtggtaattctccccataagagaaatcatagcaaacccttagatagcacttac

SEQ ID NO: 176306 - DNA, 201 bp, Homo sapiens
tgatcctgtctttatgatgttagctggttattttgcccattagttgatgcagtttcttcctagccttgatggtctttacaatttggcatgtttttgcagtrgctggtactggttgttcctttccatgtttagtgcttccttcaggagctcttgtaaggcaggcctggtggtgacaaaatctcagcatttgcttgtctgtaa

SEQ ID NO: 176307 - DNA, 201 bp, Homo sapiens
acaaaatattagggacagaaacatgttcagggactcgattgtataagtgactcagagctgagagaccttttccagcttgactgcagcccatacttagctaragtgggtatttgtctattcctgtctgcatactgtgacttggagatgcctattattttgcttgctaaaatatggaagccaaccttgaaactggcagagaag

SEQ ID NO: 176308 - DNA, 201 bp, Homo sapiens
agagcatgaggaagaaaaggatggtgaatatatgctgcaatgcctaaaacataatgtaaatatagatagcattggatttgacccataagccataaagattytagaataccagtgttcccaactatggagtgcccaatgagcttcttgacaaactcaggagagtaacctccatttgtgtgacctcctttctttgctctttat

SEQ ID NO: 176309 - DNA, 201 bp, Homo sapiens
ccatctgtttggattgttgaggttggaaactgaataatatcacttctccaaaatagatttaatagtagggctggtgaatggtttcctgacctgtttgatgsagagtgcaaacccagaggaaaaacatggtatatgagttttcgtatccattagtctaaaagaatcagaattcggttatattttaaaggcaattatagtaga

SEQ ID NO: 176310 - DNA, 201 bp, Homo sapiens
atctaagcgattcatgacctgcatacattctaaatgacaggaaccacaagcaactcagtcagcaggcttcagaatcggtcatcctaaaagatattgcaggycaatggctaatacactaacaaagaaagagcttatgcaaataagtaaggaaaatactgtttcaatgttaaatcattaaagacaaattcagactactcacaa

SEQ ID NO: 176311 - DNA, 201 bp, Homo sapiens
cctcaaaattcatccatgttgtagcatatgacaggatatccttcttttaaggctaaataatattccattgtatgtatataccacattttttaatccattcrttcattgatggatatttagattgtttccacatcttggtattgtgaatatacataaatgaatatgggaatataaatatctctttgacatgctgatctcaat

SEQ ID NO: 176312 - DNA, 201 bp, Homo sapiens
gggactcagttccttggtattttgttctcagagagatgatgcttcatacttaccaactgttcaataaagtttgttgaattaatatagttaaaagcagatayctttctgttataagttcaaagcctagtgattgaagatttttctttacattatttaaatgtatttattttggtaaaatatttagagcaagtttcattccat

SEQ ID NO: 176313 - DNA, 201 bp, Homo sapiens
tctttgtataaagtcattcactaatactgacattggctgatacttcagactggagattctcggtaatattactttttcttgataattaattttgattatamgaggatttaatatcatggaaataaattatgcaaatgaactcagaccctaggttcacttcccagaacaaaccgtattctgagaatacttgtggtgccaaaa

SEQ ID NO: 176314 - DNA, 201 bp, Homo sapiens
gaacaacagtgtctttacaagttggtgcattataaatacatttccataatttgaatcaagcctaccatctcctcctcatctccaaccacccgccccccccrccccccactttattttctgtatcttcagcaacttccagaaacttctcattcttccttaaatacacatttttgtacctgccatattttgcatgccctcttt

SEQ ID NO: 176315 - DNA, 201 bp, Homo sapiens
ttcaccattcatttcctgtactttgctgtagccagatttaaagaaggaatgtagaggtaaccttgctttgagagatttaattcagagctttaggattattyacctatttttatatcttataatggcctctggactatcctatagcaaaatatactctaatgactcatccatgtagaggactggaaaagtcagggatttcct

SEQ ID NO: 176316 - DNA, 201 bp, Homo sapiens
tcaacctgacaacacatcaaatagctatgacagccttttgaaaatagagattcctggatccagcttcagctttaccgactcagagtatccaaaaggaggcytaagaatctgtatttttaaaagcctctccaaagtgatatgtagcagtaattgaaaaggacaatctctttacttcattgatgaaatagctaagtcccagag

SEQ ID NO: 176317 - DNA, 201 bp, Homo sapiens
tcacaagtatctaagactctcccttgacacattgtaacacattttgaagcttcattttgttttccatttaaattctagagatttcttatttgtttatactwttaattcatatcattgtagaatagtaatattatctatattgtctgattttccaggctgtgtttacagatttggagattcttgcagcaatttttgccagtg

SEQ ID NO: 176318 - DNA, 201 bp, Homo sapiens
ggttttgttattacagtttgacttttgaaatgcgtatgagatttctcaggtgaaatagagcctttgatgtggtactcaaaagggataactatgactcagasgaaccatttctaaaagatggcactctttctccttccagttctttctgttcaatagtagggctggggaaaggcagaggcagtttttgttatttcaaatgac

SEQ ID NO: 176319 - DNA, 201 bp, Homo sapiens
tccttagatttgaaattcatgacacttacttattcattcacacataatgagaatgcttcttgagcaaatatggtgtatttaaagctctgaatctgtggagyagtgaggtctggcattttagaccattgtaataaaatatggtgagcacaatccttgaggcatttatcatgtactgcaggaacagagagaggagatggagag

SEQ ID NO: 176320 - DNA, 201 bp, Homo sapiens
tatttaaagctctgaatctgtggagcagtgaggtctggcattttagaccattgtaataaaatatggtgagcacaatccttgaggcatttatcatgtactgmaggaacagagagaggagatggagagttttccacccaagggaaagatacagaaaataccgggctaagggaacaacatttactaaatgtgaggcatggaaaa

SEQ ID NO: 176321 - DNA, 201 bp, Homo sapiens
tatttattttggccaatgtgttgctgttattaaaaaattgagatattaagggcaccatgtactgagaaagtctgaaaatatttggattagttgtttattcwtatctgaagaattagagctaaatcaggctaggcatggtggctcacatctgtaatcctggcaatttgggaggccaaggcaggcagatggcttgagctgagg

SEQ ID NO: 176322 - DNA, 201 bp, Homo sapiens
acgttcatcacacttatttgtgtttcaaagcagaatccacactccaaaatgtgcaactactgtcttactatggaatttacactgacacattctgaggtcakgcaggaaatagaccagagtaaagcattagcaattaggtcagtagcttgagataatgcaggctctgaggcaatcttcactttcactgaccacagactggga

SEQ ID NO: 176323 - DNA, 201 bp, Homo sapiens
tttggtgccatttattcaatcacttaagtcattttatttctgatttaaaaaaatgggagtttcatgaattgtaaaataagtcttataaattagctaaacawgtttcttcaatccttgaactgggggatttaaaatattagctgaataggcattttatattcctaatctcatactttcaaaaaaatcataaaaatgaaatcc

SEQ ID NO: 176324 - DNA, 201 bp, Homo sapiens
actgccaatgagtaacttaagttgtcagggcctagttccttatgttagaatgggaatatgagcatccatttaatgcagagttgtcaggattaaattcagcmtgttggtagaacaccgtgtctggtgcctagtaggcattcataaaacacattgctctcctctctgtttgatcaagggcttccttttaatctattgaatctt

SEQ ID NO: 176325 - DNA, 201 bp, Homo sapiens
accagtttgaggttggcagagtagaagaaggagggtattttaggccgagaatttggtaagacagagatgggattgtcagctgtatggtgaaggtggaggartactagtctttcaggaacagagcaaatgtaatagagcagctgaaaataggcttggcgttggggattaaggtcagatatggcagtctggaatttacagagg

SEQ ID NO: 176326 - DNA, 201 bp, Homo sapiens
gtcactgtcatctttactgtctgatacctacttatcttcaactttgtaccatttgttgttttaagtgctttgcatatatggtctcatttaatcctcatatrtatctgttctggttatttattgctatgtaagaaatcacttcaaacctaatactttgaaatatgaatgtatttttattagttttcatggctttgtgggtta

SEQ ID NO: 176327 - DNA, 201 bp, Homo sapiens
ttgacaaggaccactgagcattctgttgggcaagtaccagatcttagagtggcatttggaaaccactgagttctgtcagcttgtcaagggcatgactgccratgagtaacttaagttgtcagggcctagttccttatgttagaatgggaatatgagcatccatttaatgcagagttgtcaggattaaattcagcatgttgg

SEQ ID NO: 176328 - DNA, 201 bp, Homo sapiens
gttataataatataggtgaaatttgatggagacctgaatttaaaatattggtagtagggatggaaggaagtgggtacaatagaaattaatgcttggatggwtgttatagggtaggagtgtggagggagaagcccaggtttgggagaacagcattaggcacaaaatgggtatttgttgaatcgaattcaaatatttgatgaa

SEQ ID NO: 176329 - DNA, 201 bp, Homo sapiens
gtgggttaactggtcttggctagacattcttgcttggcattcctcatatggttgcagcccagtgggtagctatctgaaagctgaactggctggatggctargatggcttcttgcccctcaggtctggctctgggctggggtggctggcattgctgaagactggccaggcatgtgtgctctttcttgtgcaagtgctctctt

SEQ ID NO: 176330 - DNA, 201 bp, Homo sapiens
gccaactcagattcagtgtaggacagtgtggctcattaagagtatctttggagactagctgccacagtaatccactttacagatgaggaagctgacacacwaaaaagattatttgtcagtgattgtgcacaaaagatttaaacttgcaattcttgttctcagtaccagagtgaacctgggaaaatcattttttctctctag

SEQ ID NO: 176331 - DNA, 201 bp, Homo sapiens
ctagctgccacagtaatccactttacagatgaggaagctgacacactaaaaagattatttgtcagtgattgtgcacaaaagatttaaacttgcaattcttkttctcagtaccagagtgaacctgggaaaatcattttttctctctaggtctcaactttatgtggaaatgagggagttagagggggtgatattaaagttact

SEQ ID NO: 176332 - DNA, 201 bp, Homo sapiens
catcatcgtgcctgacttttttttttttttttttttttttttgtagaaacagggtttcatcatgttgcccaggctggtcttgaactcctgagctcaagcartccactccccttagcctcccaaagttctgggattacaagtgtgagccaccatgcccagccctgggcttttgtttataaaaatcatctgtgaaaacaaagg

SEQ ID NO: 176333 - DNA, 201 bp, Homo sapiens
attgaagattgtgggcctagggaaaattaaagaagttcaggatcctgggagttgagggagagtagtaggaatgatcaaacatgtggaacacttcagagaartagggagaccagagaaaaggaggaccttagtattcctctgggggtagctttagtggaatgttggagctttaatttcttccttttgtagaggagtaagagt

SEQ ID NO: 176334 - DNA, 201 bp, Homo sapiens
ttgagctgtattttgttctcatttgtttgtgtccagagtcaaattaagtttaaggaatttataaagagcttctttgcaagaatgatattaactcaatgtaytaaagctacattcacccaaagtgtaatagacttacacaacatggaagaaatccaggagaggcagacagttattcatgaagagtggtagtattcctgtctg

SEQ ID NO: 176335 - DNA, 201 bp, Homo sapiens
  misc_feature (1)...(201): n = A,T,C or G
cattttttattaggacattgtatcaaagaggtaaccatggaatacatttgatattattattttgtaatggaacttatttgcttaattttgtgtttgaaganatcaaattaagtccaattcaaatgtaaatactgaactctctaaaaggaaactttttagttggaaacatttcctggaatatataatgatcaattataatcc

SEQ ID NO: 176336 - DNA, 201 bp, Homo sapiens
gtttctgctgagagatcagctgtaagtctgatgggcttccctttgtgggtaacccgacctttctctctggctgcccttaacattttttccttcatttcaastttggtgaatctgacaattatgtgtcttggagttgctcttcttgaggagtatcttcgtggcattctctgtatttctggaatttgaatgttggcctgcctt

SEQ ID NO: 176337 - DNA, 201 bp, Homo sapiens
ctgttaggggaaggtgatagcgcatgtttaactgttgatcactgtttgtaaggcttttcgtgttttttacatatttggttaaggatcttaatccttgagcygtattttgttctcatttgtttgtgtccagagtcaaattaagtttaaggaatttataaagagcttctttgcaagaatgatattaactcaatgtactaaagc

SEQ ID NO: 176338 - DNA, 201 bp, Homo sapiens
tgtaaatagcagcatgaacttttgaatataaaatgctggagggtatatttaacttagctttattttctgaaaaaaagtatcaaaagtacagaatatagcawtaaattttacttggcaaatgaattatttttgttaatagcaaagatgcctaagtttggggcagaaagatttattcacattagtgatgcattcaaagcatga

SEQ ID NO: 176339 - DNA, 201 bp, Homo sapiens
acataggactctccttgacacatagtagaccctcaataaacattaggttttattattgtttattatgggttttagggaacaacacttttgtgaattattaraaccttatttgggaagctataaaagccatctgcgtgatgtgttttcttagtacaccaaatggaagttcatatgttccattcatatacatgcttccctagc

SEQ ID NO: 176340 - DNA, 201 bp, Homo sapiens; identical to SEQ ID NO: 31403

SEQ ID NO: 176341 - DNA, 201 bp, Homo sapiens
tccaggagagtacataggactctccttgacacatagtagaccctcaataaacattaggttttattattgtttattatgggttttagggaacaacacttttktgaattattagaaccttatttgggaagctataaaagccatctgcgtgatgtgttttcttagtacaccaaatggaagttcatatgttccattcatatacat

SEQ ID NO: 176342 - DNA, 201 bp, Homo sapiens
ttgaatgaaatttttagtttggtgatgactttattatttgtatttgatccttgtccatttttctctagatctggtactaatttcatgtggaaaataaatcrttaggaggttttcattttgtacgttttggctgcaaacaaccacaacccagtctttaggttttcactgagggatttttgttttagcccaattattgtatga

SEQ ID NO: 176343 - DNA, 201 bp, Homo sapiens
actcctggcctcaagtgatctgcccacctcagctttccaaagtgctgggattacaggtgtgagtcaccacacccggccaacatcatcacttttgaatgaawtttttagtttggtgatgactttattatttgtatttgatccttgtccatttttctctagatctggtactaatttcatgtggaaaataaatcgttaggaggt

SEQ ID NO: 176344 - DNA, 201 bp, Homo sapiens
tgtcttaaagtcaaaagtacctttgtccttaactcacaccaatatgtatgagactaggatatgagagagattgttacatcttgcttgatgttttgacattwtaggtagtgtaggttttgttattacagtttgacttttgaaatgcgtatgagatttctcaggtgaaatagagcctttgatgtggtactcaaaagggataac

SEQ ID NO: 176345 - DNA, 201 bp, Homo sapiens
gacgtgatagaagtttggggcccccgttttgccctgtagcttttgcctaaggagaaagccacccttttcagctgatacttgctcccacaggtttttcacartttttgagtagcgagtggcaagaagcaatatgacgatgttggtaggtagagagatacttcttcaccatctggtgagcattctggagaacagagacaagtc

SEQ ID NO: 176346 - DNA, 201 bp, Homo sapiens
taaagattggataaaatgcaattcaagtaatattcattcttgaatattgaattaagcaaatatcttagaatatagagcaaaaagccaaggatataaaataygatggaaaagtaaaaaagatatgaagaatgtggtagaagtggaggaatgggaaaggatgtgggaaaataacagaaaaaaaatccttgacctgaagagtaa

SEQ ID NO: 176347 - DNA, 201 bp, Homo sapiens
caggcaagagccactatgcacagcctgaactttaagtcttgacggtggggcatatggtggcaggctgggaagaagaagaaagttgacttctattggagatraccaatacgtgttttccaccacattctaaataaaggtgtgtattaattgatgtgcatttttgaatgagtatcactgttttactcgtttggaaaataacag

SEQ ID NO: 176348 - DNA, 201 bp, Homo sapiens
cattaaaatgtatgtatatgtatatatatatatgtgtgtgtatacatatattatttctaaattttgaaaatttttatttattattttttgagatgaagtcrccctatcgcccaggctggagtgcagtggcacaatcttggctcactgaaacctacgtctcctgggttcaagtgattcttgtacctcagcctcctgagtagc

SEQ ID NO: 176349 - DNA, 201 bp, Homo sapiens
accacattctaaataaaggtgtgtattaattgatgtgcatttttgaatgagtatcactgttttactcgtttggaaaataacagtagcacctactccatgcyagggtatcatttgaagacaccatagatccatgaaagtaagacaaaaaaattgtttggagcatgcattcttgtctttatttaatttttaaaaattcttgat

SEQ ID NO: 176350 - DNA, 201 bp, Homo sapiens
agtatcttttcagaatttttaactgaatatttatatatatgaacatttagaattaggggtaatttttaaaaatcaaaagtgatatactacagatgttattytgtgattgatctttgcacttactatgttttggagattattttattttagtacgtataaatctataccagttttcttaaattgcagcatagtatgtatatc

SEQ ID NO: 176351 - DNA, 201 bp, Homo sapiens
aattcttgatacaaaaggagatgtttccagccaacactgagattcccatatgaatacttgttttcacttacacatcaatcattttaaatatttacttttgsttgtcagtcttagcttcttaatgaattgttctcaatgtctcctttactgttttctgagccatataaggaaaaacagtcacactgctggaacatttatgtg

SEQ ID NO: 176352 - DNA, 201 bp, Homo sapiens
ggaagagcaatgtaagctggggttttcagcacaatggtaggtaggtattgtagttttgggggtgaaggtactcacacaggcaatgagtagactaaaaaaasaaaaatatagagaaagaagaatccaacaaagagattgagaagtagtggctgagaagtaggcagaaatttaggagagtggtgttctcaactccaaggtagg

SEQ ID NO: 176353 - DNA, 201 bp, Homo sapiens
acctacctgatattcatctggcacataataggatatatatgaccattaaaatgtatgtatatgtatatatatatatgtgtgtgtatacatatattatttcyaaattttgaaaatttttatttattattttttgagatgaagtcgccctatcgcccaggctggagtgcagtggcacaatcttggctcactgaaacctacgtc

SEQ ID NO: 176354 - DNA, 201 bp, Homo sapiens
tttatcccttttaccaaaaaaaaaaaaaaaaaaaagaaaaagaaaaaaaaaacatggctactgataatacttgggagcactcaacgaaggtcccgtctgaractctgtagaatatattatagaatgcaaatattctttggattccgtcttgttgttgttgttgctgtttcctaccctacaacttttggcatctctacccaa

SEQ ID NO: 176355 - DNA, 201 bp, Homo sapiens
gtggtattcaaattcagatctgatttcagagaccatcctctcaactgccacactatcttgcctcctacaaattgcttaagcagggatttaaaatgaaaccrtacttttacaaaaatcatttttcatgtccattatttaggagtctctctactctatcaaaagtattaattgacctatttattaatatcttagtaatgtaaa

SEQ ID NO: 176356 - DNA, 201 bp, Homo sapiens
tagacattcttgcttggcattcctcatatggttgcagcccagtgggtagctatctgaaagctgaactggctggatggctaggatggcttcttgcccctcargtctggctctgggctggggtggctggcattgctgaagactggccaggcatgtgtgctctttcttgtgcaagtgctctcttgcgctttctctcttcactgt

SEQ ID NO: 176357 - DNA, 201 bp, Homo sapiens
gtggctggcattgctgaagactggccaggcatgtgtgctctttcttgtgcaagtgctctcttgcgctttctctcttcactgtctgtgaagttaacatggayttcttgtagcatagcctctcagagtagtcagacctttttttttttcaacctaatggcttaggggtcccaatagcacattcaaagaaagcaggatgagagc

SEQ ID NO: 176358 - DNA, 201 bp, Homo sapiens
gatgtctgatttggaagctggccagagtggagggccccttcagctcaaggccattattggatgggggttcaactgggggaccttttggatcccagggcagyccctcttccagtgggacttatctccagcttatcacaaagagggcaggctgtgtggggcttcctcccatttggcccatttggaaaattccttctccagtag

SEQ ID NO: 176359 - DNA, 201 bp, Homo sapiens
gtctggagccagcagtactctctgtatatatatttggttctaggtatgaaattctctgtcttggatttggatactttgtaccttacattttgctaggaagkttaaggtttgtactgcatattgttgtgcaagctttatggagggggagcagatgagtaagccatctacatacagcagaagttgtccccactcaagatatag

SEQ ID NO: 176360 - DNA, 201 bp, Homo sapiens; identical to SEQ ID NO: 31390

SEQ ID NO: 176361 - DNA, 201 bp, Homo sapiens
tggaacctcccccagctatacctactttattggatttttgtgtctccatcagctgacatggtacttacagcctagaatgagcatacaaaggatactcattygctattcgatgatgactgacaaacagtctcccaggatcaccatgaaataactaaactgagtttgatttatttaaaaatcaggtccaggtaacaaactgca

SEQ ID NO: 176362 - DNA, 201 bp, Homo sapiens
tgccaggaactttgatagctgttgcagtggaaaggaaaacagtaaaagggcctttccatgaggggattagttgagattttgtagatccatcactttaggtkttaataaggacctgggtgggtacacaagttggttgttagagggtctggagccagcagtactctctgtatatatatttggttctaggtatgaaattctctg

SEQ ID NO: 176363 - DNA, 201 bp, Homo sapiens
gcaattcctcttctggatataaatctgccctacagtagagttgcaaccttggataaataaataaatttggcctccctgagcctctgttttccctgtaaatsaggactaacataatctacctcaaaggattgtgttgaaaattaagtgaaaacttacataaattatgtagtgtggtggggacatatgataggtactgtggcc

SEQ ID NO: 176364 - DNA, 201 bp, Homo sapiens
acatgtactctttgggcaattttcctttactggtctagtgcccccagaggaaggtcatataccagtcaaactttgccattttgccccttactgtgcatgcytgctcaattcctagggttttatcgcaaagttgttgcctacaagcttaagatgtttcctgttaggaaatttccccctccctggtgccagccatgaccatct

SEQ ID NO: 176365 - DNA, 201 bp, Homo sapiens; identical to SEQ ID NO: 31395

SEQ ID NO: 176366 - DNA, 201 bp, Homo sapiens
tcagctgtagaaatggagggaggggtagagctgactggagagcgatttatggatggtatatttcatgaggcttgagtcttttttagcactaatagttggcrtcagcttcacctgttgcctccatgagtcatgccctggtagcagaggatggtgggccaactgccaagccatcccctgaaggaccggctgcctgggagtgag

SEQ ID NO: 176367 - DNA, 201 bp, Homo sapiens
aaagaaatatgtcatttttgaaatttcatgaatcttatgtctataccgattccaattccaaactcagactggcaatctgcctttattattgcaaagccccrtagcttgttatcttcatgtacctcttgatcaagtatttaagtgaaataaagagtctaaatgttacgggaggtgagtccaggcagggtctacggccctcag

SEQ ID NO: 176368 - DNA, 201 bp, Homo sapiens
tgcagcaatgtgttagttgattttaataaagagttgaaatcattgttaactggcctccctcccactgagtgaagaaggcagattacacaggcacacgtttrcctcccctagtgtgtactatgaatgcagctgcttctgaagggccagcacgtggccttcttaaaactttccttggctggggttttcccttcttgccaactg

SEQ ID NO: 176369 - DNA, 201 bp, Homo sapiens
ttgtggtgagctgagatcgcgccattgcacttcagcctaggcaaaaagtgaaactgtctcaaaaaaaaaaaaaaaaagattgttcatttaaaaatcaattmgattggccaggcacggtggctcacacctgtaatcccacagcactttgggtggccgaggcaggcggatcgattgaggccaggagttcaagatcagcctggg

SEQ ID NO: 176370 - DNA, 201 bp, Homo sapiens; identical to SEQ ID NO: 31398

SEQ ID NO: 176371 - DNA, 201 bp, Homo sapiens
actttccttggctggaggcaaactgaccaatgcccgttgctgcccctttccaccgcagggttcatttggtgaaacctggttgtactgaacctttaggagarccttgaagtaaaaaagaaatcccagacaggtcagtggcggatgtaaatgtttaaggaagaacagacagtcagctgtagaaatggagggaggggtagagct

SEQ ID NO: 176372 - DNA, 201 bp, Homo sapiens
acctctggagagaccacagcctcatccctagagtagaactggaaattctccattgagacaggaaggcagcacttgaacctggcaggttttggagtgaagtrtctaaggacagaatttctcatttctccacctctgcccatgtgtaaggcagcaatattttcatagaggtgaagaaggcaggtgtcccgtggttattatgac

SEQ ID NO: 176373 - DNA, 201 bp, Homo sapiens
catgaaagaggcataattttcctaagattgcacagctaagttacatatctgagacttgaagacatcctcagattatgttatccctaaatctctaattgctwtgtagcaaaagattttagccatttttttattcctgaatcaaggatacataaataaagttgtattcaatcaatccaaaaatcctcaagcccaaataatcct

SEQ ID NO: 176374 - DNA, 201 bp, Homo sapiens
gcagtgatgtgagcagtatgagatactatgttttgcaaaactgtattaattataatatttattgagtacttactatgtcccatgcacagtccaagtttttmatgtacatattattatttaaccttcactgctatgcttgcagatggatgtgtggtatattttagttaactcgctcaaggacatgcacagtaagcggtgcag

SEQ ID NO: 176375 - DNA, 201 bp, Homo sapiens
gagaaggaggggagtcagactttccttggctggaggcaaactgaccaatgcccgttgctgcccctttccaccgcagggttcatttggtgaaacctggttgkactgaacctttaggagagccttgaagtaaaaaagaaatcccagacaggtcagtggcggatgtaaatgtttaaggaagaacagacagtcagctgtagaaat

SEQ ID NO: 176376 - DNA, 201 bp, Homo sapiens
catgcataagctttggtttgaggaacaattgagtcaaccatcgtaacagagggcctgaaagtatctgaaggtagaatgaatagtttatagtaagccagtcyactctcagctctgagaacatccagctgcataacctcaagggaactgcgtggaaaaaattaagggaaattctttgggctttagagcttttcatttcctatg

SEQ ID NO: 176377 - DNA, 201 bp, Homo sapiens
gtggaggcactgtacactacatgaagcatatttaaggaatgataacagtctagattgctagcaagcttgaataggcaaaataaaatagaaaggttagggaytagttgaattagtcagaactgttgagattccaagagaaaaacaaaattcacattttctgtgttgatctattattgcaaggtgcattagtcagctattgct

SEQ ID NO: 176378 - DNA, 201 bp, Homo sapiens
atttttcatgaatataaattttagaacatatttttcagtgctccttacctaactcccaaataatccattacttacatttctttttttgagatggagtctcrctctgtcacccaggctggagtgcagtggcacgatctcggctcactgaaacctctgcctcctgctttcaagcgattctcctgcctcagcctcccgagtagc

SEQ ID NO: 176379 - DNA, 201 bp, Homo sapiens
gggctcaagtgatcctcctgccttggcctcccaaagtgcatgagccagtgcacccagcctcagaatatttttaaagatgaaaacctaatgctcagttaaasttttataagatctatgtgcttctaaataagtgtaaagatgactattttctggatgttgtattggtggggaagatggagagatagaagaacaagtgtttat

SEQ ID NO: 176380 - DNA, 201 bp, Homo sapiens
attttcctcctgtgtatgggtttctcataaatggtaacttatacctatgaaaatacagggttctataaagtctgaaaacatagttattatatatcttaacrgaccgaagatgtccttcctgatattatgtatagcctgtgtttccagactaagtgccaggcactattctaagttaggcacgattctaagtgttttactgtt

SEQ ID NO: 176381 - DNA, 201 bp, Homo sapiens
tctaattggaaattagaattgaaagtgggaaagtgaaggaggaaaaaatgaaggttggggagaaaagaaagcaatttaggagactctatagggaggaaagkatgagatgcatttcagaaacaaaatattaacgtaaacagaaaaaagagaaagcaatcatgacaaagcctaagagggctagtggaatgctagaatgaactc

SEQ ID NO: 176382 - DNA, 201 bp, Homo sapiens
gggaggcagaggagagcagatcacgcggtcaggagttagagactagctggccaacatggtgaaatcccgtctctcctaaaaatacaaaaattagccaggtrtgatggtgcatgtctgtaatctcagctactcgggaggctgagcaggagaatcacttgaacccaggaggcagaggttgcagtgagccaagatcgtgccact

SEQ ID NO: 176383 - DNA, 201 bp, Homo sapiens
ggcggcctgagtctttttcatctttctcttctgccagcctcaagtgttggtgagttttctggtttgttcctgtaaactcgagatgtctgtcacaggtccamctattacatgcagataactatggccagtcagaaaagaggatcttctttttacgtcttcttttaagaaagaaaaaaaatcatttccagatggtctcccctt

SEQ ID NO: 176384 - DNA, 201 bp, Homo sapiens
taattttttttttttgaccactttggccagagctgttcataaattaggtaatcaatatttgttgactagtcccctcccttgttaaaaactaaacacttgtyctcttgtatcttttttaaaaaaatatttcaagtaagtttcaacagtatgctgtgataaggatgaaacctattaacattatccttggtatatattttgatt

SEQ ID NO: 176385 - DNA, 201 bp, Homo sapiens
agataatcctgccagaaatgcgtgtgcaaagatctgaaagtgatcaagagcaagggattgcagattggacagcatgttttctcatttaatcccagaggaaycctgggaggattctaggtgtgcatattgtccttattttgtagaagaaggtactgaatcttaaagagataatgtgttttcaaagcttacagagtccaaatc

SEQ ID NO: 176386 - DNA, 201 bp, Homo sapiens
cagtgctacccagtggaaatataatgcacaccccatatacaattttagatttttattaatagccagatttttaaaagtttaaaagtcagtgaaattatttktttcatactaagtcttcaaaatccagagtgtgtattatatttttgacacatctcaatttggactagccatattttaagtatttaatagttatatgtgtct

SEQ ID NO: 176387 - DNA, 201 bp, Homo sapiens
taatcctgttaaaaattaagataggtttaggaaaactaaagtcctaattttttttttttgaccactttggccagagctgttcataaattaggtaatcaatrtttgttgactagtcccctcccttgttaaaaactaaacacttgtcctcttgtatcttttttaaaaaaatatttcaagtaagtttcaacagtatgctgtgat

SEQ ID NO: 176388 - DNA, 201 bp, Homo sapiens
ccaaatcacacagctagtaaatggcagtgtcagacctcaaattccactagtctgtcttcagagtctatataattaaccactgctccctgtgcttttaaagrttagtttaatggatattgtgctatttctaataaaaggatataatttttgttatatatttttcttcttagtcttcacttttggatcttggaccacatgtgc

SEQ ID NO: 176389 - DNA, 201 bp, Homo sapiens
ctgagcatttctcacttaatctcagttctgcttttagatactcatgtctcagaaattttatcatagtatatgctagatcaatctcatctcgtttaaattamaagtttgtagtgcacaggcaaaaaccatagaggccatattcatggtcataaactgctctttctcatctctacctattttagcaataacattcttcttatt

SEQ ID NO: 176390 - DNA, 201 bp, Homo sapiens
ggagactgaacttctgagtttgtcttggagttagttgggctttactgctacttatgctagatcttgaaggcagagtaggaaatatacttagcagggaagtsggagaaaggtgagaggttccccaggcaggggaaacaaagtgagcagatttggggcaaggtgtgtgagattgtgtggttggcaatatagggtgggaaaaat

SEQ ID NO: 176391 - DNA, 201 bp, Homo sapiens
agtcaactcagtgaatgatttatcagtagccatgctctaaggagctctctattcatagatacttatgatttggtgaactgggaaacccacagagaaaggtraatgaaataggagagccaggtaaatgggccatggatctaagaaccaggaatcatgattgtttggaagaacatatctcagactgagaaaagctggcgctaa

SEQ ID NO: 176392 - DNA, 201 bp, Homo sapiens
ggatacctttgactttccacagaacttttatttgtaattctcttaactcttagtacaatattttgtgtctctgttttattgttctgatgaggtcttctacrgtgtttttagcccaacccagtgagtgtctggtgccttagaccacttggccatcctgacaccctacacagtgagtgtcaatataacattttgtagttagtc

SEQ ID NO: 176393 - DNA, 201 bp, Homo sapiens
ggtggcaccggaggtgtttcagctgttgcatgatgttatcaccatttgcaaagaggcagcatctccacaattttcttggcctgttcctcttgatggcaaawggctactgcacgtccagatgatcatgtctgtgtcacagatagtgagagggaaggaggaaggatgagagaggatggccagctaaagttgtatctaccccac

SEQ ID NO: 176394 - DNA, 201 bp, Homo sapiens
acacacacacacacacaaacacacacatacacatacatacatgcacacatacacatcatgaagagcaagctttggaatgaaatatacctgggtccaaaaawtttgaacaaattgttgactttctttatgtatgaaattattattatcacatctactttggagggatgttgtgatgtataattaagaaagtatagtctactt

SEQ ID NO: 176395 - DNA, 201 bp, Homo sapiens
aatggagattttactgtcagaagtctcctattgctattgcttcttggagttggttcccatgctctgggcacaggaaagcaatctgagatcttcactactartatttattgagcacctatactatgccaggactggactgtgctctgaggtcacagtggtaaacataccgacatggttcctgctgtcatgagccttccaaag

SEQ ID NO: 176396 - DNA, 201 bp, Homo sapiens
ttttatggctattttaggggttagtcttattttgtttttcttagtgattgattataaataactaagctcacctctttgaaatggaaataatcatacctcasactggggaaataaaagcaatgattgaagtgaggtggttgagaatgggaggaaaacaggccagcaaaatatgcattatcatgtgagcaggcaaacacacat

SEQ ID NO: 176397 - DNA, 201 bp, Homo sapiens
tgccatctagctttttagtttctatctttaggaattttccggtcctttcacagaaagacactttttaaaggagcaattcttacttcatccctgagagggaracacttatgaaggtactgcagaatcttaaaaaaaaagtcttcatcattcttttacttctttttgcctttaagttggtcttaaatgggtaaaagtgataaa

SEQ ID NO: 176398 - DNA, 201 bp, Homo sapiens
ctgcagctgccaaaaaatttggcctgagggtataatcagctgtagtaacagttttgccattttattatccgtctatcagtcaaatattagacacatctatwatatttatttatttaattacatgtataaaatcaatatagattatagatttggtatatagagaaaatatatgtttgtgtgtatatatatgtatacacatac

SEQ ID NO: 176399 - DNA, 201 bp, Homo sapiens
caaaaggaacagtcagcagagtaaacagacaacccacagagtgggagaaaaatcttcacaatctatacctctgacaaagggtagtatccagaatctacaasgaccccaaacaaatcagtaagaaaaaaacaaacaatcccatcaaaaagtaggctaagggcatgagtaggcaattcacaaaagaagatatacaaatggcaa

SEQ ID NO: 176400 - DNA, 201 bp, Homo sapiens
tatgtaaatgtacatacatgtatgtgtatatatgtgtatatatgtatatatatatgtgtatacatatgtgtgtacacgtatacatatatgtgtgtatatakagagagagacctacctgatattcatctggcacataataggatatatatgaccattaaaatgtatgtatatgtatatatatatatgtgtgtgtatacatat

SEQ ID NO: 176401 - DNA, 201 bp, Homo sapiens
aaaattttgaactctattataaatgtctacaaatattcttagaaggcccaaagtttatttttttcagtaggttataagatataatgctgagtgaacacaarcagtaacctatgttctgtataccacctgatgccagttttaaaaatatgtattcacatacaagggtagaaaaaaggcataaaaggaaatttaacaaattat

SEQ ID NO: 176402 - DNA, 201 bp, Homo sapiens
atgttgtctcccaataaatgtcatgaatgatcccaagtccaaaattttttaactcattgtttcactcccaagggagaacaaagctacatgcagatctcatrtttccatgtttcaaaattcattttttctttggtgcttacagaacttcaaattgaatttgttataaccaccaagatcagttttgtttttgtggattggtgt

SEQ ID NO: 176403 - DNA, 201 bp, Homo sapiens
tgaaaataaatatacgtaatggaggtgcttgcacttttttttttttttttttttttttttttactaatagatacggtatccaataaaattggtaatcactkgtctggatcatgtgacttcaggaagctctatacaccagcttgcagttcatggatgggacaggaagagagtatcttaagcctatgttggaaggccaggtgg

SEQ ID NO: 176404 - DNA, 201 bp, Homo sapiens
tttacttttatatcttttcttaaaaacagtttaaattgtatcctccccaccccactttatacaattctctcatgccttactttacttttatattttttccyccattcttccttgtttcattcattcactctcccaagtcctctggcctaagttttatttgtgtggtattaagcagagaccaacagaacaactgtgaagact

SEQ ID NO: 176405 - DNA, 201 bp, Homo sapiens
gtcagtctggtggccatgagccacatgtgattatttaaattaaaagtagttaaaattaaataaaattcaaaatttggtttctcatttgcactagccacatktcaaatgcttagtaaccacctgtggctagtgactgctataattggcagcaccgattatggtgttttcccctcattgaagaaagttctgctggaaggcact

SEQ ID NO: 176406 - DNA, 201 bp, Homo sapiens
gcttaaatcaggaagaattagatacactgaacagatcaataacaagcagagagattgaaatggtacttaaaaaattatcaacaaaaagaagtccaagaccmgacagattcacagcagcattctaccagacattcaaagaattggtaccaatccttttgacactattccacaagatagagaaagaaggaaccttccctaatt

SEQ ID NO: 176407 - DNA, 201 bp, Homo sapiens
tgcccatgtactcaactctttcgctgtctttcttccctccatggaagtcagactctcagctttgtactcaaaccttctggtgataatttgggacatcagcygtcctagaaaagtctctctattgtattggtttttattaaacaaaataacctaatatgcttagtgaatatgtctacacacatgtgctaaacatttgtttaa

SEQ ID NO: 176408 - DNA, 201 bp, Homo sapiens
cctccatggaagtcagactctcagctttgtactcaaaccttctggtgataatttgggacatcagccgtcctagaaaagtctctctattgtattggtttttrttaaacaaaataacctaatatgcttagtgaatatgtctacacacatgtgctaaacatttgtttaattatttaacttggaaaattttggtgtatcatttct

SEQ ID NO: 176409 - DNA, 201 bp, Homo sapiens
gtgaggcgccaactcagcaaatgtgccttttcagaaagtagtcataaaaggtacaaaaaatgaggatgaaagaaccctgaataacaacctagagctcatayatttggagccatgaggaaaagtattccatgtaagttgaaggaagatagcagtcaggagcattggtgttgaagaccaccctcactatgagaaagggtcata

SEQ ID NO: 176410 - DNA, 201 bp, Homo sapiens
ttttcgaggcaggatcttgctctgttacccaagctggagtgcagtagctcaatcacagctcattgcagctttgacctcccatgcttaagcgatactcccasctcaacctcatgagtagctgcaacaacaggcgtgccccaccactcctggcttgttttttttaattttttttgtttttttttttgtagagacagtgtctcc

SEQ ID NO: 176411 - DNA, 201 bp, Homo sapiens
tcattggcatcatgtattttctctaatgagtcctaaattgttttctcatgacaaataaagagattccattttagactagattattttttgcttatgttgcrtaaacttcagtcccatctgctttatcatcagtgcctgtcctccacaagtgatatgagcacacatgagccaaaaattaaggatttttggttgaaagatttt

SEQ ID NO: 176412 - DNA, 201 bp, Homo sapiens
atattttgatatatgtatacattgtggaatgattaaatcaagcaattaacaggtccatcacctaacaatttatcattttttgtgatgagtacatttaaaakctactctcagcaattttcaggtatactatgcatgattattaattatagtcaccagcctgtacagtagatctcttgaaattgtttctccttctaactgaaa

SEQ ID NO: 176413 - DNA, 201 bp, Homo sapiens
aaatatagagaataatgagataaatagaacgtggattatttggagttcatcctcctgagctaatgatgggcatttctggaagtgctgggttgcaaataagyccagaccagagaggattgtgtttaaaggcccagaatctcaactgataatcctcagaagctcagatttacttttttcattccaagtaaattaaactggagt

SEQ ID NO: 176414 - DNA, 201 bp, Homo sapiens
gaacttttcttctgccacataagtcaaatatccatttatagtttttaactcttctctttggcccctaaaaatagaagatcattcctgattttaaaagtagmacttgtatgcatatatataatttttatctttaaaggaatacgctgatgattcctgactctagccagtcctttgcaaccttcaaaggattgtctccttggc

SEQ ID NO: 176415 - DNA, 201 bp, Homo sapiens
tgcatgcacataaaacaaactgtgccacccaggtgctggacagaggccctgagccacataagcctctgagaatcaaattgctgaggtaaaactgatatgcyttaaatgtgtgttgatgaagagattacaagggaggaattaaacacttcaaaggagctactacaaagcaacaatcactcttcccccatccctcacacacgc

SEQ ID NO: 176416 - DNA, 201 bp, Homo sapiens
aatcaaattgctgaggtaaaactgatatgctttaaatgtgtgttgatgaagagattacaagggaggaattaaacacttcaaaggagctactacaaagcaamaatcactcttcccccatccctcacacacgcacattactgtggacgcttgcatgtttgtgtgtctgcctgagaaaatggcaaagttggtttaggaagggaa

SEQ ID NO: 176417 - DNA, 201 bp, Homo sapiens
aaatgtgtgttgatgaagagattacaagggaggaattaaacacttcaaaggagctactacaaagcaacaatcactcttcccccatccctcacacacgcacmttactgtggacgcttgcatgtttgtgtgtctgcctgagaaaatggcaaagttggtttaggaagggaacactgcaggcatgttgtgatttcagctttcaca

SEQ ID NO: 176418 - DNA, 201 bp, Homo sapiens
tatgtgtgacttccagatgaagttcaggcatagaggcagggctaaataaacaagcacatagacccgagaattctcgttgattgatctttggaaattcggtrtaaatatgatcagttcaaccatgccttagctactggatcaaaggagacatctaccggctttgggagataggaatctggaaaattgacagactgaaaaaac

SEQ ID NO: 176419 - DNA, 201 bp, Homo sapiens
ctgtagcaaactaaaggaatgactagctcaaagcaatacacggtgaaacagaaatcattttttccagttctatctactgtagacagtatcaattccttccktagaacaaaggggaaattttgtaagaattaagagaagagaagctggaactggttagggagatttaagtatttgctcttaggagctttttgttgtagttct

SEQ ID NO: 176420 - DNA, 201 bp, Homo sapiens
gtgaaccccgggggacggagcctgcagtgagccgagatcacaccactgccctccagcctgggcgacagcgagactccgtgtcaaaaaaaaaaaaaaggtgkgggggggggaacttatgaatgcctttcacttataccagcatcattaaaaatttaagttttttaagaaccatgaaaagctaaccattgacaatttaagaag

SEQ ID NO: 176421 - DNA, 201 bp, Homo sapiens
aaattcttcatatccaaaaccaaatttagcttttcctctaaatttgtgcctccttatatatctcagttggtgacactacccagctatcatgttcagaaaayaaaataaaaatacgtcataaaagcatcaaaactctataaatttatccatgtaaggattgccaccattaatatatactttaaatccttccaaatgtttgta

SEQ ID NO: 176422 - DNA, 201 bp, Homo sapiens
aatctcgtgccccatgacctcttaaaatgtccccatgcccattcagaataccccaattcacttcaaaggcaaaaacaacgtgacattgtgaaatcataccrgatgttctagtagaactgtgttctggtcctattgagttcacccaggagaggcatcaaactctgcaatcagaacatatcaacacatggcctattagctgat

SEQ ID NO: 176423 - DNA, 201 bp, Homo sapiens
agtgtctagagaaacaaaaaagacacaatttctaagatgtagtaatgaatgtttcattcatgtcggtgattattttgatttgttgatgtgtttttgataayagagtaggcaaaaaacataccatcaatttaataatggaatcctaagtttaggtttaacatgatttttgaagaagaatcaatgtgcaaatgttgatgtatt

SEQ ID NO: 176424 - DNA, 201 bp, Homo sapiens
aagaataatcgtcagagaagcaaatggtctataagttatttaattttattcttaatatggtcaaagataatggttgcactgacttcaactttactttcttmaattccattaattgcatagcactagaattttccatataaaataaaatcagatcccatgtcacacagtactctgagtcactctgtgactcctactcttgaa

SEQ ID NO: 176425 - DNA, 201 bp, Homo sapiens
tcttttttcatttcatattgcaaaatattcattctaaattgtaaaatagatggcaccagtgtgacttgttaaaataaatgtttcattaaacataatttcartatgtaattgttttcagacttcctagagaaaagtgctcccgttgtatctaattctctttcttgtttaaaatacatcaaagatgagaaattgagctctttt

SEQ ID NO: 176426 - DNA, 201 bp, Homo sapiens
tgcaatggctcccatttccctcagagttaaaagtgattattgtggcccacaacgtgtagcccaatttgacccctgtttcatctctggtcttctttttaacwcttctttctctcattcactcagctccagcccattagcctccttgctgatcttcaagcacatcagtcacacttccattttaagaccttggtgctgcatgaa

SEQ ID NO: 176427 - DNA, 201 bp, Homo sapiens
ttacaggcatgagccacagcgccctgccaacctaaaggcttttcacaactgggaattcactgaatgttgtatcattaaagctaatgtggaccttggataamtgtatgcctattttctgggaaataatggtggagctctttgaaagggtaaaaatggtgttttatcatacataactatgcctgaggtttttgttttgcattt

SEQ ID NO: 176428 - DNA, 201 bp, Homo sapiens
aaactagtaaagagtagtgcatatagaaatgctgataaatgtgttgcacatggttatcacccgactgacatgctgaccttctgactctatcaatgggtgayttttatatgaagccaagaaatctgttggtggtaagtactaagaccaccacttcaggctcactctaacctcattgtgtgcatcttgaaaccccacacagtt

SEQ ID NO: 176429 - DNA, 201 bp, Homo sapiens
gtaaagaacttttgcgctaatgaaacttgttattggctgggactaggggcctaaatactagtttgagattctgtttctgctgtgccatatagcatgagatmccacttttgcctctataaagcagggctatggttatctttccttattacctcagttgattgttggctgtgagaaccaagtaagatatgcttcatggaataa

SEQ ID NO: 176430 - DNA, 201 bp, Homo sapiens
tctctggtcttctttttaacacttctttctctcattcactcagctccagcccattagcctccttgctgatcttcaagcacatcagtcacacttccattttragaccttggtgctgcatgaagtgctctttcccccggtatcttagggccaattccattgctttaagtctttgcttgtgtttcatctccattaggccatcca

SEQ ID NO: 176431 - DNA, 201 bp, Homo sapiens
gaaaccccacacagttgtcacatatgagcagattccacaggagggatgctgaaccaaagtgacaagcttgtcctggagccctaacacagggattgaccccygaccttcaaagtcagggaacaacttagggttggcttaccttcttgtattgtgaacttttccgattgtgaagccagcttttagctttaccacactcccaga

SEQ ID NO: 176432 - DNA, 201 bp, Homo sapiens
atacattaatttcacctggttgtaaaaataactttttgtaatatggctttttaaaaatttaaaattacatgttgtggccatcattcatggttcacattatrtttctactgaacagcgttgatctagacagtagacactacgcaaaaacagctaagaaaattattaattctttaaaaggataaaatttaaagtgataaatga

SEQ ID NO: 176433 - DNA, 201 bp, Homo sapiens
aacaattacaaaaatcccttggcttttgtggtgtggactattataagggactctgatgcttcatgacagggagtaatttgatccaaagtacaacggagctstcgtgtggatttaagttaccaaactattgaagggacccatgcaccaccaagtattcaaatcacaatataatttcattattctctaccctcccttgcaaat

SEQ ID NO: 176434 - DNA, 201 bp, Homo sapiens
gagggaacacaaaaagggcacatcaggaaaaaatagttggaaaaaagtgaattttatacaaaattaactcataaaatgaatataaggcattatttcacttrttgccaaaatctgtctttacagataatcttcgggagacctttatttttataggccctagttaaaatattttttgaatgcttgaggctctatttcactaat

SEQ ID NO: 176435 - DNA, 201 bp, Homo sapiens
aaagagagtgttagaatactatgcatttaaagtgagtagttcacttcatgattgagcagaaattcctgagttcaaatcatggctcttccacttgcagcttrtatgacatttatgaaattccttaagtgtgctctgtttcaggtgcctctgcgcctacatcattagagttattcaagtattaaatgagataatacatatata

SEQ ID NO: 176436 - DNA, 201 bp, Homo sapiens
gtgaaactgaaggtttacttgcccagtttacttgcccatgtttacttgcccagttgattcagctggtttatgtataattgtcaacaatttaaactctgtcmcattcctccccaaaatttatgtactttaaaaatagatctcatcatttcaacatttcaatttatatatgagagaaataaaaaggactagtaaaaattatat

SEQ ID NO: 176437 - DNA, 201 bp, Homo sapiens
tgatgaagaaagacactttcaaggtggacaggtataattattgggtcaccaagaacaaatttgaaaaacaaaatatgccaattgaaattagcatgtagcayctaaatacccagaagcttcttcattgaataatttattcattgaataaattatgtaaactgaattagtaattcctagtgaaatagtggatgaattgagaat

SEQ ID NO: 176438 - DNA, 201 bp, Homo sapiens
ctttgagaggagtaaaatcattaatgaaaaaaatgcatacattttcttcaatcatcatctatatcccatcgtgataatgaggagtacgctgtgtgtagtgmctgtgtttgcaggtggagggagtttgagtaatggaagtaataaagatgctcccagaacaagtaccgcatccaattagcttgccaattaacaatctattcc

SEQ ID NO: 176439 - DNA, 201 bp, Homo sapiens
catttttcgctcaccctttaccattatgacagtaaactttggggaaaggggaaggcatgggccaatacatcttttagtatttcttggttatactaagaacwactgaggaactgctaaggaacaactacatagataaaaagtatttttattataacccttgtgaaaaacctcttcccccataaaacgtttagtatcttgtat

SEQ ID NO: 176440 - DNA, 201 bp, Homo sapiens
atgatggctgggtgggtgcagtagctcacacctataatcctaacactctgggaggccgaggtgggaggatcacttgagtccaggaatgtaagaccagcctkggcaacataggaagaccctgtctctacaaaaaaatatttttaaaaattctccaggcgtggttgcacacacctgtagtcccacctactcgagaggctgagg

SEQ ID NO: 176441 - DNA, 201 bp, Homo sapiens
cttgatccctttttggcaattaacttgcctttaattgatttgtggattacccactggaagttgctatggataaaggaatgtaatggcagagtttgtttatrtagggtaacaaaatagactggctgggaggagggatttaactgcaaaatatccttgattttcaggaatttttcttttcacataatggcagtgtttagataa

SEQ ID NO: 176442 - DNA, 201 bp, Homo sapiens
tgcagagccagtgctccaacctagacttccggacaccaaagcctatggccattaagcactctgctggactgtatcttggatagtttgctttatggggaacrtagtacaactttacaatacaactttaaaaataaagtatagcagagtagcagtttgtccacagtcaaatatgaaatatgtaaacatttcacaggttctttt

SEQ ID NO: 176443 - DNA, 201 bp, Homo sapiens
aaaatggaagttaaaaatcggtagcagtagtaatagtcctacagtaggaaccttgttttgtttgaaatatgtgtctgtgtctgcctacaaaacataaacaycttaagctaagaataactgtgagattaattttttattttcaaagaaataatacaaattttaaatcttgcattaaaaggaaagctagctggacgaaacttt

SEQ ID NO: 176444 - DNA, 201 bp, Homo sapiens
gttctgctggaaggcactgttctaaattgtcaggacaacttaaaaattctttgggcatatcttcctgtatctcagagtatgcatatatatttcacttaaaytttcctcttctattatttcattttacttttctgtttttcagtttaaaaggatgcttaatcgggagctcacccatctctctgaaatgagtcggtctggaaa

SEQ ID NO: 176445 - DNA, 201 bp, Homo sapiens
ttgtgtgtgcatatattttcctttcttctgggtatattcctagtagtggaattgctgggacaaatggtagctctaagtttaaccttttggttattttccartgtatctgcattctcatgtttcttacagcagaaagttattctcttgaatggctgcatcattattgatgtagtcaaggtgtatttttaagtggaaaagtta

SEQ ID NO: 176446 - DNA, 201 bp, Homo sapiens
tgaaaatttctcatcccaacctctcactggacatatctctgtagttatagctattttgattatatctactgcttataccccagaggcatagagaccagcascctaaagcaaaagacttctggattttgactttggaaaatacaaattcttctacaggagcggtgaaactagtacagctgcctgctctttacctgtaggggg

SEQ ID NO: 176447 - DNA, 201 bp, Homo sapiens
tcagaaaaggcagtgcttgtgcctttcctccctctgcagctgaccactcaggccccaccctctaggctcactccccctgaagttggaacctggctgtaccrtggcagtagtcctgggaagggcaaagaagtattaaaaagagtcagtgaggcacccttaagatgaatgggtccctgttgataggggtcagacctagtgcct

SEQ ID NO: 176448 - DNA, 201 bp, Homo sapiens
gggccttcctagacttccccaattagaattaaaactctcttctctgtgctgtcatgaaaccttgtacatttctctaactcttgaaggattacaattattgycttctgtctcacgtacctctcctgtgagcatgttttggagtagactgggtttgctcatctttgtagagcaatgaacccctgttcccagcaccatgcctgc

SEQ ID NO: 176449 - DNA, 201 bp, Homo sapiens
attttattttataactaaaaaaaactaaaataattcagaagtaaaatttggtgcattttcaatcaaacacaaaattttaatcccaaatcgataccaataaycttaggagcaatgaaagggagccagaggctgagtggaaccagtgagaatttacaaaatcccaggctgctttccccaactttcccccaccctgctaagaaa

SEQ ID NO: 176450 - DNA, 201 bp, Homo sapiens
tatgggaagggctggggtaccacatggggcacaatgacagcaagcctgggtgagacactgttaaatataactgtgtacaggtaactaactaatgagagccygtgccagtgatatgtctcagctctcaaattgcctagttctttgtcaagtttgacctaaattagaaagcatttcaaaagtatggaaagtaggaagaatgcc

SEQ ID NO: 176451 - DNA, 201 bp, Homo sapiens
cgaattttacccaggaaactgagatttttgtctttaaaaagtgaacaagaaactccctttatgcttcctttacatgtggtcacctgggtaccagcatttawatctgtggcaggtaaatagttgatcagtcaggctccagagacgatctgaggcctgtttctatgcaagacagaagttttcagctgacatacagggatggaa

SEQ ID NO: 176452 - DNA, 201 bp, Homo sapiens
atttacactctcactaactcctttattatgatttctttgaaagaatatgaagacagccataaaaaagactcttattgaagttgagagggtctcctgtaggycttcacttcactgtgtctaaacattggtctgttgcttgtgctttgcttttctctcaccctggatgaccttcaaggctcttccaaatgatttctctgattc

SEQ ID NO: 176453 - DNA, 201 bp, Homo sapiens
cattgaaggggagactttttgctttatactcttttgtttaaattctgaagcatgtgaagatataaattatacaaaaatacataaattttaaactaaaaacmaagacaaaataatattaaattagattacttattaaattagaagtttattataatagaggcaaaaactcctctacagaaattttttctttgatgaactaat

SEQ ID NO: 176454 - DNA, 201 bp, Homo sapiens
ccattttattatccgtctatcagtcaaatattagacacatctattatatttatttatttaattacatgtataaaatcaatatagattatagatttggtatrtagagaaaatatatgtttgtgtgtatatatatgtatacacatacatacacacacacatgtttacttgagcattaaaaaaacccaaacggcctctcttctt

SEQ ID NO: 176455 - DNA, 201 bp, Homo sapiens
cagcttggtgaatgggcaggtttctcacagatgtaaaaatttaatttggggaattagttcgggttattaatttaatttaattttaaatcaagcacaagtayaaatacaaattcttggttcattcaagcaattcaaaagcaatgctagagaaagtgactttggctatattaatctgtttcctataaacccatagtaccaaag

SEQ ID NO: 176456 - DNA, 201 bp, Homo sapiens
taaagttaagcaaatctggaattgaaataatttgataacatcagctaatatttttcaaagttagatttttgaggtataatttacataagagttactctttytagaggtatagttgaatgcattttcacaaatgtgtacaattggataaccaccaccataatctagatatataggtaatgtgtaattataatatatatgtac

SEQ ID NO: 176457 - DNA, 201 bp, Homo sapiens
ggtaatgtgtaattataatatatatgtactatataatataggatatttataccacccaaaaagttttctcttgctttttatagtcattccccaaaccccaygtccagtgctgattgtccctatggttttgccttgccagaatgaataatacattaaagatatagccttttgtgaatggcttctttcacttacaatactttt

SEQ ID NO: 176458 - DNA, 201 bp, Homo sapiens
gcaacaagagcaaaagtctgtctcaaaaaaaaaaaaaaaaaaaaaagtagggaaaaaattaacagtttcagaggtactgcaaattagtaaataaagcctcrgtttggggcagtctcccctggattatgttgtatgtgtgtagctcaactcgatgggcacagttgaaggaaggattccctggtatgtttgttaaacaaacat

SEQ ID NO: 176459 - DNA, 201 bp, Homo sapiens
atagaaggagggaaagagggaaaaaggtctagatgatcaagtggcaaaaacaaataacccagcatgaacaagtatgcagagagggaactctgaggaaactygctgacaaaagatagagatggaggtgaggtcaaccacaggggaataatgggggcagacaagtctaaggaggtagattttatagggacttcgaatagatga

SEQ ID NO: 176460 - DNA, 201 bp, Homo sapiens
ttcagtgattagatttctggcatctgctgtccataagatagtaaaaactgcagatagggtaaatgccagtattggaaatatgaagtttgaggtgtctgtgmacatccagatagaaatttatggaatgtggaagagcaatgtaagctggggttttcagcacaatggtaggtaggtattgtagttttgggggtgaaggtactc

SEQ ID NO: 176461 - DNA, 201 bp, Homo sapiens
cgtattactggtggggttcaacaagtatttgttgagaagtgatgaatcaagctaaagtttaagtaggcaaagatgaatcacgtcataacctctggtttccyaactttgtctatagaaaaggctccttgctaggtaaaacaaaaacagaagaagtatgtggattctcttcaactttgggactcatcaccctgaatctctcag

SEQ ID NO: 176462 - DNA, 201 bp, Homo sapiens
ggattacaggcatgagccatggcacatggctcaaattatataattcattagctggtaatagtgtaaatttggaagagaaaaactaaaatgataaagaggaragatggattgtgaatagagtaaatatatattactgtaattatgttaagccaatcaaatgcaaaggacagttcaaaggggacaagtatgtaagccacattc

SEQ ID NO: 176463 - DNA, 201 bp, Homo sapiens
ggaggcagtgatagtacattgttaatagattgtttactttttactcttctgtatagacggaccccttgcaaaagtcagggtgattttatatatacaacatygttatcagctacctctgaatacttgattcttttccttctacaaccccaacctccatttgaaaagttctcattattctttttcttacctattctaaaagta

SEQ ID NO: 176464 - DNA, 201 bp, Homo sapiens
cagtgtttgtaaggtccctcactgccccagcataacccagcatttggtccattcaaggattaagaggaacagggatctgccagccttgtttctgcagaaaraaatgggggaggcagagctggatctaaccaaacaggttaaatttaagtgccaggtttccgtgaaggagaattatgccagcaatggtttctcaccttaatg

SEQ ID NO: 176465 - DNA, 201 bp, Homo sapiens
ccttctacaaccccaacctccatttgaaaagttctcattattctttttcttacctattctaaaagtatcactcagtccccacttcctccagggagcttttytgacgagtattcagctcttacttcttagacctccagtaacatctaatgtttgtcaagtacaattaagcacttgcttttacaaaactaattgtgggagatt

SEQ ID NO: 176466 - DNA, 201 bp, Homo sapiens
attttcagaatcatactgtgatataggtactgctttctccattttataaattagaaaacaagctaggttaattcacttttataaggtgccaagctagtcartcagtggcaaagctcagatttggaaacaaggactgccttactccaaaaactgttctcttaaatttcagtgtttgtaaggtccctcactgccccagcataa

SEQ ID NO: 176467 - DNA, 201 bp, Homo sapiens
taaggaagtaccactttgtaaacaacatttttgtagaatgcattatatgcatttttttcaaaattgaaggaaagccccatctcaaacattcaaaagaatcygctcaattatcaatgtagactagaaacagagatagagaggggagatacagtttgagtgttttctgtattatcatgacagcacatggaacaaccacaggca

SEQ ID NO: 176468 - DNA, 201 bp, Homo sapiens
gtaatgtgtaattataatatatatgtactatataatataggatatttataccacccaaaaagttttctcttgctttttatagtcattccccaaaccccacgtccagtgctgattgtccctatggttttgccttgccagaatgaataatacattaaagatatagccttttgtgaatggcttctttcacttacaatacttttg

SEQ ID NO: 176469 - DNA, 201 bp, Homo sapiens
acaatattaccattttgctgacagaaggcagacatggcactaaagagggagaatgagcaaccacagagctgatttaatttccagtggggtttatggaagcrccaaaacatgatgtagccaaatgttcctaaaagtatgaagtaatttaatttgttccatcattacaagaaattaaagccaagcacaattacatcccagtag

SEQ ID NO: 176470 - DNA, 201 bp, Homo sapiens
gcggcctggtcagagctagaaccctggctctgtgtgcttctgtgaaaatctttgttccaatgtcccacccctcacttcaatacatatgccatctaattcartgctttcagtaaggcagcaaaatgaatgaatgattcagagcacacttcttgcagacaggagagtgtataagagccataattgggcaatgaccatggaagg

SEQ ID NO: 176471 - DNA, 201 bp, Homo sapiens
ctgtctgatgctcttcatgttcttaccaactcatatcctcatctaaatttgaatcacaggtacattctgaccttgtcgtagagagagtcctaaagtctcaygagagaattaccgtgcttgttctaacaagactgtgttccagcaggcatgccaaaatttgatagctacaaatagggagatttgaaaggaaagaggtgggag

SEQ ID NO: 176472 - DNA, 201 bp, Homo sapiens
catttcatctggccaaaaacattggtcatgtggttgtattttactgccaaatattactccttggccagctgttcagaggagccagaagattctctgagctmgagaggtcaactccatcctgtgtcatgtctatttattctactggcatagtcttgactattaaactaggtttcttaatgatatttcaaattgtgagtaatg

SEQ ID NO: 176473 - DNA, 201 bp, Homo sapiens
ttgcgttagttgagattttattcagcagtaaatagagagatttaaaatagaagtggcttaaggaagacagatatttctccttcatgtaaaatctgaaagtwggcagtccgaggttaatatggcacctctatccagtacagtcttcaaggacacgtgctctttccatcttattgcactgtgaggtgtagcctctgttgctaa

SEQ ID NO: 176474 - DNA, 201 bp, Homo sapiens
gagagaaactccgtctcaaaaaaaaaaaaaaaaaaaaaaaaaaaaggttattttaagaaattgtatagtgaattctcttttttaaaaaagggaaaacattwatatatttattaatatttaaacctgcagttttataaaattttgtctagtccgacactcttgttttacaaatgggaaattgaggccccagttccatatgag

SEQ ID NO: 176475 - DNA, 201 bp, Homo sapiens
tcagtttccttcggaagcttgagaggctcagtccttcctttacttcctcttaatttgaatatacagtttcccacagaataattaatttttttatatgtgcygctttcactgtttggaggttctagtttatctttccagttgcactgcaaactctttgaggttagaagtttccttacatacagcaaaaatgccagtaatgcc

SEQ ID NO: 176476 - DNA, 201 bp, Homo sapiens
agagaaactccgtctcaaaaaaaaaaaaaaaaaaaaaaaaaaaaggttattttaagaaattgtatagtgaattctcttttttaaaaaagggaaaacatttmtatatttattaatatttaaacctgcagttttataaaattttgtctagtccgacactcttgttttacaaatgggaaattgaggccccagttccatatgaga

SEQ ID NO: 176477 - DNA, 201 bp, Homo sapiens
gaggtgagaatgacatctcaaatatccatcatgagtcagtttccttcggaagcttgagaggctcagtccttcctttacttcctcttaatttgaatatacartttcccacagaataattaatttttttatatgtgccgctttcactgtttggaggttctagtttatctttccagttgcactgcaaactctttgaggttagaa

SEQ ID NO: 176478 - DNA, 201 bp, Homo sapiens
ggctgctccttgtgagtcagtagccagcagagaaatgttttccctactttcctttatttctttgttcttacttgcttcattttgccttgacctttttttcytcacccctactacccaaaggcatgtacttcccaaataaagtctgtcactctgatccctccctcagactgtttccagggatgctgagcaccctgtacattc

SEQ ID NO: 176479 - DNA, 201 bp, Homo sapiens
atggaaataattatgaaaagaccatccagtttttaatgactttacaagaatagtgttcttgtgagactattgaataagaagaaatatatgaacatttgtaycattcaactgtctaactgataccaacaccaataaatatatgaacatccttattattcaagtgtctaatgagtgagggacagtgcctgtaggaaggagagc

SEQ ID NO: 176480 - DNA, 201 bp, Homo sapiens
ttacagacatgtgccattcattcatcacctacaccactcatcaaatatctgaagaactatgaaggctgaaggaaaataagtgggtgagcacaggtgcaaakaaataataaatttggagcattctatttcgtgttatttcttgctaaaactggcatattaccccaaacatcaattgcaatatgctattcaacaagagttttt

SEQ ID NO: 176481 - DNA, 201 bp, Homo sapiens
aaagctatatgataaatatattttttcaaggttcctttggtcaagttctgaccctttccaaaatataagcattagcagctaagaatgactttttcatgtayttgaatacctcacatctgtaattttaacaagtttcatttgtaacaagtttaagaggtgagaatgacatctcaaatatccatcatgagtcagtttccttcg

SEQ ID NO: 176482 - DNA, 201 bp, Homo sapiens
gcaggctttcactgctgtgaacagataattgatatttatgtttcataatctgtgaagatagctaacacatttctgacagttgcaattttttttcccaaaasgagtttgagcatgcctatccctctctacccaagtatatttaacagcatttctatctattggggaatctgagtgaggatgacaacgtgtcagggattagaa

SEQ ID NO: 176483 - DNA, 201 bp, Homo sapiens
gttacttctcttagcaccattgctttatccggcatagtaataaaaatcaaatgagacaatggatatgaaatgctaaaaatagtacattctctgttgttatwatctattgtgattattgtgttacccttggaaaaaggcctgtagaatagtggcagctgggtcccctggacagtgaactaccaacctaaaaactgtctgggc

SEQ ID NO: 176484 - DNA, 201 bp, Homo sapiens
acactacattattcttcataagtgtttcagggcacatgcacatgaaaaaatggaaactaatgctgtttcaggtagtaattcagtgttcatcttgcccagcmgaattacatgtcatgaattcaaactaaatattttaataatcttttgtttctggaagtcatattaaaaatcttgacctcatgacttcactaaactgtcaat

SEQ ID NO: 176485 - DNA, 201 bp, Homo sapiens
aggtatctcttttctatgacctactctatcaccctcaggatctattaatcctttgagtttgatctctaaggtggcaatgaaatatttcttacaccagaaayacactgaaactcagagaaagagggctcaaatttgaggagagtgctatactggcaagaggatgccccaggtaatatcctttccttcttctagagaggaaca

SEQ ID NO: 176486 - DNA, 201 bp, Homo sapiens
atttggctctagaaaggcatttagcctatgagttcagaacaggaatggtcttaggcatctgattcaacctacgacattgccagtctgaaccaactcatccygatcccactgcaaatgagctaggcaacagtgaagagtggttctagtctgggtttggataaattgtgaaatatttctagaatttttctatagactctgaac

SEQ ID NO: 176487 - DNA, 201 bp, Homo sapiens
tttgatggaacgcactgtgttgaatgttattgtgctgacaaataagcccccaaattaaatgacttaaaaaataaactcattcttcatcaagtagcgttctrggatggtgtttaggaggatgtggcagctctccttgctctcagtcacggaccaggattctcccaccttctgtttctaccatccttcacgcatcagcatctt

SEQ ID NO: 176488 - DNA, 201 bp, Homo sapiens
aataaatgtagattgattataggataaaatattttccaataatgtaagtcctactgcaaacagtgctactgcctggaaaactccttatgttggagaggtcyaagagctaatacacttattttaaacaatatttcttaaatatttcaaacacagtaatataatatacagcttagaattgattatattaacggatctattatg

SEQ ID NO: 176489 - DNA, 201 bp, Homo sapiens
aaataacccccgttaaaatgccttcttagagatgttccagattatttcttcaaatgtgctaatcaatctcattaacctatttctttaaataagtgaccaaytcctagctaaattaaaaaatagttatgaagtttatttaaagtagaactacacagataaccatggtaaatgataaccggtatagaaaaagtaccgctgcgt

SEQ ID NO: 176490 - DNA, 201 bp, Homo sapiens
gaaagtatagaatatctattgtaatctgaaaataggaatttagagaacagaagatttgatagtaggcagagtatttgaaaatagtaatacttgagaaaacytgagttgtatagtaaaattactccgtaacacctcattcagttggcttcatttaatgtttaatgtttaatccatggataaatgtcataagtctcacaagtc

SEQ ID NO: 176491 - DNA, 201 bp, Homo sapiens
ttggaagaagagtcttcagttataccctattcagtatgataccagctgtgagtctgttatatatgacttttattgtgttgaggtatttccttttatacccrattttttgaggatttttatcatgaagggatgttgaattttatcaaatgcttattcagcatctgttgaaatggtcatatggtttttgtccttcctgtcttc

SEQ ID NO: 176492 - DNA, 201 bp, Homo sapiens
ttccaaatttaagatcatattttctgcaaatgggataatttgccttcttcctttcaaatttctttctttggtctgattgttctagcaaggacttccagtaytattaatatattgaatactagtggtgaaagtgggcatccttatcttgtcccacctcttggaagaagagtcttcagttataccctattcagtatgatacca

SEQ ID NO: 176493 - DNA, 201 bp, Homo sapiens
cccatcaatatatatgttaattttattttttaaagacattttcacttcagtgaaaaagaaagagcataatctcagaataaaagaattttccaaaggaataygtatagtttaaaaaaaaaatctcactgcatggtccatgtacactctgactttgacaaggaccactgagcattctgttgggcaagtaccagatcttagagt

SEQ ID NO: 176494 - DNA, 201 bp, Homo sapiens
tgtccaatgtaatctccatcaaaatcccaatggtattttttatagaaatagaaaagcagtcttcataagaaaccacaaaaggctgaatagtcaaaacaatyttgaaaaagaacaaaatatctggagatctcacacttcctgatttcaaaacatattactaagtgacagtaatcaaaacaatgtggtactggcataaagaca

SEQ ID NO: 176495 - DNA, 201 bp, Homo sapiens
atgtactatataatataggatatttataccacccaaaaagttttctcttgctttttatagtcattccccaaaccccacgtccagtgctgattgtccctatrgttttgccttgccagaatgaataatacattaaagatatagccttttgtgaatggcttctttcacttacaatacttttgagttttgagttgaattataagt

SEQ ID NO: 176496 - DNA, 201 bp, Homo sapiens
gtttggttttctgttgctgtgttagtttgctgagaatgatggtttccagcttcatccatgtccctgcaaaggacgtgaactcatccctttttatggctacrtagtattccatggtatatatgtgccacattttcttaatccagtctatcactgatggacatttgggttggctccaagtcttaagcaaagagttttttaaac

SEQ ID NO: 176497 - DNA, 201 bp, Homo sapiens
atctgtcaggggctgcatgtgccgtttggtggctgaagttgtgtgtatgctctccatgacaatttttcgttactggtctagtgcccccaaaggaaggtcayatatcaggcaaactctgacgttttgccccttcttgagcatgcctggacatatccccgaaggaaggccaaactccgccattttgccccttactgcagatgc

SEQ ID NO: 176498 - DNA, 201 bp, Homo sapiens
attaatctaagtcatccaaaacctgctgtttcagctcccacagtgttacccatttcagttagctgttagttttatatactgctgttttcatgacatttgcktataaagtttctaccatttcaaagtatgtattgaaactgtagtccttagttggcaagaacaatattcagttcattaagtcagtttcacaaaggaatggaa

SEQ ID NO: 176499 - DNA, 201 bp, Homo sapiens
gaggctaaggcactagaatcacttgcacctgggaaggagagggtgcagtgatctgagatcatggcactgaaatccagcccgagtgacagagcaaaactctstctctaaataaataaataaataaataaataaataaataaataaataaatcacgagctgggtggcttataaacaacataaatttatttctcacagttctgg

SEQ ID NO: 176500 - DNA, 201 bp, Homo sapiens
aaaatttaaaagattgagtgccccgcttgatcattggttcaaggcttttatagagttactgtatcctgattcttcctgatctcctcccctcatccttcttrggggaactgttggctaatccttgcatgcgcagtaacttgctaatatctgtcaggggctgcatgtgccgtttggtggctgaagttgtgtgtatgctctcca

SEQ ID NO: 176501 - DNA, 201 bp, Homo sapiens
tgtagacattatgctaagagtataatgcctttttaatattcagaagagcactctaaaagctattacagctttacagacaagaaacttgagaccagagagargttaagtaacttgaccaattgtcatatagcatttaagtggcagagttaggatttgaacccaagtttttatgtatttaaaattctggctattaacaccaca

SEQ ID NO: 176502 - DNA, 201 bp, Homo sapiens
cccctcctctcccctcctttcctttcctttccttgacactgggtagagtgtaatgcaatcatagcttactgcagccttgaacttccagggctcaaccagtmctcctgcctcagcctctgggtagcaaggacaataggcacacaccattatgcccagcttattattattattattattattattaattttgtagagatgggt

SEQ ID NO: 176503 - DNA, 201 bp, Homo sapiens
ttccatatgaactttaaagtagttttttccaattctgtgaagaaagtcatgggtagcttgatggggatggcattgaatctttaaattaccttgggcaatayggccattttcacgatattgattcttcctacccatgagcatggaatgttcttccatttgtttgtatcctcttttatttcattgagcagtggtttgcagttc

SEQ ID NO: 176504 - DNA, 201 bp, Homo sapiens
cttaagaccatggggtaccttcaattctgttaatgttttactgttgccaagtcttaaaataattgtctcccatttcagaacatggaataattgacctttcratcaagtagactcatataaggtttagaatgaatatttgaaagcaattcaaagaaaattttggtattattttgcaacacttccattttgagaaataactta

SEQ ID NO: 176505 - DNA, 201 bp, Homo sapiens
gttttgtagttctcataaaatattgcttatatattatttggctcccacactatccattttgatggttttaaatttttcaaataaaaataaatgagttttcrtactatggatgacttgacatcagttaaaagtgtaaattcatacttgaagatagcaggactctatgctctttcctcattgttctggtcaaatacatttcca

SEQ ID NO: 176506 - DNA, 201 bp, Homo sapiens
taagcagagttgggtgcctccagccaaagatggcaaggcacagagggtcttaccgagaagctgcaatctgattcatgacaccaaaatgttactggcagcgrgtttgggcaggatacacagtctttggttcttattgtctgagaagaaaaaatacatccaagagacagaagtagatttaagatggcagacaggaggcaggac

SEQ ID NO: 176507 - DNA, 201 bp, Homo sapiens
ttatatatgtgatcagtacaatgaaggagctcagtggggtaaataagcaggaacctgaacttgatctgttccggagggccacagaaggcttccttgaggcyttgagaaagtgatttgcatctgagttctgaaggattgtaagaggtaactagggaaaaagttgacaggaagaggaaggggatccagacaagaaacatttgc

SEQ ID NO: 176508 - DNA, 201 bp, Homo sapiens
tgcttatcatatataattatagaaagcataactgaacaacaggaagttattacttcttaaatatcagaaaacatttgactttctcttctgaaataaggaayggcagtaaccgaattctagttactgctcttaatagttttgtagttctcataaaatattgcttatatattatttggctcccacactatccattttgatggt

SEQ ID NO: 176509 - DNA, 201 bp, Homo sapiens
gggaagcatggaaaacaagtatttaaaatgacaggacaatccatctgccacccgtgggaatggtagaaaataagggatattcatggaaggctgcttttgtrcagtctcacaaacagcagcccttagacctaagaggacattgcctatcagtcttctcagtgtagaggaagaactgtcagggccagggagtttgggatgaga

SEQ ID NO: 176510 - DNA, 201 bp, Homo sapiens
attctcactagcaatgtatgagaatttaatttgctctgcatccaggccagcattttgtattgtttgtattttgtattttatacattctagtaagtatgtartgtggcatctcactgtggttttactttttgtttccctaatgtctaatgatggtcgtggatcttttcacatgcttattgatctttttgattcttatgaagt

SEQ ID NO: 176511 - DNA, 201 bp, Homo sapiens
caaattcccattctccatatccctttaggtaggtgaggatcttatccctagccagcagctgtaagggaactgggccttcctttctctggacatagcactgkaggtcccagtatatgttaagaatgtagatggtcagaggaacagaggaaaacctgcatctgagtccccttgtcatccctcctgtggattcctggggaagca

SEQ ID NO: 176512 - DNA, 201 bp, Homo sapiens
ttatctgtgtattgcctggaatattgtcttggtgactaaggaacccagaaatactgtggaaactgctgctactgtcaccatgtgcatagacaatgtggagrgatttctggaaaatttctgcagtctggcctctctggatttcgtgtggatacctacaaactgcactaagtgttgggagattctttagtggtatatgaaact

SEQ ID NO: 176513 - DNA, 201 bp, Homo sapiens; identical to SEQ ID NO: 31409

SEQ ID NO: 176514 - DNA, 201 bp, Homo sapiens; identical to SEQ ID NO: 31410

SEQ ID NO: 176515 - DNA, 201 bp, Homo sapiens
agccattgtcaactacatttggtgaaaactgtttcctccgtccacaactggaacattgacactaaccacattctagagttcattacatagagctgtgtctrtgggtaagttaacaggtagttttaaataactagatatagtcttttcctcttccatgtaagccaagataatatttccacttctccttctgaacatgtgagt

SEQ ID NO: 176516 - DNA, 201 bp, Homo sapiens
ccacagtataaaaataaagcattgattttaatgcactgctacagtgagatggtgccagcacctctaagtatcattgccagtgctctaacctttaaaataaygaattaattgagttatatgtagtaatatatcttggctattactgccaaagtaatagatatatactgaagtcttaggagagatagagggataaatgttagt

SEQ ID NO: 176517 - DNA, 201 bp, Homo sapiens
ttaacaagtccctcaccacttcttgggcctctaatgtgtgttttcagtcacagccactcctctctactacttttgcctgctaagtataagagtagtattgyttccagtcctgagtttgaaaaaggaagaagaattccctttatgtcaatttgtatcttttattccagattattaatcttccctggtctcactaggaagaat

SEQ ID NO: 176518 - DNA, 201 bp, Homo sapiens
taaattatgcaaatgaactcagaccctaggttcacttcccagaacaaaccgtattctgagaatacttgtggtgccaaaatttagagtgaaaccccagactrttaatgatgctcaagttactttactccaacacaataagtactcagtgatttgttacggaaattcaattaagtcttctcaagtattttttttcttttcttt

SEQ ID NO: 176519 - DNA, 201 bp, Homo sapiens; identical to SEQ ID NO: 31387

SEQ ID NO: 176520 - DNA, 201 bp, Homo sapiens; identical to SEQ ID NO: 31388

SEQ ID NO: 176521 - DNA, 201 bp, Homo sapiens; identical to SEQ ID NO: 31392

SEQ ID NO: 176522 - DNA, 201 bp, Homo sapiens
atgagccaccacacccagccccatacgaaaatttagtctcagaattagcctttgcatgcgtcacctgtaagttaatcagaatgttactttcaaaagttccmtgcaggtgaggaagctaaaaggtattcttgtatttttttaaatgaaacttcataatagaggtgtaaacagagtccattctccccagccttagaatcagac

SEQ ID NO: 176523 - DNA, 201 bp, Homo sapiens; identical to SEQ ID NO: 31396

SEQ ID NO: 176524 - DNA, 201 bp, Homo sapiens
tcaggaagactgcagagtagccataccagcaagttaaagcacagagtagtaagcacaggctttgagatggagaggaggtaaaatgcacagaattatatgcyaaaatcaactaaaacctagtttttccttgtttctcacccacaagacctctttagtattaaagttacagggtaatactacaccaaaccaaatagaaaatgc

SEQ ID NO: 176525 - DNA, 201 bp, Homo sapiens; identical to SEQ ID NO: 31399

SEQ ID NO: 176526 - DNA, 201 bp, Homo sapiens; identical to SEQ ID NO: 31402

SEQ ID NO: 176527 - DNA, 201 bp, Homo sapiens
ctgtttttctagaaagaactttgatttctcatttaaccctcctcgtaaaatgtctgattactcttgagctcaattctggattcctaagagccactcattcytttcttaactttgtgtacagttattaaaatgttctgttctggctgggcacgttggctcacacctgtaatcccagcactttgggaggctgaggtgggcaga

SEQ ID NO: 176528 - DNA, 201 bp, Homo sapiens; identical to SEQ ID NO: 31405

SEQ ID NO: 176529 - DNA, 201 bp, Homo sapiens
gaattgaacaatgagaacacttgggcacaggaaggggaacatcacacattggggcctgttgtggggtggggggaggggggagggaaagcattaggagatayacccaatgtaaatgacgagttctttgtttttgactacgctggcatgcgaatacacatttctctcatccaacagtccattgaaatggttgagggttttttg

SEQ ID NO: 176530 - DNA, 201 bp, Homo sapiens; identical to SEQ ID NO: 31406

SEQ ID NO: 176531 - DNA, 201 bp, Homo sapiens
gccagtgtttcatatatgtgaagtgctttaatcctcacaacaaacataggagggatgtagtattattaccccctttttacagatgtgaaaactgcagtacmcaaggtgaagtgagaggccccaaatcacacagctagtaaatggcagtgtcagacctcaaattccactagtctgtcttcagagtctatataattaaccact

SEQ ID NO: 176532 - DNA, 201 bp, Homo sapiens
ggcctacctacctgcacacgcaccctgcccacttacagaagggcaagaactctgcattactgaggccttgttattattatagttcctatttaggtaagaaygcaatggagaaaaaatgcatttggttattgggcctctgtttgaatatcctgtgctttttgccaaacaatgcattctacataatcttaaaaaacaaagtcc

SEQ ID NO: 176533 - DNA, 201 bp, Homo sapiens
tccagttacagaatgccagacagaagagctaactaagtacttttcctgttttactctaaaactgaaaatgcagaccttactaatttttagaacatgtgaaatgtaataagggttagtggtcaatgtgccttttcagtaaaacaccttttaagcagaatagtttcaccatgtttttggttacctttctctcatggaaagtat

SEQ ID NO: 176534 - DNA, 201 bp, Homo sapiens
aatgtagttgtgtacaagtatttatattttgtagtatttgatagaaattactcatttctcctttatttcactgataagccattatactgattttttttttwaatctatgtagggagtatttagcctatatgtattcagtacagtattatgaaggaagtgtatttaggaatttcatttcaggatgaatacttgttataaaaa

SEQ ID NO: 176535 - DNA, 201 bp, Homo sapiens
aacatggatgaaattggaaaccatcattctcagcaaactatcacaaggacaaaaaaccaaataccgcatgttctcactcataggtgggaattgaacaatgmgaacacatggacataggaaggggaacatcacacaccggggcctgctgtggggtggggggaagggggagggatagcattaggagatatacctaatgtaaat

SEQ ID NO: 176536 - DNA, 201 bp, Homo sapiens
caatgagataccatctcacaccagttagaatggcaatcattaaaaagtcaggaaacaacaggtgctggagaggatgtgaagaaataggaacacttttacaytgttggtgggactgtaaactagttcaaccattgtggaagacagtgtggcgattcctcaagggtctagaactagaaataccatttgacccagccatcccat

SEQ ID NO: 176537 - DNA, 201 bp, Homo sapiens; identical to SEQ ID NO: 31389

SEQ ID NO: 176538 - DNA, 201 bp, Homo sapiens
atttctcagatttctccagaatctgttcccctaagcaaggccctactcatggttatttcttttttgacacacacatcttttttttttttttttttttttttgagacagagtttttatgctcttgttgcccaggctggagtgcaatggcgcaacctctgctcactgcaacctctatctcccaggttcaagcgattctcctgc

SEQ ID NO: 176539 - DNA, 201 bp, Homo sapiens
ttaaccatgccctgtaattaaggtcagcacaaaataacccaatccaggcaggaccactaataacccatacccttcacgaatgaaggtttcggtcaccccaycaggtaaagaatcatgaccagctgaggtgcttgctgagggaaaagggaatacagaatgagtagtaaaagaaggtaattacaaataccagctatgaccata

SEQ ID NO: 176540 - DNA, 201 bp, Homo sapiens; identical to SEQ ID NO: 31391

SEQ ID NO: 176541 - DNA, 201 bp, Homo sapiens
tgacgattgggagaaagggaaaatgcacgggttggagttaccctttagaccaagctgactcctttctcttatatgcacacacacacacacacacacacacatcttcaataaccttattgatgattgggagaaaggaaaaatgtacaaattggagttaccctttagaccaagctgactcctttctcttacacacacatacac

SEQ ID NO: 176542 - DNA, 201 bp, Homo sapiens
atgttgggcataatttaatttattcttgatgatccagggtagttgtaacaaatgagcacaattgatctatatataataaaatgatggctttgagtttgtaraggtatgcatggcctctcaataaaaaataaatacttacaaagttgtctttataaatgtgtgccaggcactgagtggactgtgttgatttcctggttcatg

SEQ ID NO: 176543 - DNA, 201 bp, Homo sapiens; identical to SEQ ID NO: 31394

SEQ ID NO: 176544 - DNA, 201 bp, Homo sapiens
ttgacgattgggagaaagggaaaatgcacgggttggagttaccctttagaccaagctgactcctttctcttatatgcacacacacacacacacacacacacatcttcaataaccttattgatgattgggagaaaggaaaaatgtacaaattggagttaccctttagaccaagctgactcctttctcttacacacacataca

SEQ ID NO: 176545 - DNA, 201 bp, Homo sapiens
gcaatatgaatcatctaaagatgtgcttctataaataaacagaaagaaagcatcaagcagacccatggtttttctttagaaaaccaagtaaggaatatcawccactgggctttgctttcagattcctggtaatctgtggtatgattcacaccaggttcacagaggaaacaaccccaattattccgtctgcctactgcagca

SEQ ID NO: 176546 - DNA, 201 bp, Homo sapiens
tactggctaggtgatgttggcaaagttacctaccttctctgaggtacattttcttcatttgtacaggattatatgagtatgtctatgtaaatatttatgtrtataaaagatgtccccaagggacattttctatcccccagcctatcccaaggacacaaagacttacttcccacctatatggctccatgccatccatgaatg

SEQ ID NO: 176547 - DNA, 201 bp, Homo sapiens; identical to SEQ ID NO: 31397

SEQ ID NO: 176548 - DNA, 201 bp, Homo sapiens
gctgaatctttcatgttcttgtatttcacagcaactatcacatcagagaggctcaataaatatgtatggattttttgactattctctttcagggggaaaawgagagaaagaaaagaagaaagggagggaggaagattactctctgaccatttctcgatagcatacaaagtcaggaggaagagaaataaaatgtcgttagtg

SEQ ID NO: 176549 - DNA, 201 bp, Homo sapiens
tgtaaatatttatgtgtataaaagatgtccccaagggacattttctatcccccagcctatcccaaggacacaaagacttacttcccacctatatggctccmtgccatccatgaatggaacatagccttaaaatgtcgataacaacagtatcttcctaaaagagttatgaggattaaatgagatgattcacataaaccattt

SEQ ID NO: 176550 - DNA, 201 bp, Homo sapiens; identical to SEQ ID NO: 31400

SEQ ID NO: 176551 - DNA, 201 bp, Homo sapiens
tcaaattcctggcctcaagtcatctgcccacctcgacttcccaaagtgctgggattacaggcatgagcgaccgtgcctggccaaaaaaaaaaaacaacaamaaaaaaaaacaaaaaacaaaacaacttaattcataaaacttaattcaacaatttaagagttatacttcaagaatgaagatatataatgaaaatatgaagt

SEQ ID NO: 176552 - DNA, 201 bp, Homo sapiens
gtctcaaattcctggcctcaagtcatctgcccacctcgacttcccaaagtgctgggattacaggcatgagcgaccgtgcctggccaaaaaaaaaaaacaamaacaaaaaaaaacaaaaaacaaaacaacttaattcataaaacttaattcaacaatttaagagttatacttcaagaatgaagatatataatgaaaatatga

SEQ ID NO: 176553 - DNA, 201 bp, Homo sapiens
aaaaacgagaatcattttactcaatctggttcatgtagcagtatcaggctgtgaaattcatactgctcagacactggttctccaactgtgatgtacgtaaraaatactgtgcctgctgtctcttaaatgtagagtcctgatcttcatccctaagaccctgattcatttgctttagataacactgagagctaatcattttta

SEQ ID NO: 176554 - DNA, 201 bp, Homo sapiens
ccctcatcatttattttctgggcccctccagtctggtggcgggcagagaaaaatgactaacaaaagcagattgtgtgggccacagctcaaatggatttttyccccaccttttctcatcagtagacagtgccatttagacatccatgactttactcttttttctatgcatcttattcagtgattatgagacacaggaaaatc

SEQ ID NO: 176555 - DNA, 201 bp, Homo sapiens
ctggtctcaaattcctggcctcaagtcatctgcccacctcgacttcccaaagtgctgggattacaggcatgagcgaccgtgcctggccaaaaaaaaaaaamaacaacaaaaaaaaacaaaaaacaaaacaacttaattcataaaacttaattcaacaatttaagagttatacttcaagaatgaagatatataatgaaaata

SEQ ID NO: 176556 - DNA, 201 bp, Homo sapiens
tatgaatgtcttgagatattctgaattttatcaatttttagtaaatacataaaatgtatttttacataaaatttttgtgttaaaggtatatatatatatawctatcttaaacaccaaacattcaaactggtatgttttctttgcattctgttatatagcatattatatgttcccttagaattaagagtagatttagaagac

SEQ ID NO: 176557 - DNA, 201 bp, Homo sapiens
gatccaaagaactttcattcttatgacttacattcatatagtcatatatatattctaaagacatattcatttattatgactatattcatttaatatattcmtatacatagagcacatggcattatttcagttatctggattcacctacaaattggtgattgtaaaataagccctaccatgtcaacaactggaaaatttttt

SEQ ID NO: 176558 - DNA, 201 bp, Homo sapiens
tgttcctgagtttgagactaagctttctagaccagtaatttaacaaccagaatttgtactggtcatgccagttctttgtttttttgtttgtttgtttgttttttccccagcatttattttatttttattatactttaagttctagggtacatgtgggaattgaacaatgagaacacttgggcacaggaaggggaacatcac

SEQ ID NO: 176559 - DNA, 201 bp, Homo sapiens
gtgttcctgagtttgagactaagctttctagaccagtaatttaacaaccagaatttgtactggtcatgccagttctttgtttttttgtttgtttgtttgttttttccccagcatttattttatttttattatactttaagttctagggtacatgtgggaattgaacaatgagaacacttgggcacaggaaggggaacatca

SEQ ID NO: 176560 - DNA, 201 bp, Homo sapiens
gtgtgtgtgtgtgtgtgtgtgtgtgtgtgtgtgtgttttgtaagctttttactccttctcaacaaagcatttcaaggagccaacagcaaattagaattgamactccattatgtctctcaggtcttctgatcagctcttattatacttactcttagtaaaataatctctattaatagtgagaagtaaggaactatatgatat

SEQ ID NO: 176561 - DNA, 201 bp, Homo sapiens
ttttcattcctgctaattccactgtcagttcctcagctgacgctaaatgctttttgaaaatatgaacatgtgaatgttcacagcaacataattccttctcyttcctttacagttttgatgtggacaatggcacatctgcgggacggagtcccttggatcccatgaccagcccaggatccgggctaattctccaagcaaatt

SEQ ID NO: 176562 - DNA, 201 bp, Homo sapiens
tctaaatctgtcatctcagcccaacccctattcagattatctgtgccctctgcgtagccattcacttcgcctgggtgcaatcatgccttccttacccaacrtttaacaagtccagcctagcaacctacatcatgccatccaacagaaggaaggcattattgactcagaacaaagtataggcgctcttagaataagtttatt

SEQ ID NO: 176563 - DNA, 201 bp, Homo sapiens
tcgtgcagacccggggcagtaaggcatgttaaccttgaggacatcggacctggctggcctgactgttgggtctccctcctaggacacggcgagccatgggyggggcagtgcctttcaaagctgctctcacagagcgcttagccctcatccagccctccagggagcaggtgcagagactcatagcagagcaacccccacacc

SEQ ID NO: 176564 - DNA, 201 bp, Homo sapiens
gaatcctatgaacccaggaagtggtagtcgcaatgaaccaagatcatgccactgcacgaaagagcaagactgtctcaaaaaataataataaaaaatttttwaaaaaagctttttattgtggggagctctttggaaaaaagtatattgaattcagaaacaaaaagtaaaataatgtttacaaggggcaagggggagggagaa

SEQ ID NO: 176565 - DNA, 201 bp, Homo sapiens; identical to SEQ ID NO: 31442

SEQ ID NO: 176566 - DNA, 201 bp, Homo sapiens
ggcaacatagcaagaccctacaaaaaataaaaaaaagtagccaggcgaggtggggcacacctggagtcacagctactcaggaggctgaggcatgagaatcrcttgaacccaggaggcagaggttgcagtgagtggagattgtgtcactgcactccagcctgggtgacagagcgagactccaaaaaataaataaataaataa

SEQ ID NO: 176567 - DNA, 201 bp, Homo sapiens
tgcccttatgccattctatcctgaacccacctttatatgatgatgaaagaaattagcaatatgttattatctatctgttggtatatatcaaatgctcaccyaaaaatagcaacaaccagtgaaaaacatcatgtgctttggtgtttttatttggatgactatttactttgcaatctactagcaagctataatattgtatga

SEQ ID NO: 176568 - DNA, 201 bp, Homo sapiens
atcaaatgtgtccatttcacatagggctttgcctttgccatgtcattctaacgtaagaaaaactacaccaaaaatatagtgtggccaggcgcagtggctcrcgcctgtaatcccagcactttgggaggctgaggcaggtggatcacctgaggccaggagtttgagaccggcctgggcaacacggtgaaactccgtccctac

SEQ ID NO: 176569 - DNA, 201 bp, Homo sapiens
cctgccttggcctgccagagtgctgggattacaggtgtgagccaacatgcccggccagggattttatttctaagcattttaaaatcaatgctatatatatrtgtgtgtgtgtgtgtgtgtgtgtgtgtgtgtgtgtatacacatacacatatacgtatatatatgtgtgtgtatataaatatatacacacatatgtatata

SEQ ID NO: 176570 - DNA, 201 bp, Homo sapiens
caagaccccatttctataatcataatcataatcataaaaggaaataaaagcaaagcaaagcttgtttattcccaggaacaggtgtggagctccaggctgtstgactttaccgacggccatttttagccttctcagtgacatttaagtgaagatatcatctatgcagaaagctggcattggtcagatacttctctgggtctt

SEQ ID NO: 176571 - DNA, 201 bp, Homo sapiens
aatcacttgaagctgggaggcggaggctgcagtgagctgagatctcgccactgcacttccagcctgggtgacagagcgagaccctgtctttaaaaaaaaaacaagacagagactttagaagggagacttttgttaatggattactgaactacagcccttggggaagcctcctgtcccctctctggtccatagcggtgccac

SEQ ID NO: 176572 - DNA, 201 bp, Homo sapiens
cctggccaatgtggcaaaaccccatctctactaaaaatacaaaacttagctggtgtggtggcatgcgcctataatcccagctacttgggaggctgagacaygagaatggtttgaacctgggaggcggatattgcagtgagccgagatcacaccactgcactccagcctgggcaacagagtgagacactgtctcaaaaataa

SEQ ID NO: 176573 - DNA, 201 bp, Homo sapiens
gaatggtttgaacctgggaggcggatattgcagtgagccgagatcacaccactgcactccagcctgggcaacagagtgagacactgtctcaaaaataaatwaattaattaattaatttgatactactattttatggtgttctgccacctcaacaaggtttgagaattactggaagcttaaaggatacaacaaaattcaccc

SEQ ID NO: 176574 - DNA, 201 bp, Homo sapiens
tcctcggagggttgatgagagcctgagcccctgatgtgggccacctctccagcctcctctgcttttctcccagttcttccagaacacttctcacttccccrgctcctctccccagactgtggttctccacggagagtggcccacttagcttctagaggtatcagggtggaaggcagctctctgggagcagggtaagggcag

SEQ ID NO: 176575 - DNA, 201 bp, Homo sapiens
aaaaaaaaaaaaaagagaaaacagtaagttaaagagttccaggtatttaaaaccttgcagaatttgtgtttcaatgtgttgcatttcagtaagttggaggyttttatgcttagcactcattccctgaagtatttttcagctcttttgtatgtaaacaattcaacaaaaattttccccaaagtgaaagaaatagatggtcag

SEQ ID NO: 176576 - DNA, 201 bp, Homo sapiens
gtgagggtccctttgcccttctctccgctccctcccacgtggcttagggccacaggcactggggtctcaggggaggcagggcgtgcacatgtctgggctgrgcgtgtgtgctgctcccttgcagtgtggctgaaatgtgagctgtgtctccctgcctgttacctgaccctgagcagaggaagagtaacaagtgtgtgcccc

SEQ ID NO: 176577 - DNA, 201 bp, Homo sapiens; identical to SEQ ID NO: 31445

SEQ ID NO: 176578 - DNA, 201 bp, Homo sapiens
aagaggatcacttgaggacaggaattcgagaccagcctggacaacagagcaagaccctgtctctacaaaaaataaaaacattagctggatgtggcggcacrcacctgtagtcccagctacttggtgggctgagatgggaggatcccttgaactcagtagttcaaggctgcagtgagctgtgactctgccattgtactccag

SEQ ID NO: 176579 - DNA, 201 bp, Homo sapiens
gggagaggttgcagtgagttgagattgtgccaccggactccaggctggtcgacagagcgagacttcgtctaattaaaaaaaaaaaaaaagaaaagaaaagaaaaatcatcctcatgcattttgcccatgtgattgtgtcaacctctcttaatttttcaagttttaaaataattaactttaatatacaattacagcccttta

SEQ ID NO: 176580 - DNA, 201 bp, Homo sapiens
agggagaggttgcagtgagttgagattgtgccaccggactccaggctggtcgacagagcgagacttcgtctaattaaaaaaaaaaaaaaagaaaagaaaagaaaaatcatcctcatgcattttgcccatgtgattgtgtcaacctctcttaatttttcaagttttaaaataattaactttaatatacaattacagcccttt

SEQ ID NO: 176581 - DNA, 201 bp, Homo sapiens
tgaacccgggagggagaggttgcagtgagttgagattgtgccaccggactccaggctggtcgacagagcgagacttcgtctaattaaaaaaaaaaaaaaaraaaagaaaagaaaaatcatcctcatgcattttgcccatgtgattgtgtcaacctctcttaatttttcaagttttaaaataattaactttaatatacaatt

SEQ ID NO: 176582 - DNA, 201 bp, Homo sapiens
ttgaacccgggagggagaggttgcagtgagttgagattgtgccaccggactccaggctggtcgacagagcgagacttcgtctaattaaaaaaaaaaaaaaagaaaagaaaagaaaaatcatcctcatgcattttgcccatgtgattgtgtcaacctctcttaatttttcaagttttaaaataattaactttaatatacaat

SEQ ID NO: 176583 - DNA, 201 bp, Homo sapiens
cttgaacccgggagggagaggttgcagtgagttgagattgtgccaccggactccaggctggtcgacagagcgagacttcgtctaattaaaaaaaaaaaaaaagaaaagaaaagaaaaatcatcctcatgcattttgcccatgtgattgtgtcaacctctcttaatttttcaagttttaaaataattaactttaatatacaa

SEQ ID NO: 176584 - DNA, 201 bp, Homo sapiens
gcttgaacccgggagggagaggttgcagtgagttgagattgtgccaccggactccaggctggtcgacagagcgagacttcgtctaattaaaaaaaaaaaaaaagaaaagaaaagaaaaatcatcctcatgcattttgcccatgtgattgtgtcaacctctcttaatttttcaagttttaaaataattaactttaatataca

SEQ ID NO: 176585 - DNA, 201 bp, Homo sapiens
agacagaagaatcgcttgaacccgggagggagaggttgcagtgagttgagattgtgccaccggactccaggctggtcgacagagcgagacttcgtctaattaaaaaaaaaaaaaaagaaaagaaaagaaaaatcatcctcatgcattttgcccatgtgattgtgtcaacctctcttaatttttcaagttttaaaataatta

SEQ ID NO: 176586 - DNA, 201 bp, Homo sapiens
tcccagctgccctgtgatggcttcaaagacggcaggtgtcagcccactggctcggtccctgaggatgctggccaagtgggaagtgggggacactaggaagrccccgcagaagccacccaaggcttcgtggcaaacgagcccagagcgtccctgtgctggaggggcagggcctggcagggcgggggctgcagcccagcttct

SEQ ID NO: 176587 - DNA, 201 bp, Homo sapiens
caactctgctaaaaaaaaaaatacaaaaattagctgggcatggtggcacatgcctatagtcccagctacttgggaggctgagggaggagaatcacttgaasctgggaggcggaggctgcagtgagctgagatctcgccactgcacttccagcctgggtgacagagcgagaccctgtctttaaaaaaaaaacaagacagaga

SEQ ID NO: 176588 - DNA, 201 bp, Homo sapiens
ttgaggtcaggagttcaagaccagcctggccaacatggtggaaccccaactctgctaaaaaaaaaaatacaaaaattagctgggcatggtggcacatgccyatagtcccagctacttgggaggctgagggaggagaatcacttgaagctgggaggcggaggctgcagtgagctgagatctcgccactgcacttccagcctg

SEQ ID NO: 176589 - DNA, 201 bp, Homo sapiens
gtggtggcaggtgcctgtaatcccagctacctgtgaggctgaaggaggagaatcgctggaaccctggaggcagaggttgcagtgagccgagatcgcaccaytgcactccagcctgggcgacagagcgagactccatctcaaaaaaaaaagaaaaagaaaaacatatataaaacattaacaccccaggcagtataccttgtc

SEQ ID NO: 176590 - DNA, 201 bp, Homo sapiens
gtcagcgtctcattctgttgcccatgttggagtacagtagtataatcatggcttactacagcgttgaactcctggggtcaagtggccctccctccttagcctccttaatagtggggactacaggtgcatgccaccatgcccagctaatttttaaaaaaaaattttttttgagagacagggtctcactttgtcacccaggct

SEQ ID NO: 176591 - DNA, 201 bp, Homo sapiens
ccaggtgtatttcagcaccagtgttggggggcacatcctcccaagagcatctaactattcctttagagtgccctctgggtggtttatttattttcattttmattttttaattttttaattatttttttaaattgtattttttcgagatgaagtctcactctgtcactcaggctggagtgcagtggtgaaatgtcagctcac

SEQ ID NO: 176592 - DNA, 201 bp, Homo sapiens
cctctgcctcccgggttccagcaattctcctgcctcagcctcctaagtagctgggattacaggcgtgcaccaccacacctggctaatttttgcatttttttagtaaagatggggttttgtcatgttgaccaggctggtctcagactcctggcttcaggtgatctgcccacctcagcttcccaaagtgtttgggattatggg

SEQ ID NO: 176593 - DNA, 201 bp, Homo sapiens
taaacatttttcctgtgttcccacagagccttatgcacacctctgcttttttttttttttttttttttgagacggagtctcgctttgtcgcccaggctggrgtgcagtggcgcgatcttggctcaccgcaagctccacctcccaggttcacgccattctcctgcctcagcctcccgagtgggtgggactacaggcgcctgc

SEQ ID NO: 176594 - DNA, 201 bp, Homo sapiens
ataaggctaaacatttttcctgtgttcccacagagccttatgcacacctctgcttttttttttttttttttttttgagacggagtctcgctttgtcgccckggctggagtgcagtggcgcgatcttggctcaccgcaagctccacctcccaggttcacgccattctcctgcctcagcctcccgagtgggtgggactacagg

SEQ ID NO: 176595 - DNA, 201 bp, Homo sapiens
gcgtgaacccgggaggcggagcttgcagtgagcggagatcgcgccactgcactccagcctgggcgacagagccagactctgtctcaaacaaaaaaaacaamaaaaaaaagtaaaataaaataaatgtaaaaatcattcttacttgtgagccataccaaaccaggtggcagggtggatttggcctacaagctatagtttgct

SEQ ID NO: 176596 - DNA, 201 bp, Homo sapiens
ggagccctaattcgactcaacttcccacttccaaccaagctgcacacattacatccaattaaatttcccccttcccctctacacatcagagggctagttcrgtttccatacttccagctgatcacattattcatgggggaaaggagcaactaaacagagaacaccaaatgaaaaaagtatgattctctaacagtttagttt

SEQ ID NO: 176597 - DNA, 201 bp, Homo sapiens
ttcccatgtaactttggtaggccttgtgcaggtcttggagtttccagtgactttttgtcttctagtttcgttgaatatgggatttctgcctcattcccccsctcaccaccatatctccctatcactttgcataatttctaggaggaggaaggggacaattcagtcaaatattgccacagttcttatactataatcatatcg

SEQ ID NO: 176598 - DNA, 201 bp, Homo sapiens
ttactgatcaactctctcaactaccccaaacccagcagcaatacaccagtcataaattatatatcaaaactggtatataatagaaaacaatgatatcagtytaaaacaaaagcaaaaagcaagtttgtactcaagtataacccctaatactgcaaatattaaactacaggttatctcttgccatctgcaatgtcagctatt

SEQ ID NO: 176599 - DNA, 201 bp, Homo sapiens
tgctaggattatagaaatgagccactgcggccagcctggacttcctcttctgagtgccctgctgacctgccctgatgatgactgttcctgcagaggtctgygggacccccagttacctggcccctgagattatcgagtgctccatgaatgaggaccacccgggctacgggaaagaggtggacatgtgagtgcgccgggaaa

SEQ ID NO: 176600 - DNA, 201 bp, Homo sapiens
ctcccagttcttccagaacacttctcacttccccggctcctctccccagactgtggttctccacggagagtggcccacttagcttctagaggtatcagggyggaaggcagctctctgggagcagggtaagggcagtggtggtcttgggaccgatccagctatcaaccctctgtttccacaggatgaagagaggggagctct

SEQ ID NO: 176601 - DNA, 201 bp, Homo sapiens
aacacaggaggctgagtcctctcctgccctggtgagaggcgcctgccacagagggatgggagacagggaaggggaagttctttcctgaggctgaagctctygagcttggaattgcgctgtttgcaacatggccagggaatgacagtgaccctagaaggcttttctccttgtcaccacccggctgcttacagctcccctggc

SEQ ID NO: 176602 - DNA, 201 bp, Homo sapiens
gaaagggggagagaatagattttaaaatgcttaaaaaatggcctttcagagtgctctgttccaattgtttgtgtgtttgcaatcctgtgtcaataatactyggcctctaacagaaacacctggcccccagccatcgtcaacacacattgggccccttctccaaaacacaggaggctgagtcctctcctgccctggtgagag

SEQ ID NO: 176603 - DNA, 201 bp, Homo sapiens
tgttggctacaaattacttcgattaactatcatgcacatgcaattataatgattgaaacgtcttcatgtgtaatttatttcccaggttatctctactttacagatgaggaagcttgaggctcagtagaagtttactcaagatgacagagctaccagttaacagtaacacataattgtacatccttgcctctttatggcaag

SEQ ID NO: 176604 - DNA, 201 bp, Homo sapiens
caagtgatcctcccacctcagcctccctagtagctgggacaacaggtatgtgccaccaggtctggctaaccatctctatttttttttttaaaaaggggggrccaggcacagtggctcatgcctgcaatagcagcacttcctgcaataccagggaggccaaggcaggaggatcacctgagatcaggagtttgagaccagcct

SEQ ID NO: 176605 - DNA, 201 bp, Homo sapiens
atgttggctacaaattacttcgattaactatcatgcacatgcaattataatgattgaaacgtcttcatgtgtaatttatttcccaggttatctctactttacagatgaggaagcttgaggctcagtagaagtttactcaagatgacagagctaccagttaacagtaacacataattgtacatccttgcctctttatggcaa

SEQ ID NO: 176606 - DNA, 201 bp, Homo sapiens
gcgcaaggtctcagggcaccccaacatcagtgagtgatggccccaagccacacggcagggtgcccccctgtgattctgccctgacagcccaagccagggartgtggccccaccgcacagccaactagaaccacccaggctcaaggctcccagctccaccctcactgctctgatagaaggggtcccaggcagggatggatgc

SEQ ID NO: 176607 - DNA, 201 bp, Homo sapiens
aatgttggctacaaattacttcgattaactatcatgcacatgcaattataatgattgaaacgtcttcatgtgtaatttatttcccaggttatctctactttacagatgaggaagcttgaggctcagtagaagtttactcaagatgacagagctaccagttaacagtaacacataattgtacatccttgcctctttatggca

SEQ ID NO: 176608 - DNA, 201 bp, Homo sapiens
aaatgttggctacaaattacttcgattaactatcatgcacatgcaattataatgattgaaacgtcttcatgtgtaatttatttcccaggttatctctactttacagatgaggaagcttgaggctcagtagaagtttactcaagatgacagagctaccagttaacagtaacacataattgtacatccttgcctctttatggc

SEQ ID NO: 176609 - DNA, 201 bp, Homo sapiens
ctactaaaaatacaaaaaattagccgggcgtggtggcaggcacctgtagtcccagctacttagagaggctgaggcaggagaatggcgtgaacccgggaggyggagcttgcagtgagcggagatcgcgccactgcactccagcctgggcgacagagccagactctgtctcaaacaaaaaaaacaaaaaaaaaaagtaaaata

SEQ ID NO: 176610 - DNA, 201 bp, Homo sapiens
ctccagggtataactagattgttctagcagagtcctttctagatcatcccaggaggtaagaagattgaacctcaattcttaatcctgtaattggcaaactwtgctcctgcaactcttgcacagccgattcttcccatttgtttcctgggaaaaaatcgggatactcggccaggcgtggtggctcacgcctgtaatcccaac

SEQ ID NO: 176611 - DNA, 201 bp, Homo sapiens
caaatgttggctacaaattacttcgattaactatcatgcacatgcaattataatgattgaaacgtcttcatgtgtaatttatttcccaggttatctctactttacagatgaggaagcttgaggctcagtagaagtttactcaagatgacagagctaccagttaacagtaacacataattgtacatccttgcctctttatgg

SEQ ID NO: 176612 - DNA, 201 bp, Homo sapiens
ccagcactttgagaggccgaggcgggcggatcacgaggtcaggagatcgagaccacggtgaaaccccgtctctactaaaaatacaaaaaattagccgggcrtggtggcaggcacctgtagtcccagctacttagagaggctgaggcaggagaatggcgtgaacccgggaggcggagcttgcagtgagcggagatcgcgcca

SEQ ID NO: 176613 - DNA, 201 bp, Homo sapiens
ctcgcatagctgtgtgttcttttacgtgatgtttgccattacccatctttctgatgtgtgtgggctttctagtctaatgagcataggtgtgtatactcttrtatttccggtgtgcttgaaactgctccatccagttttctataatagtaccatttttcctccctgaagcttcagtaaaccatttagtcttgataacaagat

SEQ ID NO: 176614 - DNA, 201 bp, Homo sapiens
ggagatggaacagaaatggtgcttgggctgggactctcccaagtccaccaacttcagggcccagggcagggcaaggtactgctcacagggccaccagctcsgggcccattgcttccctggtcacttctagccatcctggcctggaactagggtaatgggaacctggggaggggacttagctgaagaaatgcctacctcatg

SEQ ID NO: 176615 - DNA, 201 bp, Homo sapiens
gtctcaaaaaaagtaaagtaggccgggcgcggtggctcacgcttgtaatcccagcactttgagaggccgaggcgggcggatcacgaggtcaggagatcgakaccacggtgaaaccccgtctctactaaaaatacaaaaaattagccgggcgtggtggcaggcacctgtagtcccagctacttagagaggctgaggcaggag

SEQ ID NO: 176616 - DNA, 201 bp, Homo sapiens
ttcaagcgattctcctgtctcagcctcctgagtagctgggactacaggcacatgccaccacgcccagctaatttttgtatttttagtagagatggagtttygccatgttggccaggctggtctcgaactcctggcctcagatgagccacctgcctcggcctcccaaagtgctaggattatagaaatgagccactgcggcca

SEQ ID NO: 176617 - DNA, 201 bp, Homo sapiens
cctgtctcaaaaaaagtaaagtaggccgggcgcggtggctcacgcttgtaatcccagcactttgagaggccgaggcgggcggatcacgaggtcaggagatygagaccacggtgaaaccccgtctctactaaaaatacaaaaaattagccgggcgtggtggcaggcacctgtagtcccagctacttagagaggctgaggcag

SEQ ID NO: 176618 - DNA, 201 bp, Homo sapiens
cagtcgtggtggctcacacctgtagtcccagctactcaagaggccatgatggaaggttcacttgagcccaggagtttgaggctacagtgagctatgatggyaccactgcactccagcctaggtgacagaatgagatcctgtctcaaaaaaagtaaagtaggccgggcgcggtggctcacgcttgtaatcccagcactttga

SEQ ID NO: 176619 - DNA, 201 bp, Homo sapiens
attatttccccagttgaccatctttaagtcctaattagaatgtttatttatttatattttgagtcagagtctaactcaggctgtagtgcagtgacgtaatyatggctaactgcagccttgacttcctgggctcaagctattctaccacgtcagcctccagagtaactgggactacaggcatgcgccacctgtgcaccacac

SEQ ID NO: 176620 - DNA, 201 bp, Homo sapiens
ttaatagacactgaaatttgaatttcatttttatttattattattacttttgagacagggtctcactctgtcacccaggctgcagtgcagtgtcatggtcrtagctcactgcagcctcaaactcctgtgctcaagcaatccttctgcctcaccctcctgagtagctaggtctataggtgtgtgccactacacctggctaat

SEQ ID NO: 176621 - DNA, 201 bp, Homo sapiens
gcccctccggccaggtgagaccatcgcagggtttgagaccaaagcgcggccgtccggactctactggggcaatgacgcagagggaggccgcgggcgggggygaactaaggtcggctgcggcgtgggctcgcctctgccaggcgggggtagattgaacgtaaagcctatgttaggggagtgtggggagggaattcacttacg

SEQ ID NO: 176622 - DNA, 201 bp, Homo sapiens
cttgaacctgggaggcagaggttgcagtgagtcaagattgtgccactgcactccagcctgggtgacagagcgagactccttctcaaaaaaaaaaaaaaaaagatttattaatagacactgaaatttgaatttcatttttatttattattattacttttgagacagggtctcactctgtcacccaggctgcagtgcagtgtc

SEQ ID NO: 176623 - DNA, 201 bp, Homo sapiens
ggttgcgcgttgaggccagccccgcctcccatcttccggtctcctcagaagtcgcttagctcttcggtggttgtcacacgtccggaggcctagccgtcgcktacctaggatgccgcgtggaagccgaagccgcacctcccgcatggcccctccggccaggtgagaccatcgcagggtttgagaccaaagcgcggccgtccg

SEQ ID NO: 176624 - DNA, 201 bp, Homo sapiens
cgtggtggcatgcacctataatcctagctacttgggaggctgaggcaggagaatcacttgaacctgggaggcagaggttgcagtgagtcaagattgtgccmctgcactccagcctgggtgacagagcgagactccttctcaaaaaaaaaaaaaaaaagatttattaatagacactgaaatttgaatttcatttttatttat

SEQ ID NO: 176625 - DNA, 201 bp, Homo sapiens
ggaaaatcagctctcataactaagttaatttagtataaaaatagaattgatagtgagggtataaagtgtaaccatcagttaaacctctcctgtcattcctrgcttccttgcttcagaattgaaatggaagtgggggtgtccctactctgtagaatctgggactgggcaaatgtttgtgtggcctccttaaactagctgtta

SEQ ID NO: 176626 - DNA, 201 bp, Homo sapiens
ggtggctcacacctgtaatcccagctctttgggaggctgaggcaggaggatcatttgaggtcaggagttcgagaccagacaggccaacatggtgaaacccyatctctactaaaaatgcaaaaattagctgggcgtggtggcatgcacctataatcctagctacttgggaggctgaggcaggagaatcacttgaacctggga

SEQ ID NO: 176627 - DNA, 201 bp, Homo sapiens
cctctccgtcccaagtagctgggattacaggtgcctgccaccatgcccggctaatttttgtatttttagtagagatggggtttcaccatgttggccaggcrggtctcgaactcctgacctcaagtgatcctcctgcttcagcctcccaaagtgctgagattacaagtgtgagccactgcagccggccccttgttgagttct

SEQ ID NO: 176628 - DNA, 201 bp, Homo sapiens
gaagttctctgcctgtgtgctggttggttgcgcgttgaggccagccccgcctcccatcttccggtctcctcagaagtcgcttagctcttcggtggttgtcmcacgtccggaggcctagccgtcgcgtacctaggatgccgcgtggaagccgaagccgcacctcccgcatggcccctccggccaggtgagaccatcgcaggg

SEQ ID NO: 176629 - DNA, 201 bp, Homo sapiens
gcatggtggtgcacacttgtagtcccagctactcaggaggctgaggtgggagaattgcttgggcccaggaattcaaggctagagtgagccgtgatcaccastgcactctagcctgggcaacagagaaagaccctgtctcaaaaaaaaaaaaaaaaaaaaaaagaataggaagcttctgatatttgtctttctggagtacta

SEQ ID NO: 176630 - DNA, 201 bp, Homo sapiens
cctgatgtgggccacctctccagcctcctctgcttttctcccagttcttccagaacacttctcacttccccggctcctctccccagactgtggttctccayggagagtggcccacttagcttctagaggtatcagggtggaaggcagctctctgggagcagggtaagggcagtggtggtcttgggaccgatccagctatca

SEQ ID NO: 176631 - DNA, 201 bp, Homo sapiens
ctgagcccctgatgtgggccacctctccagcctcctctgcttttctcccagttcttccagaacacttctcacttccccggctcctctccccagactgtggytctccacggagagtggcccacttagcttctagaggtatcagggtggaaggcagctctctgggagcagggtaagggcagtggtggtcttgggaccgatcca

SEQ ID NO: 176632 - DNA, 201 bp, Homo sapiens
tatgaagtgctttgtaaaatgtgtatcaattaggtatctgtggtcaagtgtggtttctcacacctgtaatcccagcactttgggaggaccaaaacaggagsattgcttaagcccagaattttgagaccagtctaggcaacatcgtgagacccctatctcttgttattttattttttattttttttgaggcagagtctcgct

SEQ ID NO: 176633 - DNA, 201 bp, Homo sapiens
atcacctgtcttggctgcccaaagtcctgggaacaggcatcagccaccatgctggcccttgttgagttcttttttttttttttttttttttgagatggagwctcgctctgtcacccaggctgcagtgcagtgcagtggtgcaatctcggcttactgcaatctccatgtctccacctcccagattcaagcggttctcccgcc

SEQ ID NO: 176634 - DNA, 201 bp, Homo sapiens
ggaggaaattggccaggcttggtggctcacacctgtcatcccagcactttgggaggccgaggcaggtgaatcacttgaggtcaggagtttgagaccagccyggccaatatggtgaaaccccatctctactaaaaatacagaagaattagccaggcgtggtggcaggcgcctgtaattccagctactcaggaggcaggagaa

SEQ ID NO: 176635 - DNA, 201 bp, Homo sapiens
aacttcaggcctgcggagacgacggagaacggaagttctctgcctgtgtgctggttggttgcgcgttgaggccagccccgcctcccatcttccggtctcckcagaagtcgcttagctcttcggtggttgtcacacgtccggaggcctagccgtcgcgtacctaggatgccgcgtggaagccgaagccgcacctcccgcatg

SEQ ID NO: 176636 - DNA, 201 bp, Homo sapiens
aggctggagtacaatggtgtgatctcggctcactgcaacctccacctccaaggttcaagtgattctcctgcctcagcctcctgagtagctgggattacagrtgcccaccaccatgcctggctaatttttgtatatttaatagggacagcatttcaccatgttggccaggctggtcttgaactcttgatctcaagtgagttg

SEQ ID NO: 176637 - DNA, 201 bp, Homo sapiens
acccaggctggagtacaatggtgtgatctcggctcactgcaacctccacctccaaggttcaagtgattctcctgcctcagcctcctgagtagctgggattrcaggtgcccaccaccatgcctggctaatttttgtatatttaatagggacagcatttcaccatgttggccaggctggtcttgaactcttgatctcaagtga

SEQ ID NO: 176638 - DNA, 201 bp, Homo sapiens
cactgcaagctccgcttcccgggttcacgccattctcctgcctcagcctcccgagtagctgggactacaggcgcccgccaccgcgcccggctaattttttrtatttttagtagagacggggtttcaccttgttagccaggatggtctcgatctcctgacctcatgatccacccgcctcagcctcccaaagtgctgggatta

SEQ ID NO: 176639 - DNA, 201 bp, Homo sapiens
tctcctgtctcagcctcctgagtagttgggattacaggtgtgggccaccacacctggctaattttcgtatgtttagtagagacagggttttgccatgttarccaggctggtctcgaactcctgacctcaggtcatccatccacctcggcctcccaaagtactgggattacaggcgtgagccactgcacccggccagcagtt

SEQ ID NO: 176640 - DNA, 201 bp, Homo sapiens
tgatatctcctgtctcagcctcctgagtagttgggattacaggtgtgggccaccacacctggctaattttcgtatgtttagtagagacagggttttgccaygttagccaggctggtctcgaactcctgacctcaggtcatccatccacctcggcctcccaaagtactgggattacaggcgtgagccactgcacccggccag

SEQ ID NO: 176641 - DNA, 201 bp, Homo sapiens
acagccttaagttgggaattaaataaatcatgctttcattcattaaatatatttattatattttcttttctttttttatttttatttatttttttttttttcagacagagtctcgttctgtcgcccaggctggagtgcagtggtgtgatctcggctcacttcaacctccgcctacagggttcaagggattctcctgcctca

SEQ ID NO: 176642 - DNA, 201 bp, Homo sapiens
caacatagcgagacccccatctctacaaaaaatacaaaaattaggccaggggtgcaccgcgcccggctaatttttgtatcttttgtagggacggggtttcrtcatgttgcccaagccatccatcctcacgcctcggcctcccaaaatgctgggattacagggcccagtcagcctcatgttttctttaagcagtccctccct

SEQ ID NO: 176643 - DNA, 201 bp, Homo sapiens
tcacgcctgtaatcccagcactttgggaggccaaggcgggcggatcacgaggtcaggaaatcgagaccatcctggctaacacggtgaaaccccgtctctaytaaaaaatacaaaaaattagccgggcgtggtggcgggcgcccgtagtcccggctacttgggtggctgaggcaggagaataccgtgaatccaggaggcgga

SEQ ID NO: 176644 - DNA, 201 bp, Homo sapiens
ttttaattaagaatataagtagtcttggccgggcgtggtggctcacgcctgtaatcccagcactttgggaggccaaggcgggcggatcacgaggtcaggaratcgagaccatcctggctaacacggtgaaaccccgtctctattaaaaaatacaaaaaattagccgggcgtggtggcgggcgcccgtagtcccggctactt

SEQ ID NO: 176645 - DNA, 201 bp, Homo sapiens
gcccagctgagattcaatttcttcatctgaaaaatggggatatctatggacgaccatagcttattaataaaagaaaaaataagtatgaaaaatagggatamtatctcactatctcttaggtagcagctgtatcaattaaaataacatggaaccaggagcaatggctcagagacagggtgcagaggctaaggcaggaggatt

SEQ ID NO: 176646 - DNA, 201 bp, Homo sapiens
cctatcagctgtgttcctggagtgcctaaacattcagttcctgaaagaggctccctttcagaaagagggtctcagcacagttcactcctggccagttcccyggcatattccctcctgggtttatagaagacacttttgctaattttcctggaggctcgggacctctgtgagtctgtagtgttaatgctcagatgtccctcg

SEQ ID NO: 176647 - DNA, 201 bp, Homo sapiens
tgaccagggaagcaatgggccatgagctggtggccctgtgggcagtatcccgccctgccctgggccctgaagttggtggatgttgggggagtcccagcccsagcgccatttctgttccatcatctccattgtctctttggacttcctctcttttttttttgaaacagagtctcactctgtcaccaggctggagtgaagtgg

SEQ ID NO: 176648 - DNA, 201 bp, Homo sapiens
gcacccggcctccctaacctgtacaggtctgcattatgtagggtgatcatgcacactgtccctgcgacagcccgggcagtcagctgctgcagtcatgcatygagaaagcctccagggcagtgctctcagcatacgtggaaatcaaaattgctcccagagaagcaagtgccctccgcacaaggctggatttacgttctctgg

SEQ ID NO: 176649 - DNA, 201 bp, Homo sapiens
cctccctaacctgtacaggtctgcattatgtagggtgatcatgcacactgtccctgcgacagcccgggcagtcagctgctgcagtcatgcattgagaaagyctccagggcagtgctctcagcatacgtggaaatcaaaattgctcccagagaagcaagtgccctccgcacaaggctggatttacgttctctgggcctggag

SEQ ID NO: 176650 - DNA, 201 bp, Homo sapiens
ctgcccacctcagcctcccaaagtgctgggatgacaggtgtgagccatcacgccacgcctaaatcctacatctgaagcaggagttgagttccctggtaggrgcctccatgttcctgacacaaagcggggtagctcagcgcctctgtgtacaggcctgagtgtcctggctctgtactgcctctatcctgcagcaggacccct

SEQ ID NO: 176651 - DNA, 201 bp, Homo sapiens
tcactgtgcaaaccactctgaatcatttcaaaaccaacactgtgtcccaacaactcacagatggtagcattatcctatctttattttctttcattttttttgagatggagtttcgcacttgttacccaggctggagtacaatggcacaatctcgactcaccacaacctccacctcctgggttcaagcaattctcctgcctc

SEQ ID NO: 176652 - DNA, 201 bp, Homo sapiens
gcctggtcaacgtggtgaaaccacgtcgctataaaaatacaaaaaataagctgggcgtggtggcgcgtgcttgtagtccccgctacttgcgtggctaaggmggcaggatcgcttgaatccaggaggtctaggctgcagtgagccatgatcgccccacttcactccagcctaggcgacagagtgagaccctgtgtcaaaaaa

SEQ ID NO: 176653 - DNA, 201 bp, Homo sapiens
ggcatgcaccaccatgccccgctaatttttgtatttttgctggagatggagttttgccatgttggccaggctggtctcgaactcctgacctcaggtgatcygcttgcctcagcctcccaaagtgctgggattacatgcttgagccaccgcgcctggccagaaaatttttaaaaagaaataggccgggcgcggtatctcaca

SEQ ID NO: 176654 - DNA, 201 bp, Homo sapiens
tcccagctactggggaggttgaggcaggagaatcgcttgaacccaggaggcggaggttgcaatgagctgagatagcaccactgcactccagcctgggcaayagagtgagactcagtctcgggggaaaaaaaaattgtgttttggtggggagggtcctgtagctaagggtagagatgctgtgaccaagtgtcctgccccagg

SEQ ID NO: 176655 - DNA, 201 bp, Homo sapiens
gtgagccgagatcatgtcactgcactccagcctgggcaacagagcgagattcctcaaaaaaaataataataataataaaggccaggtacagtgattcacayctgtaatcccagcactttgggaggcagaagcgggtggatcacctgaggtcaggagttcgagaccagcctggccaacatagtgaaacccgtctctactaaa

SEQ ID NO: 176656 - DNA, 201 bp, Homo sapiens
atgggataatgtctggacccacttccaaatggctccaggagagggggagtgtgcgattccgcaggagcaggactggccacaaactggcagctatttaagcyggccgagtacgtgggggcgggggtcgttcctcgttatattctcctttttccttttttttttttttttttttttgagacggagtctcgctgtcgcccaggc

SEQ ID NO: 176657 - DNA, 201 bp, Homo sapiens
cacgcccggctaattttttgaatttttagtagagacggggtttcactgtgttagccaggatggtctcgatttcctgacctcgtgatccgcccgcctcggcytcccaaagtgctgggattacaggcgtgagccaccgcgtccggccttttttttttttttttttttttttttttgagataaagtatcgatctgtcgcccagg

SEQ ID NO: 176658 - DNA, 201 bp, Homo sapiens
ccgcagcctcctagctgggattacaggtatgcaccacctcgcctcacaaattctaatttttgtatttttagtagagacaggtttcaccatgttggccaggstggtcttgaactcccgacctcaggtgatccaccaaccttggcctcccaaagtgctgggattacaagcgtgagccactgcaccccgccaactatcattttt

SEQ ID NO: 176659 - DNA, 201 bp, Homo sapiens
gaggaaacaatgtcagcttcctgaatcatccagggagaaagggggagagaatagattttaaaatgcttaaaaaatggcctttcagagtgctctgttccaaytgtttgtgtgtttgcaatcctgtgtcaataatacttggcctctaacagaaacacctggcccccagccatcgtcaacacacattgggccccttctccaaaa

SEQ ID NO: 176660 - DNA, 201 bp, Homo sapiens
acaatttccaaaactggttggaattgggaacttgatgtttttttcttttctttcacagccgggcccctcagatgagagctgcacccaggccagcaccagtygctcagccaccagcagcggcacccccatctgcagttggctcttctgctgctgcgccccggcagccaggtctgatggcccagatggcaaccactgcagctg

SEQ ID NO: 176661 - DNA, 201 bp, Homo sapiens
agtaacatatgcttatctaacatggaattttatgtcactgctgctaaagcaaaacatcctgttcactggataaaagacctgctttatgtgtatacacttcwgtgcaatttttaaaaatactataatttcagaacttccaaatttcaacagatgccagtgttctctccttttttcatatgggaaaatttctttcaaaattat

SEQ ID NO: 176662 - DNA, 201 bp, Homo sapiens
acttccaaatttcaacagatgccagtgttctctccttttttcatatgggaaaatttctttcaaaattatttgaagcttggacaaaaattccacagctgtawtcctcaggatcactttgcagtcttcaagattcagatacagaggaagcttcaattcaacctttcagagaagacattccagctcgcatgatctcatcaacca

SEQ ID NO: 176663 - DNA, 201 bp, Homo sapiens
gtgttctctccttttttcatatgggaaaatttctttcaaaattatttgaagcttggacaaaaattccacagctgtattcctcaggatcactttgcagtctycaagattcagatacagaggaagcttcaattcaacctttcagagaagacattccagctcgcatgatctcatcaaccaagagaatgttggtggcaatcacag

SEQ ID NO: 176664 - DNA, 201 bp, Homo sapiens
cttttaaggtaaatttccaaagagctccacaattgtttccagtatccagtgtcccgccaaataccagggattcagtaacacgtggtattttactttatttrttttctttttgtaaacatagggtctcactatgttgcccagggtggtctcaaactcctgagctcaagtgatactcctgagttcaagtgatcctcccgcctc

SEQ ID NO: 176665 - DNA, 201 bp, Homo sapiens
agactagttattagttccataggcattacacggtgtgcatgcggatttattataactgctgttaaaaatgttatgaggaggccaagcatggtggcgcacgyttgtaatcccagtactttgggaagccgaggtgggcggatcacttgaggtcaggagttcaagaccatcctggccaacatggtgaaaccccgtctctgtaaa

SEQ ID NO: 176666 - DNA, 201 bp, Homo sapiens
agcactgcacgatagaagactagttattagttccataggcattacacggtgtgcatgcggatttattataactgctgttaaaaatgttatgaggaggccamgcatggtggcgcacgcttgtaatcccagtactttgggaagccgaggtgggcggatcacttgaggtcaggagttcaagaccatcctggccaacatggtgaa

SEQ ID NO: 176667 - DNA, 201 bp, Homo sapiens
ccgcctcagcctccctaagtgctgggattacaggcatgagccactgtgcccggcctgatgaagcatattttaatctgtttcacagttttgccttgtctggmaagattacctcctggttgttacacttgtatgtgaccactcattagtgtcttctaggcaactatatatatatattttaatgtgatgtgctctagcaaaaca

SEQ ID NO: 176668 - DNA, 201 bp, Homo sapiens
ccagtaattatgcctttgtcttcattatgctatattgtatttggttcacatgtcctatcattccactaagaacagctatgaagctttttttttttttttttgagacagagtctggctttgtcacacaggctggagtgcagtggtgtaatctcggttcactgcaacctctgcctcccgggttcaagtgattctcctgcttca

SEQ ID NO: 176669 - DNA, 201 bp, Homo sapiens
aaaggatttaccacctgtcccaaagcaggtcctcatgcctatccagaggaaaaccaaggtcgtcttgctgttgcatctggggaaggggaagggcacggggyggtgacctaagattcctatctagagctcccaaacccatcaccttacatccccagggtgacccccactgctggattaggaagagtgtttcccctgtaccca

SEQ ID NO: 176670 - DNA, 201 bp, Homo sapiens
tgcagaaagctggcattggtcagatacttctctgggtctttaaccctatttttatttctcttttaaggtgaatatgcaggttttgatgagacgcagccaayagctgaatctggtggaaaaggaaaagtgattaaacttttaaaggaaaaatttcattttaagaaaataatcatgattggagatggtgccacagatatggaa

SEQ ID NO: 176671 - DNA, 201 bp, Homo sapiens
tagagtcagcgtctcattctgttgcccatgttggagtacagtagtataatcatggcttactacagcgttgaactcctggggtcaagtggccctccctcctwagcctccttaatagtggggactacaggtgcatgccaccatgcccagctaatttttaaaaaaaaattttttttgagagacagggtctcactttgtcaccca

SEQ ID NO: 176672 - DNA, 201 bp, Homo sapiens
tgttagccaggatggtctcgatttcctgacctcgtgatccgcccgcctcggcctcccaaagtgctgggattacaggcgtgagccaccgcgtccggcctttkttttttttttttttttttttttttgagataaagtatcgatctgtcgcccaggctggaatgcaatggcacgatctcggctcactgcaacctccgcctcctg

SEQ ID NO: 176673 - DNA, 201 bp, Homo sapiens
ctatctccgctcactgcaggctccaccccccggggttcacgccattctcctgcctcagcctccctagtagctgggactacaagcgcccgccatcacgcccrgctaattttttgaatttttagtagagacggggtttcactgtgttagccaggatggtctcgatttcctgacctcgtgatccgcccgcctcggcctcccaaa

SEQ ID NO: 176674 - DNA, 201 bp, Homo sapiens
ttacggaggcagaagtgagaggacaccttaatcccaggaatttaaaaccagcctgggcaacatagggagactccattctccacacagacacacacacacamacaccccaaagggaaaacaaacatgttttctaactaactctttgaaaaaaatatttttttaaattcctctactacttctcattatgctttgtacctagca

SEQ ID NO: 176675 - DNA, 201 bp, Homo sapiens
gaaggggaagggcacggggcggtgacctaagattcctatctagagctcccaaacccatcaccttacatccccagggtgacccccactgctggattaggaakagtgtttcccctgtacccacagggctccaggtcaagcccagcccacacctgacttctccactctcagcaacatcctgccctctgcctggaaccccacatg

SEQ ID NO: 176676 - DNA, 201 bp, Homo sapiens; identical to SEQ ID NO: 31450

SEQ ID NO: 176677 - DNA, 201 bp, Homo sapiens
aaatcagcaggaaataatttccttttcttggatttgaactgctaagttttgggaatttagggatgagtaaaaagcatactcccctcaataatctaatattytccatccctaagacttgcaaagagacagatttatctcccctccagttggagatagagatgagacctaacagagaaactgctgttttaaaaagagaaaacc

SEQ ID NO: 176678 - DNA, 201 bp, Homo sapiens
agcctgttaatgttattttcaagcaatccttcaaaagtttattccaaggccttgctctcctagtagcaaagcctgtctgttgcacactgggctcttggtascatcttccttttggtggatgtcgtgcagacccggggcagtaaggcatgttaaccttgaggacatcggacctggctggcctgactgttgggtctccctcct

SEQ ID NO: 176679 - DNA, 201 bp, Homo sapiens
tgccctgggccctgaagttggtggatgttgggggagtcccagcccgagcgccatttctgttccatcatctccattgtctctttggacttcctctctttttyttttgaaacagagtctcactctgtcaccaggctggagtgaagtggggcgatctcagctcactgcaaactccacctcccaggttcaagcgattctcctgtc

SEQ ID NO: 176680 - DNA, 201 bp, Homo sapiens
gcttaggagggacacaggaccgaccccggaggacgccgagaaggacggctgcgcagccccgaggcggcgggctccagtccgcggtcccgggcccgccaggwgcgcggcggcgcgcggtgcccgcccggccctccggttcagccccgccttacatcttcatggtgcccttgggccccaggttggtccttagcacgtcctgca

SEQ ID NO: 176681 - DNA, 201 bp, Homo sapiens
tcaaaggcagggctgtcagactccaggcactcaggactattactgattacacgccacttctgaatgttctcctaccttgaaaatggacactgcaaatcttyctacaaagaaaacattctacggaaaatcaagacctttctgacctagcccagagcacctctcaccatttcgtgaagcagcacattgccgtctttagtaagt

SEQ ID NO: 176682 - DNA, 201 bp, Homo sapiens
aatcccagcactttgggaaactgaggcagggattgcttgaggctgcagtcagctatgatggaaccattcactccagcctgggcaacacgtcgagaccttgycccccgccccaccaaaaataaataaataaataaataaaaggagtaagtagggaaatctcagattgaatcggaattaagaaataacatacaattgcaatgt

SEQ ID NO: 176683 - DNA, 201 bp, Homo sapiens
agaggttgcagtgagttgagattgtgccaccggactccaggctggtcgacagagcgagacttcgtctaattaaaaaaaaaaaaaaagaaaagaaaagaaaaatcatcctcatgcattttgcccatgtgattgtgtcaacctctcttaatttttcaagttttaaaataattaactttaatatacaattacagccctttagcc

SEQ ID NO: 176684 - DNA, 201 bp, Homo sapiens
gagaggttgcagtgagttgagattgtgccaccggactccaggctggtcgacagagcgagacttcgtctaattaaaaaaaaaaaaaaagaaaagaaaagaaaaatcatcctcatgcattttgcccatgtgattgtgtcaacctctcttaatttttcaagttttaaaataattaactttaatatacaattacagccctttagc

SEQ ID NO: 176685 - DNA, 201 bp, Homo sapiens
ggagaggttgcagtgagttgagattgtgccaccggactccaggctggtcgacagagcgagacttcgtctaattaaaaaaaaaaaaaaagaaaagaaaagaaaaatcatcctcatgcattttgcccatgtgattgtgtcaacctctcttaatttttcaagttttaaaataattaactttaatatacaattacagccctttag

SEQ ID NO: 176686 - DNA, 201 bp, Homo sapiens
tccagcctgggctacgagagcgaaactccatctcaaaaacaaaaacaaaacaaaacaaaaaaaaccccaaaactcttggcctcacgtgattctcccacctyggcctcccaaagtgctgggattacaggcataagccaccgtgcctggcacagtatagtgatataattgttctattttattattggttgttagtctctgact

SEQ ID NO: 176687 - DNA, 201 bp, Homo sapiens
tgattaggagccctaattcgactcaacttcccacttccaaccaagctgcacacattacatccaattaaatttcccccttcccctctacacatcagagggckagttcagtttccatacttccagctgatcacattattcatgggggaaaggagcaactaaacagagaacaccaaatgaaaaaagtatgattctctaacagtt

SEQ ID NO: 176688 - DNA, 201 bp, Homo sapiens; identical to SEQ ID NO: 31449

SEQ ID NO: 176689 - DNA, 201 bp, Homo sapiens
cctgttcactggataaaagacctgctttatgtgtatacacttcagtgcaatttttaaaaatactataatttcagaacttccaaatttcaacagatgccagkgttctctccttttttcatatgggaaaatttctttcaaaattatttgaagcttggacaaaaattccacagctgtattcctcaggatcactttgcagtcttc

SEQ ID NO: 176690 - DNA, 201 bp, Homo sapiens
ttcctgacatgctggaggggacctgccttgacattctcggttcccctctcctcctctcacaggtctcccgattcctggtggtgcaaccccagaaccgctayacagcggaagaggccttggcacaccccttcttccagcagtacttggtggaggaagtgcggcacttcagcccccgggggaagttcaaggtactaagcgtcc

SEQ ID NO: 176691 - DNA, 201 bp, Homo sapiens
tcctcctctcacaggtctcccgattcctggtggtgcaaccccagaaccgctacacagcggaagaggccttggcacaccccttcttccagcagtacttggtrgaggaagtgcggcacttcagcccccgggggaagttcaaggtactaagcgtcctgatccaggcccgccagctccctaagtgcaaacctctaagccccctcc

SEQ ID NO: 176692 - DNA, 201 bp, Homo sapiens
cctgtagtcccagctgctcaggaggctgagccagggaggcagaggttgcagtgagctgagattgcaccactgcactccagcctgggtgacagagtgaggcyctaactcaaaataaaaaaaaatgtgtgtgtgtgtatgtgtgtgcatgtgcatgtgaataatgtgtgtgtgtaaaaatgtgtgtgtatgtgtatttgtgcg

SEQ ID NO: 176693 - DNA, 201 bp, Homo sapiens
tttttagtaaagatggggttttgtcatgttgaccaggctggtctcagactcctggcttcaggtgatctgcccacctcagcttcccaaagtgtttgggattrtgggcatgagtcactgcacccagcctgttaatgttattttcaagcaatccttcaaaagtttattccaaggccttgctctcctagtagcaaagcctgtctg

SEQ ID NO: 176694 - DNA, 201 bp, Homo sapiens
cctgggggggcggaggttgcagtgaaccaagatcgcgccactgcactccagcctggagggacacagcaagactctgtctcaaaataaataaataaataaawaataaaaaaggatctttgcttcaacctccttattccacaggagcaaaccaagatccaaaaaagaaatatgacttaaagagctggttagcaggagacagga

SEQ ID NO: 176695 - DNA, 201 bp, Homo sapiens
ctccggcctgggcgacaggagcgagactccgtctcaaagaaacaaacaaaaccaaaaataagccaggtatgatggtgtacacctgtaatcccaactactcsggaagctgaggcaggagaatcacttgaacctgggggggcggaggttgcagtgaaccaagatcgcgccactgcactccagcctggagggacacagcaagac

SEQ ID NO: 176696 - DNA, 201 bp, Homo sapiens
gtgatccgcccaccttgggctaccaaagtgctgggattacaggcatgagctgctgcacccggacactatttcattttcaactgcctttcatggaagaatgyttaacctttggtctctttcttgatttatgacagctcacagcttgcaagaaaaatacctatggataggctgtgtgcctttttttttttttagatggaatct

SEQ ID NO: 176697 - DNA, 201 bp, Homo sapiens
cgcgcccggcctcacacctccgctttaatgcttgcttcctcactacaattaggtagaaaaaaaaaaaacaactatatatatatctaaaagaaaagaaagayggcttcaaggaggcacaggtatttgagctactcaggaggctgaggcaggagaatcacttgaacctgagtggtggaggttgcagtaagccaagatcgtacc

SEQ ID NO: 176698 - DNA, 201 bp, Homo sapiens
atggctcacacctggaatcccagcactttgggaggccgaggcgggcagattacctgaggtcaggagttggagaccagtctggccaacatggcgaaaccccrtctctactaaaaatacaaaaatcagccaggcgtggtgtcaggtgcctgtaatcccagctctcaggaggctgaggcaggagaatcgcttgcacccgggagg

SEQ ID NO: 176699 - DNA, 201 bp, Homo sapiens
catttcctttcttactttcagaagtaactactgtcctgaattttatgttgtaaattatcatttatgacattaaatgatagtctctttttaaagtttccagkggctattggagcatcacagtaactgagaatgttcacagtactgctgtgagaattcttatatatgtgtcattttttttttttttttttttgagacagagtt

SEQ ID NO: 176700 - DNA, 201 bp, Homo sapiens
caccgcaagctccacctcccaggttcacgccattctcctgcctcagcctcccgagtgggtgggactacaggcgcctgccaccacgcccggctaattttttwatatttttagtagagacagggtttcactgtgttagccaggatgttctcggatctcctgacctcgtgatccgcccgcctcagcctcccaaagtcctgggat

SEQ ID NO: 176701 - DNA, 201 bp, Homo sapiens
ctcggcctcccaaagtgctgggattgcaggcatgagccactgtgcccaaattattttttatttaattatttatttatttatttatttatttatttatttttagacggagtctcactctatggcccaggcttgagtgcagtggcatgaactcagctcactgcaacctctacctcctgggttcaagcgataatcttgcctcag

SEQ ID NO: 176702 - DNA, 201 bp, Homo sapiens
ccccgccaagcacagtaggcacgggcgtcattccagctcacgtgtaacactgggtgctccagtctctctcggatgccagagccaggacctgcaggctgacrgccaggattaagtgagacaggcttccgggagcgcattaagtcggaggcaggctaggtttagggcgcccgcgttcagcttttaccactagatggagcaaga

SEQ ID NO: 176703 - DNA, 201 bp, Homo sapiens
attacatccaattaaatttcccccttcccctctacacatcagagggctagttcagtttccatacttccagctgatcacattattcatgggggaaaggagcractaaacagagaacaccaaatgaaaaaagtatgattctctaacagtttagttttcattttcccaaacttaccaggagtgaagaagctgtttctttacaca

SEQ ID NO: 176704 - DNA, 201 bp, Homo sapiens
ggcttttcccagattttagggagccagggatgtggggctagttatgtccagcaggatggaggacaggtgtagtgcccaccccgtccccgcagagattgtgycgagtcctcagggtgcctggaagccccagagggcggggaacgccgcgctctagagccgctttgttctccgcggagactgcatcgatgcgggaagaaatgg

SEQ ID NO: 176705 - DNA, 201 bp, Homo sapiens
aatctttcctggcttcaactcacacgtattacatctagttttccctctacaacagttgcattctcttacctgtgttcaggtccacacccacaagctgaccygattctgaatgttctgcttgaattttaactaatgtttcctgaaggtcaaaaccagagttctgagcaagaacctaaagtaaacaaatttaattcttgagaa

SEQ ID NO: 176706 - DNA, 201 bp, Homo sapiens
caggagtgaagaagctgtttctttacacaatagttatcccatacgcctacttctgctgccaccattggctcacctaaaaggcaaccaaatcttaaaataarttcagtcagtaagaaccaacaatattgtgtgcagctttgcttatcactgatgactcatttcctccagtattaactatgagaattcaaagcttctctgtta

SEQ ID NO: 176707 - DNA, 201 bp, Homo sapiens
cacaatagttatcccatacgcctacttctgctgccaccattggctcacctaaaaggcaaccaaatcttaaaataagttcagtcagtaagaaccaacaataytgtgtgcagctttgcttatcactgatgactcatttcctccagtattaactatgagaattcaaagcttctctgttagcccaattttctactctaaaccatg

SEQ ID NO: 176708 - DNA, 201 bp, Homo sapiens
caatgattaggacattagaagtcgtaccatcaccagttatatcatcctgggctgttgctacctttgctattaaggaagctgttgggtgttgaatttgctgwaagtagaaaaagaatgaatcacttaaaacaatatgaagcagtctaaatataccacagacaaaatgcaggaagggcctctttgagtgctatctacttgaaa

SEQ ID NO: 176709 - DNA, 201 bp, Homo sapiens
tcgggcaggtgaaacaggcctgctgagcgctttccctgatattcccctatccttctttgaaactcagtgttcctggatgtacgaggggtagagaggaggcygggcctggagaataagagtcaagcaggggtagaaaatgaggtagcggaatcagcccttacctgcctccaaaatgccttttccactggaagccaccagagt

SEQ ID NO: 176710 - DNA, 201 bp, Homo sapiens
ggaggctgagaatcctatgaacccaggaagtggtagtcgcaatgaaccaagatcatgccactgcacgaaagagcaagactgtctcaaaaaataataataawaaatttttaaaaaaagctttttattgtggggagctctttggaaaaaagtatattgaattcagaaacaaaaagtaaaataatgtttacaaggggcaagggg

SEQ ID NO: 176711 - DNA, 201 bp, Homo sapiens
cactctccccaagttagcaaatgaaatctaaaaggtggacaagagctctttattagccaggcatggtggctcacacctgtaatcccaacactttgggaggytgaggtgggtggatcacttgaggccaggagtttgagaccagcctagctaacatggcaaaaccccatctctactaaaaaaacacaaagcaattcagtgggc

SEQ ID NO: 176712 - DNA, 201 bp, Homo sapiens
agggtctccctatattgcccaggctagtcttttactcctggcctcaagcgatcctcctgccccagcctcccaaagtgttgggattacaggcataagccacygcgcccagcccctttccaccctttaaagcccctcatgctgggcaggatggggagaagaataaaggaaaatcgccttatcatctggatacccttcaagccc

SEQ ID NO: 176713 - DNA, 201 bp, Homo sapiens
aactcctaacttcaggtgatccacccaaagtggcctcccaaagtgttgggattacaggtgtgaggcacaacacttggccaatattttttttttttttttttgagacagagtcttgctctgtctcaaaaagactgttgcccaggctggagtgcagtggtgcaatctcagctcactgcaacctccacctcctgggttcaagcg

SEQ ID NO: 176714 - DNA, 201 bp, Homo sapiens
catatgaagatttttaaatacgtgcaggacataattagtcttttgttatttgagaaggggtctcgaaattgttgaaagcatctgaacgttgaacagatgasgaatagttgaagttgcttttggtataatagttcagacgagtcactttggccagtcttgttttgtaatgtgtaaaatgaaggaattggactagattatttc

SEQ ID NO: 176715 - DNA, 201 bp, Homo sapiens
ccgcccacctcggcctcccaaagtgctgggattacaggcgtgagctactgcgcccagccatatattgtttttttttttttaatttttttttttttttttttgagacagagtctttctctgtcaccagggtggagtgcagtggtgcaatctcggcttactgcaacctccacttcctgggttcaagcgatttccctgcttcag

SEQ ID NO: 176716 - DNA, 201 bp, Homo sapiens
agagattgtagtgtgttgagattacaccacggaactccagcctggacagagacagagccagaccctgtcccaaaaaaataaaaataaataagtaaataaawgaataatgtttccttttttatatagatatatagacatagatatataaccatatatcatacctggatatagacacacatagagatttctttgttcaaaaat

SEQ ID NO: 176717 - DNA, 201 bp, Homo sapiens
caggccaactggctcctgggctcagggctgcgatgccaggcgcccctgcccggggaggccctgcctttcctgacatgctggaggggacctgccttgacatkctcggttcccctctcctcctctcacaggtctcccgattcctggtggtgcaaccccagaaccgctacacagcggaagaggccttggcacaccccttcttcc

SEQ ID NO: 176718 - DNA, 201 bp, Homo sapiens
ataataataataataataataataataataataataataataaagtccctgggcctgcccacatcccaggttgacgtctttgagcaccctcctgattcccstgtcagcttttgaagttagcccacagcagcctcggtccctgacccccgtgccccggctgcccctgcctgggctcccctgctacttgagacaagctagcca

SEQ ID NO: 176719 - DNA, 201 bp, Homo sapiens
aagggagctccagaggggagactgatcactcttacatcctgtctggcctggtctcaggccacacaagcttccctcaccctccaccagaggtcccccacctyccgcccggagactgggctccatgccctgtccctgcggagccttggcctgcctcccgggtttgcagttgtgatttatttttggcacgttagcctccggtca

SEQ ID NO: 176720 - DNA, 201 bp, Homo sapiens
caggcagggatggatgcaggcaggggaatgggggtttgatgtccctgggctgaattagccaggcatgctggtgcatgcctgtaatcccagccactcgggargctgaagcaggagcatcactcaagcccagtagtttgaggctgcagtgagttatgattgcactattacactccagcctgggtgagacagtgagatcctgtc

SEQ ID NO: 176721 - DNA, 201 bp, Homo sapiens
ttgaacccgggaggtggaggttgcagtgagctaagattgtgccactgcactccagcctggcaatagagcgagactccgtctcaaaaaaaaaaaaaaaaaaagcactgaacggctcaaaaaggaaaaaaaaaaaaaaaaaagagtcacacggcctgagagcaggcttgttactcaccagttctgggcaaatcacctgtctgt

SEQ ID NO: 176722 - DNA, 201 bp, Homo sapiens
ccacgcctggcctgatgtttccttatgtttaaatacagattatggccgggcacagtggctcacaactgtaatcccagcactttgggaggccaaggccggcrgatcgtgaggtcaagagatcaagaccatcctggccaacatggtgcaacaccgtctctactaaaaatacaaaaaattaactgggcatggtggtgcacgcct

SEQ ID NO: 176723 - DNA, 201 bp, Homo sapiens
ctaggctcaagtgatcctcccacctcagcctccctagtagctgggacaacaggtatgtgccaccaggtctggctaaccatctctatttttttttttaaaaagggggggccaggcacagtggctcatgcctgcaatagcagcacttcctgcaataccagggaggccaaggcaggaggatcacctgagatcaggagtttgaga

SEQ ID NO: 176724 - DNA, 201 bp, Homo sapiens
gcctcctaggctcaagtgatcctcccacctcagcctccctagtagctgggacaacaggtatgtgccaccaggtctggctaaccatctctattttttttttwaaaaagggggggccaggcacagtggctcatgcctgcaatagcagcacttcctgcaataccagggaggccaaggcaggaggatcacctgagatcaggagtt

SEQ ID NO: 176725 - DNA, 201 bp, Homo sapiens
  misc_feature (1)...(201): n = A,T,C or G
gaggcgccacgcgcaccgagagctacctccccagcctgccgctgcagccgcatcccggaagccggcagaagggcctaaggctctctcccgtcagggcggancgccccatccccttcccagcgcccccaggatggacggccggttcactgacctagcttgagccacgcgccgaccaggagcgacagcaggggcagcagcggt

SEQ ID NO: 176726 - DNA, 201 bp, Homo sapiens
gctttgtcgcccaggctggagtgcagtggcgcgatcttggctcaccgcaagctccacctcccaggttcacgccattctcctgcctcagcctcccgagtggstgggactacaggcgcctgccaccacgcccggctaatttttttatatttttagtagagacagggtttcactgtgttagccaggatgttctcggatctcctg

SEQ ID NO: 176727 - DNA, 201 bp, Homo sapiens
agcccagtgatggacaaaagccaggtgataggcagggagcggggaggactgggggtggagaagatagaaacccccacatccattccatccatgtctcttttctgaaggcggatggaccagggagagtggcagcattgacccttgaaacctccatctgcaggaattttctacagaaaagaggtccccgggactgatctggtt

SEQ ID NO: 176728 - DNA, 201 bp, Homo sapiens
tccgatactttttctccctgacaaaatccctataaagacatagttcagctggttcagctggtgaggttctgtgcccaccccatcttctcctgctccaggamacttcagatatccctgtcctgtaagttatacaccacagagtgttcatgattgccaaggaattaacctgaagcctgagtgattttcttttaaattagaata

SEQ ID NO: 176729 - DNA, 201 bp, Homo sapiens
tagcccagtgatggacaaaagccaggtgataggcagggagcggggaggactgggggtggagaagatagaaacccccacatccattccatccatgtctcttttctgaaggcggatggaccagggagagtggcagcattgacccttgaaacctccatctgcaggaattttctacagaaaagaggtccccgggactgatctggt

SEQ ID NO: 176730 - DNA, 201 bp, Homo sapiens
tcatatttagctctgaccttttttctgaggcttaaagcctttcccagtatctggaagttaaagtctaaactccttagcctggccctaggacctgcttagtstgaattcctgatgcacagccaggcccctgggccaagccatagggtagcttccagcaggtcatctgcttccttctccttgtctttgctcacactcctcgct

SEQ ID NO: 176731 - DNA, 201 bp, Homo sapiens
agcttttggttgcctttttcctaacaaatatgcctagtcctaaacattccatttttagatctcaattattaatctacactaaagacagatgcaaatcacayaggcaatgcaacttgattacaaaattattttcaggccaagaaaggttctataacctgtccaaggtcacaatttgttttagaccaggataaagacccagat

SEQ ID NO: 176732 - DNA, 201 bp, Homo sapiens
gtgccactacacctggctaattttttaatttttttgtagagccagggtctcactttgttgcccaggctgctgtcaaactcttggacttaaacaatcctccygcctcggtctcccaaagcgctgggtgtgagccactgcacccggcctccctaacctgtacaggtctgcattatgtagggtgatcatgcacactgtccctgc

SEQ ID NO: 176733 - DNA, 201 bp, Homo sapiens
gtacacccacggccccgctgcgcatgcgccctcatgcaccgcagcggcagtcgacccctatgcacatgcgcaggctgcgccaccacccgccccgcacccartagttcagcagggggaaactgacggagcgaggcggaggactggccacaccaccttcaggaccgcccagggaattaaggaaaaccacgttgagggtcccgg

SEQ ID NO: 176734 - DNA, 201 bp, Homo sapiens
tcctaattagaatgtttatttatttatattttgagtcagagtctaactcaggctgtagtgcagtgacgtaattatggctaactgcagccttgacttcctgrgctcaagctattctaccacgtcagcctccagagtaactgggactacaggcatgcgccacctgtgcaccacacttggcgactttattctattttatatttt

SEQ ID NO: 176735 - DNA, 201 bp, Homo sapiens
gtcatgttttccatgaatctctatatttgtatttttgtttgtccttcttggaaataattcattaagttttttttcagacagatttttttttttttttttttgagacagaatctcgctctgtcgcccaggctggagtgtagggatcttggctcactgtaaacctccgcctcccggattcaagcgattctcctgcttcagcct

SEQ ID NO: 176736 - DNA, 201 bp, Homo sapiens
gcattatcctatctttattttctttcattttttttgagatggagtttcgcacttgttacccaggctggagtacaatggcacaatctcgactcaccacaacstccacctcctgggttcaagcaattctcctgcctcagcttcccaagtagctgggattacaggcatgcaccaccacgcctggctaatttttgtatttttagt

SEQ ID NO: 176737 - DNA, 201 bp, Homo sapiens
cactgcaagcttcacctcctgggttcacgccattctcctgactcagcctcctgagtagctgggactacaggcatctgccaccatgcccggctactttttgyattttcagtagagacggggtttcaccatgttagccaggattgtctcgatatcctgacctcgtgatccacctgcctcggcctcccaaagtgctgggattac

SEQ ID NO: 176738 - DNA, 201 bp, Homo sapiens
agtcttcaagattcagatacagaggaagcttcaattcaacctttcagagaagacattccagctcgcatgatctcatcaaccaagagaatgttggtggcaaycacagtgctgaaagggggacaaaaataagatggctcagatgattaggagccctaattcgactcaacttcccacttccaaccaagctgcacacattacatc

SEQ ID NO: 176739 - DNA, 201 bp, Homo sapiens
cttcaacgtccagagtacctgggactacaggcacccaccaccacgccggactaatttttgttttgtttgtttgtttgtttgtttcttgagacggagtctcrctgtattgcccaggctggagtgcagtggcgcaatctcggctcactgcaagcttcacctcctgggttcacgccattctcctgactcagcctcctgagtagc

SEQ ID NO: 176740 - DNA, 201 bp, Homo sapiens
ggaaaatttctttcaaaattatttgaagcttggacaaaaattccacagctgtattcctcaggatcactttgcagtcttcaagattcagatacagaggaagmttcaattcaacctttcagagaagacattccagctcgcatgatctcatcaaccaagagaatgttggtggcaatcacagtgctgaaagggggacaaaaataa

SEQ ID NO: 176741 - DNA, 201 bp, Homo sapiens
aatctctctaaaattggcttaataccagggtttcgttgtccaagtgaaactgtatgaagtgctttgtaaaatgtgtatcaattaggtatctgtggtcaagygtggtttctcacacctgtaatcccagcactttgggaggaccaaaacaggaggattgcttaagcccagaattttgagaccagtctaggcaacatcgtgaga

SEQ ID NO: 176742 - DNA, 201 bp, Homo sapiens
cggctcactgcagtgcctcccgggttcaaacaattcacctgcctcagcctcctgagtagttgggattacaggcatgtgccactgtgcccagttaatttttrtatttttagtagggacggtttcaccatgttggacaggatggtctcaatctcctgacctcatgatccgcccacctcagcctcccaaaatgctgggattaca

SEQ ID NO: 176743 - DNA, 201 bp, Homo sapiens
aaagcaaaacatcctgttcactggataaaagacctgctttatgtgtatacacttcagtgcaatttttaaaaatactataatttcagaacttccaaatttcmacagatgccagtgttctctccttttttcatatgggaaaatttctttcaaaattatttgaagcttggacaaaaattccacagctgtattcctcaggatcac

SEQ ID NO: 176744 - DNA, 201 bp, Homo sapiens
caggtgtggtgacgtacgcctgtaatcctagctactcaggaggctgaggcaggagaatcgcttgaacccgggaggcagaggttacagtgggccaagattgkgccattgcactccagcctgggctacaagagtgaaactctgtctcaaaaaaaaagaaaaaacaattgctggccatggtgttgcccgcttttggtctcagct

SEQ ID NO: 176745 - DNA, 201 bp, Homo sapiens
ggaattttatgtcactgctgctaaagcaaaacatcctgttcactggataaaagacctgctttatgtgtatacacttcagtgcaatttttaaaaatactatratttcagaacttccaaatttcaacagatgccagtgttctctccttttttcatatgggaaaatttctttcaaaattatttgaagcttggacaaaaattcca

SEQ ID NO: 176746 - DNA, 201 bp, Homo sapiens
tgcttgaaccctggatgcagtgagccaggatcgtgctactacactccagcctgggtgacagagtgagactcttctctcaaaaaaaaaaaaaaaaaaaaaaagcaaattagacctggcacagtggctcatgcctgtgatcccagcactttgggaggccgaggtgggtagataacctgaggtcaggagttcaagaccagcctg

SEQ ID NO: 176747 - DNA, 201 bp, Homo sapiens
atggaattttatgtcactgctgctaaagcaaaacatcctgttcactggataaaagacctgctttatgtgtatacacttcagtgcaatttttaaaaatactrtaatttcagaacttccaaatttcaacagatgccagtgttctctccttttttcatatgggaaaatttctttcaaaattatttgaagcttggacaaaaattc

SEQ ID NO: 176748 - DNA, 201 bp, Homo sapiens
tgaacctgggaagcagaggttgcagtgagatgagattgtgccactgcactccagcctgggcaacagagcaggactgtctcaaaaaaaaaaaaaaaaaaaaattagccaggcctggtggcacacacttgtagtctcagctactcaggctgaggcaaggagaattgcttgaaccctggatgcagtgagccaggatcgtgctac

SEQ ID NO: 176749 - DNA, 201 bp, Homo sapiens
ggcacccacaaccatgcccagctaattcttttgtatttttagtagagacggggtttcaccgtgttagccaggatggtttcgatctcctgatctcgtgatcygcccgccttggcctcccaaagtgctgggattacaggcatgagccactgcgcccggcctatttcttaaattacctgaagatcctacgctgtacagaaaagt

SEQ ID NO: 176750 - DNA, 201 bp, Homo sapiens
  misc_feature (1)...(201): n = A,T,C or G
acggtgatgctgtccactcccacacgttccccaggaggtcatagagccctgcagccccaccggcgggtcaggccaggctgggacccgccgaccaccccgcntaccctctgaggtcctgggggccaaatggcagaagggaggtgcttccctctgcctcctctctcagacatgatggtcccaacagccagttcatgggcacag

SEQ ID NO: 176751 - DNA, 201 bp, Homo sapiens
ccacccacctcagctccccaaagtgctgggattacaggtttgatccaccgtgcccagcccctcataatattttttaatggctgcatacatttcatcatatrtatgtatcataacttatttaacgaattctattataggacacttaggttgtttacaagtttttcctgttttacacattttgttaaataaacatccctacga

SEQ ID NO: 176752 - DNA, 201 bp, Homo sapiens
tctttcaatttaggaatgaatgacttagccacgtttgagtaaaatggtgcctgttctggtctggattcctttctgtcttgaactgtccaaagttctcctcrctctaaacccttcttgtgccagaatgtatcctttataagactgcttttcttcatctctgcttttgaattatctaaaagcaagtaaaaagtcttattattt

SEQ ID NO: 176753 - DNA, 201 bp, Homo sapiens
aaatctttttatttcaatacttttgggggaacaggtggtgtttggttacatggaaaagttctttagtggtgatttctgaggttttgatgcacccatcaccygagcaatgtacaccgtactcaacagtgtagtcttttatcccttacccacctagcacatccctccaaatccccagagcccattatatcattcttttgcctt

SEQ ID NO: 176754 - DNA, 201 bp, Homo sapiens
ctgaggagggcggatcacctgagttcaggagtttgagaccagcctagctaacatggtgaaatctcatctctactaaaaacacaaaaattagcaaggcatgktggtgggtgcctgtaatcccagctacttgggaggctgaggcaggggaattgattgaacctgggaagcagaggttgcagtgagatgagattgtgccactgc

SEQ ID NO: 176755 - DNA, 201 bp, Homo sapiens
agctaaaaggagctgtggccgagtttgctctgctgcccaatcaagcagggagggagttgatactcttgtaacccaatgggtgaaggccatctcccctggcctgaccgtttcatgggcagagttaaggtcctaaaatccagctcagtctcctagggagggtgtggaaaaagaatcagccttccaagtaaattcaatgtaaag

SEQ ID NO: 176756 - DNA, 201 bp, Homo sapiens
caccacgcccagctaatttttgtatttttagtagagatggagtttcgccatgttggccaggctggtctcgaactcctggcctcagatgagccacctgcctyggcctcccaaagtgctaggattatagaaatgagccactgcggccagcctggacttcctcttctgagtgccctgctgacctgccctgatgatgactgttcc

SEQ ID NO: 176757 - DNA, 201 bp, Homo sapiens
gcaagagtcaaatctgtagcttagaaatgtgagggagaaaataggtttttaatggtaaattaggcagggcgcagtggctcatgcctgtaatcccagcacgytgggaggctgaggagggcggatcacctgagttcaggagtttgagaccagcctagctaacatggtgaaatctcatctctactaaaaacacaaaaattagca

SEQ ID NO: 176758 - DNA, 201 bp, Homo sapiens
caggcgtggtggcaggcgcctgtaattccagctactcaggaggcaggagaatcgcttgaacctgggaggcggaggttgcagtgagccaagatcacatcacygcactccatcctgggcaacagagtgagaccccatctcaaaaaaagtaaaaataaaaattaagaaggaggaaatcaaaagtgtacagggaggtgcaccatt

SEQ ID NO: 176759 - DNA, 201 bp, Homo sapiens
aaagtaactcgcctaaaatacgaagcttctccatttcactgttaaggggctataaacttacgttttctcatactctaatgacacgttacaagtgaggatgyatgcatcctccacccttttcttcatatcaggatgccgtgctccgtggtccaaaacaagccctctgattaagctgtttaaacacacacaaaattatggtta

SEQ ID NO: 176760 - DNA, 201 bp, Homo sapiens
gtacccatccctcccctcccagctgccctgtgatggcttcaaagacggcaggtgtcagcccactggctcggtccctgaggatgctggccaagtgggaagtrggggacactaggaaggccccgcagaagccacccaaggcttcgtggcaaacgagcccagagcgtccctgtgctggaggggcagggcctggcagggcggggg

SEQ ID NO: 176761 - DNA, 201 bp, Homo sapiens
gacctcaggtgatcccccagcctcggcatcccaaagtgctgggattgtaggcatgagccaccacacctggcctccgtaggttctgttttctgattttttttctgagtttcagagccctgcatcactgccaggtgagtgaaatgctggtgattgagggaattagccagttgctgtctcgcctcctatcagctgtgttcctgg

SEQ ID NO: 176762 - DNA, 201 bp, Homo sapiens
cctcttgaaagatacagagattgagaagttgggaaagcatttctttgggcaaggaaatttttcctcttatccaaaatcagacctccgaaggctggccctgsaggaaagcttgcttttgtactttggaactagggatgagaaggccttgtcagcagtggctttttttttttttttttttttaatcagttggtcctttgcttg

SEQ ID NO: 176763 - DNA, 201 bp, Homo sapiens
caggttcaagctattctgctgcctcagcctcccgagtagctgggattacagtcatgcccggcacgcctggttaatttttgtaattttaatagagacggggyttccccatgttggccaggctggtctggaactcctgacctgaggtgatttgcccaccacagcctcccaaagtgctgggattacaggtgtgagcctccatgc

SEQ ID NO: 176764 - DNA, 201 bp, Homo sapiens
tataaggaaaaagaaataatcccaattcacttgcaaaatgagtaaaagtcaaattactcggatacctctccatatttctccttttagctctgcgcagagcractatgccttcttttgaaagagcatctaaggaaaaggggtcaattccctgtaacaaaaataaaaattaatttcaacatctttcaccttaaaagtaaaaag

SEQ ID NO: 176765 - DNA, 201 bp, Homo sapiens
gtgtcagcccactggctcggtccctgaggatgctggccaagtgggaagtgggggacactaggaaggccccgcagaagccacccaaggcttcgtggcaaacragcccagagcgtccctgtgctggaggggcagggcctggcagggcgggggctgcagcccagcttctccgcctggccctgcaggtgatcgctctgaccgtgc

SEQ ID NO: 176766 - DNA, 201 bp, Homo sapiens
ggaggtggtcgcgggtgcctgtaatcccagctactcggaaggctgaggcaagagaatcgcttgagtctgggaggtggaggttgcagtgagctgagattgcrccattgcactccagcctgggcaacaagagcgaagctccatctcaaaaaaaaaaaaattgaagagagaaaatgatgtaaataatttgaaatgaaaatcttg

SEQ ID NO: 176767 - DNA, 201 bp, Homo sapiens
ctcccagctgccctgtgatggcttcaaagacggcaggtgtcagcccactggctcggtccctgaggatgctggccaagtgggaagtgggggacactaggaargccccgcagaagccacccaaggcttcgtggcaaacgagcccagagcgtccctgtgctggaggggcagggcctggcagggcgggggctgcagcccagcttc

SEQ ID NO: 176768 - DNA, 201 bp, Homo sapiens
agtcactcttaaggttggatttaatacaaatgtttgaaggacggagcgacaggccagctgccctagggaagcaaaatgctaagtgctctgatgcgaggacsggaggacaaggttcgcggatgaaccacaggaacttccgggttttaaagatcctggcgccaagttcagggcgttgaccgcgaaggacgaggcgtccccgtg

SEQ ID NO: 176769 - DNA, 201 bp, Homo sapiens
ctgtgccagtcctgggagaaaggggacaagaaggggctttgggacaaaaggagtcttgcaagagtagggggagggacagtggccccaagagacagcactgragagcagaaaagacagtgactaacttctatgttagcagttgacaacagctcagtagagaaaacctgtccacaagcaatgagaatatcacggccgggtgca

SEQ ID NO: 176770 - DNA, 201 bp, Homo sapiens
cgcttgaatccgggaggcggaggctgcagtgagctgagaacgcgccactgcactccagcctgggcgacagagccagactccgtctcaaaaaaaaaaaaaaagcatttcacaccaagtatcactaaagcacagatccttggggcctttgcaattgctgttctctcttcctgtagtgttcttatcttcataaacacatggctt

SEQ ID NO: 176771 - DNA, 201 bp, Homo sapiens
atcttggctcactgtaaacctccgcctcccggattcaagcgattctcctgcttcagcctcccaagtagctgggattacaggtgcacgacaccacaccctgstaatttttgtagttttagtagagacgaggtttcaccctgttggccaggctggtctcgaactcctgacctcaggtgatccaccagcctcggccacccaaag

SEQ ID NO: 176772 - DNA, 201 bp, Homo sapiens
aggtgtcctgggtccctttgcttttcatagcaagtgctgctggctttcttttttgtacccacaactgggcacaggctcagggaggtgctgggaccagctcrtcacacacagacggttggtggtgtgaaggtagggacactctgggaccgggattcagacatcagcccccagctacaaggccccgtgttgcctgggaccaag

SEQ ID NO: 176773 - DNA, 201 bp, Homo sapiens
caatatacagagaagattcctcattctttttttatagttgcatattatgtgaatgtgtcttttttttttttttttttttttgagatggagtcttgctgtcrcccaggctggaatgcagtggtgcaatcttggctcactgcaacctctgcctcctgggatcacgccattctcctgcctcagcctcccgagtagctgggacta

SEQ ID NO: 176774 - DNA, 201 bp, Homo sapiens
gctcagcagcctggtacggtgatgctgtccactcccacacgttccccaggaggtcatagagccctgcagccccaccggcgggtcaggccaggctgggaccygccgaccaccccgcctaccctctgaggtcctgggggccaaatggcagaagggaggtgcttccctctgcctcctctctcagacatgatggtcccaacagcc

SEQ ID NO: 176775 - DNA, 201 bp, Homo sapiens
tctctactaaaaatacaaaattagtcaggtatggtggtgcacacctgtaatcccagctacttgcgaggctgaggcaggagaattgcttcaacctgtgaggyggaggttgcagcgagccaagattgcgcctgggcaacaagagcgaaactctgtctcaaaaaaacagagtgaacttcacacatctgtcccagcaaactataa

SEQ ID NO: 176776 - DNA, 201 bp, Homo sapiens
aaatcactatgggatgagaagttgctatagaaattttactaaagagtgaactagccaggcacagtggctcacacttgtaattctggcactttgggaggccraggcaggtggatcacttgaggtcaggagtttgagaccagcctaaccaacatggtgaaaccccatctctactaaaaatacaaaattagtcaggtatggtgg

SEQ ID NO: 176777 - DNA, 201 bp, Homo sapiens
tgtttttcccgtctttgtatcctcatgtacccagtttagctcccacttataagtgagaacatgtggtatttggttttctgttcctgcgctaattcacttakgataacggcctccagctgcatctgtgttgcagcaaaggacatgttttcattcttttttatggctgtgctggcttttttttttaggccgggcatggtggct

SEQ ID NO: 176778 - DNA, 201 bp, Homo sapiens
ttgttgagagtgactgaaatcactatgggatgagaagttgctatagaaattttactaaagagtgaactagccaggcacagtggctcacacttgtaattctrgcactttgggaggccgaggcaggtggatcacttgaggtcaggagtttgagaccagcctaaccaacatggtgaaaccccatctctactaaaaatacaaaat

SEQ ID NO: 176779 - DNA, 201 bp, Homo sapiens
gaggtctgcgggacccccagttacctggcccctgagattatcgagtgctccatgaatgaggaccacccgggctacgggaaagaggtggacatgtgagtgcrccgggaaaggaggagcacccagctaggctgggcaagggaggaagtaggcagggctgggccggtgcccctggcgctgggtaagtggccctgggccctcgca

SEQ ID NO: 176780 - DNA, 201 bp, Homo sapiens
cctaaaaaaaaaaaagaaagaaagaaagaagaaactggtgtagtgtgggaagtaaacaaaaagaaaaggaaaaaaaaatgaatctgtgagaacactcttakgtggcctgcactgactttgacacaaattagattggcttagtaggcaaggtgggatcttttcataattttatttgatgtctttaaatacatttatcttttt

SEQ ID NO: 176781 - DNA, 201 bp, Homo sapiens
aacagccagttcatgggcacagccgcaagcccaagacagctcttaccgtagttgttctgggcggggaaagcattcactggggagactccatggaagccatyctcagctttgtctcccttggggaactttccctgatgggagaaaggaagggtaaaggatttaccacctgtcccaaagcaggtcctcatgcctatccagagg

SEQ ID NO: 176782 - DNA, 201 bp, Homo sapiens
tcttcaagggctccgttcaaatgactcccccccgccccgcctaacctctaatttccagtctccttcctctcttttcatgtcaccaccacctgatttacgtwggcgtttgtgtctcccctccttgaaacttaacttcgtgaaggtagaatcttatctgatttggtgcagtatctccataacccagttagacagtaaattttt

SEQ ID NO: 176783 - DNA, 201 bp, Homo sapiens
aaataataaaagtaaaaggctgggcatggtggctcacgcctgtaatcccagcactttgggaggctgaggcgagcagatcacctgaggtcaggagttcgagrccagcctgttcaatatggtgaaaccctgtctctactacaaatacaaaaattagccgggcatggtggcaggcatctataatcccaggtactcaagaggctg

SEQ ID NO: 176784 - DNA, 201 bp, Homo sapiens
ctgaagcaggagttgagttccctggtaggagcctccatgttcctgacacaaagcggggtagctcagcgcctctgtgtacaggcctgagtgtcctggctctstactgcctctatcctgcagcaggacccctcagggctcactggccattgttaagtaggacatggggcattcttccagcaggaccctgagccaaaggggtac

SEQ ID NO: 176785 - DNA, 201 bp, Homo sapiens
tgcccgccttggcctcccaaagtgctgggattacagctgtgagccaccgcacctggccatcactgtgtgtttttcccgtctttgtatcctcatgtacccastttagctcccacttataagtgagaacatgtggtatttggttttctgttcctgcgctaattcacttaggataacggcctccagctgcatctgtgttgcagc

SEQ ID NO: 176786 - DNA, 201 bp, Homo sapiens
gaatttgtggacatattttaaactaccatgctatgtttaattatggcaagtatggtcactgtagaaaaactggaaaatagggacaagcaaaaaaaaaaaaagtcacttataattccatgactcaatggatgacattactagttgggtatatataattccaatattcaaaatatatatttactttctcaaactataaacaca

SEQ ID NO: 176787 - DNA, 201 bp, Homo sapiens
tctaggcaactatatatatatattttaatgtgatgtgctctagcaaaacaatgtctacaatacagccatctcatgctcacaagtatcaatataggtgtgartatgaggtggattccaggaccatgaagaggtggcagattttaattaattaactaattaatttttcagagacaagggcttgctctgttacccagactggag

SEQ ID NO: 176788 - DNA, 201 bp, Homo sapiens
tccagaagttcaagaccagcctgggcgacatcatgagactccatctctacagaaaatgcaaaaattagccaagcatggtggtgcgcacctgtggtcccagmtactcaggacgctgatgcaggagaatcacttgagcccggggggcagaggttgtagtgagccaagatcacaccactgcactccagcctgggtgacagagtg

SEQ ID NO: 176789 - DNA, 201 bp, Homo sapiens
aaagtgctgggattacaggcgtgagccactgtgcctggctgatgctgttcttttcaaatgcatttgttggttttttatgttttttttttttttttttttttccgagatggggtctctgtctcccaggctggagtgcagtggtgcaatctctgctcacagcaggctggtctcaaactcctgacgtcagatgttcttcccacc

SEQ ID NO: 176790 - DNA, 201 bp, Homo sapiens
cacttcagccttgacctcccaggctcaagcaatcccttccccctcagcctcccaagtagctgggactgcaagtgcatgctaccacacttggctaatttttrtattttttgtagagacaggttttcaccatgttgccgaggctggtctcaaactcctgggctcagctatcctctaccctcggcctcccaaagtgctgggatt

SEQ ID NO: 176791 - DNA, 201 bp, Homo sapiens
ttttttgaaaatggaaacttttacaggcaattcacttccttcaaactaatgataaggaaatgatgctgttctgttttgttttgtttttacatgttttttttgtttgtttgtttcttttttgagacagggtcttgctctgttgcccaggctggagtgtggtggtgcaatcatggctcacttcagccttgacctcccaggctc

SEQ ID NO: 176792 - DNA, 201 bp, Homo sapiens
gggtcctgaaacttttttttatagttggtaggttctccacactattgatcccacaacaatttttcgaggtagatgctgctatccacattttttttttttttgagacagtgtcttgctctgtcgtccaagctggagtacagtggcatgatctcagctcactgcaacctctgcttcctgggttcaagcaattctccagactca

SEQ ID NO: 176793 - DNA, 201 bp, Homo sapiens
agcgagactccgtcacacacacacacacacacacacacacacacacacacaaatatatatatatatatacatatatatatatatacacacatatatatatmcatatatatatatatatacatatgtgtatatatatatatatatgcgatcgagcccgggaggctgaggttacagtgagccgagccgagattgcgccactgc

SEQ ID NO: 176794 - DNA, 201 bp, Homo sapiens
gatcgtgccactgcactccagcctggcgacagagcgagactccgtcacacacacacacacacacacacacacacacacacacaaatatatatatatatatmcatatatatatatatacacacatatatatatacatatatatatatatatacatatgtgtatatatatatatatatgcgatcgagcccgggaggctgaggt

SEQ ID NO: 176795 - DNA, 201 bp, Homo sapiens
gcctcggcctcccaaagtgctgggattacaggcgtgagccaccacgcccagcctaatttttgtatttttagtagagatgtggtttcaccatgttggccagrctggcctcgaactcctgacctcaggtgatccgcccacctcagcctcccgaagtgctgggattgcagatgtgagccaccgcacgcagctcccatctctatt

SEQ ID NO: 176796 - DNA, 201 bp, Homo sapiens
cacgatctcggctcactgcaacctctgcctcccgggttcaagcaattctcctgcttcaacgtccagagtacctgggactacaggcacccaccaccacgccrgactaatttttgttttgtttgtttgtttgtttgtttcttgagacggagtctcgctgtattgcccaggctggagtgcagtggcgcaatctcggctcactgc

SEQ ID NO: 176797 - DNA, 201 bp, Homo sapiens
aggttgcagtaagccaagatcgtaccactgccctccagcctgggcaacagagtaagactccacctaaaaaaaaaaaagaaagaaagaaagaagaaactggygtagtgtgggaagtaaacaaaaagaaaaggaaaaaaaaatgaatctgtgagaacactcttatgtggcctgcactgactttgacacaaattagattggctt

SEQ ID NO: 176798 - DNA, 201 bp, Homo sapiens
cacttgtagtctcagctactcaggctgaggcaaggagaattgcttgaaccctggatgcagtgagccaggatcgtgctactacactccagcctgggtgacasagtgagactcttctctcaaaaaaaaaaaaaaaaaaaaaaagcaaattagacctggcacagtggctcatgcctgtgatcccagcactttgggaggccgagg

SEQ ID NO: 176799 - DNA, 201 bp, Homo sapiens
gttcaggagtttgagaccagcctagctaacatggtgaaatctcatctctactaaaaacacaaaaattagcaaggcatggtggtgggtgcctgtaatcccarctacttgggaggctgaggcaggggaattgattgaacctgggaagcagaggttgcagtgagatgagattgtgccactgcactccagcctgggcaacagagc

SEQ ID NO: 176800 - DNA, 201 bp, Homo sapiens
cctggccaggagtcttctttcttaggccacatccataaaacaagcaagagactaacgtattagtttgtaagtagggtaaagtcaaatctcagacctaaccrtttgcaagtggtaattttctattaattttttcttttatatatttttaagagatagagtctcactctggtgcccaggctggagtgcagtggcgcaatcact

SEQ ID NO: 176801 - DNA, 201 bp, Homo sapiens
ccatgattgacctattatctgatttcagccagcaatattgtttttcttaatattattcttacactgttaattaaatgtgatttaaataatcttttaactcycggttattatagatgaaacagcctgcaaaaactcaccctacttcatttattccataatctttgtcctcctaatttttctattgcatcatttctgtattgt

SEQ ID NO: 176802 - DNA, 201 bp, Homo sapiens
agttccctttgctatccattggtgagtaatgtttattcattagcagtgtcctcaagaaaaatattcccatgcaagaccaggcacagtggctcatgcctgtratcccagcactttgtgaggccaaggtggacagaccacctgaggtcaggagttcaagaccagccttaccaacatggagaaaccccgtctctactaaaaata

SEQ ID NO: 176803 - DNA, 201 bp, Homo sapiens
gcgctccaattccctgagtttggtgtccatggattcagccaatcgaggattgagaatatttgaagtctgtgcaataaagtgagatccctacaaaaaataamtcagccaggtgcagtagcatgcacctgtagtcccagccactagggaggccgaggtgggatcacagaagcccagttcaaggttgcagtgatctatgatcac

SEQ ID NO: 176804 - DNA, 201 bp, Homo sapiens
aaagagcgatgaggaaggggttttactggcctaaccataaactgtaactaaacccatgactgcattctctcccttggacgcccctgattgaagataaaaarccattcttaatatatgcagttcccctgaaggtgcttttgctctgtttaaggtgttgtagcctcctcttcctaaaacactcaggctaactgccatccccca

SEQ ID NO: 176805 - DNA, 201 bp, Homo sapiens
ttatgaaattagcatcctcccagatctgacagctccctgaggggttatataaggagtagctcacttgcaaacataacatgctgctcaattcaaaggttctrgctgctgtgggtctggagttatgtaagctgagcagtagcaggaaactctgcttaaaatattgtttaaagctgtgcgtgctggcatgtgcctgtaatccca

SEQ ID NO: 176806 - DNA, 201 bp, Homo sapiens
caatctccacctcccgagttcaagcgattgtcctgcctcagcctcccgagtagctgggattacaggcatgcaccagcatgcccagctaattttgtatttttagtagagatggggtttctccatgttggtcaggctggtctcaaactcctaacctcaagtgatctgcctgcctggattacaagcatgagccaccacacctgg

SEQ ID NO: 176807 - DNA, 201 bp, Homo sapiens
tgtaaggaagaactttcccttctcctccatgaatgactgactgaatgaatgaatttgtatcagtatggattcaagaattctatttttttttttttttttttgaggcagagtttcactcttgttgcccaggctggagtgcaatggcacgatctcagctcactgcaatctccacctcccgagttcaagcgattgtcctgcctc

SEQ ID NO: 176808 - DNA, 201 bp, Homo sapiens
aaaacattattgctgcctgaatttaacttttgctgactggatccacagacaagaaagagaaataccaaatacaactaattcaactctgtttatttttgacraaaccgatttctttcattcagttcatactacgcgtccacactgtgcctccaaaaatatttgcccttataactgaatgctcagaaaggctaagaaatctgc

SEQ ID NO: 176809 - DNA, 201 bp, Homo sapiens
ctgttttaaactctacttcctctgatggaagggagaaatttctgattgacatcaagcagaaatggttccatgtgtgcttcctctcctcaataaacctcackccaaccgcaagggactttcccatgagccccttatgaaatgccactagccaaatttccccttattttagcgatgtttaatgtaactgttgaaagcatttca

SEQ ID NO: 176810 - DNA, 201 bp, Homo sapiens
aacagtgtagtcttttatcccttacccacctagcacatccctccaaatccccagagcccattatatcattcttttgcctttgcatcctcatagcttagctsccacattattcaccctttagttccaagtacattctgctgttgctgggacacaggaaggctgttttaaactctacttcctctgatggaagggagaaatttc

SEQ ID NO: 176811 - DNA, 201 bp, Homo sapiens
ggccatcaggactgccgcgctgcgccgcgtacacccacggccccgctgcgcatgcgccctcatgcaccgcagcggcagtcgacccctatgcacatgcgcasgctgcgccaccacccgccccgcacccaatagttcagcagggggaaactgacggagcgaggcggaggactggccacaccaccttcaggaccgcccagggaa

SEQ ID NO: 176812 - DNA, 201 bp, Homo sapiens
tcttcagagagtctgtttttgctggtgttttccgggatctgcatgtgcctcttcccatgtaactttggtaggccttgtgcaggtcttggagtttccagtgwctttttgtcttctagtttcgttgaatatgggatttctgcctcattccccccctcaccaccatatctccctatcactttgcataatttctaggaggaggaa

SEQ ID NO: 176813 - DNA, 201 bp, Homo sapiens
agttggtaggttctccacactattgatcccacaacaatttttcgaggtagatgctgctatccacattttttttttttttgagacagtgtcttgctctgtcrtccaagctggagtacagtggcatgatctcagctcactgcaacctctgcttcctgggttcaagcaattctccagactcagcctcccaactagctgggatta

SEQ ID NO: 176814 - DNA, 201 bp, Homo sapiens
gtttatattaaatcacatttcaaactgtgttcactgtgttctttcaagacatttatattattttaatgtattggtatttttttttttttgatggagtcttkctctgtcacccaggctggagtgcagtggcacgatctcagctcactgcaagctctgcctcccaggttcacgccattctcctgcctcagcctcccaagtagc

SEQ ID NO: 176815 - DNA, 201 bp, Homo sapiens
cccatcacccgagcaatgtacaccgtactcaacagtgtagtcttttatcccttacccacctagcacatccctccaaatccccagagcccattatatcattsttttgcctttgcatcctcatagcttagctgccacattattcaccctttagttccaagtacattctgctgttgctgggacacaggaaggctgttttaaact

SEQ ID NO: 176816 - DNA, 201 bp, Homo sapiens
ctgagttttttgttctttgttttaattaactttttcttaatttgttttttggatagaatagattaactgcttcaaaatccaaaagctactgactgcccccygcaccacagacacccagtcccactgcctgaaggcaaccagtgttatcaacttcagatattttatgcatatccaatatggtcttttctgttttacacaaat

SEQ ID NO: 176817 - DNA, 201 bp, Homo sapiens
ttttttttttcttgagacggagtttccttcttgtcgcccaggctggagtgcagtggtgcaatctctactcactgcaacctccgcctcccgggttcaagcarttctcctgtctcagcctcccaagtagctgggattacaagcatgagccacccacacccagataattttttgtatttttagtagagatggggtttcaccatg

SEQ ID NO: 176818 - DNA, 201 bp, Homo sapiens
gtttaattatggcaagtatggtcactgtagaaaaactggaaaatagggacaagcaaaaaaaaaaaaagtcacttataattccatgactcaatggatgacaktactagttgggtatatataattccaatattcaaaatatatatttactttctcaaactataaacacactgtgtactattgtgtaatcttctctttcacaca

SEQ ID NO: 176819 - DNA, 201 bp, Homo sapiens; identical to SEQ ID NO: 31457

SEQ ID NO: 176820 - DNA, 201 bp, Homo sapiens; identical to SEQ ID NO: 31458

SEQ ID NO: 176821 - DNA, 201 bp, Homo sapiens
cccttcaggatagcggttgatgggccctttggcactgccagtgaagatgtgttcagctatgaggtggtgatgttagtgggagcagggattggggtcacachcttcgcatccattctcaagtcagtctggtacaaatattgcaataacgccaccaatctgaagctcaaaaaggtaagtcctttcatttatcggagggcctta

SEQ ID NO: 176822 - DNA, 201 bp, Homo sapiens
tgatccaccccattttcagatctacttctactggctgtgccgggacacacatgcctttgagtggtttgcagatctgctgcaactgctggagagccagatgyaggaaaggaacaatgccggcttcctcagctacaacatctacctcactggctgggatgagtctcaggtaaggacaagactccaaggctcaggtccttccca

SEQ ID NO: 176823 - DNA, 201 bp, Homo sapiens
ttttgtcaagtgcccaaaggtgtccaagctggagtggcacccttttacactgacatccgcccctgaggaagacttctttagtatccatatccgcatcgttrgggactggacagaggggctgttcaatgcttgtggctgtgataagcaggagtttcaagatgcgtggaaactacctaagtgagtaaaaagtacatattacca

SEQ ID NO: 176824 - DNA, 201 bp, Homo sapiens
gtaactatctcctccccatttcccttcaggatagcggttgatgggccctttggcactgccagtgaagatgtgttcagctatgaggtggtgatgttagtggragcagggattggggtcacacccttcgcatccattctcaagtcagtctggtacaaatattgcaataacgccaccaatctgaagctcaaaaaggtaagtcct

SEQ ID NO: 176825 - DNA, 201 bp, Homo sapiens
gcatcactggagttgtcatcacgctgtgcctcatattaattatcacttcctccaccaaaaccatccggaggtcttactttgaagtcttttggtacacacawcatctctttgtgatcttcttcattggccttgccatccatggagctgagtgagtgtttaaattctgaagtgaaggatttcatgtccctcaatttctaggca

SEQ ID NO: 176826 - DNA, 201 bp, Homo sapiens
gacatctctgtaactatctcctccccatttcccttcaggatagcggttgatgggccctttggcactgccagtgaagatgtgttcagctatgaggtggtgakgttagtgggagcagggattggggtcacacccttcgcatccattctcaagtcagtctggtacaaatattgcaataacgccaccaatctgaagctcaaaaag

SEQ ID NO: 176827 - DNA, 201 bp, Homo sapiens
tgggccctttggcactgccagtgaagatgtgttcagctatgaggtggtgatgttagtgggagcagggattggggtcacacccttcgcatccattctcaagycagtctggtacaaatattgcaataacgccaccaatctgaagctcaaaaaggtaagtcctttcatttatcggagggccttagagcagtaaccatactctgc

SEQ ID NO: 176828 - DNA, 201 bp, Homo sapiens
acttggcttctaaaatttttctccctctgaatattttgttatctattaccacttaatgtatctcattttcatttttgctctgattacagacttggaaatgratagtgggtcccatgtttctgtatctctgtgagaggttggtgcggttttggcgatctcaacagaaggtggtcatcaccaaggtactgattggtttagtaa

SEQ ID NO: 176829 - DNA, 201 bp, Homo sapiens
atgtagctagatatgttttttgtacaagtttatatttttatacagttaagcaatggattccagaggagactttatgtcaccagtatgagaacagaaaacayaccagttaagccagccatgtcacttactggctgtttgacctgaggaagatgactgcatctctctgaacctcagtttcctcatttatcaaatagatataat

SEQ ID NO: 176830 - DNA, 201 bp, Homo sapiens
gtgggacaatacatttttgtcaagtgcccaaaggtgtccaagctggagtggcacccttttacactgacatccgcccctgaggaagacttctttagtatccrtatccgcatcgttggggactggacagaggggctgttcaatgcttgtggctgtgataagcaggagtttcaagatgcgtggaaactacctaagtgagtaaaa

SEQ ID NO: 176831 - DNA, 201 bp, Homo sapiens
aacttggcttctaaaatttttctccctctgaatattttgttatctattaccacttaatgtatctcattttcatttttgctctgattacagacttggaaatrgatagtgggtcccatgtttctgtatctctgtgagaggttggtgcggttttggcgatctcaacagaaggtggtcatcaccaaggtactgattggtttagta

SEQ ID NO: 176832 - DNA, 201 bp, Homo sapiens
gttgatgggccctttggcactgccagtgaagatgtgttcagctatgaggtggtgatgttagtgggagcagggattggggtcacacccttcgcatccattcycaagtcagtctggtacaaatattgcaataacgccaccaatctgaagctcaaaaaggtaagtcctttcatttatcggagggccttagagcagtaaccatac

SEQ ID NO: 176833 - DNA, 201 bp, Homo sapiens
ctcagttttttatccatatggacactaaaaaggcaagtatttaggaaaaatgtcatttccagacatatgttttattctataggtggtcactcaccctttcwaaaccatcgagctacagatgaagaagaaggggttcaaaatggaagtgggacaatacatttttgtcaagtgcccaaaggtgtccaagctggagtggcaccc

SEQ ID NO: 176834 - DNA, 201 bp, Homo sapiens
gacatctcatcccaaagcttgaaattgtctttttttttctttcccaaaagtaccagaataggagttttcctctgtggacctgaagccttggctgaaacccygagtaaacaaagcatctccaactctgagtctggccctcggggagtgcatttcattttcaacaaggaaaacttctaacttgtctcttccatgaggaaataa

SEQ ID NO: 176835 - DNA, 201 bp, Homo sapiens
agttttttatccatatggacactaaaaaggcaagtatttaggaaaaatgtcatttccagacatatgttttattctataggtggtcactcaccctttcaaamccatcgagctacagatgaagaagaaggggttcaaaatggaagtgggacaatacatttttgtcaagtgcccaaaggtgtccaagctggagtggcacccttt

SEQ ID NO: 176836 - DNA, 201 bp, Homo sapiens
gaggaagacttctttagtatccatatccgcatcgttggggactggacagaggggctgttcaatgcttgtggctgtgataagcaggagtttcaagatgcgtrgaaactacctaagtgagtaaaaagtacatattaccaacgtatatgagttcaggaaaaatggcactaaatagctcctcttcctccatgttttactaagtct

SEQ ID NO: 176837 - DNA, 201 bp, Homo sapiens; identical to SEQ ID NO: 31474

SEQ ID NO: 176838 - DNA, 201 bp, Homo sapiens
tgcacatccccaataattatgggtgccccatctcactctgaagagcaagacatctctgtaactatctcctccccatttcccttcaggatagcggttgatgvgccctttggcactgccagtgaagatgtgttcagctatgaggtggtgatgttagtgggagcagggattggggtcacacccttcgcatccattctcaagtca

SEQ ID NO: 176839 - DNA, 201 bp, Homo sapiens
ttgttattacagtttcattactgacaatctttaacctgtgtctaagaaacatgtacagatgttatacatctatatagatgtccattacaaatgtcatggarcagctaaaacatgtgtctacttttctctgctatacttattggatagaattgtttcttgaaaactaagctttgcattgttctgttattaacatcctgatat

SEQ ID NO: 176840 - DNA, 201 bp, Homo sapiens
acatccccaataattatgggtgccccatctcactctgaagagcaagacatctctgtaactatctcctccccatttcccttcaggatagcggttgatgggcyctttggcactgccagtgaagatgtgttcagctatgaggtggtgatgttagtgggagcagggattggggtcacacccttcgcatccattctcaagtcagtc

SEQ ID NO: 176841 - DNA, 201 bp, Homo sapiens
attttgctcgaaagagaataaaggtaagcctctcattatctgacttagatattctctaggccattacaattgaggactagatttcagtgagtgaagacctytcctttgccaaaaaaaaaaaaagttggctaaccatcagagggacaagtctgtaggttacaataatgggagtatagaaaaaaatgtctcccacactcctca

SEQ ID NO: 176842 - DNA, 201 bp, Homo sapiens
gtgtgtgtgtgtgtgtttatattttacagaaccctgaaggaggcctgtacctggctgtgaccctgttggcaggcatcactggagttgtcatcacgctgtgmctcatattaattatcacttcctccaccaaaaccatccggaggtcttactttgaagtcttttggtacacacatcatctctttgtgatcttcttcattggcc

SEQ ID NO: 176843 - DNA, 201 bp, Homo sapiens
ggtgatgttagtgggagcagggattggggtcacacccttcgcatccattctcaagtcagtctggtacaaatattgcaataacgccaccaatctgaagctcwaaaaggtaagtcctttcatttatcggagggccttagagcagtaaccatactctgccatgtgaggcctgagagtgctttcagggctaaggttggcagagac

SEQ ID NO: 176844 - DNA, 201 bp, Homo sapiens
taatttcctattactaaatgatctggacttacatttttcacccagacgaattgtacgtgggcagaccgcagagagtttggctgtgcataatataacagttbgtgaacaaaaaatctcagaatggggaaaaataaaggaatgcccaatccctcagtttgctggaaaccctcctatggtatgtacaattcattgttgttatta

SEQ ID NO: 176845 - DNA, 201 bp, Homo sapiens
agaaaaagtttaggtgacagaaagtggaattccacatggtaatgctgatagggcctgccaaatataatctgcttcatgatccaccccattttcagatctamttctactggctgtgccgggacacacatgcctttgagtggtttgcagatctgctgcaactgctggagagccagatgcaggaaaggaacaatgccggcttcc

SEQ ID NO: 176846 - DNA, 201 bp, Homo sapiens
ttaggtgacagaaagtggaattccacatggtaatgctgatagggcctgccaaatataatctgcttcatgatccaccccattttcagatctacttctactgrctgtgccgggacacacatgcctttgagtggtttgcagatctgctgcaactgctggagagccagatgcaggaaaggaacaatgccggcttcctcagctaca

SEQ ID NO: 176847 - DNA, 201 bp, Homo sapiens
aatttctaggtatactagcagcaatatccaaatctggctccattcagtggggctccatggtagcactcaggaaacagatagatgatttgagactgttttawatatctatcccattaaaacaaaggccaacaacagaacattgtttatatttggggcaaatattcttcaagtttggctgaagatggagagattcaggtgctc

SEQ ID NO: 176848 - DNA, 201 bp, Homo sapiens
cctattactaaatgatctggacttacatttttcacccagacgaattgtacgtgggcagaccgcagagagtttggctgtgcataatataacagtttgtgaayaaaaaatctcagaatggggaaaaataaaggaatgcccaatccctcagtttgctggaaaccctcctatggtatgtacaattcattgttgttattacagttt

SEQ ID NO: 176849 - DNA, 201 bp, Homo sapiens; identical to SEQ ID NO: 31483

SEQ ID NO: 176850 - DNA, 201 bp, Homo sapiens
atgtcatttccagacatatgttttattctataggtggtcactcaccctttcaaaaccatcgagctacagatgaagaagaaggggttcaaaatggaagtggracaatacatttttgtcaagtgcccaaaggtgtccaagctggagtggcacccttttacactgacatccgcccctgaggaagacttctttagtatccatatc

SEQ ID NO: 176851 - DNA, 201 bp, Homo sapiens
ttttacagaatgtctcttttttttctgaattcatgtcctttcctgtaggccaatcactttgctgtgcaccatgatgaggagaaagatgtgatcacaggcckgaaacaaaagactttgtatggacggcccaactgggataatgaattcaagacaattgcaagtcaacaccctaagtaaggagtctgtcaccaagatgttttt

SEQ ID NO: 176852 - DNA, 201 bp, Homo sapiens; identical to SEQ ID NO: 31486

SEQ ID NO: 176853 - DNA, 201 bp, Homo sapiens
gtaatgctgatagggcctgccaaatataatctgcttcatgatccaccccattttcagatctacttctactggctgtgccgggacacacatgcctttgagtrgtttgcagatctgctgcaactgctggagagccagatgcaggaaaggaacaatgccggcttcctcagctacaacatctacctcactggctgggatgagtct

SEQ ID NO: 176854 - DNA, 201 bp, Homo sapiens
cagaatgtctcttttttttctgaattcatgtcctttcctgtaggccaatcactttgctgtgcaccatgatgaggagaaagatgtgatcacaggcctgaaayaaaagactttgtatggacggcccaactgggataatgaattcaagacaattgcaagtcaacaccctaagtaaggagtctgtcaccaagatgtttttgaggc

SEQ ID NO: 176855 - DNA, 201 bp, Homo sapiens
ggtaatgctgatagggcctgccaaatataatctgcttcatgatccaccccattttcagatctacttctactggctgtgccgggacacacatgcctttgagyggtttgcagatctgctgcaactgctggagagccagatgcaggaaaggaacaatgccggcttcctcagctacaacatctacctcactggctgggatgagtc

SEQ ID NO: 176856 - DNA, 201 bp, Homo sapiens
acttgggaagatgactaaatcacattaatatgcactgaattctaaaaatgttttcttgtgtttagaaaacatccttagttttggaaaaaataattattatyctcagacttacatgagaaaaacttgcctgatatacttagggagggaattaaacagcatcataaaaaacagattttttctacaatatattgggtaattttt

SEQ ID NO: 176857 - DNA, 201 bp, Homo sapiens
tgtaactatctcctccccatttcccttcaggatagcggttgatgggccctttggcactgccagtgaagatgtgttcagctatgaggtggtgatgttagtgrgagcagggattggggtcacacccttcgcatccattctcaagtcagtctggtacaaatattgcaataacgccaccaatctgaagctcaaaaaggtaagtcc

SEQ ID NO: 176858 - DNA, 201 bp, Homo sapiens
ttacagaaccctgaaggaggcctgtacctggctgtgaccctgttggcaggcatcactggagttgtcatcacgctgtgcctcatattaattatcacttcctycaccaaaaccatccggaggtcttactttgaagtcttttggtacacacatcatctctttgtgatcttcttcattggccttgccatccatggagctgagtga

SEQ ID NO: 176859 - DNA, 201 bp, Homo sapiens
cctttgagtggtttgcagatctgctgcaactgctggagagccagatgcaggaaaggaacaatgccggcttcctcagctacaacatctacctcactggctgrgatgagtctcaggtaaggacaagactccaaggctcaggtccttcccatagtgtacagggcttacgaacttccccttggttattggtgtgtcttgtgtact

SEQ ID NO: 176860 - DNA, 201 bp, Homo sapiens
ctcaaattaacgggaaattcacctacctgctttgtagacatctcatcccaaagcttgaaattgtctttttttttctttcccaaaagtaccagaataggagwtttcctctgtggacctgaagccttggctgaaaccctgagtaaacaaagcatctccaactctgagtctggccctcggggagtgcatttcattttcaacaag

SEQ ID NO: 176861 - DNA, 201 bp, Homo sapiens; identical to SEQ ID NO: 31494

SEQ ID NO: 176862 - DNA, 201 bp, Homo sapiens
atcccaaagcttgaaattgtctttttttttctttcccaaaagtaccagaataggagttttcctctgtggacctgaagccttggctgaaaccctgagtaaayaaagcatctccaactctgagtctggccctcggggagtgcatttcattttcaacaaggaaaacttctaacttgtctcttccatgaggaaataaatgtgggt

SEQ ID NO: 176863 - DNA, 201 bp, Homo sapiens
atttgttcatacccttcattctctttgtttctcttctctgcccttttcagcgattcacaccattgcacatctatttaatgtggaatggtgtgtgaatgccygagtcaataattctgatccttattcagtagcactctctgaacttggagacaggcaaaatgaaagttatctcaattttgctcgaaagagaataaaggtaag

SEQ ID NO: 176864 - DNA, 201 bp, Homo sapiens
acagagtcacactataatgaatgtaaccaagaagtgttggcttcatggaactggggagcatagagctttctaaatgtccagaattcctttgactctcactycaacaatttagtaagccactaaatgtactgtgctagaagggggaaaaaataagtaggaagaatctctgtaacccataaaatggtatacaaatttcttact

SEQ ID NO: 176865 - DNA, 201 bp, Homo sapiens
tccacaaagctttacaaataaaatactatggggaagcaagagagaagttgtgtcaggtggggcagagaatgaagaagggcattttagagaaggtgacattrgagatgagtatataaaaataagcttctaagaggtgtaaaggagagagaaaggcattctatgtggagaagatggcatggacagaagcacaggaaatagtga

SEQ ID NO: 176866 - DNA, 201 bp, Homo sapiens
tgttctattgagaggatattgaataatttttctttcatcttgtgttagatactgagattgattcaatttccagccgcgccccaccccctccactcacccartactttttttgcaaagggaggagaggagacctgaaactctacttatgaatatctcctcaggatcaattcacaggagattttttggttacctataaatttg

SEQ ID NO: 176867 - DNA, 201 bp, Homo sapiens
gtcaatcctagtgtcctcaccctttgctattctttctagtgtcaaaaatgttaattcactcatgaaaacttatttattctaaaaaaagttcttggttgcaygtgtgaatttgtggactttttgcagcaaacctacaggagccatagcccataaattgagaatccctcaagacggtcattatcagctaaataccttcattat

SEQ ID NO: 176868 - DNA, 201 bp, Homo sapiens
ggctaaccatcagagggacaagtctgtaggttacaataatgggagtatagaaaaaaatgtctcccacactcctcacctcatgtgtggaggtctctagatgytttccaggtctttaagctcatccatgagaatgtgtgcatgtgaagcctggagtaactcaggcttacctgtgactatgcccaccagtcaaagaaagctggg

SEQ ID NO: 176869 - DNA, 201 bp, Homo sapiens
actctagttaatgatatgcaccttaagtgttaaagagaaagtgaactgttgtctgtaacttactttgaaatgcatcaaaaattagatgagttgatggatgkatacaggaatggatagatagaatgtgataaagcaagcataaaaggtataatctgggagatgaataaacaggtatttattgtaaatttccttcaacttgtc

SEQ ID NO: 176870 - DNA, 201 bp, Homo sapiens
tggggtcacacccttcgcatccattctcaagtcagtctggtacaaatattgcaataacgccaccaatctgaagctcaaaaaggtaagtcctttcatttatyggagggccttagagcagtaaccatactctgccatgtgaggcctgagagtgctttcagggctaaggttggcagagaccatgggaagtgaagaaaagcttcc

SEQ ID NO: 176871 - DNA, 201 bp, Homo sapiens
aaaatcaactgttctcttaaaatggtgttatcagcaaagcaataatggacaaattgggtagatagaaatacgatttttaaatagcctttctaaataaccaatagaagcattacacagatgttaaaaagtacaattatgaatggaatatgaatggagcttttgtaaaaatttatcatgaaaaataatgagtctttgagtttt

SEQ ID NO: 176872 - DNA, 201 bp, Homo sapiens
ggctgtgaccctgttggcaggcatcactggagttgtcatcacgctgtgcctcatattaattatcacttcctccaccaaaaccatccggaggtcttactttkaagtcttttggtacacacatcatctctttgtgatcttcttcattggccttgccatccatggagctgagtgagtgtttaaattctgaagtgaaggatttca

SEQ ID NO: 176873 - DNA, 201 bp, Homo sapiens; identical to SEQ ID NO: 31498

SEQ ID NO: 176874 - DNA, 201 bp, Homo sapiens
agttctacacagtctcccagagttccctggtgtgatcgagcccaatgatatgatatgatcatggtagctgatataataatgcactcttcattaatttcctkcccagtctcatttttaccctcgttttctatgaccaccttccggatagaatacttacacttaaattcttgtcacaggtttctaggcacttagaataatagt

SEQ ID NO: 176875 - DNA, 201 bp, Homo sapiens
ggagtggcacccttttacactgacatccgcccctgaggaagacttctttagtatccatatccgcatcgttggggactggacagaggggctgttcaatgctygtggctgtgataagcaggagtttcaagatgcgtggaaactacctaagtgagtaaaaagtacatattaccaacgtatatgagttcaggaaaaatggcacta

SEQ ID NO: 176876 - DNA, 201 bp, Homo sapiens
tcacaccattgcacatctatttaatgtggaatggtgtgtgaatgcccgagtcaataattctgatccttattcagtagcactctctgaacttggagacaggyaaaatgaaagttatctcaattttgctcgaaagagaataaaggtaagcctctcattatctgacttagatattctctaggccattacaattgaggactagat

SEQ ID NO: 176877 - DNA, 201 bp, Homo sapiens
taccttatggccataggtttgtatcaattcaatcaaatttgtcatctctctctggaggtaatttcagagtcaggttaatgggccagcaattaggcattcaytacatgagtgttttcttgtttgagcccaaatatattatggagagagataatgagagcatatctaaacaccttcagaaactaaggctattgtgtagaatct

SEQ ID NO: 176878 - DNA, 201 bp, Homo sapiens
gtcatttccagacatatgttttattctataggtggtcactcaccctttcaaaaccatcgagctacagatgaagaagaaggggttcaaaatggaagtgggayaatacatttttgtcaagtgcccaaaggtgtccaagctggagtggcacccttttacactgacatccgcccctgaggaagacttctttagtatccatatccg

SEQ ID NO: 176879 - DNA, 201 bp, Homo sapiens
ttcactacatgagtgttttcttgtttgagcccaaatatattatggagagagataatgagagcatatctaaacaccttcagaaactaaggctattgtgtagratcttataacttgattgagtctttaggagcatatagctcaacatcttcatcttacaaattaggaaaccaagaccagagagttaagtcattttcccacaat

SEQ ID NO: 176880 - DNA, 201 bp, Homo sapiens
tggggaagtcctgacccttatctgactccagtcttgtgtggaatctactgtggaaatgcggaaacttcatgcaattatttctgtttgtgcagctggtttgsctggggttgaacgtcttcctctttgtctggtattaccgggtttatgatattccacctaagttcttttacacaagaaaacttcttggggtaagtataaatt

SEQ ID NO: 176881 - DNA, 201 bp, Homo sapiens
gcatattctgtgctcaaaaaagtcactctgctccctttcccgcctcttctagtcagcactggcactggccagggcccctgcagcctgcctgaatttcaacygcatgctgattctcttgccagtctgtcgaaatctgctgtccttcctcaggggttccagtgcggtaagagaaaatgttttactaagttcctctaattttca

SEQ ID NO: 176882 - DNA, 201 bp, Homo sapiens
gaagtcctgacccttatctgactccagtcttgtgtggaatctactgtggaaatgcggaaacttcatgcaattatttctgtttgtgcagctggtttggctgsggttgaacgtcttcctctttgtctggtattaccgggtttatgatattccacctaagttcttttacacaagaaaacttcttggggtaagtataaattccat

SEQ ID NO: 176883 - DNA, 201 bp, Homo sapiens
attatttctgtttgtgcagctggtttggctggggttgaacgtcttcctctttgtctggtattaccgggtttatgatattccacctaagttcttttacacawgaaaacttcttggggtaagtataaattccatcccatgcaatattggctggttcacatttctcatcagacattcttgttcatcttcctgttagcattttaa

SEQ ID NO: 176884 - DNA, 201 bp, Homo sapiens
catgctaagaaccttggggaagtggggacagggcatattctgtgctcaaaaaagtcactctgctccctttcccgcctcttctagtcagcactggcactggmcagggcccctgcagcctgcctgaatttcaactgcatgctgattctcttgccagtctgtcgaaatctgctgtccttcctcaggggttccagtgcggtaaga

SEQ ID NO: 176885 - DNA, 201 bp, Homo sapiens
ggcatcactggagttgtcatcacgctgtgcctcatattaattatcacttcctccaccaaaaccatccggaggtcttactttgaagtcttttggtacacacrtcatctctttgtgatcttcttcattggccttgccatccatggagctgagtgagtgtttaaattctgaagtgaaggatttcatgtccctcaatttctaggc

SEQ ID NO: 176886 - DNA, 201 bp, Homo sapiens
gctaagaaccttggggaagtggggacagggcatattctgtgctcaaaaaagtcactctgctccctttcccgcctcttctagtcagcactggcactggccakggcccctgcagcctgcctgaatttcaactgcatgctgattctcttgccagtctgtcgaaatctgctgtccttcctcaggggttccagtgcggtaagagaa

SEQ ID NO: 176887 - DNA, 201 bp, Homo sapiens
ctaagaaccttggggaagtggggacagggcatattctgtgctcaaaaaagtcactctgctccctttcccgcctcttctagtcagcactggcactggccagsgcccctgcagcctgcctgaatttcaactgcatgctgattctcttgccagtctgtcgaaatctgctgtccttcctcaggggttccagtgcggtaagagaaa

SEQ ID NO: 176888 - DNA, 201 bp, Homo sapiens
catggtaatgctgatagggcctgccaaatataatctgcttcatgatccaccccattttcagatctacttctactggctgtgccgggacacacatgcctttkagtggtttgcagatctgctgcaactgctggagagccagatgcaggaaaggaacaatgccggcttcctcagctacaacatctacctcactggctgggatga

SEQ ID NO: 176889 - DNA, 201 bp, Homo sapiens
aattactattccattctttcccccttaatccaaagtgctgctcaacaagagttcgaagacaactggacaggaatctcacctttcataaaatggtggcatgratgattgcacttcactctggtaagtttattaaagaaaacttggaaccagggagttccctctattcatagatacctttttatataggagatcaaccagttt

SEQ ID NO: 176890 - DNA, 201 bp, Homo sapiens
ttactattccattctttcccccttaatccaaagtgctgctcaacaagagttcgaagacaactggacaggaatctcacctttcataaaatggtggcatggakgattgcacttcactctggtaagtttattaaagaaaacttggaaccagggagttccctctattcatagatacctttttatataggagatcaaccagtttta

SEQ ID NO: 176891 - DNA, 201 bp, Homo sapiens
agaggctgtcccagaaacccagcttacaataaatttgttcatacccttcattctctttgtttctcttctctgcccttttcagcgattcacaccattgcacrtctatttaatgtggaatggtgtgtgaatgcccgagtcaataattctgatccttattcagtagcactctctgaacttggagacaggcaaaatgaaagttat

SEQ ID NO: 176892 - DNA, 201 bp, Homo sapiens; identical to SEQ ID NO: 31514

SEQ ID NO: 176893 - DNA, 201 bp, Homo sapiens
gtctctgtgtgtgtgtgtgtgtgtgtgtaaaacagacactccccaacttaataatggttcaacttatgatttttcaactttacaatgaagtgaaagcaatrtgcattcagtagaagccatacttcagtacaagccatacttcagtactgtattcaataaattacatgtggtcttaaaccttttattataaatagggttcat

SEQ ID NO: 176894 - DNA, 201 bp, Homo sapiens
aggcatcactggagttgtcatcacgctgtgcctcatattaattatcacttcctccaccaaaaccatccggaggtcttactttgaagtcttttggtacacayatcatctctttgtgatcttcttcattggccttgccatccatggagctgagtgagtgtttaaattctgaagtgaaggatttcatgtccctcaatttctagg

SEQ ID NO: 176895 - DNA, 201 bp, Homo sapiens
tactgtggaaatgcggaaacttcatgcaattatttctgtttgtgcagctggtttggctggggttgaacgtcttcctctttgtctggtattaccgggtttawgatattccacctaagttcttttacacaagaaaacttcttggggtaagtataaattccatcccatgcaatattggctggttcacatttctcatcagacatt

SEQ ID NO: 176896 - DNA, 201 bp, Homo sapiens
gaccctgttggcaggcatcactggagttgtcatcacgctgtgcctcatattaattatcacttcctccaccaaaaccatccggaggtcttactttgaagtcwtttggtacacacatcatctctttgtgatcttcttcattggccttgccatccatggagctgagtgagtgtttaaattctgaagtgaaggatttcatgtccc

SEQ ID NO: 176897 - DNA, 201 bp, Homo sapiens
aatttcctattactaaatgatctggacttacatttttcacccagacgaattgtacgtgggcagaccgcagagagtttggctgtgcataatataacagtttvtgaacaaaaaatctcagaatggggaaaaataaaggaatgcccaatccctcagtttgctggaaaccctcctatggtatgtacaattcattgttgttattac

SEQ ID NO: 176898 - DNA, 201 bp, Homo sapiens
ctggacttacatttttcacccagacgaattgtacgtgggcagaccgcagagagtttggctgtgcataatataacagtttgtgaacaaaaaatctcagaatrgggaaaaataaaggaatgcccaatccctcagtttgctggaaaccctcctatggtatgtacaattcattgttgttattacagtttcattactgacaatctt

SEQ ID NO: 176899 - DNA, 201 bp, Homo sapiens; identical to SEQ ID NO: 31520

SEQ ID NO: 176900 - DNA, 201 bp, Homo sapiens
tccagacatatgttttattctataggtggtcactcaccctttcaaaaccatcgagctacagatgaagaagaaggggttcaaaatggaagtgggacaatacwtttttgtcaagtgcccaaaggtgtccaagctggagtggcacccttttacactgacatccgcccctgaggaagacttctttagtatccatatccgcatcgt

SEQ ID NO: 176901 - DNA, 201 bp, Homo sapiens; identical to SEQ ID NO: 31522

SEQ ID NO: 176902 - DNA, 201 bp, Homo sapiens
caatacatttttgtcaagtgcccaaaggtgtccaagctggagtggcacccttttacactgacatccgcccctgaggaagacttctttagtatccatatccscatcgttggggactggacagaggggctgttcaatgcttgtggctgtgataagcaggagtttcaagatgcgtggaaactacctaagtgagtaaaaagtaca

SEQ ID NO: 176903 - DNA, 201 bp, Homo sapiens
aaaggtgtccaagctggagtggcacccttttacactgacatccgcccctgaggaagacttctttagtatccatatccgcatcgttggggactggacagagsggctgttcaatgcttgtggctgtgataagcaggagtttcaagatgcgtggaaactacctaagtgagtaaaaagtacatattaccaacgtatatgagttca

SEQ ID NO: 176904 - DNA, 201 bp, Homo sapiens
tgtggaatggtgtgtgaatgcccgagtcaataattctgatccttattcagtagcactctctgaacttggagacaggcaaaatgaaagttatctcaattttrctcgaaagagaataaaggtaagcctctcattatctgacttagatattctctaggccattacaattgaggactagatttcagtgagtgaagacctctcctt

SEQ ID NO: 176905 - DNA, 201 bp, Homo sapiens
ggaatggtgtgtgaatgcccgagtcaataattctgatccttattcagtagcactctctgaacttggagacaggcaaaatgaaagttatctcaattttgctygaaagagaataaaggtaagcctctcattatctgacttagatattctctaggccattacaattgaggactagatttcagtgagtgaagacctctcctttgc

SEQ ID NO: 176906 - DNA, 201 bp, Homo sapiens
aatgcccgagtcaataattctgatccttattcagtagcactctctgaacttggagacaggcaaaatgaaagttatctcaattttgctcgaaagagaataarggtaagcctctcattatctgacttagatattctctaggccattacaattgaggactagatttcagtgagtgaagacctctcctttgccaaaaaaaaaaaa

SEQ ID NO: 176907 - DNA, 201 bp, Homo sapiens
atgcccgagtcaataattctgatccttattcagtagcactctctgaacttggagacaggcaaaatgaaagttatctcaattttgctcgaaagagaataaakgtaagcctctcattatctgacttagatattctctaggccattacaattgaggactagatttcagtgagtgaagacctctcctttgccaaaaaaaaaaaaa

SEQ ID NO: 176908 - DNA, 201 bp, Homo sapiens
attatcacttcctccaccaaaaccatccggaggtcttactttgaagtcttttggtacacacatcatctctttgtgatcttcttcattggccttgccatccrtggagctgagtgagtgtttaaattctgaagtgaaggatttcatgtccctcaatttctaggcaggatgctccattagaggcacagtgacctccttgcctgt

SEQ ID NO: 176909 - DNA, 201 bp, Homo sapiens
aattatcacttcctccaccaaaaccatccggaggtcttactttgaagtcttttggtacacacatcatctctttgtgatcttcttcattggccttgccatchatggagctgagtgagtgtttaaattctgaagtgaaggatttcatgtccctcaatttctaggcaggatgctccattagaggcacagtgacctccttgcctg

SEQ ID NO: 176910 - DNA, 201 bp, Homo sapiens
acttcctccaccaaaaccatccggaggtcttactttgaagtcttttggtacacacatcatctctttgtgatcttcttcattggccttgccatccatggagstgagtgagtgtttaaattctgaagtgaaggatttcatgtccctcaatttctaggcaggatgctccattagaggcacagtgacctccttgcctgtgtgtgg

SEQ ID NO: 176911 - DNA, 201 bp, Homo sapiens
tcctccaccaaaaccatccggaggtcttactttgaagtcttttggtacacacatcatctctttgtgatcttcttcattggccttgccatccatggagctgwgtgagtgtttaaattctgaagtgaaggatttcatgtccctcaatttctaggcaggatgctccattagaggcacagtgacctccttgcctgtgtgtggtta

SEQ ID NO: 176912 - DNA, 201 bp, Homo sapiens
agggcctacatcagagcacttaaaatatatgcagaatcttttaataaaacaatttaatttcctattactaaatgatctggacttacatttttcacccagaygaattgtacgtgggcagaccgcagagagtttggctgtgcataatataacagtttgtgaacaaaaaatctcagaatggggaaaaataaaggaatgcccaat

SEQ ID NO: 176913 - DNA, 201 bp, Homo sapiens
gcacttaaaatatatgcagaatcttttaataaaacaatttaatttcctattactaaatgatctggacttacatttttcacccagacgaattgtacgtgggyagaccgcagagagtttggctgtgcataatataacagtttgtgaacaaaaaatctcagaatggggaaaaataaaggaatgcccaatccctcagtttgctgg

SEQ ID NO: 176914 - DNA, 201 bp, Homo sapiens
taatctgcttcatgatccaccccattttcagatctacttctactggctgtgccgggacacacatgcctttgagtggtttgcagatctgctgcaactgctgkagagccagatgcaggaaaggaacaatgccggcttcctcagctacaacatctacctcactggctgggatgagtctcaggtaaggacaagactccaaggctc

SEQ ID NO: 176915 - DNA, 201 bp, Homo sapiens
aacttcttggggtaagtataaattccatcccatgcaatattggctggttcacatttctcatcagacattcttgttcatcttcctgttagcattttaaatamatattctgaccaacccaaacagtaccattagcctcactccctccattgcaacttcctgggcaacagtcacttaaagccttccagtctgggaccaacaaaa

SEQ ID NO: 176916 - DNA, 201 bp, Homo sapiens
agtatccatgtttcagtgcaggttttcaggccttgctgtctgagtaacaaggccgtgaagtaacagaccccacgccatagactgtggggcttcccacaccrcgactcttgatgattgaccagtggtctgtagcctttgccataaatacccgagtcgctcatttttcacacataagccagcattataaaatgcagtggctga

SEQ ID NO: 176917 - DNA, 201 bp, Homo sapiens
cgaaactgtcaagattggcaaggtgagtgaaagcccttattaaactggaaatggactgctttgggctggattaattagcagagtggcccattattcattcygtgtgcaaagtcgcaaacttgatttattaattccatttagtgtgccacttgataattcatttcaccttcacagatggcagtctgattttgagttttgctg

SEQ ID NO: 176918 - DNA, 201 bp, Homo sapiens
gttgttttttgtgccctaaaattcttagaaacgagttgccactgaaacatgtatcctcaagaggatcttgctctcatggtctggtctgcagaccaccaggrcatcgccagggaggtcattggaaatgcagactcccaggcctgctcaatccaaatctgcaccttcagcagatccgcaggtgatcgtgtgcacagtaaagac

SEQ ID NO: 176919 - DNA, 201 bp, Homo sapiens
catcagcacaacggcttgctggcaggcctctgccccagacttctatgatgtgtaaccccgtggagggaagaggggcctgtacagttctctcaccaaagccraggcattcagttatcctctctacattcccgtctaaatatgaacatgcagactttgcaccaccgctaagacatctgggagctctgacccgggcaagcaggg

SEQ ID NO: 176920 - DNA, 201 bp, Homo sapiens; identical to SEQ ID NO: 31536

SEQ ID NO: 176921 - DNA, 201 bp, Homo sapiens; identical to SEQ ID NO: 31537

SEQ ID NO: 176922 - DNA, 201 bp, Homo sapiens
aaagaaccgagatggcatttagcttagttggcgcacagcacggtttggggacatactcggggttcataaggtgaacctgttccaaaacagaaggggagaargtaccttagaaatgacacctggtcttggcttactcccacttacaaaacaaagtctccgagagctcaccaaggtctgcacaatcgcgtggttggttgcatt

SEQ ID NO: 176923 - DNA, 201 bp, Homo sapiens
ttcaacgaagctgccatttttctcgtcttaggtgtggtcattgtaagactctggctcctacttgggaggaactctctaaaaaggaattccctggtctggcrggggtcaagatcgccgaagtagactgcactgctgaacggaatatctgcagcaagtattcggtgggtacttggatggatgcttatgggagctctcagtatg

SEQ ID NO: 176924 - DNA, 201 bp, Homo sapiens; identical to SEQ ID NO: 31539

SEQ ID NO: 176925 - DNA, 201 bp, Homo sapiens
cagcagctttatgagatttaaatgaaagaaaaagcttgaagagctgtgcttgttggtaaattaagtttataaaattaaggacggattataatcttgacatytttgcagtcttacctttattatataccaactactcctgtttaaaattcacttcttgctccctgttgattttaaaaccctctaagcttcagcatgagagta

SEQ ID NO: 176926 - DNA, 201 bp, Homo sapiens
tgttggtaaattaagtttataaaattaaggacggattataatcttgacatctttgcagtcttacctttattatataccaactactcctgtttaaaattcayttcttgctccctgttgattttaaaaccctctaagcttcagcatgagagtaaattctaagctggcatgtgaactggtctgggtcccagtcaccgacagcca

SEQ ID NO: 176927 - DNA, 201 bp, Homo sapiens; identical to SEQ ID NO: 31540

SEQ ID NO: 176928 - DNA, 201 bp, Homo sapiens; identical to SEQ ID NO: 31541

SEQ ID NO: 176929 - DNA, 201 bp, Homo sapiens
caaatacttaaacagagatatgtgggtttctatgatggtgtttaagttggacttttaagagggccctttcagaaaactgcagatactgcagtagggctcasgaataggctgccaggaaaggaggctgagtgggcggcgagtcaaatgggaggtcagcaggggcaagatcaagtaggaccaacaatacctggcacaacactt

SEQ ID NO: 176930 - DNA, 201 bp, Homo sapiens
aggcactgttctaggccaccaggaaataaaaataagaccggtttcctgcctctgaagcatacaggtctctgaggcaaatggtgagaagacacacaagccartggcagggggctggggcagaaatgtgtgcagggcttggctgctagagagaagtgggggcaaatgggcaagaagtgtccctaaagagctgattgacgggat

SEQ ID NO: 176931 - DNA, 201 bp, Homo sapiens
attcttggtctttggtgactgcttgctaatgtaagtgccataatttgggtttactttaaatcagatcaatggagataaaattgcttactatctgtatctaygtaaaagcattaactattctatgctttatagtattgcattgaaagtatggatcaagagcatcccaaagaagcaggtagtgagcagagatgagggcgagga

SEQ ID NO: 176932 - DNA, 201 bp, Homo sapiens
taattatataccacggatgttttcatcgcagcaccatttctatttataatgcagttttccaccatgaagtgggtcttttcagtgcgtgtggcgtcatgttyctggacataaagatggtagtgttccacagtggcccccttggcctccgtcactgacatgttactcgatgccagactcaaatggagcagccctggtacactt

SEQ ID NO: 176933 - DNA, 201 bp, Homo sapiens
atgcttccagaataattagctttatgttgttactttttttttttttttttttttttgagatggagtcttgctctgttgccaggctggagtgcagtagcgcratcttgatttactgcaacctccacctcctgggtttaagcgattctcctgcctcagcctcctgagaagctgggactacaggtgcgtgccaccacgcccagc

SEQ ID NO: 176934 - DNA, 201 bp, Homo sapiens
ctgctctcaggagagaatcgcagatccatttttggagaaacacatagacgtcattctgtaaagaactgtcaagggagaatggctttaaagcagactaccaygtagcacctttcccttaaattctccagccagagcttccatcagcgtttttcacattgacttagaacaggctgctttccatttttatgttcaatgtaaaac

SEQ ID NO: 176935 - DNA, 201 bp, Homo sapiens
actcatcccacggaagagcttcctgtcattcacacaagcatgtgcacagctttcctgccagtgccgggatgccccgaggaagggaagtgaccacaggccagagcagaaagccataattttaggacacaagacctttgagaggttggaatagcctgcaggttcttgttgcagaacttggtattcttccccagagctcagtag

SEQ ID NO: 176936 - DNA, 201 bp, Homo sapiens
cactcatcccacggaagagcttcctgtcattcacacaagcatgtgcacagctttcctgccagtgccgggatgccccgaggaagggaagtgaccacaggccagagcagaaagccataattttaggacacaagacctttgagaggttggaatagcctgcaggttcttgttgcagaacttggtattcttccccagagctcagta

SEQ ID NO: 176937 - DNA, 201 bp, Homo sapiens
gtgctaggagaatagggtggccagtgagaaaagcggctgaggatgagacttcagtgggtatcctggagactccaggcttagaggtgcagactcaagtgtcrgacacccagggctgcctggtccacaccacagcgccctggagagttttcaacctgcctcatccccaaaagacagtccccctccccaccttcatcccctgta

SEQ ID NO: 176938 - DNA, 201 bp, Homo sapiens
cccagggctgcctggtccacaccacagcgccctggagagttttcaacctgcctcatccccaaaagacagtccccctccccaccttcatcccctgtacagtrtccagccacctcctcaccacatctcccaggcttgggacccagggacttgcattgatctctctgcccttcagaggctgccagcctccctttgtgtgtagcc

SEQ ID NO: 176939 - DNA, 201 bp, Homo sapiens
gcactcatcccacggaagagcttcctgtcattcacacaagcatgtgcacagctttcctgccagtgccgggatgccccgaggaagggaagtgaccacaggccagagcagaaagccataattttaggacacaagacctttgagaggttggaatagcctgcaggttcttgttgcagaacttggtattcttccccagagctcagt

SEQ ID NO: 176940 - DNA, 201 bp, Homo sapiens; identical to SEQ ID NO: 31550

SEQ ID NO: 176941 - DNA, 201 bp, Homo sapiens
ggcactcatcccacggaagagcttcctgtcattcacacaagcatgtgcacagctttcctgccagtgccgggatgccccgaggaagggaagtgaccacaggccagagcagaaagccataattttaggacacaagacctttgagaggttggaatagcctgcaggttcttgttgcagaacttggtattcttccccagagctcag

SEQ ID NO: 176942 - DNA, 201 bp, Homo sapiens
ctgaaaaatagaacccaggaaggtgtggtttcccactttgtgcgtcttttgtgggataggaaggagtggtccgggcagaggagggttgctgagctaccccrggaagaccaaggtagtgcgaattctggaacccctccgcccccctgcagctcagggtggatgtaatctctgaacggagcccactggtcctcaactccaggc

SEQ ID NO: 176943 - DNA, 201 bp, Homo sapiens
cttccacagaaggaagcagctcagccttcaatcaagctctgggtgtttggtaatggctgccaccattcagatgagagtaaactgctgagaaaggacctttrtcccccgtgtccagagaactcacctgccatcccaggtcttggaaactcacatacagctcatgcttcctgcaggctgttttcaattcactgctgttgtaat

SEQ ID NO: 176944 - DNA, 201 bp, Homo sapiens
ttgaataaaaccagaaacttctgaaagtttaggattaactgaatgtattatctcctggaacgttatgtttgtttcctttttatcagagaggagcagatacrtgcctggctgcagccccttgacagctcattttctgattgtttcactaaatgagtttgctctctgataagacaactttctttttgctctgtctaatccttt

SEQ ID NO: 176945 - DNA, 201 bp, Homo sapiens
atgttcacgcacgggatccagagcgccgcgcacttcgtcatgttcttcgcgccctggtaacgccgcgcaggccggcgccctgccccgcacttggcgcttcscggggcgtggggcgcttgggcgccgcgggcggggggtcccggggccacgtggacgccgacggctctggtctgcggcgtgcgtgctacgggcgcggggctc

SEQ ID NO: 176946 - DNA, 201 bp, Homo sapiens
gtcagtccccactgccagcgtttcctccagcattagaactatcatggcttctttggttaaacaccaaatggactagttctcaaacctgtgcctttagacarcagggtcacacttaatgtagtcggagagatgctcatgccatgagaagcatgtaggaaccaaggcctgctgaggaacaaaaacctcacatctcccagcttg

SEQ ID NO: 176947 - DNA, 201 bp, Homo sapiens
cgacggctctggtctgcggcgtgcgtgctacgggcgcggggctcggggctcaggggtgcggggtgtaatactgggggcgcggggccgggagcgcggggacyctgcgggttcggggctccggctggcggggagcggggggcgcgggcgccgcggctcggggccgggagccggggactgcaggggaccgagggcttggggctc

SEQ ID NO: 176948 - DNA, 201 bp, Homo sapiens
tctgtgtgtgtgtgtctctctgtgtccaaacccttcttacaaggacaccagtcatgctagattggggcccatcctagtgacctcattttaacttgaatatmtctgtaaagaccttattctaaataaggtcaccttctgagattgatggttatgacttacacagatctgtcttgcaggacacagttcaactgataacactgt

SEQ ID NO: 176949 - DNA, 201 bp, Homo sapiens
cggggctccggctggcggggagcggggggcgcgggcgccgcggctcggggccgggagccggggactgcaggggaccgagggcttggggctccgggtcgggrggcgtgagctcagcgggccgggcactggcggctgacgtggcgctcggcggccggggcggtgcgggaggagggggcggacccctaggggacagccgggaaa

SEQ ID NO: 176950 - DNA, 201 bp, Homo sapiens
cctacatctttggggtaatatgtaacggggcagaggccagttgaggttaatgattaaggctgccattttaaagcaactctactttttttggagcttattgrtattacaggtaaagatgaacttttacagaaactttttggtgtggaaatacctaaatgtgcacaaaagtcaagagaaggctaaaccctgagtttcagcagt

SEQ ID NO: 176951 - DNA, 201 bp, Homo sapiens
ttctgcctgcctccctccctccttccctggccgatggtcagcagctcagagttccccatcagcacaacggcttgctggcaggcctctgccccagacttctrtgatgtgtaaccccgtggagggaagaggggcctgtacagttctctcaccaaagccgaggcattcagttatcctctctacattcccgtctaaatatgaaca

SEQ ID NO: 176952 - DNA, 201 bp, Homo sapiens
aagacatctgggagctctgacccgggcaagcaggggttgcaggaaggcttaagtgattcagaacacctcagtggactcactcagccgcgtgcccgtgtctyggccaggtggatcagtacaagggaaagcgggatttggagtcactgagggagtacgtggagtcgcagctgcagcgcacagagactggagcgacggagaccg

SEQ ID NO: 176953 - DNA, 201 bp, Homo sapiens
ttcttaaaaatctcatttttctaccttgccatggggctgatttgtatccaaaagtaatgctgcgtgtctaggactgaatgatggttaacaggatgatctamttgggatggtgagatggtcaaaagcataaacttgggggttgggtagacctggctggctgaccttgggaaaaacctctccacgcctcggtctccccctttg

SEQ ID NO: 176954 - DNA, 201 bp, Homo sapiens
gggcttccttccttcactcaggtagcaggaggtttcagattcatttgttctgctttatgaagcccttgttatgtcacaggcactgttctaggccaccaggraataaaaataagaccggtttcctgcctctgaagcatacaggtctctgaggcaaatggtgagaagacacacaagccaatggcagggggctggggcagaaat

SEQ ID NO: 176955 - DNA, 201 bp, Homo sapiens
tcagaaattgtacctttcaaactgggagaaacgtttttctcttaaccttgtattcaggctattactgcgtttcagttcatttggagttaaatcaacttttwgggccactgtgggtttattaacaatgtgtatatgaagtacattatgtttcacattcctaagaaccaactgactcgaatttttacaactccaatggtttag

SEQ ID NO: 176956 - DNA, 201 bp, Homo sapiens
ccccaaacattgttacaggacttacatggaatgtgtgcagacaccaatctgagcacacccaatacatgttagggttttccctaccatttggaaatgtgggygtttccacaaaggaccctggaattcttggtctttggtgactgcttgctaatgtaagtgccataatttgggtttactttaaatcagatcaatggagataaa

SEQ ID NO: 176957 - DNA, 201 bp, Homo sapiens
gagactggagcgacggagaccgtcacgccctcagaggccccggtgctggcagctgagcccgaggctgacaaggtgggtgcctgctggagtcgggatccccrtaagtggcccgtggcccccggccccccacctccccaccctcagaggcctcctcaaatgctttggacaaaatgacagtttggggacacagtcatctgatgg

SEQ ID NO: 176958 - DNA, 201 bp, Homo sapiens
ttgtacctttcaaactgggagaaacgtttttctcttaaccttgtattcaggctattactgcgtttcagttcatttggagttaaatcaacttttagggccastgtgggtttattaacaatgtgtatatgaagtacattatgtttcacattcctaagaaccaactgactcgaatttttacaactccaatggtttagaaattac

SEQ ID NO: 176959 - DNA, 201 bp, Homo sapiens
ccatagttggtattcaccaaaaaccatcacaaatttaaaaagtcacaaatgtaaaaagtcacaaatttaaaaaggcccatgttggatcatgtgtttagatktttaatgagaagagctggtctccccaagtaaaccatggctggttttgtgttattaaaaagaacaaaaatgaacgtacaccacactgaacacagtttggga

SEQ ID NO: 176960 - DNA, 201 bp, Homo sapiens
gctttatagtattgcattgaaagtatggatcaagagcatcccaaagaagcaggtagtgagcagagatgagggcgaggaggtgaatgcttacctgttgagaractgttgctttcaaagttcaggggcagcaggggtgagctggctgtggtgtctttcctcttaacctgctgaccatctgtggcctgagactatgtgcatcac

SEQ ID NO: 176961 - DNA, 201 bp, Homo sapiens
cctagagatggctggctgtgctcaggaaaatgttttgaggtcttcctgttgggccagtcatgaatcattacagcagggcaggactgacggggggaactacytgtgttagtttcctaggctgctgtaacaaagttccacaaaccgggtggccagaaacaatagaaatgtattctctgcagtcctggaggccagaggtcctaa

SEQ ID NO: 176962 - DNA, 201 bp, Homo sapiens
ttatcagtccaacaacaagaagatggttttttttaaattatttgttttgcaaatgaatagcaaattacaaaaaaatcataggctaggtcttactgtatttyacttttagcaaagacacaagtgtgaccgtccctggtcctttctgatgtcttgaggatccacccatttcccttcctgaagagcgttagcgggaggcagagc

SEQ ID NO: 176963 - DNA, 201 bp, Homo sapiens; identical to SEQ ID NO: 31549

SEQ ID NO: 176964 - DNA, 201 bp, Homo sapiens
ttagaacgattatcagtccaacaacaagaagatggttttttttaaattatttgttttgcaaatgaatagcaaattacaaaaaaatcataggctaggtcttwctgtattttacttttagcaaagacacaagtgtgaccgtccctggtcctttctgatgtcttgaggatccacccatttcccttcctgaagagcgttagcggg

SEQ ID NO: 176965 - DNA, 201 bp, Homo sapiens
tagggagtgatgcagagaaacaaaagtgggttggaggctgagcgctgaaaactgacatcaaaggttgggttgaagagactgaggagtgacgtggggatggyaggaggtagatcagagaagcagaaaggacggtggatgcagatggggccaatggcagttgtaccaacgctgctgagaagcccaggaagatgaggaacataa

SEQ ID NO: 176966 - DNA, 201 bp, Homo sapiens
agaagacacacaagccaatggcagggggctggggcagaaatgtgtgcagggcttggctgctagagagaagtgggggcaaatgggcaagaagtgtccctaargagctgattgacgggatctgtgctggacagataggctgggcagggctgccactgaggggctgcaccaggagaggcacaacccgagaatcagccggcattt

SEQ ID NO: 176967 - DNA, 201 bp, Homo sapiens
tataaaataatcttgtctactgtcttaccccattccttgtatccttacttaattattgtatgaaattttatgggagattcttttaggtttatatccatagwggatcctagcagacctaggcgtgagcagacacaagcccaggtgaccacgctgaagcccttcatccctggcacatgtggctgggttacactggacccttaa

SEQ ID NO: 176968 - DNA, 201 bp, Homo sapiens
aagtaaacagctgattttgtagttgtcaggaccacttatgttagaggagtgtatgtgtcatggtggttacaaaggtcatcccaaattgagtataattatayaccacggatgttttcatcgcagcaccatttctatttataatgcagttttccaccatgaagtgggtcttttcagtgcgtgtggcgtcatgtttctggacat

SEQ ID NO: 176969 - DNA, 201 bp, Homo sapiens
gggggaacacagtgggagacaggtcagggtgtggtgtaggatccctgagagtgagagaggagctggagttgagagtctgtgggcagctggccaaggattakgaactgtatcccatattgacagggagcccacggaggctctgtgcagattggagttgtaggaaaatgaccggcatgcacgtgtgctggaggtgggaagctg

SEQ ID NO: 176970 - DNA, 201 bp, Homo sapiens
ggtatgttttagcatagctttcaggaacattctcttcaaaaactgcaccttgctggcagagttgctacagaatgtggattttgaaaagaatatttgtaacrtacaaagtgtccagtagccccattagcaagaaggttcatgaagaaactgactgggaagttgatctgcttttattctcaggttgattgtacacagcactat

SEQ ID NO: 176971 - DNA, 201 bp, Homo sapiens
tggtgtaggatccctgagagtgagagaggagctggagttgagagtctgtgggcagctggccaaggattatgaactgtatcccatattgacagggagcccayggaggctctgtgcagattggagttgtaggaaaatgaccggcatgcacgtgtgctggaggtgggaagctgctctattaggcctttaaagatgatgagttcc

SEQ ID NO: 176972 - DNA, 201 bp, Homo sapiens
aaactttttggtgtggaaatacctaaatgtgcacaaaagtcaagagaaggctaaaccctgagtttcagcagttaccaccattttggtgtttgtcttccccrccaccctgcgccttgtttggctgtagtcagtcttcagggaagtcacttgtgtggcctcacagataagcacttactctttgttaacactgccaccctgcca

SEQ ID NO: 176973 - DNA, 201 bp, Homo sapiens
cagagccgtgcaggaagcagtttctgtttccaggtgcggaacacaccttgtgggagcctggggaggtgccaggctaggtgagggcaatcatctttgatacygcagatgttgcagttgcttatcatgttgaacttcgtgacgtagccggtgtactggccaaatctagttaagttttggctgttttttgtggttatgagagtc

SEQ ID NO: 176974 - DNA, 201 bp, Homo sapiens; identical to SEQ ID NO: 31542

SEQ ID NO: 176975 - DNA, 201 bp, Homo sapiens; identical to SEQ ID NO: 31543

SEQ ID NO: 176976 - DNA, 201 bp, Homo sapiens
ttgccgtcttacaattctgataccgtacattgggcatttactcacaaaatccacatacgcgctgtagaagtggcaggggtgtttagatgagcaggcttgcyaacaaatggtactctgtatttcttttttcttctattggtagtcacatttttgcctatccttgacaccttctatgaatttttatctagagtattagagcac

SEQ ID NO: 176977 - DNA, 201 bp, Homo sapiens; identical to SEQ ID NO: 31544

SEQ ID NO: 176978 - DNA, 201 bp, Homo sapiens
atacaggaactgagtgttaatttcatcctctggtgatgtcttttgcttatggttaaaggacctactcccgtatcctctctgcagattccttcagaggccarcatttgtaggaaaaagaaaagattccttctctatgggaaggtgaatggacagcatcagtcaatgtcaaggatgttcttatagctggaaacttgaattctc

SEQ ID NO: 176979 - DNA, 201 bp, Homo sapiens; identical to SEQ ID NO: 31545

SEQ ID NO: 176980 - DNA, 201 bp, Homo sapiens
tcagagaaggaagtgaaggcttccacctcagcctggccataacagctgtcagctgcaatatcagctactccatagttggtattcaccaaaaaccatcacaratttaaaaagtcacaaatgtaaaaagtcacaaatttaaaaaggcccatgttggatcatgtgtttagatttttaatgagaagagctggtctccccaagtaa

SEQ ID NO: 176981 - DNA, 201 bp, Homo sapiens; identical to SEQ ID NO: 31546

SEQ ID NO: 176982 - DNA, 201 bp, Homo sapiens; identical to SEQ ID NO: 31548

SEQ ID NO: 176983 - DNA, 201 bp, Homo sapiens
tctttggggtaatatgtaacggggcagaggccagttgaggttaatgattaaggctgccattttaaagcaactctactttttttggagcttattgatattayaggtaaagatgaacttttacagaaactttttggtgtggaaatacctaaatgtgcacaaaagtcaagagaaggctaaaccctgagtttcagcagttaccac

SEQ ID NO: 176984 - DNA, 201 bp, Homo sapiens
agcgccctggagagttttcaacctgcctcatccccaaaagacagtccccctccccaccttcatcccctgtacagtatccagccacctcctcaccacatctsccaggcttgggacccagggacttgcattgatctctctgcccttcagaggctgccagcctccctttgtgtgtagcctatgaaatgcagattgtgtaggtat

SEQ ID NO: 176985 - DNA, 201 bp, Homo sapiens
tttttggagcttattgatattacaggtaaagatgaacttttacagaaactttttggtgtggaaatacctaaatgtgcacaaaagtcaagagaaggctaaamcctgagtttcagcagttaccaccattttggtgtttgtcttccccgccaccctgcgccttgtttggctgtagtcagtcttcagggaagtcacttgtgtggc

SEQ ID NO: 176986 - DNA, 201 bp, Homo sapiens
gttctttctgttgcatagagaggatgtcacaaagggtgctaggagaatagggtggccagtgagaaaagcggctgaggatgagacttcagtgggtatcctggagactccaggcttagaggtgcagactcaagtgtcagacacccagggctgcctggtccacaccacagcgccctggagagttttcaacctgcctcatcccca

SEQ ID NO: 176987 - DNA, 201 bp, Homo sapiens
tggagcttattgatattacaggtaaagatgaacttttacagaaactttttggtgtggaaatacctaaatgtgcacaaaagtcaagagaaggctaaaccctsagtttcagcagttaccaccattttggtgtttgtcttccccgccaccctgcgccttgtttggctgtagtcagtcttcagggaagtcacttgtgtggcctca

SEQ ID NO: 176988 - DNA, 201 bp, Homo sapiens
ggctgggggaacacagtgggagacaggtcagggtgtggtgtaggatccctgagagtgagagaggagctggagttgagagtctgtgggcagctggccaaggrttatgaactgtatcccatattgacagggagcccacggaggctctgtgcagattggagttgtaggaaaatgaccggcatgcacgtgtgctggaggtgggaa

SEQ ID NO: 176989 - DNA, 201 bp, Homo sapiens
tcagggaagtcacttgtgtggcctcacagataagcacttactctttgttaacactgccaccctgccactgtcacaggtaatacagttcacaactgtacccyagcatcagagactgactctggaccacctggggtcagggctgggcccagcctagaatctcctatccaagccagcactggagcctcctcccatccccccgac

SEQ ID NO: 176990 - DNA, 201 bp, Homo sapiens
agctgattgacgggatctgtgctggacagataggctgggcagggctgccactgaggggctgcaccaggagaggcacaacccgagaatcagccggcatttcygcagggccagagctggggctgggggaacacagtgggagacaggtcagggtgtggtgtaggatccctgagagtgagagaggagctggagttgagagtctgt

SEQ ID NO: 176991 - DNA, 201 bp, Homo sapiens
aaaattagccacagaatttttccagccacaacggtaggagtgtatctggttttatttaggaagcaatttgcatgtgatctggaccgctggtttgcaaactyttttcttttttgttttaaggtacgaggctaccccacgttattgcttttccgaggagggaagaaagtcagtgagcacagtggaggcagagaccttgactcg

SEQ ID NO: 176992 - DNA, 201 bp, Homo sapiens
agctaaacaccttctgtgtccaaataatgatgctgtgagggtttgtttgtttttttccccgtagccaagggggtgatgtttcattttttaaactttttttyatgataaaatataatacagatcgagaaaacaaatgtagggcttaatgaatttttatagcgtggtcacactgtaactactgtccagttcaagaaataaaac

SEQ ID NO: 176993 - DNA, 201 bp, Homo sapiens
tgtgcaaagtcgcaaacttgatttattaattccatttagtgtgccacttgataattcatttcaccttcacagatggcagtctgattttgagttttgctggmttttccacagcctagagataaattatggcctcggctgctttgtttattttgaagagatggccaaatctgaattggcagccccagagcccgttctgcaaag

SEQ ID NO: 176994 - DNA, 201 bp, Homo sapiens
ccaaaaaatttgtgtgacttgttttattgtgatattatctttattgcagtggtctggaaccaaacccacagtatctcggaagtatgcctgtgtattaatgrtaatcatatgcttaatgacctcaggcagaaacaaaagcttctctctgtctaaacagaatttagattgggcacagtggctcatgcctatcatcccagcact

SEQ ID NO: 176995 - DNA, 201 bp, Homo sapiens
taatacagatcgagaaaacaaatgtagggcttaatgaatttttatagcgtggtcacactgtaactactgtccagttcaagaaataaaactgccagcttccygtgtcccatgcagggcacagcccgccctcccttctccaagaaggcacttgcctgacatttgtggaaaccacttgtattagtccgttttcactgctgatga

SEQ ID NO: 176996 - DNA, 201 bp, Homo sapiens
aatgcctgattctttccttttattacagttttccaaataatgagttgattgctgattgtccatcaaagatgacaaatttggttttgagtattgttatgaastcatgaacagaaacacatttgatggagtccctttgtaccaattaaagtgctcatgccgaactaagatttgctaagcaggacaaagatctgattcttcaat

SEQ ID NO: 176997 - DNA, 201 bp, Homo sapiens
aattctaagctggcatgtgaactggtctgggtcccagtcaccgacagccaggctaacccccctcccaccaccaccaaatgtcaagccagggccctgactcmagctaccaggtgctgactttacttgctcgagttaaaatgttgcttcctaaaaaccggcatgtttaactgagctattaatacaataaatcttgcctctaaa

SEQ ID NO: 176998 - DNA, 201 bp, Homo sapiens
gcccacggaggctctgtgcagattggagttgtaggaaaatgaccggcatgcacgtgtgctggaggtgggaagctgctctattaggcctttaaagatgatgmgttccctcatgctgcagccgtgactgtgcgatggcgaggaggagaaagccagcataaggagtccagccgctgtgcagcgcggaggagagggagggagggt

SEQ ID NO: 176999 - DNA, 201 bp, Homo sapiens
gaaggggagccatccatacggcaggagggggtcagaagagacaagggaacagagtcgggtagaagggagggtttgaaccaaacttaatcatggccttgatkctcaccccacatcgctgaagtaccaaggaggccttaaaatggttttgaaattgtgagaccataagcaatcaaatctaaaatgtctttggcattcaagtga

SEQ ID NO: 177000 - DNA, 201 bp, Homo sapiens
tatgatggccatattcagttttgtggtatctgcacttttccaaatagatggcttttctttttggctaaacaatgagtgtcatgatgtagctttgctcctckgttcttttaagtactcggatttcttttgtagagaaatccagtagagtctgttagagccattcagtatgctacgcagtttcctgaacctgcatgccacgtg

SEQ ID NO: 177001 - DNA, 201 bp, Homo sapiens
aaggcgtcacttttcttgtttgttacactccacatgttcctgagaaactaaccataggggtaaaaagttaataagcacaggacttgaacgaaccatagcartgcctttcaaatcatttgcaacatttaaaaacctaaagctccacagatcaagtatcaaaaaggaggatcccctttggctgaaggggagccatccatacgg

SEQ ID NO: 177002 - DNA, 201 bp, Homo sapiens
aaaagttaataagcacaggacttgaacgaaccatagcaatgcctttcaaatcatttgcaacatttaaaaacctaaagctccacagatcaagtatcaaaaargaggatcccctttggctgaaggggagccatccatacggcaggagggggtcagaagagacaagggaacagagtcgggtagaagggagggtttgaaccaaac

SEQ ID NO: 177003 - DNA, 201 bp, Homo sapiens
cagaaatgtgtgcagggcttggctgctagagagaagtgggggcaaatgggcaagaagtgtccctaaagagctgattgacgggatctgtgctggacagatargctgggcagggctgccactgaggggctgcaccaggagaggcacaacccgagaatcagccggcatttctgcagggccagagctggggctgggggaacacag

SEQ ID NO: 177004 - DNA, 201 bp, Homo sapiens
tgggtggtgccttctgattaatgccgagtgctcaggtccctggatgccgggtagacctggtgggtcatgctgctgtgttggagagggactggaaaaacacycgtgttcctacactgtaggatcctgatgagctaggaagagcatctgaagtctttgtaatttcaatttcaacaaatacctaagactaccttcttgtatcag

SEQ ID NO: 177005 - DNA, 201 bp, Homo sapiens
aaatattttttaattaaggtacattgtttttaaagaagtaatgctgtagcacatttcatagactatagtgtaaacataactttgatattcactagggaacmaaaaaatttgtgtgacttgttttattgtgatattatctttattgcagtggtctggaaccaaacccacagtatctcggaagtatgcctgtgtattaatgat

SEQ ID NO: 177006 - DNA, 201 bp, Homo sapiens
tcagtgcttccatccctcacctgcaaagactctctcaactcggctgggtgtggtggctcatgcctgtaatcctagcactttgggaggctgaggcgggtggwtcacccaaggtcaagagttcaagaccagcctggccaacatggtgaaacgtcgtctctgctaaaaatacaaaaattagccaggtggtaggtgcctgtaatc

SEQ ID NO: 177007 - DNA, 201 bp, Homo sapiens
cagaaagacctcatctcatggcccatttcccttagtggaggtggcggcctcacctgcaggttggaaagggctgagaggctgcgtccaggctctgcaagggwctttctgtctcctcagtgtgggagcaggatggccgcgtgtaatccccccatgccaccccagaaccacagtcaccaacttgccatattttagtgtctccag

SEQ ID NO: 177008 - DNA, 201 bp, Homo sapiens; identical to SEQ ID NO: 31547

SEQ ID NO: 177009 - DNA, 201 bp, Homo sapiens
ggagattgtagactcttagaatattatgtactaaaaaggatttataatcctccccctccccagttgatgttggaagtcttcacttttttataaatcatcatgatcataaaccactggttaagtgttcctttgtgggtggtgccttctgattaatgccgagtgctcaggtccctggatgccgggtagacctggtgggtcatg

SEQ ID NO: 177010 - DNA, 201 bp, Homo sapiens
aatttttgtatttccatgtttgcttctgtattttttcttgaacagttatacaaacatgtttcatctcattaatgattttatatatttatgtggtctttatrttgatcatgtcttatattattttatcatgtggatttgccataattcaactctaattctgtcagtggatatttaggttatttataccttttccatcatcag

SEQ ID NO: 177011 - DNA, 201 bp, Homo sapiens
aggagattgtagactcttagaatattatgtactaaaaaggatttataatcctccccctccccagttgatgttggaagtcttcacttttttataaatcatcatgatcataaaccactggttaagtgttcctttgtgggtggtgccttctgattaatgccgagtgctcaggtccctggatgccgggtagacctggtgggtcat

SEQ ID NO: 177012 - DNA, 201 bp, Homo sapiens
tcttgatgaatatagccaggtttcttaagcaccatatcagcttatgctgccactgtagggcaagacgtgacctgtttctgggatgcactgtggtgttcccrtgccgggggactgctctggagtctgccaggaacccaggaagcaactagaggccccgcatgtgccataaatgaacacttcatactgaaaggcccttgaaca

SEQ ID NO: 177013 - DNA, 201 bp, Homo sapiens
gatgaatatagccaggtttcttaagcaccatatcagcttatgctgccactgtagggcaagacgtgacctgtttctgggatgcactgtggtgttcccgtgcygggggactgctctggagtctgccaggaacccaggaagcaactagaggccccgcatgtgccataaatgaacacttcatactgaaaggcccttgaacatctc

SEQ ID NO: 177014 - DNA, 201 bp, Homo sapiens
caggagattgtagactcttagaatattatgtactaaaaaggatttataatcctccccctccccagttgatgttggaagtcttcacttttttataaatcatcatgatcataaaccactggttaagtgttcctttgtgggtggtgccttctgattaatgccgagtgctcaggtccctggatgccgggtagacctggtgggtca

SEQ ID NO: 177015 - DNA, 201 bp, Homo sapiens
gagaaatgtaggattgtgactagacagctgcacacattgctgtctgcttgggtcctggcagaagcatcttttgaaaagcccctttccccctctttctgtaygagacttagtcatatgaattacattctttcttgaaggtgcagcttatgttcatgccatggttttctctctgttgcctttcattcacctgcattttccttc

SEQ ID NO: 177016 - DNA, 201 bp, Homo sapiens
ggccaaatctgaattggcagccccagagcccgttctgcaaagagatggggtagagccttgtagaatgttcactggacgaacttggagaccgtccacgttcracctcacccaagagctctctctaaaaggaccctggctctgtgctcccccaagcacgcagaagaccctccctcagtttgcactgtgcctgggattctttcc

SEQ ID NO: 177017 - DNA, 201 bp, Homo sapiens
gatggttaacaggatgatctacttgggatggtgagatggtcaaaagcataaacttgggggttgggtagacctggctggctgaccttgggaaaaacctctcyacgcctcggtctccccctttgcaaaactgagctaagatctactgtgtggtgtctgggcagatgaaagtacactgcttagtgtgatgcttagcatggggca

SEQ ID NO: 177018 - DNA, 201 bp, Homo sapiens
taccatcttaggttctgggtaaggccagtatgctgatactaatttcaaagcctaatctagccatgtgacttcattttaaggagaattagccatttttttttggactgaatgtgtgtgtaccccagcattcataggggaaatcctaatccccaatgctggcaataggaggtggggcctttgagagggagcaggttattaggg

SEQ ID NO: 177019 - DNA, 201 bp, Homo sapiens
ccctggctctgtgctcccccaagcacgcagaagaccctccctcagtttgcactgtgcctgggattctttccagcatttcctactttatacagagaagccargagtggtgtctgacaacttctgtgtaactggattttctggaaatatccagtgtagctccagggacatcacttttattcttctacactttccagcacccac

SEQ ID NO: 177020 - DNA, 201 bp, Homo sapiens
tggttaacaggatgatctacttgggatggtgagatggtcaaaagcataaacttgggggttgggtagacctggctggctgaccttgggaaaaacctctccaygcctcggtctccccctttgcaaaactgagctaagatctactgtgtggtgtctgggcagatgaaagtacactgcttagtgtgatgcttagcatggggcaga

SEQ ID NO: 177021 - DNA, 201 bp, Homo sapiens
acctgcctgagtccaggcatgtgtcaggacatgagctttcacgttattctttcctggcaagtgtaactggagtaaaggattggaggggcagggagtttgggctcccacgctccctagagatggctggctgtgctcaggaaaatgttttgaggtcttcctgttgggccagtcatgaatcattacagcagggcaggactgacg

SEQ ID NO: 177022 - DNA, 201 bp, Homo sapiens
cagtttatatttattgaacatttcggggaagtaattataaaataatcttgtctactgtcttaccccattccttgtatccttacttaattattgtatgaaawtttatgggagattcttttaggtttatatccatagaggatcctagcagacctaggcgtgagcagacacaagcccaggtgaccacgctgaagcccttcatcc

SEQ ID NO: 177023 - DNA, 201 bp, Homo sapiens
tctcgacccaggatttcaacgaagctgccatttttctcgtcttaggtgtggtcattgtaagactctggctcctacttgggaggaactctctaaaaaggaaytccctggtctggcgggggtcaagatcgccgaagtagactgcactgctgaacggaatatctgcagcaagtattcggtgggtacttggatggatgcttatgg

SEQ ID NO: 177024 - DNA, 201 bp, Homo sapiens
tacctgcctgagtccaggcatgtgtcaggacatgagctttcacgttattctttcctggcaagtgtaactggagtaaaggattggaggggcagggagtttgggctcccacgctccctagagatggctggctgtgctcaggaaaatgttttgaggtcttcctgttgggccagtcatgaatcattacagcagggcaggactgac

SEQ ID NO: 177025 - DNA, 201 bp, Homo sapiens
aagatttgggttgtggagatgaaccttgaaacatttcagtggcccaggttatcactagaataacccacatcttacagtcacagggtaactgtgctctggtygtaaacacaaaccttcaggcctttgaacagagctaaggcttgcacttggtccggttctgcctgcctccctccctccttccctggccgatggtcagcagct

SEQ ID NO: 177026 - DNA, 201 bp, Homo sapiens
aagtgaaggcttccacctcagcctggccataacagctgtcagctgcaatatcagctactccatagttggtattcaccaaaaaccatcacaaatttaaaaartcacaaatgtaaaaagtcacaaatttaaaaaggcccatgttggatcatgtgtttagatttttaatgagaagagctggtctccccaagtaaaccatggctg

SEQ ID NO: 177027 - DNA, 201 bp, Homo sapiens
tggggctccgggtcggggggcgtgagctcagcgggccgggcactggcggctgacgtggcgctcggcggccggggcggtgcgggaggagggggcggacccckaggggacagccgggaaaagcccgccctgcgccgcgctcctgaattcaaccgcctcttgcacctcggcaccgagggaggggaaggtggggtcgtcgccctt

SEQ ID NO: 177028 - DNA, 201 bp, Homo sapiens
tgatgaggcgtgtctgacctcctatctgtttccaggcaggaactcagtttagggtttttctggggtccccttagcccagagagggtctgttcagtgagttrggggtgttaggattttatttttagtttacattatacaatatttttaaaaatcctttcatgatgtcttctaagccttaactctcagctgttacagatcaca

SEQ ID NO: 177029 - DNA, 201 bp, Homo sapiens
tctggctgaacttcaggggttcttctttccccctccgcaggtgcacccaagatcccaaggtagggcagtttctctcagaactattgaccaaccgaaaggaraacattcctttcaagctttctgaagactgtctttacctcaatatttacactcctgctgacttgaccaagaaaaacaggctgctggtaagttgtgggatcc

SEQ ID NO: 177030 - DNA, 201 bp, Homo sapiens
atgaaggcagcttggggagggagctgcacaggccaggattgtttcaggaccccagggcctctacaggaaacacaggttttccacacgtcagtttcccctcrtgacatagggactctgggggagtttgctgtgcctctttaatgaacatcttaattgttccaagttccctcatgataatagaaggatgagaatgattacctt

SEQ ID NO: 177031 - DNA, 201 bp, Homo sapiens
agggtgatgacccaatgtgtcagcatttgccaaataaacaaacggcaggagatggggctggctgccagctgcagggttgggagtgtctgctggcaaagaaggccaccccaaggtgaaagaggaaggggtgtcaggtccagtcagtctcccaggggcaccgtagcatggtgcctaggagtggcggagcaggtctgcgaacat

SEQ ID NO: 177032 - DNA, 201 bp, Homo sapiens
ggcatgtgtgcttctcgagacaatcattcatgcacagagaagtttacttcaccatgaaagagttaactgagatgaagctgagatacaagggctgccccatrggtacgcggagtgcttgaacagtccaggcttgagggtgatgggagtgaggtggagaacatgaatccttagcgtttgctatgcccatgatgatgttctcag

SEQ ID NO: 177033 - DNA, 201 bp, Homo sapiens
gtctttcctgttgtgaaaaatgagtgttttttacattagcagctctccaccccaattccaggtcacttaagagagaggctcactgtcccgtctttgcttcsatgtccctgaactcttagaaaagtaggaaaccagagtatgctgggcaaactgaccccaatgcctaggtcaggcagaagggaccctgtccctcgggagggc

SEQ ID NO: 177034 - DNA, 201 bp, Homo sapiens
ctcagctgtcatggctcactgtctgcggcagaagatggaagaggagctcttggagacgacattgaaaatggtaggttgcctgttcccgtagcccaaaccctgtaaacttggtcccagacttcttcatttcagctgtcctcttgccctgggacagttacctggggcaatttctcaagtctcaggagtctcagtatctgaatg

SEQ ID NO: 177035 - DNA, 201 bp, Homo sapiens
tcagctgtcatggctcactgtctgcggcagaagatggaagaggagctcttggagacgacattgaaaatggtaggttgcctgttcccgtagcccaaaccctgtaaacttggtcccagacttcttcatttcagctgtcctcttgccctgggacagttacctggggcaatttctcaagtctcaggagtctcagtatctgaatgg

SEQ ID NO: 177036 - DNA, 201 bp, Homo sapiens
cagctgtcatggctcactgtctgcggcagaagatggaagaggagctcttggagacgacattgaaaatggtaggttgcctgttcccgtagcccaaaccctgtaaacttggtcccagacttcttcatttcagctgtcctcttgccctgggacagttacctggggcaatttctcaagtctcaggagtctcagtatctgaatggg

SEQ ID NO: 177037 - DNA, 201 bp, Homo sapiens
tgtctaataattttcttgggattctttttagaagtgaataactaggctggaccaaagaaatatttttgaactcttggcaaataatgcaaatttgcattccmgtgcataagaacgtggatttcttaatttactttctcatttgggataccaaggttaaaagttaatgctgccaatttgccccaccaaaaagaagcacatcac

SEQ ID NO: 177038 - DNA, 201 bp, Homo sapiens
ttgttctggcagagttgagccttcccaggcaagcatgttaaggatactggagtcattctagggacacagccttaagctgctagaagcgatgctagagtttsgtcgagtctctgagtgcagaggtttgggcagagttgttttgtgtgaagagatatgaagttcgcccctcagaaggatttcagaggttataccaaagaccaa

SEQ ID NO: 177039 - DNA, 201 bp, Homo sapiens
cctaattcccccacctggaggcaagtggtataaatttttttgtactttcttctaaagatttttcatgtcctatatactttaaaaatcaattttatatttcrcttttgttcatagaacactatgttgtgaggattttctcaatattcatataaactcatcaaaacattccttattccatgaaatggctgtgttaaatagact

SEQ ID NO: 177040 - DNA, 201 bp, Homo sapiens
gtgaaaccaccaactcagctgtcatggctcactgtctgcggcagaagatggaagaggagctcttggagacgacattgaaaatggtaggttgcctgttcccrtagcccaaaccctgtaaacttggtcccagacttcttcatttcagctgtcctcttgccctgggacagttacctggggcaatttctcaagtctcaggagtct
